United States Patent Application Publication US 2018/0126003 A1 - sequence listing, part 24

SEQ ID NO: 39723 - DNA, 4188 bp, Artificial Sequence
  derived and/or modified sequence
atgaccggcgccgagatcgagagcggcgcccaggtgaagcccgagaagaagcccggcgaggaggtggtgggcggcgccgagatcgagaacgacgtgcccctggtggtgagacccaaggtgagaacccaggcccagatcatgcccggcgccagacccaagaacaagagcaaggtgatgcccggcgccagcaccaaggtggagaccagcgccgtgggcggcgccagacccaagagcaaggccaaggccatccccgtgagcagattcaaggaggaggcccagatgtgggcccagcccagattcggcgccgagagactgagcaagaccgagagaaacagccagaccaacatcatcgccagccccctggtgagcaccgacagcgtgctggtggccaagaccaagtacctgagcgaggacagagagctggtgaacaccgacaccgagagcttccccagaagaaaggcccactaccaggccggcttccagcccagcttcagaagcaaggaggagaccaacatgggcagctggtgctgccccagacccaccagcaagcaggaggccagccccaacagcgacttcaagtgggtggacaagagcgtgagcagcctgttctggagcggcgacgaggtgaccgccaagttccaccccggcaacagagtgaaggacagcaacagaagcatgcacatggccaaccaggaggccaacaccatgagcagaagccagaccaaccaggagctgtacatcgccagcagcagcggcagcgaggacgagagcgtgaagaccccctggttctgggccagagacaagaccaacacctggagcggccccagagaggaccccaacagcagaagcagattcagaagcaagaaggaggtgtacgtggagagcagcagcggcagcgagcacgaggaccacctggagagctggttcggcgccggcaaggaggccaagttcagaagcaagatgagagccggcaaggaggccaacaacagagccagacacagagccaagagagaggcctgcatcgacttcatgcccggcagcatcgacgtgatcaagaaggagagctgcttctggcccgaggagaacgccaacaccttcagcagacccatgatcaagaaggaggccagagccagagccatgaccaaggaggaggccaagaccaaggccagagccagagccaagcaggaggccagaagcgaggaggaggccctgatcggcacctggttctgggccaccgacgagagcagcatggccgacgaggccagcatcgagagcagcctgcaggtggaggacgagagcatcatcggcagctggttctggaccgaggaggaggccagcatgggcaccggcgccagcagcaagagcagacccagaaccgacggcgagagaatcggcgacagcctgttcggcgccagagagaagaccagcatgaagaccggcgccgaggccaccagcgagagcatcctggccgccgacgacgagcaggtgatcatcggcagctggttctgggccggcgaggaggtgaaccaggaggccgaggaggagaccatcttcggcagctggttctgggtgatcgacgccgccagcgtggagagcggcgtgggcgtgagctgcgagagcagaaccagaagcgaggaggaggaggtgatcggcccctggttctggagcggcgagcaggtggacatcgaggccggcatcggcgaggaggccagacccggcgccgaggaggagaccatcttcggcagctggttctgggccgagaaccagacctacatggactgcagagccgagaccagctgcgacaccatgcagggcgccgaggaggaggagcccatcatcggcagctggttctggaccagagtggaggcctgcgtggagggcgacgtgaacagcaagagcagcctggaggacaaggaggaggccatgatcccctgcttcggcgccaaggaggaggtgagcatgaagcacggcaccggcgtgagatgcagattcatggccggcgccgaggagaccaacaacaagagctgcttctgggccgagaaggagccctgcatgtaccccgccggcggcggcagctggaagagcagacccgaggaggaggaggacatcgtgaacagctggttctggagcagaaagtacaccaagcccgaggccatcatcggcagctggctgtgggccaccgaggagagcaacatcgacggcaccggcgagaaggccaagctgctgaccgaggaggagaccatcatcaacagctggttctggaaggaggacgaggccatcagcgaggccaccgacagagaggagagcagacccgaggccgaggagggcgacatcatcggcagctggttctgggccggcgaggaggacagactggagcccgccgccgagaccagagaggaggacagactggccgccgagaaggagggcatcgtgggcagctggttcggcgccagagaggagaccatcagaagagaggccggcagctgcagcaagagcagccccaaggccgaggaggaggaggtgatcatcggcagctggttctgggaggaggaggccagccccgaggccgtggccggcgtgggcttcgagagcaagcccggcaccgaggaggaggagatcaccgtgggcagctggttctggcccgaggaggaggccagcatccaggccggcagccaggccgtggaggagatggagagcgagaccgaggaggagaccatcttcggcagctggttctgggacggcaaggaggtgagcgaggaggccggcccctgctgcgtgagcaagcccgaggacgacgaggagatgatcgtggagagctggttctggagcagagacaaggccatcaaggagaccggcaccgtggccacctgcgagagcaagcccgagaacgaggagggcgccatcgtgggcagctggttcgaggccgaggacgaggtggacaacagaaccgacaacggcagcaactgcggcagcagaaccctggccgacgaggacgaggccatcgtgggcagctggttctgggccggcgacgaggcccacttcgagagcaaccccagccccgtgttcagagccatctgcagaagcacctgcagcgtggagcaggagcccgaccccagcagaagaccccagagctgggaggaggtgaccgtgcagttcaagcccggcccctggggcagagtgggcttccccagcatcagccccttcagattccccaaggaggccgccagcctgttctgcgagatgttcggcggcaagcccagaaacatggtgctgagccccgagggcgaggaccaggagagcctgctgcagcccgaccagcccagccccgagttccccttccagtacgaccccagctacagaagcgtgcaggagatcagagagcacctgagagccaaggagagcaccgagcccgagagcagcagctgcaactgcatccagtgcgagctgaagatcggcagcgaggagttcgaggagctgctgctgctgatggagaagatcagagaccccttcatccacgagatcagcaagatcgccatgggcatgagaagcgccagccagttcaccagagacttcatcagagacagcggcgtggtgagcctgatcgagaccctgctgaactaccccagcagcagagtgagaaccagcttcctggagaacatgatcagaatggcccccccctaccccaacctgaacatcatccagacctacatctgcaaggtgtgcgaggagaccctggcctacagcgtggacagccccgagcagctgagcggcatcagaatgatcagacacctgaccaccaccaccgactaccacaccctggtggccaactacatgagcggcttcctgagcctgctggccaccggcaacgccaagaccagattccacgtgctgaagatgctgctgaacctgagcgagaacctgttcatgaccaaggagctgctgagcgccgaggccgtgagcgagttcatcggcctgttcaacagagaggagaccaacgacaacatccagatcgtgctggccatcttcgagaacatcggcaacaacatcaagaaggagaccgtgttcagcgacgacgacttcaacatcgagcccctgatcagcgccttccacaaggtggagaagttcgccaaggagctgcagggcaagaccgacaaccagaacgaccccgagggcgaccaggagaactag

SEQ ID NO: 39724 - protein, 196 aa, Artificial Sequence
  derived and/or modified sequence
MQDEDGYITLNIKTRKPALISAVMQRNYLQGENENRTGTLQQLAKRFCQYVVKQSELKGTFKGHKCSPCDTNWRYYGDSCYGFFRHNLTWEESKQYCTDMNATLLKIDNRNIVEYIKARTHLIRWVGLSRQKSNEVWKWEDGSVISENMFEFLEDGKGNMNCAYFHNGKMHPTFCENKHYLMCERKAGMTKVDQLP

SEQ ID NO: 39725 - protein, 138 aa, Artificial Sequence
  derived and/or modified sequence
HKCSPCDTNWRYYGDSCYGFFRHNLTWEESKQYCTDMNATLLKIDSKEEKLFLTSFRILTIVFIWVGLSRQKSNEVWKWEDGSVISDSLFSQSNFQNGKGNMNCAYFHNGKMHPTFCENKHYLMCERKAGMTKVDQLP

SEQ ID NO: 39726 - DNA, 869 bp, Artificial Sequence
  derived and/or modified sequence
gtccatgtatctctgagcagctatgaagaagcttcctggaaaacaataagcaaaggaaaacaaatgtgtcccatctcacatggttctaccctactaaagacaggaagatcataaactgacagatactgaaattgtaaagttggaaactacattttgcaaagtcattgaactctgagctcagttgcagtactcgggaagccatgcaggatgaagatggatacatcaccttaaatattaaaactcggaaaccagctctcatctccgctgtcatgcagcgcaattacctacaaggtgagaatgaaaatcgcacaggaactctgcaacaattagcaaagcgcttctgtcaatatgtggtaaaacaatcagaactaaagggcactttcaaaggtcataaatgcagcccctgtgacacaaactggagatattatggagatagctgctatgggttcttcaggcacaacttaacatgggaagagagtaagcagtactgcactgacatgaatgctactctcctgaagattgacaaccggaacattgtggagtacatcaaagccaggactcatttaattcgttgggtcggattatctcgccagaagtcgaatgaggtctggaagtgggaggatggctcggttatctcagaaaatatgtttgagtttttggaagatggaaaaggaaatatgaattgtgcttattttcataatgggaaaatgcaccctaccttctgtgagaacaaacattatttaatgtgtgagaggaaggctggcatgaccaaggtggaccaactaccttaatgcaaagaggtggacaggataacacagataagggctttattgtacaataaaagatatgtatgaatgcatcagtagctg

SEQ ID NO: 39727 - DNA, 417 bp, Artificial Sequence
  derived and/or modified sequence
cataaatgcagcccctgtgacacaaactggagatattatggagatagctgctatgggttcttcaggcacaacttaacatgggaagagagtaagcagtactgcactgacatgaatgctactctcctgaagattgacagcaaggaagagaaacttttcttaacatctttcaggattctgaccattgtgtttatttgggtcggattatctcgccagaagtcgaatgaggtctggaagtgggaggatggctcggttatctcagattccctcttctctcagtccaattttcaaaatggaaaaggaaatatgaattgtgcttattttcataatgggaaaatgcaccctaccttctgtgagaacaaacattatttaatgtgtgagaggaaggctggcatgaccaaggtggaccaactaccttaa

SEQ ID NO: 39728 - DNA, 3054 bp, Artificial Sequence
  derived and/or modified sequence
gagatggttcaactctcttacttggttatttccatctcggttattccttgctccagcagaatcctgaaatgtccatgtatctctgagcagctatgaagaagcttcctggaaaacaataagcaaaggaaaacaaatgtgtcccatctcacatggttctaccctactaaagacaggaagatcataaactgacagatactgaaattgtaaagttggaaactacattttgcaaagtcattgaactctgagctcagttgcagtactcgggaagccatgcaggatgaagatggatacatcaccttaaatattaaaactcggaaaccagctctcatctccgctgtcatgcagcgcaattacctacaaggtgagaatgaaaatcgcacaggaactctgcaacaattagcaaagcgcttctgtcaatatgtggtaaaacaatcagaactaaagggcactttcaaaggtcataaatgcagcccctgtgacacaaactggagatattatggagatagctgctatgggttcttcaggcacaacttaacatgggaagagagtaagcagtactgcactgacatgaatgctactctcctgaagattgacaaccggaacattgtggagtacatcaaagccaggactcatttaattcgttgggtcggattatctcgccagaagtcgaatgaggtctggaagtgggaggatggctcggttatctcagaaaatatgtttgagtttttggaagatggaaaaggaaatatgaattgtgcttattttcataatgggaaaatgcaccctaccttctgtgagaacaaacattatttaatgtgtgagaggaaggctggcatgaccaaggtggaccaactaccttaatgcaaagaggtggacaggataacacagataagggctttattgtacaataaaagatatgtatgaatgcatcagtagctgaaaattgcttatttctccctttcttctcactggagttatttttaatattatctttcctatcagaattacctagtcccttctttgaatatacagaagccatcacgtgagtttatcatttgcttcccaattgttctattttcctttaattttctttcttcttgtccttcatttctaattacctgaacatggtatgatttactgcatcttcagatatacacatataacatcaaaatcaggccaatataggttagggcttaattaatataagttgtgcaaaatatctatgtttgaaatctgtccaaaatatctaagtttgaaaggcggtgtaagatagtaaaaagaatattaaacttagaatcagcaaaataatttagatgtcaattaactaaattacaatcatgaacaagtttcataacctctttaacttcccttttctcatatttaaaataggaataataacaaccatcttttatatctcacagttctacaacctaaaatagaactttagagtgttaactgtaccagaaactccatgaaagcgaacactatgacttccccattcactattctcttaccagcaccaacccgaaaccctggctcacaaaacagagagatatttgtttctctttgtataagatagttcatgagaaaaatagctcaatcattaaaacattacgcaaatagaattactattccaagtctacctctggttagattcaacagtagtaattttctgcgctagagaaggaaaagaaagtttgcaagaaaactcactgggtttgtaaaatgaataaatgcttcttaagtttcagaggctactagacagaaggacaagtaaaaatgctttaattagtattttcctaacagttctgtgctttatttttgctgagtaactcaggaagtatttacagaatatgtggaaaggcacccttttacaggataataggaaaaaattgcatttctttcccacagcttcccttttttaactagtggctaccatttacgaacatgattctcaaacatctcaacggaggttttggttaaaacatagagaaaccaaataggaaactcaaatgctgatgttactcagtgggaagactgaggagacacagagacctgggtttttaccagcatcacgacacaattctcatacaagtagtctttaatacagttagagaaatatcactactttagaacttactctctatctggctttggataagtaatgttctcaccttgaaatgggtttaatattattaccttgctcataagttaattgtgaagctcatttaatatgattatataaagtatcgatcagaataccaagtatgtaatacatactcaataaatatgtgttactcttaaagctttgtgcgctaacactgaaagacacttgaatctttatcttttttctagcctatcaataattaagcagatttggagggcttaggaaaaataatagaaatacctcaaattttacttgttacttcaaatgtctggagatcttggatttgggtgatggtatcagtatgttttttattttgaattgtctatttagagaaactaaataggaaccaataattcagaaaactgtacaaaattagcaactcaactttgtttcatctccctaaaatggaaaaacatatgtgtatacatccctatagcacacataaacttagaagaataatatcttagtgcatggcaacaatacaattaaaaatgtaggccaatcactgtgattctttttctggtattcatatctaaagtatcttatacataaaatcaaaatagcacaaacgttagtagcacagatcagaccacctcatttcaaatactaaatcttctacatgtcatctaagtgaactccagcaaaatttgacttctgtcttcttcaatttaaaactaacttacaggcatgcctcggaaatattgtgggttcagttccagaccaccacaataaagcaattattgcaataaagtgagtcacattaattatttgctttcccaattcgtgtaaaagttatgtttgagctacaacgtcttctattaagtatacaacagcattatgtctggaaaatgtacatagttttattaaaaatagtttattgctaaaaa

SEQ ID NO: 39729 - DNA, 591 bp, Artificial Sequence
  derived and/or modified sequence
atgcaggacgaggacggctacatcaccctgaacatcaagaccagaaagcccgccctgatcagcgccgtgatgcagagaaactacctgcagggcgagaacgagaacagaaccggcaccctgcagcagctggccaagagattctgccagtacgtggtgaagcagagcgagctgaagggcaccttcaagggccacaagtgcagcccctgcgacaccaactggagatactacggcgacagctgctacggcttcttcagacacaacctgacctgggaggagagcaagcagtactgcaccgacatgaacgccaccctgctgaagatcgacaacagaaacatcgtggagtacatcaaggccagaacccacctgatcagatgggtgggcctgagcagacagaagagcaacgaggtgtggaagtgggaggacggcagcgtgatcagcgagaacatgttcgagttcctggaggacggcaagggcaacatgaactgcgcctacttccacaacggcaagatgcaccccaccttctgcgagaacaagcactacctgatgtgcgagagaaaggccggcatgaccaaggtggaccagctgccctag

SEQ ID NO: 39730 - DNA, 417 bp, Artificial Sequence
  derived and/or modified sequence
cacaagtgcagcccctgcgacaccaactggagatactacggcgacagctgctacggcttcttcagacacaacctgacctgggaggagagcaagcagtactgcaccgacatgaacgccaccctgctgaagatcgacagcaaggaggagaagctgttcctgaccagcttcagaatcctgaccatcgtgttcatctgggtgggcctgagcagacagaagagcaacgaggtgtggaagtgggaggacggcagcgtgatcagcgacagcctgttcagccagagcaacttccagaacggcaagggcaacatgaactgcgcctacttccacaacggcaagatgcaccccaccttctgcgagaacaagcactacctgatgtgcgagagaaaggccggcatgaccaaggtggaccagctgccctag

SEQ ID NO: 39731 - DNA, 591 bp, Artificial Sequence
  derived and/or modified sequence
atgcaggacgaggatggctacattacacttaatattaagactcggaaacccgccctcatcagcgctgtcatgcagaggaattacctccaaggggagaacgagaaccgcaccgggactctgcagcagctcgccaagaggttttgtcagtacgtggttaagcagtcagaacttaagggcactttcaagggccataagtgttccccttgcgatacgaactggagatattatggagacagctgctacggcttcttccgtcacaatctgacttgggaagaatccaagcagtactgtaccgatatgaatgccactttactcaagatagataacaggaacatcgttgagtacatcaaggccaggacacatctgatacggtgggtgggcctgagtcgccagaagagcaatgaggtttggaagtgggaagatgggtctgttatctcggaaaacatgtttgagttcctggaggatggcaagggcaacatgaattgcgcttactttcacaatggaaagatgcacccaacattctgcgaaaacaaacactatctaatgtgcgagcgtaaggccggcatgactaaggttgaccagctgccatag

SEQ ID NO: 39732 - DNA, 417 bp, Artificial Sequence
  derived and/or modified sequence
cacaaatgtagcccatgtgacactaattggagatactacggtgattcatgttatgggttttttcggcacaatctgacatgggaagagtcgaagcagtattgtacggacatgaacgccactttgctcaaaattgactccaaagaagaaaagctgttccttacttcttttcggattctgacgattgtgtttatctgggtgggacttagccgccaaaagtcgaacgaggtctggaagtgggaggacgggagcgtaatctcagatagtctcttcagccagagcaatttccagaatggcaagggtaacatgaactgcgcgtacttccacaatggcaagatgcaccccactttttgtgagaataagcactatttaatgtgtgagcgaaaggcaggcatgaccaaggttgaccagttgccctag

SEQ ID NO: 39733 - DNA, 591 bp, Artificial Sequence
  derived and/or modified sequence
atgcaggatgaggatggctatatcacactcaacatcaagacccgtaagccagccttaatctccgccgtaatgcaacgtaattatctgcagggtgaaaatgagaaccgaaccggaaccctgcagcagctggctaagaggttttgtcagtacgtggtaaaacagtccgagctgaaagggaccttcaaggggcataaatgttcgccctgtgatacgaattggcgctactacggcgattcctgttacggatttttccgccacaaccttacgtgggaggaatcaaagcagtactgtactgacatgaatgctactctgcttaagatcgataaccggaacattgtggaatatatcaaggccagaactcacttgattcgttgggttgggctgtcccggcagaagtccaatgaggtctggaagtgggaagatgggagcgtgatctccgaaaatatgttcgagtttctggaggacgggaaagggaacatgaactgtgcatacttccataacggcaagatgcatccaacgttctgtgaaaacaagcattatttgatgtgtgagaggaaggccggtatgactaaggtcgaccagttgccctag

SEQ ID NO: 39734 - DNA, 591 bp, Artificial Sequence
  derived and/or modified sequence
atgcaggatgaagatggctacatcaccctgaacatcaagaccaggaagccagccctgatctctgctgtgatgcagaggaactacctgcagggagaaaatgaaaatagaacaggcaccctgcagcagctggccaagcgcttctgccagtatgtggtgaagcagagcgagctgaagggcaccttcaagggccacaagtgcagcccctgtgacaccaactggagatactacggggacagctgctacggcttcttccgccacaacctgacctgggaggagagcaagcagtactgcacagacatgaatgccaccctgctgaagattgacaacagaaacatcgtggagtacatcaaggcccggacccacctgatccgctgggtgggcctgagccggcagaagagcaatgaggtgtggaagtgggaggatggcagcgtcatcagcgagaacatgtttgagttcctggaggatggaaaaggaaacatgaactgtgcctacttccacaacgggaagatgcaccccaccttctgtgagaacaagcactacctgatgtgtgagaggaaggccggcatgaccaaggtggaccagctgccctag

SEQ ID NO: 39735 - DNA, 417 bp, Artificial Sequence
  derived and/or modified sequence
cacaagtgcagcccctgtgacaccaactggagatactatggagacagctgctacggcttcttccgccacaacctgacctgggaggagagcaagcagtactgcacagacatgaatgccaccctgctgaagattgacagcaaggaggagaagctgttcctgaccagcttccgcatcctgaccatcgtgttcatctgggtgggcctgagccggcagaagagcaatgaggtgtggaagtgggaggatggcagcgtcatcagtgacagcctcttcagccagagcaacttccagaatggaaaaggaaacatgaactgtgcctacttccacaacgggaagatgcaccccaccttctgtgagaacaagcactacctgatgtgtgagaggaaggccggcatgaccaaggtggaccagctgccctag

SEQ ID NO: 39736 - DNA, 591 bp, Artificial Sequence
  derived and/or modified sequence
atgcaggacgaggacggctacatcaccctgaacatcaagacccggaagcctgcgttgatttcagccgtgatgcagagaaactaccttcaaggcgagaacgaaaaccgaaccgggactctgcagcagctggcgaagcggttctgccagtacgtagtgaaacagtccgaactgaaaggcactttcaagggccataaatgctcaccatgcgatactaactggcgctactatggcgactcttgctacggctttttccgccataatcttacctgggaggaatctaagcaatactgtacagatatgaacgctactctactgaaaattgataatcggaacatcgtggagtacatcaaggctagaacacatctgatcagatgggtgggcctgtcacggcaaaagtctaatgaagtttggaagtgggaggacggctctgtgatcagtgaaaacatgtttgagttcctggaggacggcaagggcaacatgaactgcgcctattttcataacgggaagatgcatcctaccttttgtgaaaataagcattatctgatgtgcgaacgaaaagcaggcatgacaaaagttgaccaattgccttag

SEQ ID NO: 39737 - DNA, 417 bp, Artificial Sequence
  derived and/or modified sequence
cacaagtgcagcccctgcgacaccaactggcggtactacggcgactcgtgttacgggttttttcgccacaacctcacctgggaggagagcaaacagtactgcacagacatgaatgccacattgctcaagattgacagtaaggaagagaaattgttcctgacatcctttcgcatcctgaccatcgtattcatatgggtgggcttgagcaggcagaaatctaacgaagtatggaagtgggaggacgggtcagtgattagcgatagcctattttctcaatccaactttcagaatggaaagggcaatatgaactgcgcttattttcacaatggaaagatgcaccctactttctgcgaaaacaaacattacctcatgtgcgaacgcaaggccggcatgacgaaggtagaccaactgccctag

SEQ ID NO: 39738 - DNA, 591 bp, Artificial Sequence
  derived and/or modified sequence
atgcaggacgaggacggctacatcaccctgaacatcaagacccggaaaccagctcttataagtgcggtaatgcagcgcaattacctgcagggagagaatgaaaaccgcaccggtacactgcagcagctggctaagagattctgccaatatgttgtgaagcaatcagagcttaaaggcaccttcaaaggtcacaagtgctccccgtgtgacaccaactggcggtactatggcgacagttgttacggcttcttcagacacaacctgacgtgggaggaatccaagcaatactgtactgacatgaatgcgacgttgctgaagatagacaatcggaacattgtagaatatattaaggcgcggacccacctgatccgttgggtcgggcttagtcgccaaaagagtaatgaggtctggaagtgggaagacggcagcgtgatttcagagaacatgtttgaattcctggaagacgggaagggtaatatgaactgcgcatacttccacaatggtaagatgcatcccacattctgcgagaacaaacattatctgatgtgtgaaagaaaggctgggatgactaaggtggatcaactgccgtag

SEQ ID NO: 39739 - DNA, 591 bp, Artificial Sequence
  derived and/or modified sequence
atgcaggacgaggatgggtacatcaccctcaatattaagacgagaaagcctgcactaatttctgccgtgatgcagcgcaactacttacagggagaaaacgaaaataggacgggcactctgcagcagttagccaagaggttttgccagtacgtagtaaaacagagtgagcttaagggtacctttaagggccacaaatgctcaccttgtgacactaactggagatactacggcgacagctgttacggatttttccgacataaccttacatgggaagaatctaaacaatattgcacagacatgaatgcaactctgttgaagattgacaatagaaacattgtcgagtacattaaagcccgtactcatcttattcgctgggtcggcctgagtcgccagaaaagtaatgaggtatggaagtgggaggatggcagcgtgatctcagagaacatgttcgagttcctcgaagatggcaaggggaatatgaactgcgcctattttcataacggaaagatgcatcccacgttctgtgaaaataagcactaccttatgtgtgagagaaaggccggtatgactaaggtggaccagcttccatag

SEQ ID NO: 39740 - DNA, 417 bp, Artificial Sequence
  derived and/or modified sequence
cataaatgcagtccttgtgacaccaactggcggtactacggtgacagctgttacgggttcttccgccataacttaacatgggaggaatccaaacaatactgtactgacatgaatgctacactgctaaaaatcgactctaaagaagagaagttgtttcttaccagtttcaggattctgactatagttttcatatgggtcggcttgagcagacagaagtccaacgaggtgtggaaatgggaagatggcagcgtaatcagcgacagtctgttctcacagtccaacttccaaaacggaaaaggaaacatgaattgtgcatatttccacaatggcaaaatgcatccaaccttctgtgagaataaacattacctcatgtgtgagagaaaggcaggtatgacaaaagtggatcaacttccttag

SEQ ID NO: 39741 - DNA, 591 bp, Artificial Sequence
  derived and/or modified sequence
atgcaggatgaagatggatacattacacttaacattaagacgaggaaaccagcacttattagcgctgtgatgcagagaaactacctgcagggtgagaacgaaaataggaccggcacactccagcaactcgcaaagagattttgccagtacgtcgtcaagcagtcagagctcaaagggacatttaaggggcacaagtgctccccatgcgacactaattggcgatactatggggactcctgctatggctttttccggcacaatctgacctgggaggaaagtaagcagtattgcaccgacatgaatgctaccctgctgaagattgataataggaatatcgtagagtacatcaaggcaagaacgcatctgattcgttgggtggggctaagccggcagaagtctaatgaagtatggaaatgggaggatggttcggtgatcagcgagaatatgtttgagtttctcgaggacggcaagggcaacatgaattgtgcttactttcataatggcaaaatgcacccaaccttttgtgaaaacaagcactatcttatgtgtgagcgcaaagcaggaatgaccaaggtcgaccagcttccatag

SEQ ID NO: 39742 - protein, 928 aa, Artificial Sequence
  derived and/or modified sequence
MNEAMATDSPRRPSRCTGGVVVRPQAVTEQSYMESVVTFLQDVVPQAYSGTPLTEEKEKIVWVRFENADLNDTSRNLEFHEIHSTGNEPPLLIMIGYSDGMQVWSIPISGEAQELFSVRHGPIRAARILPAPQFGAQKCDNFAEKRPLLGVCKSIGSSGTSPPYCCVDLYSLRTGEMVKSIQFKTPIYDLHCNKRILVVVLQEKIAAFDSCTFTKKFFVTSCYPCPGPNMNPIALGSRWLAYAENKLIRCHQSRGGACGDNIQSYTATVISAAKTLKSGLTMVGKVVTQLTGTLPSGVTEDDVAIHSNSRRSPLVPGIITVIDTETVGEGQVLVSEDSDSDGIVAHFPAHEKPVCCMAFNTSGMLLVTTDTLGHDFHVFQILTHPWSSSQCAVHHLYTLHRGETEAKVQDICFSHDCRWVVVSTLRGTSHVFPINPYGGQPCVRTHMSPRVVNRMSRFQKSAGLEEIEQELTSKQGGRCSPVPGLSSSPSGSPLHGKLNSQDSYNNFTNNNPGNPRLSPLPSLMVVMPLAQIKQPMTLGTITKRTGPYLFGAGCFSIKAPCKVKPPPQISPSKSMGGEFCVAAIFGTSRSWFANNAGLKREKDQSKQVVVESLYIISCYGTLVEHMMEPRPLSTAPKISDDTPLEMMTSPRASWTLVRTPQWNELQPPFNANHPLLLAADAVQYYQFLLAGLVPPGSPGPITRHGSYDSLASDHSGQEDEEWLSQVEIVTHTGPHRRLWMGPQFQFKTIHPSGQTTVISSSSSVLQSHGPSDTPQPLLDFDTDDLDLNSLRIQPVRSDPVSMPGSSRPVSDRRGVSTVIDAASGTFDRSVTLLEVCGSWPEGFGLRHMSSMEHTEEGLRERLADAMAESPSRDVVGSGTELQREGSIETLSNSSGSTSGSIPRNFDGYRSPLPTNESQPLSLFPTGFP

SEQ ID NO: 39743 - protein, 706 aa, Artificial Sequence
  derived and/or modified sequence
MNEAMATDSPRRPSRCTGGVVVRPQAVTEQSYMESVVTFLQDVVPQAYSGTPLTEEKEKIVWVRFENADLNDTSRNLEFHEIHSTGNEPPLLIMIGYSDGMQVWSIPISGEAQELFSVRHGPIRAARILPAPQFGAQKCDNFAEKRPLLGVCKSIGSSGTSPPYCCVDLYSLRTGEMVKSIQFKTPIYDLHCNKRILVVVLQEKIAAFDSCTFTKKFFVTSCYPCPGPNMNPIALGSRWLAYAENKLIRCHQSRGGACGDNIQSYTATVISAAKTLKSGLTMVGKVVTQLTGTLPSGVTEDDVAIHSNSRRSPLVPGIITVIDTETVGEGQVLVSEDSDSDGIVAHFPAHEKPVCCMAFNTSGMLLVTTDTLGHDFHVFQILTHPWSSSQCAVHHLYTLHRGETEAKVQDICFSHDCRWVVVSTLRGTSHVFPINPYGGQPCVRTHMSPRVVNRMSRFQKSAGLEEIEQELTSKQGGRCSPVPGLSSSPSGSPLHGKLNSQDSYNNFTNNNPGNPRLSPLPSLMVVMPLAQIKQPMTLGTITKRTGPYLFGAGCFSIKAPWSYIMTKYIFYIKPPNKVKPPPQISPSKSMGGEFCVAAIFGTSRSWFANNAGLKREKDQSKQVVVESLYIISCYGTLVEHMMEPRPLSTAPKISDDTPLEMMTSPRASWTLVRTPQWNELQPPFNANHPLLLAADAVQYYQFLLAG

SEQ ID NO: 39744 - DNA, 2787 bp, Artificial Sequence
  derived and/or modified sequence
atgaacgaggccatggccaccgacagccccagaagacccagcagatgcaccggcggcgtggtggtgagaccccaggccgtgaccgagcagagctacatggagagcgtggtgaccttcctgcaggacgtggtgccccaggcctacagcggcacccccctgaccgaggagaaggagaagatcgtgtgggtgagattcgagaacgccgacctgaacgacaccagcagaaacctggagttccacgagatccacagcaccggcaacgagccccccctgctgatcatgatcggctacagcgacggcatgcaggtgtggagcatccccatcagcggcgaggcccaggagctgttcagcgtgagacacggccccatcagagccgccagaatcctgcccgccccccagttcggcgcccagaagtgcgacaacttcgccgagaagagacccctgctgggcgtgtgcaagagcatcggcagcagcggcaccagccccccctactgctgcgtggacctgtacagcctgagaaccggcgagatggtgaagagcatccagttcaagacccccatctacgacctgcactgcaacaagagaatcctggtggtggtgctgcaggagaagatcgccgccttcgacagctgcaccttcaccaagaagttcttcgtgaccagctgctacccctgccccggccccaacatgaaccccatcgccctgggcagcagatggctggcctacgccgagaacaagctgatcagatgccaccagagcagaggcggcgcctgcggcgacaacatccagagctacaccgccaccgtgatcagcgccgccaagaccctgaagagcggcctgaccatggtgggcaaggtggtgacccagctgaccggcaccctgcccagcggcgtgaccgaggacgacgtggccatccacagcaacagcagaagaagccccctggtgcccggcatcatcaccgtgatcgacaccgagaccgtgggcgagggccaggtgctggtgagcgaggacagcgacagcgacggcatcgtggcccacttccccgcccacgagaagcccgtgtgctgcatggccttcaacaccagcggcatgctgctggtgaccaccgacaccctgggccacgacttccacgtgttccagatcctgacccacccctggagcagcagccagtgcgccgtgcaccacctgtacaccctgcacagaggcgagaccgaggccaaggtgcaggacatctgcttcagccacgactgcagatgggtggtggtgagcaccctgagaggcaccagccacgtgttccccatcaacccctacggcggccagccctgcgtgagaacccacatgagccccagagtggtgaacagaatgagcagattccagaagagcgccggcctggaggagatcgagcaggagctgaccagcaagcagggcggcagatgcagccccgtgcccggcctgagcagcagccccagcggcagccccctgcacggcaagctgaacagccaggacagctacaacaacttcaccaacaacaaccccggcaaccccagactgagccccctgcccagcctgatggtggtgatgcccctggcccagatcaagcagcccatgaccctgggcaccatcaccaagagaaccggcccctacctgttcggcgccggctgcttcagcatcaaggccccctgcaaggtgaagccccccccccagatcagccccagcaagagcatgggcggcgagttctgcgtggccgccatcttcggcaccagcagaagctggttcgccaacaacgccggcctgaagagagagaaggaccagagcaagcaggtggtggtggagagcctgtacatcatcagctgctacggcaccctggtggagcacatgatggagcccagacccctgagcaccgcccccaagatcagcgacgacacccccctggagatgatgaccagccccagagccagctggaccctggtgagaaccccccagtggaacgagctgcagccccccttcaacgccaaccaccccctgctgctggccgccgacgccgtgcagtactaccagttcctgctggccggcctggtgccccccggcagccccggccccatcaccagacacggcagctacgacagcctggccagcgaccacagcggccaggaggacgaggagtggctgagccaggtggagatcgtgacccacaccggcccccacagaagactgtggatgggcccccagttccagttcaagaccatccaccccagcggccagaccaccgtgatcagcagcagcagcagcgtgctgcagagccacggccccagcgacaccccccagcccctgctggacttcgacaccgacgacctggacctgaacagcctgagaatccagcccgtgagaagcgaccccgtgagcatgcccggcagcagcagacccgtgagcgacagaagaggcgtgagcaccgtgatcgacgccgccagcggcaccttcgacagaagcgtgaccctgctggaggtgtgcggcagctggcccgagggcttcggcctgagacacatgagcagcatggagcacaccgaggagggcctgagagagagactggccgacgccatggccgagagccccagcagagacgtggtgggcagcggcaccgagctgcagagagagggcagcatcgagaccctgagcaacagcagcggcagcaccagcggcagcatccccagaaacttcgacggctacagaagccccctgcccaccaacgagagccagcccctgagcctgttccccaccggcttcccctag

SEQ ID NO: 39745 - DNA, 2787 bp, Artificial Sequence
  derived and/or modified sequence
atgaacgaggctatggccactgattcccccaggcgccctagcaggtgcaccgggggggtcgttgtgcgcccacaggctgtaaccgagcaatcatacatggaatctgtagtcaccttcttgcaggacgtggtgccccaggcatattctggtactcccctgacagaagagaaagaaaaaatcgtgtgggtgagatttgagaatgctgatctcaatgacaccagccggaacctagagttccacgagattcactcaaccggcaacgagccaccactactgattatgatcggctactcagatgggatgcaggtgtggagtattccaataagcggcgaggctcaagagcttttctctgtgcgccatggccctatcagagccgcccggatcctcccggcgccccagttcggagcacaaaaatgcgataattttgccgagaaacggccacttctgggcgtttgcaagagtattggcagctcgggtacctccccaccatactgctgtgttgatctctacagtctcaggaccggggagatggtcaagtctatccaatttaagacaccaatttatgatctccactgtaacaaacgtatattagtggttgtgttgcaggagaagatcgctgctttcgactcttgtacgtttacgaagaaattttttgtaacaagttgctatccatgccccggtcctaacatgaaccctattgccctggggtctaggtggctggcttatgcggagaataagttgatcaggtgccaccagtcccggggaggcgcttgtggcgacaatattcagagttatactgctacagtcatcagtgctgctaagactctcaagagcggtttaactatggttggaaaagtggtcacccagcttactggcaccctgccttcaggcgtcactgaggatgatgtagcaattcattcgaactcacgccggtcacccctcgtgcccggcattatcacggtgattgataccgagacggtaggtgaaggccaggtgctggtcagcgaggattccgacagtgatgggattgtcgcgcactttcccgcacatgaaaagccggtgtgctgcatggcttttaatacgtccgggatgctgctggtcactaccgacacattggggcacgacttccacgtgttccagatactgacacacccctggagctcctctcagtgcgcggtgcaccacctgtatacccttcatcgaggtgagacagaagccaaggttcaagacatctgcttcagccacgactgccgatgggtggtggtgtctacacttcgaggcacatcacacgtgtttcccattaatccctacggcggtcaaccttgtgtccgcacccatatgtcccctcgcgttgtcaaccgcatgtcgagatttcagaagagtgccggcctggaggagattgaacaggagctgacttctaagcaaggcggccgttgtagccccgttcccgggctttcaagctcaccaagtggttcaccgctgcacgggaaactgaactcccaggactcttataacaacttcaccaataacaatccaggaaatccccgccttagccccctaccttctctcatggtggtcatgccccttgctcagatcaaacagccaatgaccctgggcaccatcaccaagcgcacaggaccatacttatttggagcaggctgtttttccattaaagctccctgcaaagtaaaaccaccaccacagattagtccttctaaatccatgggtggcgagttttgtgtggctgctattttcgggaccagtcgaagctggtttgccaacaacgcaggactaaaacgtgaaaaggaccagtctaagcaggtggtggtcgagagtctctacatcattagttgttatggtactctggttgagcacatgatggaaccgcggcctctgagtacagctcccaagatttccgatgatacgcctttggaaatgatgacctcccctagagcgagttggaccctggtccggactccccagtggaacgagctacaaccgcccttcaacgccaatcacccgctgctcctcgccgctgacgccgtacagtactatcaattcctcttagcaggactagtccctcccggatccccaggccccatcacacgacacggctcatatgacagtctggcatctgaccacagtggacaggaggacgaagagtggctgtcacaggtcgaaatcgttactcacacaggtccgcacaggagactttggatggggccgcagttccagttcaaaaccattcacccgtccgggcagacgacagtgatctcctcgtcttcctccgttctgcagtcccatggcccttcagacacacctcagcctctcctggactttgacactgacgacctcgatttgaattcattgcggattcagcccgtccggagtgacccagtctcgatgcctgggtctagccggcccgtgagcgatcgtcggggtgtgagcactgtgattgatgcagcgtcgggcacatttgatcgctctgtgacactgcttgaggtttgcggaagctggccagaggggttcggtttgagacatatgtcttccatggaacatacagaggagggactcagagaacgcctcgcagacgctatggcagagagccccagcagagatgttgtcggttctggaacggaattacagcgggagggctctatagagactctcagcaatagcagtggttcaacctccggcagcataccacgaaacttcgacggttaccgtagccctctgccgaccaatgagtcccagcccttaagcctctttcccaccgggttcccttag

SEQ ID NO: 39746 - DNA, 2787 bp, Artificial Sequence
  derived and/or modified sequence
atgaatgaggccatggccacagacagcccccggcggcccagccgctgcacaggaggagtggtggtgcggccccaggccgtgacagagcagagctacatggagagcgtggtgaccttcctgcaggatgtggtgccccaggcctacagcggcacccccctgacagaggagaaggagaagatcgtgtgggtgcgctttgaaaatgctgacctgaatgacaccagcaggaacctggagttccacgagatccacagcactggaaatgaaccacccctgctgatcatgattggctacagtgatggcatgcaggtgtggagcatccccatctctggagaggcccaggagctgttctctgtgcgccacggccccatccgggccgcccgcatcctgcctgccccccagtttggagcccagaagtgtgacaactttgctgagaagaggcccctgctgggcgtgtgcaagagcatcggcagcagcggcaccagccccccctactgctgcgtggacctgtacagcctgaggactggagagatggtgaagagcatccagttcaagacccccatctatgacctgcactgcaacaagaggatcctggtggtggtgctgcaggagaagattgctgcctttgacagctgcaccttcaccaagaagttctttgtgaccagctgctacccctgccccggccccaacatgaaccccatcgccctgggcagccgctggctggcctatgcagagaacaagctgatccgctgccaccagagcagaggaggagcctgtggggacaacatccagagctacacagccaccgtcatctctgctgccaagaccctgaagagcggcctgaccatggtgggcaaggtggtgacccagctgaccggcaccctgcccagcggcgtgacagaagatgatgtggccatccacagcaacagccgccgcagccccctggtgcccggcatcatcaccgtcatcgacacagagaccgtgggggagggccaggtgctggtgtctgaggacagcgacagtgatggcatcgtggcccacttccctgcccacgagaagcctgtgtgctgcatggccttcaacaccagcggcatgctgctggtgaccacagacaccctgggccatgacttccacgtgttccagatcctgacccacccctggagcagcagccagtgtgctgtgcaccacctgtacaccctgcacagaggagaaacagaggccaaggtgcaggacatctgcttcagccatgactgccgctgggtggtggtgtccaccctgcggggcaccagccacgtgttccccatcaacccctatggaggccagccctgtgtgaggacccacatgagcccccgggtggtgaacaggatgagccgcttccagaagtctgctggcctggaggagattgagcaggagctgaccagcaagcagggcggccgctgcagccctgtgcccggcctgagcagcagccccagcggcagccccctgcacggcaagctgaacagccaggacagctacaacaacttcaccaacaacaaccctggcaacccccggctgagccccctgcccagcctgatggtggtgatgcccctggcccagatcaagcagcccatgaccctgggcaccatcaccaagaggacaggcccctacctgtttggagctggctgcttcagcatcaaggccccctgcaaggtgaagcccccaccccagatcagccccagcaagtccatgggcggggagttctgtgtggccgccatcttcggcaccagccgctcctggtttgccaacaatgccggcctgaagcgggagaaggaccagagcaagcaggtggtggtggagagcctgtacatcatcagctgctacggcaccctggtggagcacatgatggagccccggcccctgagcacagcccccaagatcagtgatgacacccccctggagatgatgaccagcccccgggcctcctggaccctggtgaggaccccccagtggaatgagctgcagccccccttcaatgccaaccaccccctgctgctggccgcagatgctgtgcagtactaccagttcctgctggccggcctggtgcccccaggcagccctggccccatcaccaggcatggcagctatgacagcctggccagtgaccacagcggccaggaggatgaggagtggctgagccaggtggagatcgtgacccacacaggcccccaccggcggctgtggatgggcccccagttccagttcaagaccatccaccccagcggccagaccaccgtcatcagcagcagcagctctgtgctgcagagccacggccccagcgacaccccccagcccctgctggactttgacacagatgacctggacctgaacagcctgcgcatccagcctgtgcggagtgaccctgtgtccatgcctggcagcagcaggcctgtgtctgaccggcggggcgtgtccacagtgattgatgctgccagcggcacctttgacagatctgtgaccctgctggaggtgtgtggctcctggccagagggcttcggcctgcggcacatgagctccatggagcacacagaggagggcctgcgggagcggctggctgatgccatggccgagagccccagcagagatgtggtgggcagcggcacagagctgcagcgggagggcagcattgagaccctgagcaacagcagcggcagcaccagcggcagcatccccaggaactttgatggctaccgcagccccctgcccaccaatgaaagccagcccctgagcctcttccccaccggcttcccctag

SEQ ID NO: 39747 - DNA, 3608 bp, Artificial Sequence
  derived and/or modified sequence
ggttccgctgaggcgtggtaggaagtggctgccgtcaatcactcggggagactccaaacagtgagcctagagctggagactagcgttaaccggcggggcggccggttttatgaatgaagctatggctacagattccccaagaagacccagtcgttgtactggtggagttgtggttcgcccccaggctgtcacagagcagtcctacatggaaagtgttgtgacttttctgcaggatgttgtgccacaggcttacagtggaacacctctaacagaagaaaaggagaaaatagtctgggtcagatttgaaaatgcagatttaaatgatacatcaagaaatctggaatttcatgaaatacatagtactgggaatgaaccgcctttgttgattatgattggctacagtgatggaatgcaggtctggagcatccctatcagtggtgaagcacaagagctcttctctgttcgacatggcccaattcgagcggctagaatcttgcctgctccacagtttggtgctcaaaaatgtgataactttgctgaaaaaagacccctccttggtgtttgtaagagcattggatcttctggcacaagcccaccgtactgttgtgtggatctgtattcacttcgtactggggagatggtcaagtccattcaatttaagacacctatttatgatctccattgcaataaacggatccttgtcgtagtcttgcaggagaaaattgctgcctttgatagctgtactttcacgaagaaattctttgttacaagctgctatccatgtccagggccaaacatgaatcctattgctcttgggagccgctggcttgcttatgcagaaaacaagttgattcgatgtcatcagtcccgtggtggagcctgtggagacaacattcagtcttatactgccacagtcattagtgctgctaaaacattgaaaagtggcctgacaatggtagggaaagtggtgactcagctgacaggcacactgccttcaggtgtgacagaagatgatgttgccatccacagtaattcacggcggagtcctttggtcccaggcatcatcacagttattgacaccgaaaccgttggagagggccaggtgcttgtgagtgaggattctgacagtgatggcattgtggcccacttccctgcccatgagaagccagtgtgctgcatggcttttaatacaagtggaatgcttctagtcacaacagacacccttggccatgactttcatgtcttccaaattctgactcatccttggtcctcatcacaatgtgctgtccaccatctgtatactcttcacaggggagaaactgaagccaaagtacaggacatctgcttcagccatgactgtcgctgggttgtggtcagtactctccggggtacttcccacgttttccccatcaacccttatggtggccagccttgtgttcgtacacatatgtcaccacgagtagtgaatcgcatgagccgtttccagaaaagtgctggactggaagagattgaacaagaactgacgtctaagcaaggaggtcgctgtagccctgttccaggtctatcaagcagcccttctgggtcacccttgcatgggaaactgaacagccaagactcctataacaattttaccaacaacaaccctggcaaccctcggctctctcctcttcccagcttgatggtagtgatgcctcttgcacaaatcaagcagccaatgacattggggaccatcaccaaacgaaccgggccttatctctttggagcggggtgtttttccataaaagccccatgcaaagttaaacctcctccacaaatttcacccagcaaatcgatgggcggagaattttgtgtggctgctatcttcggaacatccaggtcatggtttgcaaataatgcaggtctgaaaagagaaaaagatcagtccaaacaagttgtagttgagtccctgtacattatcagttgctatggcaccttagtggaacacatgatggagccgcgacccctcagcactgcacccaagattagtgacgacacaccactggaaatgatgacatcgcctcgagccagctggactctggttagaacccctcaatggaatgaattgcagccaccgtttaatgcaaaccaccctctgctcctcgctgcagatgcagtacagtattatcagttcctgcttgctggcctggttccccctggaagtcctgggcccattactcgacatgggtcttacgacagtttagcttctgaccatagtggacaggaagatgaagaatggctttcccaggttgaaattgtaacacacactggaccccatagacgtctgtggatgggtccacagttccagttcaaaaccatccatccctcaggccaaaccacagttatctcatccagttcatctgtgttgcagtctcatggtccgagtgacacgccacagcctcttttggattttgatacagatgatcttgatctcaacagtctcaggatccagccagtccgctctgaccccgtcagcatgccagggtcatcccgtccagtctctgatcgaaggggagtttccacagtgattgatgctgcctcaggtacctttgacaggagcgtgaccctgctggaggtgtgcgggagctggcctgagggcttcgggctgcggcacatgtcctccatggagcacacggaggagggcctccgggagcgacttgccgacgccatggccgagtcacctagccgggacgtcgtgggatccggaacagaacttcagcgagagggaagcatcgagactctgagtaacagctcaggctccaccagcggcagcataccaagaaactttgatggctaccgatctccgctgcccaccaatgagagccagcccctcagcctcttcccgactggcttcccgtaggtaccagcaacctgcttctgactggccagccccctcccctgctggaggaggggagaagccccgctctggtcctacccttcagtctctgctcttccttcatcaaccaccttccccaagcttagtgacagcagccgcccatcctacctggatggagaagagacccttctccaagcacctcagcgcacttgccctctgccacacctgtcggtggaggctgtggccaggagagactgtagaagctcggtccctgtgtatgtttgcatatgacatcctgcattggatccgcttttgtattttttaaccatacccacggtggggcgggtggggggagcctggaacagtgaccagatctgggggcctgagtggggacagagttgatcgtccacctggccattttgaccctgagtggacagtcacagcctcagctcatgtctggctgtgacacacactgcccccagcttcccttggtcagccccactccagcacggggtgaacggaggcccagagtactagggaaggaggaagggaggacatgcctcttcttcctcctttctttccccatctgttcatgggaagagtttgtctttcttatctttaagcccctttaccctggtcctgtactgatcagtgaaggaaaccgtggttactgaggccctgttgaaaagtgcacgtcttgtccaataaatcacgctgcagttggtgtccatccctg

SEQ ID NO: 39748 - DNA, 2787 bp, Artificial Sequence
  derived and/or modified sequence
atgaacgaggccatggccaccgacagcccccggcggcccagccggtgcacgggtggtgtggtcgtgcgccctcaggcagtgacagaacaatcatacatggaaagtgtagtgaccttcctgcaggacgttgtgccccaggcctattcaggaaccccattaactgaggagaaggaaaaaatcgtctgggtgaggttcgaaaacgccgacctgaacgatacaagccgcaatcttgagtttcacgagatacacagcacaggcaacgagcccccactgctgataatgatcggttatagcgacggaatgcaggtgtggagcatccctatctccggagaagcacaagaactctttagtgtacgccacggtccaattagggcggccaggatcctccccgctccccaattcggagcgcagaagtgtgacaatttcgctgaaaagcgccctctgctgggcgtttgcaagtctataggatcctccggcacatctcccccttattgttgcgtggatctgtactccctgcggaccggagagatggttaaatcaattcaatttaagacacccatctacgatttacattgcaataaaagaattttagtcgtggtgttacaggaaaagatagcagcttttgactcatgtacttttaccaagaagttttttgtgaccagttgctatccctgtcccgggcccaacatgaatcccatcgcactggggagcaggtggcttgcatacgctgagaacaaacttattcgctgccatcagagtaggggaggtgcttgtggtgacaatatacagagctataccgcaaccgtgatctcagcggccaaaacactgaagagtggcctcacgatggtgggcaaggtcgttactcaactcactgggaccctgccttcaggcgtcactgaagacgatgttgccatccacagcaatagccgaaggtcccctctcgtgccgggtattattacagtgatagatacagagacagtgggagagggacaggtcctcgtgagtgaggactccgatagtgacggcattgtggcccattttcccgcgcacgagaaaccagtctgctgcatggcttttaatacatcaggaatgctcctggttactactgataccctagggcacgattttcacgtctttcagatccttacccatccgtggtccagcagccaatgtgccgtccaccatttatacacactccaccgcggcgagaccgaagcaaaggttcaggatatttgcttctcacacgactgcaggtgggtggtagtttcaactctccgaggaacatctcacgtgtttcccattaacccttatggggggcagccatgtgttagaacgcacatgtctccacgcgtggtcaatcggatgtcaagattccagaagtccgccgggcttgaagagattgagcaggaattaacgagcaagcaggggggccgatgttctcctgtccctggtctgtccagctcacctagcgggtccccactgcatgggaagctgaattctcaggacagttacaacaattttaccaataataatccgggcaatcccagattatcacccctgccctccttgatggtggttatgcctctcgcccagatcaaacagcctatgacgctgggcactattaccaagcgtacaggcccatacctcttcggggcagggtgcttttctattaaagcaccctgcaaagtgaaaccaccaccccagatttcaccatccaaatctatgggaggcgagttttgtgtggccgccatctttggcaccagcagatcatggtttgctaataatgcagggctgaaaagagaaaaagatcagtccaaacaagtggtagttgagtctctgtatatcatctcttgttatggcaccctggtggagcatatgatggagccccgtcccttgtctacggccccaaaaatcagtgacgatacacccctggagatgatgaccagccctagagcttcttggactcttgtcaggactccccagtggaacgagctccagcctccatttaatgccaaccatccactgctcctggctgccgatgcggtccagtactaccaattcctcttggcggggctggtgccacctggctctcccggacctataacaaggcacgggagttacgattcactggctagtgaccattctggacaggaagacgaagaatggctgtctcaggtggagattgtcacgcatacagggcctcacagaagactgtggatgggtccccagttccagttcaaaacgatccacccgtccggtcagacaacggtgatttctagcagttcctcagttctgcaatcacatgggccaagtgatacaccacagccgctcctcgactttgacaccgatgatctggatttgaatagtctgagaatccagcctgtgagatctgaccccgtctccatgcccgggtcgagtaggcctgtgtcagatagacgcggagtatccacggttattgatgcagctagcgggaccttcgataggagtgtgactctcttggaagtgtgtgggtcctggcccgaaggcttcggcctgagacacatgagctcaatggagcatacagaggaaggcctgagagagaggttggcagatgcgatggccgaatccccttccagagatgtggtcggatcagggaccgagcttcagagagaagggagcattgagaccctgtccaactcaagcggcagcaccagcggttccattccgcgcaattttgatggttaccggagtcccctgcccacaaacgaatctcagccgttgtctctgttccctactggcttcccctag

SEQ ID NO: 39749 - DNA, 2787 bp, Artificial Sequence
  derived and/or modified sequence
atgaatgaagcaatggcaactgactccccgcgacggccaagccggtgcacgggaggggtagtagtcaggccccaggcagtaacggagcaatcttacatggagagtgtcgtcacatttttgcaggatgtcgtccctcaagcgtattcggggacacctctcactgaggaaaaagaaaaaattgtatgggtgcggttcgagaacgccgatctgaacgacacctctagaaacctggagtttcacgaaatacatagcacaggtaacgaacctcctctgctgattatgattggatactctgatggaatgcaagtgtggtctatacccatcagtggcgaggcgcaagagctattttcggtgcgacatgggccaatcagggcagcccgaatcctgcccgctccccaatttggcgcacaaaagtgtgacaatttcgctgaaaagcggcctcttttaggcgtttgcaagtctataggttcctccgggaccagtcccccttattgctgtgttgacctctatagcttgagaacaggcgaaatggttaaaagcatccagttcaaaacccccatttatgacctgcactgtaacaaaagaatcttggtcgtggtcttgcaggagaagattgctgcttttgacagttgtacctttaccaaaaagttcttcgtgactagctgctatccgtgccctggccctaatatgaatcctattgccttaggctcacggtggctagcctacgctgaaaacaagctgattaggtgtcatcaaagtagaggaggcgcatgcggggacaacattcagtcttacacagctactgtcattagcgccgctaaaactctgaagtccggcctgactatggtgggaaaggtagttactcagttaactggaacgctccccagcggcgtcaccgaggacgacgtcgccatccactctaacagccgtaggtcgcctttggtgccgggtattattaccgtcatcgacacagagaccgtcggagaaggtcaggtgttagtcagcgaagactcggacagtgatgggatcgttgctcacttccctgcccacgaaaagcccgtctgttgtatggccttcaataccagcggaatgctgcttgtgaccaccgatacgctgggacacgattttcacgtgttccagattcttactcacccttggtcgtcctctcagtgtgcagtgcatcacctctatacactacatagaggagagactgaagcaaaggtccaggatatttgcttttcgcatgactgccgctgggtggtcgtctcaaccctccggggtactagccatgtgtttccgataaatccctatggagggcagccatgcgtcaggacacatatgtctccccgagtggtcaatcggatgtcacgtttccagaagagcgccggtcttgaggagattgaacaggagctgacatccaaacaaggtgggcgttgctctcccgtcccgggtctgagttcatcaccaagtggctcccccttacacggcaagctcaattcccaagattcctataataacttcacaaataataaccctggcaatcctcgcctgtcccccctgcctagcctcatggtggtgatgccattggctcaaattaagcagcccatgacacttgggactattactaagagaacaggaccataccttttcggggctggatgcttctcaatcaaagcaccttgcaaagttaagccccctcctcaaataagtccatctaaatctatggggggtgagttctgtgtcgcggcaatcttcggcacatccagaagctggttcgcaaacaacgcgggactgaaacgcgagaaggaccagtctaaacaggtggtcgtggagtctctgtatattatctcctgctatggcacactcgtagagcatatgatggaacctcgaccccttagtaccgcaccaaaaatctcagatgatacaccccttgaaatgatgaccagtcctcgggcttcctggactctcgtgcggaccccacagtggaatgaattgcagcccccattcaacgcaaatcaccctctgttgctggccgctgacgcagtgcagtattaccaatttctcctggcaggcctcgtgccgccagggtcccctgggcctatcactcggcatggtagttatgactctctggcatccgaccatagcggccaggaagacgaagaatggctgtcacaggttgaaatcgtgacgcatacaggtcctcaccggcgactctggatgggacctcaatttcagttcaaaaccatccacccatccggacaaacaaccgtgattagctcttcctcatcagtgctgcagtctcacggcccttcagatacccctcagccactcctggactttgataccgacgacctcgatctgaatagcctgcgaatccagccagtgaggtcagatcctgtttctatgcccggttctagtcgacccgtgagtgaccgaagaggagtaagcacagtgatagacgctgcgtccggtacatttgatcgatcggtgacattgctggaggtgtgcggaagttggcctgagggtttcggtcttcggcacatgagctccatggaacacacagaagaagggctcagagaacgcctggcagatgcaatggccgaaagcccatcacgagacgtggtgggctctgggaccgaattgcagcgggaaggcagtatcgaaaccctgtccaacagcagtggatctaccagcggcagcatccctcgcaacttcgatggttacaggagccctctcccaacaaatgagtcccagcctttgtctctgttcccgacaggattcccttag

SEQ ID NO: 39750 - protein, 831 aa, Artificial Sequence
  derived and/or modified sequence
MSKKGRSKGEKPEMETDAVQMANEELRAKLTSIQIEFQQEKSKVGKLRERLQEAKLEREQEQRRHTAYISELKAKLHEEKTKELQALREGLIRQHEQEAARTAKIKEGELQRLQATLNVLRDGAADKVKTALLTEAREEARRAFDGERLRLQQEILELKAARKQAEEALSNCMQADKTKAADLRAAYQAHQDEVHRIKRECERDIRRLMDEIKGKDRVILALEKELGVQAGQTQKLLLQKEALDEQLVQVKEAERHHSSPKRELPPGIGDMVELMGVQDQHMDERDVRRFQLKIAELNSVIRKLEDRNTLLADERNELLKRSRETEVQLKPLVEKNKRMNKKNEDLLQSIQRMEEKIKNLTRENVEMKEKLSAQASLKRHTSLNDLSLTRDEQEIEFLRLQVLEQQHVIDDLSLERERLLRSKRHRGKSLKPPKKHVVETFFGFDEESVDSETLSETSYNTDRTDRTPATPEEDLDDATAREEADLRFCQLTREYQALQRAYALLQEQVGGTLDAEREARTREQLQADLLRCQAKIEDLEKLLVEKGQDSKWVEEKQLLIRTNQDLLEKIYRLEMEENQLKNEMQDAKDQNELLEFRVLELEERERRSPAFNLQITTFPENHSSALQLFCHQEGVKDVNVSELMKKLDILGDNGNLRNEEQVAIIQAGTVLALCEKWLKQIEGTEAALTQKMLDLEKEKDLFSRQKGYLEEELDYRKQALDQAYLKIQDLEATLYTALQQEPGRRAGEALSEGQREDLQAAVEKVRRQILRQSREFDSQILRERMELLQQAQQRIRELEDKLEFQKRHLKELEEKFLFLFLFFSLAFILWP

SEQ ID NO: 39751 - protein, 646 aa, Artificial Sequence
  derived and/or modified sequence
MSKKGRSKGEKPEMETDAVQMANEELRAKLTSIQIEFQQEKSKMDEIKGKDRVILALEKELGVQAGQTQKLLLQKEALDEQLVQVKEAERHHSSPKRELPPGIGDMVELMGVQDQHMDERDVRRFQLKIAELNSVIRKLEDRNTLLADERNELLKRSRETEVQLKPLVEKNKRMNKKNEDLLQSIQRMEEKIKNLTRENVEMKEKLSAQASLKRHTSLNDLSLTRDEQEIEFLRLQVLEQQHVIDDLSLKHVVETFFGFDEESVDSETLSETSYNTDRTDRTPATPEEDLDDATAREEADLRFCQLTREYQALQRAYALLQEQVGGTLDAEREARTREQLQADLLRCQAKIEDLEKLLVEKGQDSKWVEEKQLLIRTNQDLLEKIYRLEMEENQLKNEMQDAKDQNELLEFRVLELEERERRSPAFNLQITTFPENHSSALQLFCHQEGVKDVNVSELMKKLDILGDNGNLRNEEQVAIIQAGTVLALCEKWLKQIEGTEAALTQKMLDLEKEKDLFSRQKGYLEEELDYRKQALDQAYLKIQDLEATLYTALQQEPGRRAGEALSEGQREDLQAAVEKVRRQILRQSREFDSQILRERMELLQQAQQRIRELEDKLEFQKRHLKELEEKFLFLFLFFSLAFILWP

SEQ ID NO: 39752 - DNA, 2496 bp, Artificial Sequence
  derived and/or modified sequence
atgagcaagaagggcagaagcaagggcgagaagcccgagatggagaccgacgccgtgcagatggccaacgaggagctgagagccaagctgaccagcatccagatcgagttccagcaggagaagagcaaggtgggcaagctgagagagagactgcaggaggccaagctggagagagagcaggagcagagaagacacaccgcctacatcagcgagctgaaggccaagctgcacgaggagaagaccaaggagctgcaggccctgagagagggcctgatcagacagcacgagcaggaggccgccagaaccgccaagatcaaggagggcgagctgcagagactgcaggccaccctgaacgtgctgagagacggcgccgccgacaaggtgaagaccgccctgctgaccgaggccagagaggaggccagaagagccttcgacggcgagagactgagactgcagcaggagatcctggagctgaaggccgccagaaagcaggccgaggaggccctgagcaactgcatgcaggccgacaagaccaaggccgccgacctgagagccgcctaccaggcccaccaggacgaggtgcacagaatcaagagagagtgcgagagagacatcagaagactgatggacgagatcaagggcaaggacagagtgatcctggccctggagaaggagctgggcgtgcaggccggccagacccagaagctgctgctgcagaaggaggccctggacgagcagctggtgcaggtgaaggaggccgagagacaccacagcagccccaagagagagctgccccccggcatcggcgacatggtggagctgatgggcgtgcaggaccagcacatggacgagagagacgtgagaagattccagctgaagatcgccgagctgaacagcgtgatcagaaagctggaggacagaaacaccctgctggccgacgagagaaacgagctgctgaagagaagcagagagaccgaggtgcagctgaagcccctggtggagaagaacaagagaatgaacaagaagaacgaggacctgctgcagagcatccagagaatggaggagaagatcaagaacctgaccagagagaacgtggagatgaaggagaagctgagcgcccaggccagcctgaagagacacaccagcctgaacgacctgagcctgaccagagacgagcaggagatcgagttcctgagactgcaggtgctggagcagcagcacgtgatcgacgacctgagcctggagagagagagactgctgagaagcaagagacacagaggcaagagcctgaagccccccaagaagcacgtggtggagaccttcttcggcttcgacgaggagagcgtggacagcgagaccctgagcgagaccagctacaacaccgacagaaccgacagaacccccgccacccccgaggaggacctggacgacgccaccgccagagaggaggccgacctgagattctgccagctgaccagagagtaccaggccctgcagagagcctacgccctgctgcaggagcaggtgggcggcaccctggacgccgagagagaggccagaaccagagagcagctgcaggccgacctgctgagatgccaggccaagatcgaggacctggagaagctgctggtggagaagggccaggacagcaagtgggtggaggagaagcagctgctgatcagaaccaaccaggacctgctggagaagatctacagactggagatggaggagaaccagctgaagaacgagatgcaggacgccaaggaccagaacgagctgctggagttcagagtgctggagctggaggagagagagagaagaagccccgccttcaacctgcagatcaccaccttccccgagaaccacagcagcgccctgcagctgttctgccaccaggagggcgtgaaggacgtgaacgtgagcgagctgatgaagaagctggacatcctgggcgacaacggcaacctgagaaacgaggagcaggtggccatcatccaggccggcaccgtgctggccctgtgcgagaagtggctgaagcagatcgagggcaccgaggccgccctgacccagaagatgctggacctggagaaggagaaggacctgttcagcagacagaagggctacctggaggaggagctggactacagaaagcaggccctggaccaggcctacctgaagatccaggacctggaggccaccctgtacaccgccctgcagcaggagcccggcagaagagccggcgaggccctgagcgagggccagagagaggacctgcaggccgccgtggagaaggtgagaagacagatcctgagacagagcagagagttcgacagccagatcctgagagagagaatggagctgctgcagcaggcccagcagagaatcagagagctggaggacaagctggagttccagaagagacacctgaaggagctggaggagaagttcctgttcctgttcctgttcttcagcctggccttcatcctgtggccctag

SEQ ID NO: 39753 - DNA, 1941 bp, Artificial Sequence
  derived and/or modified sequence
atgagcaagaagggcagaagcaagggcgagaagcccgagatggagaccgacgccgtgcagatggccaacgaggagctgagagccaagctgaccagcatccagatcgagttccagcaggagaagagcaagatggacgagatcaagggcaaggacagagtgatcctggccctggagaaggagctgggcgtgcaggccggccagacccagaagctgctgctgcagaaggaggccctggacgagcagctggtgcaggtgaaggaggccgagagacaccacagcagccccaagagagagctgccccccggcatcggcgacatggtggagctgatgggcgtgcaggaccagcacatggacgagagagacgtgagaagattccagctgaagatcgccgagctgaacagcgtgatcagaaagctggaggacagaaacaccctgctggccgacgagagaaacgagctgctgaagagaagcagagagaccgaggtgcagctgaagcccctggtggagaagaacaagagaatgaacaagaagaacgaggacctgctgcagagcatccagagaatggaggagaagatcaagaacctgaccagagagaacgtggagatgaaggagaagctgagcgcccaggccagcctgaagagacacaccagcctgaacgacctgagcctgaccagagacgagcaggagatcgagttcctgagactgcaggtgctggagcagcagcacgtgatcgacgacctgagcctgaagcacgtggtggagaccttcttcggcttcgacgaggagagcgtggacagcgagaccctgagcgagaccagctacaacaccgacagaaccgacagaacccccgccacccccgaggaggacctggacgacgccaccgccagagaggaggccgacctgagattctgccagctgaccagagagtaccaggccctgcagagagcctacgccctgctgcaggagcaggtgggcggcaccctggacgccgagagagaggccagaaccagagagcagctgcaggccgacctgctgagatgccaggccaagatcgaggacctggagaagctgctggtggagaagggccaggacagcaagtgggtggaggagaagcagctgctgatcagaaccaaccaggacctgctggagaagatctacagactggagatggaggagaaccagctgaagaacgagatgcaggacgccaaggaccagaacgagctgctggagttcagagtgctggagctggaggagagagagagaagaagccccgccttcaacctgcagatcaccaccttccccgagaaccacagcagcgccctgcagctgttctgccaccaggagggcgtgaaggacgtgaacgtgagcgagctgatgaagaagctggacatcctgggcgacaacggcaacctgagaaacgaggagcaggtggccatcatccaggccggcaccgtgctggccctgtgcgagaagtggctgaagcagatcgagggcaccgaggccgccctgacccagaagatgctggacctggagaaggagaaggacctgttcagcagacagaagggctacctggaggaggagctggactacagaaagcaggccctggaccaggcctacctgaagatccaggacctggaggccaccctgtacaccgccctgcagcaggagcccggcagaagagccggcgaggccctgagcgagggccagagagaggacctgcaggccgccgtggagaaggtgagaagacagatcctgagacagagcagagagttcgacagccagatcctgagagagagaatggagctgctgcagcaggcccagcagagaatcagagagctggaggacaagctggagttccagaagagacacctgaaggagctggaggagaagttcctgttcctgttcctgttcttcagcctggccttcatcctgtggccctag

SEQ ID NO: 39754 - DNA, 2496 bp, Artificial Sequence
  derived and/or modified sequence
atgtctaaaaaaggcagaagtaaaggggagaagcccgagatggaaactgatgcagtccaaatggccaatgaggagttgagggccaagctgacaagcattcagatcgagtttcagcaggagaaaagtaaagttggaaagctgcgagaacggcttcaggaggccaaacttgagagggagcaggagcagcgccgacataccgcctacataagcgagctcaaagccaaactgcacgaggaaaaaaccaaagaactgcaggctctgagagagggcctcatccgacagcatgaacaagaggctgctcgaaccgccaaaattaaagaaggtgagctgcagcgcctgcaggcaactctcaatgtgttgagagatggtgcagccgataaagtaaaaacggcgctcctgaccgaggcccgtgaagaagcccgccgcgcattcgacggtgagcggctgcgactgcagcaggaaattctggaattgaaggccgctagaaaacaggccgaggaggccctcagtaattgcatgcaggctgacaaaacaaaagctgctgacttaagggcagcctatcaggctcaccaggatgaggtgcaccgaatcaagcgggagtgtgagagggatattcgaagactgatggatgagatcaagggcaaggaccgggttatcctggccttggagaaggaactgggcgtgcaggccgggcagactcagaagcttttactccagaaggaggccctggacgaacagctggtgcaggttaaggaggccgaaaggcaccattcatcccctaagagagagttgccacccggtatcggcgatatggtggaactgatgggggtgcaggaccagcacatggatgaaagagatgtcagaagattccaacttaaaattgccgagcttaattctgtgatccgcaaactggaggatcgtaatacgctgttggctgacgagaggaacgaactccttaaaagaagcagagagacggaagtgcaactgaaacctctggtggagaagaataagcgaatgaataagaaaaacgaagacctgctacagtccatccaacgcatggaggagaagatcaaaaacctgacaagggaaaatgtagagatgaaagagaaactttccgcacaggcaagtttaaagcgtcatacctccctgaatgacctgtctctgacccgcgacgaacaagagatagagttcttgagactccaggtgttggagcagcaacacgtgattgacgacctgtcactcgagcgagaaagactgctgcggagcaaacgccatagaggaaaaagcctgaagccacccaagaagcatgtagtggaaacatttttcggatttgacgaggaatccgttgactctgagaccctgtcggaaacatcatataacacggataggactgaccgcacccctgctacacctgaggaggatcttgacgacgccacagctcgggaggaagcagatctccgcttttgtcagctgactagggaataccaggccctgcagcgggcctacgctctcctgcaggaacaggtggggggaactctcgatgctgagagagaggctcgtacccgggagcagctgcaggccgacctcctccgatgtcaagccaagatagaggatctggagaaactcctggtcgagaaggggcaggactctaaatgggtggaggaaaagcagctccttatcaggactaaccaggacctgttggagaaaatatatcggctggaaatggaggaaaaccaattaaagaatgaaatgcaggacgccaaggaccagaatgaattgttagaattcagagtgttggagctggaagagagggaaagacggtccccagcctttaatctacagatcacgacatttcctgaaaaccattcgtccgctctgcagctgttctgccatcaagagggagtgaaagatgtcaatgtgtccgaactgatgaaaaaactggacatccttggagacaacggaaacctgaggaacgaagaacaggtggctattatacaggcggggacagttttggccctctgtgagaaatggcttaaacagatcgaaggcacagaggctgcactcacgcaaaagatgctggatctcgagaaggaaaaagacctattctcacggcagaaaggatatctcgaagaagagctggattaccgtaagcaggcactcgatcaggcatacctgaaaatccaggatttggaagcgaccctctatacggctttgcagcaggagcctggtagaagggccggcgaggcactttcagaaggccagcgggaggatctccaagccgcggtggagaaggtgagacgccagattctccgacaatcccgcgaattcgatagtcaaatactgcgggaacggatggaattgcttcagcaggcccagcagcgcattcgggagttagaagacaagctggaattccagaaacggcacctgaaggaacttgaggaaaagttcctctttctcttcctattcttttccctggctttcattctctggccatag

SEQ ID NO: 39755 - DNA, 1941 bp, Artificial Sequence
  derived and/or modified sequence
atgtccaagaagggccgcagtaagggcgagaagcctgaaatggaaactgacgcggtgcagatggcaaatgaggagctgagggcaaaactgacttctatccaaatcgagttccagcaggagaaatctaaaatggatgagattaaagggaaggatcgggtgatccttgcactggagaaagaactgggagttcaggcgggccagacacagaaactgctgctgcaaaaggaagccctcgacgagcaactggtgcaggtgaaggaagctgagcgccaccactcctctcctaaacgcgagctgccacctggcattggggacatggtagaacttatgggcgtgcaggaccaacatatggacgagagggatgtaagacgtttccaactcaagatcgctgagctgaatagcgtgataagaaagttagaagaccggaataccttactggctgatgaaagaaatgaactgctcaagcggtcccgcgaaacagaggtccagctgaagccattggtagagaagaacaaaagaatgaacaagaagaatgaagatttgttgcagtcaatccagcgtatggaggagaaaatcaagaaccttacccgcgagaatgtggagatgaaggagaaactctctgcccaggctagcttgaaacggcacacaagcctgaacgacctctccctgactcgagacgagcaggaaatcgagttcttacgtctgcaggtactagagcaacagcatgtcattgatgatctgtccctcaagcacgtggtcgagactttttttggttttgatgaggagagtgttgactctgagactctaagtgaaacctcttacaacactgacagaacggaccggaccccagccactcctgaagaagacttggacgacgccacagcacgcgaagaggccgatctaaggttttgtcagttgacccgagagtaccaggcgctccagagggcttacgccctgctgcaggaacaagtggggggcaccctagacgccgaaagagaagcgcgaacccgggagcagcttcaggcggatctgctcaggtgtcaggccaagatcgaagacctcgaaaagcttctcgtggagaaaggacaggattctaaatgggtggaggaaaaacagttgctgattcggaccaatcaggacctgctggagaaaatataccggcttgagatggaggagaatcagctgaagaatgaaatgcaggacgccaaggaccagaatgagctgcttgagtttcgggtgctggagctggaggaacgggaacgaaggagtcccgcttttaatctgcaaattaccactttcccggaaaaccacagctccgcactccagctgttttgccatcaggagggagtcaaagacgttaacgtgagcgagctaatgaagaagctcgatattctcggggacaacgggaacctgagaaacgaggagcaggtggcaatcatacaagccggtaccgtgctcgcactgtgcgagaaatggctaaaacagattgaggggaccgaagccgccctaacccagaagatgctggatctggagaaagagaaggatctgttttcaagacaaaaaggctaccttgaggaggaattagattatagaaagcaggccctcgaccaggcatacctcaagattcaagacctcgaggccacattgtataccgcccttcagcaggaaccagggcgtcgcgccggcgaagccctctccgaaggccagcgtgaagacctccaggcggccgtggaaaaggttcgtcgacagatcttgcggcagtccagagaatttgattcccagattcttcgggaacgcatggaactcctgcagcaagcacagcagcgaatcagagagctggaggacaaactggaatttcagaaaaggcatctgaaggagctggaagaaaaatttctctttctcttcttgtttttcagcctggccttcattctgtggccatag

SEQ ID NO: 39756 - DNA, 2975 bp, Artificial Sequence
  derived and/or modified sequence
agctgcagccacccgcgtgcggcacgcgccggccgcctgcccggatcgcggccaccagtgccgcggcctctcgactcccgccccgccgagccgcgcgcgcgactgccatcctcctcaattgctttttacgattttttttgtgcatgcattcattttctgttccgttttgtcctttttaaggcggtggcggcggcgacagcggcgtaagctcgcagcggggagggggcggccggaggatgcggcgcggggctgcgctcgctacgtccgctgctgctgcccggctcgggcctgagcgccgagcaggatcccaagtgatggtggtttcctcggagggcgagctgagtcctgcgcgactggttagcacggtggagctggtagccacgcctgctggctggcgtgcgtgaacaggtgtggaccgcaggatctcagcactctgacccaaggggaagcatgtcgaagaaaggccggagcaagggcgagaagcccgagatggagacggacgcggtgcagatggccaacgaggagctgcgggccaagctgaccagcattcagatcgagttccagcaggaaaaaagcaaggtgggcaaactgcgcgagcggctgcaggaggcgaagctggagcgcgagcaggagcagcgacggcacacggcctacatttcggagctcaaggccaagctgcatgaggagaagaccaaggagctgcaggcgctgcgcgaggggctcatccggcagcacgagcaggaggcggcgcgcaccgccaagatcaaggagggcgagctgcagcggctgcaggccacgctgaacgtgctgcgcgacggcgcggccgacaaggtcaagacggcgctgctgaccgaggcgcgcgaggaggcgcgcagggccttcgatggagagcgcctgcggctgcagcaggagatcctggagctcaaggcagcgcgcaagcaggcagaggaggcgctcagtaactgcatgcaggctgacaagaccaaggcagccgacctgcgtgccgcctaccaggcgcaccaagacgaggtgcaccgcatcaagcgcgagtgcgagcgcgacatccgcaggctgatggatgagatcaaagggaaagaccgtgtgattctggccttggagaaggaacttggcgtgcaggctgggcagacccagaagctgcttctgcagaaagaggctttggatgagcagctggttcaggtcaaggaggccgagcggcaccacagtagtccaaagagagagctcccgcccgggatcggggacatggtggagctcatgggcgtccaggatcaacatatggacgagcgagatgtgaggcgatttcaactaaaaattgctgaactgaattcagtgatacggaagctggaagacagaaatacgctgttggcagatgagaggaatgaactgctgaaacgctcacgagagaccgaggttcagctgaagcccctggtggagaagaacaagcggatgaacaagaagaatgaggatctgttgcagagtatccagaggatggaggagaaaatcaagaacctcacgcgggaaaacgtggaaatgaaagaaaagctgtcagcgcaggcgtctctgaagcggcatacctccttgaatgacctcagcctgacgagggatgagcaggagatcgagttcctgaggctgcaggtgctggagcagcagcacgtcattgacgacctctcactggagagagaacggctgttgcgctccaaaaggcatcgagggaaaagtctgaaaccgcccaagaagcatgttgtggagacattttttggatttgatgaggagtctgtggactcagaaacgttgtccgaaacatcctacaacacagacaggacagacaggaccccagccacgcccgaagaagacttggacgatgccacagcccgagaggaggctgacctgcgcttctgccagctgacccgggagtaccaggccctgcaacgcgcctacgccctgctccaggagcaggtgggaggcacgctggacgctgagagggaggcccggactcgggagcagctacaagctgatctgctgaggtgtcaggccaaaatcgaagatttggagaagttactggttgagaagggacaggattccaagtgggttgaagagaagcagctgctcatcagaacaaaccaagacttgctggaaaagatttacagactggaaatggaagagaaccagctgaagaatgaaatgcaagacgccaaggatcagaacgagctgttagaattcagagtgctagaactcgaagagagagagaggaggtcgccagcatttaacctccaaatcaccaccttccccgagaaccacagcagcgctctccagctgttctgtcaccaggaaggagttaaggatgtgaatgtttctgaacttatgaagaaattagatatccttggcgataacgggaatttgagaaatgaagaacaggttgcaataatccaagctggaactgtgcttgccctgtgtgaaaagtggctgaagcaaatagaggggaccgaggccgccctgacccagaagatgctggacctggagaaggagaaggacctgttcagcaggcagaagggctacctggaagaggagctcgactaccggaagcaagcccttgaccaggcttacctgaaaatccaagacctggaggccacactgtacacagcgctgcagcaggagccggggcggagggccggtgaggcgctgagcgagggccagcgggaggacctgcaggctgctgtggaaaaggtgcgcaggcagatcctcaggcagagccgcgagttcgacagccagatcctgcgggagcgcatggagctgctgcagcaggcccagcagagaatccgagaactggaggacaaactggagtttcagaagcggcacctgaaagaactggaggaaaagtttttgttcctttttttgtttttctcactagcattcattctgtggccttgatgacttcagtgagccaagaactcgggttg

SEQ ID NO: 39757 - DNA, 2420 bp, Artificial Sequence
  derived and/or modified sequence
agctgcagccacccgcgtgcggcacgcgccggccgcctgcccggatcgcggccaccagtgccgcggcctctcgactcccgccccgccgagccgcgcgcgcgactgccatcctcctcaattgctttttacgattttttttgtgcatgcattcattttctgttccgttttgtcctttttaaggcggtggcggcggcgacagcggcgtaagctcgcagcggggagggggcggccggaggatgcggcgcggggctgcgctcgctacgtccgctgctgctgcccggctcgggcctgagcgccgagcaggatcccaagtgatggtggtttcctcggagggcgagctgagtcctgcgcgactggttagcacggtggagctggtagccacgcctgctggctggcgtgcgtgaacaggtgtggaccgcaggatctcagcactctgacccaaggggaagcatgtcgaagaaaggccggagcaagggcgagaagcccgagatggagacggacgcggtgcagatggccaacgaggagctgcgggccaagctgaccagcattcagatcgagttccagcaggaaaaaagcaagatggatgagatcaaagggaaagaccgtgtgattctggccttggagaaggaacttggcgtgcaggctgggcagacccagaagctgcttctgcagaaagaggctttggatgagcagctggttcaggtcaaggaggccgagcggcaccacagtagtccaaagagagagctcccgcccgggatcggggacatggtggagctcatgggcgtccaggatcaacatatggacgagcgagatgtgaggcgatttcaactaaaaattgctgaactgaattcagtgatacggaagctggaagacagaaatacgctgttggcagatgagaggaatgaactgctgaaacgctcacgagagaccgaggttcagctgaagcccctggtggagaagaacaagcggatgaacaagaagaatgaggatctgttgcagagtatccagaggatggaggagaaaatcaagaacctcacgcgggaaaacgtggaaatgaaagaaaagctgtcagcgcaggcgtctctgaagcggcatacctccttgaatgacctcagcctgacgagggatgagcaggagatcgagttcctgaggctgcaggtgctggagcagcagcacgtcattgacgacctctcactgaagcatgttgtggagacattttttggatttgatgaggagtctgtggactcagaaacgttgtccgaaacatcctacaacacagacaggacagacaggaccccagccacgcccgaagaagacttggacgatgccacagcccgagaggaggctgacctgcgcttctgccagctgacccgggagtaccaggccctgcaacgcgcctacgccctgctccaggagcaggtgggaggcacgctggacgctgagagggaggcccggactcgggagcagctacaagctgatctgctgaggtgtcaggccaaaatcgaagatttggagaagttactggttgagaagggacaggattccaagtgggttgaagagaagcagctgctcatcagaacaaaccaagacttgctggaaaagatttacagactggaaatggaagagaaccagctgaagaatgaaatgcaagacgccaaggatcagaacgagctgttagaattcagagtgctagaactcgaagagagagagaggaggtcgccagcatttaacctccaaatcaccaccttccccgagaaccacagcagcgctctccagctgttctgtcaccaggaaggagttaaggatgtgaatgtttctgaacttatgaagaaattagatatccttggcgataacgggaatttgagaaatgaagaacaggttgcaataatccaagctggaactgtgcttgccctgtgtgaaaagtggctgaagcaaatagaggggaccgaggccgccctgacccagaagatgctggacctggagaaggagaaggacctgttcagcaggcagaagggctacctggaagaggagctcgactaccggaagcaagcccttgaccaggcttacctgaaaatccaagacctggaggccacactgtacacagcgctgcagcaggagccggggcggagggccggtgaggcgctgagcgagggccagcgggaggacctgcaggctgctgtggaaaaggtgcgcaggcagatcctcaggcagagccgcgagttcgacagccagatcctgcgggagcgcatggagctgctgcagcaggcccagcagagaatccgagaactggaggacaaactggagtttcagaagcggcacctgaaagaactggaggaaaagtttttgttcctttttttgtttttctcactagcattcattctgtggccttgatgacttcagtgagccaagaactcgggttg

SEQ ID NO: 39758 - DNA, 2496 bp, Artificial Sequence
  derived and/or modified sequence
atgagcaagaagggccgcagcaagggggagaagccagagatggagacagatgctgtgcagatggccaatgaggagctgcgggccaagctgaccagcatccagatcgagttccagcaggagaagagcaaggtgggcaagctgcgggagcggctgcaggaggccaagctggagcgggagcaggagcagaggaggcacacagcctacatcagcgagctgaaggccaagctgcacgaggagaagaccaaggagctgcaggccctgcgggagggcctcatccggcagcacgagcaggaggccgccaggacagccaagatcaaggagggggagctgcagaggctgcaggccaccctgaatgtgctgagagatggagctgctgacaaggtgaagacagccctgctgacagaggcccgggaggaggcccggcgggcctttgatggagagcggctgcggctgcagcaggagatcctggagctgaaggccgccaggaagcaggccgaggaggccctgagcaactgcatgcaggccgacaagaccaaggctgctgacctgcgggccgcctaccaggcccaccaggatgaggtgcaccgcatcaagcgggagtgtgagcgggacatccggcggctgatggatgagatcaagggcaaggacagagtcatcctggccctggagaaggagctgggcgtgcaggccggccagacccagaagctgctgctgcagaaggaggccctggatgagcagctggtgcaggtgaaggaggccgagcggcaccacagcagccccaagcgggagctgcccccaggcatcggggacatggtggagctgatgggcgtgcaggaccagcacatggatgaaagagatgtgcggcgcttccagctgaagattgctgagctgaacagcgtcatcaggaagctggaggacaggaacaccctgctggctgatgaaagaaatgagctgctgaagaggagccgggagacagaggtgcagctgaagcccctggtggagaagaacaagaggatgaacaagaagaatgaagacctgctgcagagcatccagaggatggaggagaagatcaagaacctgaccagagaaaatgtggagatgaaggagaagctgagcgcccaggccagcctgaagaggcacaccagcctgaatgacctgagcctgaccagagatgagcaggagattgagttcctgcggctgcaggtgctggagcagcagcacgtgattgatgacctgagcctggagcgggagcggctgctgcggagcaagaggcaccggggcaagagcctgaagccacccaagaagcacgtggtggagaccttcttcggctttgatgaggagagcgtggacagcgagaccctgtctgagaccagctacaacacagacagaacagacaggaccccagccaccccagaggaggacctggatgatgccacagcccgggaggaggccgacctgcgcttctgccagctgacccgggagtaccaggccctgcagagggcctatgccctgctgcaggagcaggtgggcggcaccctggatgctgagcgggaggcccggacccgggagcagctgcaggccgacctgctgcgctgccaggccaagattgaggacctggagaagctgctggtggagaagggccaggacagcaagtgggtggaggagaagcagctgctgatccgcaccaaccaggacctgctggagaagatctaccgcctggagatggaggagaaccagctgaagaatgagatgcaggatgccaaggaccagaatgagctgctggagttccgggtgctggagctggaggagcgggagcggcgcagccctgccttcaacctgcagatcaccaccttccctgagaaccacagcagcgccctgcagctgttctgccaccaggagggcgtgaaggatgtgaatgtgtctgagctgatgaagaagctggacatcctgggggacaatggaaacctgagaaatgaggagcaggtggccatcatccaggccggcaccgtgctggccctgtgtgagaagtggctgaagcagatcgagggcacagaggccgccctgacccagaagatgctggacctggagaaggagaaggacctcttcagccggcagaagggctacctggaggaggagctggactacaggaagcaggccctggaccaggcctacctgaagatccaggacctggaggccaccctgtacacagccctgcagcaggagcccggccggcgggccggggaggccctgtctgagggccagcgggaggacctgcaggccgctgtggagaaggtgcggcggcagatcctgcggcagagccgggagtttgacagccagatcctgcgggagaggatggagctgctgcagcaggcccagcagaggatccgggagctggaggacaagctggagttccagaagaggcacctgaaggagctggaggagaagttcctgttcctgttcctgttcttcagcctggccttcatcctgtggccctag

SEQ ID NO: 39759 - DNA, 1941 bp, Artificial Sequence
  derived and/or modified sequence
atgagcaagaagggccgcagcaagggggagaagccagagatggagacagatgctgtgcagatggccaatgaggagctgcgggccaagctgaccagcatccagatcgagttccagcaggagaagagcaagatggatgagatcaagggcaaggacagagtcatcctggccctggagaaggagctgggcgtgcaggccggccagacccagaagctgctgctgcagaaggaggccctggatgagcagctggtgcaggtgaaggaggccgagcggcaccacagcagccccaagcgggagctgcccccaggcattggagacatggtggagctgatgggcgtgcaggaccagcacatggatgaaagagatgtgcggcgcttccagctgaagattgctgagctgaacagcgtcatcaggaagctggaggacaggaacaccctgctggctgatgaaagaaatgagctgctgaagaggagccgggagacagaggtgcagctgaagcccctggtggagaagaacaagaggatgaacaagaagaatgaagacctgctgcagagcatccagaggatggaggagaagatcaagaacctgacccgggagaatgtggagatgaaggagaagctgagcgcccaggccagcctgaagaggcacaccagcctgaatgacctgagcctgaccagagatgagcaggagattgagttcctgcggctgcaggtgctggagcagcagcacgtgattgatgacctgagcctgaagcacgtggtggagaccttctttggatttgatgaggagagcgtggacagcgagaccctgtctgagaccagctacaacacagacagaacagacaggaccccagccaccccagaggaggacctggatgatgccacagcccgggaggaggccgacctgcgcttctgccagctgacccgggagtaccaggccctgcagagggcctatgccctgctgcaggagcaggtgggcggcaccctggatgctgagcgggaggcccggacccgggagcagctgcaggccgacctgctgcgctgccaggccaagattgaggacctggagaagctgctggtggagaagggccaggacagcaagtgggtggaggagaagcagctgctgatccgcaccaaccaggacctgctggagaagatctaccgcctggagatggaggagaaccagctgaagaatgagatgcaggatgccaaggaccagaatgagctgctggagttccgggtgctggagctggaggagcgggagaggaggagccctgccttcaacctgcagatcaccaccttccctgagaaccacagcagcgccctgcagctgttctgccaccaggagggcgtgaaggatgtgaatgtgtctgagctgatgaagaagctggacatcctgggggacaatggaaacctgagaaatgaggagcaggtggccatcatccaggccggcaccgtgctggccctgtgtgagaagtggctgaagcagatcgagggcacagaagctgccctgacccagaagatgctggacctggagaaggagaaggacctcttcagccggcagaagggctacctggaggaggagctggactacaggaagcaggccctggaccaggcctacctgaagatccaggacctggaggccaccctgtacacagccctgcagcaggagcctggaagaagagctggggaggccctgtctgagggccagcgggaggacctgcaggccgctgtggagaaggtgcggcggcagatcctgcggcagagccgggagtttgacagccagatcctgcgggagaggatggagctgctgcagcaggcccagcagaggatccgggagctggaggacaagctggagttccagaagaggcacctgaaggagctggaggagaagttcctgttcctgttcctgttcttcagcctggccttcatcctgtggccctag

SEQ ID NO: 39760 - DNA, 2496 bp, Artificial Sequence
  derived and/or modified sequence
atgagcaagaagggccggagcaagggcgagaagcccgagatggagaccgatgcagtgcagatggccaacgaagagttaagggctaagttgacaagcatacagattgagttccagcaggagaaatccaaagttggcaagttgcgtgagcgtctgcaggaggcaaaacttgagagagagcaagagcagcggcggcatacagcatacatctctgagctgaaggcgaagctgcacgaggaaaagaccaaagaattgcaagcgctaagagagggactcattcggcaacatgagcaggaggcagcaagaacagcaaaaatcaaggagggcgaactccaacgtctccaggccactcttaacgtgttgcgggatggggccgccgataaagtcaaaaccgcccttttaactgaagcacgagaagaagcccggagggcttttgatggtgagcgcttacggctgcagcaggaaatcctggaactcaaggctgccagaaagcaagcggaggaagcactgagcaactgtatgcaagccgataaaactaaggcggccgacctccgagcggcctatcaagcacatcaagatgaagtccaccgcattaaaagggagtgtgagagagatatcagacgcctcatggatgagataaaaggcaaggatcgcgtgatactcgctctggaaaaagaactcggcgtccaagcgggacagacccaaaaattgctccttcaaaaggaggccctcgatgaacagttggtccaggtcaaggaggcggaaagacaccattcttcgccaaaacgggagctgcctcccggaatcggtgacatggttgagctgatgggcgtacaggatcagcacatggacgagagggacgtgcggcgctttcaattaaaaatcgcagagctgaactccgtgattcgaaaactcgaggatcgtaacacgctgctagcggacgagcgtaacgaactcctcaaaagaagccgtgagactgaggtgcagctgaagccactggtggagaagaacaaaagaatgaataagaaaaatgaagacctcctgcagtccatccagagaatggaagaaaagattaaaaatctaacccgggagaacgttgaaatgaaagagaaactgtccgctcaagctagcctcaaacgacatacatcactgaatgacctgtccttgactagagatgaacaggaaatagagttcctacgtctgcaagtcttagagcagcagcacgtgatcgatgacctgtcactggaaagggagcggctgctgagatctaaacgccatcgggggaagtcactgaagcctccaaaaaagcatgtggttgagactttctttggatttgatgaggaatctgtagattcagagacactctcagaaacctcttacaacactgacagaactgatcgcacccccgccacccccgaagaagatcttgatgacgccaccgcaagagaggaagccgatctccgcttttgtcagctcactcgcgaatatcaggccctgcagcgggcttacgctctcttgcaagaacaggtgggcggaacactggatgccgagcgtgaggctcgcacacgggagcaactccaggctgatctcctccgttgccaagctaaaatcgaggacctggaaaagttgttggtagagaagggacaagactcgaagtgggtagaggagaagcagctcctgatcagaaccaatcaagacctgttggaaaagatttatagacttgagatggaggagaatcagttgaaaaacgagatgcaggatgctaaggaccagaatgaactgctggagttcagggtcctggagctggaagagcgcgagcgcaggtcccctgccttcaacttgcagatcaccaccttccctgaaaaccatagcagcgctctccaactgttttgccaccaggaaggtgttaaagatgttaacgtgtcagaacttatgaagaaactcgacatcctgggtgacaatgggaatctaagaaacgaagaacaggtggcgatcatacaagccggtacggtgctggccttgtgtgagaagtggctcaagcaaatagaggggaccgaggccgccctgacccagaagatgctcgatctggaaaaagagaaggatctgttttcacggcagaaggggtatttggaggaagaactggattaccggaagcaggctctcgaccaagcctacctgaaaatccaagacttggaagccaccttatacacggctctccagcaggagcccggtcggagagccggtgaagcgctctctgaggggcagagggaagacttgcaggccgccgtcgaaaaagtccggcgccaaattctgcggcagagtcgcgaattcgattcacaaattctcagagagcgcatggaactgctccagcaggcccagcaaagaattcgggagttggaagacaaactggagtttcagaaacgacacctgaaggagctggaggagaaattcctttttctgttcctattcttttcactggcctttatcctttggccttag

SEQ ID NO: 39761 - DNA, 1941 bp, Artificial Sequence
  derived and/or modified sequence
atgagcaagaagggccggagcaagggcgagaagcccgagatggagaccgatgctgtgcaaatggcgaatgaggaattgcgagctaaactaacctcgatccaaattgagttccaacaggagaagtctaagatggatgagattaagggtaaagaccgcgtgatcctggccttagagaaagaattgggcgtacaagccggacaaacccaaaagttgttactccagaaggaggcccttgatgagcagctggtgcaagttaaggaggccgagcggcatcattcaagcccaaagcgcgagctgcccccaggcatcggcgatatggtggagctgatgggagttcaggaccaacacatggatgagcgtgatgttaggagattccaacttaaaatagccgagctgaacagcgtcatacgtaagttggaagaccgcaataccctgctggctgatgaaagaaatgagttacttaagcgaagccgggaaactgaagtgcagttgaaacccctggtcgagaaaaataagagaatgaataagaagaatgaagatctacttcagtctattcagagaatggaggagaaaatcaaaaatctgaccagggagaacgtggaaatgaaagaaaagttatctgctcaggcctcactgaaacggcacactagtctaaacgatctctccctgaccagagacgagcaagagattgaatttcttagactgcaggtgcttgagcaacagcacgttattgacgacttgtccctcaagcacgtggtggagacattctttggctttgacgaggagtcagtggattcagagaccctcagcgaaacgtcctataacactgacaggactgacagaaccccagccacccctgaagaagacctcgacgatgcaaccgcccgagaggaagccgacctgcgattctgccagcttacgcgagaataccaggctctccagagagcctacgccctcctccaggaacaggtgggcggcaccctcgacgcggagcgagaggctcgcaccagagaacaactacaggcagatctgctccgctgccaggcaaaaatcgaagacctagagaagttgctcgtcgagaagggccaggattctaagtgggtggaggagaagcagctgctgattcggacaaaccaagacttgcttgagaagatttatagattagagatggaggagaaccagctgaagaatgagatgcaagatgctaaggatcagaacgagctccttgagtttagggtcttggaattagaagagcgggagcgccggtccccggcatttaacctgcagataacaacattcccagagaatcactcttccgctctgcaactgttctgtcaccaggaaggagtcaaggacgttaatgtgtccgagctgatgaagaagttggacatactaggtgacaacggtaatctgaggaatgaggaacaggttgccatcatccaagctgggactgttctggccctgtgtgagaagtggctgaaacagatcgagggtacggaggctgccctgactcagaaaatgcttgatttagagaaagagaaagatctcttttcccggcagaaaggctatctcgaagaagagcttgattaccgcaagcaggcactcgatcaggcctatctgaagatccaggacctggaagccactttgtacactgcccttcaacaggagccaggtcggcgggccggagaggctctaagtgaaggacaacgggaggatctgcaggccgcagtagagaaggtgagacgccagattctaagacagtctcgggaatttgacagccagattctgcgggaaaggatggaactgctgcagcaggcccaacagcgaatccgcgagctggaagataagcttgagtttcaaaagaggcacctgaaggagctagaggagaaattcctgttcttgtttctcttcttttcccttgcatttattctctggccctag

SEQ ID NO: 39762 - DNA, 2496 bp, Artificial Sequence
  derived and/or modified sequence
atgtccaagaagggcaggtcaaagggcgaaaaacctgaaatggagactgacgccgtgcaaatggcaaatgaagagctgagggctaaactaacaagcattcagatcgagtttcagcaggaaaagagtaaggtgggcaagcttcgagaacggctccaggaggcaaagctggaacgagaacaggaacagcggagacatacagcctatatctccgaactaaaagctaaattacatgaggagaagaccaaagaactccaggccctccgggagggcttaattcgacaacacgagcaggaggctgccaggactgccaaaatcaaagaaggggaactccaaaggctgcaggccacattgaatgtcctccgggatggagcagccgataaagtgaaaaccgcactgctgaccgaggctagagaggaagctagacgggctttcgacggtgagaggctgagactgcagcaggaaattcttgagcttaaagctgcccgaaagcaggcagaggaggcactgagcaattgcatgcaagcggacaaaacaaaagctgctgacctgagagccgcttaccaagctcaccaggatgaagtgcatcggatcaaacgggagtgtgagcgcgacattcgtagattgatggatgagatcaaggggaaagatagagttatcttagccttagaaaaagagttaggtgttcaggcaggccagacacagaagctgctgctgcagaaagaggcgttggacgaacagttagtacaagtgaaggaagccgaaagacaccacagctctccgaagagagaacttccacccggtataggggatatggtagagctgatgggagtgcaagatcagcacatggacgaaagagatgtcaggagatttcagctgaaaatcgcagagttaaactccgtgatccggaaattggaagatcgcaacactcttctggctgatgaacgtaacgagctgctgaagaggtctcgcgaaactgaagttcagttaaagccactcgtggagaagaacaaaagaatgaacaagaagaatgaggacctgttacagtccattcagcggatggaggagaagatcaagaatctgacaagagagaacgtagaaatgaaagagaaactgtcagcccaggcttccctgaaacgtcatacttcactcaacgaccttagcctgacccgcgacgaacaggagatcgagttcctgcggttgcaggttctggagcaacagcacgtgatcgacgatctgagtctcgagcgagaaagactactgaggtccaagcgccacagagggaaatccctcaaaccacctaaaaaacacgtcgtggagacatttttcggatttgacgaagagtcggtcgattccgagactttaagtgagacatcttacaataccgatcggactgaccggacacccgcaacccctgaagaagacctagatgatgctaccgctcgtgaggaagctgacctgcgtttttgccagcttacaagagagtaccaggccttgcagcgggcttatgcactattgcaggagcaggtgggcggaactttggatgctgagcgtgaggcgaggaccagggaacagttacaggcagatctgctccgatgtcaggcgaaaattgaagatctggagaaacttctcgtggagaagggccaggactccaaatgggttgaggagaaacagctgctgattaggaccaaccaagatctgctagagaagatttatcggttggaaatggaggaaaaccaattgaagaatgagatgcaagacgccaaggatcagaacgagctcctcgagttcagagtgttggaattggaggagagagaacgcaggtctcccgcattcaatctgcagattaccacatttcccgagaaccatagttcagctttacagttgttttgccatcaagagggcgtaaaggatgtgaacgtaagtgaactgatgaagaaactggacattctcggcgacaatgggaatctccgcaatgaggagcaggtggcaataatacaggcgggtacggtgcttgcactttgcgagaaatggttaaaacagatcgaaggaacggaggccgcactgactcaaaaaatgctcgacctggaaaaggaaaaagacttgttcagtcggcagaagggctacttagaggaagagctggattatagaaagcaggccctggaccaggcatatctaaagatccaagatttggaagccactctctataccgcactacaacaggagcccggacggagggctggcgaagccttgtccgaaggccagcgggaggacctccaggctgcagttgaaaaagtgcgacgtcaaatcctccggcagagccgggagttcgatagccagatcctgcgggaacggatggaactgctgcaacaggcacagcagaggattagagaactcgaggacaagttggagttccagaaaagacaccttaaggagcttgaggaaaaatttctgttcctgtttctttttttcagcctggccttcatcctgtggccttag

SEQ ID NO: 39763 - DNA, 1941 bp, Artificial Sequence
  derived and/or modified sequence
atgtcaaaaaagggcaggtcaaagggggaaaagcccgaaatggaaacagatgctgtgcagatggccaacgaggaattgagggccaaactgacgtccattcagatcgagttccagcaggaaaaaagtaagatggatgagattaagggaaaagatagggtgatactcgcactcgagaaagaactgggggtgcaggccggacagacacagaaactattattgcagaaggaggcccttgatgagcagctagtgcaggtcaaagaagccgagcgacaccattcaagccccaagcgcgaacttccgccaggcattggggacatggtcgagttgatgggagtccaggatcagcatatggatgaaagagatgtccggcgattccaactcaaaatagcagagctgaactccgtcattaggaaactagaagacaggaataccctcctggcggacgagcgtaatgaactgctcaaacgtagcagagagaccgaggtacaattgaagcctctcgtagaaaaaaataagagaatgaacaagaaaaacgaggacctgctgcagagcattcagcggatggaggaaaaaattaagaatctgacccgcgagaatgttgagatgaaggagaagctttccgcacaagctagcctcaaaaggcacaccagtctgaacgacctctcccttaccagagacgagcaggaaattgagttcctgcgtttgcaggtcttagagcagcaacatgtgattgacgacctttcgctcaaacacgtggtcgagacctttttcggctttgacgaagagagtgtggatagcgagaccctgtctgaaactagttacaatacagatagaaccgatcgtacccccgctacccccgaggaagacctggatgacgccactgccagagaggaggctgatcttcgattttgccagcttaccagagaataccaggccctacagagagcctatgccctgctgcaggaacaagtaggcggtacattagatgctgaacgcgaggcccgaacaagggagcagctccaagctgacttattacggtgccaggccaagattgaagaccttgagaagctacttgtcgaaaagggccaggatagcaaatgggtggaagagaaacagctcctgatccgcactaaccaggatctcctcgaaaaaatttatcgcctggaaatggaggaaaaccaactcaaaaacgagatgcaggacgctaaggatcagaacgaactactggaatttagagtcctggaattagaggagcgagagaggcgctcacccgctttcaacctccaaataacaactttccccgaaaaccacagcagcgccctgcagcttttctgtcaccaggaaggagtgaaagatgtaaatgtctccgaactgatgaagaaactggatattctgggagataacgggaatctgcggaatgaggaacaggtagccattatacaggccggtaccgttctggccttgtgtgaaaagtggttgaagcagatagagggcactgaggctgcccttacccaaaagatgttggatctggaaaaggagaaggacctgttttctagacaaaaggggtacttggaggaagaactggactataggaagcaagcacttgaccaagcatatctgaagatccaggatcttgaagccaccttatatacagcattgcagcaggaaccaggacgacgagctggggaggctctctctgagggtcagagggaagatctccaggccgcagtggaaaaagtgcggagacagatcttacggcagagtcgggaattcgatagccaaatcctgcgcgaacgcatggagctcctgcagcaggcacaacagaggatccgggagcttgaagacaagttggagttccagaagcgccatcttaaggagttggaagagaagttcctgttcttatttctgtttttttctctggcttttatactttggccttag

SEQ ID NO: 39764 - protein, 472 aa, Artificial Sequence
  derived and/or modified sequence
MAGPGWGPPRLDGFILTERLGSGTYATVYKAYAKKDTREVVAIKCVAKKSLNKASVENLLTEIEILKGIRHPHIVQLKDFQWDSDNIYLIMEFCAGGDLSRFIHTRRILPEKVARVFMQQLASALQFLHERNISHLDLKPQNILLSSLEKPHLKLADFGFAQHMSPWDEKHVLRGSPLYMAPEMVCQRQYDARVDLWSMGVILYEALFGQPPFASRSFSELEEKIRSNRVIELPLRPLLSRDCRDLLQRLLERDPSRRISFQDFFAHPWVDLEHMPSGESLGRATALVVQAVKKDQEGDSAAALSLYCKALDFFVPALHYEVDAQRKEAIKAKVGQYVSRAEELKAIVSSSNQALLRQGTSARDLLREMARDKPRLLAALEVASAAMAKEEAAGGEQDALDLYQHSLGELLLLLAAEPPGRRRELLHTEVQNLMARAEYLKEQVKMRESRWEADTLDKEGLSESVRSSCTLQ

SEQ ID NO: 39765 - DNA, 1419 bp, Artificial Sequence
  derived and/or modified sequence
atggccggccccggctggggcccccccagactggacggcttcatcctgaccgagagactgggcagcggcacctacgccaccgtgtacaaggcctacgccaagaaggacaccagagaggtggtggccatcaagtgcgtggccaagaagagcctgaacaaggccagcgtggagaacctgctgaccgagatcgagatcctgaagggcatcagacacccccacatcgtgcagctgaaggacttccagtgggacagcgacaacatctacctgatcatggagttctgcgccggcggcgacctgagcagattcatccacaccagaagaatcctgcccgagaaggtggccagagtgttcatgcagcagctggccagcgccctgcagttcctgcacgagagaaacatcagccacctggacctgaagccccagaacatcctgctgagcagcctggagaagccccacctgaagctggccgacttcggcttcgcccagcacatgagcccctgggacgagaagcacgtgctgagaggcagccccctgtacatggcccccgagatggtgtgccagagacagtacgacgccagagtggacctgtggagcatgggcgtgatcctgtacgaggccctgttcggccagccccccttcgccagcagaagcttcagcgagctggaggagaagatcagaagcaacagagtgatcgagctgcccctgagacccctgctgagcagagactgcagagacctgctgcagagactgctggagagagaccccagcagaagaatcagcttccaggacttcttcgcccacccctgggtggacctggagcacatgcccagcggcgagagcctgggcagagccaccgccctggtggtgcaggccgtgaagaaggaccaggagggcgacagcgccgccgccctgagcctgtactgcaaggccctggacttcttcgtgcccgccctgcactacgaggtggacgcccagagaaaggaggccatcaaggccaaggtgggccagtacgtgagcagagccgaggagctgaaggccatcgtgagcagcagcaaccaggccctgctgagacagggcaccagcgccagagacctgctgagagagatggccagagacaagcccagactgctggccgccctggaggtggccagcgccgccatggccaaggaggaggccgccggcggcgagcaggacgccctggacctgtaccagcacagcctgggcgagctgctgctgctgctggccgccgagccccccggcagaagaagagagctgctgcacaccgaggtgcagaacctgatggccagagccgagtacctgaaggagcaggtgaagatgagagagagcagatgggaggccgacaccctggacaaggagggcctgagcgagagcgtgagaagcagctgcaccctgcagtag

SEQ ID NO: 39766 - DNA, 1419 bp, Artificial Sequence
  derived and/or modified sequence
atggccggtccaggttggggtccacctcgcttggatggtttcatcttgacggaaagactggggtccgggacttatgctacggtgtacaaggcctacgcgaaaaaggacaccagggaagtggtggcgatcaagtgcgttgccaagaagtccctgaataaagccagcgttgagaatcttctgacagagatcgagattcttaagggaattcgccatccacacattgttcaactgaaagacttccagtgggactcagataacatttacttgatcatggagttctgtgcagggggggacttaagcagatttatccatacaaggaggattctacctgagaaggtcgctagagtgttcatgcagcagctggctagcgcgctgcaatttttgcatgaacggaacatcagccatctggacctgaagcctcagaatatcttactatctagtctcgagaaaccccacctgaaacttgccgatttcggattcgcccaacatatgtctccatgggacgagaaacacgtcctacgcggcagcccactgtacatggcgccagaaatggtgtgccaacgtcagtatgacgctcgcgtcgacttatggagcatgggcgtgattctgtacgaggccctttttgggcaaccaccgttcgccagccggtctttctcagaactggaggaaaagattcgaagtaacagggtgattgaactgccactcaggcctcttctgtctcgggactgccgcgacttactccaacgcctactggaacgcgacccgtcccggaggatatccttccaggactttttcgcccacccttgggttgatctggagcacatgccttctggggaatctctcggcagagcaacggctttagtggtccaagcagtcaaaaaggaccaagagggagactctgctgcagcactaagcctgtattgtaaggccttagatttctttgtgccagccctgcattacgaggtggatgcccagagaaaggaggcaattaaggcaaaggttggccagtacgtgagcagggcagaagaactgaaagccatagtttcctcctctaaccaagcattgctgaggcaaggcacatccgcacgcgatctgctgcgcgagatggcccgggataaaccacgcctcctggccgcccttgaggtggcgagcgctgccatggctaaagaagaggcagcaggaggggaacaggatgctctcgatctgtaccagcacagcctcggcgagcttctcctgcttttagccgctgaacctccagggcggagacgcgaacttttgcatacggaggtccagaacttgatggcccgcgccgaatacttgaaggaacaggtcaagatgagagaatcgaggtgggaggctgacactctggacaaagaaggtctgagtgaaagcgtgcgctcctcttgtacactacagtag

SEQ ID NO: 39767 - DNA, 1419 bp, Artificial Sequence
  derived and/or modified sequence
atggccggccctggctggggccccccccggctggatggcttcatcctgacagagcggctgggcagcggcacctacgccaccgtgtacaaggcctatgccaagaaggacacccgggaggtggtggccatcaagtgtgtggccaagaagagcctgaacaaggcctctgtggagaacctgctgacagaaattgagatcctgaagggcatccgccacccccacatcgtgcagctgaaggacttccagtgggacagcgacaacatctacctgatcatggagttctgtgccggcggggacctgagccgcttcatccacacccggcgcatcctgcctgagaaggtggcccgggtcttcatgcagcagctggccagcgccctgcagttcctgcatgaaagaaacatcagccacctggacctgaagccccagaacatcctgctgagcagcctggagaagccccacctgaagctggccgactttggatttgcccagcacatgagcccctgggatgagaagcacgtgctgcggggcagccccctgtacatggcccctgagatggtgtgccagaggcagtatgatgcccgggtggacctgtggagcatgggcgtcatcctgtatgaggccctgtttggccagcccccatttgccagccgctccttcagcgagctggaggagaagatccgcagcaacagagtgattgagctgcccctgcggcccctgctgagccgggactgccgggacctgctgcagaggctgctggagcgggaccccagccgccgcatctccttccaggacttctttgcccacccctgggtggacctggagcacatgcccagcggggagagcctgggccgggccacagccctggtggtgcaggccgtgaagaaggaccaggagggggacagcgctgctgccctgagcctgtactgcaaggccctggacttctttgtgcctgccctgcactatgaggtggatgcccagaggaaggaggccatcaaggccaaggtgggccagtatgtgtccagagctgaggagctgaaggccatcgtgagcagcagcaaccaggccctgctgcggcagggcaccagcgcccgggacctgctgcgggagatggcccgggacaagccccggctgctggccgccctggaggtggccagcgctgccatggccaaggaggaggccgccggcggggagcaggatgccctggacctgtaccagcacagcctgggggagctgctgctgctgctggccgctgagcccccaggaagaagaagagagctgctgcacacagaggtgcagaacctgatggcccgggcagagtacctgaaggagcaggtgaagatgagggagagccgctgggaggccgacaccctggacaaggagggcctgtctgagagcgtgcgcagcagctgcaccctgcagtag

SEQ ID NO: 39768 - DNA, 1419 bp, Artificial Sequence
  derived and/or modified sequence
atggccggccccggctggggccccccccggctggacggcttcatcctgaccgagcggctgggttcaggtacttacgccacggtgtataaggcctatgccaaaaaggacacgagagaagtcgtggccattaaatgcgtggcgaagaagagcctgaacaaggcttccgtggaaaatctgctgaccgaaatcgagattctgaaaggcattcgacacccgcatattgtacagttaaaggactttcagtgggattccgataatatttatcttattatggaattctgtgctggtggagacctcagccggttcatacacaccagacggatcctccctgaaaaagtggcccgggtgtttatgcagcagctcgcgagtgccctgcagtttcttcacgaacgcaacattagccatctggacctgaagccacaaaacatcctgctttcctctctcgaaaagccccacttgaagctagccgatttcggattcgcacagcacatgagtccttgggatgaaaagcacgtgctgcgaggatccccactctatatggctcctgaaatggtgtgccagcggcaatatgacgcaagagttgatctttggtccatgggggtaatcctgtatgaggccctctttgggcagcctccttttgctagtcgatccttcagcgagcttgaagagaaaattaggtccaacagggtgatcgagctaccacttcggcccctgctatcgagggactgcagagatcttctgcagcggctacttgagcgggatcctagtcggcgcatctccttccaggacttcttcgcgcatccgtgggttgacttggagcatatgccctccggagaatcacttggacgagcaactgccctagtagtccaggctgtaaagaaggatcaggaaggggattccgcagcggccctctccttgtactgcaaagccctggacttttttgtgccagcactgcactatgaagtggacgcgcaacgaaaagaagcgatcaaggcgaaggtggggcaatacgtctccagggcagaggagctgaaagctatcgtttccagcagcaaccaagccctgttgagacagggaacttccgccagagatcttcttcgggagatggcacgcgacaagcccagactgctcgcggccctggaggtggcatcagccgctatggcaaaagaagaggccgcaggcggcgagcaggatgcactggatctttaccaacattccctgggtgagctgctgctgctgcttgccgcggaacctcccggtcgtcggcgcgagctgttacacacagaagttcagaacctaatggctcgcgctgagtacctgaaagagcaagtgaagatgcgagagagtcggtgggaagctgatacactggacaaagaaggtctgagcgagtcagtgcggtccagttgcacactacaatag

SEQ ID NO: 39769 - DNA, 1419 bp, Artificial Sequence
  derived and/or modified sequence
atggccggtcccggatggggaccgccaagactggacggctttattctgaccgagcggctgggttccggaacctacgcgacagtttacaaagcctatgcaaagaaagatactagggaggtggtagctatcaaatgcgtggcaaaaaagtctttgaacaaagcctcggtcgagaatttgcttactgagattgagatactgaaagggattcgacacccgcacattgtccaacttaaggatttccagtgggatagtgacaatatctacttaatcatggagttctgtgctgggggtgacctctctcgcttcatacacacacgacgaatattaccagagaaggtggcacgggtatttatgcagcagctggcctcagcactacagtttctgcacgagagaaatatctctcacctcgaccttaagccacaaaacatcctcctgtcaagcttagagaagcctcatctcaagctggccgactttggcttcgctcagcatatgtctccctgggatgagaaacacgtgctccggggatcgccgttgtatatggctcccgagatggtgtgccagcggcagtacgatgcgagagtcgacctctggagcatgggagttattctctacgaggcactatttggccagcccccatttgccagccgcagctttagcgagctcgaagagaagattaggagcaatcgagtcatcgaactgccccttcggcctctgttgtcaagagattgtagagacttgttgcagcgtctgctagagagagatccatctcgacgaataagtttccaggatttcttcgctcacccatgggtcgatctggaacacatgccttccggggagagcctggggcgagctacagcactggtggttcaggctgtgaagaaggaccaggagggagattctgccgcagccctgagtctttattgcaaagccttagattttttcgtgccagctctgcattacgaagtggacgcacagcgcaaggaagccattaaagctaaggttgggcaatatgtgagccgcgcagaggaactgaaggctattgtgtcaagcagtaaccaggcactccttagacaaggtacatccgccagagatcttttgcgggaaatggcgagagataagcctcggcttctggcagcactggaggtcgcatcagccgctatggcaaaagaggaggctgcgggaggagagcaagacgcacttgacctgtaccagcatagcctcggggaactgctcctgctgttggctgctgaaccacctggcagacgccgagagctcctccatacggaagtgcagaatctcatggctagggctgaatatctcaaagaacaagtcaaaatgagggagtcaagatgggaggccgatacccttgacaaggaaggtcttagcgaatccgtgagatcttcatgtacattgcagtag

SEQ ID NO: 39770 - DNA, 2635 bp, Artificial Sequence
  derived and/or modified sequence
cggcgctgggggcagcgtggagccacccagtgctcggcccgccccgcaacccgccggaaccgccgcccgcagcgaggaagcgcccgcgcgggcgcaggcggccggaatggcggggcccggctggggtcccccgcgcctggacggcttcatcctcaccgagcgcctgggcagcggcacgtacgccacggtgtacaaggcctacgccaagaaggacactcgtgaagtggtagccataaagtgtgtagccaagaaaagtctgaacaaggcatcggtggagaacctcctcacggagattgagatcctcaagggcattcgacatccccacattgtgcagctgaaagactttcagtgggacagtgacaatatctacctcatcatggagttttgcgcagggggcgacctgtctcgcttcatccatacccgcaggattctgcctgagaaggtggcgcgtgtcttcatgcagcaattagctagcgccctgcaattcctgcatgaacggaatatctctcacctggatctgaagccacagaacattctactgagctccttggagaagccccacctaaaactggcagactttggtttcgcacaacacatgtccccgtgggatgagaagcacgtgctccgtggctcccccctctacatggcccccgagatggtgtgccagcggcagtatgacgcccgcgtggacctctggtccatgggggtcatcctgtatgaagccctcttcgggcagcccccctttgcctccaggtcgttctcggagctggaagagaagatccgtagcaaccgggtcatcgagctccccttgcggcccctgctctcccgagactgccgggacctactgcagcggctcctggagcgggaccccagccgtcgcatctccttccaggacttttttgcgcacccctgggtggacctggagcacatgcccagtggggagagtctggggcgagcaaccgccctggtggtgcaggctgtgaagaaagaccaggagggggattcagcagctgccttatcactctactgcaaggctctggacttctttgtacctgccctgcactatgaagtggatgcccagcggaaggaggcaattaaggcaaaggtggggcagtacgtgtcccgggctgaggagctcaaggccatcgtctcctcttccaatcaggccctgctgaggcaggggacctctgcccgagacctgctcagagagatggcccgggacaagccacgcctcctagctgccctggaagtggcttcagctgccatggccaaggaggaggccgccggcggggagcaggatgccctggacctgtaccagcacagcctgggggagctactgctgttgctggcagcggagcccccgggccggaggcgggagctgcttcacactgaggttcagaacctcatggcccgagctgaatacttgaaggagcaggtcaagatgagggaatctcgctgggaagctgacaccctggacaaagagggactgtcggaatctgttcgtagctcttgcacccttcagtgaccctagaagaatgattggacagatgtgagccatctggagcagaggggcactaacccaggctgacgccaagaatgaagtggcccactgcagccctggcgagcaggcttcttggatggacagtgctgagacccccatatcccagagtccccagcctccctcaggttactctgcaccccacagatggtttgatggctgtgctgtatactggaggggagggcaggactctgggagaacagcacttctttcatgagacctttgttactcggtggttactgggtcctgtgcctgtccgttttggggcatgcagccctctatcatttttggctccgagaagagggcaaggggcccccgcagggtacttctgtgcttgccctcgccctgccagcaggcagctgtgcccctggcctgcccttcccgggaccccttattccaactcagctcctctttgcactggaatggggcactccaacacccctcagggaccaccctccccacagtatgcactcagccccacagaacccaccagtctttctgggaactcacacctgcccgccatcttggtactttaggttaatccctcaagcatgaaagctggatcttttggggtttaagaagcccaagccttgttcctgccctggcctagggagcactcaggagggttccttggtcctcatctctcccacctccgttccctctgggccccacactagccacagcgcgggccttgtgctggagtttgagcctgggacagggagagggaggcttggagacagtctgacccagtgccctctaggccacccacttctaggcctgccctgccgccgtggagccctgggcaagctctttcccctttctgggcctgggtctccccatctcttcaatggggctgataccttcacagcccacagcatgggcacttatgaggacaaagtgaatttaacctggaaaagaatgtatttgagagtttcttttaaataatcagcgggtgttggtgatttgtagcccttctgcccttaaatgcttccttgggcaagagctgtctgtcctccctgcaggaggctgagtgtaaagagtatcattcattgtttctctattaaattattttctcta

SEQ ID NO: 39771 - protein, 172 aa, Artificial Sequence
  derived and/or modified sequence
MSAAEAGGVFHRARGRTLAAFPAEKESEWKGPFYFILGADPQFGLIKAWSTGDCDNGGDEWEQEIRLTEQAVQAINKLNPKPKFFVLCGDLIHAMPGVKVVFSGHYHRNAGGTYQNLDMVVSSAIGCQLGRDPHGLRVVVVTAEKIVHRYYSLDELSEKGIEDDLMDLIKKK

SEQ ID NO: 39772 - DNA, 519 bp, Artificial Sequence
  derived and/or modified sequence
atgagcgccgccgaggccggcggcgtgttccacagagccagaggcagaaccctggccgccttccccgccgagaaggagagcgagtggaagggccccttctacttcatcctgggcgccgacccccagttcggcctgatcaaggcctggagcaccggcgactgcgacaacggcggcgacgagtgggagcaggagatcagactgaccgagcaggccgtgcaggccatcaacaagctgaaccccaagcccaagttcttcgtgctgtgcggcgacctgatccacgccatgcccggcgtgaaggtggtgttcagcggccactaccacagaaacgccggcggcacctaccagaacctggacatggtggtgagcagcgccatcggctgccagctgggcagagacccccacggcctgagagtggtggtggtgaccgccgagaagatcgtgcacagatactacagcctggacgagctgagcgagaagggcatcgaggacgacctgatggacctgatcaagaagaagtag

SEQ ID NO: 39773 - DNA, 519 bp, Artificial Sequence
  derived and/or modified sequence
atgagtgctgcggaagcaggaggagtgtttcaccgcgccaggggaaggacactcgcagcctttcctgcggaaaaagagtcagagtggaagggcccgttttattttatcctaggtgcagatccccaattcgggctcattaaggcgtggtctacaggcgactgcgacaacgggggagacgagtgggagcaggagatcaggctcactgaacaggccgtgcaagccattaataagctgaatcccaaacccaaattttttgtgttgtgtggggacttgatccacgcaatgcctggggtgaaggtggttttctccggtcattatcatcgcaatgcggggggcacgtatcaaaatctcgacatggttgtcagttccgccataggctgtcagttggggagagatcctcatggcttgcgcgtggtggtggtgacagccgaaaagatcgttcaccggtactactctctggacgagctgtctgagaaggggattgaggacgatttaatggatcttattaagaaaaagtag

SEQ ID NO: 39774 - DNA, 519 bp, Artificial Sequence
  derived and/or modified sequence
atgtctgctgctgaggccggcggcgtcttccaccgggcccggggccgcaccctggccgccttccctgctgagaaggagagcgagtggaagggccccttctacttcatcctgggcgctgacccccagtttggcctcatcaaggcctggagcactggagactgtgacaatggaggagatgagtgggagcaggagatccggctgacagagcaggccgtgcaggccatcaacaagctgaaccccaagcccaagttctttgtgctgtgtggggacctgattcatgccatgcctggggtgaaggtggtgttttctggccactaccacagaaatgctgggggcacctaccagaacctggacatggtggtgtcctctgccatcggctgccagctgggccgggacccccacggcctgcgggtggtggtggtgacagctgagaagatcgtgcaccgctactacagcctggatgagctgtctgagaagggcattgaagatgacctgatggacctgatcaagaagaagtag

SEQ ID NO: 39775 - DNA, 519 bp, Artificial Sequence
  derived and/or modified sequence
atgagcgccgccgaggccggcggcgtgttccaccgggcccggggcagaactctcgcagcatttccggctgaaaaggaatccgagtggaagggccccttttactttatcctgggcgccgacccgcaattcggactgatcaaggcttggtccacaggggattgtgacaacggaggtgacgaatgggagcaggagatccggttgactgagcaggctgtccaagccatcaacaagctgaatccgaaaccaaaattctttgtgctgtgcggtgatctaattcacgcaatgccaggcgttaaggtggtgttctcggggcactaccacagaaatgctgggggcacctaccagaaccttgacatggtagtgagctccgccatcggctgccagctcggtagagatcctcatggtctgagggttgtggtagttacagcagagaagatcgtgcaccgttactacagtctggatgaactgtccgagaaaggtatcgaagatgatctgatggacttgatcaaaaaaaaatag

SEQ ID NO: 39776 - DNA, 519 bp, Artificial Sequence
  derived and/or modified sequence
atgtcagccgcagaagcaggaggcgtgttccacagagctcgcggtcgcactcttgcagcctttccagcagagaaagaatccgagtggaagggacccttctactttatcctcggtgcagatccgcaatttggcttaatcaaggcgtggtcgacgggggactgcgataatggcggagatgaatgggaacaggagattaggttaacagagcaagccgttcaggccattaacaagctcaatcctaagcctaaattctttgtgctgtgtggcgatttgattcacgcgatgccgggagtgaaagtggtgttctccgggcactaccatagaaatgctggaggcacttaccagaacctggatatggtggtaagttcggcgattggatgccagctgggcagagatcctcacggattgagggtggtagtggtcaccgccgaaaagatcgtccataggtattattcgcttgatgagctgagcgagaaggggatcgaggacgacctcatggacctgattaagaagaagtag

SEQ ID NO: 39777 - DNA, 1993 bp, Artificial Sequence
  derived and/or modified sequence
agcggttgttctgtgtgaagtcgcgcggcttccacccacgcagtgttctaagtgaaggccagaaactcgctcgccatgtcggctgcagaggcggggggtgttttccacagagccaggggcaggaccctggccgcgtttcccgcagaaaaggaaagcgaatggaaaggcccattctacttcatcctgggcgcagacccacagtttgggctgatcaaggcctggtccactggggactgtgacaatggcggtgacgaatgggaacaggagatccgtctaactgagcaagccgtccaggccatcaacaagctgaaccccaaacccaaattcttcgttctgtgcggcgacctcatccacgccatgccaggtgtcaaagtcgtgttctcaggccactaccacaggaatgccgggggtacctaccagaacctcgacatggtggtgtcatctgccattggatgccagctgggcagagacccccacgggctccgagtcgtggtggtcaccgccgagaaaattgttcaccgatactacagtctagatgagctgagtgagaaaggaatagaagacgatctcatggatttgatcaagaaaaaatgacgctccttcccgttcccgttcacttttcacttgcactatttttttattttgccagaaacagcagctgcacacaacctcttgctgaaatataaaaatagcccaggcaggtttgtgaatttatgtccttttgcataaatcagagagctggggccctgtcctgaattatattcaaaatagaactgcatttcctttaaaatggagcgaatgatcctggaaatcagtttttaaaatattagactatctctgcatggatgtttgaataaattctcctaatgctgtgtttctcaactccacttttgaattggattgtattctggttagcatatggtcaaagtctgcctatcgacctcaattccaatctgacagccaagtatgatctttgataattccttaaacaaactacacctgattgtattaaattgtggtcacgattcccaaaacgctaggcaaaacaaagttcatctcctttcctttccagcggaacgaacagctgtctcccttgttgtgagagccatgcagacttattttgacaaggagccaagtaggcaccatttactgttcaattctgagacttctgatgataggaacagaatgcagttgatacagctcggagcttaaatttgccttcctgggtgcctagaaaagtcacctttgcacataaattggccatttctgaaaatctcctccaagagactgaaaccaaagctctaaaacgccgcttcttcagtctctggggagcacgttgagttggttcacatccacattctggctgtgtagccactccacagatgggtggtctcttgggatcagaatgcccctccactcatgagactcttcattttgtccactttgacaggaaaagtgggaatgtatgcagagctctcaaaagaaacaaaaaaggccaaaacggtgccttcagccacatcctctgaattggccctgacttggactaaatgcactaatgcaaaatcccttgacaaaagcgcataggttatttcaaaccagcattgttttttatgtaacctgttttaccgcatcttctcagcagcttctgaccactgctcaattttctcctttacagccattgttctggtggacaaataacctaggtactccaaatcctggcaggaaaaatatacagcattatgaaacagcactcagtaatcctaaaatgatttccaaagctggttacacatgacctgcaaagtctattaaattaaaagactttctcattacagagtttagtcaacgtagcaaaaccatgggaaattaaatggaaagataattaaatatgtaaattcataaggaacaaaagacgagaagttaattatacaataggctggtgacaccagagttcattgttatgtgccacaagaaaattaaattttttaaaaaacta

SEQ ID NO: 39778 - protein, 165 aa, Artificial Sequence
  derived and/or modified sequence
LAWRPGERGAPASRPRLALLLLLLLLPLPSGAWYKHVASPRYHTVGRAAGLLMGLRRSPYLWRRALRAAAGPLARDTLSPEPAAREAPLLLPSWVQELWETRRRSSQAGIPVRAPRSPRAPEPALEPESLDFSGAGQRLRRDVSRPAVDPAANRLGLPCLAPGPF

SEQ ID NO: 39779 - DNA, 498 bp, Artificial Sequence
  derived and/or modified sequence
ctggcctggagacccggcgagagaggcgcccccgccagcagacccagactggccctgctgctgctgctgctgctgctgcccctgcccagcggcgcctggtacaagcacgtggccagccccagataccacaccgtgggcagagccgccggcctgctgatgggcctgagaagaagcccctacctgtggagaagagccctgagagccgccgccggccccctggccagagacaccctgagccccgagcccgccgccagagaggcccccctgctgctgcccagctgggtgcaggagctgtgggagaccagaagaagaagcagccaggccggcatccccgtgagagcccccagaagccccagagcccccgagcccgccctggagcccgagagcctggacttcagcggcgccggccagagactgagaagagacgtgagcagacccgccgtggaccccgccgccaacagactgggcctgccctgcctggcccccggccccttctag

SEQ ID NO: 39780 - DNA, 342 bp, Artificial Sequence
  derived and/or modified sequence
atgcacaccgtgccctggggcgtggacttcgccctgatcgccatgaagaacttcatcagccagtggagcagcttcttcagaagcggcatgggcaagagccagaccggctacctgcccagagtgcccagagagcagcccttcgccgccggcctgtggggcctggccgccgccctgagccacctggccgtgaacgccttcagcctgctgtgcccccccctgcccaagaccagctgcagcctgaacccccacggcgacgtggagagcagaaaggtgcacgccaccgtggagaacgtgtacatcagcgccctgaacctgccctgggtgagagtgaagtggtgctag

SEQ ID NO: 39781 - DNA, 498 bp, Artificial Sequence
  derived and/or modified sequence
ctggcatggcgacctggagaaagaggggcccccgcttcaaggccgagactggccctgctcttactgcttttgctgttgcctctgccctccggagcttggtataaacatgtagcttccccgcggtatcatacagttggccgggctgcagggctcttgatgggcttgcgccgctctccttatctgtggcggagagctctgcgtgccgctgcggggcccttggcgagagatacactgagtcctgagcccgctgcgcgcgaggcaccattgctgctgccctcctgggttcaggagctgtgggagacccgccgacgttctagtcaggccggcatccccgttcgtgccccgcggtcaccaagggcgcccgagcccgccctggagcctgaatccctcgacttctccggggccggccagcgcctgagacgtgatgtttccaggcctgcagtcgacccagctgctaataggctgggcctgccgtgcctggcccccggcccattttag

SEQ ID NO: 39782 - DNA, 498 bp, Artificial Sequence
  derived and/or modified sequence
ctggcctggaggcctggagagcggggggccccagccagccggccccggctggccctgctgctgctgctgctgctgctgcccctgcccagcggggcctggtacaagcacgtggccagcccccgctaccacacagtgggccgggctgctggcctgctgatgggcctgcggcgcagcccctacctgtggaggcgggccctgcgggctgctgctggccccctggcccgggacaccctgagccctgagcctgctgcccgggaggcccccctgctgctgcccagctgggtgcaggagctgtgggagaccaggagaagaagcagccaggccggcatccctgtgcgggcccccaggagcccccgggcccctgagcccgccctggagcctgagagcctggacttctctggagctggccagaggctgcggagagatgtgtccaggcctgctgtggaccctgctgccaaccggctgggcctgccctgcctggcccctggccccttctag

SEQ ID NO: 39783 - DNA, 498 bp, Artificial Sequence
  derived and/or modified sequence
ctggcctggcggcccggcgagcggggcgcccccgccagccggccccggctggccctactactactgctccttctgctccctctcccgtccggcgcttggtacaaacacgtagcgagtccgcgataccacactgtgggcagagccgcaggccttctgatggggctgcgccgatcaccttatttgtggcgccgtgctctaagggctgccgccggacctctggcccgggacaccctcagccctgaaccagcggcacgcgaggctccattgttactgccttcctgggtgcaggaactgtgggaaacacgccgacggtcaagccaggcgggcattcccgtgagggcgccccgatccccacgggccccagaaccagctctcgagcctgagagtctcgatttctccggcgccggccagaggctgaggagagacgtcagtcgccctgctgtcgatcccgcagcgaaccggctggggctgccatgtctagcccccggccctttttag

SEQ ID NO: 39784 - DNA, 1015 bp, Artificial Sequence
  derived and/or modified sequence
gtacccactccctggcacttccactcctagagggaggaggctgagcaggcagagaatgggacgtgtcccctcagaggagcctcgagcccagttccagccagcggcccactcagtgaggtgctcaagtacccacgtcccccgccagctgccagggttccctctcctccctccgtccctccccccatctggggagcccagcggtactgagggggcggaacgaggcggggccaccgagcggttatagctgggcctgcaggggacccacggctcgcctccagcctcctgcgctccggtacctgggcgtcccaactccactgcgcgcccaaacccagccgagccggttcgtggcccgccccgccgggcggccgtcgacgcgagcgccctggcgtggcgcccaggggagcggggggctcccgcgagccggccgcggctggcactgctgctgcttctgctcctgctgccgctgccctccggcgcgtggtacaagcacgtggcgagtccccgctaccacacggtgggccgcgccgctggcctgctcatggggctgcgtcgctcaccctatctgtggcgccgcgcgctgcgcgcggccgccgggcccctggccagggacaccctctcccccgaacccgcagcccgcgaggctcctctcctgctgccctcgtgggttcaggagctgtgggagacgcgacgcaggagctcccaggcagggatccccgtccgtgcgccccggagcccgcgcgccccagagcctgcgctggaaccggagtccctggacttcagcggagctggccagagacttcggagagacgtctcccgcccagcggtggaccccgcagcaaaccgccttggcctgccctgcctggcccccggaccgttctgacagcgtcccccgcccgcccgtggcgcctccgcgcctgacccaggaggagtggccgcgcgcttccaggagccgctcatagaccccgcctgccgtccggtcaataaaatccgcctgactcctgcgcccccgcatgcg

SEQ ID NO: 39785 - DNA, 498 bp, Artificial Sequence
  derived and/or modified sequence
ctcgcctggcgcccaggggagcgtggggcaccggctagtcgtcctcgcctagcactccttctgcttctcttgctcctgccgctgccctctggcgcttggtacaaacacgtggcatccccaaggtaccacaccgtgggcagggctgcgggacttctgatgggcctgcgtagatctccctatctgtggagaagggcgctgagggcagccgctggacccttggctagagacaccctatcccctgaacccgctgcccgagaggctcccctcctcctcccaagctgggtacaggagctgtgggagacaagaagaagaagctcccaagcaggtatacccgtgagagccccaaggagcccgagggccccagagccggctttggagccggagtcattggacttcagtggagcgggtcagcgtcttcgcagagatgtctcacggcctgcagtggaccctgctgcaaatcgcctggggctaccatgcctggctccaggcccattttag

SEQ ID NO: 39786 - protein, 18 aa, Artificial Sequence
  derived and/or modified sequence
VAPEEHPVLLTEAPLNPK

SEQ ID NO: 39787 - protein, 375 aa, Artificial Sequence
  derived and/or modified sequence
MDDDIAALVVDNGSGMCKAGFAGDDAPRAVFPSIVGRPRHQGVMVGMGQKDSYVGDEAQSKRGILTLKYPIEHGIVTNWDDMEKIWHHTFYNELRVAPEEHPVLLTEAPLNPKANREKMTQIMFETFNTPAMYVAIQAVLSLYASGRTTGIVMDSGDGVTHTVPIYEGYALPHAILRLDLAGRDLTDYLMKILTERGYSFTTTAEREIVRDIKEKLCYVALDFEQEMATAASSSSLEKSYELPDGQVITIGNERFRCPEALFQPSFLGMESCGIHETTFNSIMKCDVDIRKDLYANTVLSGGTTMYPGIADRMQKEITALAPSTMKIKIIAPPERKYSVWIGGSILASLSTFQQMWISKQEYDESGPSIVHRKCF

SEQ ID NO: 39788 - protein, 347 aa, Artificial Sequence
  derived and/or modified sequence
MDDDIAALVVDNGSGMCKAGFAGDDAPRAVFPSIVGRPRHQGVMVGIVTNWDDMEKIWHHTFYNELRVAPEEHPVLLTEAPLNPKANREKMTQIMFETFNTPAMYVAIQAVLSLYASGRTTGIVMDSGDGVTHTVPIYEGYALPHAILRLDLAGRDLTDYLMKILTERGYSFTTTAEREIVRDIKEKLCYVALDFEQEMATAASSSSLEKSYELPDGQVITIGNERFRCPEALFQPSFLGMESCGIHETTFNSIMKCDVDIRKDLYANTVLSGGTTMYPGIADRMQKEITALAPSTMKIKIIAPPERKYSVWIGGSILASLSTFQQMWISKQEYDESGPSIVHRKCF

SEQ ID NO: 39789 - protein, 80 aa, Artificial Sequence
  derived and/or modified sequence
MDDDIAALVVDNGSGMCKAGFAGDDAPRAVFPSIVGRPRHQGVMVGMGQKDSYVGDEAQSKRGILTLKYPIEHGIVTNWD

SEQ ID NO: 39790 - protein, 99 aa, Artificial Sequence
  derived and/or modified sequence
MLTMDDDIAALVVDNGSGMCKAGFAGDDAPRAVFPSIVGRPRHQGVMVGMGQKDSYVGDEAQSKRGILTLKYPIEHGIVTNWDDMEKIWHHTFYNELRV

SEQ ID NO: 39791 - protein, 164 aa, Artificial Sequence
  derived and/or modified sequence
MDDDIAALVVDNGSGMCKAGFAGDDAPRAVFPSIVGRPRHQGVMVGMGQKDSYVGDEAQSKRGILTLKYPIEHGIVTNWDDMEKIWHHTFYNELRVAPEEHPVLLTEAPLNPKANREKMTQIMFETFNTPAMYVAIQAVLSLYASGRTTGIVMDSGDGVTHTVP

SEQ ID NO: 39792 - protein, 103 aa, Artificial Sequence
  derived and/or modified sequence
MDDDIAALVVDNGSGMCKAGFAGDDAPRAVFPSIVGRPRHQGVMVGMGQKDSYVGDEAQSKRGILTLKYPIEHGIVTNWDDMEKIWHHTFYNELRVAPEEHPV

SEQ ID NO: 39793 - protein, 351 aa, Artificial Sequence
  derived and/or modified sequence
MDDDIAALVVDNGSGMCKAGFAGDDAPRAVFPSIVGRPRHQGVMVGMGQKDSYVGDEAQSKRGILTLKYPIEHGIVTNWDDMEKIWHHTFYNELRVAPEEHPVLLTEAPLNPKANREKMTQIMFETFNTPAMYVAIQAVLSLYASGRTTAILRLDLAGRDLTDYLMKILTERGYSFTTTAEREIVRDIKEKLCYVALDFEQEMATAASSSSLEKSYELPDGQVITIGNERFRCPEALFQPSFLGMESCGIHETTFNSIMKCDVDIRKDLYANTVLSGGTTMYPGIADRMQKEITALAPSTMKIKIIAPPERKYSVWIGGSILASLSTFQQMWISKQEYDESGPSIVHRKCF

SEQ ID NO: 39794 - protein, 429 aa, Artificial Sequence
  derived and/or modified sequence
MRVSVPGPAAAAAPAAGREPSTPGGGSGGGGAVAAASGAAVPGSVQLALSVLHALLYAALFAFAYLQLWRLLLYRERRLSYQSLCLFLCLLWAALRTTLFSAAFSLSGSLPLLRPPAHLHFFPHWLLYCFPSCLQFSTLCLLNLYLAEVICKVRCATELDRHKILLHLGFIMASLLFLVVNLTCAMLVHGDVPENQLKWTVFVRALINDSLFILCAISLVCYICKITKMSSANVYLESKGMSLCQTVVVGSVVILLYSSRACYNLVVVTISQDTLESPFNYGWDNLSDKAHVEDISGEEYIVFGMVLFLWEHVPAWSVVLFFRAQRLNQNLAPAGMINSHSYSSRAYFFDNPRRYDSDDDLPRLGSSREGSLPNSQSLGWYGTMTGCGSSSYTVTPHLNGPMTDTAPLLFTCSNLDLNNHHSLYVTPQN

SEQ ID NO: 39795 - DNA, 1290 bp, Artificial Sequence
  derived and/or modified sequence
atgagagtgagcgtgcccggccccgccgccgccgccgcccccgccgccggcagagagcccagcacccccggcggcggcagcggcggcggcggcgccgtggccgccgccagcggcgccgccgtgcccggcagcgtgcagctggccctgagcgtgctgcacgccctgctgtacgccgccctgttcgccttcgcctacctgcagctgtggagactgctgctgtacagagagagaagactgagctaccagagcctgtgcctgttcctgtgcctgctgtgggccgccctgagaaccaccctgttcagcgccgccttcagcctgagcggcagcctgcccctgctgagaccccccgcccacctgcacttcttcccccactggctgctgtactgcttccccagctgcctgcagttcagcaccctgtgcctgctgaacctgtacctggccgaggtgatctgcaaggtgagatgcgccaccgagctggacagacacaagatcctgctgcacctgggcttcatcatggccagcctgctgttcctggtggtgaacctgacctgcgccatgctggtgcacggcgacgtgcccgagaaccagctgaagtggaccgtgttcgtgagagccctgatcaacgacagcctgttcatcctgtgcgccatcagcctggtgtgctacatctgcaagatcaccaagatgagcagcgccaacgtgtacctggagagcaagggcatgagcctgtgccagaccgtggtggtgggcagcgtggtgatcctgctgtacagcagcagagcctgctacaacctggtggtggtgaccatcagccaggacaccctggagagccccttcaactacggctgggacaacctgagcgacaaggcccacgtggaggacatcagcggcgaggagtacatcgtgttcggcatggtgctgttcctgtgggagcacgtgcccgcctggagcgtggtgctgttcttcagagcccagagactgaaccagaacctggcccccgccggcatgatcaacagccacagctacagcagcagagcctacttcttcgacaaccccagaagatacgacagcgacgacgacctgcccagactgggcagcagcagagagggcagcctgcccaacagccagagcctgggctggtacggcaccatgaccggctgcggcagcagcagctacaccgtgaccccccacctgaacggccccatgaccgacaccgcccccctgctgttcacctgcagcaacctggacctgaacaaccaccacagcctgtacgtgaccccccagaactag

SEQ ID NO: 39796 - DNA, 3888 bp, Artificial Sequence
  derived and/or modified sequence
atgagggtgtccgtgccgggtccggcggccgctgccgcccccgcagccggccgcgagccctccacgcccggcgggggcagcggaggcggaggcgccgtcgctgcagcctcaggcgccgcggtgccgggctccgtgcagttggcgctgagcgtcctgcacgccctgctctacgccgcgctgttcgcctttgcctacctgcagctgtggcggctgctcctgtaccgcgagcggcggctgagttaccagagcctctgcctcttcctctgtctcctgtgggcagcgctcaggaccaccctcttctccgccgccttctcgctcagcggctccctgcccttgctccggccgcccgctcacctgcacttcttcccccactggctgctctactgcttcccctcctgtctccagttctccacgctctgtctcctcaacctctacctggcggaggttatatgtaaagtcagatgtgccactgaacttgacagacacaaaattctactgcatttgggctttataatggcaagcctgctctttttagtggtgaacttgacttgcgcaatgctagttcatggagatgtcccagaaaatcagttgaagtggactgtgtttgttcgagcattaattaatgatagcctgtttattctttgtgccatctctttagtgtgttacatatgcaaaattacaaaaatgtcatcagctaatgtctacctcgaatcaaagggtatgtctctgtgccagactgtcgtcgtgggctctgtagtcattcttctgtactcttccagagcttgttataatttggtggtggtcaccatatctcaggatacattagaaagtccatttaattatggctgggataatctttcagataaggctcatgtagaagacataagtggagaagagtatatagtatttggaatggtcctctttctgtgggaacatgtgccagcatggtcggtggtactgtttttccgggcacagagattaaaccagaatttggcacctgctggcatgataaatagtcacagttatagttccagagcttactttttcgacaatccaagacgatatgatagtgatgatgacctgccaagactgggaagttcaagagaaggaagtttaccaaattcgcaaagtttgggctggtatggcaccatgactgggtgtggcagcagcagttacacagtcactccccacctgaatggacctatgacagatactgctcctttgctctttacttgtagtaatttagatttgaacaatcatcatagcttatatgtgacaccacaaaactgacagcatcaccaagtcatgattcttgagttgtttttcataaatgtgtatattcaatgtgtttaaattccatctacataaacattccattatctgttgcaactgaaaacaaaatctggaagtgtggctgtgtttggtaaataacacagctattatttttgacctcttcatagtaaaatgaagtaaaatggaaagtttggagtaggagaaaagagagattagatcttaaggcacttgatggcctccaaaaatcctgactttggaacatcaaatgcatatgtgcacttttatctttgttctgagtcactgcagtccccaaagtcatatgccaatgttcacactgaaatactgtattgtacaccaaactggaaggcaattttcctatgaaaatcaaagccggtatattcattggtatgctctatacagatatcttaataaaaattttatagtgtgaacagtgcacagagttaaggcataaaaatgtatcattctttataaaaatctactgaaaatgtgtaatcattgaagacagttcttttaagcatgattttaaaatagcaactgaaattcaatcattttaaacaaatgatggtagtaatccattagttatggccagcagtgttctttggagagccacaataatttcaagaggaaaatataccagtgaaaattgtgtggctattttgagtagaattggtcagttgattattttgtgtaattgagatatatgtagtagtttaagcatgattcttgaagaaagcaatagtgacttttgcatagggagattttggtagaaacttcttgggactaaacaagtttagagatgcatttaagaattattcacaaaatgtgtaattctaaattaaaacataaatatattttcaaaagcatttgatttctctgaagcatgatatagctggtcttacctagtgaatcaggattgtcctcaggtaaatgaaatcatgatacattattgcagtgaactcaagtgcaatactttgtaagacatataattcctatgattttcacatttttatatcttatatatgggaaaagccaaattaaattgaattcagattaattccagcattagactaaatgagcaaacttaagtaaatgtacaaactaggtaagtataaaaccacaggttaacaatattggagtacttttagaattacattaaaactgtcttaaatgtcctatcccaaatctaaaaaaaaagaaaatggcaggctgagataatacagaattttaaaatgcactttgtaccagtgtctatatggaaagaagtagatgctgaatacctcaagatgccaagggaacaagcaacattgggaagttgtcacaacatgctcaaagacaaactacaattgtctgctagctatttcttcagaactggaactaatacgactatccttttctgttttatactttgattagaatgttatttcctcgcttacttaaaatgtacttcaactttttaacaactgatacaataacttcataaaagtataacactaggttgaaaccttaaggaaaaattgaaattgttaatgctttcgatcttttgggaggccagtacacagacaaataaatttcttctttttatgatacaaaatgactttgtattcaatcagaagcatatacttatgttattttgggtttgtttataattctctcattgtaaccaaattattttaaaatgtatagtataaaaagttacccgtggtattaagtgacaaaagcgtacttttattacaactccagttgttagattgcttctcagaatgctaactgtttattttgctaataatgttaggcatctaatcatctagagctgtccaaaaagatatgttgtctttgttaatccttggggttcaaggtgataaagtttttctagtaaggctcccctcgataatgttcctatttgaccaaactaacaaagattactttttaaaaatttttcagataaaataacttggttctttctgctgcattagttgattgttccaaatttgaggtttgtaagtttattcttatcactgactagggtacccaaattcttgcatttgtctccttatacacatctaacatatcaccaaagacaaataaagatacactctggcccaatctttgcttaaaaattccaaagcactaggagcactttaagtttggtctcgaaaggagttgtttataaaatcaaagggctaccgattccctgttcatcctgcactgaagcacatgatgacagtatcaaaccttcatttttgttcattaaaaagtgaatttcattacttaagtgtgtaattctatagtgattagcagtatttgttttcatcatttcacttgggtggccattaattttgaaacctttaccactcattgtagttggttgtagttttatggaaaatgtaatttatagctaaagtggcttttttatgcatagctgccttttttattgtttaacagtgtttctcagctatataatcagtttcaaactggttgtaaaagtatagctgtggccaatgaatgtatttatttgttgtttcactaaattgtaacaaaacactactattaaaaataaaagtgtttgtgctttta

SEQ ID NO: 39797 - DNA, 1290 bp, Artificial Sequence
  derived and/or modified sequence
atgcgagtgtcagtccccggaccagccgccgctgctgcaccggccgctggccgggagccttcgacgccgggaggggggtccggcgggggaggggcagtagcagccgccagcggggcagcagtcccaggttctgttcaactggccctcagcgtcctacatgcactcctctacgcggctctgttcgcttttgcttacctgcagctgtggcgcttactgttatatcgcgagaggcgtctttcttatcagagtctatgcctgttcctgtgcctgttgtgggctgcactgcggactaccttattttcagccgccttctctctgtcaggctctcttcccttactgaggcctcccgcccacctgcacttcttccctcactggttactctattgttttccatcttgcctgcagttttctacactgtgcttgttgaacttgtacttggccgaggtcatctgcaaagttagatgcgccactgaacttgacagacacaagatacttttgcatctgggatttataatggccagtctcttattcctggtggtcaacctgacctgtgctatgctcgttcatggcgatgtgcccgagaatcaactaaaatggactgtgtttgtgagagctctcatcaatgactccttattcattctctgtgcaatctctctggtgtgttacatatgcaaaattacaaagatgagctcggccaatgtctacctggagagcaaaggtatgtccttgtgccagactgtggtcgtcggttctgttgtgatcctgctctactcttcgcgggcgtgctataatctggtcgtcgtgaccattagccaggatactctggagtcacctttcaattatggctgggacaacctctcagataaagcacacgtggaggatatcagcggcgaggaatacatagtgtttggcatggtgttatttctttgggagcatgtgcctgcttggtctgtcgttttgttctttagagcccagcgccttaaccagaatctggctcctgctggcatgattaacagccactcctactcttctcgggcatacttctttgacaacccacggcgatatgactctgacgatgacctccccagattggggagctcccgtgagggcagcctgccaaactcccaaagcttgggctggtacgggactatgaccggctgcgggtcctcctcctacactgtcactccacatttgaatggacccatgaccgatacagcccctctgttgtttacttgcagtaatctggatctgaacaaccatcactcactatacgtaaccccccagaactag

SEQ ID NO: 39798 - DNA, 1290 bp, Artificial Sequence
  derived and/or modified sequence
atgagggtgtctgtgcccggccctgctgctgctgctgccccagctgctggccgggagcccagcaccccaggcggcggcagcggcggcggcggcgctgtggccgccgccagcggggctgctgtgcccggctctgtgcagctggccctgtctgtgctgcacgccctgctgtatgctgccctgtttgcctttgcctacctgcagctgtggaggctgctgctgtaccgggagcggcggctgagctaccagagcctgtgcctcttcctgtgcctgctgtgggccgccctgcggaccaccctcttctctgctgccttcagcctgagcggcagcctgcccctgctgcggcccccagcccacctgcacttcttcccccactggctgctgtactgcttccccagctgcctgcagttcagcaccctgtgcctgctgaacctgtacctggccgaggtgatctgcaaggtgcgctgtgccacagagctggacagacacaagatcctgctgcacctgggcttcatcatggccagcctgctcttcctggtggtgaacctgacctgtgccatgctggtgcatggagatgtgcctgagaaccagctgaagtggacagtgtttgtgcgggccctgatcaatgacagcctcttcatcctgtgtgccatcagcctggtgtgctacatctgcaagatcaccaagatgagcagcgccaacgtgtacctggagagcaagggcatgagcctgtgccagacagtggtggtgggctctgtggtgatcctgctgtacagcagccgggcctgctacaacctggtggtggtgaccatcagccaggacaccctggagagccccttcaactacggctgggacaacctgagtgacaaggcccacgtggaggacatcagcggggaggagtacatcgtgtttggcatggtgctcttcctgtgggagcacgtgcctgcctggagcgtggtgctcttcttccgggcccagaggctgaaccagaacctggccccagctggcatgatcaacagccacagctacagcagccgggcctacttctttgacaaccccaggagatatgacagtgatgatgacctgccccggctgggcagcagccgggagggcagcctgcccaacagccagagcctgggctggtacggcaccatgacaggctgcggcagcagcagctacacagtgaccccccacctgaatggccccatgacagacacagcccccctgctcttcacctgcagcaacctggacctgaacaaccaccacagcctgtatgtgaccccccagaactag

SEQ ID NO: 39799 - DNA, 1290 bp, Artificial Sequence
  derived and/or modified sequence
atgcgggtgagcgtgcccggccccgccgccgccgccgcccccgccgctgggcgggagccgagtactccgggaggggggtccggaggtggcggcgctgttgccgccgcttccggagcagccgtgcccggtagtgtccaattggccctttccgtactccacgccctgttgtacgcggcactcttcgcgtttgcatacctgcaactctggcggctcctcttgtatagagagcgacgcctgtcttaccaaagcctctgcctgtttctctgcctgctgtgggcagccttgcgcaccaccctgttttcagcggccttttcactgtccggctctctcccgctgttaagaccacccgcacatcttcatttttttccacattggcttctctattgttttccgagctgcctgcagttttctaccctctgcctgctgaatttgtacctagctgaagtgatctgtaaagtccggtgcgcaaccgaacttgacaggcacaaaatactcctccacctgggctttatcatggcgtccctgctatttctggtggtaaatttgacctgtgccatgctggtgcacggtgatgtgccggaaaaccagctgaagtggacggtgttcgtacgcgccctgataaacgactctctctttattctgtgtgctatatcactcgtgtgttacatatgtaaaattacaaagatgtcctcagccaacgtatatcttgagtccaagggcatgagcctgtgccagacagtggtcgttgggtctgttgtgatcctcctgtattctagccgcgcatgctacaacctggtggtggtcacaatatcgcaggatacactggagagcccttttaactatgggtgggacaacctgtctgataaagcacacgtggaagacatttccggcgaggagtatatcgtgttcggcatggtactatttttgtgggaacatgtgccggcctggtctgtggtcctcttttttcgggcgcagcggctgaaccagaatctggctcctgccggtatgattaacagtcacagctatagctcccgtgcttatttttttgacaatccgcgacggtacgattccgacgatgacctccctaggctcggttcctcaagagaagggtcgttgccaaattcacagtctttaggctggtacggaacaatgaccgggtgtgggtcttcatcatacactgtgacgccccatcttaacggaccaatgacagacaccgctccgcttctctttacttgcagtaatctggacctaaacaaccaccattcgctttacgtcacacctcagaattag

SEQ ID NO: 39800 - DNA, 1290 bp, Artificial Sequence
  derived and/or modified sequence
atgagggtttccgtgcccggtccggcagccgcagctgcacctgcggctggtcgcgagcccagtacaccaggtggcggttcagggggtggcggagcagttgcagcggctagcggagccgctgtacccggttcagtccagctggccttatctgttttacacgcacttctgtatgcagctctattcgccttcgcttatttgcagctttggagactgctgctgtacagagagcgccgactgtcctaccagtctctgtgtctttttctctgcttgctgtgggccgctctgcgaacaaccttgttcagtgccgctttctctcttagtggtagcctgcccctgttgcgcccacccgctcacctgcatttctttccacactggcttctctattgctttccctcttgcctccaattctccacgttgtgcttactaaacctctacttggctgaggtgatctgcaaggttcggtgtgctacagaactggatcggcacaagattcttttgcaccttggcttcatcatggcatccctactttttttggtcgtgaacctgacctgcgccatgctagtgcatggtgacgtaccggagaaccagcttaagtggaccgtctttgttagagctctcatcaatgactcattatttatcttgtgcgccattagtctggtatgctacatctgtaagatcactaagatgtcaagtgcaaacgtgtatttagagtctaaaggaatgtcactgtgtcagactgtggtggtgggcagtgtggtaatcttattatacagcagtagggcctgttataatcttgtggttgtgaccatctctcaagacacgttggagagtccctttaattacggatgggataacctatccgacaaagcccatgttgaagatatatccggagaagaatatatcgtgttcggcatggtcctgtttctttgggagcacgtacccgcatggtcggttgtcctgttcttcagggcccaacggttgaaccagaacctagccccagccggaatgatcaattctcattcttattcatctcgcgcatattttttcgataacccaagacggtacgactctgacgatgacctcccacgcctcggcagttcccgagagggatctctccccaactcgcagtctctgggctggtacggaaccatgacaggctgtgggagctctagctacacagtcacaccccacctgaacggcccaatgactgataccgcaccgcttctgttcacctgctccaatcttgatcttaacaatcatcacagtctgtacgtcactccacagaactag

SEQ ID NO: 39801 - protein, 708 aa, Artificial Sequence
  derived and/or modified sequence
MKDMPLRIHVLLGLAITTLVQAVDKKVDCPRLCTCEIRPWFTPRSIYMEASTVDCNDLGLLTFPARLPANTQILLLQTNNIAKIEYSTDFPVNLTGLDLSQNNLSSVTNINVKKMPQLLSVYLEENKLTELPEKCLSELSNLQELYINHNLLSTISPGAFIGLHNLLRLHLNSNRLQMINSKWFDALPNLEILMIGENPIIRIKDMNFKPLINLRSLVIAGINLTEIPDNALVGLENLESISFYDNRLIKVPHVALQKVVNLKFLDLNKNPINRIRRGDFSNMLHLKELGINNMPELISIDSLAVDNLPDLRKIEATNNPRLSYIHPNAFFRLPKLESLMLNSNALSALYHGTIESLPNLKEISIHSNPIRCDCVIRWMNMNKTNIRFMEPDSLFCVDPPEFQGQNVRQVHFRDMMEICLPLIAPESFPSNLNVEAGSYVSFHCRATAEPQPEIYWITPSGQKLLPNTLTDKFYVHSEGTLDINGVTPKEGGLYTCIATNLVGADLKSVMIKVDGSFPQDNNGSLNIKIRDIQANSVLVSWKASSKILKSSVKWTAFVKTENSHAAQSARIPSDVKVYNLTHLNPSTEYKICIDIPTIYQKNRKKCVNVTTKGLHPDQKEYEKNNTTTLMACLGGLLGIIGVICLISCLSPEMNCDGGHSYVRNYLQKPTFALGELYPPLINLWEAGKEKSTSLKVKATVIGLPTNMS

SEQ ID NO: 39802 - DNA, 2127 bp, Artificial Sequence
  derived and/or modified sequence
atgaaggacatgcccctgagaatccacgtgctgctgggcctggccatcaccaccctggtgcaggccgtggacaagaaggtggactgccccagactgtgcacctgcgagatcagaccctggttcacccccagaagcatctacatggaggccagcaccgtggactgcaacgacctgggcctgctgaccttccccgccagactgcccgccaacacccagatcctgctgctgcagaccaacaacatcgccaagatcgagtacagcaccgacttccccgtgaacctgaccggcctggacctgagccagaacaacctgagcagcgtgaccaacatcaacgtgaagaagatgccccagctgctgagcgtgtacctggaggagaacaagctgaccgagctgcccgagaagtgcctgagcgagctgagcaacctgcaggagctgtacatcaaccacaacctgctgagcaccatcagccccggcgccttcatcggcctgcacaacctgctgagactgcacctgaacagcaacagactgcagatgatcaacagcaagtggttcgacgccctgcccaacctggagatcctgatgatcggcgagaaccccatcatcagaatcaaggacatgaacttcaagcccctgatcaacctgagaagcctggtgatcgccggcatcaacctgaccgagatccccgacaacgccctggtgggcctggagaacctggagagcatcagcttctacgacaacagactgatcaaggtgccccacgtggccctgcagaaggtggtgaacctgaagttcctggacctgaacaagaaccccatcaacagaatcagaagaggcgacttcagcaacatgctgcacctgaaggagctgggcatcaacaacatgcccgagctgatcagcatcgacagcctggccgtggacaacctgcccgacctgagaaagatcgaggccaccaacaaccccagactgagctacatccaccccaacgccttcttcagactgcccaagctggagagcctgatgctgaacagcaacgccctgagcgccctgtaccacggcaccatcgagagcctgcccaacctgaaggagatcagcatccacagcaaccccatcagatgcgactgcgtgatcagatggatgaacatgaacaagaccaacatcagattcatggagcccgacagcctgttctgcgtggacccccccgagttccagggccagaacgtgagacaggtgcacttcagagacatgatggagatctgcctgcccctgatcgcccccgagagcttccccagcaacctgaacgtggaggccggcagctacgtgagcttccactgcagagccaccgccgagccccagcccgagatctactggatcacccccagcggccagaagctgctgcccaacaccctgaccgacaagttctacgtgcacagcgagggcaccctggacatcaacggcgtgacccccaaggagggcggcctgtacacctgcatcgccaccaacctggtgggcgccgacctgaagagcgtgatgatcaaggtggacggcagcttcccccaggacaacaacggcagcctgaacatcaagatcagagacatccaggccaacagcgtgctggtgagctggaaggccagcagcaagatcctgaagagcagcgtgaagtggaccgccttcgtgaagaccgagaacagccacgccgcccagagcgccagaatccccagcgacgtgaaggtgtacaacctgacccacctgaaccccagcaccgagtacaagatctgcatcgacatccccaccatctaccagaagaacagaaagaagtgcgtgaacgtgaccaccaagggcctgcaccccgaccagaaggagtacgagaagaacaacaccaccaccctgatggcctgcctgggcggcctgctgggcatcatcggcgtgatctgcctgatcagctgcctgagccccgagatgaactgcgacggcggccacagctacgtgagaaactacctgcagaagcccaccttcgccctgggcgagctgtacccccccctgatcaacctgtgggaggccggcaaggagaagagcaccagcctgaaggtgaaggccaccgtgatcggcctgcccaccaacatgagctag

SEQ ID NO: 39803 - DNA, 2127 bp, Artificial Sequence
  derived and/or modified sequence
atgaaagacatgcccctgagaatacacgtgctgctgggtctggcaattaccaccctagtacaggccgtagataagaaagtcgactgtccacggctctgcacgtgtgaaatccgcccttggtttacaccaagaagcatatacatggaggctagcactgtcgattgcaatgatctcggtctcctcacattccctgcccgtttacctgcgaatacccaaatactgctgcttcagaccaacaacattgctaagattgagtactccactgacttccccgtgaatctaacaggccttgatctctctcagaataatctgtcgagtgtgacgaacattaacgtgaaaaaaatgccccaactgttgtccgtctacctggaggaaaacaagcttaccgaactccccgagaagtgtctttcagaactgagtaaccttcaagagttgtacatcaaccataacctgcttagcactatcagcccaggcgctttcatcggactccataacttgctgaggctgcatttaaactccaatcgcttgcagatgattaatagtaagtggttcgatgcactcccaaacctggagatcctgatgattggcgaaaacccaattatccggattaaggacatgaactttaagccattgatcaacctacgcagcctggtgatagctggcatcaacctgacggagatccccgacaacgctctggtggggttagaaaacctagaaagcatcagcttttatgacaacagattgattaaagtgccacatgtagccctccagaaggtggtgaatcttaaatttctggatttgaataaaaatcccatcaaccggattcgccggggagatttcagtaacatgctgcacctcaaagagctggggatcaataatatgccagaactgatttcaatcgactcactggcggtagataatctgcctgacctccgcaaaattgaagctacgaataatcctcgtctgagctacattcaccccaatgccttttttagacttccgaagttggaaagcctgatgctcaactctaatgcattgtcagctttgtatcatggtactatcgagagcttaccgaatcttaaagaaattagtatccactccaacccaataagatgtgattgtgttattagatggatgaacatgaataagaccaatatccggtttatggagcctgacagcctcttctgtgtggaccccccagagtttcaaggtcagaacgtgcgacaagtgcactttagggacatgatggaaatctgcctgcccctgatcgcacccgagagctttcccagtaacctgaacgtcgaggcgggctcttacgttagtttccattgtcgggcgaccgcggagccccaacccgagatctattggataacccctagtggacaaaagttgctcccaaacacattaacggataagttttacgtgcattccgaaggcacacttgacattaacggggtaacgccaaaagagggcggactctatacgtgcattgccacaaatctggtgggggcggacctgaaatcggtgatgatcaaggttgacgggtcttttcctcaggacaacaatggatccctcaacataaaaattagggacatccaggccaactcagtgcttgtgtcttggaaggcaagctctaagatcctcaaatctagtgtgaagtggactgccttcgttaagactgagaacagccacgcagcccagtctgctcgcatccctagcgacgttaaagtttacaacctgacccatctgaacccctccactgaatataagatctgcattgacattccaactatttaccagaagaacaggaagaaatgcgtgaacgtcactaccaaggggctccacccggaccaaaaggagtacgagaagaacaacacgaccaccctcatggcatgcctgggaggcttactcggaatcattggggtgatctgcctgatatcatgcctcagtccggagatgaattgcgacggggggcactcctatgtgcgcaactatctgcagaaacccacattcgccctgggagaactgtaccccccacttattaacctctgggaggccggcaaggagaaatcaaccagtctgaaggtgaaggctacagttattgggttacccaccaacatgagctag

SEQ ID NO: 39804 - DNA, 2127 bp, Artificial Sequence
  derived and/or modified sequence
atgaaagacatgcctctgagaattcacgtgctccttggcttagcaatcaccactctggtgcaggcggtcgataagaaggttgactgccccaggttgtgcacatgcgaaatcagaccttggtttactccacggtcaatatatatggaggcgtctactgttgactgcaatgacttagggctgctgaccttccctgcacggctgcccgcaaacacccagatcctgctcctccagaccaacaatatcgcaaagatcgagtacagcaccgattttcctgtgaatctcacagggctcgacttatcccaaaataacctttctagtgtgactaatattaacgtcaagaagatgcctcagctactgtccgtgtacctggaggagaacaaactaaccgagctcccagagaagtgtctttctgagctatcgaacttacaggaactgtatataaatcacaacctgctcagcactatctctcccggtgcattcattggtctgcataatctgcttcggttgcacctcaattctaaccggttacagatgattaattctaagtggttcgacgcgctcccaaacctggaaatccttatgatcggcgaaaaccccatcattagaataaaggatatgaattttaaaccactgatcaatctgagatcattagtgatcgccggtatcaatttgaccgagatcccagataatgccctggtgggactggagaacctcgaaagtatctccttttacgacaaccggctgataaaggtgcctcacgtggcattacaaaaggtggtgaacttaaagtttctcgacctgaataagaatccgatcaacagaattcgccgcggggacttttcgaatatgcttcatttaaaggaactcggaattaataacatgcctgaacttatttctatcgattccctggcagtggataacttaccagatctgagaaagatcgaagcgaccaacaaccctagactctcatatattcatcccaacgccttctttcgcctccctaaattggaaagtctgatgcttaattccaatgctctttccgcactgtaccacggtaccattgagagtctacctaacctcaaggagatcagtattcactctaaccccatcagatgtgattgtgtcattcgctggatgaacatgaacaagaccaatatccgctttatggagccagacagtctcttctgtgtcgatcccccagaatttcaggggcagaatgtgcgacaggtacattttagagacatgatggagatttgcctccccctcattgccccagaatcatttcctagcaacctgaacgtcgaagcgggaagttacgtgtctttccactgcagggcaacagcagaaccccagcccgagatatattggatcacccctagtggccagaagcttttacccaatacgcttaccgacaaattttacgtgcattccgaaggaacactggacattaacggagttacccctaaggaaggcggcttgtatacatgcatcgctacaaacctggtgggagcagaccttaagtccgtaatgattaaagtggacggctcctttcctcaagacaataacggctctctgaatattaagatcagagatatccaggctaattctgttctggtgtcctggaaggcttcatccaagatccttaaatcctcggtgaaatggaccgcatttgtgaaaactgaaaacagccacgctgcccaaagcgctagaatcccctcggatgtgaaggtctacaatctgacccacctcaatcccagtacagaatacaagatatgtatcgacatacccaccatctatcagaagaaccgcaagaaatgtgtgaacgtgacaaccaaaggtctgcacccagatcagaaggagtatgaaaagaacaacacgacaacattaatggcctgcttgggaggactgctgggtatcatcggggttatctgcctaataagttgcctgagtccggaaatgaattgcgatggaggccatagctatgtgagaaactacctccaaaagccaacctttgccttgggtgagctttatccccctctgatcaacctttgggaggccggaaaagaaaaaagcaccagtctgaaagtgaaggccactgttattggccttcccactaatatgtcctag

SEQ ID NO: 39805 - DNA, 2127 bp, Artificial Sequence
  derived and/or modified sequence
atgaaagacatgccactgcggatacacgtcttgctgggtctggcaattactaccctcgtccaggcagtggataaaaaggtagactgccctcgcctgtgtacttgtgagattcggccttggttcacaccccgcagcatatatatggaggctagtaccgttgactgcaatgacctgggtttacttacttttcccgcgagactacctgccaatacccagatcctgctccttcaaaccaacaatatcgcaaagattgaatactccactgacttccctgtgaatctcactggtctggatttgagccagaacaatttatcatcagtgactaatatcaatgtgaagaaaatgccccagctcctctccgtgtatctggaagagaacaagctcactgagcttcctgagaagtgtctgtccgaactgtccaacctccaggaattatacatcaaccacaacttgttatctaccattagtcctggggcctttatcggattgcacaacctgttacgactacaccttaattctaacaggctgcagatgattaactctaagtggttcgacgctctgcctaatttggaaatactgatgatcggagagaaccctatcatcaggatcaaggatatgaatttcaagccccttattaaccttagatccctggtgatcgcaggaatcaacctcaccgagattcctgacaacgccctggtcggcctcgagaatctcgaaagtatcagtttctacgataataggttgattaaagtaccgcacgtcgcccttcagaaagtcgtgaacctgaaattcctggacctcaataagaacccgatcaaccggatccgccgaggcgacttttccaatatgctgcaccttaaggaactgggaattaacaatatgccagagcttatctcgatagacagtttggcagtcgacaatttaccagacctccgtaaaatcgaggccaccaataacccaaggttgagctacattcaccctaacgctttttttcgcctcccgaagctggaaagtctgatgctgaacagcaatgctctgagcgctctctaccacgggacaatcgaatccctgccaaaccttaaagaaatttcaatacattctaatcccattcgctgcgactgcgtaatacgctggatgaatatgaataaaactaacatcagattcatggaacccgattcactgttttgtgtcgacccgcccgagtttcagggtcaaaacgttagacaagtccattttcgggacatgatggagatttgcctcccccttatagcgccggagtccttcccgtctaacctgaacgtcgaagctggtagttatgttagttttcactgtagggctactgccgagcctcagcccgaaatatattggataactccgagcggccaaaagctcttaccaaacaccctgacagacaagttctacgtacacagcgaggggaccctcgacatcaacggagtgacccccaaagagggcggactttacacctgtatagctacaaatctcgtgggcgctgatctcaaaagtgtgatgatcaaagtcgacggcagtttcccccaagataacaatggtagtctgaacatcaagatccgcgacatccaggctaattcagtgctcgttagttggaaagcgtcgtctaagatcctcaaaagctccgttaagtggactgctttcgtgaaaacagagaatagccacgctgctcagtccgcccgtatcccctcagacgtgaaggtatataaccttacccatctgaatccaagcacagagtacaagatatgtattgatatccctacaatttaccagaagaaccggaagaagtgtgtgaatgttacaaccaaaggtctccaccccgatcagaaggagtacgaaaagaacaatacaaccaccctgatggcatgtttaggcggacttcttggaattatcggcgtgatctgtctcatcagttgcctgtcacccgagatgaactgtgatgggggccatagctacgttagaaattatcttcagaagcccaccttcgcccttggagagctgtacccgcctctgataaatctgtgggaggcaggaaaggagaagagtactagcttaaaggtgaaagcaacagttatcggtcttcccaccaatatgtcttag

SEQ ID NO: 39806 - DNA, 3099 bp, Artificial Sequence
  derived and/or modified sequence
tttcagccaaccagactggagcagctgcgagtgctacatcttggctgtctgaagcgattggctcctctctggggagtggagggtgttcagttattaatgaccgctgagcaggcagcaccatgtcagtgtgacaactgatcgggtgaacgatgcaccactaaccaccatggaaacaaggaaaaataaagccagctcacaggatctctcttcactggattgagagcctcagcctgccgactgagaaaaagagttccaggaaaaagaaggaatcccggctgcagcctcctgccttcctttatattttaaaatagagagataagattgcgtgcatgtgtgcatatctatagtatatattttgtacactttgttacacagacacacaaatgcacctatttataccgggcaagaacacaaccatgtgattatctcaaccaaggaactgaggaatccagcacgcaaggacatcggaggtgggctagcactgaaactgcttttcaagacgaggaagaggaggagaaagagaaagaagaggaagatgttgggcaacatttatttaacatgctccacagcccggaccctggcatcatgctgctattcctgcaaatactgaagaagcatgggatttaaatattttacttctaaataaatgaattactcaatctcctatgaccatctatacatactccaccttcaaaaagtacatcaatattatatcattaaggaaatagtaaccttctcttctccaatatgcatgacatttttggacaatgcaattgtggcactggcacttatttcagtgaagaaaaactttgtggttctatggcattcatcatttgacaaatgcaagcatcttccttatcaatcagctcctattgaacttactagcactgactgtggaatccttaagggcccattacatttctgaagaagaaagctaagatgaaggacatgccactccgaattcatgtgctacttggcctagctatcactacactagtacaagctgtagataaaaaagtggattgtccacggttatgtacgtgtgaaatcaggccttggtttacacccagatccatttatatggaagcatctacagtggattgtaatgatttaggtcttttaactttcccagccagattgccagctaacacacagattcttctcctacagactaacaatattgcaaaaattgaatactccacagactttccagtaaaccttactggcctggatttatctcaaaacaatttatcttcagtcaccaatattaatgtaaaaaagatgcctcagctcctttctgtgtacctagaggaaaacaaacttactgaactgcctgaaaaatgtctgtccgaactgagcaacttacaagaactctatattaatcacaacttgctttctacaatttcacctggagcctttattggcctacataatcttcttcgacttcatctcaattcaaatagattgcagatgatcaacagtaagtggtttgatgctcttccaaatctagagattctgatgattggggaaaatccaattatcagaatcaaagacatgaactttaagcctcttatcaatcttcgcagcctggttatagctggtataaacctcacagaaataccagataacgccttggttggactggaaaacttagaaagcatctctttttacgataacaggcttattaaagtaccccatgttgctcttcaaaaagttgtaaatctcaaatttttggatctaaataaaaatcctattaatagaatacgaaggggtgattttagcaatatgctacacttaaaagagttggggataaataatatgcctgagctgatttccatcgatagtcttgctgtggataacctgccagatttaagaaaaatagaagctactaacaaccctagattgtcttacattcaccccaatgcatttttcagactccccaagctggaatcactcatgctgaacagcaatgctctcagtgccctgtaccatggtaccattgagtctctgccaaacctcaaggaaatcagcatacacagtaaccccatcaggtgtgactgtgtcatccgttggatgaacatgaacaaaaccaacattcgattcatggagccagattcactgttttgcgtggacccacctgaattccaaggtcagaatgttcggcaagtgcatttcagggacatgatggaaatttgtctccctcttatagctcctgagagctttccttctaatctaaatgtagaagctgggagctatgtttcctttcactgtagagctactgcagaaccacagcctgaaatctactggataacaccttctggtcaaaaactcttgcctaataccctgacagacaagttctatgtccattctgagggaacactagatataaatggcgtaactcccaaagaagggggtttatatacttgtatagcaactaacctagttggcgctgacttgaagtctgttatgatcaaagtggatggatcttttccacaagataacaatggctctttgaatattaaaataagagatattcaggccaattcagttttggtgtcctggaaagcaagttctaaaattctcaaatctagtgttaaatggacagcctttgtcaagactgaaaattctcatgctgcgcaaagtgctcgaataccatctgatgtcaaggtatataatcttactcatctgaatccatcaactgagtataaaatttgtattgatattcccaccatctatcagaaaaacagaaaaaaatgtgtaaatgtcaccaccaaaggtttgcaccctgatcaaaaagagtatgaaaagaataataccacaacacttatggcctgtcttggaggccttctggggattattggtgtgatatgtcttatcagctgcctctctccagaaatgaactgtgatggtggacacagctatgtgaggaattacttacagaaaccaacctttgcattaggtgagctttatcctcctctgataaatctctgggaagcaggaaaagaaaaaagtacatcactgaaagtaaaagcaactgttataggtttaccaacaaatatgtcctaaaaaccaccaaggaaacctactccaaaaatgaac

SEQ ID NO: 39807 - DNA, 3465 bp, Artificial Sequence
  derived and/or modified sequence
gcgagtgctacatcttggctgtctgaagcgattggctcctctctggggagtggagggtgttcagttattaatgaccgctgagcaggcagcaccatgtcagtgtgacaactgatcgggtgaacgatgcaccactaaccaccatggaaacaaggaaaaataaagccagctcacaggatctctcttcactggattgagagcctcagcctgccgactgagaaaaagagttccaggaaaaagaaggaatcccggctgcagcctcctgccttcctttatattttaaaatagagagataagattgcgtgcatgtgtgcatatctatagtatatattttgtacactttgttacacagacacacaaatgcacctatttataccgggcaagaacacaaccatgtgattatctcaaccaaggaactgaggaatccagcacgcaaggacatcggaggtgggctagcactgaaactgcttttcaagcatcatgctgctattcctgcaaatactgaagaagcatgggatttaaatattttacttctaaataaatgaattactcaatctcctatgaccatctatacatactccaccttcaaaaagtacatcaatattatatcattaaggaaatagtaaccttctcttctccaatatgcatgacatttttggacaatgcaattgtggcactggcacttatttcagtgaagaaaaactttgtggttctatggcattcatcatttgacaaatgcaagcatcttccttatcaatcagctcctattgaacttactagcactgactgtggaatccttaagggcccattacatttctgaagaagaaagctaagatgaaggacatgccactccgaattcatgtgctacttggcctagctatcactacactagtacaagctgtagataaaaaagtggattgtccacggttatgtacgtgtgaaatcaggccttggtttacacccagatccatttatatggaagcatctacagtggattgtaatgatttaggtcttttaactttcccagccagattgccagctaacacacagattcttctcctacagactaacaatattgcaaaaattgaatactccacagactttccagtaaaccttactggcctggatttatctcaaaacaatttatcttcagtcaccaatattaatgtaaaaaagatgcctcagctcctttctgtgtacctagaggaaaacaaacttactgaactgcctgaaaaatgtctgtccgaactgagcaacttacaagaactctatattaatcacaacttgctttctacaatttcacctggagcctttattggcctacataatcttcttcgacttcatctcaattcaaatagattgcagatgatcaacagtaagtggtttgatgctcttccaaatctagagattctgatgattggggaaaatccaattatcagaatcaaagacatgaactttaagcctcttatcaatcttcgcagcctggttatagctggtataaacctcacagaaataccagataacgccttggttggactggaaaacttagaaagcatctctttttacgataacaggcttattaaagtaccccatgttgctcttcaaaaagttgtaaatctcaaatttttggatctaaataaaaatcctattaatagaatacgaaggggtgattttagcaatatgctacacttaaaagagttggggataaataatatgcctgagctgatttccatcgatagtcttgctgtggataacctgccagatttaagaaaaatagaagctactaacaaccctagattgtcttacattcaccccaatgcatttttcagactccccaagctggaatcactcatgctgaacagcaatgctctcagtgccctgtaccatggtaccattgagtctctgccaaacctcaaggaaatcagcatacacagtaaccccatcaggtgtgactgtgtcatccgttggatgaacatgaacaaaaccaacattcgattcatggagccagattcactgttttgcgtggacccacctgaattccaaggtcagaatgttcggcaagtgcatttcagggacatgatggaaatttgtctccctcttatagctcctgagagctttccttctaatctaaatgtagaagctgggagctatgtttcctttcactgtagagctactgcagaaccacagcctgaaatctactggataacaccttctggtcaaaaactcttgcctaataccctgacagacaagttctatgtccattctgagggaacactagatataaatggcgtaactcccaaagaagggggtttatatacttgtatagcaactaacctagttggcgctgacttgaagtctgttatgatcaaagtggatggatcttttccacaagataacaatggctctttgaatattaaaataagagatattcaggccaattcagttttggtgtcctggaaagcaagttctaaaattctcaaatctagtgttaaatggacagcctttgtcaagactgaaaattctcatgctgcgcaaagtgctcgaataccatctgatgtcaaggtatataatcttactcatctgaatccatcaactgagtataaaatttgtattgatattcccaccatctatcagaaaaacagaaaaaaatgtgtaaatgtcaccaccaaaggtttgcaccctgatcaaaaagagtatgaaaagaataataccacaacacttatggcctgtcttggaggccttctggggattattggtgtgatatgtcttatcagctgcctctctccagaaatgaactgtgatggtggacacagctatgtgaggaattacttacagaaaccaacctttgcattaggtgagctttatcctcctctgataaatctctgggaagcaggaaaagaaaaaagtacatcactgaaagtaaaagcaactgttataggtttaccaacaaatatgtcctaaaaaccaccaaggaaacctactccaaaaatgaacaaaaaaaaaaaaagcgaaagactgcagttgtgctaaaaacaaaacaaaacaaacaaacaaacaaaaaagtaaaaaaagattactttcgagagagaagtttaagcttcaccaatgctgctcctgaccaatggaaatatgtacaacttcagcattttaagtaactggcttcaaggggtactgtggcaaccaaataaaataactccattttctaaaactttcatgtaacttttatgtctggactacagttcaagtggacaaaaacatttctgtattttttttaagtaaataagagtagttgaactgagcaatacctcctcctgtgttgtattacacatattagccacgagtttttgcagtgaccagataaacttgaattgacacgtggtgtaataaaatggacaaattctgtagagtagacacagtgagtatgtggacctcttttataaggaaaaatacattttggattaaaatcaa

SEQ ID NO: 39808 - DNA, 3725 bp, Artificial Sequence
  derived and/or modified sequence
tttcagccaaccagactggagcagctgcgagtgctacatcttggctgtctgaagcgattggctcctctctggggagtggagggtgttcagttattaatgaccgctgagcaggcagcaccatgtcagtgtgacaactgatcgggtgaacgatgcaccactaaccaccatggaaacaaggaaaaataaagccagctcacaggatctctcttcactggattgagagcctcagcctgccgactgagaaaaagagttccaggaaaaagaaggaatcccggctgcagcctcctgccttcctttatattttaaaatagagagataagattgcgtgcatgtgtgcatatctatagtatatattttgtacactttgttacacagacacacaaatgcacctatttataccgggcaagaacacaaccatgtgattatctcaaccaaggaactgaggaatccagcacgcaaggacatcggaggtgggctagcactgaaactgcttttcaaggaggtgaagcattccacagataatcagctactctattcagggaaggagtgtaaacatcaccactttttgcatgtttgcataaaaaaggcccactgaatcagttaaagacgaggaagaggaggagaaagagaaagaagaggaagatgttgggcaacatttatttaacatgctccacagcccggaccctggcatcatgctgctattcctgcaaatactgaagaagcatgggatttaaatattttacttctaaataaatgaattactcaatctcctatgaccatctatacatactccaccttcaaaaagtacatcaatattatatcattaaggaaatagtaaccttctcttctccaatatgcatgacatttttggacaatgcaattgtggcactggcacttatttcagtgaagaaaaactttgtggttctatggcattcatcatttgacaaatgcaagcatcttccttatcaatcagctcctattgaacttactagcactgactgtggaatccttaagggcccattacatttctgaagaagaaagctaagatgaaggacatgccactccgaattcatgtgctacttggcctagctatcactacactagtacaagctgtagataaaaaagtggattgtccacggttatgtacgtgtgaaatcaggccttggtttacacccagatccatttatatggaagcatctacagtggattgtaatgatttaggtcttttaactttcccagccagattgccagctaacacacagattcttctcctacagactaacaatattgcaaaaattgaatactccacagactttccagtaaaccttactggcctggatttatctcaaaacaatttatcttcagtcaccaatattaatgtaaaaaagatgcctcagctcctttctgtgtacctagaggaaaacaaacttactgaactgcctgaaaaatgtctgtccgaactgagcaacttacaagaactctatattaatcacaacttgctttctacaatttcacctggagcctttattggcctacataatcttcttcgacttcatctcaattcaaatagattgcagatgatcaacagtaagtggtttgatgctcttccaaatctagagattctgatgattggggaaaatccaattatcagaatcaaagacatgaactttaagcctcttatcaatcttcgcagcctggttatagctggtataaacctcacagaaataccagataacgccttggttggactggaaaacttagaaagcatctctttttacgataacaggcttattaaagtaccccatgttgctcttcaaaaagttgtaaatctcaaatttttggatctaaataaaaatcctattaatagaatacgaaggggtgattttagcaatatgctacacttaaaagagttggggataaataatatgcctgagctgatttccatcgatagtcttgctgtggataacctgccagatttaagaaaaatagaagctactaacaaccctagattgtcttacattcaccccaatgcatttttcagactccccaagctggaatcactcatgctgaacagcaatgctctcagtgccctgtaccatggtaccattgagtctctgccaaacctcaaggaaatcagcatacacagtaaccccatcaggtgtgactgtgtcatccgttggatgaacatgaacaaaaccaacattcgattcatggagccagattcactgttttgcgtggacccacctgaattccaaggtcagaatgttcggcaagtgcatttcagggacatgatggaaatttgtctccctcttatagctcctgagagctttccttctaatctaaatgtagaagctgggagctatgtttcctttcactgtagagctactgcagaaccacagcctgaaatctactggataacaccttctggtcaaaaactcttgcctaataccctgacagacaagttctatgtccattctgagggaacactagatataaatggcgtaactcccaaagaagggggtttatatacttgtatagcaactaacctagttggcgctgacttgaagtctgttatgatcaaagtggatggatcttttccacaagataacaatggctctttgaatattaaaataagagatattcaggccaattcagttttggtgtcctggaaagcaagttctaaaattctcaaatctagtgttaaatggacagcctttgtcaagactgaaaattctcatgctgcgcaaagtgctcgaataccatctgatgtcaaggtatataatcttactcatctgaatccatcaactgagtataaaatttgtattgatattcccaccatctatcagaaaaacagaaaaaaatgtgtaaatgtcaccaccaaaggtttgcaccctgatcaaaaagagtatgaaaagaataataccacaacacttatggcctgtcttggaggccttctggggattattggtgtgatatgtcttatcagctgcctctctccagaaatgaactgtgatggtggacacagctatgtgaggaattacttacagaaaccaacctttgcattaggtgagctttatcctcctctgataaatctctgggaagcaggaaaagaaaaaagtacatcactgaaagtaaaagcaactgttataggtttaccaacaaatatgtcctaaaaaccaccaaggaaacctactccaaaaatgaacaaaaaaaaaaaaagcgaaagactgcagttgtgctaaaaacaaaacaaaacaaacaaacaaacaaaaaagtaaaaaaagattactttcgagagagaagtttaagcttcaccaatgctgctcctgaccaatggaaatatgtacaacttcagcattttaagtaactggcttcaaggggtactgtggcaaccaaataaaataactccattttctaaaactttcatgtaacttttatgtctggactacagttcaagtggacaaaaacatttctgtattttttttaagtaaataagagtagttgaactgagcaatacctcctcctgtgttgtattacacatattagccacgagtttttgcagtgaccagataaacttgaattgacacgtggtgtaataaaatggacaaattctgtagagtagacacagtgagtatgtggacctcttttataaggaaaaatacattttggattaaaatcaattgcttctgtcttgttttgtttctaaataaagaataatttctggg

SEQ ID NO: 39809 - DNA, 2127 bp, Artificial Sequence
  derived and/or modified sequence
atgaaggacatgcccctgcgcatccacgtgctgctgggcctggccatcaccaccctggtgcaggccgtggacaagaaggtggactgcccccggctgtgcacctgtgagatccggccctggttcacccccaggagcatctacatggaggccagcacagtggactgcaatgacctgggcctgctgaccttccctgcccggctgcctgccaacacccagatcctgctgctgcagaccaacaacatcgccaagattgagtacagcacagacttccctgtgaacctgaccggcctggacctgagccagaacaacctgagctctgtgaccaacatcaacgtgaagaagatgccccagctgctgtctgtgtacctggaggagaacaagctgacagagctgcctgagaagtgcctgtctgagctgagcaacctgcaggagctgtacatcaaccacaacctgctgagcaccatcagccctggggccttcatcggcctgcacaacctgctgcggctgcacctgaacagcaaccggctgcagatgatcaacagcaagtggtttgatgccctgcccaacctggagatcctgatgattggagagaaccccatcatccgcatcaaggacatgaacttcaagcccctcatcaacctgcggagcctggtgattgctggcatcaacctgacagagatcccagacaatgccctggtgggcctggagaacctggagagcatctccttctatgacaacagactcatcaaggtgccccacgtggccctgcagaaggtggtgaacctgaagttcctggacctgaacaagaaccccatcaaccgcatccggcggggggacttcagcaacatgctgcacctgaaggagctgggcatcaacaacatgcctgagctgatcagcattgacagcctggccgtggacaacctgcctgacctgaggaagattgaggccaccaacaacccccggctgagctacatccaccccaatgccttcttccggctgcccaagctggagagcctgatgctgaacagcaatgccctgagcgccctgtaccacggcaccatcgagagcctgcccaacctgaaggagatcagcatccacagcaaccccatccgctgtgactgtgtgatccgctggatgaacatgaacaagaccaacatccgcttcatggagccagacagcctcttctgtgtggaccccccagagttccagggccagaatgtgcggcaggtgcacttccgggacatgatggagatctgcctgcccctgattgcccctgagagcttccccagcaacctgaatgtggaggccggcagctatgtgtccttccactgccgggccacagctgagccccagcctgagatctactggatcacccccagcggccagaagctgctgcccaacaccctgacagacaagttctacgtgcacagcgagggcaccctggacatcaacggggtgacccccaaggagggcggcctgtacacctgcatcgccaccaacctggtgggcgctgacctgaagtctgtgatgatcaaggtggatggcagcttcccccaggacaacaacggcagcctgaacatcaagatccgggacatccaggccaacagcgtgctggtgtcctggaaggccagcagcaagatcctgaagagctctgtgaagtggacagcctttgtgaagacagagaacagccatgctgcccagagcgcccgcatccccagtgatgtgaaggtgtacaacctgacccacctgaaccccagcacagagtacaagatctgcatcgacatccccaccatctaccagaagaacaggaagaagtgtgtgaatgtgaccaccaagggcctgcacccagaccagaaggagtatgagaagaacaacaccaccaccctgatggcctgcctgggcggcctgctgggcatcatcggggtcatctgcctgatcagctgcctgagccctgagatgaactgtgatggcggccacagctatgtgaggaactacctgcagaagcccacctttgccctgggggagctgtacccacccctcatcaacctgtgggaggccggcaaggagaagagcaccagcctgaaggtgaaggccaccgtgattggcctgcccaccaacatgtcctag

SEQ ID NO: 39810 - DNA, 2127 bp, Artificial Sequence
  derived and/or modified sequence
atgaaggacatgcccctgcggatccacgtgctgctgggcctggccatcaccaccctggtgcaagctgtcgataagaaagtagactgccccagactctgcacttgtgagatacggccctggttcactcctagatcgatttatatggaggcatccacggtcgattgcaatgatctgggtttactaacgtttcccgccagactgccagcaaatacacagatcctcttgcttcagaccaataacatagccaaaatcgagtatagcacagactttcccgtgaatctcacgggccttgacctctctcagaacaatctctcttcagtgacaaacattaatgtaaagaagatgccgcagctcctgagtgtatacttagaggaaaataaattaacagagttgcccgagaagtgtctgtcggagctgtccaatcttcaggagctgtacattaatcacaatctcctcagtacaatctcccccggcgcattcatcgggctgcataatttgctgcgtctgcacttgaattcgaacagactccagatgatcaacagcaagtggttcgatgctctacctaatctggaaatcctcatgatcggggagaatcctataattaggattaaagacatgaattttaagcctctgatcaacctgaggagcctagtgattgccgggattaacctgaccgaaatccctgataatgcgctggtgggattagagaatctcgagtcaatctcattttatgacaaccggctgataaaggttccgcacgtggctttacaaaaggtggtgaaccttaaatttttggatctaaacaagaatcccattaaccgaatacgccggggagattttagcaatatgttgcacttaaaagaactagggattaataatatgccggaactcattagcatagattccctggcagtagacaatttacctgatctaaggaaaatagaggctacaaataacccaagactttcatacatccaccccaacgcattcttcagactccctaaactggagagtcttatgcttaacagtaacgccctgtctgcgttgtatcacgggacaatcgagagcctcccaaatctgaaggagattagcattcatagtaaccctatccgttgcgactgcgtgatacgctggatgaacatgaataagaccaacatacgattcatggagcctgattccttattttgtgtggatccacccgaatttcaaggtcagaacgttcggcaagtgcacttccgtgacatgatggagatctgtctcccccttattgcacccgagtcttttcctagcaatttgaatgttgaagcaggatcatacgtctccttccattgtagggcgacggctgagcctcaacctgaaatttattggatcactccttccggccagaaattattgcctaatactctgacagacaaattctatgtccattcagagggaaccctcgatattaacggcgtgaccccgaaggaaggaggactgtatacttgtattgccaccaacctggttggggcagatctgaagtccgttatgattaaagtggacggctctttccctcaggacaacaacggctcgttgaacattaaaattagagacatccaggctaattcggtcctggtctcttggaaggcttcaagcaagatactgaaatcttctgtaaagtggacagcatttgtcaagacagagaattcacatgccgcccagtccgcacggatccctagcgatgtgaaggtgtacaacctcactcacttaaaccccagtaccgagtataagatctgcatcgacattcccacgatctaccaaaagaataggaagaaatgcgtgaacgtaaccaccaaagggctgcacccagatcagaaagaatatgagaagaataatacgacaacactcatggcctgcctcggtggattgcttggcatcatcggcgtgatttgcctgatatcttgcctgtcccccgagatgaactgtgacgggggtcactcttatgtaagaaactacctacaaaagcctacgttcgcactgggcgagctctacccgcccttaatcaatctgtgggaggccgggaaggagaaatccacatccctcaaagtgaaggccactgtaatcggcctccctacgaatatgagctag

SEQ ID NO: 39811 - DNA, 2127 bp, Artificial Sequence
  derived and/or modified sequence
atgaaggacatgcccctgcggatccacgtgctgctgggcctggccattactactttggtgcaggcagtggataagaaggtggactgccctcgactctgcacatgtgaaattagaccgtggtttacaccacggagtatttacatggaagccagtacagtggactgtaatgacctcggtctgttgacattccctgctagactgcctgccaacacccaaattcttctgcttcaaactaataatattgcaaagatcgaatactctaccgattttcccgtgaacctgaccggactggatctctctcaaaacaatctcagttcagtgacaaacattaatgtgaaaaagatgccacagttattgtccgtttacctggaagagaacaagctcacagaactgccggaaaagtgtctatcagagctatcaaacctacaggaactgtacatcaatcacaacctgctcagcacaatctctcctggagctttcattggtttgcataatctactcaggctccacctgaactcaaatcggctgcaaatgattaacagtaaatggtttgatgcgttgccaaatcttgagatactcatgatcggcgaaaacccgatcataagaatcaaggacatgaattttaagccactgataaacctacgctcgttagtgatcgccggaataaatctgactgaaataccggacaatgccttggtcggactggaaaatctcgagtcgatcagcttctacgacaataggcttatcaaagtacctcacgttgctcttcagaaggtggttaatctgaaattcctcgatttgaacaaaaatccaataaacaggatccggcggggcgatttctccaacatgctccatttgaaagagctcggtattaacaatatgcccgaactgatctccatcgactcacttgctgtcgataatctccctgacctgagaaaaattgaggccacgaataacccccggctgagctatatccacccaaatgccttctttcgcttgcccaaactagagtctctaatgctgaactctaacgctttgagcgccctgtaccatggtacaatagagtccttacccaacttaaaagagattagcatccactcgaacccaatacgctgcgattgcgtgattagatggatgaatatgaacaagaccaatatacgcttcatggagcctgacagcttattttgtgtcgatccccctgagttccaggggcagaatgtgcggcaggtccatttccgagacatgatggagatctgccttccactaatcgccccggagagctttccctctaatctaaacgtggaggccggctcatacgttagttttcactgtagggcaaccgctgaacctcagcccgagatttactggatcacgccttccggccaaaaattgctgccaaacacattgacagacaagttttacgttcattccgagggaacgttggatattaatggcgtcactcccaaagagggtggcctctatacctgcattgcgacaaacttagtaggcgcggacctgaaatccgttatgatcaaggtggacgggtcttttccccaggataataacggtagcctcaacattaaaatccgtgacattcaggcaaacagcgtgttggtgagctggaaggctagttctaaaattctgaaatcaagcgtgaagtggactgccttcgtcaagacggagaactcccatgccgcacagagcgcacgtattccttctgacgtgaaagtctacaacctgacacatttgaatcccagtacagaatataagatctgcatcgacatcccaacaatataccagaagaatagaaagaagtgcgtgaacgtaacgaccaagggtcttcaccccgatcaaaaagaatacgagaaaaacaacacaaccactctcatggcatgtcttggcgggctactcgggattataggcgttatctgtctcatcagttgtctgtcccccgagatgaattgcgacggcggacacagttatgtgagaaattatctgcagaaacctacattcgctctgggagaactgtatcctcccctgataaacttgtgggaggctggtaaagagaaatccaccagcctgaaggtaaaagccacggtgatcggactgccaaccaatatgtcctag

SEQ ID NO: 39812 - DNA, 2127 bp, Artificial Sequence
  derived and/or modified sequence
atgaaggacatgcccctgcggatccacgtgctgctgggcctggccatcacaaccctcgtgcaggctgtggacaagaaagtggactgtcccagactctgtacatgtgagattcggccttggtttaccccaaggagcatttatatggaggcttccactgtggactgcaacgacctgggattactgacttttcccgcccggctgcctgctaatacacagatcttgttactccagaccaacaatatcgccaaaatcgagtactcaacagacttccctgtgaacttgacgggactggacctgtcccagaacaacttgagctctgtaactaatattaacgtcaaaaagatgccccagctcttgtccgtttacttggaggagaacaaactgacagagctccctgaaaaatgcttgtctgaactctcgaatttgcaggagctctacattaaccataaccttctctccaccatatctcctggtgcctttattggccttcacaatcttctacgacttcacctgaatagtaaccggcttcagatgattaacagcaagtggttcgatgctctccccaatctggaaatcctgatgattggcgagaaccccattatccgtattaaggacatgaatttcaaacccctgattaacttgagatcactcgtaatcgcaggaataaacctcactgaaattccagacaacgcccttgtggggttagagaacctggagagtatcagcttctacgacaaccggctgattaaggtgccccacgtggctctgcagaaagtggtcaatctgaaatttctcgacctcaacaaaaacccaatcaatcgaattcgtagaggggatttctctaacatgctccacttaaaggagctggggataaataatatgcccgagttgatctcaattgactcactcgcagtggacaacctccccgatttacgtaaaattgaggcaaccaataatccgaggctgagttatatacacccaaacgcctttttccggttgcccaaactagagagccttatgcttaactctaatgcgctgtcagcactctaccatgggacgatagaatccctgcctaatttgaaggagatttcaatacacagtaatcctatcagatgtgactgcgtgatacgttggatgaacatgaacaaaactaacatccggttcatggagccagactcgctgttctgcgtggatccaccggagttccagggtcaaaacgttagacaggtacatttcagggacatgatggaaatctgtctccctttaatcgcaccagagagttttccaagtaacctgaacgtggaggcaggtagctacgtatcatttcattgccgggccaccgccgagcctcagcctgaaatttactggatcaccccaagtgggcagaaacttctgcctaacacactcaccgacaagttctacgtgcattctgaaggcacgctggatatcaatggcgtgacccccaaggaggggggtctttacacatgtatcgctaccaacctcgttggtgcagacttgaagtctgtcatgatcaaagtagacggtagctttccacaggacaacaatggatctctgaatatcaagatcagggatatccaggccaattcggtgttggtcagctggaaagcatcttctaagatcctcaagtcgtctgtcaagtggacagcctttgtgaagaccgagaattcccacgccgcacagagtgcaagaataccaagcgacgtgaaggtctataacctaacgcatcttaacccttcaactgagtacaagatatgtatcgatatacctactatctaccaaaaaaaccggaaaaagtgcgttaatgttactactaaggggcttcatccagaccagaaggagtatgagaaaaacaacacaacgacactgatggcttgcctaggaggtcttctaggaataatcggagtaatttgtttaatatcgtgtctcagccccgaaatgaattgtgacgggggacacagctacgtgcgtaattacctgcagaaacctacatttgccctgggggagttgtaccctccgctgataaatctctgggaggccggcaaggagaaaagcacttccctgaaagtgaaggccaccgtgatagggttgcctacaaatatgagctag

SEQ ID NO: 39813 - DNA, 2127 bp, Artificial Sequence
  derived and/or modified sequence
atgaaggatatgcccctccggatccatgtgttactcggacttgcgatcaccacactggtccaagctgtggacaagaaggtggactgccccaggctgtgtacttgtgaaatccggccttggtttactccccgtagtatttatatggaagcctcaactgtcgattgtaacgacctgggactgctgacatttccagcaagacttcccgcaaacactcagattttgctcctgcaaactaacaacattgccaaaatagagtacagtacagatttccccgttaatctcacgggactcgacttgtcacaaaataatttaagcagcgttaccaacatcaacgtgaagaaaatgcctcagctgctgtctgtctatttggaggagaacaagctcaccgaactccccgagaaatgcttaagcgagctgagcaacctacaggaattgtatatcaaccacaatctgctgtcaacaataagccctggtgcgttcattggactgcataacctactgaggctgcacctcaatagtaacaggctccagatgatcaactctaaatggtttgatgccttacccaatctggagatcctcatgattggcgaaaacccaattatcagaatcaaggacatgaacttcaaaccactcatcaatcttagatccctcgtgattgccggaatcaaccttacagagatccctgataatgctctcgtgggcctggaaaatcttgaatccatctccttttacgacaaccgcctaattaaagtgccgcacgtggctttacagaaagtcgtgaacctgaagtttctggatctgaacaaaaaccccatcaatcgaatcaggcgcggagatttctcgaacatgctgcacttgaaggagttgggaattaacaacatgccagagctgatttccattgattcacttgccgtggataacctgcccgacctacggaagatcgaggccaccaataatcctcggctgtcatatatccaccctaacgctttctttcgccttccgaaactggaatcactgatgctgaacagtaatgccttgagtgccttgtaccacggaactatcgaatccctgccaaatctcaaggaaatcagtattcattctaaccctatacgatgcgactgcgtgattaggtggatgaacatgaataaaactaacattcgattcatggaacctgacagcctgttctgtgtggatcctcctgagtttcaaggccagaacgtgcgacaggtccactttcgcgatatgatggagatttgtctgcctctcattgccccagaaagctttccatctaacctgaatgtggaagccggaagctatgtgtcatttcactgccgcgcaaccgctgaaccacagcccgaaatctattggatcactcctagtggccaaaagctgctgccaaataccctgaccgacaagttctacgtccacagtgaggggaccctggacatcaacggtgtcaccccaaaggaaggtgggctgtatacttgtatcgcaacaaatctagtgggcgcagacctcaagagcgttatgattaaggttgacggctccttcccccaggacaacaacgggtcactgaacatcaaaatacgcgacatccaggccaattccgttctcgtttcttggaaggcctcctccaagatcctgaaatcctccgtgaagtggactgctttcgtgaagacagaaaattctcatgccgctcagagcgctcgtatcccatccgatgtgaaggtctacaatctgactcacctcaatccttccactgaatataagatatgcatcgatattccgacaatctaccagaaaaatcgtaagaagtgcgtaaacgtgacaacaaagggtcttcacccagaccaaaaggagtacgaaaagaataacacaactacccttatggcttgtctggggggtctactgggcatcatcggtgtgatctgcctcatttcctgtctatctccagaaatgaattgtgacggcggacatagttatgtacgcaactacctccaaaagcccacatttgcgctgggagaactctatccgccattgatcaacctctgggaggcaggcaaagagaaaagcacttccctcaaggtaaaagccacagtgattggattgccaacgaacatgtcatag

SEQ ID NO: 39814 - DNA, 2127 bp, Artificial Sequence
  derived and/or modified sequence
atgaaagacatgcctctccggattcacgtgctgctggggcttgcgattacaacactggtccaggcagtcgataaaaaggtcgactgtcctaggctgtgtacatgtgagatccgcccatggtttaccccacggagcatttatatggaggccagcactgtggactgtaatgatctcggtcttctgacgtttcctgcgaggttacccgcaaatactcagatcctattgctgcagacgaacaatatcgcgaaaatagaatattctaccgacttcccggtgaatctgacagggctagatctgtcccagaacaatctgagtagtgtgaccaatatcaacgttaagaaaatgccacaactgctgagtgtgtacctagaggaaaataaactgacagaattgcccgagaagtgcctttccgagctgagtaatctgcaggagctgtatatcaaccacaatctcctgtcaacaatcagtcctggggcattcattggtctccataatctcctgcgtctgcatttgaactcaaacaggttgcagatgattaactcaaagtggttcgatgccctgcctaatctcgagatcttgatgatcggcgagaacccaatcattagaattaaggatatgaacttcaagcctcttatcaacttgcgcagccttgtgatcgccggtatcaacttgaccgagatccctgataacgccctcgtggggctcgagaacctggagtcgatttcattttacgacaatcgactgatcaaggtcccccacgtagcccttcagaaggtggtcaacctaaaattcctggatctaaataagaatcccatcaaccgcatcaggcggggagatttcagtaacatgttacatttgaaagaattggggattaataatatgcctgaattaatctccatcgattccctcgctgtcgacaacctgcccgacttacgcaagatcgaggcaaccaacaacccgagactgagttacattcaccctaatgctttcttccgacttcccaaattagagagtttgatgctcaactctaatgccctctctgcattgtaccatggaactattgaatctctccccaacctgaaggagatatcaatccacagcaacccgatccgttgtgactgtgtcatcaggtggatgaatatgaataaaaccaatatcaggtttatggagcctgattccttgttctgtgtggaccctcctgaattccagggccagaacgttcggcaggtgcacttcagagatatgatggaaatttgtctgccgctaatagcgcctgagagctttccttcaaatttaaacgttgaggcgggttcttacgtgtctttccactgtcgggctacagcagagccgcagccggaaatctactggatcacccccagtggccagaagctcctgccaaacacgctcactgacaagttttacgtccacagcgagggtacactggacattaacggggtgacaccgaaggaagggggactctatacgtgcattgcaacaaacctggtcggggctgatcttaagagtgtcatgatcaaggtggatggcagcttcccacaagataacaacggaagcctcaatatcaagattcgggacatacaggctaattcggtcttagtgtcctggaaagcctcttcaaaaattctgaaatcatccgtcaaatggacagcctttgttaagaccgagaattcgcacgcagctcagagcgcgaggattccatccgacgtgaaagtttataacttgacccatctgaaccccagtaccgagtacaagatctgcatagatatccccaccatctatcaaaaaaaccggaagaagtgtgtcaatgttactactaaggggctccaccccgaccagaaggaatatgagaaaaacaatacaaccacattaatggcatgcttaggaggtttgcttggcatcattggtgtaatttgcctgatttcctgccttagccccgaaatgaattgtgatggcggtcattcatatgtgcgaaactatttgcaaaagcctaccttcgccctgggggaattataccctcccctgatcaatctgtgggaagctggcaaggagaagagcacgagtcttaaggtgaaggctacagtcatcggactgcccaccaacatgagttag

SEQ ID NO: 39815 - DNA, 2127 bp, Artificial Sequence
  derived and/or modified sequence
atgaaagatatgcctttacggatccacgtgctgctgggactggccattaccacgctcgtccaggcggtggacaaaaaagtagactgtcctaggctgtgtacctgcgaaattcgaccttggtttactcctcgctctatctacatggaagcttccaccgtggactgcaatgatcttgggctactgacgttcccggctcgcttgcccgctaatacccagattctgctgttacaaactaataacattgctaagatagaatactcaaccgactttcccgtcaatctcaccggactcgatctaagccagaataacctttcaagtgtgaccaatatcaacgttaaaaagatgccccaattattaagtgtctatttagaagaaaataagttaaccgaattgccagagaagtgcctgtcagagctgtctaacctccaggagctgtacatcaatcataatctgttgagcactataagccctggcgcattcattgggctgcacaacctcctcagattgcaccttaatagcaataggctgcaaatgataaacagcaaatggttcgacgccctgcccaaccttgagatcctgatgatcggtgagaatcctattatacgcatcaaggatatgaacttcaagcctcttatcaacctccggagcctggttatcgctggaatcaaccttactgaaatcccagacaacgcactcgtgggtctcgagaacctggagagtatatctttttatgacaaccggctgatcaaggtgccccacgtggcactgcagaaggtggttaacctgaagttcctggacttaaataaaaatccaatcaaccgtatccgtcggggtgacttctcaaacatgctgcatttgaaggagctgggaatcaacaatatgccagagctcatttcaatagactcgctcgccgtggataacctccccgacctccgcaaaattgaagccacgaataacccccgactgtcatatatacatcctaatgcattttttaggctgcctaaactggagtcgctgatgctgaacagcaacgccctgtctgccctgtaccacgggaccatcgagtctcttcccaatctgaaggaaataagcatccacagcaatccaatccgatgtgattgcgttattaggtggatgaatatgaataaaactaacatcaggttcatggagcccgactccctgttctgcgtggaccccccagagtttcagggccagaacgtgcgacaggtacactttagggacatgatggagatttgtctgcccctcatcgctcctgaaagctttcctagtaatttaaatgtcgaggctggctcctacgtgtcattccattgccgcgctaccgcggagccccagcctgagatttactggattaccccttcggggcagaagctgctgcctaacacccttacagacaaattttatgtgcattccgaggggactctcgacattaacggggtcacacctaaggaagggggattgtacacctgcattgcgactaatttggttggcgctgatttgaagtcagtcatgattaaggtggatggttcatttccccaggacaataacggatcactgaacatcaaaataagggatatccaagccaacagcgtgctggtctcctggaaggctagctctaaaatcctgaagagctcagtcaagtggacagctttcgtgaagaccgagaattcccatgcagcccagtccgcccgaatcccaagcgacgtgaaagtgtacaacctgacccaccttaatcccagtacggagtacaagatatgcattgacatccccacgatttatcagaagaataggaagaagtgcgtgaacgtgactacaaaaggccttcatcctgatcagaaggagtatgaaaagaataacaccaccaccctgatggcatgtttagggggtctgttgggaatcatcggagtaatttgtctgatctcctgcctcagtcccgaaatgaactgcgacgggggacactcttatgtgagaaattatcttcaaaagccaacatttgctttgggggagttgtatcctccactaattaatctctgggaagctggaaaggagaagtcaacctccctaaaagttaaggcaaccgtgataggactccccacaaacatgagctag

SEQ ID NO: 39816 - protein, 107 aa, Artificial Sequence
  derived and/or modified sequence
MLRLYPGPMVTEAEGKGGPEMASLSSSVVPVSFISTLRESVLDPGVGGEGASDKQRSKLSLSHSMIPAAKIHTELCLPAFFSPAGTQRRFQQPQHHLTLSIIHTAAR

SEQ ID NO: 39817 - DNA, 324 bp, Artificial Sequence
  derived and/or modified sequence
atgctgagactgtaccccggccccatggtgaccgaggccgagggcaagggcggccccgagatggccagcctgagcagcagcgtggtgcccgtgagcttcatcagcaccctgagagagagcgtgctggaccccggcgtgggcggcgagggcgccagcgacaagcagagaagcaagctgagcctgagccacagcatgatccccgccgccaagatccacaccgagctgtgcctgcccgccttcttcagccccgccggcacccagagaagattccagcagccccagcaccacctgaccctgagcatcatccacaccgccgccagatag

SEQ ID NO: 39818 - DNA, 324 bp, Artificial Sequence
  derived and/or modified sequence
atgctgcgcctatacccaggacccatggttaccgaggctgaggggaagggaggcccagaaatggcaagtctaagctcctccgtagtgcctgtttctttcattagcactctgagggaatccgttctggaccctggagtgggcggtgaaggagcctcagacaagcagaggagtaagctgtcattgtctcattcgatgattccagcagcaaagatccatactgaactgtgcctgccggctttcttttctcccgccggcacacagagacggtttcagcagccacagcaccacttaaccctttctattatccacactgcagctcggtag

SEQ ID NO: 39819 - DNA, 324 bp, Artificial Sequence
  derived and/or modified sequence
atgctgcggctgtacccaggccccatggtgacagaagctgagggcaagggcggccctgagatggccagcctgagcagctctgtggtgcctgtgtccttcatcagcaccctgcgggagagcgtgctggaccccggggtgggcggggagggcgccagtgacaagcagaggagcaagctgagcctgagccacagcatgatcccagctgccaagatccacacagagctgtgcctgcctgccttcttctccccagctggcacccagaggcgcttccagcagccccagcaccacctgaccctgagcatcatccacacagctgccaggtag

SEQ ID NO: 39820 - DNA, 324 bp, Artificial Sequence
  derived and/or modified sequence
atgctgcggctgtaccccggccccatggtgaccgaggccgagggcaaaggagggcccgaaatggcaagcctgagttcaagtgtcgtgcctgttagtttcatatccacactgcgggagtcagtcctcgaccctggcgtgggtggtgagggtgctagtgataagcagcgatcaaagctgtccctgagtcattctatgatcccagctgccaagatccatacggagttatgcctgccggcctttttctccccggcaggaacacaacgccggtttcagcagccgcaacaccatttgacactttctataatccacacagccgcacgctag

SEQ ID NO: 39821 - DNA, 324 bp, Artificial Sequence
  derived and/or modified sequence
atgcttaggttgtatcccggaccaatggtgacagaagctgaagggaaggggggtcccgagatggcatcattaagttcaagcgtcgttcccgttagctttattagcactcttcgcgagtcagttcttgatccaggcgtgggcggtgaaggtgctagcgataaacaaagaagcaaactgtcactgagccactcaatgattcctgccgctaaaatacatactgagttgtgcttgccggcttttttctccccagctggcacacaacgacgctttcaacagcctcagcaccacctgaccctgtcaatcatccacacggctgcccgttag

SEQ ID NO: 39822 - DNA, 818 bp, Artificial Sequence
  derived and/or modified sequence
ctggctgagtgagatggcagctggcttggcaaggggacagcacctttgtcaccacattatgtccctgtaccctacatgctgcgcctatacccaggaccgatggtaactgaggcggaggggaaaggagggcctgagatggcaagtctgtcctcctcggtggttcctgtgtccttcatttccactctgcgagagtctgtgctggaccctggagttggtggagaaggagccagtgacaagcagaggagcaaactgtctttatcacactccatgatcccagctgctaaaatccacactgagctctgcttaccagccttcttctctcctgctggaacccagaggaggttccagcagcctcagcaccacctgacactgtctatcatccacactgcagcaaggtgattctgccaaaacatatctccttaaaagccaactggagcttctcatcagcatcaatgtgaagccaaaaatccttaggaggacagagggagtccctcacaacctagactggtccccttccctccagctgcctcaactgtccacaggactctcttcccacctgcggccacactgtgcaacctggaatttccccacctgggcggactcatcacgtcatcaccaattggatgcatcttctgctctgtgcagctggtgaaatctttctcaacccttgagatgcagcccaatcttctcctaacatctggattcctctctgtcactgcattccctcctgtcatcctgcctttgttttcttgccctcctttctctcccgggtgataggcattaactaaaattaaataaaaattcagatcatccttgca

SEQ ID NO: 39823 - protein, 93 aa, Artificial Sequence [sequence omitted]

SEQ ID NO: 39824 - protein, 107 aa, Artificial Sequence
  derived and/or modified sequence
MEQKLVEEILQAITMSTDTGVSLPSYEEDQGSKLIRKAKEAPFVPVGIAGFAAIVAYGLYKLKSRGNTKMSIHLIHMRVAAQGFVVGAMTVGMGYSMYREFWAKPKP

SEQ ID NO: 39825 - DNA, 324 bp, Artificial Sequence
  derived and/or modified sequence
atggagcagaagctggtggaggagatcctgcaggccatcaccatgagcaccgacaccggcgtgagcctgcccagctacgaggaggaccagggcagcaagctgatcagaaaggccaaggaggcccccttcgtgcccgtgggcatcgccggcttcgccgccatcgtggcctacggcctgtacaagctgaagagcagaggcaacaccaagatgagcatccacctgatccacatgagagtggccgcccagggcttcgtggtgggcgccatgaccgtgggcatgggctacagcatgtacagagagttctgggccaagcccaagccctag

SEQ ID NO: 39826 - DNA, 324 bp, Artificial Sequence
  derived and/or modified sequence
atggagcagaagcttgtcgaagaaatactccaggccatcaccatgtccactgacaccggcgtatccttaccctcctatgaagaggatcaggggagcaaactcatcagaaaagccaaggaagccccctttgtccccgttggtattgcaggttttgccgccatagtcgcctatggactgtacaaactgaagagccgcggaaacaccaagatgagtattcatctaatacacatgagagtcgctgcgcagggcttcgtcgttggcgcgatgaccgtgggcatgggctacagcatgtatcgcgaattctgggccaagcccaagccttag

SEQ ID NO: 39827 - DNA, 1373 bp, Artificial Sequence
  derived and/or modified sequence
ggctgggacggctgtgggtggggagaagccgggaggactgggtgcgcctgcagggatcggaagccggttggggtgtgagaggttttctcgctctagggagattcttcaagcaatcactatgtcaacagacacaggtgtttcccttccttcatatgaggaagatcagggatcaaaactcattcgaaaagctaaagaggcaccattcgtacccgttggaatagcgggttttgcagcaattgttgcatatggattatataaactgaagagcaggggaaatactaaaatgtccattcatctgatccacatgcgtgtggcagcccaaggctttgttgtaggagcaatgactgttggtatgggctattccatgtatcgggaattctgggcaaaacctaagccttagaagaagagatgctgtcttggtcttgttggaggagcttgctttagttagatgtcttattattaaagttacctattattgttggaaataaactaatttgtatgggtttagatggtaacatggcattttgaatattggcttcctttcttgcaggcttgatttgcttggtgaccgaattactagtgactagtttactaactaggtcattcaaggaagtcaagttaacttaaacatgtcacctaaatgcacttgatggtgttgaaatgtccaccttcttaaatttttaagatgaacttagttctaaagaagataacaggccaatcctgaaggtactccctgtttgctgcagaatgtcagatattttggatgttgcataagagtcctatttgccccagttaattcaacttttgtctgcctgttttgtggactggctggctctgttagaactctgtccaaaaagtgcatggaatataacttgtaaagcttcccacaattgacaatatatatgcatgtgtttaaaccaaatccagaaagcttaaacaatagagctgcataatagtatttattaaagaatcacaactgtaaacatgagaataatttaaggattctagtttagttttttgtaattgcaaattatatttttgctgctgatatattagaataatttttaaatgtcatcttgaaatagaaatatgtattttaagcactcacgcaaaggtaaatgaacacgttttaaatgtgtgtgttgctaattttttccataagaattgtaaacattgaactgaacaaattacctataatggatttggttaatgacttatgagcaagctggtttggccagacagtatacccaaacttttatataatatacagaaggctatcacacttgtgaaattctcttgtctaatctgaatttgcattccatggtgttaacatggtatatgtattgttattaaagtaagtgacccatgtcaaa

SEQ ID NO: 39828 - DNA, 1322 bp, Artificial Sequence
  derived and/or modified sequence
gcgcctgcagggatcggaagccggttggggtgtgagaggttttctcgctctagaacctcatagaaattctttctcagggagattcttcaagcaatcactatgtcaacagacacaggtgtttcccttccttcatatgaggaagatcagggatcaaaactcattcgaaaagctaaagaggcaccattcgtacccgttggaatagcgggttttgcagcaattgttgcatatggattatataaactgaagagcaggggaaatactaaaatgtccattcatctgatccacatgcgtgtggcagcccaaggctttgttgtaggagcaatgactgttggtatgggctattccatgtatcgggaattctgggcaaaacctaagccttagaagaagagatgctgtcttggtcttgttggaggagcttgctttagttagatgtcttattattaaagttacctattattgttggaaataaactaatttgtatgggtttagatggtaacatggcattttgaatattggcttcctttcttgcaggcttgatttgcttggtgaccgaattactagtgactagtttactaactaggtcattcaaggaagtcaagttaacttaaacatgtcacctaaatgcacttgatggtgttgaaatgtccaccttcttaaatttttaagatgaacttagttctaaagaagataacaggccaatcctgaaggtactccctgtttgctgcagaatgtcagatattttggatgttgcataagagtcctatttgccccagttaattcaacttttgtctgcctgttttgtggactggctggctctgttagaactctgtccaaaaagtgcatggaatataacttgtaaagcttcccacaattgacaatatatatgcatgtgtttaaaccaaatccagaaagcttaaacaatagagctgcataatagtatttattaaagaatcacaactgtaaacatgagaataatttaaggattctagtttagttttttgtaattgcaaattatatttttgctgctgatatattagaataatttttaaatgtcatcttgaaatagaaatatgtattttaagcactcacgcaaaggtaaatgaacacgttttaaatgtgtgtgttgctaattttttccataagaattgtaaacattgaactgaacaaattacctataatggatttggttaatgacttatgagcaagctggtttggccagacagtatacccaaacttttatataatatacagaaggctatcacacttgtgaaattctcttgtctaatctgaatttgcattccatggtgttaacatggtatatg

SEQ ID NO: 39829 - DNA, 585 bp, Artificial Sequence
  derived and/or modified sequence
aagcgaaacaagccgggggactgcgagccagggactcgggccgcggggcgggaagaagtggggcagcgcttggccaggccgaaaggactttgggggtgggggctgggagtccgtgtctcgaatgagggaggagaggtggagttgccggggctcaggcccggcctcgagcatgggcggatgagaggagtcgggagccgaggcctagggtccttcgggtgaggggagacggagccagcgaggagatggagcagaagcttgtggaggagattcttcaagcaatcactatgtcaacagacacaggtgtttcccttccttcatatgaggaagatcagggatcaaaactcattcgaaaagctaaagaggcaccattcgtacccgttggaatagcgggttttgcagcaattgttgcatatggattatataaactgaagagcaggggaaatactaaaatgtccattcatctgatccacatgcgtgtggcagcccaaggctttgttgtaggagcaatgactgttggtatgggctattccatgtatcgggaattctgggcaaaacctaagccttagaagaagagatgctgtcttg

SEQ ID NO: 39830 - DNA, 324 bp, Artificial Sequence
  derived and/or modified sequence
atggagcagaagctggtggaggagatcctgcaggccatcaccatgagcacagacacaggagtgtccctgcccagctatgaggaggaccagggcagcaagctgatcaggaaggccaaggaggccccctttgtgcctgtgggcattgctggctttgctgccatcgtggcctacggcctgtacaagctgaagagccggggcaacaccaagatgagcatccacctgatccacatgagggtggccgcccagggctttgtggtgggcgccatgacagtgggcatgggctacagcatgtaccgggagttctgggccaagcccaagccctag

SEQ ID NO: 39831 - DNA, 324 bp, Artificial Sequence
  derived and/or modified sequence
atggagcagaagctggtggaggagatcctgcaggccatcaccatgtctacagacaccggcgtgtctctcccttcttacgaggaggatcagggaagtaaacttatcagaaaggccaaggaagccccctttgttcctgtcggtattgccgggttcgccgccattgtggcctacggactctacaaactgaaatctagaggaaatactaagatgagtattcatttgatccatatgagagtggccgctcaaggcttcgtagtaggcgccatgacagtgggaatgggatattcaatgtaccgagagttttgggcgaagccgaagccttag

SEQ ID NO: 39832 - DNA, 324 bp, Artificial Sequence
  derived and/or modified sequence
atggaacagaagctggtggaagaaattttacaggcgattacaatgtctaccgacaccggagtgagtctgccatcctacgaagaggatcaaggatctaaattgatcagaaaggcgaaggaagccccttttgtccccgtgggcatcgccggatttgctgccatcgttgcatatggtttatataagctcaaatctcggggaaacaccaagatgtccatacatcttattcacatgcgcgtcgctgcccagggattcgttgtcggggcaatgacagtaggcatggggtattctatgtaccgagaattttgggcgaagcccaaaccatag

SEQ ID NO: 39833 - DNA, 282 bp, Artificial Sequence
  derived and/or modified sequence
atgagcaccgacaccggcgtgagcctgcccagctacgaggaggaccagggcagcaagctgatcagaaaggccaaggaggcccccttcgtgcccgtgggcatcgccggcttcgccgccatcgtggcctacggcctgtacaagctgaagagcagaggcaacaccaagatgagcatccacctgatccacatgagagtggccgcccagggcttcgtggtgggcgccatgaccgtgggcatgggctacagcatgtacagagagttctgggccaagcccaagccctag

SEQ ID NO: 39834 - DNA, 282 bp, Artificial Sequence
  derived and/or modified sequence
atgtcaaccgacactggcgtgtcattgcccagttacgaagaagatcagggaagcaagctgataagaaaagccaaggaggccccatttgtgcccgtgggcatcgctggattcgcggctatagtcgcatatggactgtataagctaaaaagccgagggaacactaaaatgagcatccacttaatccatatgcgggtcgccgctcaaggctttgttgtcggagctatgaccgtggggatgggatactccatgtacagggagttctgggccaagcctaaaccctag

SEQ ID NO: 39835 - DNA, 282 bp, Artificial Sequence
  derived and/or modified sequence
atgagtacagacactggagttagtttgccgtcttatgaagaagatcagggaagtaagttaatccggaaagctaaggaggccccctttgtgccagtaggcattgcaggctttgctgccattgtggcctatgggttgtacaaattaaagagccgcgggaacactaagatgtccatccacctcatccacatgcgggtcgctgcccagggcttcgtggtaggggctatgaccgtgggaatggggtacagtatgtatagggagttctgggcaaagcccaaaccttag

SEQ ID NO: 39836 - DNA, 282 bp, Artificial Sequence
  derived and/or modified sequence
atgagcacagacacaggagtgtccctgcccagctatgaggaggaccagggcagcaagctgatcaggaaggccaaggaggccccctttgtgcctgtgggcattgctggctttgctgccatcgtggcctacggcctgtacaagctgaagagccggggcaacaccaagatgagcatccacctgatccacatgagggtggccgcccagggctttgtggtgggcgccatgacagtgggcatgggctacagcatgtaccgggagttctgggccaagcccaagccctag

SEQ ID NO: 39837 - DNA, 282 bp, Artificial Sequence
  derived and/or modified sequence
atgagcaccgacaccggcgtgagcctgcccagctacgaggaggaccaggggagtaaactaatcagaaaagccaaagaggccccatttgtgcccgttggtatcgctgggtttgcagctattgtcgcttacggactttacaaactgaaatcacgcggtaatactaagatgagcattcacctcatccacatgagggtagctgcacaggggttcgtggtcggcgctatgaccgtcggcatgggatattctatgtatcgcgagttctgggcaaagccaaaaccatag

SEQ ID NO: 39838 - DNA, 282 bp, Artificial Sequence
  derived and/or modified sequence
atgagcaccgacaccggcgtgagcctgcccagctacgaggaggaccaaggcagcaagcttatacgcaaggctaaagaagccccttttgtgcctgtggggatagccggtttcgcagccatcgtagcatacggactgtataagctgaagtctcgcgggaatacaaaaatgagtatccacctcattcatatgagggttgccgcccagggattcgtcgttggcgcgatgaccgttggtatggggtacagtatgtaccgcgaattctgggccaaacccaaaccatag

SEQ ID NO: 39839 - DNA, 282 bp, Artificial Sequence
  derived and/or modified sequence
atgtctactgacaccggtgtcagcctgccctcctacgaagaagatcagggctccaaacttatacgcaaagctaaggaggcaccatttgtgcccgttggcattgctggcttcgccgcaattgtcgcctatgggctgtataaactgaagagtagaggtaatactaaaatgagtatccacctgattcacatgcgagtggctgcccaaggattcgtcgtcggcgcaatgactgttgggatggggtacagcatgtacagggagttttgggcgaaacccaagccttag

SEQ ID NO: 39840 - DNA, 282 bp, Artificial Sequence
  derived and/or modified sequence
atgagtacagatacgggggtgagtctgccctcctatgaggaagaccagggatctaaactcatcagaaaggcaaaggaagccccattcgtgcccgttggcatagccggtttcgctgccattgtggcctacggactgtacaagctgaagtcacgtggaaatactaagatgtccattcacctcatacatatgcgggtggctgcacaggggttcgttgtcggggcaatgactgtgggcatgggctatagcatgtatcgggaattttgggcaaagcccaagccttag

SEQ ID NO: 39841 - protein, 626 aa, Artificial Sequence
  derived and/or modified sequence
MCSTLKKCGTYRTEVAECHDHGSTFQGRKKGGSSFRDNFDKRSCHYEHGGYERPPSHCQENDGSVEMRDVHKDQQLRHTPYSIRCERRMKWHSEDEIRITTWRNRKPPERKMSQNTQDGYTRNWFKVTIPYGIKYDKAWLMNSIQSHCSDRFTPVDFHYVRNRACFFVQDASAASALKDVSYKIYDDENQKICIFVNHSTAPYSVKNKLKPGQMEMLKLTMNKRYNVSQQALDLQNLRFDPDLMGRDIDIILNRRNCMAATLKIIERNFPELLSLNLCNNKLYQLDGLSDITEKAPKVKTLNLSKNKLESAWELGKVKGLKLEELWLEGNPLCSTFSDQSAYVSAIRDCFPKLLRLDGRELSAPVIVDIDSSETMKPCKENFTGSETLKHLVLQFLQQYYSIYDSGDRQGLLGAYHDEACFSLAIPFDPKDSAPSSLCKYFEDSRNMKTLKDPYLKGELLRRTKRDIVDSLSALPKTQHDLSSILVDVWCQTERMLCFSVNGVFKEVEGQSQGSVLAFTRTFIATPGSSSSLCIVNDELFVRDASPQETQSAFSIPVSTLSSSSEPSLSQEQQEMVQAFSAQSGMKLEWSQKCLQDNEWNYTRAGQAFTMLQTEGKIPAEAFKQIS

SEQ ID NO: 39842 - protein, 409 aa, Artificial Sequence
  derived and/or modified sequence
MKWHSEDEIRITTWRNRKPPERKMSQNTQDGYTRNWFKVTIPYGIKYDKAWLMNSIQSHCSDRFTPVDFHYVRNRACFFVQDASAASALKDVSYKIYDDENQKICIFVNHSTAPYSVKNKLKPGQMEMLKLTMNKRYNVSQQALDLQNLRFDPDLMGRDIDIILNRRNCMAATLKIIERNFPELLSLNLCNNKLYQLDGLSDITEKAPKVKTLNLSKNKLESAWELGKVKGLKLEELWLEGNPLCSTFSDQSAYVSAIRDCFPKLLRLDGRELSAPVIVDIDSSETMKPCKENFTGSETLKHLVLQFLQQYYSIYDSGDRQGLLGAYHDEACFSLAIPFDPKDSAPSSLCKYFEDSRNMKTLKDPYLKGELLRRTKRDIVDSLSALPKTQHDLSSILVDVWCQTVPSGQ

SEQ ID NO: 39843 - DNA, 1881 bp, Artificial Sequence
  derived and/or modified sequence
atgtgcagcaccctgaagaagtgcggcacctacagaaccgaggtggccgagtgccacgaccacggcagcaccttccagggcagaaagaagggcggcagcagcttcagagacaacttcgacaagagaagctgccactacgagcacggcggctacgagagaccccccagccactgccaggagaacgacggcagcgtggagatgagagacgtgcacaaggaccagcagctgagacacaccccctacagcatcagatgcgagagaagaatgaagtggcacagcgaggacgagatcagaatcaccacctggagaaacagaaagccccccgagagaaagatgagccagaacacccaggacggctacaccagaaactggttcaaggtgaccatcccctacggcatcaagtacgacaaggcctggctgatgaacagcatccagagccactgcagcgacagattcacccccgtggacttccactacgtgagaaacagagcctgcttcttcgtgcaggacgccagcgccgccagcgccctgaaggacgtgagctacaagatctacgacgacgagaaccagaagatctgcatcttcgtgaaccacagcaccgccccctacagcgtgaagaacaagctgaagcccggccagatggagatgctgaagctgaccatgaacaagagatacaacgtgagccagcaggccctggacctgcagaacctgagattcgaccccgacctgatgggcagagacatcgacatcatcctgaacagaagaaactgcatggccgccaccctgaagatcatcgagagaaacttccccgagctgctgagcctgaacctgtgcaacaacaagctgtaccagctggacggcctgagcgacatcaccgagaaggcccccaaggtgaagaccctgaacctgagcaagaacaagctggagagcgcctgggagctgggcaaggtgaagggcctgaagctggaggagctgtggctggagggcaaccccctgtgcagcaccttcagcgaccagagcgcctacgtgagcgccatcagagactgcttccccaagctgctgagactggacggcagagagctgagcgcccccgtgatcgtggacatcgacagcagcgagaccatgaagccctgcaaggagaacttcaccggcagcgagaccctgaagcacctggtgctgcagttcctgcagcagtactacagcatctacgacagcggcgacagacagggcctgctgggcgcctaccacgacgaggcctgcttcagcctggccatccccttcgaccccaaggacagcgcccccagcagcctgtgcaagtacttcgaggacagcagaaacatgaagaccctgaaggacccctacctgaagggcgagctgctgagaagaaccaagagagacatcgtggacagcctgagcgccctgcccaagacccagcacgacctgagcagcatcctggtggacgtgtggtgccagaccgagagaatgctgtgcttcagcgtgaacggcgtgttcaaggaggtggagggccagagccagggcagcgtgctggccttcaccagaaccttcatcgccacccccggcagcagcagcagcctgtgcatcgtgaacgacgagctgttcgtgagagacgccagcccccaggagacccagagcgccttcagcatccccgtgagcaccctgagcagcagcagcgagcccagcctgagccaggagcagcaggagatggtgcaggccttcagcgcccagagcggcatgaagctggagtggagccagaagtgcctgcaggacaacgagtggaactacaccagagccggccaggccttcaccatgctgcagaccgagggcaagatccccgccgaggccttcaagcagatcagctag

SEQ ID NO: 39844 - DNA, 1230 bp, Artificial Sequence
  derived and/or modified sequence
atgaagtggcacagcgaggacgagatcagaatcaccacctggagaaacagaaagccccccgagagaaagatgagccagaacacccaggacggctacaccagaaactggttcaaggtgaccatcccctacggcatcaagtacgacaaggcctggctgatgaacagcatccagagccactgcagcgacagattcacccccgtggacttccactacgtgagaaacagagcctgcttcttcgtgcaggacgccagcgccgccagcgccctgaaggacgtgagctacaagatctacgacgacgagaaccagaagatctgcatcttcgtgaaccacagcaccgccccctacagcgtgaagaacaagctgaagcccggccagatggagatgctgaagctgaccatgaacaagagatacaacgtgagccagcaggccctggacctgcagaacctgagattcgaccccgacctgatgggcagagacatcgacatcatcctgaacagaagaaactgcatggccgccaccctgaagatcatcgagagaaacttccccgagctgctgagcctgaacctgtgcaacaacaagctgtaccagctggacggcctgagcgacatcaccgagaaggcccccaaggtgaagaccctgaacctgagcaagaacaagctggagagcgcctgggagctgggcaaggtgaagggcctgaagctggaggagctgtggctggagggcaaccccctgtgcagcaccttcagcgaccagagcgcctacgtgagcgccatcagagactgcttccccaagctgctgagactggacggcagagagctgagcgcccccgtgatcgtggacatcgacagcagcgagaccatgaagccctgcaaggagaacttcaccggcagcgagaccctgaagcacctggtgctgcagttcctgcagcagtactacagcatctacgacagcggcgacagacagggcctgctgggcgcctaccacgacgaggcctgcttcagcctggccatccccttcgaccccaaggacagcgcccccagcagcctgtgcaagtacttcgaggacagcagaaacatgaagaccctgaaggacccctacctgaagggcgagctgctgagaagaaccaagagagacatcgtggacagcctgagcgccctgcccaagacccagcacgacctgagcagcatcctggtggacgtgtggtgccagaccgtgcccagcggccagtag

SEQ ID NO: 39845 - DNA, 1881 bp, Artificial Sequence
  derived and/or modified sequence
atgtgctccacactgaaaaaatgcggcacatatcgcacagaggtggcagaatgtcatgaccacggatccactttccaggggagaaaaaaaggcgggtcttccttcagagacaacttcgataaacgctcctgtcactacgagcacgggggctacgagagacccccgtcccattgccaggagaacgacggaagcgttgagatgcgcgacgtccataaagatcaacagcttcgtcacaccccttactcgatcagatgcgagcggagaatgaagtggcattccgaagacgaaatccgaattacgacctggagaaaccggaagccaccagagaggaagatgtcgcagaatacacaggacgggtacacccgtaactggtttaaggtcaccatcccgtatggcatcaaatacgataaagcctggttgatgaatagcatccagagtcactgctcagatcgctttacccccgtggactttcactatgtccgcaatcgagcgtgtttcttcgtgcaggacgcatccgcagcatctgccttgaaagacgtctcttataaaatctatgatgatgagaatcaaaagatctgcatctttgtcaatcattctaccgccccatactctgtcaagaataaactgaaacctggccagatggaaatgcttaagctgacaatgaataaacgttacaatgtatcacagcaggctctcgatctgcagaaccttcgtttcgatcccgatctcatgggccgtgatattgacatcatcctgaaccgtcggaattgtatggctgcaaccctgaaaattatcgagcggaatttcccggaactcctttccttaaatctgtgtaacaacaagctttatcagctagacggtctcagtgacattaccgaaaaggcccctaaagttaaaaccctcaacctttccaagaacaaactcgagagtgcctgggaactgggcaaggtgaaagggctgaagctggaagagctttggctggaggggaaccctctgtgttccacattttcagaccaatctgcctacgtctcagctattagggattgcttccctaaactgctgcgccttgacggaagggagctgtccgcacccgtcatagttgacattgacagctccgaaactatgaaaccctgcaaggaaaactttacaggctccgagactttgaagcatttggtgctccagtttctgcagcaatactacagcatctatgactcaggagacaggcagggccttttgggggcctatcacgacgaagcctgcttcagcctggccattccctttgaccccaaagattctgcccccagcagcctgtgcaagtactttgaagacagtcgaaatatgaagacactgaaggacccatatcttaaaggggagctcttgaggcggaccaagcgcgatatcgtggactccctctctgccctgccaaagacccagcacgatctctcatcaatcctcgtggacgtctggtgtcagacggaaaggatgttgtgtttttccgtgaacggcgtgttcaaggaagtggagggccagagccagggcagcgtgctcgctttcacccgcacatttatcgctacaccaggcagctctagcagtctatgcatcgtgaacgacgagttgtttgtgagggacgccagccctcaggagacacagtcagcattctcaatacccgttagcacactgtcaagttcaagcgagccctccctatcccaggaacagcaggaaatggtccaggctttcagcgcacagtcaggcatgaagcttgaatggtcccagaagtgccttcaggataatgagtggaattacacacgcgcagggcaggcttttacaatgctccagacagagggaaagatccccgccgaggccttcaagcagattagctag

SEQ ID NO: 39846 - DNA, 1881 bp, Artificial Sequence
  derived and/or modified sequence
atgtgttccaccttgaagaaatgtggaacatacaggaccgaagttgcggaatgccatgatcacggcagcacattccaaggaagaaagaaggggggatcttcttttcgagataattttgataagcgcagttgtcactatgagcacggaggctatgaaaggcctccatcacattgccaggaaaatgatggttctgtcgaaatgagagacgtccacaaggaccagcagctgcggcacaccccgtactccattcgttgtgaacggcggatgaaatggcacagtgaggacgaaattcgtataacaacctggaggaatcggaaaccccctgaaagaaagatgtctcagaatactcaagacggatataccaggaattggttcaaagtgaccatcccttacggcattaagtatgataaggcatggctgatgaactcaatccagtcccactgttcagaccggttcacgcctgtggacttccattatgtgcggaacagagcatgtttttttgtccaggatgcaagtgccgcgtccgcactgaaagatgtatcgtataagatctatgatgatgagaaccagaagatttgtatcttcgtgaatcattctaccgccccatattcagtgaagaacaagctgaaacctggacagatggaaatgcttaaactcactatgaataagagatacaacgtgtcccagcaagcccttgatttgcagaatttacggttcgacccagacctgatgggcagggatattgatatcattttgaaccggcgaaactgcatggcagctactctgaagataattgagcgcaacttccctgaactgttgagtcttaatctctgtaacaacaaactgtatcaactggacggtttgtctgatatcaccgaaaaagccccaaaagtcaagaccctcaatctcagtaagaacaagctggaatcagcgtgggagttggggaaggtgaagggcctgaaactggaagagctgtggcttgagggaaaccctctgtgttccacattttctgaccaatctgcgtatgtctccgccatccgggattgcttcccaaaattgctccgtctcgatggaagagaactgagtgcacctgtgatcgttgacatcgacagttcggagacaatgaaaccctgcaaagaaaacttcaccggaagtgagacccttaagcaccttgttctccagtttctgcagcaatactatagcatctacgactccggcgatcgtcaaggcctgctaggagcctatcatgacgaagcttgtttttccctggcaatcccatttgaccctaaagacagcgcaccctcctccctgtgtaaatactttgaagactcaagaaacatgaagaccctaaaagatccttacctcaagggtgaattgctccgcaggacaaagagagacattgtggactccttgtctgccctgcccaagacacagcacgacctcagttctatactcgtagatgtctggtgtcagaccgagcgtatgctgtgtttcagtgtgaacggagtttttaaggaggtggagggccagtcccagggcagcgtcctcgccttcaccaggacattcatcgcaacccctgggtctagctccagcctctgtatcgtgaatgatgaactgtttgtcagagacgcctcgccgcaggaaacacagagtgcttttagcattcctgttagcactctaagcagctcttcggaaccatctctatcgcaagagcaacaggagatggtacaagcattctccgctcaaagcggtatgaagttggagtggtcacagaagtgtcttcaagacaatgagtggaattacacccgcgcgggccaggcgttcacaatgttgcagactgagggcaagattcccgctgaagccttcaagcagatttcctag

SEQ ID NO: 39847 - DNA, 1230 bp, Artificial Sequence
  derived and/or modified sequence
atgaagtggcacagtgaggatgaaatacgcatcacaacttggcgaaatcgtaaaccccctgagaggaagatgtcgcaaaacactcaagacgggtacacacgcaactggttcaaagttactatcccctacggtatcaagtatgacaaagcttggcttatgaattccatacagtcacattgcagcgaccgtttcactcccgtggatttccactacgttaggaatagagcctgctttttcgtccaggatgcctctgctgcatcagctctgaaggatgtatcatacaagatctatgacgacgagaatcaaaaaatttgcatctttgtcaatcacagcaccgcaccttattctgttaaaaacaagctgaaaccaggccagatggaaatgttgaaacttacaatgaataaacgctataacgtctcacaacaggcgctggatctgcagaacctgcgattcgatccggacctgatgggcagagacattgacatcattctgaaccgacgcaactgtatggccgctactctcaagatcatcgagaggaatttccccgagctcctgtcattgaacctatgtaacaacaagctttaccagcttgacggtttatccgacatcacagagaaggcaccaaaagtcaaaaccttaaatcttagcaagaataagctcgaaagtgcttgggagctcggtaaggttaaaggcctaaagctggaagagctgtggctcgaaggcaatccgctgtgtagtacattctccgaccagtcagcatatgtatctgccatcagggactgctttcctaaacttttgcggctcgacggccgcgaactctccgcacccgtgatcgtagacatcgatagttcggaaacaatgaaaccatgcaaggaaaacttcacaggatctgaaactcttaaacacctggttttacaattcctgcagcagtactactcaatctacgacagtggggaccgacagggtctgctaggcgcttaccatgacgaagcttgtttctcactggcaattcctttcgacccaaaggatagtgcccctagttcattgtgcaagtacttcgaagacagtagaaatatgaagactctcaaggacccctatctgaagggagagcttttgcgcaggactaaacgggatatcgtggactctctctccgcgctgcctaagactcaacacgacctgtcttctatcctggttgatgtttggtgtcagactgtcccaagtggacagtag

SEQ ID NO: 39848 - DNA, 1881 bp, Artificial Sequence
  derived and/or modified sequence
atgtgcagcacccttaagaaatgcgggacttaccggacggaggtcgcagaatgtcacgaccatgggtcaaccttccaggggagaaagaagggaggtagctccttccgagacaatttcgataagagatcgtgtcattacgagcacggcggatatgagagacccccatctcactgccaggaaaatgacgggagtgtcgagatgagagacgttcacaaagaccagcagctgagacataccccctatagcatacgctgtgagagaaggatgaagtggcattccgaagatgagattagaatcaccacctggagaaacaggaagccgcctgaacgcaaaatgtcccagaatactcaagacgggtacacacggaattggtttaaagtgaccattccatacggcatcaagtatgacaaagcatggttgatgaactctattcagtcacattgttctgataggtttaccccagtagacttccattatgtgcgaaacagggcttgttttttcgtccaggacgcaagtgcagcctccgctctgaaggacgtctcttataagatttacgatgacgaaaatcagaaaatatgcatattcgtgaatcacagcactgccccctacagcgttaagaataagctcaaaccaggacagatggagatgcttaagttgacaatgaacaaacgttataacgtcagccagcaagccctcgaccttcaaaatctcagattcgatcctgatctgatggggcgagatatcgatattatacttaaccggagaaactgcatggcagcaactctgaagatcatcgaacgcaatttcccagaattgctgtctcttaatctgtgtaacaacaagctgtaccagctggacgggctgtccgatataacagagaaagcccctaaagttaagacattgaacctgtctaagaataaactcgagagcgcctgggaactggggaaagtcaagggactgaaactggaggagctgtggctagaggggaaccccctgtgctctacctttagcgaccagtccgcgtacgtctccgccatccgggactgctttcccaaactcctcaggctcgacggccgcgagcttagcgcccctgtaattgttgatatcgattcatccgagacaatgaaaccttgcaaggagaatttcactgggagcgaaacattaaagcatttggtactacagtttctccagcagtactattcaatttacgattccggagataggcagggactgttaggggcctatcatgatgaggcatgcttttctttggcaatcccttttgaccctaaggattcggccccgtccagcctatgcaagtacttcgaggattcacggaacatgaagaccctgaaggatccttatctgaaaggtgaactgctccgcaggacaaaaagagatattgtggactcgctaagtgccctccccaaaacccagcacgacctaagtagcatcctcgtagatgtatggtgccagactgagaggatgctgtgctttagtgtgaacggtgtatttaaagaagttgagggccaatcccaaggtagcgttctcgcgtttacacgtacttttatcgcaacccccggttcctcttcctccctctgtatcgtaaacgacgagcttttcgtacgagatgcctctcctcaggaaactcagtctgctttcagtattccagtgtctaccctgtcctcctcatccgagcctagcctgagccaagagcagcaagaaatggtccaagccttctcggcccagagtggcatgaaattagaatggtctcaaaagtgcctgcaggacaatgaatggaactacaccagggcaggtcaggcttttacgatgctccagacagaaggcaagattccggcagaggctttcaagcaaatcagctag

SEQ ID NO: 39849 - DNA, 1881 bp, Artificial Sequence
  derived and/or modified sequence
atgtgcagcacccttaaaaagtgcggaacatacaggacagaagttgccgaatgtcatgaccacggctcaacatttcagggaagaaagaaaggcgggagctcctttcgcgacaacttcgacaaaaggagctgccattacgagcatggaggctatgagcgtccgccctcccattgccaggaaaacgacggctcagtcgagatgagagatgtgcacaaagaccagcagttgcggcatactccatacagcatcagatgcgagcggaggatgaaatggcattctgaggatgaaattcggattacaacgtggcgaaaccgcaagccgcccgaaagaaaaatgagccagaatactcaagacggctatacaaggaactggtttaaagttaccatcccttacggtatcaaatacgacaaagcttggctgatgaattcaatacagtctcattgcagcgacagattcacgcctgtggattttcattacgtcagaaaccgggcatgcttttttgtgcaagacgcgagtgcagccagcgccctcaaagacgtttcatataaaatttatgatgacgagaatcagaaaatttgtatcttcgtcaatcacagcacagccccttactcagtgaagaataagctaaaaccaggacagatggaaatgttgaagttgactatgaacaagcggtacaacgtcagccaacaagctctggatttgcaaaacctgcgatttgatccagatctcatgggtagagatattgacatcatcttgaatcgacggaactgcatggccgccacactgaagatcatagagaggaatttccccgagttgctgtcacttaacttatgtaacaacaagctgtaccaattagatggtctctccgatatcaccgagaaggccccgaaggttaagaccctgaatctgagcaaaaacaaattggaatctgcttgggaattaggcaaagtgaaggggctgaagctggaggaactgtggcttgagggcaatcccctatgtagcaccttctccgaccaaagtgcttacgtctcagcaattcgtgactgcttcccgaagctcctcaggctcgacgggcgggaactttctgcacccgttatcgtggacatcgactcatctgaaacgatgaaaccatgcaaagagaattttacaggttcagagactctgaagcacctcgttctgcagttcttacagcaatattacagcatctacgatagtggagatcgccagggcttgctcggcgcctaccatgacgaagcttgcttttccctggccatcccatttgaccctaaagattcagctccttctagcctctgtaagtattttgaggacagccgcaacatgaagaccctgaaagatccatatttaaagggggagttactcagaaggacaaagcgagatatcgttgatagcctgtcagctttgcctaaaacacaacacgatctatctagcatcctggttgatgtttggtgtcagacagaacgtatgctttgtttttctgtaaatggggtgtttaaggaagtcgaaggccaaagccagggtagtgtgcttgcattcacaagaacctttattgccacccctgggtcttcctcgtctctgtgcatagtgaatgatgaattgtttgtgagggacgccagcccacaggaaacgcagtccgcgttcagtataccggtctctacactgtcgtcctctagcgagccttcacttagtcaggaacagcaagaaatggtgcaggcatttagtgctcagagcggaatgaagctggaatggagtcaaaagtgtctgcaggacaacgaatggaattacacccgtgcaggtcaggcctttacgatgctccaaacggagggcaaaataccagcggaggccttcaagcagattagttag

SEQ ID NO: 39850 - DNA, 2322 bp, Artificial Sequence
  derived and/or modified sequence
ttgtggcaagattctgaggggaagtgtagctcccaggttggttccaagtcttcttccaattaggatcttatccaggacgcttcattgcatttggtcttcatttctccttagtctcctccaggctgacatttcctcaatctttattggtcttccacagccctgacacttttggagataccagtcagcatttccaagttcgttctgtgagactgtagtgtcaggacaaagcaacaacaaaatgtgctctactctaaagaagtgtgggacatacagaactgaagttgcagaatgccatgaccatggtagcacttttcaaggaagaaagaaaggtgggagttctttccgggataattttgacaagaggagctgtcattatgaacatggtgggtatgagcgcccgccttcacactgccaggagaatgatggaagcgtggagatgagggatgtccacaaggaccaacaactaagacacactccttatagcatccgatgcgaaagaagaatgaaatggcatagtgaagacgaaatccgtattaccacgtggagaaatagaaaacctccggagagaaaaatgagtcagaacacacaggatggatacacaaggaactggtttaaggtcacaattccttacgggataaagtatgacaaggcatggctaatgaattcaatccagagccattgcagtgaccgcttcactccggttgatttccactacgtccgaaatcgggcatgcttctttgtccaggatgctagcgctgcctccgcattgaaggatgtcagttataagatttatgatgatgagaaccaaaagatatgtatatttgtcaatcattctactgcgccctactctgtgaagaataagttgaagccaggccaaatggagatgctaaagctgaccatgaacaaacggtacaatgtctcccagcaagctcttgatctccagaatctccgctttgacccagacttgatgggccgtgacattgatataatcctgaatcgaagaaactgcatggctgccaccctgaagatcattgaaagaaatttccctgagctgttgtctttgaacttgtgcaacaacaagctgtaccagctggatggcctttctgacattacagagaaggctcccaaagtcaagaccctgaatctctccaaaaataagctggagtcggcgtgggagttgggcaaggtgaaagggctgaagctcgaagagctatggctagaagggaacccgttgtgcagcaccttctcggaccagtccgcctatgtaagtgccatccgggattgtttccccaagttgttacgcctggacggccgagagttatccgcaccagtgattgttgacattgacagctctgagacaatgaaaccctgcaaggaaaactttactggatctgagaccctaaagcatttagtcctgcaattcctgcagcagtattactcgatctatgactctggagatcgacagggtctcctcggtgcttaccacgatgaggcctgcttctccttggctattcccttcgaccccaaggactcagccccgagcagcttgtgcaagtactttgaggatagcaggaatatgaaaacactcaaggacccctacctgaagggggaactgctgaggcgcacaaaacgtgacattgtggactccctcagtgcgttgcccaaaactcagcatgacctcagctccatcctggtggacgtgtggtgccagacggaaaggatgctctgcttttctgtcaatggggttttcaaggaagtggaaggacagtctcagggttctgttctcgccttcacccggaccttcattgctacccctggcagcagttccagtctgtgcatcgtgaatgacgagctgtttgtgagggatgccagcccccaagagactcagagtgccttctccatcccagtgtccacactctcctccagctctgagccctccctctcccaggagcagcaggaaatggtgcaggctttctctgcccagtctgggatgaaactggagtggtctcagaagtgccttcaggacaatgagtggaactacactagagctggccaggccttcactatgctccagaccgagggcaagatccccgcggaggccttcaagcaaatctcctaaaaggagccctccgatgtcttctttgtcttcgttcacatcctctttgtttcctcttttcaccagcctaaggcctggctgaccaggaagccaacgttaacttgcaggccacgtgacataaccacccaaagagccagttgctctgtgtattcgccccactcatgatcaccattttattttcataataaagagtgacgttacacgtt

SEQ ID NO: 39851 - DNA, 2884 bp, Artificial Sequence
  derived and/or modified sequence
cctcctcctctgggatcttgaaaacgtagaattcccagagactctgctgatggacagaatccggctccaggaactggcattccagttgcaccagttaactgtcctggcctcagtcttgctagtggccagaagcttctctggtgaagttttattcagatcacctgaatttgtggatagactgaaatgcaccaccaaggccctaactgaggaatttatctccaggcctgaagagactatgctgagtgtgagtgaacaggtgtctcaggaagtccatcaaggccttaaggacatgggcctcactactctgagcagtgaaaacacagcatctcttctaggccaactccagaacatcaccaagaaagagaactgcattcgtagcattgttggagtctctgctacactttcctggaggcctcattctcattgaaaaggagttggcagaactgggctggaagtttctcaatctgatgcatcataatcagcagagtcatttttcacaaaacgaaatctttccagaagatcacgaataagagagatcaaagctaggcagcttgagttgaagtagagctggaagaaggagttttgaggactgtttcaaaaccactggactagatgatctctaaaggatcttatccaggacgcttcattgcatttggtcttcatttctccttagtctcctccaggctgacatttcctcaatctttattggtcttccacagccctgacacttttggagataccagtcagcatttccaagttcgttctgtgagactgtagtgtcaggacaaagcaacaacaaaatgtgctctactctaaagaagtgtgggacatacagaactgaagttgcagaatgccatgaccatggtagcacttttcaaggaagaaagaaaggtgggagttctttccgggataattttgacaagaggagctgtcattatgaacatggtgggtatgagcgcccgccttcacactgccaggagaatgatggaagcgtggagatgagggatgtccacaaggaccaacaactaagacacactccttatagcatccgatgcgaaagaagaatgaaatggcatagtgaagacgaaatccgtattaccacgtggagaaatagaaaacctccggagagaaaaatgagtcagaacacacaggatggatacacaaggaactggtttaaggtcacaattccttacgggataaagtatgacaaggcatggctaatgaattcaatccagagccattgcagtgaccgcttcactccggttgatttccactacgtccgaaatcgggcatgcttctttgtccaggatgctagcgctgcctccgcattgaaggatgtcagttataagatttatgatgatgagaaccaaaagatatgtatatttgtcaatcattctactgcgccctactctgtgaagaataagttgaagccaggccaaatggagatgctaaagctgaccatgaacaaacggtacaatgtctcccagcaagctcttgatctccagaatctccgctttgacccagacttgatgggccgtgacattgatataatcctgaatcgaagaaactgcatggctgccaccctgaagatcattgaaagaaatttccctgagctgttgtctttgaacttgtgcaacaacaagctgtaccagctggatggcctttctgacattacagagaaggctcccaaagtcaagaccctgaatctctccaaaaataagctggagtcggcgtgggagttgggcaaggtgaaagggctgaagctcgaagagctatggctagaagggaacccgttgtgcagcaccttctcggaccagtccgcctatgtaagtgccatccgggattgtttccccaagttgttacgcctggacggccgagagttatccgcaccagtgattgttgacattgacagctctgagacaatgaaaccctgcaaggaaaactttactggatctgagaccctaaagcatttagtcctgcaattcctgcagcagtattactcgatctatgactctggagatcgacagggtctcctcggtgcttaccacgatgaggcctgcttctccttggctattcccttcgaccccaaggactcagccccgagcagcttgtgcaagtactttgaggatagcaggaatatgaaaacactcaaggacccctacctgaagggggaactgctgaggcgcacaaaacgtgacattgtggactccctcagtgcgttgcccaaaactcagcatgacctcagctccatcctggtggacgtgtggtgccagacggaaaggatgctctgcttttctgtcaatggggttttcaaggaagtggaaggacagtctcagggttctgttctcgccttcacccggaccttcattgctacccctggcagcagttccagtctgtgcatcgtgaatgacgagctgtttgtgagggatgccagcccccaagagactcagagtgccttctccatcccagtgtccacactctcctccagctctgagccctccctctcccaggagcagcaggaaatggtgcaggctttctctgcccagtctgggatgaaactggagtggtctcagaagtgccttcaggacaatgagtggaactacactagagctggccaggccttcactatgctccagaccgagggcaagatccccgcggaggccttcaagcaaatctcctaaaaggagccctccgatgtcttctttgtcttcgttcacatcctctttgtttcctcttttcaccagcctaaggcctggctgaccaggaagccaacgttaacttgcaggccacgtgacataaccacccaaagagccagttgctctgtgtattcgccccactcatgatcaccattttattttcataataaagagtgacgttacacgtt

SEQ ID NO: 39852 - DNA, 3193 bp, Artificial Sequence
  derived and/or modified sequence
cctgactcacctagctcctcctgcagcatggcgtgttcacttccaagcggggcagactctgctgatggacagaatccggctccaggaactggcattccagttgcaccagttaactgtcctggcctcagtcttgctagtggccagaagcttctctggtgaagttttattcagatcacctgaatttgtggatagactgaaatgcaccaccaaggccctaactgaggaatttatctccaggcctgaagagactatgctgagtgtgagtgaacaggtgtctcaggaagtccatcaaggccttaaggacatgggcctcactactctgagcagtgaaaacacagcatctcttctaggccaactccagaacatcaccaagaaagagaactgcattcgtagcattgttgatcagtggatccgtttttttctcaaatgctgtttgcttcatggcatgcaggagtctctgctacactttcctggaggcctcattctcattgaaaaggagttggcagaactgggctggaagtttctcaatctgatgcatcataatcagcagagtcatttttcacaaaacgaaatctttccagaagatcacgaataagagagatcaaagctaggcagcttgagttgaagtagagctggaagaaggagttttgaggactgtttcaaaaccactggactagatgatctctaaagtggtgacatggacataggataatggttatagacagtccccctcccaacgggaaaaaatgaaagcaagcaaaaagttaccagctccaagccaacttgaaatccaatcaggatcttatccaggacgcttcattgcatttggtcttcatttctccttagtctcctccaggctgacatttcctcaatctttattggtcttccacagccctgacacttttggagataccagtcagcatttccaagttcgttctgtgagactgtagtgtcaggacaaagcaacaacaaaatgtgctctactctaaagaagtgtgggacatacagaactgaagggatgatgcttcctgtctgtcacaaggctgagtgaacacaacatgcctgtaggtccagaacattcttcctacagagaccagatgtccagaaagccctatctgctggattcagggaacgcctctcctcatttctgtcagcactatttgcaaaagcctccttctctgagatcttcaaagctgcagttctagccacagtctgcagggagttgcagaatgccatgaccatggtagcacttttcaaggaagaaagaaaggtgggagttctttccgggataattttgacaagaggagctgtcattatgaacatggtgggtatgagcgcccgccttcacactgccaggagaatgatggaagcgtggagatgagggatgtccacaaggaccaacaactaagacagtaagtgaccaggcagcctggtttgcacgtagcagcccccgggactgtgcaaccctttcattctctgtggtcttccttttcttctctcattagagaactgacgaatgctggaagtggaatagtggctgagcagtcctaattgtagccctggcgtcagtgagtggagcatgtataggagactttcttagatttaatggatacccgccttctctcctcttccccacagcactccttatagcatccgatgcgaaagaagaatgaaatggcatagtgaagacgaaatccgtattaccacgtggagaaatagaaaacctccggagagaaaaatgagtcagaacacacaggatggatacacaaggaactggtttaaggtcacaattccttacgggataaagtatgacaaggcatggctaatgaattcaatccagagccattgcagtgaccgcttcactccggttgatttccactacgtccgaaatcgggcatgcttctttgtccaggatgctagcgctgcctccgcattgaaggatgtcagttataagatttatgatgatgagaaccaaaagatatgtatatttgtcaatcattctactgcgccctactctgtgaagaataagttgaagccaggccaaatggagatgctaaagctgaccatgaacaaacggtacaatgtctcccagcaagctcttgatctccagaatctccgctttgacccagacttgatgggccgtgacattgatataatcctgaatcgaagaaactgcatggctgccaccctgaagatcattgaaagaaatttccctgagctgttgtctttgaacttgtgcaacaacaagctgtaccagctggatggcctttctgacattacagagaaggctcccaaagtcaagaccctgaatctctccaaaaataagctggagtcggcgtgggagttgggcaaggtgaaagggctgaagctcgaagagctatggctagaagggaacccgttgtgcagcaccttctcggaccagtccgcctatgtaagtgccatccgggattgtttccccaagttgttacgcctggacggccgagagttatccgcaccagtgattgttgacattgacagctctgagacaatgaaaccctgcaaggaaaactttactggatctgagaccctaaagcatttagtcctgcaattcctgcagcagtattactcgatctatgactctggagatcgacagggtctcctcggtgcttaccacgatgaggcctgcttctccttggctattcccttcgaccccaaggactcagccccgagcagcttgtgcaagtactttgaggatagcaggaatatgaaaacactcaaggacccctacctgaagggggaactgctgaggcgcacaaaacgtgacattgtggactccctcagtgcgttgcccaaaactcagcatgacctcagctccatcctggtggacgtgtggtgccagacggtgccttcaggacaatgagtggaactacactagagctggccaggccttcactatgctccagaccgagggcaagatccccgcggaggccttcaagcaaatctcctaaaaggagccctccgatgtcttctttgtcttcgttcacatcctctttgtttcctcttttcaccagcctaaggcctggctgaccaggaagccaacgttaacttgcaggccacgtgacataaccacccaaagagccagttgctctgtgtattcgccccactcatgatcaccattttattttcataataaagagtgacgttacacgttgta

SEQ ID NO: 39853 - DNA, 1881 bp, Artificial Sequence
  derived and/or modified sequence
atgtgcagcaccctgaagaagtgtggcacctacagaacagaggtggctgaatgtcatgaccacggcagcaccttccagggcaggaagaagggcggcagcagcttccgggacaactttgacaagaggagctgccactatgagcacggcggctatgagcggccccccagccactgccaggagaatgatggctctgtggagatgagagatgtgcacaaggaccagcagctgcggcacaccccctacagcatccgctgtgaaagaaggatgaagtggcacagtgaagatgagatccgcatcaccacctggaggaacaggaagcccccagagaggaagatgagccagaacacccaggacggctacaccaggaactggttcaaggtgaccatcccctacggcatcaagtatgacaaggcctggctgatgaacagcatccagagccactgcagcgaccgcttcacccctgtggacttccactacgtgaggaacagagcctgcttctttgtgcaggatgccagcgctgccagcgccctgaaggatgtgtcctacaagatctatgatgatgagaaccagaagatctgcatctttgtgaaccacagcacagccccctacagcgtgaagaacaagctgaagccaggccagatggagatgctgaagctgaccatgaacaagcgctacaacgtgtcccagcaggccctggacctgcagaacctgcgctttgatcctgacctgatgggccgggacatcgacatcatcctgaacagaagaaactgcatggccgccaccctgaagatcattgaaagaaacttccctgagctgctgagcctgaacctgtgcaacaacaagctgtaccagctggatggcctgagtgacatcacagagaaggcccccaaggtgaagaccctgaacctgagcaagaacaagctggagagcgcctgggagctgggcaaggtgaagggcctgaagctggaggagctgtggctggagggcaaccccctgtgcagcaccttcagtgaccagagcgcctacgtgtctgccatccgggactgcttccccaagctgctgcggctggatggccgggagctgagcgcccctgtgattgtggacatcgacagcagcgagaccatgaagccctgcaaggagaacttcaccggcagcgagaccctgaagcacctggtgctgcagttcctgcagcagtactacagcatctatgattctggggaccggcagggcctgctgggcgcctaccatgatgaggcctgcttcagcctggccatcccctttgaccccaaggacagcgcccccagcagcctgtgcaagtactttgaggacagcaggaacatgaagaccctgaaggacccctacctgaagggggagctgctgcggaggaccaagagggacatcgtggacagcctgagcgccctgcccaagacccagcacgacctgagcagcatcctggtggatgtgtggtgccagacagagaggatgctgtgcttctctgtgaatggagtcttcaaggaggtggagggccagagccagggctctgtgctggccttcaccaggaccttcatcgccaccccaggcagcagcagcagcctgtgcatcgtgaatgatgagctgtttgtgagagatgccagcccccaggagacccagagcgccttcagcatccctgtgtccaccctgagcagcagcagcgagcccagcctgagccaggagcagcaggagatggtgcaggccttcagcgcccagagcggcatgaagctggagtggagccagaagtgcctgcaggacaatgagtggaactacacccgggccggccaggccttcaccatgctgcagacagagggcaagatcccagctgaggccttcaagcagatctcctag

SEQ ID NO: 39854 - DNA, 1230 bp, Artificial Sequence
  derived and/or modified sequence
atgaagtggcacagtgaagatgagatccgcatcaccacctggaggaacaggaagcccccagagaggaagatgagccagaacacccaggacggctacaccaggaactggttcaaggtgaccatcccctacggcatcaagtatgacaaggcctggctgatgaacagcatccagagccactgcagcgaccgcttcacccctgtggacttccactacgtgaggaacagagcctgcttctttgtgcaggatgccagcgctgccagcgccctgaaggatgtgtcctacaagatctatgatgatgagaaccagaagatctgcatctttgtgaaccacagcacagccccctacagcgtgaagaacaagctgaagccaggccagatggagatgctgaagctgaccatgaacaagcgctacaacgtgtcccagcaggccctggacctgcagaacctgcgctttgatcctgacctgatgggccgggacatcgacatcatcctgaacagaagaaactgcatggccgccaccctgaagatcattgaaagaaacttccctgagctgctgagcctgaacctgtgcaacaacaagctgtaccagctggatggcctgagtgacatcacagagaaggcccccaaggtgaagaccctgaacctgagcaagaacaagctggagagcgcctgggagctgggcaaggtgaagggcctgaagctggaggagctgtggctggagggcaaccccctgtgcagcaccttcagtgaccagagcgcctacgtgtctgccatccgggactgcttccccaagctgctgcggctggatggccgggagctgagcgcccctgtgattgtggacatcgacagcagcgagaccatgaagccctgcaaggagaacttcaccggcagcgagaccctgaagcacctggtgctgcagttcctgcagcagtactacagcatctatgattctggggaccggcagggcctgctgggcgcctaccatgatgaggcctgcttcagcctggccatcccctttgaccccaaggacagcgcccccagcagcctgtgcaagtactttgaggacagcaggaacatgaagaccctgaaggacccctacctgaagggggagctgctgcggaggaccaagagggacatcgtggacagcctgagcgccctgcccaagacccagcacgacctgagcagcatcctggtggatgtgtggtgccagacagtgcccagcggccagtag

SEQ ID NO: 39855 - DNA, 1881 bp, Artificial Sequence
  derived and/or modified sequence
atgtgcagcaccctgaagaagtgcggcacctaccggaccgaggtggctgagtgtcatgaccatggtagtactttccagggccgcaagaaagggggttcatcgtttcgggataatttcgacaagaggtcttgtcactacgagcacggtggttatgaaaggcctccctctcactgtcaagagaatgacggttcagtggaaatgcgtgacgttcacaaggatcagcagctgagacatactccatacagtatacggtgcgaaagacggatgaaatggcactccgaagatgagattcgaattactacatggcggaacaggaagccgcccgaacgaaagatgagccagaacacacaggatggatacacccgcaattggttcaaggtgactatcccttatggtatcaaatacgataaggcttggctgatgaactctattcaaagtcactgttccgacaggtttacccccgttgatttccactacgttcgaaatcgcgcgtgtttcttcgtccaggacgcctctgccgcttcagctcttaaggacgtttcatataaaatatacgatgatgagaaccaaaagatctgcatttttgtaaatcactcaacagctccatacagcgtcaagaataaactgaaacctggtcagatggaaatgctgaaacttaccatgaataagcggtacaatgtctctcagcaagcgcttgacctgcagaacctgagattcgaccctgatttgatggggcgtgatatcgacatcattctcaataggcgtaattgtatggccgcaacactaaaaattattgagcggaatttccctgaactactatctttgaatctctgtaacaacaaactatatcagttggatggactgagcgacatcaccgaaaaggcccctaaggtcaagactttaaacctgagcaaaaacaaactcgagtcagcctgggagttaggtaaagtgaaggggctgaagctcgaggaactgtggctggaaggcaatcccctgtgttcgaccttctcagaccaaagcgcatatgtttcagcaattcgcgactgttttcccaaattgctccggctggacggaagggagctatctgccccggtgatcgtggatatcgatagtagcgagaccatgaagccctgtaaagaaaattttactggtagtgagaccctcaaacacctggtgctgcaatttttgcagcagtactattctatttacgatagcggcgacagacagggtttgctcggggcataccacgacgaggcctgtttttccttagccatccctttcgatcctaaagattctgccccctcatcactctgtaagtattttgaggatagccggaatatgaaaacactgaaggacccatacttaaagggcgagctcttaagaagaactaagcgcgacatcgtagattccctgtccgccctcccgaagacacagcacgatctgagcagcatcctcgttgacgtctggtgccagacagaacgaatgttatgttttagtgttaatggtgtgttcaaggaagtggaggggcaaagccaaggtagtgttttggcattcaccagaacatttattgcgacgcccggcagcagcagtagcttgtgtattgtgaacgacgagctcttcgtcagagacgcaagtccccaggaaacacaatcagctttctctattcccgtgtcaactttgtcgtcttcaagcgaaccctcattatctcaagaacaacaggagatggtgcaagcctttagcgcacaaagcggcatgaaactcgagtggtcacagaagtgcctgcaggataacgagtggaactacacacgggcggggcaagccttcactatgttacagaccgaaggcaagatccctgcagaggcttttaagcagattagctag

SEQ ID NO: 39856 - DNA, 1881 bp, Artificial Sequence
  derived and/or modified sequence
atgtgcagcaccctgaagaagtgcggcacctaccggaccgaggtggcggagtgccacgaccacggttctacattccaggggcgtaagaaaggcggaagtagctttagggacaatttcgacaagagatcatgtcactatgaacacggcggctatgaacggccacccagccactgtcaggaaaatgacggtagcgtggaaatgagagacgtgcataaggatcagcagcttagacataccccctattcaattagatgtgagcgtagaatgaagtggcactcagaagatgaaataaggatcacgacatggaggaaccgtaaaccgccagaacggaagatgtcacaaaatacgcaagacggctatacaaggaactggtttaaggtgactattccctacggcattaaatatgacaaagcctggctgatgaatagtatccaaagccattgcagcgataggttcactccagtagatttccactacgtcaggaacagagcttgtttcttcgttcaggacgcatcagccgcctctgcactcaaggatgtgagctataaaatctacgatgatgaaaaccagaaaatctgcatcttcgttaatcactcgactgccccatatagcgttaagaataaactcaaacccgggcagatggaaatgctcaagctgactatgaataagaggtataacgtgagtcagcaagcattggatcttcagaacctccgattcgatcccgatcttatgggcagagacatagatataatcttgaaccgcagaaactgcatggcggcaacgctgaaaataatagaacgcaattttcctgagctcctaagtctgaacctgtgcaataacaaactgtatcagctggacggcttaagtgacataactgagaaagcaccgaaggtcaaaacactcaacctgtccaagaacaaactcgaatccgcctgggagctgggcaaagtcaagggtctgaaactggaagaactgtggctggaagggaaccctctatgctctaccttctcagatcaatctgcatatgtgtccgccatccgggattgctttccaaagctgttgagactcgacggcagagaactgagcgcccctgtaatagtggatatcgatagcagcgaaactatgaagccatgtaaagaaaatttcaccggatccgagacattaaagcacctggtgctgcagttccttcagcagtattattcgatatacgacagcggagatcgacaaggactccttggagcctaccacgatgaagcctgcttcagcctggccatcccgttcgatccgaaggactccgcaccaagttcactatgcaagtattttgaagactctcgcaacatgaaaacactgaaagacccctacctcaaaggggagcttcttaggagaaccaaacgcgatattgtcgatagcctgagcgcacttccaaaaacacaacacgaccttagttctatcctagtggacgtctggtgtcaaactgagaggatgttgtgcttctcagtgaacggcgtgtttaaagaggttgaagggcagtctcagggttctgtcctcgcgtttaccaggaccttcattgcaacccccgggagctccagctcattgtgcatcgtaaacgacgaattatttgtccgggacgctagtccacaggaaacccagagcgccttttccatccctgttagtaccctctcctcttcttctgagccatcactgtctcaggagcagcaggaaatggtgcaagccttttcagcgcaatctggcatgaaactggagtggtctcagaagtgtctgcaggacaatgagtggaattataccagggcgggccaggctttcacaatgctgcaaaccgaaggcaaaattcccgctgaagcatttaagcagatcagctag

SEQ ID NO: 39857 - DNA, 1230 bp, Artificial Sequence
  derived and/or modified sequence
atgaagtggcacagcgaggacgagatccggatcaccacctggcggaaccgaaagccccccgaacggaagatgtcacagaatacacaggatgggtatacgcgaaactggttcaaagtgaccattccgtacggaatcaaatacgataaggcctggcttatgaattctattcagagccactgttctgataggtttacacctgtcgatttccattacgtaagaaaccgcgcctgtttcttcgtgcaggacgccagtgccgcaagcgctctcaaagacgtctcttacaagatctacgacgacgagaatcagaaaatctgtatcttcgtcaaccactcaaccgctccttatagcgtcaagaataagctgaagcccggccagatggaaatgctgaagttaactatgaataagcggtacaatgtgagtcagcaagccttggacctccaaaatttacggttcgatccggacctcatgggtcgcgatattgacattatcctgaatcgtcggaactgcatggcggccaccctgaagattatagagaggaattttcccgagttgctatccttaaacttatgcaacaataagctctaccaactcgacggactttcagacataaccgagaaagcccccaaagtaaaaacccttaacctctctaagaataagcttgagtctgcatgggaactcggtaaagtgaaaggattgaaacttgaggagctctggctcgagggtaaccctttgtgcagcacattcagcgaccagtccgcatacgtgtctgccattcgtgattgtttccctaagctcttgcgactcgacggtcgggaattatctgccccagttatcgttgatatagattcatcagaaacgatgaaaccatgtaaagaaaactttacgggttcggaaaccctgaagcatctggtattgcagttcctacagcagtactatagtatatatgatagcggtgatagacaggggctgctgggtgcataccacgacgaagcctgcttctcactcgctatccctttcgaccctaaagactccgctccttcctcactgtgtaagtacttcgaggactctcgcaacatgaagactctcaaagatccttacctcaagggcgagttgctccggagaactaagagagatatcgtggatagcctatccgcactgcccaaaacccagcatgatctcagcagcatcctcgtcgacgtgtggtgtcagactgtgccatctggccagtag

SEQ ID NO: 39858 - DNA, 1881 bp, Artificial Sequence
  derived and/or modified sequence
atgtgcagcaccctgaagaagtgcggcacctaccggaccgaggtggcagagtgtcatgaccacggcagtacctttcaaggccgtaagaagggcggatccagctttcgagacaatttcgacaaaagatcttgtcactatgaacacggaggttacgagagacccccctcacactgtcaggagaacgatggttcagttgaaatgcgcgatgttcataaggaccagcagctgcggcacaccccttatagtattaggtgcgaacgccggatgaagtggcacagcgaagacgagatcagaattaccacctggcgaaatcggaagcccccagagcgaaaaatgagccagaacacccaggatgggtatacgagaaactggttcaaggtgaccattccctatggaatcaaatatgataaggcttggctgatgaatagcatacagtcgcattgcagtgaccgctttactcccgtggatttccattatgtgcggaaccgcgcatgcttcttcgtgcaggatgcctcagccgcctctgctcttaaggacgtatcatacaagatttatgacgatgagaatcaaaagatctgtatcttcgtgaatcattctaccgccccctattccgttaagaacaagctcaaacctgggcagatggagatgttgaagttgacaatgaacaagcgatacaatgtcagccaacaggccttagatttgcagaacctcagattcgatccggacctgatggggcgcgacatcgacatcatacttaatagacgcaactgcatggccgccaccctcaagatcatcgagcgcaacttcccagagcttttgtccctgaacttgtgcaataacaagctgtaccagctggacggcttgtccgacatcacagagaaggctccgaaggtgaagacgctcaatttatcaaagaataaattggagagtgcatgggagctcgggaaggtgaaaggcttaaagctggaggagttgtggctggaggggaatcctttatgctctactttcagtgaccaatcggcctatgtgagtgctattcgggactgcttccctaaactcctacggctggatggaagagaactgtccgcccccgttatagtggacattgacagctctgaaacaatgaaaccttgcaaggagaactttaccggttcggaaacactaaagcatcttgttctccagtttctgcagcaatactatagtatatacgatagtggcgatagacagggcttgctaggcgcctaccatgatgaggcctgcttttccctggcaataccattcgaccccaaagacagcgctccctccagtctttgcaagtactttgaagattccagaaatatgaagacgcttaaggacccttacctaaagggtgagctcctgagaaggactaaacgggacatcgttgactccctctcagcactgccaaagacccagcatgatctgtcaagtatcttggtggacgtgtggtgccagaccgagcggatgctgtgcttctccgtaaatggcgtctttaaagaggtcgaggggcagtctcaggggtcagtactcgcgttcacaaggacattcattgccactccaggaagttcatccagtttatgtatcgtgaatgacgaactcttcgtgagagatgctagcccgcaagagacccaaagcgcattcagtatccctgtctcgaccctctcctcctcttccgagccttcactgagccaggagcagcaggaaatggtgcaagcctttagtgcccagagtggcatgaagctggaatggtctcagaagtgtctgcaggataacgaatggaattacactcgagctggacaggccttcaccatgctgcagacggaagggaagatcccagcggaggcattcaaacaaatcagttag

SEQ ID NO: 39859 - DNA, 1881 bp, Artificial Sequence
  derived and/or modified sequence
atgtgcagcaccctgaagaagtgcggcacctaccggaccgaggtggctgaatgccacgatcacggatcaactttccaaggccggaaaaaaggcggttcctccttcagggacaactttgacaagcgctcatgccactatgagcatgggggttatgagaggccaccctctcattgtcaggagaatgacggttccgtggaaatgcgggatgtccacaaagatcaacagctgagacacactccgtacagcatacgctgcgaaagacgcatgaagtggcattcagaggatgagattcgcataacaacctggagaaatcgaaaacctccagagaggaagatgagtcagaatactcaggacggctacacacgaaactggttcaaggtcacaatcccatatggtatcaagtatgataaggcttggctgatgaactcaattcaatcacattgctccgatagatttactccagtggattttcattacgtccgcaatcgcgcctgttttttcgttcaagatgccagcgctgcaagtgcgctcaaggatgtctcttataaaatctatgatgatgaaaaccaaaagatatgcatttttgtgaatcactctactgcaccctactcggttaagaataaactaaagcccggccagatggaaatgctgaagctgacgatgaataaacggtataacgtgagccagcaagcccttgatctgcagaacctgcggttcgaccccgacctgatgggccgtgacatagacatcatccttaacagacgtaactgcatggccgctactctcaaaattatcgaacggaatttcccagagctgctgtcgctcaatctctgcaacaataaactttaccagctggatggcctctccgacatcactgagaaggccccaaaagtgaaaactttgaatctgtcaaaaaataagctcgagtcggcatgggaactggggaaagtcaaaggcctgaagctcgaagagctgtggttagagggaaaccctctgtgttcaacattcagcgatcagtcagcatatgtaagcgccataagggactgtttccccaaactactgcgactagacgggcgcgaactgtcagcacctgtgatagtggacatagacagcagtgaaactatgaaaccgtgcaaagagaactttactggtagcgaaaccctgaagcatctggttctccaatttctgcagcaatattacagtatatacgactccggggatcgccaggggctgctgggggcatatcatgacgaagcttgcttctctctagccatccctttcgatcccaaagacagcgctccgtctagcctttgcaagtactttgaggacagccgaaatatgaaaacactgaaggacccttaccttaaaggggagctcctaaggcgcaccaaacgcgacatagtagattccctgagcgcactcccaaagacacaacacgacctcagttccattctggtcgacgtttggtgtcaaacagagcgcatgctctgtttttctgtcaatggagtttttaaggaagtggagggtcagagccagggttccgttttggcttttaccagaaccttcatcgccacacccggatcctctagctctctctgtatagtgaacgatgaattgttcgtacgggatgcgagcccacaggagactcagtcagcgtttagcattcccgtgagcaccttgtccagcagctcggaaccctcactaagtcaagagcagcaggagatggtgcaagccttctcagcacagtctggaatgaagctggagtggagtcagaagtgcctccaagataacgagtggaactacactcgggctggtcaagctttcacaatgttacaaaccgaggggaagattcccgcagaggccttcaaacagataagctag

SEQ ID NO: 39860 - DNA, 3848 bp, Artificial Sequence
  derived and/or modified sequence
agacgcagaggcgaggccgccagtcgaggacgaggaggagataacatcaagatgccgaagactgaggaaactgtgctccagaatgatcccagtgtagcagagaatggggcccctgagcctaaaacaccagggcagagccagaaaagcaagagtttctgtttagatgaccagtctcctgacctgatgtcttttctgtcacagatctgatagagacagttaatgaagtttccaagctgagcatttcacatgaaattgtagtaaaccaagatttctatgtggaagagaccattttgcctccaaacagtgtagaaggcaggtttgcggaggcaatgtacaatgctttttggaaccatctgaaagaacagctattgagtactcctcctgacttcacttgtgcccttgaacttctaaaagatgttaaggagaccttgctatcactgctattaccatggcagaaccgcctaagaaatgagatagaagaagctctggacacagatctcctcaagcaggaagcagaacatggggccctggatgtccctcatctttctaactacattctcaatttgatggctctgctatgtgcaccggttcgagatgaagcgatacagaaactagagaccataagagatccagtgcagttactgaggggcatcctccgtgttctgggcctaatgaaaatggacatggtgaactataccatccagagctttcgaccctacctgcaggaacattccatccagtatgaacaagctaaattccaggaactccttgataaacagcccagtctcctcgattataccacaaaatggctaaccaaagcagccacagacatcactacactatgtccgagttctcctgactcacctagctcctcctgcagcatggcgtgttcacttccaagcggggcaggtaacaattcagagccccccagtccaacaatggtgctataccaaggctacctgaacctcctcctctgggatcttgaaaacgtagaattcccagagactctgctgatggacagaatccggctccaggaactggcattccagttgcaccagttaactgtcctggcctcagtcttgctagtggccagaagcttctctggtgaagttttattcagatcacctgaatttgtggatagactgaaatgcaccaccaaggccctaactgaggaatttatctccaggcctgaagagactatgctgagtgtgagtgaacaggtgtctcaggaagtccatcaaggccttaaggacatgggcctcactactctgagcagtgaaaacacagcatctcttctaggccaactccagaacatcaccaagaaagagaactgcattcgtagcattgttggagtctctgctacactttcctggaggcctcattctcattgaaaaggagttggcagaactgggctggaagtttctcaatctgatgcatcataatcagcagagtcatttttcacaaaacgaaatctttccagaagatcacgaataagagagatcaaagctaggcagcttgagttgaagtagagctggaagaaggagttttgaggactgtttcaaaaccactggactagatgatctctaaaggatcttatccaggacgcttcattgcatttggtcttcatttctccttagtctcctccaggctgacatttcctcaatctttattggtcttccacagccctgacacttttggagataccagtcagcatttccaagttcgttctgtgagactgtagtgtcaggacaaagcaacaacaaaatgtgctctactctaaagaagtgtgggacatacagaactgaagttgcagaatgccatgaccatggtagcacttttcaaggaagaaagaaaggtgggagttctttccgggataattttgacaagaggagctgtcattatgaacatggtgggtatgagcgcccgccttcacactgccaggagaatgatggaagcgtggagatgagggatgtccacaaggaccaacaactaagacacactccttatagcatccgatgcgaaagaagaatgaaatggcatagtgaagacgaaatccgtattaccacgtggagaaatagaaaacctccggagagaaaaatgagtcagaacacacaggatggatacacaaggaactggtttaaggtcacaattccttacgggataaagtatgacaaggcatggctaatgaattcaatccagagccattgcagtgaccgcttcactccggttgatttccactacgtccgaaatcgggcatgcttctttgtccaggatgctagcgctgcctccgcattgaaggatgtcagttataagatttatgatgatgagaaccaaaagatatgtatatttgtcaatcattctactgcgccctactctgtgaagaataagttgaagccaggccaaatggagatgctaaagctgaccatgaacaaacggtacaatgtctcccagcaagctcttgatctccagaatctccgctttgacccagacttgatgggccgtgacattgatataatcctgaatcgaagaaactgcatggctgccaccctgaagatcattgaaagaaatttccctgagctgttgtctttgaacttgtgcaacaacaagctgtaccagctggatggcctttctgacattacagagaaggctcccaaagtcaagaccctgaatctctccaaaaataagctggagtcggcgtgggagttgggcaaggtgaaagggctgaagctcgaagagctatggctagaagggaacccgttgtgcagcaccttctcggaccagtccgcctatgtaagtgccatccgggattgtttccccaagttgttacgcctggacggccgagagttatccgcaccagtgattgttgacattgacagctctgagacaatgaaaccctgcaaggaaaactttactggatctgagaccctaaagcatttagtcctgcaattcctgcagcagtattactcgatctatgactctggagatcgacagggtctcctcggtgcttaccacgatgaggcctgcttctccttggctattcccttcgaccccaaggactcagccccgagcagcttgtgcaagtactttgaggatagcaggaatatgaaaacactcaaggacccctacctgaagggggaactgctgaggcgcacaaaacgtgacattgtggactccctcagtgcgttgcccaaaactcagcatgacctcagctccatcctggtggacgtgtggtgccagacggaaaggatgctctgcttttctgtcaatggggttttcaaggaagtggaaggacagtctcagggttctgttctcgccttcacccggaccttcattgctacccctggcagcagttccagtctgtgcatcgtgaatgacgagctgtttgtgagggatgccagcccccaagagactcagagtgccttctccatcccagtgtccacactctcctccagctctgagccctccctctcccaggagcagcaggaaatggtgcaggctttctctgcccagtctgggatgaaactggagtggtctcagaagtgccttcaggacaatgagtggaactacactagagctggccaggccttcactatgctccagaccgagggcaagatccccgcggaggccttcaagcaaatctcctaaaaggagccctccgatgtcttctttgtcttcgttcacatcctctttgtttcctcttttcaccagcctaaggcctggctgaccaggaagccaacgttaacttgcaggccacgtgacataaccacccaaagagccagttgctctgtgtattcgccccactcatgatcaccattttattttcataataaagagtgacgttacacgtt

SEQ ID NO: 39861 - DNA, 1881 bp, Artificial Sequence
  derived and/or modified sequence
atgtgctccactttgaagaagtgcggaacctacaggacggaagtcgccgagtgccatgatcacggaagcacttttcagggacgaaagaaaggaggcagttcttttagagacaactttgacaaacgctcttgccactacgagcatggcggttatgagcgacccccatcccactgccaagaaaatgatgggtctgtcgagatgcgagatgtacataaggaccagcaattgcgtcacactccgtattcaatacggtgcgagagacgcatgaagtggcacagcgaagatgagatacgtatcaccacctggcgcaatagaaagccccctgaaaggaagatgtcacaaaatacacaggatggttatacccgaaactggttcaaggtgaccattccgtatgggatcaaatatgacaaagcgtggctaatgaattcgatccagtcgcattgtagcgacagatttaccccggttgactttcactacgtccggaaccgcgcttgtttctttgtgcaagatgcaagcgccgctagtgccctcaaagacgtcagctataagatctatgacgacgagaaccagaagatctgcattttcgtcaaccactctaccgccccatatagtgtgaaaaataagcttaagccgggacagatggagatgctgaagttgactatgaacaagcggtataacgtctcccagcaggctttggatctgcagaatctgagattcgaccccgacctgatgggcagggatattgacattatactgaatcgcagaaactgtatggccgcaactctaaagattatcgagcgtaacttccccgagctgttgtcacttaacctgtgcaacaataagctgtaccaactggacggcctatccgacatcaccgaaaaggcgcctaaagtcaagaccctgaacctttcaaagaataaattggagtccgcctgggagctcggtaaggtcaagggtcttaaactggaggagctgtggctcgaggggaaccctctctgctcaacgttctccgatcagagcgcttacgtatccgccatacgcgactgctttccaaaattacttagactagacggccgtgagctctcagctcctgtcatcgtagacatcgattccagtgagacaatgaagccctgtaaggagaatttcacaggctcagagacacttaagcaccttgttttgcagtttttgcagcaatattacagtatttatgactctggggaccggcagggactgcttggcgcataccacgacgaagcatgtttttcgttagccatcccgtttgaccccaaggacagtgcgccttctagtctgtgtaagtatttcgaagactcccgtaacatgaagacactgaaagatccctacctgaaaggggagttactccgccgaacgaagcgggacatagtggattctttatctgctctgcccaagacccaacacgacctgtcctccatcttagtcgacgtgtggtgccagactgagcgcatgctctgctttagcgtgaacggtgtctttaaggaagtagagggccagtcccagggttccgtgcttgcgtttacaaggactttcattgccacccctggttcttcctcttccctgtgtattgtaaatgatgagctgttcgtgagagacgctagcccacaggagacacagtcagctttttccatcccggtctctacactgagctctagtagtgaaccatccttgagccaggaacagcaggagatggtgcaggccttcagtgcccagtccgggatgaagctggagtggtcccagaagtgcctgcaagacaatgagtggaattacacccgcgcagggcaggcttttactatgctccagactgaaggcaaaattccagcggaggccttcaaacagatctcttag

SEQ ID NO: 39862 - DNA, 1881 bp, Artificial Sequence
  derived and/or modified sequence
atgtgttctaccctcaagaaatgcggaacctacaggactgaagttgctgaatgtcacgatcacggaagcactttccaggggcgaaagaaggggggatcgagcttccgtgacaattttgacaagcgtagttgtcactacgaacacggaggatacgagcggcctccaagccactgccaggaaaacgatggaagtgtggagatgagggatgtacataaggatcaacaacttcgccacactccttattcgatccgttgcgaacgccgaatgaagtggcactccgaagatgaaattcggattacaacctggaggaaccgaaaaccccctgaaaggaagatgtcccagaatactcaggacgggtacacccggaattggtttaaagtgacaataccctatggcatcaagtatgacaaagcttggctgatgaattccattcagtcacactgtagcgatcgcttcacccccgtggatttccactatgtgcggaacagagcctgcttcttcgttcaagacgcatctgcagccagcgctctcaaagatgtgtcctacaagatttacgacgatgaaaaccagaaaatctgcatctttgtgaatcactccacagccccttattccgtgaagaataagctgaaaccaggacagatggagatgctgaaactgactatgaataagaggtataatgtgtcacaacaagctcttgacctgcagaatctgcgttttgaccccgacctcatgggcagggacatcgacattatcctgaacaggcggaattgcatggccgctacattaaagattattgaacgcaattttccagagctgctgtctctgaatctgtgcaacaacaagctgtaccagctggacggtctcagcgatatcaccgagaaagctcccaaggtaaaaacactgaacttgtctaagaacaagctggagtctgcctgggagcttgggaaggttaagggccttaagctggaagaactgtggttggagggcaatcccctgtgcagcactttctccgaccagtccgcatatgtaagcgccattagagactgcttcccgaaactactacgcttggatggacgcgagctaagtgctccagtgatcgtggatatagattccagcgaaaccatgaaaccttgcaaagaaaatttcaccggaagcgagactctgaaacacctggtcctccaattcctgcagcagtactatagcatctacgattctggagatcggcagggactgctcggggcataccacgacgaggcatgttttagtttagctataccctttgatccgaaagactcagccccatcctctttgtgtaaatacttcgaagacagtcgcaatatgaagactttaaaggacccatacctgaagggcgaactcctgcggagaaccaagcgtgacatcgtggatagcctgtcagctctgcctaagacacagcacgatctgagcagtatcctggtggatgtttggtgtcagaccgagcggatgctatgtttctcagtcaacggagtgttcaaggaggtggagggccaatcccagggatccgtccttgcttttacacgcacatttatcgcaacgcccggtagcagtagtagtctttgcatcgttaacgacgaattgttcgtaagggatgcttcccctcaggaaactcagagtgctttttcgatccccgtctccaccttgtcctcgtcctctgagccctccctctcccaagaacagcaggagatggttcaggctttttctgctcagagcggaatgaaacttgaatggagtcagaaatgcctccaagataatgagtggaattacacgcgggctggccaagcctttacgatgttgcagaccgagggaaagattcctgcagaagcctttaagcaaatctcatag

SEQ ID NO: 39863 - DNA, 1230 bp, Artificial Sequence
  derived and/or modified sequence
atgaagtggcactccgaagacgaaatccgtattaccacatggcgcaataggaaaccgcctgagagaaagatgtcccaaaacactcaagacggttacactcggaactggtttaaggtcactattccatatgggattaaatacgataaagcttggctgatgaactccatacagtcacactgtagcgataggtttacccccgtggatttccactacgtaagaaatagggcatgctttttcgtgcaggacgcgagtgcagcgtctgcactgaaagatgtttcatacaagatttacgatgatgagaatcagaaaatctgcatctttgtgaaccattctacggccccatacagcgtgaaaaataaactgaagccaggtcagatggaaatgctcaaactcactatgaacaagagatacaatgtgtcccagcaggcgctggacctgcagaatctaaggttcgatccggatctgatggggagggacattgatatcattttaaatcggcgaaactgcatggccgctacattaaagatcattgagcgcaattttccggagttgttgagcctgaacctctgtaataataagctctatcagctcgatggcttgtccgacattacagagaaagcgccaaaagttaagacactcaacttatccaagaacaaactggagtctgcttgggaactgggcaaagtcaaaggcctcaagttagaggagctgtggctggaaggtaacccactctgctccacattttccgaccagagcgcctatgtcagcgcaatcagagattgctttccaaaactgctgaggctcgacggacgtgagcttagcgccccagtgatcgtggatattgactcttctgaaacgatgaaaccttgcaaagagaatttcacaggttccgaaacccttaagcacttggttttgcaatttctgcaacagtactatagcatttacgactccggtgatcgacagggcttgcttggtgcctaccacgacgaggcatgtttctcccttgcaatcccattcgatcctaaagacagcgctccctcgtctctttgtaagtactttgaggatagcaggaatatgaaaactctcaaagacccttatctcaaaggggagctcctgaggcgtacaaagagagatatcgtcgactccctgtcggctttgcctaagactcaacatgatctctcctcgatcctggttgatgtgtggtgccaaaccgttccaagtgggcagtag

SEQ ID NO: 39864 - DNA, 1881 bp, Artificial Sequence
  derived and/or modified sequence
atgtgcagcactctgaagaagtgcggaacctaccggaccgaggttgcagagtgccatgaccatggatcaaccttccagggacgcaagaaaggcggttctagcttccgagataatttcgacaaacgcagttgccactacgaacacgggggttacgagcgtccgccaagccattgtcaagagaatgatgggtcagtggagatgcgtgacgtgcacaaggatcagcagctaagacacacaccctatagcatcaggtgtgagagaaggatgaagtggcactctgaagatgagattcggataactacctggcggaaccgaaaacccccagagagaaaaatgtctcaaaatacacaggacggctacacccggaactggttcaaggtgaccattccatacgggataaagtacgataaagcgtggctaatgaactccattcagtcacactgttcagatcgctttacacccgtcgactttcattatgtgcggaaccgagcgtgcttcttcgttcaggatgcctccgccgctagcgccttgaaggatgtgtcatataaaatttatgacgatgagaatcagaagatttgcattttcgttaatcatagcacagccccttattcagtcaagaacaagttgaaacctggacagatggagatgttgaaactgaccatgaacaaacggtataatgtgtcgcagcaggccctggatctccagaacctccgattcgacccagatctaatgggacgtgatatcgatataatcttgaaccgtcgcaactgcatggccgctacgctgaaaattattgaacggaactttcccgagctactgtctctcaatctgtgcaacaataagctttatcagcttgacggcctctctgatattactgaaaaggcaccaaaagtgaagactctgaatctgtctaagaacaaacttgagagtgcatgggagctggggaaggttaaggggttgaagctggaggagttatggctcgaaggtaatccactatgttccactttttccgatcagtctgcgtacgtctcagccatcagagactgctttccaaaactgctgagattggacgggagagaactgagcgcacctgtcattgtcgacattgattccagcgagacaatgaaaccgtgcaaagagaacttcacaggtagtgaaactctaaagcaccttgtactgcagttcttgcagcagtactatagtatctacgacagtggcgatcggcaaggactgctcggcgcttaccacgacgaggcctgtttctcgctggcgatcccttttgatcccaaagacagcgccccaagttccctgtgcaaatatttcgaagacagccggaacatgaagaccctgaaagacccatatctcaaaggcgagctgcttcggagaactaaaagggacatagttgactcactgtccgctctccccaagacccaacatgacttgagttcaattttggtcgacgtatggtgccagactgaacggatgctgtgtttttctgttaatggtgtgtttaaagaggtggaaggacagtcccagggctccgtgcttgcattcactaggacatttattgctactcccggttccagtagctctctgtgcattgtaaacgacgagctctttgtccgcgacgcttcccctcaggagacccagagtgcattttccattcctgtaagtaccctgagttcttcttccgagcccagtctgagtcaggagcagcaggagatggtccaagcattctctgctcagagcggcatgaaattggaatggagccagaagtgcctgcaggacaacgagtggaactacactcgtgcaggtcaggctttcacaatgctgcagacagagggaaaaatccctgcagaggcattcaagcagatttcttag

SEQ ID NO: 39865 - DNA, 1881 bp, Artificial Sequence
  derived and/or modified sequence
atgtgctcaacccttaagaaatgtggaacctacagaacagaggtggcagaatgccatgaccacggatccaccttccaggggagaaagaagggaggctcctccttcagggacaattttgataagcgcagctgccattacgagcacgggggatacgaacggccaccgtcacattgccaggagaacgatggctcagttgagatgcgtgacgtgcacaaggatcagcagcttcgccatactccctactctatccgctgcgagcggcgaatgaaatggcacagtgaggatgagattcggattacgacatggcgcaatagaaaacctccagaaaggaagatgtctcagaatacacaggacgggtatacacgaaactggttcaaggtgacaataccctatggcattaaatatgacaaggcctggctgatgaacagcattcagtcacactgctctgatcggttcacaccagtcgacttccactacgtacgtaatcgcgcatgcttctttgttcaggatgcgtccgcagctagcgctcttaaggacgtatcatacaagatctacgatgacgagaatcaaaaaatttgcatcttcgttaatcattccactgctccctattccgttaagaacaaactaaagcccggacaaatggaaatgctgaagctgaccatgaataaacgctacaatgtctctcagcaggctctcgacctccagaacctacggttcgaccctgacctaatgggtagagatatcgacataatcttaaaccggaggaattgtatggccgctacgctcaagattatcgaaaggaacttcccagagctgttgtccctcaatctctgtaacaataaactttatcagttagacggtctgagtgatattactgaaaaagctcccaaagttaaaacgctgaatctgtctaagaacaagctggagtcggcctgggaactcgggaaagtgaaggggcttaagctcgaggaactgtggttagagggaaatcccctgtgtagtaccttctctgaccagtctgcctacgtgtctgccattcgcgattgttttcctaagttgctgcgtctcgatgggagggaacttagcgcgcctgtcattgtggacatcgactctagcgagaccatgaagccctgcaaagagaacttcacagggtccgaaactttgaagcaccttgtgttacaatttttacagcagtactactcaatttatgacagcggggataggcagggactactcggagcatatcatgacgaggcttgcttctctctggctatccccttcgatcctaaggactctgctccctcctccttgtgcaaatatttcgaggattcaagaaacatgaagacactcaaggatccgtatctgaaaggcgaactgctccgcaggaccaaaagagacatcgtggattcgctgtccgccttaccgaagactcagcatgatctttcttccattttagtggacgtttggtgtcagacagaacgcatgctctgctttagcgtcaatggtgttttcaaagaagtggaggggcagagccaagggagtgtgctggccttcactcggactttcattgcaacccccggaagcagctcttctctatgcatcgtgaatgatgagctgtttgtcagggatgcctcaccccaggagacccagagtgcattctctatccctgtctcaactttaagctcatcctctgagcctagcctgagtcaggagcaacaggaaatggtccaggctttttcggcgcaaagtgggatgaagctggagtggagccaaaaatgcctgcaggacaacgagtggaactacacaagagcagggcaggcatttaccatgctgcaaaccgagggcaagatacctgccgaggcgtttaagcagatcagctag

SEQ ID NO: 39866 - DNA, 3959 bp, Artificial Sequence
  derived and/or modified sequence
agacgcagaggcgaggccgccagtcgaggacgaggaggagataacatcaagatgccgaagactgaggaaactgtgctccagaatgatcccagtgtagcagagaatggggcccctgagcctaaaacaccagggcagagccagaaaagcaagagtttctgtttagatgaccagtctcctgacctgatgtcttttctgtcacagatctgatagagacagttaatgaagtttccaagctgagcatttcacatgaaattgtagtaaaccaagatttctatgtggaagagaccattttgcctccaaacagtgtagaaggcaggtttgcggaggcaatgtacaatgctttttggaaccatctgaaagaacagctattgagtactcctcctgacttcacttgtgcccttgaacttctaaaagatgttaaggagaccttgctatcactgctattaccatggcagaaccgcctaagaaatgagatagaagaagctctggacacagatctcctcaagcaggaagcagaacatggggccctggatgtccctcatctttctaactacattctcaatttgatggctctgctatgtgcaccggttcgagatgaagcgatacagaaactagagaccataagagatccagtgcagttactgaggggcatcctccgtgttctgggcctaatgaaaatggacatggtgaactataccatccagagctttcgaccctacctgcaggaacattccatccagtatgaacaagctaaattccaggaactccttgataaacagcccagtctcctcgattataccacaaaatggctaaccaaagcagccacagacatcactacactatgtccgagttctcctgactcacctagctcctcctgcagcatggcgtgttcacttccaagcggggcaggtaacaattcagagccccccagtccaacaatggtgctataccaaggctacctgaacctcctcctctgggatcttgaaaacgtagaattcccagagactctgctgatggacagaatccggctccaggaactggcattccagttgcaccagttaactgtcctggcctcagtcttgctagtggccagaagcttctctggtgaagttttattcagatcacctgaatttgtggatagactgaaatgcaccaccaaggccctaactgaggaatttatctccaggcctgaagagactatgctgagtgtgagtgaacaggtgtctcaggaagtccatcaaggccttaaggacatgggcctcactactctgagcagtgaaaacacagcatctcttctaggccaactccagaacatcaccaagaaagagaactgcattcgtagcattgttggagtctctgctacactttcctggaggcctcattctcattgaaaaggagttggcagaactgggctggaagtttctcaatctgatgcatcataatcagcagagtcatttttcacaaaacgaaatctttccagaagatcacgaataagagagatcaaagctaggcagcttgagttgaagtagagctggaagaaggagttttgaggactgtttcaaaaccactggactagatgatctctaaagtggtgacatggacataggataatggttatagacagtccccctcccaacgggaaaaaatgaaagcaagcaaaaagttaccagctccaagccaacttgaaatccaatcaggatcttatccaggacgcttcattgcatttggtcttcatttctccttagtctcctccaggctgacatttcctcaatctttattggtcttccacagccctgacacttttggagataccagtcagcatttccaagttcgttctgtgagactgtagtgtcaggacaaagcaacaacaaaatgtgctctactctaaagaagtgtgggacatacagaactgaagttgcagaatgccatgaccatggtagcacttttcaaggaagaaagaaaggtgggagttctttccgggataattttgacaagaggagctgtcattatgaacatggtgggtatgagcgcccgccttcacactgccaggagaatgatggaagcgtggagatgagggatgtccacaaggaccaacaactaagacacactccttatagcatccgatgcgaaagaagaatgaaatggcatagtgaagacgaaatccgtattaccacgtggagaaatagaaaacctccggagagaaaaatgagtcagaacacacaggatggatacacaaggaactggtttaaggtcacaattccttacgggataaagtatgacaaggcatggctaatgaattcaatccagagccattgcagtgaccgcttcactccggttgatttccactacgtccgaaatcgggcatgcttctttgtccaggatgctagcgctgcctccgcattgaaggatgtcagttataagatttatgatgatgagaaccaaaagatatgtatatttgtcaatcattctactgcgccctactctgtgaagaataagttgaagccaggccaaatggagatgctaaagctgaccatgaacaaacggtacaatgtctcccagcaagctcttgatctccagaatctccgctttgacccagacttgatgggccgtgacattgatataatcctgaatcgaagaaactgcatggctgccaccctgaagatcattgaaagaaatttccctgagctgttgtctttgaacttgtgcaacaacaagctgtaccagctggatggcctttctgacattacagagaaggctcccaaagtcaagaccctgaatctctccaaaaataagctggagtcggcgtgggagttgggcaaggtgaaagggctgaagctcgaagagctatggctagaagggaacccgttgtgcagcaccttctcggaccagtccgcctatgtaagtgccatccgggattgtttccccaagttgttacgcctggacggccgagagttatccgcaccagtgattgttgacattgacagctctgagacaatgaaaccctgcaaggaaaactttactggatctgagaccctaaagcatttagtcctgcaattcctgcagcagtattactcgatctatgactctggagatcgacagggtctcctcggtgcttaccacgatgaggcctgcttctccttggctattcccttcgaccccaaggactcagccccgagcagcttgtgcaagtactttgaggatagcaggaatatgaaaacactcaaggacccctacctgaagggggaactgctgaggcgcacaaaacgtgacattgtggactccctcagtgcgttgcccaaaactcagcatgacctcagctccatcctggtggacgtgtggtgccagacggaaaggatgctctgcttttctgtcaatggggttttcaaggaagtggaaggacagtctcagggttctgttctcgccttcacccggaccttcattgctacccctggcagcagttccagtctgtgcatcgtgaatgacgagctgtttgtgagggatgccagcccccaagagactcagagtgccttctccatcccagtgtccacactctcctccagctctgagccctccctctcccaggagcagcaggaaatggtgcaggctttctctgcccagtctgggatgaaactggagtggtctcagaagtgccttcaggacaatgagtggaactacactagagctggccaggccttcactatgctccagaccgagggcaagatccccgcggaggccttcaagcaaatctcctaaaaggagccctccgatgtcttctttgtcttcgttcacatcctctttgtttcctcttttcaccagcctaaggcctggctgaccaggaagccaacgttaacttgcaggccacgtgacataaccacccaaagagccagttgctctgtgtattcgccccactcatgatcaccattttattttcataataaagagtgacgttacacgttgta

SEQ ID NO: 39867 - DNA, 1881 bp, Artificial Sequence
  derived and/or modified sequence
atgtgcagcacccttaagaaatgcgggacctaccgtaccgaggtggctgaatgccacgaccacggctctacattccagggccgcaaaaaaggcgggtcgagctttcgggacaactttgacaaaaggtcctgccattacgagcacggaggctatgagaggccaccctcccattgccaggagaacgacgggtcagtcgagatgagggacgtacacaaggaccaacagctgagacacacaccatactcaatcaggtgcgagaggcgtatgaaatggcacagcgaagacgagattcggataacaacctggcgaaataggaaacctcctgagaggaagatgtcacagaacacacaggatggttataccaggaattggtttaaagtcacgatcccttacggcattaagtacgacaaggcttggctcatgaatagcattcagtcccactgcagcgaccggttcactccggtggactttcactatgtgcgcaaccgtgcttgcttctttgtccaggacgcaagcgctgcatctgcgcttaaggatgtgagctataagatctatgatgatgagaatcaaaaaatctgtatattcgtgaatcatagtaccgccccctacagcgtaaagaacaaactcaaacccgggcaaatggagatgctgaagctcacgatgaataagcgctacaatgttagccagcaggctctcgacctgcaaaatctgaggtttgacccagatttgatggggcgcgacatagatatcattctcaatagaaggaattgcatggctgcaacccttaagatcattgagcgcaatttcccggagttattgtctctaaatctgtgtaacaacaagctgtaccagttagacggactgtccgacattactgaaaaggccccgaaagttaagacactgaatctctccaaaaacaagctggagtctgcctgggagcttggtaaagtgaaaggactcaagctcgaggagctgtggctggaaggaaacccattgtgtagcaccttttccgatcagtctgcctacgtaagcgccatccgcgactgcttccccaagctcctgcgtctagatgggcgggaactctcggcgccggtcatcgtggacatcgacagttcggagacaatgaagccctgcaaagaaaatttcaccggctcggaaaccctcaagcacttagtccttcagttcctgcagcaatattactccatctatgattccggcgaccgtcagggattgctgggggcctatcacgacgaagcatgcttcagcctcgcaatcccttttgaccccaaggactccgctcccagtagtctttgcaagtacttcgaagatagtagaaacatgaaaactcttaaggatccatacctgaagggcgagttgctcagaaggacgaagagagacatagtggactccctgtctgctctcccgaagactcagcatgacctcagttctatcctggttgacgtttggtgtcagactgaaaggatgctctgtttttctgttaatggggtgttcaaggaggtggaaggtcaatcccagggttccgtcctggcctttactaggaccttcatagctacgcccggaagtagtagcagtctctgcattgtgaacgacgaactgtttgtgagggacgcatcaccccaggagacccagtccgccttctcaatccccgtgtccacattgtccagctcgtccgagccgtcactaagccaggagcagcaagaaatggtgcaggccttcagcgcccagagcggaatgaagctggagtggtcccagaaatgtctgcaggacaacgaatggaattacactcgtgctgggcaagcgttcacaatgctccagaccgagggaaaaatcccagctgaagcctttaagcagatctcttag

SEQ ID NO: 39868 - DNA, 1881 bp, Artificial Sequence
  derived and/or modified sequence
atgtgctctactctgaaaaaatgcggaacgtatcgtaccgaggtggcagagtgccacgaccacggcagcacctttcaagggaggaaaaaaggcggcagctcgttccgggacaacttcgataagaggtcctgccattacgagcacggcggttacgaaaggccaccttcccactgccaggagaacgacggctccgtggagatgcgtgacgtgcacaaggatcagcaactgagacacaccccctacagtattaggtgtgagagaaggatgaagtggcactcagaagatgagatccggatcaccacttggcgaaaccgcaaaccacctgagaggaaaatgtcacaaaacacacaggacgggtatactcggaactggttcaaagtgacaataccgtacggaattaagtacgataaagcgtggctcatgaactccattcagagccattgctctgaccgctttacacctgtcgactttcactacgtgcgtaaccgggcatgctttttcgtgcaggacgcctccgccgcatccgcactaaaggatgtgagctataaaatttatgacgacgagaaccaaaaaatttgtattttcgtgaaccatagcacggccccctatagtgtgaaaaataagctgaagccagggcagatggagatgttgaagctgactatgaataaacgttataatgtgtctcagcaagctctggatttacagaatctccgtttcgatcctgatctgatgggcagggacattgatattatactgaaccgccgcaactgcatggccgccacattgaagatcatagaacggaacttcccggagctactctccctcaacctttgcaataacaagctgtatcagctcgacgggcttagtgacattaccgagaaggccccaaaagtcaaaactctgaacctgagcaaaaataaactggagtccgcttgggagctgggaaaggttaagggattgaaactggaggaactgtggcttgagggtaatcccctttgtagtaccttcagcgatcaaagcgcctacgtgagcgctatacgcgattgttttcctaaacttctacgcctcgacgggcgcgagctgagtgctcccgtgatcgtggacatcgatagcagcgagaccatgaaaccctgcaaggaaaacttcacaggaagcgaaacactgaagcacttagttcttcagtttcttcagcagtattacagcatctacgactccggagatcggcagggcctgttgggcgcttatcatgacgaggcgtgtttctctctggccattcccttcgaccctaaggattccgcaccctctagtctctgcaagtattttgaagactctagaaacatgaagacactgaaggacccttatctcaagggggaactccttcgtagaaccaagagagatattgtggattctctttctgccctgcctaagacgcagcacgaccttagttcaattttggtggatgtatggtgtcagactgagcgaatgttatgctttagtgtgaatggcgtgttcaaggaggtggaaggccagagccagggatcagtcttggccttcacaagaactttcatcgccacccctggtagtagttcatccctttgtatcgtcaacgatgagctcttcgtgcgagacgcatcccctcaggaaacccagtccgctttcagcatccccgtgagcaccctttcttcaagttccgagccttccctctcccaagaacaacaggaaatggtccaggcctttagcgcccaatcaggcatgaaacttgagtggtcccagaagtgcttgcaggacaacgagtggaactacactcgggctggccaggcattcaccatgttgcagactgagggcaagatccccgccgaggctttcaagcagatctcctag

SEQ ID NO: 39869 - DNA, 1881 bp, Artificial Sequence
  derived and/or modified sequence
atgtgcagcaccctgaagaagtgcggcacctaccggaccgaggtggcagaatgtcacgatcatggctctaccttccagggcagaaagaagggcggcagtagcttcagagacaattttgacaagcgcagttgccattatgagcatggtggctacgagagacctccatcccactgtcaggagaatgatggaagcgtggaaatgcgcgatgttcataaggatcagcagctgcgccatactccctatagtatccggtgcgaacggagaatgaaatggcactcagaagatgagattaggatcactacctggagaaatcggaagcctccagagaggaaaatgtcccagaatactcaggacggttatactaggaattggttcaaagtcaccatcccttacggcatcaaatacgataaggcatggttgatgaattcgattcagtctcactgtagcgacagattcacacccgtggacttccattacgtgcggaatcgggcttgtttctttgtgcaagatgcatccgcagcctcagccctgaaggatgtgtcctacaaaatatacgacgatgagaatcaaaagatatgtatcttcgttaaccactctacggccccttactccgtcaagaacaagctgaagccaggacagatggaaatgctgaaactgaccatgaataagcggtacaacgtttctcagcaagccctggatcttcagaatctaaggttcgatcccgatctaatgggtcgcgatattgatattatccttaatcgaaggaattgcatggcggccaccctgaagatcatagagaggaattttcctgagcttctgtcactgaacctatgtaataataagctgtaccaactcgatggtctctccgatatcaccgagaaggctcccaaggtgaagactcttaacctgtcaaagaataagctcgagtcagcgtgggagttgggcaaagtgaagggccttaagctcgaagagttgtggctggagggaaacccgctatgctccacgttctctgatcagagtgcgtacgtgtcagctattagagactgctttcctaagctccttaggctggatgggagggaactctcagcccccgtgattgtggacatcgactcctcggagaccatgaaaccatgtaaggagaattttaccggcagcgaaacactgaagcacctggtattacagtttttacagcagtactattccatttatgacagcggtgaccggcagggtcttctcggcgcctaccacgacgaagcttgtttcagcttggcaattccatttgatcccaaggactcagcaccatctagtctctgcaaatactttgaggactcacgcaatatgaagacactgaaggacccatacctcaagggcgagttgctaaggcggacaaaacgggacatcgtcgattctctgagtgccttacccaaaactcagcatgatctgtcctccatcttagtggatgtttggtgtcagacagagcgaatgttatgttttagcgtcaatggagtgttcaaggaggtggaaggccagtcccaggggtccgttctggcttttacacggacttttattgcgacccctggaagtagttcatcactctgtatcgtgaacgatgagctctttgtgcgtgacgcttcgccacaggagacccagtctgctttttctattcctgtgtcaacactgtcctcctcttccgagccaagtctgtcccaagagcaacaagagatggtgcaagcgttttctgcacaatcaggtatgaaactggaatggagtcagaagtgcttacaggacaacgagtggaactacaccagggcggggcaggcctttacaatgctgcagacagagggcaaaatacccgcagaagcattcaaacagatcagctag

SEQ ID NO: 39870 - DNA, 1881 bp, Artificial Sequence
  derived and/or modified sequence
atgtgcagcaccctgaagaagtgcggcacctaccggaccgaggtggccgaatgtcacgatcacggatcaacctttcagggtagaaagaagggggggagctctttccgcgacaacttcgataagcgctcctgtcattacgaacatggcgggtacgaaaggcccccatcccactgccaggagaacgatggaagcgtggaaatgagagacgtccacaaggatcagcagctccggcacaccccttactctatcaggtgcgagcgcagaatgaaatggcattcagaagatgaaatccggataactacctggcgaaatagaaagccccccgaaaggaagatgtcacagaatacacaggatggttacaccagaaattggttcaaagtgaccatcccctatggcattaagtacgacaaagcctggctcatgaatagtatccagtcacattgttccgataggtttacaccagtggactttcactacgttcgtaatcgcgcgtgtttcttcgttcaggacgccagcgctgcatctgcgctgaaagacgtgtcctacaaaatctatgacgatgagaaccagaagatttgcatattcgtaaaccactctactgctccttacagtgtcaaaaacaagctaaaaccagggcagatggaaatgctgaaactgaccatgaacaagcgatacaatgtcagtcagcaggcccttgatcttcagaacctccgtttcgatcctgaccttatgggccgcgacatcgacatcattctgaacagacggaactgcatggctgccaccctgaaaatcatagaaaggaacttccctgaactgctgtctcttaatttgtgcaataataagttatatcagctcgatggcctcagcgacattaccgagaaagcaccaaaagtcaaaacattgaacctgtcaaaaaataagcttgagtcagcttgggagctgggcaaggttaaggggctgaaactggaagagctgtggctggagggaaatcctctgtgctctacatttagcgatcaaagtgcttacgtttccgcaattagagactgttttcctaaactgctgcgtttagatggccgggagctttccgccccagtcattgttgacatcgacagctcggaaactatgaagccctgcaaggagaatttcaccggcagcgaaacgctcaaacaccttgtcctacaattcctgcaacagtactacagcatatacgattccggcgatcgccagggtctcttaggtgcctaccatgatgaagcctgtttctccctcgcaattccttttgaccccaaagattccgcaccctccagtctttgcaaatattttgaggatagccgcaacatgaaaacgctcaaagatccatacttgaaaggagaactgctgcgaagaaccaagcgtgatattgtcgactctctgagcgcactccccaagactcaacatgatctgtcatctattctcgttgacgtatggtgtcaaactgagagaatgctgtgtttctccgtcaacggggtcttcaaggaggtggaaggacagtctcagggaagtgtgcttgcttttacccgaacatttatcgcaacgccaggatcgtcctcaagcctttgtatcgtgaacgacgagctgttcgtgagggacgcgagccctcaggaaactcaaagcgctttctcaatccccgtttctaccctatcaagctcctcggagccaagtttgtcccaagagcaacaagagatggtgcaggccttttccgcccagagcgggatgaaactggaatggtcccaaaagtgtctgcaggataacgagtggaattacacaagggcaggacaagccttcaccatgctccagaccgaaggtaaaatcccggcggaagctttcaagcaaataagttag

SEQ ID NO: 39871 - DNA, 2400 bp, Artificial Sequence
  derived and/or modified sequence
aattgaagtcctctccccactgctttgagaaggaaccgttaagacgctgggccccacccacaagattgcgtcttgtttgtggcaagattctgaggggaagtgtagctcccaggttggttccaagtcttcttccaattaggatcttatccaggacgcttcattgcatttggtcttcatttctccttagtctcctccaggctgacatttcctcaatctttattggtcttccacagccctgacacttttggagataccagtcagcatttccaagttcgttctgtgagactgtagtgtcaggacaaagcaacaacaaaatgtgctctactctaaagaagtgtgggacatacagaactgaagttgcagaatgccatgaccatggtagcacttttcaaggaagaaagaaaggtgggagttctttccgggataattttgacaagaggagctgtcattatgaacatggtgggtatgagcgcccgccttcacactgccaggagaatgatggaagcgtggagatgagggatgtccacaaggaccaacaactaagacacactccttatagcatccgatgcgaaagaagaatgaaatggcatagtgaagacgaaatccgtattaccacgtggagaaatagaaaacctccggagagaaaaatgagtcagaacacacaggatggatacacaaggaactggtttaaggtcacaattccttacgggataaagtatgacaaggcatggctaatgaattcaatccagagccattgcagtgaccgcttcactccggttgatttccactacgtccgaaatcgggcatgcttctttgtccaggatgctagcgctgcctccgcattgaaggatgtcagttataagatttatgatgatgagaaccaaaagatatgtatatttgtcaatcattctactgcgccctactctgtgaagaataagttgaagccaggccaaatggagatgctaaagctgaccatgaacaaacggtacaatgtctcccagcaagctcttgatctccagaatctccgctttgacccagacttgatgggccgtgacattgatataatcctgaatcgaagaaactgcatggctgccaccctgaagatcattgaaagaaatttccctgagctgttgtctttgaacttgtgcaacaacaagctgtaccagctggatggcctttctgacattacagagaaggctcccaaagtcaagaccctgaatctctccaaaaataagctggagtcggcgtgggagttgggcaaggtgaaagggctgaagctcgaagagctatggctagaagggaacccgttgtgcagcaccttctcggaccagtccgcctatgtaagtgccatccgggattgtttccccaagttgttacgcctggacggccgagagttatccgcaccagtgattgttgacattgacagctctgagacaatgaaaccctgcaaggaaaactttactggatctgagaccctaaagcatttagtcctgcaattcctgcagcagtattactcgatctatgactctggagatcgacagggtctcctcggtgcttaccacgatgaggcctgcttctccttggctattcccttcgaccccaaggactcagccccgagcagcttgtgcaagtactttgaggatagcaggaatatgaaaacactcaaggacccctacctgaagggggaactgctgaggcgcacaaaacgtgacattgtggactccctcagtgcgttgcccaaaactcagcatgacctcagctccatcctggtggacgtgtggtgccagacggaaaggatgctctgcttttctgtcaatggggttttcaaggaagtggaaggacagtctcagggttctgttctcgccttcacccggaccttcattgctacccctggcagcagttccagtctgtgcatcgtgaatgacgagctgtttgtgagggatgccagcccccaagagactcagagtgccttctccatcccagtgtccacactctcctccagctctgagccctccctctcccaggagcagcaggaaatggtgcaggctttctctgcccagtctgggatgaaactggagtggtctcagaagtgccttcaggacaatgagtggaactacactagagctggccaggccttcactatgctccagaccgagggcaagatccccgcggaggccttcaagcaaatctcctaaaaggagccctccgatgtcttctttgtcttcgttcacatcctctttgtttcctcttttcaccagcctaaggcctggctgaccaggaagccaacgttaacttgcaggccacgtgacataaccacccaaagagccagttgctctgtgtattcgccccactcatgatcaccattttattttcataataaagagtgacgttacacgttgt

SEQ ID NO: 39872 - DNA, 1881 bp, Artificial Sequence
  derived and/or modified sequence
atgtgttcgacactgaagaaatgtgggacatatcgcactgaggtggcagagtgccacgatcacgggagcacattccagggtagaaagaaaggcggatcttcctttcgcgacaactttgacaagcggagctgccactatgagcatgggggatatgagcggccaccctcccattgccaagaaaatgatgggtccgtggagatgcgagatgttcacaaagatcagcagctgaggcacactccctattcaattcgttgtgaacggaggatgaaatggcacagcgaagacgagatccggattactacttggaggaatcgcaagcccccagagcgcaagatgtcacaaaacacccaggatggctacacacgaaattggttcaaagttacgattccttacgggataaaatatgacaaggcctggctgatgaacagtatacaaagccattgttcagacaggtttacgcctgtcgacttccactacgttagaaacagggcatgtttctttgtccaggatgccagtgccgcatctgcactgaaggacgtatcgtacaaaatctatgacgatgaaaaccagaaaatctgcatcttcgtgaaccactccaccgctccctactctgtgaaaaataaactcaaacccggacagatggaaatgttgaaactgaccatgaataagcggtacaatgtaagtcaacaggcccttgatttgcaaaacctccggtttgatcccgatctgatgggcagagacatagacatcatcctcaaccgccgtaactgtatggcagctactctcaagattattgagcgcaacttccctgaattgctgtctttgaacttgtgcaacaacaagctttaccagctggacggactgtctgacatcaccgaaaaagctcccaaagtcaagacccttaacttgtccaagaacaaactcgaatcagcttgggaattgggcaaggtcaagggcctcaaactggaggaactttggctggagggcaaccctctgtgctccacttttagcgaccagagcgcatatgttagcgctatcagagattgctttccaaaactgctgcgactggacgggagggagttgagcgcccctgtgatcgtggatatcgattctagtgagactatgaaaccatgcaaagagaactttaccggaagtgaaacacttaaacacctggtgctgcagtttttgcagcagtactacagcatctacgattcgggcgaccgacaggggctcctgggcgcataccatgacgaggcatgctttagccttgctatccctttcgaccccaaggactccgcgcctagttcactgtgtaaatacttcgaggactctcggaacatgaagaccctcaaagatccttacttgaagggcgagctgctgaggcgcaccaaacgcgatatcgtagacagcctgtcagcgttgccgaagacccaacacgacctttcctcaatcctggtcgacgtgtggtgccagactgaaagaatgctttgcttttccgttaatggggttttcaaggaggtagagggacagtctcagggaagcgtactggcctttaccagaacattcattgcgaccccaggttcaagctcgtctctgtgcatcgtgaacgacgagctcttcgtgcgcgacgcaagcccgcaggaaacccagagcgccttcagcataccggtatctacgttgagtagttcatccgagcccagcctgtctcaagaacagcaggagatggtgcaggcattttcagcacaatcaggcatgaaacttgaatggtcccagaagtgtctgcaggacaatgaatggaattatactcgagcgggtcaggcatttactatgctgcagacagaggggaaaatcccggcagaggctttcaagcagattagctag

SEQ ID NO: 39873 - DNA, 1881 bp, Artificial Sequence
  derived and/or modified sequence
atgtgttctacgctgaaaaaatgtggtacttaccggaccgaagtagctgagtgccatgatcacggcagcacctttcagggcagaaaaaaggggggatcctccttccgcgacaattttgataagaggagctgccactacgagcatggaggttatgagagacctccttcccactgtcaggagaacgacggctctgtggaaatgagagatgtgcacaaggatcaacagctccgtcacactccctatagcattaggtgcgaacggagaatgaagtggcactctgaagatgagattaggatcactacttggcggaaccgtaaaccaccagagagaaagatgtcacagaacacgcaggacggatatacaaggaactggtttaaagttactattccatatggaattaagtacgataaggcctggcttatgaatagtatccagtcacattgcagcgatcgattcacgcccgtcgactttcactatgtgcgtaaccgtgcctgttttttcgtgcaggacgcatctgctgcgtccgctttgaaggacgtgtcatacaaaatttatgatgatgagaaccagaagatatgcatattcgttaatcactctactgccccttactcggtaaaaaataaactgaagccgggacagatggaaatgctgaagctgacaatgaataagcgatataatgtctctcagcaagcgctggatttgcagaatctgcgctttgaccctgatctgatggggcgtgatatcgacataattctcaatcgtcgcaattgcatggctgccacactgaaaatcattgagcgcaactttccagagctgctgtctctgaacctgtgcaataacaagctgtaccagctggacggtctctccgacattacagaaaaggccccaaaggtaaagacgctgaatctgtctaagaacaagctcgaatccgcttgggaactggggaaagtgaaaggactgaagctggaggaactttggctggaaggcaatcccctgtgctccacattctcagaccagagtgcatacgtgtctgccataagagattgctttccaaaactccttagattagacggacgtgagctcagtgcccctgtaattgtggacattgatagctctgaaaccatgaaaccttgtaaggagaattttacgggttctgagaccctgaagcacctcgtcctgcagtttctgcagcagtactactccatatatgatagcggagacagacaaggcctcctcggagcctaccatgatgaagcgtgctttagcctggcaattcccttcgaccctaaagatagcgctccgagcagcctctgtaagtactttgaggatagtcgcaatatgaagacgctgaaagacccctatctgaaaggagaactgctccggagaacaaagagggacattgtggattctctgtcagcgctcccgaagacccagcatgacctttcctctatactggtggatgtctggtgccagactgaacgcatgttatgttttagtgtgaacggagtgttcaaagaggtggagggtcagagccaaggcagcgtcttggcctttacccgcacttttattgctacccctgggtccagctctagcctgtgtatcgtcaatgacgagctctttgtgcgggacgcgagcccccaggagacacagagtgctttctctatccccgtgtcaactctctcctcatcaagtgaaccctctctgtcccaggagcagcaggaaatggtgcaggcctttagcgcccagagcggcatgaaactagaatggtctcaaaagtgtcttcaggataacgagtggaattatactcgcgcaggccaggctttcacgatgttgcagacagaaggaaaaattcccgctgaagcttttaagcagataagctag

SEQ ID NO: 39874 - DNA, 1881 bp, Artificial Sequence
  derived and/or modified sequence
atgtgcagtacactgaaaaagtgcggcacctaccgcaccgaggttgcggagtgccatgatcatggctccacctttcaagggcgtaagaaggggggcagctcttttcgagataatttcgacaaacgctcttgtcactacgaacatgggggttatgagaggcctcccagccattgtcaagagaacgatggttctgtcgagatgcgggacgtccacaaagatcaacaactgcgacataccccatactccatcaggtgcgaacgtagaatgaagtggcacagtgaagacgaaattcgcatcaccacttggaggaaccgtaaaccgccggagcgtaagatgagtcagaatacacaggatggatataccagaaactggtttaaggttactatcccttacggcatcaagtacgacaaagcctggctgatgaacagcatacagtcacattgctccgacaggtttacacccgtagattttcattatgttcggaacagggcatgcttcttcgtccaggacgccagtgccgctagcgcactcaaagatgtgtcgtataaaatttacgacgacgaaaatcagaagatatgtatctttgtcaatcactccacggcaccctacagtgtgaaaaataagctaaagcctgggcagatggagatgctcaagctgacaatgaacaaaaggtacaacgtttcacagcaggccctggaccttcaaaacctcaggtttgaccctgacctcatggggcgagatatagacatcatattgaaccgccggaactgtatggcagcaacacttaagatcattgagcgtaatttcccggagcttctgtctcttaacctgtgcaacaataagttgtaccagctggacggcctgagcgacatcactgagaaggcccccaaggtgaagaccttaaatctgagtaagaataagctcgagtcggcctgggagcttgggaaggtgaagggactcaaactggaagagctctggctggagggcaaccctctctgttccacattctcagatcagtccgcctatgtctcagccattagagattgctttcccaaactgctgagactggacggtcgcgagctgagtgcaccggttatcgttgacatagactcctctgagacaatgaaaccctgcaaggaaaacttcaccggttccgagacattgaaacatcttgttctgcaattccttcaacagtactactctatctacgacagcggagatcgtcaggggctactgggggcttaccacgacgaggcttgtttctccctcgctatcccatttgaccccaaagattccgcgcctagcagtctctgtaagtacttcgaagactcacgcaacatgaagactctgaaagatccatatctcaaaggggagctgctcagacgaacgaaacgcgacattgtcgactcactgtccgcattacccaagactcagcatgatctgagctctatcctggttgacgtctggtgccagacagagcgcatgctatgctttagcgtcaatggagtgttcaaagaggtggaagggcagtcccagggctctgttctcgcctttacaaggacgtttatagccacccccgggagctcctcctccctgtgtattgtcaatgacgaactcttcgtgcgcgatgcatcccctcaggagacgcaatccgcgttttccattcccgtatccaccttgagctctagctcagagccttcactttcccaggagcagcaggagatggtacaggctttttctgcccagagcggaatgaagctcgaatggagccagaagtgtcttcaggataacgaatggaattatacccgtgccggtcaggctttcacgatgctgcagaccgaagggaaaattcccgcggaagccttcaaacagattagttag

SEQ ID NO: 39875 - DNA, 1881 bp, Artificial Sequence
  derived and/or modified sequence
atgtgctctacgcttaaaaagtgcggtacctaccgaacggaggtggcggaatgccatgaccacggctcgacattccagggtcgcaagaagggcggctcctccttccgagataattttgataagcggagctgtcactacgagcacggtggatacgagagaccccctagccactgtcaggaaaatgatggatccgttgaaatgagggatgtccataaggatcagcaactgcggcacaccccgtactccatacgatgtgagaggcggatgaagtggcactccgaggacgagatcagaatcactacatggcgcaatagaaaaccccctgagagaaaaatgagccagaatacccaagacgggtacacaagaaactggttcaaggtgacgatcccttatgggatcaagtatgataaagcatggctcatgaattccatacagtcacactgcagcgaccggttcactccagtggacttccattacgtgaggaacagagcctgtttctttgttcaggatgccagcgccgcttctgccctgaaggatgttagctataaaatttatgatgatgaaaaccagaagatatgcatcttcgtgaaccattccacggccccatattcagtaaagaacaagctgaaacccggtcagatggagatgctgaaactgaccatgaacaaaaggtataatgtttcacaacaggcactggatctgcagaacctgagattcgaccccgacctcatggggagagatatagatattattttgaaccgaagaaactgtatggccgccacgctgaagattattgaacggaacttcccagaactactgtccctcaatctgtgtaataataaactgtaccaactggatggcctgtctgatataacagagaaggccccaaaagtcaaaacactgaatctctccaaaaataaactagagtccgcctgggagctgggcaaagttaaaggcctcaagctggaagagctgtggttggagggcaatcccttatgtagcactttctctgaccaatctgcctacgtgagcgcgattagagactgcttccctaagttgctccgtctcgatggccgcgagctaagcgctccggtaatagtagacattgatagttccgagactatgaaaccttgcaaagagaacttcacaggtagcgagacactaaaacacctggtgctgcagttcttgcagcagtactatagcatttatgactccggtgacaggcagggattgctgggggcctatcacgatgaggcctgtttttctctcgctatacctttcgaccccaaagactcggctccatccagtctgtgtaaatactttgaggattcccggaatatgaaaactctgaaagatccttatcttaagggagagttattgagacgcaccaagagagacattgtcgactcactgtccgcactaccaaaaacccagcacgatctgtcaagcatactggtggatgtctggtgccagacagaaaggatgctgtgtttctccgttaacggagtatttaaggaagttgaagggcagagccagggatcagtgctggcttttactcggacctttatagctacgccagggagctcttcctccctgtgtattgtgaacgatgagcttttcgtgcgcgatgcttccccacaggaaacgcagtccgccttcagcatccctgtgtcaacactgtcatcatcctcagagccctccctgtcacaggagcagcaagagatggtccaggcgttcagcgctcagtcaggtatgaagctcgagtggagccaaaaatgtctgcaggataacgaatggaactacacacgtgccggccaggcatttaccatgctgcaaactgaaggaaagattccagccgaagctttcaagcagatttcttag

SEQ ID NO: 39876 - DNA, 1881 bp, Artificial Sequence
  derived and/or modified sequence
atgtgtagcaccctgaaaaaatgcggcacatatcggacagaagtggccgagtgccacgaccacggctccacctttcagggccgcaagaaaggcggttcatcattccgggataatttcgataaaagaagctgtcactacgaacatggtggatatgagcgaccgccctctcactgccaagagaatgacggatccgtagagatgcgcgacgtccacaaagatcagcaactgagacatactccatatagcatccgatgcgaacgtcgcatgaagtggcactcagaagatgaaatcagaatcacaacctggcggaataggaagccaccagagcgcaaaatgagtcaaaatacgcaggatggctacacacggaactggtttaaagttacgatcccctatgggattaagtacgataaagcttggttgatgaattccatacagtctcattgcagcgatcgattcactccagtggactttcattatgtacggaacagggcttgtttcttcgtgcaggacgcatctgccgcatcagcgttgaaagatgtgtcatataaaatctacgatgatgagaaccaaaaaatctgtatctttgtaaatcattctaccgccccctatagcgtgaaaaacaaactgaaacccgggcagatggagatgctcaagctgacaatgaataagagatataatgtctcccaacaggccctcgatttgcagaatctgcgcttcgatcctgacctgatggggcgggacatcgatatcatcctgaacaggcggaattgtatggccgcaactctcaagatcatagaacggaatttcccagaattacttagtttgaatttgtgtaataacaaactgtaccagctggatgggttgtccgatatcacagagaaagctcctaaagtcaagacactgaacctcagcaaaaataagttggagtcagcttgggagttggggaaggtgaagggactgaagcttgaagaactctggctggagggaaatcccctgtgctcaaccttttcagatcagagtgcatatgtgtctgccataagggattgcttccccaagttactcagattagatggccgcgagctttctgccccggtcatcgtcgatatcgatagcagtgagaccatgaaaccatgcaaggaaaatttcactggttctgaaacactgaagcatttggtattacagtttctgcagcaatactactccatatatgattctggtgaccgtcaaggcttactgggcgcataccatgacgaagcctgttttagtctggctataccattcgatccaaaagacagcgctccaagttctctttgtaaatacttcgaagattcaagaaatatgaagactctgaaggatccataccttaagggcgagcttctgcgccggactaagcgggatatcgttgacagcttgtctgcacttcctaaaacccaacacgatctgtcctctatcctggttgatgtctggtgccaaacagagagaatgctgtgcttttccgtgaacggggtgtttaaagaagtggaaggtcagagccaggggtctgttctcgcctttacgcgcacatttatcgccacgccaggttcctcctcctctctatgcatcgtgaatgatgaactctttgtcagagatgcatcccctcaggagacacagagcgctttcagcattcccgttagcaccctttcttcaagttcagagccgtcactgtctcaggagcagcaagagatggtccaagccttctctgcgcagtctgggatgaaactggaatggagtcagaagtgcctccaggacaatgaatggaactatacaagggcaggacaggctttcactatgttgcagacagaggggaagataccggccgaggcttttaagcagatctcctag

SEQ ID NO: 39877 - DNA, 1230 bp, Artificial Sequence
  derived and/or modified sequence
atgaagtggcactccgaagatgaaatccgcattacaacatggcgcaatcgaaagcctccagaaaggaaaatgtcccaaaatacacaggatggatacacgaggaattggtttaaggtcaccattccctatggcatcaagtatgataaggcctggctgatgaatagcatccagagccactgcagtgacagatttacaccggtagatttccactacgtgcgaaaccgagcttgcttctttgttcaggatgcttccgcagcgagcgccctgaaggacgtctcttacaaaatttatgacgacgagaaccagaagatttgtatttttgtgaaccacagcacagctccctattctgtcaagaacaaactaaagcctggtcagatggagatgcttaagctgacgatgaacaaacgatacaacgtgagccagcaggccctggacctgcagaatttgagatttgatcccgatctgatgggccgcgatattgatatcatccttaatcgcagaaactgcatggctgcaacacttaagattattgaacggaacttcccagagctcttatcgcttaatctctgtaacaacaagctgtaccagctcgatggcctaagtgatataacagagaaagctcctaaggttaaaacactaaacctgagtaaaaataaactggagagcgcgtgggagttggggaaagtgaaagggctcaaactggaagaactgtggctcgaaggaaaccctttatgtagtactttcagcgaccagagtgcttacgtcagcgctattcgcgactgcttcccaaagttgctgagattagacggacgggagctctccgctccagtgattgttgacatcgacagcagtgagacaatgaagccgtgtaaagagaacttcactgggtccgaaactctgaagcacctcgtgctccagttcctgcagcagtactatagtatatacgattcaggggaccggcagggcctcctgggagcatatcacgatgaggcctgttttagtcttgctatcccttttgatcccaaggatagtgcgcccagttcactctgcaaatattttgaggacagccgcaacatgaaaaccttgaaagatccgtatctaaagggagagctgctgaggagaacaaaacgcgacattgttgacagtttgtccgccctcccaaagactcagcacgacttgtccagtattttggtcgacgtgtggtgccaaacggtgccttccgggcagtag

SEQ ID NO: 39878 - DNA, 1881 bp, Artificial Sequence
  derived and/or modified sequence
atgtgtagtacattaaagaaatgtggcacgtaccgaactgaggtcgccgagtgtcacgaccatggatcgaccttccagggacgcaagaaggggggctcaagtttcagagataacttcgacaaacggagctgccactatgaacatggcggatacgagcgtccacccagccattgccaggagaatgacgggtcagtggagatgcgtgatgtccacaaagaccagcagttgcgccataccccgtactccatccgttgtgagagacggatgaaatggcattctgaggatgaaattaggataaccacatggcgcaaccggaagcctccggaacggaagatgtctcaaaacactcaggacggatacacacgtaactggttcaaagtcaccatcccatatggcatcaaatatgacaaagcatggctaatgaactccatccagtctcactgttccgaccggttcactccagtggattttcattacgtccgaaatcgagcatgttttttcgtccaggacgccagtgccgcgtcagccttgaaagatgtgtcctacaaaatctacgacgatgaaaaccagaagatatgcatcttcgtaaatcactcaaccgccccctattccgtaaaaaataaactgaagcctgggcagatggagatgttaaagttgaccatgaataaaagatacaatgtctcccagcaggcgcttgatctccaaaatctgaggttcgatcccgacctcatgggcagggatattgacatcatactcaatcgaaggaattgtatggcagcgactctgaaaattattgaaagaaattttccagaactgttgtccctgaacttgtgcaataataagctctatcagctagacggtttgagtgacataaccgagaaagctcccaaggtgaaaacgttgaacttgtccaagaacaaattagagtctgcctgggaactgggcaaagtgaagggactcaagctcgaagagctttggctggagggaaaccctctgtgcagtaccttcagtgatcaaagtgcatacgtgagcgccattcgtgactgcttccccaagctgttacgcctggatggcagagaattaagcgcacctgtgatcgtcgatatcgattcttctgagaccatgaagccatgtaaggaaaatttcaccggaagcgagactctgaaacaccttgtactgcagttcctgcagcagtactatagcatttatgatagtggcgaccgccaagggctgctcggcgcgtatcatgatgaggcctgtttttcgttggccatccctttcgaccccaaggattctgcacctagcagcctgtgtaagtactttgaggatagtcgtaatatgaaaacgctgaaggatccatatttgaagggagagctgctcagacgcaccaaacgagacatagtggattccctgtcagctttgcccaaaacccagcatgacctgagttctatcctggtggatgtgtggtgtcaaacagaacggatgctgtgtttcagtgttaacggagtctttaaggaggtcgagggacagtcgcagggatcggttctcgcttttacccggaccttcatcgccactccaggatcatcgtcatcactgtgcatcgtgaatgatgaattgttcgtccgggacgcaagtcctcaagaaactcaaagcgcattttccatcccagttagtaccctgagcagtagctccgagccttctttgtcccaagaacagcaagagatggtccaggccttctccgctcagtctggcatgaagctagaatggtcccagaaatgcctgcaggataatgagtggaattacactcgcgcgggccaggcctttaccatgctccaaaccgagggtaaaatcccagccgaggccttcaagcagattagctag

SEQ ID NO: 39879 - DNA, 1881 bp, Artificial Sequence
  derived and/or modified sequence
atgtgcagcaccctgaagaagtgcggcacctaccggaccgaggtggctgaatgccacgaccacgggtcaacatttcaaggcaggaagaagggcgggagcagcttcagagacaacttcgacaagcgatcctgtcattacgagcacgggggttatgagagacccccctcccactgccaagagaacgacggttcagtggaaatgcgtgacgtccataaggatcagcagctgagacacacaccttactctatcagatgtgaaagaagaatgaaatggcactcagaggacgaaatccgaataaccacatggcgtaatcgcaaacctcccgaaagaaagatgagccagaatactcaggatgggtacaccagaaactggtttaaagtcacaatcccctacggtatcaagtatgataaggcttggttgatgaactccattcagagtcactgcagtgatagattcacccccgtggacttccattacgtgaggaatagagcttgtttctttgtgcaggacgctagcgcggcttctgccctgaaggacgtttcctacaagatatacgacgacgaaaaccagaaaatttgcatctttgtgaatcattccacagcgccgtattcagtgaagaataaactgaaaccgggacaaatggaaatgctgaagctgactatgaataagcgttacaatgtgtcacagcaggccctcgatttgcagaacctgagatttgacccagacttaatgggcagggatatagacatcattttgaacaggagaaactgcatggccgccacattgaagattattgaaagaaattttcccgaactgctgtctcttaacctctgcaataacaagctatatcagctggatggattaagtgacatcacggagaaggctcctaaggtgaaaactctcaacctatccaagaacaagctggagagcgcttgggagctgggcaaagtgaagggcttaaagctggaagaactgtggttggaaggcaaccctctgtgttctactttctccgatcagagcgcctacgtgagcgctattagagactgtttcccgaagctcttgagactggatgggagggagctgagcgcccctgtcatcgtggatattgatagctcggagaccatgaaaccatgtaaagaaaatttcacaggcagcgaaaccctgaaacatctggtattacagtttctgcagcagtactacagcatatatgattcaggcgatcgacaggggctgctcggcgcttatcatgatgaggcgtgcttcagtctggccatcccatttgaccccaaggactccgcccccagctctctctgtaaatacttcgaagactcacggaacatgaaaacactaaaggacccctacctgaaaggagagctcctgcgtcgtactaaacgggacatagtcgattcgctcagcgccctgcccaaaacacagcacgatctttcgtctatcctcgtcgacgtttggtgccagaccgagcggatgctgtgcttttctgtgaatggagtgtttaaggaggtcgaaggtcagagtcaaggcagcgttctagcctttaccaggaccttcatcgcaacaccaggatccagttcctccctctgcattgtcaacgatgagctctttgtgcgagatgctagcccccaggagacgcaatctgcattttccattcccgtgtcaactctctcaagtagttccgagcctagcctgagccaagaacaacaggaaatggtccaggccttctctgcccagtccgggatgaagctggagtggagccaaaaatgcctgcaggacaacgaatggaattataccagagctgggcaggcgtttaccatgctgcagacagaaggtaagattcctgccgaagcatttaaacaaatctcctag

SEQ ID NO: 39880 - DNA, 1881 bp, Artificial Sequence
  derived and/or modified sequence
atgtgcagcaccctgaagaagtgcggcacctaccggaccgaggtggccgagtgccatgaccacgggtcgacgttccaagggagaaagaagggaggttcgtccttcagggacaacttcgacaaacgatcttgtcattatgaacatggagggtatgagcggcccccatcccattgtcaggagaatgacggctctgtggaaatgcgagacgtgcataaagaccagcagttgcgacataccccctattccattcgttgtgagcgcaggatgaagtggcattctgaagacgaaatccgtataacaacttggagaaacagaaaacccccagagcgaaagatgagccaaaatacacaggacggttacacaaggaattggttcaaagtcaccatcccgtatggtatcaagtacgataaagcctggctgatgaactctatccagtctcattgcagcgatcgttttactccagtcgacttccactacgttcgaaatcgcgcgtgcttttttgtacaggacgcctccgcggcatctgccttaaaggacgtctcctacaagatctacgatgacgaaaatcagaagatctgtatttttgtgaaccactccaccgctccttatagtgtcaagaataagcttaaacccggtcaaatggagatgttgaagctcacgatgaataagcgctacaatgtgagccagcaggcactggacctgcagaacctgaggtttgaccctgacctcatggggcgggacatcgacataattctaaaccgaaggaattgtatggccgcgaccctgaagattatcgagagaaacttccccgagctactaagtctgaacctctgtaataataagctttaccaattggatggcctaagcgacataaccgagaaggcacccaaagtcaagactctgaacttatccaaaaacaaactggagtctgcctgggagctgggcaaggttaaaggattaaaactggaggagttatggctggaggggaatccactgtgcagcacatttagcgaccaaagtgcatatgtttcggcaattcgcgactgctttcccaagctcctacggctggatggtcgtgagctcagcgcccccgttatcgtggatatcgacagtagtgagacgatgaaaccgtgtaaggaaaatttcacgggctctgaaacattgaagcacttagtgctacagttcctgcagcagtactacagcatctacgattctggggatcgacaggggctccttggcgcttatcacgacgaggcatgttttagcctcgcaattccctttgaccctaaagacagcgcgccatcaagtctgtgtaagtacttcgaggatagtcgcaacatgaaaacgcttaaagacccttacctgaagggagagttgctccgtaggaccaagcgcgatattgtggatagcctttccgctttaccaaagacccagcacgatttatcttccatcctggtcgatgtgtggtgccagactgaacggatgctatgcttttcagtgaacggtgtcttcaaggaagtagaggggcagtcccaggggagcgtgcttgcgtttacccggacatttatcgccacaccgggctcctcatcatccttatgtatagtcaacgatgagctcttcgtgagggatgctagcccacaggagactcagtctgcattcagtatccctgtgtccacattgtcaagttcatctgaaccatctctgagccaggaacagcaggaaatggtgcaagctttctcagcacagagcggaatgaaactggagtggtcacagaaatgtctccaggataatgagtggaattacacaagggctggccaggcatttacaatgttacagactgaaggcaagattcccgccgaggctttcaagcaaatcagctag

SEQ ID NO: 39881 - DNA, 1881 bp, Artificial Sequence
  derived and/or modified sequence
atgtgcagcaccctgaagaagtgcggcacctaccggaccgaggtggccgagtgccacgaccatgggtctacgtttcaagggcggaaaaaaggaggatccagtttccgtgataatttcgacaagcgctcatgtcactacgagcacggaggctatgaaaggcccccatcgcattgccaggagaatgacgggtcagtcgaaatgagagacgtccacaaagatcagcaactccgacacacaccctattctattaggtgtgagcggagaatgaagtggcacagcgaagatgaaatccgtatcaccacctggcgtaacagaaagccaccggagcgaaagatgtcccagaacacacaggacggctatactaggaattggttcaaagtcacaatcccctatggtatcaagtacgataaggcctggctgatgaactcaatccaaagccactgctctgatcgctttactcccgtcgattttcattacgtccgcaaccgggcctgcttctttgttcaggatgctagcgctgccagtgctctgaaggacgtgtcttacaagatctacgatgatgagaaccaaaaaatttgcattttcgtcaatcacagcacagccccttattctgtgaagaacaagctcaaaccaggccaaatggaaatgctaaaattaacaatgaacaagcgctacaacgtgagtcagcaagccctggacctgcagaacctgcggtttgacccagatctgatgggtcgcgacattgatatcattctcaatcgaaggaattgcatggcagctacactgaagatcatcgaacgcaacttccctgagctgctgagcttgaacctctgtaataataagctgtatcagctggacggcttgtcggatataaccgaaaaggctcccaaggtcaaaaccctcaacctgagcaagaacaaactggagtccgcctgggaactgggtaaagtgaaggggcttaaactggaggaactgtggctggagggcaaccctctctgctcaacatttagtgaccagtcagcttacgtgagcgcgatcagagactgctttcccaaactgctgcgcctcgatggccgtgaactgtccgctccagtgatcgtcgacattgatagctccgaaacgatgaaaccgtgtaaagagaattttactggcagtgaaacactgaagcatctcgtgttgcagttcttacaacaatattattctatttacgattcaggcgatcgtcaaggcctccttggagcttatcacgacgaggcttgcttctccctagctatcccattcgatcccaaagatagtgcccctagcagtctgtgtaaatacttcgaagatagtcgcaacatgaaaacactgaaagacccctatctgaagggcgaactgttgcgacggactaaaagagatatcgtggactccctgagtgccctccccaagacccagcatgatctcagcagcatactcgtggacgtttggtgtcagactgagcggatgttgtgtttctctgtaaacggagttttcaaggaagtagagggacagtctcaaggctcggttctcgcatttacccgcaccttcatcgccacacccggatcttcttccagcctgtgcatagtcaatgatgagctcttcgtgcgcgatgcctccccccaagagacacagagcgctttcagcatcccagtgtctactctctcttctagttccgagccatctctgtcccaggaacagcaggagatggtgcaggctttctccgcccagagtggaatgaagcttgagtggtcccagaaatgtttgcaagataacgagtggaattatactcgcgcaggccaggctttcactatgctccagacagagggcaagatcccagccgaagcgtttaagcaaatttcctag

SEQ ID NO: 39882 - DNA, 1230 bp, Artificial Sequence
  derived and/or modified sequence
atgaagtggcacagcgaggacgagatccggatcaccacctggcggaacaggaagcccccagagagaaagatgtcacagaatacgcaggacggctacactcgcaattggtttaaagtcactataccttacgggataaagtatgataaagcatggctcatgaactctatccagtctcactgttccgataggttcacacccgtcgacttccactatgtgcgaaacagagcatgtttcttcgtgcaggacgcatcagcagcctcagccctaaaggatgtctcttacaaaatctacgatgatgagaaccagaagatttgcatttttgtgaaccatagcaccgcaccttactcagttaagaacaaattgaagcccggacagatggagatgctgaaattgaccatgaataaacgttacaacgtgagccagcaggctctcgatctgcaaaacttgaggtttgatccggaccttatggggagggatattgatattatcttgaacagacgcaactgcatggcagccacattgaagataattgagaggaattttcctgaactcctgtcgcttaacctctgtaacaataaactctaccaactggacggactctcagacattaccgagaaggctccaaaggttaagaccttaaatctcagcaagaataaactcgaatctgcttgggagctaggcaaggtgaagggtctcaaactagaagaactttggctggaggggaatcccctatgctcaacattttccgaccagagcgcatatgtgtctgctatcagagattgtttccctaagttactgagactggatggccgcgagttatcagcccctgtcatcgtggacatagactcctccgagaccatgaaaccatgtaaagaaaacttcacaggatctgagaccttgaagcacctagttcttcaatttttacagcaatactactctatctacgactcaggagatcgccagggattgttgggagcctaccatgacgaagcctgcttttcactcgccattccttttgaccccaaagattctgccccaagttctctatgcaagtacttcgaggattccagaaacatgaagaccctgaaagatccctacctcaaaggtgagttgttacgacgcaccaaacgtgacatcgtggatagcttatccgcgctgccgaagacgcagcacgacctcagcagtatattggtggacgtgtggtgccagactgtgccgagcgggcagtag

SEQ ID NO: 39883 - DNA, 1881 bp, Artificial Sequence
  derived and/or modified sequence
atgtgcagcaccctgaagaagtgcggcacctaccggaccgaggtggctgagtgtcatgatcacggttctacttttcaaggtcgcaagaagggggggagttcttttcgggataattttgacaagcggtcttgccattacgagcacggaggatacgagcgcccacctagccattgtcaggaaaacgatggcagcgtggagatgcgagacgtacataaggatcagcagctccgacatacaccatattctatccgatgcgagaggagaatgaaatggcatagcgaggatgagatcaggattactacatggcgcaataggaaaccaccagagcgcaaaatgagtcagaacacgcaagacgggtatacccgcaattggtttaaggtgacaataccttatggtatcaagtatgataaagcatggctgatgaactccatacagtcccattgttccgacaggtttaccccagttgacttccactatgttcggaacagggcgtgtttttttgtacaggatgcatctgccgccagcgccttgaaggatgtgtcctataaaatctatgatgatgagaaccagaaaatttgcatcttcgtaaatcacagcaccgccccgtattctgtgaagaacaaactcaagcccgggcaaatggagatgctgaaattaaccatgaacaaaagatataacgtgagccagcaagctttggatctccagaatctccgctttgaccccgacctgatgggccgggacatcgatattattctgaaccgcagaaattgtatggcagccacactgaagataattgagaggaatttcccagagctgctatctctgaacctgtgcaacaataaactctatcagctggatggcttatcagatatcactgaaaaggcccctaaagtgaagaccctgaatctgtctaagaataagctggagtcagcatgggagctgggcaaagtgaagggtctcaaacttgaagagctatggctggagggcaaccccctgtgcagtaccttttccgaccaaagcgcctatgtaagcgcaattcgagactgctttcccaagctgttacgtctggatggtcgcgagctgtcagccccagtaatcgtcgacatagatagttctgaaacaatgaaaccttgcaaagaaaactttacaggctccgaaacgctcaaacacctcgtactccagtttttgcagcaatactatagcatatacgacagtggagatagacagggtcttttaggagcttatcatgacgaagcctgtttcagtttggccatcccattcgaccctaaagacagtgccccctctagcctgtgtaaatacttcgaggactcccggaacatgaagactttaaaggatccttacctgaagggggagttgctgaggcgtacaaagcgcgacattgtggattctcttagcgcactgcctaagacacagcacgacctttcctctattctggtcgacgtgtggtgccaaaccgagcggatgctctgcttctctgtgaacggggtgtttaaggaggttgagggacagtcccaggggtctgtactagcattcaccagaacatttatcgccacccccggctcatcttcttccctatgtatcgtgaacgacgaactgttcgttcgggacgcttctccccaggagactcaaagtgcttttagcattcctgtatctactttgagttcttcctccgagcctagtctctctcaggagcagcaagaaatggttcaggctttctctgcccaatccggcatgaaactggaatggtcccaaaaatgtctgcaggataatgaatggaattacacacgcgctggacaggctttcacaatgttacaaaccgaaggcaagatcccggcagaagccttcaaacagatatcttag

SEQ ID NO: 39884 - DNA, 3848 bp, Artificial Sequence
  derived and/or modified sequence
agacgcagaggcgaggccgccagtcgaggacgaggaggagataacatcaagatgccgaagactgaggaaactgtgctccagaatgatcccagtgtagcagagaatggggcccctgagcctaaaacaccagggcagagccagaaaagcaagagtttctgtttagatgaccagtctcctgacctgatgtcttttctgtcacagatctgatagagacagttaatgaagtttccaagctgagcatttcacatgaaattgtagtaaaccaagatttctatgtggaagagaccattttgcctccaaacagtgtagaaggcaggtttgcggaggcaatgtacaatgctttttggaaccatctgaaagaacagctattgagtactcctcctgacttcacttgtgcccttgaacttctaaaagatgttaaggagaccttgctatcactgctattaccatggcagaaccgcctaagaaatgagatagaagaagctctggacacagatctcctcaagcaggaagcagaacatggggccctggatgtccctcatctttctaactacattctcaatttgatggctctgctatgtgcaccggttcgagatgaagcgatacagaaactagagaccataagagatccagtgcagttactgaggggcatcctccgtgttctgggcctaatgaaaatggacatggtgaactataccatccagagctttcgaccctacctgcaggaacattccatccagtatgaacaagctaaattccaggaactccttgataaacagcccagtctcctcgattataccacaaaatggctaaccaaagcagccacagacatcactacactatgtccgagttctcctgactcacctagctcctcctgcagcatggcgtgttcacttccaagcggggcaggtaacaattcagagccccccagtccaacaatggtgctataccaaggctacctgaacctcctcctctgggatcttgaaaacgtagaattcccagagactctgctgatggacagaatccggctccaggaactggcattccagttgcaccagttaactgtcctggcctcagtcttgctagtggccagaagcttctctggtgaagttttattcagatcacctgaatttgtggatagactgaaatgcaccaccaaggccctaactgaggaatttatctccaggcctgaagagactatgctgagtgtgagtgaacaggtgtctcaggaagtccatcaaggccttaaggacatgggcctcactactctgagcagtgaaaacacagcatctcttctaggccaactccagaacatcaccaagaaagagaactgcattcgtagcattgttggagtctctgctacactttcctggaggcctcattctcattgaaaaggagttggcagaactgggctggaagtttctcaatctgatgcatcataatcagcagagtcatttttcacaaaacgaaatctttccagaagatcacgaataagagagatcaaagctaggcagcttgagttgaagtagagctggaagaaggagttttgaggactgtttcaaaaccactggactagatgatctctaaaggatcttatccaggacgcttcattgcatttggtcttcatttctccttagtctcctccaggctgacatttcctcaatctttattggtcttccacagccctgacacttttggagataccagtcagcatttccaagttcgttctgtgagactgtagtgtcaggacaaagcaacaacaaaatgtgctctactctaaagaagtgtgggacatacagaactgaagttgcagaatgccatgaccatggtagcacttttcaaggaagaaagaaaggtgggagttctttccgggataattttgacaagaggagctgtcattatgaacatggtgggtatgagcgcccgccttcacactgccaggagaatgatggaagcgtggagatgagggatgtccacaaggaccaacaactaagacacactccttatagcatccgatgcgaaagaagaatgaaatggcatagtgaagacgaaatccgtattaccacgtggagaaatagaaaacctccggagagaaaaatgagtcagaacacacaggatggatacacaaggaactggtttaaggtcacaattccttacgggataaagtatgacaaggcatggctaatgaattcaatccagagccattgcagtgaccgcttcactccggttgatttccactacgtccgaaatcgggcatgcttctttgtccaggatgctagcgctgcctccgcattgaaggatgtcagttataagatttatgatgatgagaaccaaaagatatgtatatttgtcaatcattctactgcgccctactctgtgaagaataagttgaagccaggccaaatggagatgctaaagctgaccatgaacaaacggtacaatgtctcccagcaagctcttgatctccagaatctccgctttgacccagacttgatgggccgtgacattgatataatcctgaatcgaagaaactgcatggctgccaccctgaagatcattgaaagaaatttccctgagctgttgtctttgaacttgtgcaacaacaagctgtaccagctggatggcctttctgacattacagagaaggctcccaaagtcaagaccctgaatctctccaaaaataagctggagtcggcgtgggagttgggcaaggtgaaagggctgaagctcgaagagctatggctagaagggaacccgttgtgcagcaccttctcggaccagtccgcctatgtaagtgccatccgggattgtttccccaagttgttacgcctggacggccgagagttatccgcaccagtgattgttgacattgacagctctgagacaatgaaaccctgcaaggaaaactttactggatctgagaccctaaagcatttagtcctgcaattcctgcagcagtattactcgatctatgactctggagatcgacagggtctcctcggtgcttaccacgatgaggcctgcttctccttggctattcccttcgaccccaaggactcagccccgagcagcttgtgcaagtactttgaggatagcaggaatatgaaaacactcaaggacccctacctgaagggggaactgctgaggcgcacaaaacgtgacattgtggactccctcagtgcgttgcccaaaactcagcatgacctcagctccatcctggtggacgtgtggtgccagacggaaaggatgctctgcttttctgtcaatggggttttcaaggaagtggaaggacagtctcagggttctgttctcgccttcacccggaccttcattgctacccctggcagcagttccagtctgtgcatcgtgaatgacgagctgtttgtgagggatgccagcccccaagagactcagagtgccttctccatcccagtgtccacactctcctccagctctgagccctccctctcccaggagcagcaggaaatggtgcaggctttctctgcccagtctgggatgaaactggagtggtctcagaagtgccttcaggacaatgagtggaactacactagagctggccaggccttcactatgctccagaccgagggcaagatccccgcagaggccttcaagcaaatctcctaaaaggagccctccgatgtcttctttgtcttcgttcacatcctctttgtttcctcttttcaccagcctaaggcctggctgaccaggaagccaacgttaacttgcaggccacgtgacataaccacccaaagagccagttgctctgtgtattcgccccactcatgatcaccattttattttcataataaagagtgacgttacacgtt

SEQ ID NO: 39885 - DNA, 2322 bp, Artificial Sequence
  derived and/or modified sequence
ttgtggcaagattctgaggggaagtgtagctcccaggttggttccaagtcttcttccaattaggatcttatccaggacgcttcattgcatttggtcttcatttctccttagtctcctccaggctgacatttcctcaatctttattggtcttccacagccctgacacttttggagataccagtcagcatttccaagttcgttctgtgagactgtagtgtcaggacaaagcaacaacaaaatgtgctctactctaaagaagtgtgggacatacagaactgaagttgcagaatgccatgaccatggtagcacttttcaaggaagaaagaaaggtgggagttctttccgggataattttgacaagaggagctgtcattatgaacatggtgggtatgagcgcccgccttcacactgccaggagaatgatggaagcgtggagatgagggatgtccacaaggaccaacaactaagacacactccttatagcatccgatgcgaaagaagaatgaaatggcatagtgaagacgaaatccgtattaccacgtggagaaatagaaaacctccggagagaaaaatgagtcagaacacacaggatggatacacaaggaactggtttaaggtcacaattccttacgggataaagtatgacaaggcatggctaatgaattcaatccagagccattgcagtgaccgcttcactccggttgatttccactacgtccgaaatcgggcatgcttctttgtccaggatgctagcgctgcctccgcattgaaggatgtcagttataagatttatgatgatgagaaccaaaagatatgtatatttgtcaatcattctactgcgccctactctgtgaagaataagttgaagccaggccaaatggagatgctaaagctgaccatgaacaaacggtacaatgtctcccagcaagctcttgatctccagaatctccgctttgacccagacttgatgggccgtgacattgatataatcctgaatcgaagaaactgcatggctgccaccctgaagatcattgaaagaaatttccctgagctgttgtctttgaacttgtgcaacaacaagctgtaccagctggatggcctttctgacattacagagaaggctcccaaagtcaagaccctgaatctctccaaaaataagctggagtcggcgtgggagttgggcaaggtgaaagggctgaagctcgaagagctatggctagaagggaacccgttgtgcagcaccttctcggaccagtccgcctatgtaagtgccatccgggattgtttccccaagttgttacgcctggacggccgagagttatccgcaccagtgattgttgacattgacagctctgagacaatgaaaccctgcaaggaaaactttactggatctgagaccctaaagcatttagtcctgcaattcctgcagcagtattactcgatctatgactctggagatcgacagggtctcctcggtgcttaccacgatgaggcctgcttctccttggctattcccttcgaccccaaggactcagccccgagcagcttgtgcaagtactttgaggatagcaggaatatgaaaacactcaaggacccctacctgaagggggaactgctgaggcgcacaaaacgtgacattgtggactccctcagtgcgttgcccaaaactcagcatgacctcagctccatcctggtggacgtgtggtgccagacggaaaggatgctctgcttttctgtcaatggggttttcaaggaagtggaaggacagtctcagggttctgttctcgccttcacccggaccttcattgctacccctggcagcagttccagtctgtgcatcgtgaatgacgagctgtttgtgagggatgccagcccccaagagactcagagtgccttctccatcccagtgtccacactctcctccagctctgagccctccctctcccaggagcagcaggaaatggtgcaggctttctctgcccagtctgggatgaaactggagtggtctcagaagtgccttcaggacaatgagtggaactacactagagctggccaggccttcactatgctccagaccgagggcaagatccccgcagaggccttcaagcaaatctcctaaaaggagccctccgatgtcttctttgtcttcgttcacatcctctttgtttcctcttttcaccagcctaaggcctggctgaccaggaagccaacgttaacttgcaggccacgtgacataaccacccaaagagccagttgctctgtgtattcgccccactcatgatcaccattttattttcataataaagagtgacgttacacgtt

SEQ ID NO: 39886 - DNA, 2934 bp, Artificial Sequence
  derived and/or modified sequence
cctcctcctctgggatcttgaaaacgtagaattcccagagactctgctgatggacagaatccggctccaggaactggcattccagttgcaccagttaactgtcctggcctcagtcttgctagtggccagaagcttctctggtgaagttttattcagatcacctgaatttgtggatagactgaaatgcaccaccaaggccctaactgaggaatttatctccaggcctgaagagactatgctgagtgtgagtgaacaggtgtctcaggaagtccatcaaggccttaaggacatgggcctcactactctgagcagtgaaaacacagcatctcttctaggccaactccagaacatcaccaagaaagagaactgcattcgtagcattgttgatcagtggatccgtttttttctcaaatgctgtttgcttcatggcatgcaggagtctctgctacactttcctggaggcctcattctcattgaaaaggagttggcagaactgggctggaagtttctcaatctgatgcatcataatcagcagagtcatttttcacaaaacgaaatctttccagaagatcacgaataagagagatcaaagctaggcagcttgagttgaagtagagctggaagaaggagttttgaggactgtttcaaaaccactggactagatgatctctaaaggatcttatccaggacgcttcattgcatttggtcttcatttctccttagtctcctccaggctgacatttcctcaatctttattggtcttccacagccctgacacttttggagataccagtcagcatttccaagttcgttctgtgagactgtagtgtcaggacaaagcaacaacaaaatgtgctctactctaaagaagtgtgggacatacagaactgaagttgcagaatgccatgaccatggtagcacttttcaaggaagaaagaaaggtgggagttctttccgggataattttgacaagaggagctgtcattatgaacatggtgggtatgagcgcccgccttcacactgccaggagaatgatggaagcgtggagatgagggatgtccacaaggaccaacaactaagacacactccttatagcatccgatgcgaaagaagaatgaaatggcatagtgaagacgaaatccgtattaccacgtggagaaatagaaaacctccggagagaaaaatgagtcagaacacacaggatggatacacaaggaactggtttaaggtcacaattccttacgggataaagtatgacaaggcatggctaatgaattcaatccagagccattgcagtgaccgcttcactccggttgatttccactacgtccgaaatcgggcatgcttctttgtccaggatgctagcgctgcctccgcattgaaggatgtcagttataagatttatgatgatgagaaccaaaagatatgtatatttgtcaatcattctactgcgccctactctgtgaagaataagttgaagccaggccaaatggagatgctaaagctgaccatgaacaaacggtacaatgtctcccagcaagctcttgatctccagaatctccgctttgacccagacttgatgggccgtgacattgatataatcctgaatcgaagaaactgcatggctgccaccctgaagatcattgaaagaaatttccctgagctgttgtctttgaacttgtgcaacaacaagctgtaccagctggatggcctttctgacattacagagaaggctcccaaagtcaagaccctgaatctctccaaaaataagctggagtcggcgtgggagttgggcaaggtgaaagggctgaagctcgaagagctatggctagaagggaacccgttgtgcagcaccttctcggaccagtccgcctatgtaagtgccatccgggattgtttccccaagttgttacgcctggacggccgagagttatccgcaccagtgattgttgacattgacagctctgagacaatgaaaccctgcaaggaaaactttactggatctgagaccctaaagcatttagtcctgcaattcctgcagcagtattactcgatctatgactctggagatcgacagggtctcctcggtgcttaccacgatgaggcctgcttctccttggctattcccttcgaccccaaggactcagccccgagcagcttgtgcaagtactttgaggatagcaggaatatgaaaacactcaaggacccctacctgaagggggaactgctgaggcgcacaaaacgtgacattgtggactccctcagtgcgttgcccaaaactcagcatgacctcagctccatcctggtggacgtgtggtgccagacggaaaggatgctctgcttttctgtcaatggggttttcaaggaagtggaaggacagtctcagggttctgttctcgccttcacccggaccttcattgctacccctggcagcagttccagtctgtgcatcgtgaatgacgagctgtttgtgagggatgccagcccccaagagactcagagtgccttctccatcccagtgtccacactctcctccagctctgagccctccctctcccaggagcagcaggaaatggtgcaggctttctctgcccagtctgggatgaaactggagtggtctcagaagtgccttcaggacaatgagtggaactacactagagctggccaggccttcactatgctccagaccgagggcaagatccccgcagaggccttcaagcaaatctcctaaaaggagccctccgatgtcttctttgtcttcgttcacatcctctttgtttcctcttttcaccagcctaaggcctggctgaccaggaagccaacgttaacttgcaggccacgtgacataaccacccaaagagccagttgctctgtgtattcgccccactcatgatcaccattttattttcataataaagagtgacgttacacgtt

SEQ ID NO: 39887 - DNA, 3192 bp, Artificial Sequence
  derived and/or modified sequence
cctgactcacctagctcctcctgcagcatggcgtgttcacttccaagcggggcagactctgctgatggacagaatccggctccaggaactggcattccagttgcaccagttaactgtcctggcctcagtcttgctagtggccagaagcttctctggtgaagttttattcagatcacctgaatttgtggatagactgaaatgcaccaccaaggccctaactgaggaatttatctccaggcctgaagagactatgctgagtgtgagtgaacaggtgtctcaggaagtccatcaaggccttaaggacatgggcctcactactctgagcagtgaaaacacagcatctcttctaggccaactccagaacatcaccaagaaagagaactgcattcgtagcattgttgatcagtggatccgtttttttctcaaatgctgtttgcttcatggcatgcaggagtctctgctacactttcctggaggcctcattctcattgaaaaggagttggcagaactgggctggaagtttctcaatctgatgcatcataatcagcagagtcatttttcacaaaacgaaatctttccagaagatcacgaataagagagatcaaagctaggcagcttgagttgaagtagagctggaagaaggagttttgaggactgtttcaaaaccactggactagatgatctctaaagtggtgacatggacataggataatggttatagacagtccccctcccaacgggaaaaaatgaaagcaagcaaaaagttaccagctccaagccaacttgaaatccaatcaggatcttatccaggacgcttcattgcatttggtcttcatttctccttagtctcctccaggctgacatttcctcaatctttattggtcttccacagccctgacacttttggagataccagtcagcatttccaagttcgttctgtgagactgtagtgtcaggacaaagcaacaacaaaatgtgctctactctaaagaagtgtgggacatacagaactgaagggatgatgcttcctgtctgtcacaaggctgagtgaacacaacatgcctgtaggtccagaacattcttcctacagagaccagatgtccagaaagccctatctgctggattcagggaacgcctctcctcatttctgtcacactatttgcaaaagcctccttctctgagatcttcaaagctgcagttctagccacagtctgcagggagttgcagaatgccatgaccatggtagcacttttcaaggaagaaagaaaggtgggagttctttccgggataattttgacaagaggagctgtcattatgaacatggtgggtatgagcgcccgccttcacactgccaggagaatgatggaagcgtggagatgagggatgtccacaaggaccaacaactaagacagtaagtgaccaggcagcctggtttgcacgtagcagcccccgggactgtgcaaccctttcattctctgtggtcttccttttcttctctcattagagaactgacgaatgctggaagtggaatagtggctgagcaatcctaattgtagccctggcgtcagtgagtggagcatgtataggagactttcttagatttaatggatacccgccttctctcctcttccccacagcactccttatagcatccgatgcgaaagaagaatgaaatggcatagtgaagacgaaatccgtattaccacgtggagaaatagaaaacctccggagagaaaaatgagtcagaacacacaggatggatacacaaggaactggtttaaggtcacaattccttacgggataaagtatgacaaggcatggctaatgaattcaatccagagccattgcagtgaccgcttcactccggttgatttccactacgtccgaaatcgggcatgcttctttgtccaggatgctagcgctgcctccgcattgaaggatgtcagttataagatttatgatgatgagaaccaaaagatatgtatatttgtcaatcattctactgcgccctactctgtgaagaataagttgaagccaggccaaatggagatgctaaagctgaccatgaacaaacggtacaatgtctcccagcaagctcttgatctccagaatctccgctttgacccagacttgatgggccgtgacattgatataatcctgaatcgaagaaactgcatggctgccaccctgaagatcattgaaagaaatttccctgagctgttgtctttgaacttgtgcaacaacaagctgtaccagctggatggcctttctgacattacagagaaggctcccaaagtcaagaccctgaatctctccaaaaataagctggagtcggcgtgggagttgggcaaggtgaaagggctgaagctcgaagagctatggctagaagggaacccgttgtgcagcaccttctcggaccagtccgcctatgtaagtgccatccgggattgtttccccaagttgttacgcctggacggccgagagttatccgcaccagtgattgttgacattgacagctctgagacaatgaaaccctgcaaggaaaactttactggatctgagaccctaaagcatttagtcctgcaattcctgcagcagtattactcgatctatgactctggagatcgacagggtctcctcggtgcttaccacgatgaggcctgcttctccttggctattcccttcgaccccaaggactcagccccgagcagcttgtgcaagtactttgaggatagcaggaatatgaaaacactcaaggacccctacctgaagggggaactgctgaggcgcacaaaacgtgacattgtggactccctcagtgcgttgcccaaaactcagcatgacctcagctccatcctggtggacgtgtggtgccagacggtgccttcaggacaatgagtggaactacactagagctggccaggccttcactatgctccagaccgagggcaagatccccgcagaggccttcaagcaaatctcctaaaaggagccctccgatgtcttctttgtcttcgttcacatcctctttgtttcctcttttcaccagcctaaggcctggctgaccaggaagccaacgttaacttgcaggccacgtgacataaccacccaaagagccagttgctctgtgtattcgccccactcatgatcaccattttattttcataataaagagtgacgttacacgttgta

SEQ ID NO: 39888 - DNA, 3959 bp, Artificial Sequence
  derived and/or modified sequence
agacgcagaggcgaggccgccagtcgaggacgaggaggagataacatcaagatgccgaagactgaggaaactgtgctccagaatgatcccagtgtagcagagaatggggcccctgagcctaaaacaccagggcagagccagaaaagcaagagtttctgtttagatgaccagtctcctgacctgatgtcttttctgtcacagatctgatagagacagttaatgaagtttccaagctgagcatttcacatgaaattgtagtaaaccaagatttctatgtggaagagaccattttgcctccaaacagtgtagaaggcaggtttgcggaggcaatgtacaatgctttttggaaccatctgaaagaacagctattgagtactcctcctgacttcacttgtgcccttgaacttctaaaagatgttaaggagaccttgctatcactgctattaccatggcagaaccgcctaagaaatgagatagaagaagctctggacacagatctcctcaagcaggaagcagaacatggggccctggatgtccctcatctttctaactacattctcaatttgatggctctgctatgtgcaccggttcgagatgaagcgatacagaaactagagaccataagagatccagtgcagttactgaggggcatcctccgtgttctgggcctaatgaaaatggacatggtgaactataccatccagagctttcgaccctacctgcaggaacattccatccagtatgaacaagctaaattccaggaactccttgataaacagcccagtctcctcgattataccacaaaatggctaaccaaagcagccacagacatcactacactatgtccgagttctcctgactcacctagctcctcctgcagcatggcgtgttcacttccaagcggggcaggtaacaattcagagccccccagtccaacaatggtgctataccaaggctacctgaacctcctcctctgggatcttgaaaacgtagaattcccagagactctgctgatggacagaatccggctccaggaactggcattccagttgcaccagttaactgtcctggcctcagtcttgctagtggccagaagcttctctggtgaagttttattcagatcacctgaatttgtggatagactgaaatgcaccaccaaggccctaactgaggaatttatctccaggcctgaagagactatgctgagtgtgagtgaacaggtgtctcaggaagtccatcaaggccttaaggacatgggcctcactactctgagcagtgaaaacacagcatctcttctaggccaactccagaacatcaccaagaaagagaactgcattcgtagcattgttggagtctctgctacactttcctggaggcctcattctcattgaaaaggagttggcagaactgggctggaagtttctcaatctgatgcatcataatcagcagagtcatttttcacaaaacgaaatctttccagaagatcacgaataagagagatcaaagctaggcagcttgagttgaagtagagctggaagaaggagttttgaggactgtttcaaaaccactggactagatgatctctaaagtggtgacatggacataggataatggttatagacagtccccctcccaacgggaaaaaatgaaagcaagcaaaaagttaccagctccaagccaacttgaaatccaatcaggatcttatccaggacgcttcattgcatttggtcttcatttctccttagtctcctccaggctgacatttcctcaatctttattggtcttccacagccctgacacttttggagataccagtcagcatttccaagttcgttctgtgagactgtagtgtcaggacaaagcaacaacaaaatgtgctctactctaaagaagtgtgggacatacagaactgaagttgcagaatgccatgaccatggtagcacttttcaaggaagaaagaaaggtgggagttctttccgggataattttgacaagaggagctgtcattatgaacatggtgggtatgagcgcccgccttcacactgccaggagaatgatggaagcgtggagatgagggatgtccacaaggaccaacaactaagacacactccttatagcatccgatgcgaaagaagaatgaaatggcatagtgaagacgaaatccgtattaccacgtggagaaatagaaaacctccggagagaaaaatgagtcagaacacacaggatggatacacaaggaactggtttaaggtcacaattccttacgggataaagtatgacaaggcatggctaatgaattcaatccagagccattgcagtgaccgcttcactccggttgatttccactacgtccgaaatcgggcatgcttctttgtccaggatgctagcgctgcctccgcattgaaggatgtcagttataagatttatgatgatgagaaccaaaagatatgtatatttgtcaatcattctactgcgccctactctgtgaagaataagttgaagccaggccaaatggagatgctaaagctgaccatgaacaaacggtacaatgtctcccagcaagctcttgatctccagaatctccgctttgacccagacttgatgggccgtgacattgatataatcctgaatcgaagaaactgcatggctgccaccctgaagatcattgaaagaaatttccctgagctgttgtctttgaacttgtgcaacaacaagctgtaccagctggatggcctttctgacattacagagaaggctcccaaagtcaagaccctgaatctctccaaaaataagctggagtcggcgtgggagttgggcaaggtgaaagggctgaagctcgaagagctatggctagaagggaacccgttgtgcagcaccttctcggaccagtccgcctatgtaagtgccatccgggattgtttccccaagttgttacgcctggacggccgagagttatccgcaccagtgattgttgacattgacagctctgagacaatgaaaccctgcaaggaaaactttactggatctgagaccctaaagcatttagtcctgcaattcctgcagcagtattactcgatctatgactctggagatcgacagggtctcctcggtgcttaccacgatgaggcctgcttctccttggctattcccttcgaccccaaggactcagccccgagcagcttgtgcaagtactttgaggatagcaggaatatgaaaacactcaaggacccctacctgaagggggaactgctgaggcgcacaaaacgtgacattgtggactccctcagtgcgttgcccaaaactcagcatgacctcagctccatcctggtggacgtgtggtgccagacggaaaggatgctctgcttttctgtcaatggggttttcaaggaagtggaaggacagtctcagggttctgttctcgccttcacccggaccttcattgctacccctggcagcagttccagtctgtgcatcgtgaatgacgagctgtttgtgagggatgccagcccccaagagactcagagtgccttctccatcccagtgtccacactctcctccagctctgagccctccctctcccaggagcagcaggaaatggtgcaggctttctctgcccagtctgggatgaaactggagtggtctcagaagtgccttcaggacaatgagtggaactacactagagctggccaggccttcactatgctccagaccgagggcaagatccccgcagaggccttcaagcaaatctcctaaaaggagccctccgatgtcttctttgtcttcgttcacatcctctttgtttcctcttttcaccagcctaaggcctggctgaccaggaagccaacgttaacttgcaggccacgtgacataaccacccaaagagccagttgctctgtgtattcgccccactcatgatcaccattttattttcataataaagagtgacgttacacgttgta

SEQ ID NO: 39889 - DNA, 2062 bp, Artificial Sequence
  derived and/or modified sequence
tccaggtttgttctggaaaacactaggtctgagagacagcaacaacaaaagtatactctaccattaaagaaataatgccgtatatgtagtagcacttttcaaagaaggaagaaaggtgggagtcatttccagggtaattttgacaagaggaactgtcattatgaacatggtgggtatgaacttctgccttcacgctgccaggagaatgatggaagcatggagatgagggatgtccacaaggaccgccaactaagacacactccttatagaatccaatgcaacaggaagctagtgaaatgacatagtgaagatcaaatccatattaccatttggagaaatagaaaacctccagagagaaaaatgaggcggaacacacaagatgaaaacatgaggaaatggttcaaggtcacaattccttatgggataaagtatgacaaggcatggctaatgaattcaatccagagcaattgcagtgtccccttcactccggttgatttccactacatccgaaatcgggcatgcttctttgtccaggttgctagtgctgcctctgcattgaaggatgtcagttataagatttatgatgatgagaaccaaaagatatgtatatttgtcagtcattttactgcgccctactctgtgaagaataagttgaagccaggccaaatggagatgctaaagctgaccatgaacaaacggtacaatgtctcccagcaagctcttgatctccagaatctccgctttgacccagacttgatgggccgtgacattgatataatcctgaatcgaagaaactgcatggctgccaccctgaagatcactgaaagaaatttccctgagctgttgtctttgaacttgtgcaacaacaaactgtaccagctggatggcctttctgacattacagagaaggctcccaaagtcaagaccctgaatctctccaaaaataagctggagtcggcgtgggagttgggcaaggtgaaagggctgaagctcgaagagctatggctagaagggaacccgttgtgcagcaccttctcggaccagtctgcctatgtaagtgccatccgggattgtttccccaagttgttacgcctggacggccgagagttatccgcaccagtgattgttgacattgacagctctgagacaatgaaaccctgcaaggaaaactttactggatctgagaccctaaagcatttagtcctgcaattcctgcagcagagcaacttgtgcaagtacttcaaggatagcaggaatataaaaattctcaaagacccctacctgcagaggaagctgctaaagcacacaaaatgtccacgaaacgtggactccctcagtgcattgcctgaaactcagcatgacttcacctccatcctggtggacatgtggtaccagaccgtgaacacctgcttcctccctcgggcaggcccagagagccagaggtggtggtgtttgttgtctctgaagtggaaggatggtctcagggttctgatcttgccttcatgtggaccttcatcactacctctggccgcaattccagtctgtgcatcatgaatgataagctgtttctgagggatgccagcccccaagagactcagagtgccttctccatcccagtgtccacactctcctccagctctgagccctccctctcctaggagcacaggaaatggtgcaggctttctctgcccagtctgggatgaaactagagtggtctcagaagtgccttcaggacaataagtggaactacattagagctggtcaggtcttcactatgctccagactgagggcaagatcccagtggaggccttcaagcaaatcccctaaaaggagccctttgatgtcatctttgtcttccttctcatcctctttgtttcctcttttcaccagcctaagaccactctaaggactggggttggaggcctggctgaccaagaagccaaagttaacttgcaggccacaggacatagccacctgaagagccagttgttctgtgtatttgccccactcatgatcaccgtttattttcataataaacagtgacgttacatgttgtatgtt

SEQ ID NO: 39890 - DNA, 1554 bp, Artificial Sequence
  derived and/or modified sequence
tccaggtttgttctggaaaacactaggtctgagagacagcaacaacaaaagtatactctaccattaaagaaataatgccgtatatgtagtagcacttttcaaagaaggaagaaaggtgggagtcatttccagggtaattttgacaagaggaactgtcattatgaacatggtgggtatgaacttctgccttcacgctgccaggagaatgatggaagcatggagatgagggatgtccacaaggaccgccaactaagacacactccttatagaatccaatgcaacaggaagctagtgaaatgacatagtgaagatcaaatccatattaccatttggagaaatagaaaacctccagagagaaaaatgaggcggaacacacaagatgaaaacatgaggaaatggttcaaggtcacaattccttatgggataaagtatgacaaggcatggctaatgaattcaatccagagcaattgcagtgtccccttcactccggttgatttccactacatccgaaatcgggcatgcttctttgtccaggttgctagtgctgcctctgcattgaaggatgtcagttataagatttatgatgatgagaaccaaaagatatgtatatttgtcagtcattttactgcgccctactctgtgaagaataagttgaagccaggccaaatggagatgctaaagctgaccatgaacaaacggtacaatgtctcccagcaagctcttgatctccagaatctccgctttgacccagacttgatgggccgtgacattgatataatcctgaatcgaagaaactgcatggctgccaccctgaagatcactgaaagaaatttccctgagctgttgtctttgaacttgtgcaacaacaaactgtaccagctggatggcctttctgacattacagagaaggctcccaaagtcaagaccctgaatctctccaaaaataagctggagtcggcgtgggagttgggcaaggtgaaagggctgaagctcgaagagctatggctagaagggaacccgttgtgcagcaccttctcggaccagtctgcctatgtaagtgccatccgggattgtttccccaagttgttacgcctggacggccgagagttatccgcaccagtgattgttgacattgacagctctgagacaatgaaaccctgcaaggaaaactttactggatctgagaccctaaagcatttagtcctgcaattcctgcagcagagcaacttgtgcaagtacttcaaggatagcaggaatataaaaattctcaaagacccctacctgcagaggaagctgctaaagcacacaaaatgtccacgaaacgtggactccctcagtgcattgcctgaaactcagcatgacttcacctccatcctggtggacatgtggtaccagaccgtgaacacctgcttcctccctcgggcaggcccagagagccagaggtggtggtgtttgttgtctctgaagtggaaggatggtctcagggttctgatcttgccttcatgtggaccttcatcactacctctggccgcaattccagtctgtgcatcatga

SEQ ID NO: 39891 - DNA, 1613 bp, Artificial Sequence
  derived and/or modified sequence
tccaggtttgttctggaaaacactaggtctgagagacagcaacaacaaaagtatactctaccattaaagaaataatgccgtatatgtagtagcacttttcaaagaaggaagaaaggtgggagtcatttccagggtaattttgacaagaggaactgtcattatgaacatggtgggtatgaacttctgccttcacgctgccaggagaatgatggaagcatggagatgagggatgtccacaaggaccgccaactaagacacactccttatagaatccaatgcaacaggaagctagtgaaatgacatagtgaagatcaaatccatattaccatttggagaaatagaaaacctccagagagaaaaatgaggcggaacacacaagatgaaaacatgaggaaatggttcaaggtcacaattccttatgggataaagtatgacaaggcatggctaatgaattcaatccagagcaattgcagtgtccccttcactccggttgatttccactacatccgaaatcgggcatgcttctttgtccaggttgctagtgctgcctctgcattgaaggatgtcagttataagatttatgatgatgagaaccaaaagatatgtatatttgtcagtcattttactgcgccctactctgtgaagaataagttgaagccaggccaaatggagatgctaaagctgaccatgaacaaacggtacaatgtctcccagcaagctcttgatctccagaatctccgctttgacccagacttgatgggccgtgacattgatataatcctgaatcgaagaaactgcatggctgccaccctgaagatcactgaaagaaatttccctgagctgttgtctttgaacttgtgcaacaacaaactgtaccagctggatggcctttctgacattacagagaaggctcccaaagtcaagaccctgaatctctccaaaaataagctggagtcggcgtgggagttgggcaaggtgaaagggctgaagctcgaagagctatggctagaagggaacccgttgtgcagcaccttctcggaccagtctgcctatgtaagtgccatccgggattgtttccccaagttgttacgcctggacggccgagagttatccgcaccagtgattgttgacattgacagctctgagacaatgaaaccctgcaaggaaaactttactggatctgagaccctaaagcatttagtcctgcaattcctgcagcagagcaacttgtgcaagtacttcaaggatagcaggaatataaaaattctcaaagacccctacctgcagaggaagctgctaaagcacacaaaatgtccacgaaacgtggactccctcagtgcattgcctgaaactcagcatgacttcacctccatcctggtggacatgtggtaccagaccgtgaacacctgcttcctccctcgggcaggcccagagagccagagcctaagaccactctaaggactggggttggaggcctggctgaccaagaagccaaagttaacttgcaggccacaggacatagccacctgaagagccagttgttctgtgtatttgccccactcatgatcaccgtttattttcataataaacagtgacgttacatgttgtatgtt

SEQ ID NO: 39892 - DNA, 1881 bp, Artificial Sequence
  derived and/or modified sequence
atgtgtagcactcttaaaaaatgcgggacctatcgcaccgaggtagctgagtgtcacgatcatggttcgacgtttcagggccgaaaaaaaggcggaagctctttccgcgacaacttcgacaagaggtcttgtcattacgagcacggcggatacgagcggccaccatcccactgtcaggagaatgatggctcagtcgagatgagggacgtgcacaaagatcagcagctcaggcacaccccctactctatcagatgcgaacgcaggatgaaatggcactcggaggacgaaataagaattactacctggcggaatcggaaacctcctgagcggaagatgtcccagaacactcaggatggatatactagaaactggtttaaggtgactattccctacgggattaaatatgacaaggcatggctgatgaactctattcagagtcattgctccgaccgcttcacacccgtggacttccactacgtgaggaacagagcgtgcttcttcgtgcaggacgcttcggccgctagcgccctcaaagacgtgtcgtataagatctacgacgacgagaatcagaagatctgtattttcgtgaaccacagcacggcaccctatagcgttaaaaataaactcaagccaggacagatggagatgctgaagctcactatgaacaagagatacaacgtatcccaacaggccctggaccttcagaatctgcgctttgatccagacctaatgggaagagatattgacataattctcaaccgtcgaaattgtatggctgccactctgaagatcatagagcgtaattttcccgaactgctgtcccttaacctgtgtaataacaaactgtaccagctggacgggctctccgatataacagagaaagcccctaaagtaaagacattgaacctgagcaagaataagttggagtccgcttgggagctcggcaaagttaaagggttgaagttagaagaattgtggctggaaggcaatcccttgtgctctaccttcagtgatcagagtgcatacgtatcagcaatcagggactgctttccaaaattgcttcgactggacggaagagagctcagcgctccagttatcgtggatatcgattcaagcgaaacaatgaagccctgcaaggagaattttacaggcagtgaaacgctgaaacaccttgtcctgcagtttctgcaacaatactacagcatttacgatagcggagatcgccagggcctgcttggagcctaccacgacgaggcctgcttctcactcgcgatcccattcgacccgaaggactcggcaccgtcctccctgtgtaaatactttgaggatagccgaaacatgaagaccttgaaagatccatacctgaagggggagctcctacggcgaactaaacgggacatcgtggattccctcagtgccctgcctaaaactcagcatgacctgtcatctattctggtggacgtttggtgccagacagagcgcatgctgtgtttctccgtgaacggtgtgttcaaggaagtcgaaggacagagccagggttcagtgttggcattcacccgcaccttcatcgctacccctgggagttcctcttcactgtgcattgtgaatgatgagcttttcgtgcgagacgcttctccccaggaaacccagagcgcttttagcattcccgtgagcacactgtcgtcctccagtgagccaagtctcagtcaggagcagcaggaaatggtccaggccttttccgcacagtcaggcatgaaactagagtggtcccaaaaatgtcttcaagataatgagtggaactataccagggccggtcaagccttcacaatgctgcagaccgaaggaaagatacctgcagaggctttcaagcagatatcctag

SEQ ID NO: 39893 - DNA, 1881 bp, Artificial Sequence
  derived and/or modified sequence
atgtgctccacgctgaaaaaatgtggtacctataggaccgaagtggcagagtgccacgatcacggaagcaccttccagggcaggaaaaagggaggatcctctttccgcgataattttgacaaaaggagttgtcactatgaacatggagggtacgagcgcccaccgagccactgtcaggagaatgacggatccgtggagatgcgtgacgtgcataaagatcagcaacttcggcatacaccttacagcatcaggtgtgagcgaaggatgaagtggcattccgaagacgaaatccgtattactacgtggcggaatcggaaaccgccagaacggaaaatgagccagaatacccaagacggctacacgagaaactggttcaaggtcactataccatatgggataaagtacgataaagcctggctgatgaatagtatccagtctcactgttcagaccgattcacccctgttgatttccattacgtccgaaaccgagcatgcttttttgtccaggacgcaagtgctgctagcgcacttaaagacgttagctataaaatttacgatgacgagaaccagaagatctgcatttttgtgaaccactccaccgctccctactctgtcaagaacaagctgaaaccaggccaaatggaaatgttgaaactcacgatgaacaagagatataatgtctcacaacaggcgttagatttacagaatctgaggtttgacccagatttgatgggacgggatattgacatcattctcaaccgacgcaactgcatggctgctacacttaagatcatcgagcgcaactttcctgagctcctatcattgaacctgtgcaataataaactctatcagttagatgggctgtcggatattacggaaaaggcacctaaggtcaagactttgaacctgagcaaaaataagctcgagtccgcctgggagcttgggaaggttaaaggactgaaactggaagagttgtggttggaaggaaatcctctgtgcagcacattcagcgatcagtccgcttacgttagcgccatccgagattgttttcctaagcttctgagactggacggcagggagctctccgcacctgtcattgtggacatcgatagctccgagactatgaagccctgtaaggaaaactttactggttcagagaccttaaaacacctcgtgctacagttcctgcagcagtactacagcatttacgacagcggcgacaggcagggcctccttggcgcttatcacgacgaagcttgtttctcactggcgattcctttcgaccccaaagacagcgccccaagcagtttgtgcaagtattttgaggacagtcggaatatgaagacacttaaagacccctatttaaaaggtgaattgctgagaagaactaaacgggatattgtggattcactttcggccctcccgaaaactcagcacgacttgtcatcaatactcgtggacgtctggtgccaaacagagaggatgctgtgcttttccgtgaacggagtgtttaaggaggtcgaggggcaatctcagggaagtgtgttagcctttactaggacctttatcgccacgcctggaagctcgagcagtctctgcattgtcaatgacgagttgttcgtacgggatgcatccccccaagagacacagagcgccttcagcatccccgtgagtaccctctccagttccagcgaaccaagtttgtctcaggaacagcaggagatggtgcaggcattttctgcacagtccgggatgaaattagaatggtcccagaagtgtctacaggataatgagtggaattatacaagggctggccaggcattcacaatgcttcagacggaggggaagattccagcagaggccttcaaacagatatcctag

SEQ ID NO: 39894 - DNA, 1881 bp, Artificial Sequence
  derived and/or modified sequence
atgtgcagcaccctaaaaaaatgtggcacctaccggacagaagtcgccgagtgccacgaccacgggagcactttccagggaaggaagaagggcggtagcagctttagagacaatttcgacaaacgcagctgtcattacgagcacggcggatacgaaagacccccttctcactgtcaggagaatgatggatctgtagagatgcgggatgtgcataaggaccaacagctccgacacaccccttacagcatccgctgcgaacgaagaatgaaatggcacagtgaggatgaaattcgcatcactacatggaggaacaggaaaccacccgagaggaaaatgtctcaaaacacgcaggatggctatacccggaattggttcaaggtcacaataccctatggaatcaaatatgacaaggcatggctcatgaactctatccagagtcattgttccgacagattcacgcccgtagacttccattacgtgagaaatagggcgtgcttctttgtgcaggatgccagcgctgctagcgcgctgaaagacgtcagttacaaaatctatgatgatgaaaatcaaaagatctgtatctttgtgaatcattctacagccccatacagtgtcaagaacaaactgaagcccggtcagatggagatgttgaaacttacgatgaacaaaagatataacgtcagccagcaggccctggacctccaaaatctgaggttcgatccagatctgatgggcagggatattgatataatcctgaataggagaaattgtatggccgctacattaaagattatcgagagaaacttccctgaactcctcagcctaaatctctgcaataataagctttaccaactcgacggcttgagtgacatcaccgagaaggctccaaaagtaaagactcttaacctttcaaaaaacaaactcgaatccgcttgggagctgggaaaggtgaagggactcaaactggaggagctgtggttggagggcaaccccttgtgctccactttttcagatcagagcgcctacgtgtccgccatcagggattgctttcccaaactgttacgacttgacggaagggaactatcagctcctgttattgtggacatagatagctccgagaccatgaagccctgtaaggagaatttcacagggtcagaaactctcaagcacctcgtactgcagttcctacagcagtattactccatctacgattccggcgataggcagggactactcggcgcatatcacgacgaggcttgcttctcattggccattccttttgaccctaaggatagtgctccaagcagtctctgtaagtacttcgaggactcgcgaaatatgaagaccctaaaagatccttacttgaagggtgagctgttaagacgtacaaagcgagacatcgttgactctctgtctgcactgcccaagacccagcacgacttgtcttccatcctcgtggatgtatggtgtcagacagagcggatgctgtgcttctcagttaatggcgtatttaaggaggtagagggccagtctcaggggtctgtcttggcgttcacacgaacctttattgccacccccggtagttcttcgtcgctctgcatcgtcaacgatgaactgttcgtccgcgacgcaagcccccaggagactcagtccgcctttagcatacccgtgtccacactttccagctccagcgaaccatcactgagccaggaacagcaagagatggtgcaggcatttagtgcacagtccggcatgaagctcgagtggtcacagaaatgcctgcaggacaatgagtggaattatacaagggccggacaggcctttaccatgctccagaccgaaggaaagatacctgctgaagcattcaagcagatatcctag

SEQ ID NO: 39895 - DNA, 1230 bp, Artificial Sequence
  derived and/or modified sequence
atgaaatggcattccgaggatgagattcgcattactacgtggaggaatcgaaaaccaccagagaggaagatgagtcagaacactcaagacggatacacccgtaactggtttaaggtcaccatcccctacggcatcaagtacgacaaagcttggctcatgaacagtattcaatcacactgttccgaccggtttacacctgtggattttcactatgtcagaaacagagcgtgctttttcgtgcaagacgcgtccgccgcttctgctttaaaagatgtgtcctataagatatatgacgacgagaaccaaaagatttgtattttcgttaaccactccacggctccctactccgtgaaaaataaactcaagcccggtcagatggagatgctgaagctgacgatgaataagaggtataatgtcagtcagcaggctttggacttgcaaaatctgcgtttcgatccagatttgatgggcagagatatcgacatcatccttaaccggcgaaattgtatggctgctacacttaagattattgaaagaaactttccagaactactgtcgctcaatctgtgcaacaataagttgtaccagctggacgggctgtctgacatcactgaaaaagcccctaaggtaaaaacactgaacctctctaagaacaaactggagtccgcctgggaactgggtaaggtgaagggcctgaaattggaggagctctggttggaggggaaccccctgtgtagcacatttagcgatcaaagcgcctatgtctccgcaattagagattgttttcctaaactcctgagacttgacggcagagaattgtcagcaccagtgattgtcgacattgattctagcgagactatgaaaccctgcaaggagaattttacgggttctgagacgctgaagcatctggtgctccagttcttgcagcaatattacagtatttatgactcaggtgaccgtcaggggctgctcggagcctaccacgacgaggcctgtttctcactggccattccttttgaccccaaggactcagcaccttcctccctctgcaaatatttcgaggattctcgaaacatgaaaacgctcaaagatccgtatctcaagggggagctgctgagacgcaccaaacgcgatatcgttgattctttatccgccttgccaaagacccagcatgatctcagctctattttggtggacgtctggtgccagactgttcccagtggacaatag

SEQ ID NO: 39896 - DNA, 1881 bp, Artificial Sequence
  derived and/or modified sequence
atgtgctccacgcttaagaagtgcggaacatacagaacagaagtggctgaatgtcacgatcatggcagcacctttcaaggaaggaagaagggtggcagcagctttcgcgataacttcgacaaaaggagctgccactatgagcacggtggctatgagcgcccacctagccactgtcaagaaaatgatgggtctgtcgaaatgcgcgacgttcataaggatcagcagctgcggcacacaccttactctatacggtgtgaaagacgaatgaaatggcattcagaggatgaaatcaggataacaacatggaggaaccgcaagcccccagaaagaaagatgtctcagaatacacaggacggatatacacgtaactggttcaaggtcaccataccttacggcatcaagtatgacaaggcttggctcatgaattctatccagtctcattgttccgatcggttcactcccgtggatttccattacgttagaaacagagcgtgcttctttgtccaggacgcatccgccgctagcgccctgaaggatgtgagctataaaatttatgatgatgaaaaccagaagatttgtatctttgtgaaccatagtaccgctccttactcagtgaagaataagttgaaaccgggacagatggagatgctgaaacttaccatgaataagagatataacgtgtcccaacaggctctcgacctccaaaacctccggttcgatccggatctgatgggcagagatattgatataattttgaacaggagaaactgcatggcagcaaccctcaagatcattgagcgaaatttccccgagctgctgagtttgaacctgtgtaataacaagctctatcagcttgacggcctgtcagacatcaccgagaaagctcctaaggtgaagacactgaaccttagtaagaataaacttgagtctgcctgggagctgggcaaggtcaagggcctcaaacttgaggagctctggctcgaaggtaatcccctctgtagtactttcagcgatcagagcgcgtacgtgtctgctatccgagactgcttccccaagctcctgcgcttggacgggagggagctcagcgctccagttatcgtcgacatcgatagctctgagaccatgaaaccttgtaaagaaaattttacgggctcagaaactctcaaacacctggtcttgcagtttctgcagcagtactactcgatttacgatagcggtgatcgtcaaggactgctgggcgcttatcacgacgaagcatgtttctccctggccatcccctttgatcccaaggattccgcccctagctctctttgtaagtattttgaggacagtcggaacatgaagactctgaaagatccctatctcaaaggagagttgctacgcaggactaagcgtgacatcgtcgattcacttagcgccctgcccaagactcagcacgacctgtctagcatccttgttgacgtttggtgccagacagaaagaatgctgtgtttcagtgtaaatggcgttttcaaggaagtggagggccaatctcagggttccgtcctcgcttttacacggactttcatcgcaactcctggctcctcaagctcactttgcattgtcaatgacgagctgttcgtccgcgatgcctccccacaggaaacccagagcgccttttccattccggtcagcaccttgagctcatctagtgagccctcactctcccaggagcagcaggaaatggtccaggcattcagcgcccagtccggcatgaaactcgaatggtcacagaagtgtctgcaggataatgagtggaactacactagagccggtcaagcctttaccatgctccagacagagggcaagatcccagcggaggcttttaaacagattagctag

SEQ ID NO: 39897 - protein, 159 aa, Artificial Sequence
  derived and/or modified sequence
MVPSAGQLALFALGIVLAACQALENSTSPLSDPPVAAAVVSHFNDCPDSHTQFCFHGTCRFLVQEDKPACVCHSGYVGARCEHADLLAVVAASQKKQAITALVVVSIVALAVLIITCVLIHCCQVRKHCEWCRALICRHEKPSALLKGRTACCHSETVV

SEQ ID NO: 39898 - DNA, 4261 bp, Artificial Sequence
  derived and/or modified sequence
agccgccttcctatttccgcccggcgggcagcgctgcggggcgagtgccagcagagaggcgctcggtcctccctccgccctcccgcgccgggggcaggccctgcctagtctgcgtctttttcccccgcaccgcggcgccgctccgccactcgggcaccgcaggtagggcaggaggctggagagcctgctgcccgcccgcccgtaaaatggtcccctcggctggacagctcgccctgttcgctctgggtattgtgttggctgcgtgccaggccttggagaacagcacgtccccgctgagtgacccgcccgtggctgcagcagtggtgtcccattttaatgactgcccagattcccacactcagttctgcttccatggaacctgcaggtttttggtgcaggaggacaagccagcatgtgtctgccattctgggtacgttggtgcacgctgtgagcatgcggacctcctggccgtggtggctgccagccagaagaagcaggccatcaccgccttggtggtggtctccatcgtggccctggctgtccttatcatcacatgtgtgctgatacactgctgccaggtccgaaaacactgtgagtggtgccgggccctcatctgccggcacgagaagcccagcgccctcctgaagggaagaaccgcttgctgccactcagaaacagtggtctgaagagcccagaggaggagtttggccaggtggactgtggcagatcaataaagaaaggcttcttcaggacagcactgccagagatgcctgggtgtgccacagaccttcctacttggcctgtaatcacctgtgcagccttttgtgggccttcaaaactctgtcaagaactccgtctgcttggggttattcagtgtgacctagagaagaaatcagcggaccacgatttcaagacttgttaaaaaagaactgcaaagagacggactcctgttcacctaggtgaggtgtgtgcagcagttggtgtctgagtccacatgtgtgcagttgtcttctgccagccatggattccaggctatatatttctttttaatgggccacctccccacaacagaattctgcccaacacaggagatttctatagttattgttttctgtcatttgcctactggggaagaaagtgaaggaggggaaactgtttaatatcacatgaagaccctagctttaagagaagctgtatcctctaaccacgagaccctcaaccagcccaacatcttccatggacacatgacattgaagaccatcccaagctatcgccacccttggagatgatgtcttatttattagatggataatggttttatttttaatctcttaagtcaatgtaaaaagtataaaaccccttcagacttctacattaatgatgtatgtgttgctgactgaaaagctatactgattagaaatgtctggcctcttcaagacagctaaggcttgggaaaagtcttccagggtgcggagatggaaccagaggctgggttactggtaggaataaaggtaggggttcagaaatggtgccattgaagccacaaagccggtaaatgcctcaatacgttctgggagaaaacttagcaaatccatcagcagggatctgtcccctctgttggggagagaggaagagtgtgtgtgtctacacaggataaacccaatacatattgtactgctcagtgattaaatgggttcacttcctcgtgagccctcggtaagtatgtttagaaatagaacattagccacgagccataggcatttcaggccaaatccatgaaagggggaccagtcatttattttccattttgttgcttggttggtttgttgctttatttttaaaaggagaagtttaactttgctatttattttcgagcactaggaaaactattccagtaatttttttttcctcatttccattcaggatgccggctttattaacaaaaactctaacaagtcacctccactatgtgggtcttcctttcccctcaagagaaggagcaattgttcccctgagcatctgggtccatctgacccatggggcctgcctgtgagaaacagtgggtcccttcaaatacatagtggatagctcatccctaggaattttcattaaaatttggaaacagagtaatgaagaaataatatataaactccttatgtgaggaaatgctactaatatctgaaaagtgaaagatttctatgtattaactcttaagtgcacctagcttattacatcgtgaaaggtacatttaaaatatgttaaattggcttgaaattttcagagaattttgtcttcccctaattcttcttccttggtctggaagaacaatttctatgaattttctctttatttttttttataattcagacaattctatgacccgtgtcttcatttttggcactcttatttaacaatgccacacctgaagcacttggatctgttcagagctgaccccctagcaacgtagttgacacagctccaggtttttaaattactaaaataagttcaagtttacatcccttgggccagatatgtgggttgaggcttgactgtagcatcctgcttagagaccaatcaacggacactggtttttagacctctatcaatcagtagttagcatccaagagactttgcagaggcgtaggaatgaggctggacagatggcggaagcagaggttccctgcgaagacttgagatttagtgtctgtgaatgttctagttcctaggtccagcaagtcacacctgccagtgccctcatccttatgcctgtaacacacatgcagtgagaggcctcacatatacgcctccctagaagtgccttccaagtcagtcctttggaaaccagcaggtctgaaaaagaggctgcatcaatgcaagcctggttggaccattgtccatgcctcaggatagaacagcctggcttatttggggatttttcttctagaaatcaaatgactgataagcattggatccctctgccatttaatggcaatggtagtctttggttagctgcaaaaatactccatttcaagttaaaaatgcatcttctaatccatctctgcaagctccctgtgtttccttgccctttagaaaatgaattgttcactacaattagagaatcatttaacatcctgacctggtaagctgccacacacctggcagtggggagcatcgctgtttccaatggctcaggagacaatgaaaagcccccatttaaaaaaataacaaacattttttaaaaggcctccaatactcttatggagcctggatttttcccactgctctacaggctgtgactttttttaagcatcctgacaggaaatgttttcttctacatggaaagatagacagcagccaaccctgatctggaagacagggccccggctggacacacgtggaaccaagccagggatgggctggccattgtgtccccgcaggagagatgggcagaatggccctagagttcttttccctgagaaaggagaaaaagatgggattgccactcacccacccacactggtaagggaggagaatttgtgcttctggagcttctcaagggattgtgttttgcaggtacagaaaactgcctgttatcttcaagccaggttttcgagggcacatgggtcaccagttgctttttcagtcaatttggccgggatggactaatgaggctctaacactgctcaggagacccctgccctctagttggttctgggctttgatctcttccaacctgcccagtcacagaaggaggaatgactcaaatgcccaaaaccaagaacacattgcagaagtaagacaaacatgtatatttttaaatgttctaacataagacctgttctctctagccattgatttaccaggctttctgaaagatctagtggttcacacagagagagagagagtactgaaaaagcaactcctcttcttagtcttaataatttactaaaatggtcaacttttcattatctttattataataaacctgatgcttttttttagaactccttactctgatgtctgtatatgttgcactgaaaaggttaatatttaatgttttaatttattttgtgtggtaagttaattttgatttctgtaatgtgttaatgtgattagcagttattttccttaatatctgaattatacttaaagagtagtgagcaatataagacgcaattgtgtttttcagtaatgtgcattgttattgagttgtactgtaccttatttggaaggatgaaggaatgaatctttttttcctaaa

SEQ ID NO: 39899 - DNA, 480 bp, Artificial Sequence
  derived and/or modified sequence
atggtgcccagcgccggccagctggccctgttcgccctgggcatcgtgctggccgcctgccaggccctggagaacagcaccagccccctgagcgacccccccgtggccgccgccgtggtgagccacttcaacgactgccccgacagccacacccagttctgcttccacggcacctgcagattcctggtgcaggaggacaagcccgcctgcgtgtgccacagcggctacgtgggcgccagatgcgagcacgccgacctgctggccgtggtggccgccagccagaagaagcaggccatcaccgccctggtggtggtgagcatcgtggccctggccgtgctgatcatcacctgcgtgctgatccactgctgccaggtgagaaagcactgcgagtggtgcagagccctgatctgcagacacgagaagcccagcgccctgctgaagggcagaaccgcctgctgccacagcgagaccgtggtgtag

SEQ ID NO: 39900 - DNA, 480 bp, Artificial Sequence
  derived and/or modified sequence
atggtgccctccgccggacaactggcattgtttgccttgggaattgtgctggccgcatgccaggctctcgaaaacagcaccagccccctctcggacccccctgttgccgccgccgtcgtctcccatttcaacgactgccctgacagtcatacccagttctgtttccacgggacttgcaggtttctggtgcaggaggacaagcctgcatgtgtctgccatagcggctatgtgggagcacgctgcgaacacgccgacttactagcagtggttgccgcttcccagaagaagcaggccatcactgcactcgtggttgtgagcatcgtggctcttgccgtgctgatcattacttgcgtcctcatccactgctgccaagtaagaaagcactgcgaatggtgccgggctctaatctgcaggcatgagaaaccttcagcactgcttaagggacggacagcttgttgtcacagtgagactgttgtgtag

SEQ ID NO: 39901 - DNA, 480 bp, Artificial Sequence
  derived and/or modified sequence
atggtgcccagcgctggccagctggccctgtttgccctgggcatcgtgctggccgcctgccaggccctggagaacagcaccagccccctgagtgacccccctgtggccgctgctgtggtgagccacttcaatgactgcccagacagccacacccagttctgcttccacggcacctgccgcttcctggtgcaggaggacaagccagcctgtgtgtgccacagcggctacgtgggcgcccgctgtgaacatgctgacctgctggccgtggtggccgccagccagaagaagcaggccatcacagccctggtggtggtgtccatcgtggccctggccgtgctgatcatcacctgtgtgctgatccactgctgccaggtgaggaagcactgtgagtggtgccgggccctgatctgcagacatgagaagcccagcgccctgctgaagggccgcacagcctgctgccacagcgagaccgtggtgtag

SEQ ID NO: 39902 - DNA, 480 bp, Artificial Sequence
  derived and/or modified sequence
atggtgcccagcgccggccagctggccctgttcgccctgggcatcgttctggccgcctgccaggccctggagaactcaacctcccccctgtcagatccccctgttgcagcggccgtagtctctcactttaacgactgtcctgatagtcatactcagttctgcttccacggtacttgccgctttctggtacaggaggataagcctgcctgcgtttgtcactcaggatacgtgggggctcgctgcgaacacgccgacttactggccgtcgtggctgcgagccaaaagaagcaggcaattactgcactggtagtcgtttcaatcgttgcgctcgctgtgttaatcattacatgtgtgctgattcactgctgtcaggtgcgaaagcactgtgaatggtgcagagccctgatatgtcgccatgagaagccctccgcactgcttaaagggagaaccgcctgttgtcacagtgagaccgtggtgtag

SEQ ID NO: 39903 - DNA, 480 bp, Artificial Sequence
  derived and/or modified sequence
atggtaccctcggctggtcaattggccttgttcgctcttggaatcgtcttggcagcttgccaggctctggagaattcaactagtcccctgtcagatccacccgtggcggcagctgtggtgagtcactttaacgactgcccagatagccacacccaattttgtttccatggaacctgccggtttctggtgcaggaggacaagcctgcctgcgtgtgccattctggttacgtgggggcacggtgcgaacacgcggatcttctcgctgtcgtcgccgcttcccagaagaagcaggcaatcaccgcccttgtagtcgtcagtatagtggcccttgccgtacttataattacttgcgtgttaattcattgttgtcaggttaggaaacactgtgagtggtgccgggcactgatctgtaggcacgagaagccttcggctctcctgaaagggagaacagcttgttgccacagcgaaactgtagtatag

SEQ ID NO: 39904 - DNA, 1225 bp, Artificial Sequence
  derived and/or modified sequence
actcgggcaccgcaggtagggcaggaggctggagagcctgctgcccgcccgcccgtaaaatggtcccctcggctggacagctcgccctgttcgctctgggtattgtgttggctgcgtgccaggccttggagaacagcacgtccccgctgagtgacccgcccgtggctgcagcagtggtgtcccattttaatgactgcccagattcccacactcagttctgcttccatggaacctgcaggtttttggtgcaggaggacaagccagcatgtgtctgccattctgggtacgttggtgcacgctgtgagcatgcggacctcctggccgtggtggctgccagccagaagaagcaggccatcaccgccttggtggtggtctccatcgtggccctggctgtccttatcatcacatgtgtgctgatacactgctgccaggtccgaaaacactgtgagtggtgccgggccctcatctgccggcacgagaagcccagcgccctcctgaagggaagaaccgcttgctgccactcagaaacagtggtctgaagagcccagaggaggagtttggccaggtggactgtggcagatcaataaagaaaggcttcttcaggacagcactgccagagatgcctgggtgtgccacagaccttcctacttggcctgtaatcacctgtgcagccttttgtgggccttcaaaactctgtcaagaactccgtctgcttggggttattcagtgtgacctagagaagaaatcagcggaccacgatttcaagacttgttaaaaaagaactgcaaagagacggactcctgttcacctaggtgaggtgtgtgcagcagttggtgtctgagtccacatgtgtgcagttgtcttctgccagccatggattccaggctatatatttctttttaatgggccacctccccacaacagaattctgcccaacacaggagatttctatagttattgttttctgtcatttgcctactggggaagaaagtgaaggaggggaaactgtttaatatcacatgaagaccctagctttaagagaagctgtatcctctaaccacgagaccctcaaccagcccaacatcttccatggacacatgacattgaagaccatcccaagctatcgccacccttggagatgatgtcttatttattagatggataatggttttatttttaatctcttaagtcaatgtaaaaagtataaaaccccttcagacttcta

SEQ ID NO: 39905 - DNA, 4323 bp, Artificial Sequence
  derived and/or modified sequence
gtcagctgtgccccggtcgccgagtggcgaggaggtgacggtagccgccttcctatttccgcccggcgggcagcgctgcggggcgagtgccagcagagaggcgctcggtcctccctccgccctcccgcgccgggggcaggccctgcctagtctgcgtctttttcccccgcaccgcggcgccgctccgccactcgggcaccgcaggtagggcaggaggctggagagcctgctgcccgcccgcccgtaaaatggtcccctcggctggacagctcgccctgttcgctctgggtattgtgttggctgcgtgccaggccttggagaacagcacgtccccgctgagtgacccgcccgtggctgcagcagtggtgtcccattttaatgactgcccagattcccacactcagttctgcttccatggaacctgcaggtttttggtgcaggaggacaagccagcatgtgtctgccattctgggtacgttggtgcacgctgtgagcatgcggacctcctggccgtggtggctgccagccagaagaagcaggccatcaccgccttggtggtggtctccatcgtggccctggctgtccttatcatcacatgtgtgctgatacactgctgccaggtccgaaaacactgtgagtggtgccgggccctcatctgccggcacgagaagcccagcgccctcctgaagggaagaaccgcttgctgccactcagaaacagtggtctgaagagcccagaggaggagtttggccaggtggactgtggcagatcaataaagaaaggcttcttcaggacagcactgccagagatgcctgggtgtgccacagaccttcctacttggcctgtaatcacctgtgcagccttttgtgggccttcaaaactctgtcaagaactccgtctgcttggggttattcagtgtgacctagagaagaaatcagcggaccacgatttcaagacttgttaaaaaagaactgcaaagagacggactcctgttcacctaggtgaggtgtgtgcagcagttggtgtctgagtccacatgtgtgcagttgtcttctgccagccatggattccaggctatatatttctttttaatgggccacctccccacaacagaattctgcccaacacaggagatttctatagttattgttttctgtcatttgcctactggggaagaaagtgaaggaggggaaactgtttaatatcacatgaagaccctagctttaagagaagctgtatcctctaaccacgagaccctcaaccagcccaacatcttccatggacacatgacattgaagaccatcccaagctatcgccacccttggagatgatgtcttatttattagatggataatggttttatttttaatctcttaagtcaatgtaaaaagtataaaaccccttcagacttctacattaatgatgtatgtgttgctgactgaaaagctatactgattagaaatgtctggcctcttcaagacagctaaggcttgggaaaagtcttccagggtgcggagatggaaccagaggctgggttactggtaggaataaaggtaggggttcagaaatggtgccattgaagccacaaagccggtaaatgcctcaatacgttctgggagaaaacttagcaaatccatcagcagggatctgtcccctctgttggggagagaggaagagtgtgtgtgtctacacaggataaacccaatacatattgtactgctcagtgattaaatgggttcacttcctcgtgagccctcggtaagtatgtttagaaatagaacattagccacgagccataggcatttcaggccaaatccatgaaagggggaccagtcatttattttccattttgttgcttggttggtttgttgctttatttttaaaaggagaagtttaactttgctatttattttcgagcactaggaaaactattccagtaatttttttttcctcatttccattcaggatgccggctttattaacaaaaactctaacaagtcacctccactatgtgggtcttcctttcccctcaagagaaggagcaattgttcccctgagcatctgggtccatctgacccatggggcctgcctgtgagaaacagtgggtcccttcaaatacatagtggatagctcatccctaggaattttcattaaaatttggaaacagagtaatgaagaaataatatataaactccttatgtgaggaaatgctactaatatctgaaaagtgaaagatttctatgtattaactcttaagtgcacctagcttattacatcgtgaaaggtacatttaaaatatgttaaattggcttgaaattttcagagaattttgtcttcccctaattcttcttccttggtctggaagaacaatttctatgaattttctctttatttttttttataattcagacaattctatgacccgtgtcttcatttttggcactcttatttaacaatgccacacctgaagcacttggatctgttcagagctgaccccctagcaacgtagttgacacagctccaggtttttaaattactaaaataagttcaagtttacatcccttgggccagatatgtgggttgaggcttgactgtagcatcctgcttagagaccaatcaacggacactggtttttagacctctatcaatcagtagttagcatccaagagactttgcagaggcgtaggaatgaggctggacagatggcggaagcagaggttccctgcgaagacttgagatttagtgtctgtgaatgttctagttcctaggtccagcaagtcacacctgccagtgccctcatccttatgcctgtaacacacatgcagtgagaggcctcacatatacgcctccctagaagtgccttccaagtcagtcctttggaaaccagcaggtctgaaaaagaggctgcatcaatgcaagcctggttggaccattgtccatgcctcaggatagaacagcctggcttatttggggatttttcttctagaaatcaaatgactgataagcattggatccctctgccatttaatggcaatggtagtctttggttagctgcaaaaatactccatttcaagttaaaaatgcatcttctaatccatctctgcaagctccctgtgtttccttgccctttagaaaatgaattgttcactacaattagagaatcatttaacatcctgacctggtaagctgccacacacctggcagtggggagcatcgctgtttccaatggctcaggagacaatgaaaagcccccatttaaaaaaataacaaacattttttaaaaggcctccaatactcttatggagcctggatttttcccactgctctacaggctgtgactttttttaagcatcctgacaggaaatgttttcttctacatggaaagatagacagcagccaaccctgatctggaagacagggccccggctggacacacgtggaaccaagccagggatgggctggccattgtgtccccgcaggagagatgggcagaatggccctagagttcttttccctgagaaaggagaaaaagatgggattgccactcacccacccacactggtaagggaggagaatttgtgcttctggagcttctcaagggattgtgttttgcaggtacagaaaactgcctgttatcttcaagccaggttttcgagggcacatgggtcaccagttgctttttcagtcaatttggccgggatggactaatgaggctctaacactgctcaggagacccctgccctctagttggttctgggctttgatctcttccaacctgcccagtcacagaaggaggaatgactcaaatgcccaaaaccaagaacacattgcagaagtaagacaaacatgtatatttttaaatgttctaacataagacctgttctctctagccattgatttaccaggctttctgaaagatctagtggttcacacagagagagagagagtactgaaaaagcaactcctcttcttagtcttaataatttactaaaatggtcaacttttcattatctttattataataaacctgatgcttttttttagaactccttactctgatgtctgtatatgttgcactgaaaaggttaatatttaatgttttaatttattttgtgtggtaagttaattttgatttctgtaatgtgttaatgtgattagcagttattttccttaatatctgaattatacttaaagagtagtgagcaatataagacgcaattgtgtttttcagtaatgtgcattgttattgagttgtactgtaccttatttggaaggatgaaggaatgaatctttttttcctaaatcaaaaaaaaaaaaaaaaaa

SEQ ID NO: 39906 - protein, 121 aa, Artificial Sequence
  derived and/or modified sequence
MAPAKKGGEKKKGRSAINEVVTREYTINIHKRIHGVGFKKRAPRALKEIRKFAMKEMGTPDVRIDTRLNKAVWAKGIRNVPYRIRVRLSRKRNEDEDSPNKLYTLVTYVPVTTFKSKFSIP

SEQ ID NO: 39907 - DNA, 366 bp, Artificial Sequence
  derived and/or modified sequence
atggcccccgccaagaagggcggcgagaagaagaagggcagaagcgccatcaacgaggtggtgaccagagagtacaccatcaacatccacaagagaatccacggcgtgggcttcaagaagagagcccccagagccctgaaggagatcagaaagttcgccatgaaggagatgggcacccccgacgtgagaatcgacaccagactgaacaaggccgtgtgggccaagggcatcagaaacgtgccctacagaatcagagtgagactgagcagaaagagaaacgaggacgaggacagccccaacaagctgtacaccctggtgacctacgtgcccgtgaccaccttcaagagcaagttcagcatcccctag

SEQ ID NO: 39908 - DNA, 348 bp, Artificial Sequence
  derived and/or modified sequence
atggcccccgccaagaagggcggcgagaagaagaagggcagaagcgccatcaacgaggtggtgaccagagagtacaccatcaacatccacaagagaatccacggcgtgggcttcaagaagagagcccccagagccctgaaggagatcagaaagttcgccatgaaggagatgggcacccccgacgtgagaatcgacaccagactgaacaaggccgtgtgggccaagggcatcagaaacgtgccctacagaatcagagtgagactgagcagaaagagaaacgaggacgaggacagccccaacaagctgtacaccctggtgacctacgtgcccgtgaccaccttcaagtag

SEQ ID NO: 39909 - DNA, 366 bp, Artificial Sequence
  derived and/or modified sequence
atggcaccagccaagaagggaggcgagaaaaaaaagggacggtccgctatcaacgaggtcgtgacgcgcgagtataccataaacattcacaaaagaatccacggagtcggtttcaagaagagggctcccagggccctcaaggaaattcgcaagttcgcgatgaaggagatggggacccccgatgttcgcatcgacactcgcctcaataaggctgtttgggccaaaggaatcagaaatgtgccttatcggatacgagtgagattgagtcgaaagcggaacgaagatgaagacagtccaaacaagttgtataccctggtgacatatgtaccagtgaccaccttcaaatcaaaattctcgattccttag

SEQ ID NO: 39910 - DNA, 348 bp, Artificial Sequence
  derived and/or modified sequence
atggccccagctaagaagggtggagagaagaagaagggccgtagcgccattaacgaagtagtcaccagagaatataccatcaatatacataagcggatacacggagttgggtttaagaagagggccccgcgtgcactcaaagagatacgcaagttcgctatgaaggagatgggcactcccgatgtgcggatagacactagactcaataaagctgtttgggctaaaggtatccgaaacgttccctaccgcattagagtgcggttgtccagaaaacgaaatgaagatgaggactcacccaacaagctgtacactctcgttacctatgtccctgtgacaacatttaagtag

SEQ ID NO: 39911 - DNA, 366 bp, Artificial Sequence
  derived and/or modified sequence
atggccccagccaagaagggcggggagaagaagaagggccgcagcgccatcaatgaggtggtgacccgggagtacaccatcaacatccacaagaggatccacggcgtgggcttcaagaagagggccccccgggccctgaaggagatcaggaagtttgccatgaaggagatgggcaccccagatgtgagaattgacacccggctgaacaaggctgtgtgggccaagggcatcagaaatgtgccctaccgcatccgggtgcggctgagcaggaagagaaatgaagatgaggacagccccaacaagctgtacaccctggtgacctacgtgcctgtgaccaccttcaagagcaagttcagcatcccctag

SEQ ID NO: 39912 - DNA, 348 bp, Artificial Sequence
  derived and/or modified sequence
atggccccagccaagaagggcggggagaagaagaagggccgcagcgccatcaatgaggtggtgacccgggagtacaccatcaacatccacaagaggatccacggcgtgggcttcaagaagagggccccccgggccctgaaggagatcaggaagtttgccatgaaggagatgggcaccccagatgtgagaattgacacccggctgaacaaggctgtgtgggccaagggcatcagaaatgtgccctaccgcatccgggtgcggctgagcaggaagagaaatgaagatgaggacagccccaacaagctgtacaccctggtgacctacgtgcctgtgaccaccttcaagtag

SEQ ID NO: 39913 - DNA, 366 bp, Artificial Sequence
  derived and/or modified sequence
atggcccccgccaagaagggcggcgagaagaagaagggccggagcgcgattaacgaagttgtaacacgcgagtataccatcaatatccataaaaggatccacggtgtgggatttaagaaacgcgctccacgcgcgctgaaggagatacggaagtttgccatgaaagaaatgggaacccccgacgtgaggattgacactcgactcaataaagccgtgtgggcgaagggaatcaggaacgtcccttataggatacgagtgagactgtcgaggaagaggaacgaagacgaagactctcctaacaagctctacaccttggtcacctacgtccccgtgactacctttaagagcaagttttccataccctag

SEQ ID NO: 39914 - DNA, 348 bp, Artificial Sequence
  derived and/or modified sequence
atggcccccgccaagaagggcggcgagaagaagaagggccggagcgcaattaacgaagttgtaaccagagagtatactattaacatccataagagaattcacggggtgggctttaagaaacgtgctcccagagccttaaaggagatccggaagtttgccatgaaggagatgggcacccctgatgtgcgcattgacaccagactgaacaaggctgtgtgggccaaaggaattcgaaatgttccatacaggatccgtgtgcgcctgtctagaaagcgcaacgaggatgaggatagccccaataaactctacaccctggtgacttacgtacctgttaccacgttcaagtag

SEQ ID NO: 39915 - DNA, 716 bp, Artificial Sequence
  derived and/or modified sequence
ctttccaacttggacgctgcagaatggctcccgcaaagaagggtggcgagaagaaaaagggccgttctgccatcaacgaagtggtaacccgagaatacaccatcaacattcacaagcgcatccatggagtgggcttcaagaagcgtgcacctcgggcactcaaagagattcggaaatttgccatgaaggagatgggaactccagatgtgcgcattgacaccaggctcaacaaagctgtctgggccaaaggaataaggaatgtgccataccgaatccgtgtgcggctgtccagaaaacgtaatgaggatgaagattcaccaaataagctatatactttggttacctatgtacctgttaccactttcaaaagtaagttctccatcccataaagccatttaaattcattagaaaaatgtccttacctcttaaaatgtgaattcatctgttaagctaggggtgacacacgtcattgtaccctttttaaattgttggtgtgggaagatgctaaagaatgcaaaactgatccatatctgggatgtaaaaaggttgtggaaaatagaatgcccagacccgtctacaaaaggtttttagagttgaaatatgaaatgtgatgtgggtatggaaattgactgttacttcctttacagatctacagacagtcaatgtggatgagaactaatcgctgatcgtcagatcaaataaagttataaaattgc

SEQ ID NO: 39916 - DNA, 366 bp, Artificial Sequence
  derived and/or modified sequence
atggcacccgctaagaaaggcggagagaagaagaaaggcagatctgccattaacgaggtggtaacgcgggaatacacaataaatattcataagcgaattcacggagtcggttttaagaaacgagctcccagggctctgaaagagatcagaaaatttgcaatgaaagagatggggactcctgacgttcgaatagatacaagactgaataaagccgtgtgggccaagggaattcggaacgtaccgtacaggatccgagtgagactgtcaagaaaaaggaatgaggacgaggactctcccaacaagctatatactctcgtgacctacgtgccagttactacatttaagtccaagttttccattccttag

SEQ ID NO: 39917 - DNA, 348 bp, Artificial Sequence
  derived and/or modified sequence
atggcgccagcgaaaaaggggggtgagaagaaaaagggtagaagcgccatcaacgaagtggtcacaagagaatacactattaacatccataagcgcattcacggggtgggttttaagaaaagggcgccaagagccctgaaggaaattcgtaaattcgccatgaaggagatgggcacccctgacgttcggatagacaccaggctgaacaaagcggtgtgggctaaagggattcggaatgtgccgtaccggattcgggtgaggctgagcagaaagcgaaacgaggatgaggattctcccaacaaactttatacgcttgtgacttatgttcctgtgactactttcaagtag

SEQ ID NO: 39918 - DNA, 357 bp, Artificial Sequence
  derived and/or modified sequence
cctgcatttagatggctcccgcaaagaagggtggcgagaagaaaaagggccgttctgccatcaacgaagtggtaacccgagaatacaccatcaacattcacaagcgcatccatggagtgggcttcaagaagcgtgcacctcgggcactcaaagagattcggaaatttgccatgaaggagatgggaactccagatgtgcgcattgacaccaggctcaacaaagctgtctgggccaaaggaataaggaatgtgccataccgaatccgtgtgcggctgtccagaaaacgtaatgaggatgaagattcaccaaataagctatatactttggttacctatgtacctgttaccactttcaaaa

SEQ ID NO: 39919 - DNA, 531 bp, Artificial Sequence
  derived and/or modified sequence
atgaccatgtgctcaggagcccgactagccctgctcgtatatggcatcattatgcatagtagtgtctactcctcacccgccgctgctggccttagatttcccggaattaggccagaagaggaagcttacggtgaggacgggaacccactgcccgattttgatggaagcgaaccacctggcgcaggctcccccgcctctgcaccaagagccgccgccgcgtggtaccgtccagcgggtcgaagggatgtggcccacgggatcctgaacgaagcctacagaaaggtcttggaccaactgtctgcgggaaaacacctgcagagcctcgtagctcggggggttggggggtccttgggggggggggctggagacgatgccgaacctctgtccaagcgccatagcgacggcatcttcaccgatagctacagccggtataggaagcagatggctgtgaaaaagtacctggccgcggttctggggaaacgttataagcagcgtgttaagaataaaggacggcgaattgcctacctttag

SEQ ID NO: 39920 - DNA, 531 bp, Artificial Sequence
  derived and/or modified sequence
atgacaatgtgttccggtgcccgcctcgcactgctggtgtacgggatcattatgcattcatctgtatattcttctccagctgccgccgggctcagatttccgggcattcggccagaagaggaggcttatggcgaagacggcaatcccttgcctgacttcgatggctccgagccgcctggcgcaggttcaccagcctccgcccctagggcagctgcagcctggtacagaccggcaggaagaagggacgtggcccatggaatcctcaatgaagcatacagaaaagtcctggaccagctgtctgccgggaaacacctgcagtctctcgtggcccggggcgtggggggttcactgggcgggggagctggggatgacgcggaacccctctccaagaggcatagcgacggcatattcaccgatagttacagtaggtaccggaagcaaatggcagtgaagaagtacctcgcagccgtgctcggaaagcgctacaaacagagggtgaaaaacaagggacgcaggattgcttatttgtag

SEQ ID NO: 39921 - DNA, 531 bp, Artificial Sequence
  derived and/or modified sequence
atgactatgtgcagcggagccaggctcgcactgttggtgtacgggattattatgcactcctctgtgtacagctcgccggctgctgccggtctcagattccccggtattcggccggaagaagaggcatacggcgaagacggcaaccccctgccagattttgatggctctgagccccctggggctgggtcacctgcgtccgctcctcgggcagcagccgcctggtaccgccccgcagggcggcgagatgtagcacacggaattctcaatgaggcctataggaaggtgctggatcagttgtctgctggcaagcacctgcagagtctggttgccagaggcgtaggcggttctctgggcggcggtgctggagacgatgccgaaccgctatccaagcgccactccgatggaattttcactgactcctattcccggtacagaaagcagatggccgttaaaaagtacctcgccgccgtgctaggcaaacggtacaaacaaagggtgaagaataaggggcgaagaatagcttatctttag

SEQ ID NO: 39922 - DNA, 531 bp, Artificial Sequence
  derived and/or modified sequence
atgaccatgtgtagcggagcgaggctggccctgctggtctatgggataatcatgcacagcagcgtctacagctcacctgccgccgccggactccggttccccgggatcaggccagaggaagaggcgtacggcgaggacggaaacccgctgccagacttcgatggctcggagccgccgggcgcagggagccccgcctccgcgccgcgcgccgccgccgcctggtaccgcccggccgggagaagagatgtcgcccacgggatccttaacgaggcctaccgcaaagtgctggaccagctgtccgccgggaagcacctgcagtcgctcgtggcccggggcgtgggtgggagcctcggcggcggcgcgggggacgacgcggagccgctctccaagcgccactcggacgggatcttcacggacagctacagccgctaccggaaacaaatggctgtcaagaaatacttggcggccgtcctagggaagaggtataaacaaagggttaaaaacaaaggacgccgaatagcttatttgtag

SEQ ID NO: 39923 - DNA, 3206 bp, Artificial Sequence
  derived and/or modified sequence
ggtaagggagggaaaatcttaccaaagcgaccggctcactcgactgctgattctttcgcttggcatcgcgtcaggggagttagctttccttcagccgggtctggctagttattgggcgccgggtagatgcatatataaatgaccatgtgtagcggagcgaggctggccctgctggtctatgggataatcatgcacagcagcgtctacagctcacctgccgccgccggactccggttccccgggatcaggccagaggaagaggcgtacggcgaggacggaaacccgctgccagacttcgatggctcggagccgccgggcgcagggagccccgcctccgcgccgcgcgccgccgccgcctggtaccgcccggccgggagaagagatgtcgcccacgggatccttaacgaggcctaccgcaaagtgctggaccagctgtccgccgggaagcacctgcagtcgctcgtggcccggggcgtgggtgggagcctcggcggcggcgcgggggacgacgcggagccgctctccaagcgccactcggacgggatcttcacggacagctacagccgctaccggaaacaaatggctgtcaagaaatacttggcggccgtcctagggaagaggtataaacaaagggttaaaaacaaaggacgccgaatagcttatttgtagcgatgggttaccagctaccctgtgtatacagccctgacgcaatgaaaagtcgttttccaaactgactcaacagtcatcgctcgtgtgttctatccaaacatgtatttatgtaatgaagtaaagccattaaatgaatattttgataataatattgtttttctttctacaaagcactagagaatgcacagatatactttgtggaccaattattgatatatattataaatatatataaagaatatatatatatatatatatatatatatatataaagtatagagagaagttcatacaaagcgtgcacaaggattgaaaattcgcccgagctgtttatgtttttataaaaataaatagaaaagtagacaatcattgttttgaatattactcctatttttgtaaactggaattaaaaggatagtatttttatccatgacaggcctgaagatattactacttaccatttgctactgtacataaacaatgatgccctgctccagggagattttgaggtaaagatatggagaattgctgaagggcattctttcccagtgagtctctggggcaggctgcttcaatcccagcctaactcaactgggctctgtccccctggttgggtggcaattccaatatttctgctttctttgattctccttttatgtgtagttgtctctcttcagactctcagcccagaagaaaattctcctgataaaacaacagctcgatccaaattgtgcttctccccagaattcacgcctctccctaggagaagagttgaggaactgtacagaaaagggcggcttcgttagaccgctctcttttctgtacttcctgagtggccagggaatctaatatccccaaattagggcaattggaacaaagtgaaggacatagaggtatattggaagaggcagagcctgaggtggtaggaggaggaccctggaaatggactggtttgagattgccccaggtctgggaagctgagggcaaatccagtcccaatggtcctgactttgggcgctgggtattggaaatggatgcaaagtacaatgtgtttttctccagtgctgtccatgcttctcatcttgtgaaatggccaggatcctctcctttgaaacctgctctgtaggagctacccttttcctttgtggttttatggagacctctccttcctaccctcctgcactgtttaagtactgtttaccatttttcattcacttctcttaaacttgtgaatgcttctcactttttttttttgtttgatgcaggcacttattgtaaattttagaaacccctctgtagccactagtaagtaattatgcactaaatatgaaccctttgtttcttgtttattgagtttgtaggtaaaatgtatttttctacattattgcttattgcttagtaaaatttatttcataaaaccaacctttgtcatattagaatgtgtagtgttcacatgttgctcagttttgctaactgataaatcatttaatcctcttcttcatatgtatgagtactatcttatatctgtggtcaagagtgaggtaagcaagctccaacagaccctgagaacctacgcttgtatcctttctttggctaaagaaagcatgtctgtttcctgtcaattctttgaacatacagagtaatctttataaacaaaagaaccttcacccagcaatcagatcgagcagcaacagacaaaccagccagccaatctcccaaatttcaggcacaagtttatttatttatttttttatgttttgaaaaaagaagatgaagaagaagaaaaaaaaaagaacaaggaaagattaaacgttagcttgtaaagtttaaaggacctttccttttcctttacggatttgatcagtatgaagtcataaatcaaagaaaacagaattggatttgcattcccaggcgggatggatgctgccaggagatcacattgcaaatagtgaaaacagaggcattcggtctatgcctgagtcctgtgtataggatcaatcttcctttaattccgcagtctcctcaggcaatgtgacacgggatgcagtttgcagctttagtgcctttcttcgccttttaaattgccacgaatcacagatggctatttagtggccctacaatgctgcaacacatcagcttgcattttagtcttaattatttgtttcttggataatgggcagagttttctgtatttgtatcagctgttagtggtgaaatagggctctagttaaccttttatttatgaagtctaatttagtgttcccgtggctagttgcaagcattttacagtgatcacccagtttaatcttttgtatactttttagaaatgccaagagccttactaaactgaagcagatttatgatatagtgataatttaggtagatgttagtcttgaagctcttattttgtgtgcaactgattataaaaacaccttaaccaagtattattacacacatgatatctataactaggactttgataactgttatataaagtgtgtaaaatttgtatgaataaatttttgtaaacaatgcaa

SEQ ID NO: 39924 - DNA, 3346 bp, Artificial Sequence
  derived and/or modified sequence
attctttcgcttggcatcgcgtcaggggagttagctttccttcagccgggtctggctagttattgggcgccgggtagatgcatatatatatatttttttctaactatagcaagcaagaagtggcagggcgcgcaccggctgtcgccaagtgctgttcaactcagggagccggggcttcgctccgtccctcccccggcttccagagctttttggggttggagggtgggaggccaggggcgttctcacagctgtgtgtcctctttcccatcctgcgcagaatgaccatgtgtagcggagcgaggctggccctgctggtctatgggataatcatgcacagcagcgtctacagctcacctgccgccgccggactccggttccccgggatcaggccagaggaagaggcgtacggcgaggacggaaacccgctgccagacttcgatggctcggagccgccgggcgcagggagccccgcctccgcgccgcgcgccgccgccgcctggtaccgcccggccgggagaagagatgtcgcccacgggatccttaacgaggcctaccgcaaagtgctggaccagctgtccgccgggaagcacctgcagtcgctcgtggcccggggcgtgggtgggagcctcggcggcggcgcgggggacgacgcggagccgctctccaagcgccactcggacgggatcttcacggacagctacagccgctaccggaaacaaatggctgtcaagaaatacttggcggccgtcctagggaagaggtataaacaaagggttaaaaacaaaggacgccgaatagcttatttgtagcgatgggttaccagctaccctgtgtatacagccctgacgcaatgaaaagtcgttttccaaactgactcaacagtcatcgctcgtgtgttctatccaaacatgtatttatgtaatgaagtaaagccattaaatgaatattttgataataatattgtttttctttctacaaagcactagagaatgcacagatatactttgtggaccaattattgatatatattataaatatatataaagaatatatatatatatatatatatatatatatataaagtatagagagaagttcatacaaagcgtgcacaaggattgaaaattcgcccgagctgtttatgtttttataaaaataaatagaaaagtagacaatcattgttttgaatattactcctatttttgtaaactggaattaaaaggatagtatttttatccatgacaggcctgaagatattactacttaccatttgctactgtacataaacaatgatgccctgctccagggagattttgaggtaaagatatggagaattgctgaagggcattctttcccagtgagtctctggggcaggctgcttcaatcccagcctaactcaactgggctctgtccccctggttgggtggcaattccaatatttctgctttctttgattctccttttatgtgtagttgtctctcttcagactctcagcccagaagaaaattctcctgataaaacaacagctcgatccaaattgtgcttctccccagaattcacgcctctccctaggagaagagttgaggaactgtacagaaaagggcggcttcgttagaccgctctcttttctgtacttcctgagtggccagggaatctaatatccccaaattagggcaattggaacaaagtgaaggacatagaggtatattggaagaggcagagcctgaggtggtaggaggaggaccctggaaatggactggtttgagattgccccaggtctgggaagctgagggcaaatccagtcccaatggtcctgactttgggcgctgggtattggaaatggatgcaaagtacaatgtgtttttctccagtgctgtccatgcttctcatcttgtgaaatggccaggatcctctcctttgaaacctgctctgtaggagctacccttttcctttgtggttttatggagacctctccttcctaccctcctgcactgtttaagtactgtttaccatttttcattcacttctcttaaacttgtgaatgcttctcactttttttttttgtttgatgcaggcacttattgtaaattttagaaacccctctgtagccactagtaagtaattatgcactaaatatgaaccctttgtttcttgtttattgagtttgtaggtaaaatgtatttttctacattattgcttattgcttagtaaaatttatttcataaaaccaacctttgtcatattagaatgtgtagtgttcacatgttgctcagttttgctaactgataaatcatttaatcctcttcttcatatgtatgagtactatcttatatctgtggtcaagagtgaggtaagcaagctccaacagaccctgagaacctacgcttgtatcctttctttggctaaagaaagcatgtctgtttcctgtcaattctttgaacatacagagtaatctttataaacaaaagaaccttcacccagcaatcagatcgagcagcaacagacaaaccagccagccaatctcccaaatttcaggcacaagtttatttatttatttttttatgttttgaaaaaagaagatgaagaagaagaaaaaaaaaagaacaaggaaagattaaacgttagcttgtaaagtttaaaggacctttccttttcctttacggatttgatcagtatgaagtcataaatcaaagaaaacagaattggatttgcattcccaggcgggatggatgctgccaggagatcacattgcaaatagtgaaaacagaggcattcggtctatgcctgagtcctgtgtataggatcaatcttcctttaattccgcagtctcctcaggcaatgtgacacgggatgcagtttgcagctttagtgcctttcttcgccttttaaattgccacgaatcacagatggctatttagtggccctacaatgctgcaacacatcagcttgcattttagtcttaattatttgtttcttggataatgggcagagttttctgtatttgtatcagctgttagtggtgaaatagggctctagttaaccttttatttatgaagtctaatttagtgttcccgtggctagttgcaagcattttacagtgatcacccagtttaatcttttgtatactttttagaaatgccaagagccttactaaactgaagcagatttatgatatagtgataatttaggtagatgttagtcttgaagctcttattttgtgtgcaactgattataaaaacaccttaaccaagtattattacacacatgatatctataactaggactttgataactgttatataaagtgtgtaaaatttgtatgaataaatttttgtaaacaatgcaa

SEQ ID NO: 39925 - DNA, 531 bp, Artificial Sequence
  derived and/or modified sequence
atgaccatgtgcagcggggcccggctggccctgctggtgtatggcatcatcatgcacagctctgtgtacagcagccctgctgctgctggcctgcgcttccctggcatccggcctgaggaggaggcctatggagaagatggcaaccccctgcctgactttgatggcagcgagcccccaggagctggcagccctgccagcgcccccagggctgctgctgcctggtacagacctgctggaagaagagatgtggcccacggcatcctgaatgaggcctacaggaaggtgctggaccagctgtctgctgggaagcacctgcagagcctggtggcccggggcgtgggcggcagcctgggcggcggcgctggagatgatgctgagcccctgagcaagaggcacagtgatggcatcttcacagacagctacagccgctacaggaagcagatggctgtgaagaagtacctggccgctgtgctgggcaagcgctacaagcagagggtgaagaacaagggcagaagaattgcctacctgtag

SEQ ID NO: 39926 - DNA, 531 bp, Artificial Sequence
  derived and/or modified sequence
atgaccatgtgcagcggcgcccggctggccctgctggtgtacggcataattatgcattcctctgtctactccagtcccgccgccgccggactgcgtttcccgggaatccgccccgaggaagaagcctatggagaagatggaaaccctctaccagatttcgatgggtccgagccccccggagccggctctccagcctccgctcctcgagccgctgcagcctggtaccggcccgcaggccgccgtgatgtggcccatggcattctgaatgaggcatatagaaaagtgttagatcagctttctgctggcaagcacctgcaaagcctagtagcaaggggcgtgggaggttcccttggcgggggggcaggggatgatgctgagccactgtctaaacgccactctgacggtattttcacggattcttactctaggtacaggaaacagatggccgtgaagaaataccttgctgccgtgcttggtaaacgctataagcagagggtgaagaacaagggacgccgcattgcctacctctag

SEQ ID NO: 39927 - DNA, 531 bp, Artificial Sequence
  derived and/or modified sequence
atgaccatgtgcagcggcgcccggctggccctgctggtgtacggcatcatcatgcactcctcagtctattccagtcccgccgccgccggcttgagatttcccggtatccgcccagaggaagaggcttatggtgaggatggcaacccattgccagatttcgacggctccgagccaccgggggccggatcacccgcctccgctccacgagcggcagctgcttggtacagaccagcaggccggcgtgacgtggcacacggcattttaaatgaggcgtaccggaaggtactggaccaattaagtgccggcaagcacctccagtctctggtagcccgcggagtgggcggatctctaggcggtggcgcgggagacgacgcagagcccctttccaagcggcacagcgacggcattttcacagattcctatagccgctacagaaagcaaatggccgtcaaaaagtacctcgccgcagtgctgggtaagagatacaagcagagagtgaagaataagggccgtagaattgcctacctttag

SEQ ID NO: 39928 - DNA, 531 bp, Artificial Sequence
  derived and/or modified sequence
atgaccatgtgcagcggcgcccggctggccctgctggtgtacggcatcataatgcactccagtgtgtattcatcacccgccgctgctggcctacggttccccggcattcggcccgaggaggaggcgtacggcgaggacggtaacccactgcccgattttgacggcagcgagccaccgggggctgggtctcccgccagcgcccccagagctgccgctgcttggtataggcctgcaggccgccgtgatgtggcccatggtatccttaacgaggcatatagaaaagtcctggaccagttgtccgctggcaagcatctgcaatccctggtggctcgcggcgtgggggggagtctggggggcggcgcaggggatgacgctgagcccctctcaaaaaggcattcagacgggatcttcacagacagctattcgagatacagaaagcagatggcagtaaaaaaatatctcgcagccgtcctcggcaagaggtataagcaacgggtgaaaaataagggacggagaatagcttatctatag

SEQ ID NO: 39929 - DNA, 531 bp, Artificial Sequence
  derived and/or modified sequence
atgacaatgtgctcaggtgcacggctggccctgctggtatatggcatcatcatgcatagcagtgtatactcaagtcccgcagccgctggactacggttccctggcattcgcccagaagaagaagcctacggagaggacggtaatccccttcctgactttgacggctctgaaccgcctggcgctggatcgcctgcgtccgcacccagggcagcagctgcctggtaccggcctgcgggtagacgcgacgtagcccatgggatattgaatgaggcatatcgcaaggtgctcgatcagctctccgcgggtaaacacctgcaatcactcgtggcgaggggagtgggcggatcactggggggaggcgcaggagacgacgccgagccgctgagcaagaggcactctgatggcatctttaccgatagttatagtcggtacaggaaacagatggcagttaaaaagtacctggcggcagtattagggaaaagatataagcaacgggtgaagaataagggcaggagaattgcctacttgtag

SEQ ID NO: 39930 - DNA, 531 bp, Artificial Sequence
  derived and/or modified sequence
atgaccatgtgttcgggcgcacgcctggctctactagtgtatgggatcattatgcactcctcagtgtattctagccctgcagcagccggtctgcggtttcccggaatccggcctgaagaggaagcctatggagaagacggcaacccactgcccgactttgatggctcggaaccgcctggagccggatcacccgcttccgcccctcgagccgctgcagcgtggtacagacctgctggacgtagagacgttgcgcatggaattctgaacgaggcctaccgtaaagtgctggatcagctgagcgccggtaaacatctccagtctctggtggctcggggagtcggtggcagcctaggcggaggggctggcgacgacgccgagcccctcagcaagcgccattcagacgggatttttaccgactcgtactctcgatatcgcaaacaaatggctgtgaagaaatacctcgccgcagttcttgggaagagatacaaacaacgggtgaaaaacaaaggtaggagaatcgcctacctgtag

SEQ ID NO: 39931 - DNA, 531 bp, Artificial Sequence
  derived and/or modified sequence
atgaccatgtgctctggggctagactcgccctgctcgtttacggcatcataatgcactccagtgtgtacagcagcccagccgcagccggacttaggtttccagggataaggcccgaggaggaggcatacggggaagatggaaacccactacctgactttgacggctcagagccacccggtgctggatctcccgcttctgctccccgagccgctgcagcgtggtatcgccctgccggtcggagagacgtggctcacgggatcctcaacgaagcttacaggaaggtcctagatcagctgtcagctggcaagcatctccaaagtcttgtcgcccgtggggttggtggctccctcgggggtggtgccggagatgacgcagaaccactgtctaaacgtcactccgacggaatatttaccgattcttactcaagataccgaaaacagatggccgttaaaaaatatctggccgcagtactaggcaagagatacaagcagcgcgtcaagaacaaaggtagacggattgcttacctgtag

SEQ ID NO: 39932 - DNA, 531 bp, Artificial Sequence
  derived and/or modified sequence
atgaccatgtgcagcggcgccagactggccctgctggtgtacggcatcatcatgcacagcagcgtgtacagcagccccgccgccgccggcctgagattccccggcatcagacccgaggaggaggcctacggcgaggacggcaaccccctgcccgacttcgacggcagcgagccccccggcgccggcagccccgccagcgcccccagagccgccgccgcctggtacagacccgccggcagaagagacgtggcccacggcatcctgaacgaggcctacagaaaggtgctggaccagctgagcgccggcaagcacctgcagagcctggtggccagaggcgtgggcggcagcctgggcggcggcgccggcgacgacgccgagcccctgagcaagagacacagcgacggcatcttcaccgacagctacagcagatacagaaagcagatggccgtgaagaagtacctggccgccgtgctgggcaagagatacaagcagagagtgaagaacaagggcagaagaatcgcctacctgtag

SEQ ID NO: 39933 - protein, 419 aa, Artificial Sequence
  derived and/or modified sequence
MASIFSKLLTGRNASLLFATMGTSVLTTGYLLNRQKVCAEVREQPRLFPPSADYPDLRKHNNCMAECLTPAIYAKLRNKVTPNGYTLDQCIQTGVDNPGHPFIKTVGMVAGDEESYEVFADLFDPVIKLRHNGYDPRVMKHTTDLDASKITQGQFDEHYVLSSRVRTGRSIRGLSLPPACTRAERREVENVAITALEGLKGDLAGRYYKLSEMTEQDQQRLIDDHFLFDKPVSPLLTCAGMARDWPDARGIWHNYDKTFLIWINEEDHTRVISMEKGGNMKRVFERFCRGLKEVERLIQERGWEFMWNERLGYILTCPSNLGTGLRAGVHVRIPKLSKDPRFSKILENLRLQKRGTGGVDTAAVADVYDISNIDRIGRSEVELVQIVIDGVNYLVDCEKKLERGQDIKVPPPLPQFGKK

SEQ ID NO: 39934 - protein, 170 aa, Artificial Sequence
  derived and/or modified sequence
MASIFSKLLTGRNASLLFATMGTSVLTTGYLLNRQKVCAEVREQPRLFPPSADYPDLRKHNNCMAECLTPAIYAKLRNKVTPNGYTLDQCIQTGVDNPGHPFIKTVGMVAGDEESYEVFADLFDPVIKLRHNGYDPRVMKHTTDLDASKITQGQFDEHYVLSSRVRTGRS

SEQ ID NO: 39935 - DNA, 1260 bp, Artificial Sequence
  derived and/or modified sequence
atggcatccattttttccaagctattgaccggcaggaacgcaagtctgctttttgcaacgatgggcacttcagtgttgaccactggttacctgctgaacaggcaaaaggtgtgcgccgaggtaagggaacagcccagactgtttcctccgtctgctgattatccagaccttcgtaaacacaataactgtatggcagaatgcctgacacctgccatctacgccaaactgagaaacaaggtcactccaaacgggtacaccctggaccaatgcatccagacgggtgtagacaatcccggtcatccgttcataaagactgtaggaatggtggctggagacgaagagagttatgaagtgtttgcggatttgtttgaccctgttattaaactgcgtcataacggatacgacccccgcgtcatgaagcacaccaccgatctggacgccagtaaaattacacagggacagttcgatgagcattatgtgctgagctctcgcgtgaggaccggccggtcaatccgagggctgtctttgccccccgcgtgcacccgcgcggaaagacgggaggtcgagaatgtggccattacagcattggaagggctaaagggtgacctagctggaaggtactataaattgagcgaaatgacagagcaggatcagcagcgcctgatcgatgatcacttcctttttgacaagcccgtctcccccctgcttacctgtgctggcatggcacgggactggccagatgcccggggaatctggcacaactacgacaaaactttcttgatttggattaacgaggaagaccacacccgcgtgatcagcatggagaaaggtggtaatatgaaaagagtctttgagcggttctgtcgtgggttgaaggaggtggagcgcctaatacaggaacggggttgggagttcatgtggaacgagcggctcgggtacatcctgacatgcccgagtaacctgggtaccggactgcgcgccggtgtacatgtgagaatcccaaagctgtctaaggatcctcgattttccaaaatattagagaacctaagactccagaagagaggtacaggcggcgtcgatacagctgcagtagccgacgtgtatgacatctccaatatcgaccgcattgggagatcggaggtggagctggttcagatcgtgattgatggcgtgaattaccttgtcgactgtgaaaagaagctggagcggggacaagacatcaaggttcctccgccattaccccagtttggaaaaaagtag

SEQ ID NO: 39936 - DNA, 1260 bp, Artificial Sequence
  derived and/or modified sequence
atggcgtctatattctctaagctgctgaccggcagaaatgccagccttctattcgccactatgggcacctcggtcctcaccactgggtatctattgaacaggcagaaggtctgcgctgaggtgcgcgaacaaccacgtctctttcctccctcagccgactaccctgaccttagaaaacataacaactgcatggccgaatgccttactccagcaatttacgccaagcttcggaacaaagtgactcctaacggatataccttagaccagtgtattcaaaccggggtggacaacccagggcatccgttcatcaagacagtgggaatggtggctggtgacgaggagagctacgaggtgttcgccgacttattcgatccagtgataaagttgcgtcacaacggctacgacccaagagttatgaaacatacaacagacctcgacgcttccaaaatcacccagggccagtttgatgagcactacgtgctttctagccgggtacgtacgggtagaagtatcaggggtctgtctttgcccccggcttgtacgcgagccgagcgccgcgaagtggagaacgtggcaataaccgccctggaggggctcaagggagaccttgcaggacgctattacaaattgtctgagatgacagaacaggatcagcagcggctgattgacgaccactttctcttcgacaagcccgtttctcctctgctgacatgtgccggtatggcccgggactggccggacgcgcgaggaatctggcacaactacgacaagacttttttgatttggataaacgaagaagatcacacacgagtgatttcaatggagaagggcggcaatatgaaacgggttttcgagcggttctgcagaggactcaaggaagtcgagagactgatccaagaacggggatgggagtttatgtggaatgagaggttaggctacatcttgacttgcccctccaatttaggaacagggctgcgggccggcgtccacgttcgaatacccaagctcagtaaggacccaagattctccaaaattctggagaatctccggctgcagaaaaggggcaccggtggagtggatacggccgctgttgccgacgtgtacgacatttctaatatcgaccggatcggcaggtcggaggtcgagttagtccagatcgtgattgatggcgtcaactaccttgttgactgcgaaaagaaactcgagcggggacaagacattaaagttccaccccccctgccacagttcggcaaaaagtag

SEQ ID NO: 39937 - DNA, 1260 bp, Artificial Sequence
  derived and/or modified sequence
atggcctcaatcttctctaaattactaactggaaggaatgcaagtcttcttttcgccaccatggggacctccgtgctaaccaccggttacctgctcaatcggcagaaagtgtgcgcagaagtccgggaacagcccagactcttccccccttctgcagactacccagacctgcgaaaacacaataactgtatggcagagtgccttacacccgctatttatgccaagctgcggaacaaggtgacacctaacggatacactctggaccagtgtatccagactggggtggacaaccccgggcacccattcatcaaaactgtggggatggtggctggcgatgaggagtcttacgaagtgtttgcggacctgtttgatccagtaatcaagctgagacacaatggctatgacccccgggtgatgaaacacaccaccgatttagacgcctcaaagattactcagggacaattcgacgagcattacgtcctgagttcaagggtgaggaccggtcggagcatcaggggcttgtctctgccccccgcttgtacccgcgcagaacgtagggaggtggagaatgtggccattaccgcactggagggcctgaaaggtgacctggccggtcgatattataagcttagcgaaatgaccgagcaggaccaacaaaggctgatcgacgaccacttcttattcgacaagcccgtgtctcctctgcttacctgcgcgggcatggcccgggattggcctgatgcaagagggatctggcacaactacgataagaccttcctcatatggatcaatgaggaggaccacactcgcgtaattagtatggaaaagggagggaacatgaagcgtgtgttcgaacggttctgtcgcggtctcaaggaagtagagcgcctaatccaagaacgtgggtgggagttcatgtggaacgaaaggctgggatacatactaacttgtccctctaacctcggtactgggctgagggccggggtccacgtgagaatcccaaaactgagcaaagatccacgcttctcgaaaatcttagagaatctgcggctccagaagcggggaacgggaggagttgacaccgccgcggttgccgacgtgtatgatatctccaatatagaccgcattgggcgtagtgaagtggagttggtgcagattgtcattgatggcgttaattacttggtagactgtgagaagaagcttgaacggggccaggatattaaagtaccacctccgctgccccaatttggcaaaaaatag

SEQ ID NO: 39938 - DNA, 513 bp, Artificial Sequence
  derived and/or modified sequence
atggccagcattttctccaagctgctcacagggaggaatgcttcgcttctgttcgccacaatgggtacctcagtgctaaccactgggtacttgctcaatcgccagaaagtgtgtgctgaagtcagggagcaacctagactctttccgccctccgccgactacccagacctcaggaagcacaacaattgtatggctgagtgtctgacaccggccatttacgctaagctgagaaacaaggtgactccgaatggatatactctagatcagtgtatacagacgggcgtggataatccggggcatcccttcatcaaaacagtggggatggttgcaggagacgaagagagctacgaggtgttcgctgacctattcgatcccgttatcaagctgcgtcacaatggctatgatcctagggtgatgaagcacaccacagatttggatgcttctaaaattacccaggggcagttcgacgagcattacgtcctaagttcacgcgtgagaaccggccgcagttag

SEQ ID NO: 39939 - DNA, 1260 bp, Artificial Sequence
  derived and/or modified sequence
atggccagcatcttcagcaagctgctgaccggcagaaatgccagcctgctgtttgccaccatgggcacctctgtgctgaccaccggctacctgctgaaccggcagaaggtgtgtgccgaggtgcgggagcagcccaggctcttccccccatctgctgactacccagacctgaggaagcacaacaactgcatggccgagtgcctgaccccagccatctatgccaagctgaggaacaaggtgaccccaaatggctacaccctggaccagtgcatccagacaggagtggacaaccctggccaccccttcatcaagacagtgggcatggtggccggagatgaggagagctatgaggtgtttgctgacctgtttgatcctgtgatcaagctgcggcacaacggctatgacccccgggtgatgaagcacaccacagacctggatgccagcaagatcacccagggccagtttgatgagcactacgtgctgagcagccgggtgaggacaggccgcagcatccggggcctgagcctgcccccagcctgcaccagggctgagcggcgggaggtggagaatgtggccatcacagccctggagggcctgaagggggacctggccggccgctactacaagctgtctgagatgacagagcaggaccagcagaggctgattgatgaccacttcctgtttgacaagcctgtgagccccctgctgacctgtgccggcatggcccgggactggccagatgcccggggcatctggcacaactatgacaagaccttcctgatctggatcaatgaggaggaccacaccagggtcatctccatggagaagggcggcaacatgaagagggtgtttgagcgcttctgccggggcctgaaggaggtggagcggctcatccaggagcggggctgggagttcatgtggaatgaaaggctgggctacatcctgacctgccccagcaacctgggcaccggcctgcgggccggcgtgcacgtgcgcatccccaagctgagcaaggacccccgcttcagcaagatcctggagaacctgcggctgcagaagaggggcaccggcggcgtggacacagctgctgtggctgatgtgtatgacatcagcaacatcgaccgcatcggccgctctgaggtggagctggtgcagatcgtgattgatggagtgaactacctggtggactgtgagaagaagctggagcggggccaggacatcaaggtgcccccacccctgccccagtttgggaagaagtag

SEQ ID NO: 39940 - DNA, 513 bp, Artificial Sequence
  derived and/or modified sequence
atggccagcatcttcagcaagctgctgaccggcagaaatgccagcctgctgtttgccaccatgggcacctctgtgctgaccaccggctacctgctgaaccggcagaaggtgtgtgccgaggtgcgggagcagcccaggctcttccccccatctgctgactacccagacctgaggaagcacaacaactgcatggccgagtgcctgaccccagccatctatgccaagctgaggaacaaggtgaccccaaatggctacaccctggaccagtgcatccagacaggagtggacaaccctggccaccccttcatcaagacagtgggcatggtggccggagatgaggagagctatgaggtgtttgctgacctgtttgatcctgtgatcaagctgcggcacaacggctatgacccccgggtgatgaagcacaccacagacctggatgccagcaagatcacccagggccagtttgatgagcactacgtgctgagcagccgggtgaggacaggccgctcctag

SEQ ID NO: 39941 - DNA, 1260 bp, Artificial Sequence
  derived and/or modified sequence
atggccagcatcttcagcaagctgctgaccggccggaacgccagcctgctgttcgctacaatggggacctccgtcctgacaacagggtatttgcttaacagacagaaggtttgcgccgaggtgagggagcagcctaggctttttcctccatccgctgactaccctgatctgaggaagcacaacaactgcatggcagaatgcctgacacctgctatttacgcaaaactgcgcaataaggttactcctaacggctatactcttgatcagtgcatacagaccggagtcgacaatcctggacatcccttcattaaaacggttggcatggtcgccggcgacgaagaaagctacgaggttttcgccgacctcttcgaccccgtcatcaagctccggcataacggctatgatccaagagttatgaagcatacaaccgacctcgatgcttcaaagatcacacaagggcaatttgatgagcactatgtgctgagttctagggtcagaaccggaaggagtatccgcgggctgtctcttcccccagcctgcactcgagccgagaggagagaagtggaaaatgtggccattaccgctcttgaggggctgaagggtgacctggcagggcgttattacaagctttcggaaatgacggagcaggaccagcagagactgattgacgaccacttcctctttgataagccggtcagtccactgttgacctgtgcaggaatggcccgggattggccagacgccaggggaatttggcacaattatgacaagaccttcctgatatggataaacgaagaagatcacacccgggtcatttcaatggagaaagggggcaacatgaagagagtgtttgaaaggttctgccgtggtttgaaggaagtggaacggctgatccaggagagggggtgggagtttatgtggaacgaacggctcggttatatcctgacttgcccatcaaatcttggcacgggactcagagcgggggtgcacgtcaggatccccaaactgagcaaagatccccgatttagtaaaatccttgagaatttaaggctacaaaagagagggacaggcggcgtcgacactgccgccgtggcagacgtttacgacatttccaatatcgataggattggtaggtctgaggtggagctggtgcagattgtcattgacggagtaaattacctcgtcgattgcgagaagaagcttgagcggggtcaggacataaaagtgcctccgccccttccccagttcgggaagaaatag

SEQ ID NO: 39942 - DNA, 1260 bp, Artificial Sequence
  derived and/or modified sequence
atggccagcatcttcagcaagctgctgaccggccggaacgccagcttgctttttgccaccatgggtacttccgtgctgaccaccggatacttgcttaacagacagaaagtctgcgccgaggtgcgcgaacaaccaaggctgttcccaccctccgcagattatcctgatttgcgcaaacacaacaactgcatggcagaatgtctgacaccagcaatctacgcaaagctccgaaacaaggttactccaaatggctacaccctagatcagtgtattcagaccggtgtggacaatcccgggcacccatttatcaaaaccgtcggaatggtggctggggacgaggaaagctacgaggtgtttgcagacctctttgaccccgtcatcaaactacgccacaatggttatgatcctcgagtcatgaaacacacaactgacttggacgccagcaaaatcacccagggacagttcgacgagcactatgtgctgagttcgagggtacgcacaggccggtcgatacgcgggctgtcactgcccccggcttgcaccagagccgagcgacgcgaagtggagaacgtcgccataaccgccctcgagggcttaaagggagacctggctggcagatactataagttatcagaaatgaccgaacaagaccagcagagattaattgacgatcacttccttttcgataaacctgtgtccccactgttgacatgcgctgggatggctcgggactggccagacgctcgcggaatctggcataattatgataagacctttctgatctggatcaacgaagaggatcatacaagggtcattagcatggagaagggtgggaatatgaaacgcgtgttcgagcgcttttgtcgggggctgaaggaagtcgaacggctgatccaggaacgtggttgggaattcatgtggaatgaacggctcggctatatactcacatgtccctcaaatttgggaacagggttgcgcgcaggcgttcatgtacggatccctaaactttcgaaagatccacggttctcaaaaatcctggaaaatctcagactgcagaaacgtgggaccgggggcgtggatactgctgcagtggctgacgtatacgacattagcaatatcgatagaatcggcaggtctgaagtggaacttgtacagatcgtcattgacggcgttaattacttagtagactgcgagaaaaagctcgagcggggacaagatattaaagtccccccccctctaccgcagttcggaaagaagtag

SEQ ID NO: 39943 - DNA, 1260 bp, Artificial Sequence
  derived and/or modified sequence
atggccagcatcttcagcaagctgctgaccggccggaacgccagcctccttttcgccacaatgggaacaagcgttttaacaacaggatacctgctgaatcgccaaaaagtgtgtgcagaggtgcgcgagcagccacgactgttccctccaagcgccgactacccggatttacgcaagcacaacaattgcatggcagaatgcctcacacccgcgatatatgccaagctgcgcaataaggtgacccctaatggatacactttggaccagtgtattcagaccggggtggacaatcctgggcatccatttattaagacagtgggcatggtggccggggacgaggaatcatatgaagtgttcgccgacctgttcgatcccgtgataaaactgaggcacaacggctacgatcctagagtgatgaaacataccactgacctcgatgcctccaagatcacccagggccagttcgacgaacattacgtcctgagctctcgcgtgcgtacaggcaggtccatccgcggcctgtcgctgccccccgcctgtactcgcgccgagcgacgagaagtggaaaatgtcgctatcacggcccttgaagggctgaaaggggacctcgccgggaggtactataaactgagcgagatgaccgaacaggatcagcagaggttgatcgacgatcactttctgttcgacaagccagtttcaccgctgctcacgtgcgccggcatggccagggactggccagacgctcgcgggatttggcacaattacgataagaccttcttgatatggatcaatgaggaggaccatacaagagtcatctctatggaaaaggggggcaacatgaaaagggtgttcgagagattctgtaggggcctaaaggaagtggagcgcttgattcaagaacgcgggtgggaattcatgtggaatgagcggcttggctatatcctgacatgcccatccaaccttggtaccggtttacgagccggcgtgcatgtcagaattcccaaactgagcaaggatccgcgatttagtaaaatcttggagaatctcaggctgcagaaacgcgggaccggtggggtggatacagccgccgtcgctgacgtgtacgacatcagcaacatcgacaggattggtaggagcgaagtggagctagtccaaatcgtgattgacggcgtgaactatctcgtcgactgcgaaaagaaacttgagcgagggcaagatattaaggtccctcctcctctgccacagtttgggaaaaaatag

SEQ ID NO: 39944 - DNA, 513 bp, Artificial Sequence
  derived and/or modified sequence
atggccagcatcttcagcaagctgctgaccggccggaacgccagcctcctcttcgcaaccatgggcacatctgtcctcactaccgggtacctccttaacagacaaaaggtgtgtgccgaagtcagagaacagccacggctgttccctccttcagccgactaccccgatctacgtaagcacaacaattgcatggccgagtgtttaaccccagccatttatgccaagttgcggaataaagtgacaccgaatggttacacactggaccagtgcattcaaaccggcgttgacaatccaggccatcctttcattaaaacggtcgggatggtggccggggacgaagaatcctatgaagtgttcgctgacttattcgacccagtcatcaaacttaggcataatggatacgatccacgtgtgatgaaacacacaactgaccttgacgcctccaaaatcacccagggtcagttcgacgaacattacgtcctgagttcccgggtgcgcactggcagatcctag

SEQ ID NO: 39945 - DNA, 1260 bp, Artificial Sequence
  derived and/or modified sequence
atggcgagtattttcagcaaattactgaccggacgcaacgcctctctgcttttcgcgaccatgggaacaagtgtactcaccactggatacttgctgaatcgacaaaaggtttgtgcggaagtccgcgaacagcctaggttgttccctccatccgccgactacccagatctgcggaaacacaataactgtatggcggagtgcctgacccctgccatctatgctaagttgcggaacaaagtcacacctaatggatacacattagaccagtgcatacagaccggcgtggacaaccccggtcaccccttcatcaagaccgtggggatggtcgctggcgacgaggaatcgtatgaggttttcgccgacctgtttgaccctgttataaaactccgacacaacggatatgaccccagagtgatgaaacatacaacagacctcgatgcatcaaagattacacagggacagtttgacgaacattatgtgttgtcgagccgggtacgtacaggaaggagtatccgaggtcttagcctcccacctgcatgcaccagagctgaaagaagggaagtggaaaatgtagccataacggccctcgagggtctcaagggagaccttgcgggaagatactacaagctgtctgaaatgaccgaacaggatcagcaacgtttgatcgatgaccactttctcttcgacaagcctgtctcaccactgttgacctgtgcgggtatggctagggactggccggacgccagaggcatctggcataattatgataaaaccttcctgatctggatcaatgaagaggaccataccagagtcatatctatggaaaaagggggaaatatgaaacgagtgttcgagagattctgcagggggctgaaagaggtggagcggctgatacaggaacggggatgggagtttatgtggaatgaaaggttgggatacatcctgacctgcccttccaacctcggcacgggcctgagagcgggtgtgcatgtccgaataccaaaattaagtaaggatccacgcttttctaagatcctcgagaacttacgactgcagaaaagaggtacgggcggagtagataccgcggctgtcgctgatgtctacgacatatccaatattgacaggatcggcagaagcgaggtggagctcgtccagatcgtcattgacggggttaactacctggtggattgtgaaaaaaaacttgagagaggccaagacattaaggtcccgccacctctgccgcagttcggcaaaaagtag

SEQ ID NO: 39946 - DNA, 1260 bp, Artificial Sequence
  derived and/or modified sequence
atggcgtccatatttagcaagctgttgacgggtagaaacgccagcttgctgttcgccaccatggggaccagtgtactgacaacaggctacctattgaatcgacagaaggtgtgtgcggaagttcgcgaacagcctcgcctgttccccccttctgctgactatcctgacctgagaaaacacaacaattgtatggctgagtgtcttactcccgctatttatgccaagttgcgcaacaaggtcactcctaatggatatactctcgatcaatgcattcaaacgggcgtggataaccccggacatcctttcatcaagactgtcggcatggtcgcgggtgacgaagagagctatgaagtgtttgccgatttgtttgatcccgtgatcaaactgcgccacaacggctacgacccacgggttatgaagcataccacagacctcgacgcaagcaagatcacgcaaggccagttcgatgaacactacgtgttgagctcccgggtgcgaaccgggaggtcgataagaggcctgtccctgccacctgcctgcactagggccgagaggcgggaggtggagaatgtggcaatcactgcgctcgagggcctgaaaggggacttggctgggagatactataagctttcagagatgaccgagcaagatcagcagagactgattgacgatcatttcctctttgacaagcctgtttccccgctgctaacatgtgccggtatggcaagggattggccagacgcacggggaatttggcacaattatgacaaaacttttctgatttggatcaatgaagaagatcataccagagtcatctctatggagaagggagggaacatgaaaagggtgttcgaaagattctgtcggggactgaaagaagttgaacgactgatccaggaacgaggatgggagttcatgtggaacgaacgcctcggatacattttgacctgcccgagcaacctgggtactggacttcgggcaggggtgcacgtgaggattcccaagctttccaaggatccaaggtttagcaagatcctggagaacctgagactgcaaaagaggggcaccggaggtgtcgacactgccgctgtcgccgacgtgtacgacattagtaatatcgaccgtataggtagaagtgaagtagagcttgttcagattgtcattgatggtgtgaattatcttgtggattgtgagaagaaactcgaaagagggcaggacataaaagtgccgcctccactcccacagtttgggaaaaagtag

SEQ ID NO: 39947 - DNA, 1260 bp, Artificial Sequence
  derived and/or modified sequence
atggcctctattttcagtaagctattgactggacggaacgcctccctgctgttcgcaaccatggggactagcgtgctgactaccggctacctgcttaatagacagaaagtatgcgctgaggttcgggagcaaccgaggctcttcccgccatcggcagattacccagatttgcgcaagcataacaattgtatggccgaatgtttgacacctgccatctatgctaaactcagaaacaaggtcaccccgaatggctacactctcgaccaatgtattcagacgggtgttgataacccgggtcacccattcattaaaaccgtggggatggtagccggagacgaagaaagttatgaggtgttcgcagatctgttcgatccagtcattaagctgcggcacaatgggtacgaccctagagtaatgaagcatactaccgatctagatgccagtaagattacccagggccagttcgatgagcactacgtgttgtctagtagagttcgcaccggcagatcaatcaggggattgagtctgccacctgcttgtactcgggctgagcgcagagaggtagagaacgtcgccataactgccctcgagggattgaagggcgatttggctggcagatattataagctgagtgagatgacggagcaggatcagcagaggcttattgacgaccatttcctgttcgataaacccgtgtctccactgttgacctgtgcaggcatggcaagagattggcccgacgccaggggcatctggcacaattacgataaaactttcctcatttggataaacgaggaagaccacactagggtcatctcgatggaaaagggtggaaatatgaaacgggtgttcgagcggttctgcagaggtttaaaagaggttgaacgactgattcaggagcggggatgggaattcatgtggaatgagcgattgggttacattcttacgtgcccaagtaatctgggcaccggtctccgtgcaggggtgcatgtgagaatccccaagctgtctaaggatcccagatttagcaaaatcctcgaaaacctacgactacagaagcggggtactggtggcgtggacaccgctgccgtcgccgacgtttacgacatttcgaatattgaccgcatcggaagatcagaggtggaactcgttcagatcgtcatcgatggcgtgaattacctcgtggactgcgaaaaaaaactggagcgagggcaggatatcaaggtacctcctcctcttccccaattcggtaagaaatag

SEQ ID NO: 39948 - DNA, 513 bp, Artificial Sequence
  derived and/or modified sequence
atggcctctattttttctaagctcctcactggacggaacgccagtttactgttcgccacaatgggaacaagcgtccttactaccggctatctgctaaacagacagaaagtatgtgctgaggtgcgggagcaaccgagactgtttcctccttcggctgactaccccgatttgcgcaagcataacaactgcatggccgagtgcctgaccccggctatttatgccaaattgaggaataaggttactcccaatgggtatacgctggaccagtgtatccagactggagtcgacaatccagggcatcccttcatcaagacagtgggaatggtggccggagacgaggagtcctatgaggtgttcgccgacttattcgaccccgttatcaaactgcggcataatggttatgacccccgtgttatgaagcataccacggaccttgatgcttcgaagatcacacagggccagtttgatgagcactatgtgttgagtagcagggtgcgtactggcaggtcttag

SEQ ID NO: 39949 - DNA, 1512 bp, Artificial Sequence
  derived and/or modified sequence
agggaggatttccaggccggcccgaccagctcgccctgcatacacttcttggctgtgtgcgctcagcaggacgtgggaggctccggcttcaagacactcatccaagaggaaggatggccagtatcttttctaagttgctaactggccgcaatgcttctctgctgtttgctaccatgggcaccagtgtcctgaccaccgggtacctgctgaaccggcagaaagtgtgtgccgaggtccgggagcagcctaggctatttcctccaagcgcagactacccagacctgcgcaagcacaacaactgcatggccgagtgcctcacccccgccatttatgccaagcttcgcaacaaggtgacacccaacggctacacgctggaccagtgcatccagactggagtggacaaccctggccaccccttcataaagactgtgggcatggtggctggtgacgaggagtcctatgaggtgtttgctgacctttttgaccccgtcatcaaactaagacacaacggctatgaccccagggtgatgaagcacacaacggatctggatgcatcaaagatcacccaagggcagttcgacgagcattacgtgctgtcttctcgggtgcgcactggccgcagcatccgtgggctgagcctgcctccagcctgcacccgggccgagcgaagggaggtagagaacgtggccatcactgccctggagggcctcaagggggacctggctggccgctactacaagctgtccgagatgacggagcaggaccagcagcggctcatcgatgaccactttctgtttgataagccagtgtcccctttattaacatgtgctgggatggcccgtgactggccagatgccaggggaatctggcataattatgataagacatttctcatctggataaatgaggaggatcacaccagggtaatctcaatggaaaaaggaggcaatatgaaacgagtatttgagcgattctgtcgtggactaaaagaagtagaacggttaatccaagaacgaggctgggagttcatgtggaatgagcgcctaggatacattttgacctgtccttcgaaccttggaacaggactacgagctggtgtccacgttaggatcccaaagctcagcaaggacccacgcttttctaagatcctggaaaacctaagactccagaagcgtggcacaggtggtgtggacactgccgcggtcgcagatgtgtacgacatttccaacatagatagaattggtcgatcagaggttgagcttgttcagatagtcatcgatggagtcaattacctggtggattgtgaaaagaagttggagagaggccaagatattaaggtgccaccccctctgcctcagtttggcaaaaagtaaactttccctttcccaatttataaataatctgtctgctggtacgacagacataaatctctactctgagagtttttatacacttggaaaaatataaaattgtagatcctgcctatctttacaataaaactctccttaatat

SEQ ID NO: 39950 - DNA, 1637 bp, Artificial Sequence
  derived and/or modified sequence
atacacttcttggctgtgtgcgctcagcaggacgtgggaggctccggcttcaagatcaaaggaaatgtttccctttgtcccgtttcacactaaacgggttggggaggaaccaggggagatgtcaaccgtctgccggtgactgggaagttttctgcaagtcctccacagcataggccagcaggccacttttcactaacagaagtcacaagccaagtgagacactcatccaagaggaaggatggccagtatcttttctaagttgctaactggccgcaatgcttctctgctgtttgctaccatgggcaccagtgtcctgaccaccgggtacctgctgaaccggcagaaagtgtgtgccgaggtccgggagcagcctaggctatttcctccaagcgcagactacccagacctgcgcaagcacaacaactgcatggccgagtgcctcacccccgccatttatgccaagcttcgcaacaaggtgacacccaacggctacacgctggaccagtgcatccagactggagtggacaaccctggccaccccttcataaagactgtgggcatggtggctggtgacgaggagtcctatgaggtgtttgctgacctttttgaccccgtcatcaaactaagacacaacggctatgaccccagggtgatgaagcacacaacggatctggatgcatcaaagatcacccaagggcagttcgacgagcattacgtgctgtcttctcgggtgcgcactggccgcagcatccgtgggctgagcctgcctccagcctgcacccgggccgagcgaagggaggtagagaacgtggccatcactgccctggagggcctcaagggggacctggctggccgctactacaagctgtccgagatgacggagcaggaccagcagcggctcatcgatgaccactttctgtttgataagccagtgtcccctttattaacatgtgctgggatggcccgtgactggccagatgccaggggaatctggcataattatgataagacatttctcatctggataaatgaggaggatcacaccagggtaatctcaatggaaaaaggaggcaatatgaaacgagtatttgagcgattctgtcgtggactaaaagaagtagaacggttaatccaagaacgaggctgggagttcatgtggaatgagcgcctaggatacattttgacctgtccttcgaaccttggaacaggactacgagctggtgtccacgttaggatcccaaagctcagcaaggacccacgcttttctaagatcctggaaaacctaagactccagaagcgtggcacaggtggtgtggacactgccgcggtcgcagatgtgtacgacatttccaacatagatagaattggtcgatcagaggttgagcttgttcagatagtcatcgatggagtcaattacctggtggattgtgaaaagaagttggagagaggccaagatattaaggtgccaccccctctgcctcagtttggcaaaaagtaaactttccctttcccaatttataaataatctgtctgctggtacgacagacataaatctctactctgagagtttttatacacttggaaaaatataaaattgtagatcctgcctatctttacaataaaactctccttaatat

SEQ ID NO: 39951 - DNA, 1479 bp, Artificial Sequence
  derived and/or modified sequence
ctgcatacacttcttggctgtgtgcgctcagcaggacgtgggaggctccggcttcaaggtcgacactcatccaagaggaaggatggccagtatcttttctaagttgctaactggccgcaatgcttctctgctgtttgctaccatgggcaccagtgtcctgaccaccgggtacctgctgaaccggcagaaagtgtgtgccgaggtccgggagcagcctaggctatttcctccaagcgcagactacccagacctgcgcaagcacaacaactgcatggccgagtgcctcacccccgccatttatgccaagcttcgcaacaaggtgacacccaacggctacacgctggaccagtgcatccagactggagtggacaaccctggccaccccttcataaagactgtgggcatggtggctggtgacgaggagtcctatgaggtgtttgctgacctttttgaccccgtcatcaaactaagacacaacggctatgaccccagggtgatgaagcacacaacggatctggatgcatcaaagatcacccaagggcagttcgacgagcattacgtgctgtcttctcgggtgcgcactggccgcagcatccgtgggctgagcctgcctccagcctgcacccgggccgagcgaagggaggtagagaacgtggccatcactgccctggagggcctcaagggggacctggctggccgctactacaagctgtccgagatgacggagcaggaccagcagcggctcatcgatgaccactttctgtttgataagccagtgtcccctttattaacatgtgctgggatggcccgtgactggccagatgccaggggaatctggcataattatgataagacatttctcatctggataaatgaggaggatcacaccagggtaatctcaatggaaaaaggaggcaatatgaaacgagtatttgagcgattctgtcgtggactaaaagaagtagaacggttaatccaagaacgaggctgggagttcatgtggaatgagcgcctaggatacattttgacctgtccttcgaaccttggaacaggactacgagctggtgtccacgttaggatcccaaagctcagcaaggacccacgcttttctaagatcctggaaaacctaagactccagaagcgtggcacaggtggtgtggacactgccgcggtcgcagatgtgtacgacatttccaacatagatagaattggtcgatcagaggttgagcttgttcagatagtcatcgatggagtcaattacctggtggattgtgaaaagaagttggagagaggccaagatattaaggtgccaccccctctgcctcagtttggcaaaaagtaaactttccctttcccaatttataaataatctgtctgctggtacgacagacataaatctctactctgagagtttttatacacttggaaaaatataaaattgtagatcctgcctatctttacaataaaactctccttaat

SEQ ID NO: 39952 - DNA, 594 bp, Artificial Sequence
  derived and/or modified sequence
ctgcatacacttcttggctgtgtgcgctcagcaggacgtgggaggctccggcttcaaggtcgacactcatccaagaggaaggatggccagtatcttttctaagttgctaactggccgcaatgcttctctgctgtttgctaccatgggcaccagtgtcctgaccaccgggtacctgctgaaccggcagaaagtgtgtgccgaggtccgggagcagcctaggctatttcctccaagcgcagactacccagacctgcgcaagcacaacaactgcatggccgagtgcctcacccccgccatttatgccaagcttcgcaacaaggtgacacccaacggctacacgctggaccagtgcatccagactggagtggacaaccctggccaccccttcataaagactgtgggcatggtggctggtgacgaggagtcctatgaggtgtttgctgacctttttgaccccgtcatcaaactaagacacaacggctatgaccccagggtgatgaagcacacaacggatctggatgcatcaaagatcacccaagggcagttcgacgagcattacgtgctgtcttctcgggtgcgcactggccgcagcat

SEQ ID NO: 39953 - DNA, 1260 bp, Artificial Sequence
  derived and/or modified sequence
atggccagcatcttcagcaagctgctgaccggcagaaacgccagcctgctgttcgccaccatgggcaccagcgtgctgaccaccggctacctgctgaacagacagaaggtgtgcgccgaggtgagagagcagcccagactgttcccccccagcgccgactaccccgacctgagaaagcacaacaactgcatggccgagtgcctgacccccgccatctacgccaagctgagaaacaaggtgacccccaacggctacaccctggaccagtgcatccagaccggcgtggacaaccccggccaccccttcatcaagaccgtgggcatggtggccggcgacgaggagagctacgaggtgttcgccgacctgttcgaccccgtgatcaagctgagacacaacggctacgaccccagagtgatgaagcacaccaccgacctggacgccagcaagatcacccagggccagttcgacgagcactacgtgctgagcagcagagtgagaaccggcagaagcatcagaggcctgagcctgccccccgcctgcaccagagccgagagaagagaggtggagaacgtggccatcaccgccctggagggcctgaagggcgacctggccggcagatactacaagctgagcgagatgaccgagcaggaccagcagagactgatcgacgaccacttcctgttcgacaagcccgtgagccccctgctgacctgcgccggcatggccagagactggcccgacgccagaggcatctggcacaactacgacaagaccttcctgatctggatcaacgaggaggaccacaccagagtgatcagcatggagaagggcggcaacatgaagagagtgttcgagagattctgcagaggcctgaaggaggtggagagactgatccaggagagaggctgggagttcatgtggaacgagagactgggctacatcctgacctgccccagcaacctgggcaccggcctgagagccggcgtgcacgtgagaatccccaagctgagcaaggaccccagattcagcaagatcctggagaacctgagactgcagaagagaggcaccggcggcgtggacaccgccgccgtggccgacgtgtacgacatcagcaacatcgacagaatcggcagaagcgaggtggagctggtgcagatcgtgatcgacggcgtgaactacctggtggactgcgagaagaagctggagagaggccaggacatcaaggtgcccccccccctgccccagttcggcaagaagtag

SEQ ID NO: 39954 - DNA, 513 bp, Artificial Sequence
  derived and/or modified sequence
atggccagcatcttcagcaagctgctgaccggcagaaacgccagcctgctgttcgccaccatgggcaccagcgtgctgaccaccggctacctgctgaacagacagaaggtgtgcgccgaggtgagagagcagcccagactgttcccccccagcgccgactaccccgacctgagaaagcacaacaactgcatggccgagtgcctgacccccgccatctacgccaagctgagaaacaaggtgacccccaacggctacaccctggaccagtgcatccagaccggcgtggacaaccccggccaccccttcatcaagaccgtgggcatggtggccggcgacgaggagagctacgaggtgttcgccgacctgttcgaccccgtgatcaagctgagacacaacggctacgaccccagagtgatgaagcacaccaccgacctggacgccagcaagatcacccagggccagttcgacgagcactacgtgctgagcagcagagtgagaaccggcagaagctag

SEQ ID NO: 39955 - protein, 662 aa, Artificial Sequence
  derived and/or modified sequence
MGPLRESKEHRVQHHDKEISRSRIPRLILRPHMPQQQHKVSPASESPFSEEESREFNPSSSGRSARTVSSNSFCSDDTGCPSSQSVSPVKTPSDAGNSPIGFCPGSDEGFTRKKCTIGMVGEGSIQSSRYKKESKSGLVKPGSEADFSSSSSTGSISAPEVHMSTAGSKRSSSSRNRGPHGRSNGASSHKPGSSPSSPREKDLLSMLCRNQLSPVNIHPSYAPSSPSSSNSGSYKGSDCSPIMRRSGRYMSCGENHGVRPPNPEQYLTPLQQKEVTVRHLKTKLKESERRLHERESEIVELKSQLARMREDWIEEECHRVEAQLALKEARKEIKQLKQVIETMRSSLADKDKGIQKYFVDINIQNKKLESLLQSMEMAHSGSLRDELCLDFPCDSPEKSLTLNPPLDTMADGLSLEEQVTGEGADRELLVGDSIANSTDLFDEIVTATTTESGDLELVHSTPGANVLELLPIVMGQEEGSVVVERAVQTDVVPYSPAISELIQSVLQKLQDPCPSSLASPDESEPDSMESFPESLSALVVDLTPRNPNSAILLSPVETPYANVDAEVHANRLMRELDFAACVEERLDGVIPLARGGVVRQYWSSSFLVDLLAVAAPVVPTVLWAFSTQRGGTDPVYNIGALLRGCCVVALHSLRRTAFRIKT

SEQ ID NO: 39956 - protein, 204 aa, Artificial Sequence
  derived and/or modified sequence
MGPLRESKEHRVQHHDKEISRSRIPRLILRPHMPQQQHKVSPASESPFSEEESREFNPSSSGRSARTVSSNSFCSDDTGCPSSQSVSPVKTPSDAGNSPIGFCPGSDEGFTRKKCTIGMVGEGSIQSSRYKKESKSGLVKPGSEADFSSSSSTGSISAPEVHMSTAGSKRSSSSRNRGPHGRSNGASSHKPGSSPSSPREKDLL

SEQ ID NO: 39957 - protein, 162 aa, Artificial Sequence
  derived and/or modified sequence
MGPLRESKEHRVQHHDKEISRSRIPRLILRPHMPQQQHKVSPASESPFSEEESREFNPSSSGRSARTVSSNSFCSDDTGCPSSQSVSPVKTPSDAGNSPIGFCPGSDEGFTRKKCTIGMVGEGSIQSSRYKKESKSGLVKPGSEADFSSSSSTGSISAPEVH

SEQ ID NO: 39958 - protein, 104 aa, Artificial Sequence
  derived and/or modified sequence
MGPLRESKEHRVQHHDKEISRSRIPRLILRPHMPQQQHKVSPASESPFSEEESREFNPSSSGRSARTVSSNSFCSDDTGCPSSQSVSPVKTPSDAGNSPIGFCP

SEQ ID NO: 39959 - DNA, 1989 bp, Artificial Sequence
  derived and/or modified sequence
atgggccccctgagagagagcaaggagcacagagtgcagcaccacgacaaggagatcagcagaagcagaatccccagactgatcctgagaccccacatgccccagcagcagcacaaggtgagccccgccagcgagagccccttcagcgaggaggagagcagagagttcaaccccagcagcagcggcagaagcgccagaaccgtgagcagcaacagcttctgcagcgacgacaccggctgccccagcagccagagcgtgagccccgtgaagacccccagcgacgccggcaacagccccatcggcttctgccccggcagcgacgagggcttcaccagaaagaagtgcaccatcggcatggtgggcgagggcagcatccagagcagcagatacaagaaggagagcaagagcggcctggtgaagcccggcagcgaggccgacttcagcagcagcagcagcaccggcagcatcagcgcccccgaggtgcacatgagcaccgccggcagcaagagaagcagcagcagcagaaacagaggcccccacggcagaagcaacggcgccagcagccacaagcccggcagcagccccagcagccccagagagaaggacctgctgagcatgctgtgcagaaaccagctgagccccgtgaacatccaccccagctacgcccccagcagccccagcagcagcaacagcggcagctacaagggcagcgactgcagccccatcatgagaagaagcggcagatacatgagctgcggcgagaaccacggcgtgagaccccccaaccccgagcagtacctgacccccctgcagcagaaggaggtgaccgtgagacacctgaagaccaagctgaaggagagcgagagaagactgcacgagagagagagcgagatcgtggagctgaagagccagctggccagaatgagagaggactggatcgaggaggagtgccacagagtggaggcccagctggccctgaaggaggccagaaaggagatcaagcagctgaagcaggtgatcgagaccatgagaagcagcctggccgacaaggacaagggcatccagaagtacttcgtggacatcaacatccagaacaagaagctggagagcctgctgcagagcatggagatggcccacagcggcagcctgagagacgagctgtgcctggacttcccctgcgacagccccgagaagagcctgaccctgaacccccccctggacaccatggccgacggcctgagcctggaggagcaggtgaccggcgagggcgccgacagagagctgctggtgggcgacagcatcgccaacagcaccgacctgttcgacgagatcgtgaccgccaccaccaccgagagcggcgacctggagctggtgcacagcacccccggcgccaacgtgctggagctgctgcccatcgtgatgggccaggaggagggcagcgtggtggtggagagagccgtgcagaccgacgtggtgccctacagccccgccatcagcgagctgatccagagcgtgctgcagaagctgcaggacccctgccccagcagcctggccagccccgacgagagcgagcccgacagcatggagagcttccccgagagcctgagcgccctggtggtggacctgacccccagaaaccccaacagcgccatcctgctgagccccgtggagaccccctacgccaacgtggacgccgaggtgcacgccaacagactgatgagagagctggacttcgccgcctgcgtggaggagagactggacggcgtgatccccctggccagaggcggcgtggtgagacagtactggagcagcagcttcctggtggacctgctggccgtggccgcccccgtggtgcccaccgtgctgtgggccttcagcacccagagaggcggcaccgaccccgtgtacaacatcggcgccctgctgagaggctgctgcgtggtggccctgcacagcctgagaagaaccgccttcagaatcaagacctag

SEQ ID NO: 39960 - DNA, 615 bp, Artificial Sequence
  derived and/or modified sequence
atgggccccctgagagagagcaaggagcacagagtgcagcaccacgacaaggagatcagcagaagcagaatccccagactgatcctgagaccccacatgccccagcagcagcacaaggtgagccccgccagcgagagccccttcagcgaggaggagagcagagagttcaaccccagcagcagcggcagaagcgccagaaccgtgagcagcaacagcttctgcagcgacgacaccggctgccccagcagccagagcgtgagccccgtgaagacccccagcgacgccggcaacagccccatcggcttctgccccggcagcgacgagggcttcaccagaaagaagtgcaccatcggcatggtgggcgagggcagcatccagagcagcagatacaagaaggagagcaagagcggcctggtgaagcccggcagcgaggccgacttcagcagcagcagcagcaccggcagcatcagcgcccccgaggtgcacatgagcaccgccggcagcaagagaagcagcagcagcagaaacagaggcccccacggcagaagcaacggcgccagcagccacaagcccggcagcagccccagcagccccagagagaaggacctgctgtag

SEQ ID NO: 39961 - DNA, 1788 bp, Artificial Sequence
  derived and/or modified sequence
atgggccccttctgggccagaaaggacgacaccggctgccccagcagccagagcgtgagccccgtgaagacccccagcgacgccggcaacagccccatcggcttctgccccggcagcgacgagggcttcaccagaaagaagtgcaccatcggcatggtgggcgagggcagcatccagagcagcagatacaagaaggagagcaagagcggcctggtgaagcccggcagcgaggccgacttcagcagcagcagcagcaccggcagcatcagcgcccccgaggtgcacatgagcaccgccggcagcaagagaagcagcagcagcagaaacagaggcccccacggcagaagcaacggcgccagcagccacaagcccggcagcagccccagcagccccagagagaaggacctgctgagcatgctgtgcagaaaccagctgagccccgtgaacatccaccccagctacgcccccagcagccccagcagcagcaacagcggcagctacaagggcagcgactgcagccccatcatgagaagaagcggcagatacatgagctgcggcgagaaccacggcgtgagaccccccaaccccgagcagtacctgacccccctgcagcagaaggaggtgaccgtgagacacctgaagaccaagctgaaggagagcgagagaagactgcacgagagagagagcgagatcgtggagctgaagagccagctggccagaatgagagaggactggatcgaggaggagtgccacagagtggaggcccagctggccctgaaggaggccagaaaggagatcaagcagctgaagcaggtgatcgagaccatgagaagcagcctggccgacaaggacaagggcatccagaagtacttcgtggacatcaacatccagaacaagaagctggagagcctgctgcagagcatggagatggcccacagcggcagcctgagagacgagctgtgcctggacttcccctgcgacagccccgagaagagcctgaccctgaacccccccctggacaccatggccgacggcctgagcctggaggagcaggtgaccggcgagggcgccgacagagagctgctggtgggcgacagcatcgccaacagcaccgacctgttcgacgagatcgtgaccgccaccaccaccgagagcggcgacctggagctggtgcacagcacccccggcgccaacgtgctggagctgctgcccatcgtgatgggccaggaggagggcagcgtggtggtggagagagccgtgcagaccgacgtggtgccctacagccccgccatcagcgagctgatccagagcgtgctgcagaagctgcaggacccctgccccagcagcctggccagccccgacgagagcgagcccgacagcatggagagcttccccgagagcctgagcgccctggtggtggacctgacccccagaaaccccaacagcgccatcctgctgagccccgtggagaccccctacgccaacgtggacgccgaggtgcacgccaacagactgatgagagagctggacttcgccgcctgcgtggaggagagactggacggcgtgatccccctggccagaggcggcgtggtgagacagtactggagcagcagcttcctggtggacctgctggccgtggccgcccccgtggtgcccaccgtgctgtgggccttcagcacccagagaggcggcaccgaccccgtgtacaacatcggcgccctgctgagaggctgctgcgtggtggccctgcacagcctgagaagaaccgccttcagaatcaagacctag

SEQ ID NO: 39962 - DNA, 489 bp, Artificial Sequence
  derived and/or modified sequence
atgggccccctgagagagagcaaggagcacagagtgcagcaccacgacaaggagatcagcagaagcagaatccccagactgatcctgagaccccacatgccccagcagcagcacaaggtgagccccgccagcgagagccccttcagcgaggaggagagcagagagttcaaccccagcagcagcggcagaagcgccagaaccgtgagcagcaacagcttctgcagcgacgacaccggctgccccagcagccagagcgtgagccccgtgaagacccccagcgacgccggcaacagccccatcggcttctgccccggcagcgacgagggcttcaccagaaagaagtgcaccatcggcatggtgggcgagggcagcatccagagcagcagatacaagaaggagagcaagagcggcctggtgaagcccggcagcgaggccgacttcagcagcagcagcagcaccggcagcatcagcgcccccgaggtgcactag

SEQ ID NO: 39963 - DNA, 315 bp, Artificial Sequence
  derived and/or modified sequence
atgggccccctgagagagagcaaggagcacagagtgcagcaccacgacaaggagatcagcagaagcagaatccccagactgatcctgagaccccacatgccccagcagcagcacaaggtgagccccgccagcgagagccccttcagcgaggaggagagcagagagttcaaccccagcagcagcggcagaagcgccagaaccgtgagcagcaacagcttctgcagcgacgacaccggctgccccagcagccagagcgtgagccccgtgaagacccccagcgacgccggcaacagccccatcggcttctgcccctag

SEQ ID NO: 39964 - DNA, 1989 bp, Artificial Sequence
  derived and/or modified sequence
atggggccactcagggaaagtaaggagcatcgggtacagcaccacgacaaggagatatcaagatcacgaatcccaagactcattcttcgtccacacatgccacagcagcagcacaaggtgtcgccagctagcgaaagccccttcagtgaagaggaaagtagggaatttaaccctagtagttccggccggagcgcccggacagtgagctcaaactcattttgtagcgatgacaccggatgtccaagtagccaatccgtgagcccggtcaaaaccccgagcgacgcagggaatagtccgataggattctgccccggttcagatgaaggctttacgagaaagaaatgcacaatcggtatggtgggggaggggagcatccagtcctctagatataaaaaagaatcaaaaagcgggcttgtaaagccaggctcagaggctgacttctcctcaagcagctccaccggctccatcagcgcccctgaggtccacatgagcactgcgggcagtaaacgatcctcctcaagtagaaatcggggcccgcacggccggtctaacggcgcatcttcccataaacccggcagctccccgtcctcccccagagagaaggacctgctgtctatgctgtgtaggaaccagctctcacccgtgaacatccacccctcctacgctccctccagtcctagctcatccaactctgggagttacaaaggctctgactgttcaccaatcatgcgaagatccggtagatacatgtcctgtggtgaaaaccacggcgtgcgcccacctaatccggagcagtatctgacacccctgcagcaaaaggaggttacagtcaggcatttgaagactaaactgaaggaaagcgagagacgtctgcacgaaagagagtcagagatcgtggagctgaaatctcagctggccaggatgagggaggattggatcgaggaagagtgtcaccgagtggaggctcagctggctctgaaagaagcgaggaaagagataaagcagctgaagcaagtgattgagaccatgcgaagtagtcttgccgataaagacaagggaatccagaagtatttcgtggacatcaatatccagaataagaaactggaatccctgctgcaatctatggagatggcccactctggcagcctcagggatgagctttgtttggacttcccttgtgattcccccgagaaaagcttaacgcttaatcccccattagacaccatggcggatggactcagtttggaggagcaggtgaccggggagggggccgatcgggagctgcttgtcggggactccatcgcgaattcaaccgatctgttcgacgaaatcgtcacagctaccaccactgagagtggtgacctagaattggtgcacagcacccctggggccaatgtcctggagttgctgccaatcgtgatgggccaggaggaaggttccgtcgtggtcgaacgggcagtgcagaccgacgttgtaccatattcgcctgcgatcagtgagctgatacagtcggtactccagaagcttcaggatccctgtccatcaagcctcgcttccccagatgaatccgagcctgacagcatggagagttttccggaatccttaagcgccttggtcgttgatctgaccccacggaaccctaacagcgccattctgctgtctcctgtggaaactccatatgccaatgtggacgctgaagtgcacgctaaccggttaatgcgggaactggactttgcagcctgtgtagaagagcgtctcgacggcgtcatccctctggcgcgcgggggcgttgtgcgacaatattggtcttcaagctttcttgtcgacttactggctgttgcagcacctgtggtaccaacggtgctgtgggcttttagcacgcagcgcggcggaaccgacccagtgtacaacattggagctctgctcagaggatgttgcgtcgttgcactgcactctctccggaggacagcgttccgaataaaaacatag

SEQ ID NO: 39965 - DNA, 1989 bp, Artificial Sequence
  derived and/or modified sequence
atggggccacttagggagagcaaggagcacagggtgcagcatcacgacaaggagatatcccggagtaggatacctcgactgatactgcggccccacatgcctcaacagcaacataaggtaagcccagcaagcgagtcccctttcagcgaggaagaatccagggagtttaaccccagcagcagcgggcgcagtgctagaaccgtgagctcgaacagtttctgttctgacgatacgggctgcccatctagccagagcgttagccccgtgaagactcccagtgacgccggcaattctcccattgggttctgcccgggtagtgacgaaggtttcacgcggaaaaaatgtaccataggaatggttggtgagggatccattcagtcctcacgttacaagaaggagagcaagtcaggtctcgtgaaacccgggtcagaggcagatttctctagtagttcatccaccgggtctatatcggcccccgaagtgcacatgtcaaccgcaggatcaaagcggtcatcctcttctaggaaccggggcccccatggaagatcaaacggcgcttccagccacaagccgggaagctcgccgtcgtcccccagggagaaggacttgctgagcatgttgtgcaggaatcagctgagcccagtgaacattcaccccagctatgccccctcaagtcccagctcttctaatagcggaagctataagggctccgactgtagccctataatgaggcgaagcggccgttacatgtcatgtggagaaaatcatggggttagacctccaaaccctgaacaatacctaacgcctctgcagcagaaggaggttaccgtgcggcatctgaagacgaaactcaaagaaagcgaaaggcgccttcatgagcgagagagcgaaatcgtggagctcaaaagccagctggccaggatgcgagaagattggatcgaagaggaatgccatagagtagaagcacagctcgcactgaaggaagcacggaaggagatcaagcagctgaagcaggtgattgaaaccatgcgaagcagtctggccgacaaagataagggcattcagaagtatttcgtcgacattaacatccaaaataaaaagcttgagagcctgctgcaatccatggaaatggcacacagcgggtccctaagagatgagctctgtctggacttcccctgtgacagccccgagaagtcattaactctgaaccctcccctggacaccatggcagacggcctgagtctggaagaacaggttactggagagggggctgaccgagagctgttggtgggtgatagcatcgctaacagcacagatctctttgatgagattgtgactgcaacaaccacagagtctggcgacttggagctcgttcactcgactccaggcgctaatgtgctggagctgcttcccatagtgatgggtcaggaagagggatctgtggtggtcgagcgagctgtccagactgatgtagtgccttatagccctgctataagcgagctgatacagagtgtgctgcagaagttacaagatccttgcccaagctcgctcgcttcgccggatgagtcagaaccagattccatggaatctttcccagagtcactgtctgcccttgtggtcgacctcacaccaagaaatcccaactctgccattctgctgtcacccgtcgaaacaccgtacgccaatgtcgacgcagaggtgcatgccaacaggctgatgagagagcttgacttcgcggcctgtgtggaagaaagactcgacggggtgatacccctggcccgggggggtgtggttaggcagtattggtcaagtagcttcctcgtcgatctgctcgctgtggccgctcctgtggtacccactgtcctgtgggctttcagcacccagcgggggggcaccgaccccgtgtataatatcggtgctctcctgcgcggctgctgtgtagtcgccctgcactcgcttagacggacagcgtttagaattaagacttag

SEQ ID NO: 39966 - DNA, 1989 bp, Artificial Sequence
  derived and/or modified sequence
atgggaccattgagagagtccaaggaacatagggttcaacatcatgataaggagattagccgctctaggatcccacggttgatcttgcgcccacacatgcctcaacagcagcataaggtctcaccggcgtccgaatcacccttcagtgaagaagaaagtagagaatttaacccgagttccagcggacgatcagcacggaccgtatccagcaactccttttgttctgacgatacgggatgtccaagctcccaatccgtgtccccggtcaaaacccctagcgatgccggcaactcccccatcggtttttgcccaggaagcgacgagggttttactcggaagaagtgtacaataggaatggttggagaggggagtatccaaagctctcggtacaaaaaggaatcaaaatctggactggtgaaacctggaagtgaggcggacttctcaagctcatcatcgacgggctcgatctctgccccagaagtgcatatgagcactgccggtagcaagcgatcttcaagttctcgaaataggggcccgcacggtagatctaatggggcttcttcacacaagccaggcagcagcccatcctccccacgagaaaaggatctgctatcgatgttgtgtaggaatcagttgtcaccggtgaatattcatccgtcatacgcccctagtagccccagcagctcaaactcgggcagctacaaaggttccgactgttcacccattatgagaaggtcagggagatatatgagctgcggcgagaatcacggcgtgcggcccccaaaccccgagcagtacctaacccctcttcagcagaaagaagtaaccgtgcgacatctgaagacaaagctgaaagagtctgaacgtcggctccatgaacgagagtcggaaattgtcgaacttaaatcccagttggcccgaatgcgggaagactggatagaggaggagtgccacagggttgaggcacagttagccctgaaggaagccaggaaggagatcaaacagctcaagcaggtgattgagaccatgcgctcatcgctggctgataaggacaagggcattcagaaatacttcgtggatataaatatccagaacaagaaacttgaatctctgctccaatcaatggagatggcacattccggctctctgagggacgaactatgccttgattttccttgcgatagccctgagaagtcactcacgctcaaccctccgctggatactatggcggatggactctctctggaggaacaggtgaccggcgaaggcgccgatagggaactgctcgttggcgactcaatagctaattctaccgatctgttcgacgagatcgtgaccgcgaccaccacggagtcaggggatcttgaactggttcactccacacctggcgcaaacgtcctggaactgcttcctatagtaatggggcaggaagagggttctgtggtggtcgagagagcagtccaaaccgacgtcgttccttacagtccagccatctcagagcttatccagagtgtgctgcagaagttgcaggacccgtgcccatccagcctggctagccccgatgaaagtgagcccgacagcatggagagctttccggaatccttgtccgcgctggtggtcgatttaaccccccgcaatccaaatagcgccattcttctttcaccagtcgagaccccatacgccaatgtcgatgccgaagtccatgccaatcgtctcatgcgtgagctggatttcgctgcatgcgttgaggagaggttggacggagtgatccccctagccaggggcggggtagtgagacagtactggagttctagtttcctggtggacctgctggcggttgccgcaccagttgtgcccaccgtcttatgggcattttccacccaacggggaggcacggatcccgtatataatattggagctctgcttcgtggttgctgtgtggtggctctgcattctctgaggcgaaccgcattccggatcaaaacatag

SEQ ID NO: 39967 - DNA, 615 bp, Artificial Sequence
  derived and/or modified sequence
atgggcccattgcgggagtcgaaagaacatcgcgtgcagcaccacgataaggagatatcacgcagccgaattccacgccttatactgagaccccacatgccccagcagcagcacaaagtctctccagcaagtgagtcaccattttctgaggaagaatctagagaattcaatcctagcagctctgggagaagcgcccggacagtgtccagtaattctttctgctccgatgatacgggatgccctagtagccagtccgtcagccctgtgaagaccccaagtgacgctggcaactctcccatcggcttttgccccggctccgacgaagggttcactcggaagaaatgtaccattggcatggtcggggaggggtcgatacagtcctctcgatataagaaagagtctaagtctggcttagtgaaaccagggtctgaggccgatttctctagctcgtcctcaactgggagcatatccgccccagaagtgcatatgtctactgccggctctaagcgaagttcaagcagcaggaacagaggaccccacgggcggtctaacggtgccagcagccacaaacctgggagtagcccatcctctcctcgggagaaggacctattgtag

SEQ ID NO: 39968 - DNA, 1788 bp, Artificial Sequence
  derived and/or modified sequence
atggggcctttctgggcgagaaaggatgacaccggatgcccctcatcccagtcggtcagtcccgtgaagactccctctgatgctggcaactctcccatcgggttttgccctggcagcgatgaggggtttactcgcaagaaatgtacaatcggaatggtgggagaaggttccatccaatcttcccggtacaagaaggagtctaaatctggtctggttaagcccggctcagaggccgacttcagttcctctagcagtactggcagcattagcgcacctgaggtacacatgagcactgccggttctaagcgatcctccagttctcgtaaccgtgggccccatggacgctctaatggagcctcatcccacaagcccggcagcagcccctcatcccccagagaaaaggacctacttagcatgttatgcagaaatcaactatcaccggtgaatatccacccatcctacgcgccgtcttctccttccagctccaatagcgggtcctataagggaagtgactgcagtcctattatgaggcggagcggaagatacatgagctgcggcgaaaaccacggagtccggcctcctaaccccgagcagtacctaaccccgttgcagcaaaaggaagtgacggtgcgacatctaaagaccaagttaaaagaaagtgagcggcgccttcacgaaagagaatctgagattgtggagctgaaaagccagctggcacggatgagggaagactggatcgaggaagaatgtcaccgggtggaggcccagcttgccttaaaggaagctcgcaaggaaataaaacagttgaagcaggtgattgaaacaatgagatccagtttggctgacaaggacaagggaatacagaagtattttgtggatattaacatccagaacaaaaaattggagagcctactgcagtccatggaaatggcccacagcggcagcttgcgggatgaattatgccttgactttccctgcgattctcccgaaaagtcgctcactctgaatccacctctggataccatggccgacgggctgtctcttgaagaacaggtgactggggaaggtgccgatagggagcttctggtgggtgacagtattgccaattccaccgatctgtttgatgaaattgtgacggcaaccacaacggagagtggtgatttagaactggttcacagcacccccggcgccaacgtgttagaactcctgcccatcgttatgggtcaggaagagggatctgtggtggtggaacgcgcggtccaaacagacgtggtgccctactcacccgccatttcggagctaatacaaagcgtcttacagaagctccaagatccttgtccatcctctttggctagtccagacgagagcgaacctgactctatggaatctttcccagaaagcctgagcgcgctggttgttgacctaacccctcgcaatcctaacagcgcgatcctcctcagcccagttgagactccatacgccaatgtggatgcggaggtccatgccaataggttgatgcgagaactcgacttcgcagcttgcgttgaggagaggctcgatggagtgatacccctagccagaggtggagtggtgcgtcagtactggtcctccagctttttggttgaccttctggcagtggcagcgcctgttgtccccacagtgttgtgggctttttcaacccagagaggcgggacagaccctgtctacaacatcggtgcactccttcgcggttgttgcgttgtcgcgctgcatagcctgcgtcgtacagcttttagaattaaaacttag

SEQ ID NO: 39969 - DNA, 489 bp, Artificial Sequence
  derived and/or modified sequence
atgggcccactacgggaatctaaggagcatcgagtgcagcaccacgataaagagatttcgcgctcacgcattccgcggctcatactccggccacatatgccacagcagcaacataaggtgtcgcccgcctcagagagcccattctcagaggaggagtcaagagagttcaatcctagcagctccggccgttccgcgcgcacagtttcctctaatagcttctgctccgacgatacggggtgcccctcgtcccagtctgtctcccctgtgaagactccatcagacgcaggcaatagccctatcgggttttgccctggtagcgacgaaggttttaccagaaagaaatgtactattggcatggttggggaggggtcaatccaatcatctagatacaagaaagagtccaaatccggcctagtgaagcccgggtccgaagctgatttctcgagttccagttctacaggcagcatcagtgcccccgaggtccattag

SEQ ID NO: 39970 - DNA, 1989 bp, Artificial Sequence
  derived and/or modified sequence
atgggacccctgcgtgagtctaaagagcatcgtgtccagcatcacgataaagaaatatcccgcagtcgaattcctaggctcatactgcgcccccatatgccacagcagcaacataaagtgtctccggcgagcgaaagcccattttctgaggaggaatctcgagaatttaacccttcttccagcggccgctccgcgagaacggtgtcgtccaactctttttgctcagacgacaccggctgtccatcgtcccagagcgtgagcccggtaaagacacccagcgacgctggaaatagccccatcggcttttgcccagggtcagacgagggttttacacgaaagaagtgtactataggcatggtcggtgagggcagcatccaaagttcccgctacaagaaagaatcaaaaagcgggctggttaagcctggctcagaagccgattttagctccagctcctccacgggatctattagtgccccagaggtccacatgtccaccgcagggtctaaaagatcaagttcgtctaggaatagaggaccccacggccgttccaacggggcaagctcccacaagcccggctcttccccctcatctccacgcgaaaaggacctgttgagcatgctttgccggaaccagctcagcccagtaaacatccatccttcttacgcacccagctctccttcaagttccaactctggatcctacaagggatccgactgctcccccatcatgcgacgctctgggaggtatatgagttgcggcgagaatcatggtgtgaggcctcccaaccccgagcagtacctcacgccactacagcaaaaggaagtgactgtcaggcatctgaagacaaaacttaaggagagtgagagacggttgcacgagagagagagcgaaatcgtggagttgaagtcacagctcgcccgaatgagagaagattggattgaggaagagtgccaccgggtagaagcacagctggcactgaaggaagctcgcaaagaaatcaaacagctcaaacaagttatcgagacaatgcgctcgtccttggccgacaaagataaaggtatccagaagtacttcgtcgatatcaatatacaaaataagaaactggaatcactgttgcagtcaatggaaatggcccactcaggtagcctccgcgacgaactgtgtttagactttccctgcgacagcccagagaagtctcttacgctcaatcctcctcttgataccatggcggatggactctcattagaggaacaggtgacgggtgaaggcgcagaccgggagctcctcgtaggagacagcatcgccaatagcacggatttatttgacgagatcgtcacggctactactacggagagcggtgacttggaactggttcacagcacaccaggggcaaacgttctagagctgttgccgatcgtgatgggtcaggaggagggctccgtggtggtggagcgggccgtgcagacggacgtggtgccttacagccccgccatcagtgaactgatacaaagcgtgctgcaaaagctacaggacccttgtccatccagtctagccagccctgatgaatcagaacccgactctatggagtcctttcctgagtctctgtctgctttagtggtcgacctgactcccagaaaccctaactccgcaatcctcctgagccctgtcgaaacaccctacgcaaacgtggatgccgaggtgcacgcgaatcggttaatgcgcgagctggatttcgcggcttgtgtcgaggagagattggacggtgtcatccctctcgcccggggaggcgtcgtcagacagtactggtccagctcattcttggtcgatctgctggctgtggcagcccctgtggtccccaccgtgctctgggccttcagcactcagcgcggtgggacagatccggtttacaacattggggccctgttacgcgggtgctgtgtggttgccctccacagcctgcgacgaaccgcatttcgaatcaagacatag

SEQ ID NO: 39971 - DNA, 315 bp, Artificial Sequence
  derived and/or modified sequence
atgggacccttgagggagagcaaggaacaccgtgtgcaacatcatgataaggagatttcaaggagtaggatcccccggctgattctacgaccgcacatgccacagcaacagcacaaagtgagtcccgctagcgaatcccctttcagtgaggaggaatctagggagttcaatcccagctcttccggacggtcagctcggaccgtaagtagtaactctttctgctccgatgacaccgggtgccctagcagccagtccgtcagccccgtgaagacaccgtcagatgcgggcaactcccctattggcttctgcccctag

SEQ ID NO: 39972 - DNA, 1989 bp, Artificial Sequence
  derived and/or modified sequence
atgggccccctgcgggagagcaaggagcaccgggtgcagcaccacgacaaggagatcagccgcagccgcatccccaggctcatcctgcggccccacatgccccagcagcagcacaaggtgtccccagccagcgagagccccttcagcgaggaggagagccgggagttcaaccccagcagcagcggccgcagcgccaggacagtgagcagcaacagcttctgcagtgatgacaccggctgccccagcagccagagcgtgtcccctgtgaagacccccagtgatgctggcaacagccccatcggcttctgccccggcagtgatgagggcttcaccaggaagaagtgcaccatcggcatggtgggggagggcagcatccagagcagccgctacaagaaggagagcaagagcggcctggtgaagccaggcagcgaggccgacttcagcagcagcagcagcacaggcagcatcagcgcccctgaggtgcacatgagcacagctggcagcaagaggagcagcagcagcaggaacagaggcccccacggccgcagcaatggagccagcagccacaagccaggcagcagccccagcagcccccgggagaaggacctgctgtccatgctgtgcaggaaccagctgagccctgtgaacatccaccccagctatgcccccagcagccccagcagcagcaacagcggcagctacaagggcagtgactgcagccccatcatgaggaggagcggccgctacatgagctgtggggagaaccacggcgtgcggccccccaaccctgagcagtacctgacccccctgcagcagaaggaggtgacagtgcgccacctgaagaccaagctgaaggagagcgagcggcggctgcacgagcgggagagcgagatcgtggagctgaagagccagctggccaggatgagggaggactggattgaggaggagtgccaccgggtggaggcccagctggccctgaaggaggccaggaaggagatcaagcagctgaagcaggtgattgagaccatgaggagcagcctggccgacaaggacaagggcatccagaagtactttgtggacatcaacatccagaacaagaagctggagagcctgctgcagagcatggagatggcccacagcggcagcctgagagatgagctgtgcctggacttcccctgtgacagccctgagaagagcctgaccctgaacccccccctggacaccatggctgatggcctgagcctggaggagcaggtgactggagagggcgctgaccgggagctgctggtgggggacagcatcgccaacagcacagacctgtttgatgagatcgtgacagccaccaccacagagagcggggacctggagctggtgcacagcacccctggggccaacgtgctggagctgctgcccatcgtgatgggccaggaggagggctctgtggtggtggagagagctgtgcagacagatgtggtgccctacagccctgccatcagcgagctgatccagagcgtgctgcagaagctgcaggacccctgccccagcagcctggccagcccagatgaaagtgagccagacagcatggagagcttccctgagagcctgagcgccctggtggtggacctgaccccaagaaaccccaacagcgccatcctgctgagccctgtggagaccccctatgccaacgtggatgctgaggtgcacgccaaccggctgatgagggagctggactttgctgcctgtgtggaggagcggctggatggagtcatccccctggcccggggcggcgtggtgcggcagtactggagcagcagcttcctggtggacctgctggccgtggccgcccctgtggtgcccaccgtgctgtgggccttcagcacccagaggggcggcacagatcctgtgtacaacatcggggccctgctgcggggctgctgcgtggtggccctgcacagcctgcggaggacagccttccgcatcaagacctag

SEQ ID NO: 39973 - DNA, 615 bp, Artificial Sequence
  derived and/or modified sequence
atgggccccctgcgggagagcaaggagcaccgggtgcagcaccacgacaaggagatcagccgcagccgcatccccaggctcatcctgcggccccacatgccccagcagcagcacaaggtgtccccagccagcgagagccccttcagcgaggaggagagccgggagttcaaccccagcagcagcggccgcagcgccaggacagtgagcagcaacagcttctgcagtgatgacaccggctgccccagcagccagagcgtgtcccctgtgaagacccccagtgatgctggcaacagccccatcggcttctgccccggcagtgatgagggcttcaccaggaagaagtgcaccatcggcatggtgggggagggcagcatccagagcagccgctacaagaaggagagcaagagcggcctggtgaagccaggcagcgaggccgacttcagcagcagcagcagcacaggcagcatcagcgcccctgaggtgcacatgagcacagctggcagcaagaggagcagcagcagcaggaacagaggcccccacggccgcagcaatggagccagcagccacaagccaggcagcagccccagcagcccccgggagaaggacctgctgtag

SEQ ID NO: 39974 - DNA, 1788 bp, Artificial Sequence
  derived and/or modified sequence
atgggccccttctgggccaggaaggatgacaccggctgccccagcagccagagcgtgtcccctgtgaagacccccagtgatgctggcaacagccccatcggcttctgccccggcagtgatgagggcttcaccaggaagaagtgcaccatcggcatggtgggggagggcagcatccagagcagccgctacaagaaggagagcaagagcggcctggtgaagccaggcagcgaggccgacttcagcagcagcagcagcacaggcagcatcagcgcccctgaggtgcacatgagcacagctggcagcaagaggagcagcagcagcaggaacagaggcccccacggccgcagcaatggagccagcagccacaagccaggcagcagccccagcagcccccgggagaaggacctgctgtccatgctgtgcaggaaccagctgagccctgtgaacatccaccccagctatgcccccagcagccccagcagcagcaacagcggcagctacaagggcagtgactgcagccccatcatgagaagaagtggccgctacatgagctgtggagaaaatcatggagtgcggccccccaaccctgagcagtacctgacccccctgcagcagaaggaggtgacagtgcgccacctgaagaccaagctgaaggagagcgagcggcggctgcacgagcgggagagcgagatcgtggagctgaagagccagctggccaggatgagggaggactggattgaggaggagtgccaccgggtggaggcccagctggccctgaaggaggccaggaaggagatcaagcagctgaagcaggtgattgagaccatgaggagcagcctggccgacaaggacaagggcatccagaagtactttgtggacatcaacatccagaacaagaagctggagagcctgctgcagagcatggagatggcccacagcggcagcctgagagatgagctgtgcctggacttcccctgtgacagccctgagaagagcctgaccctgaacccccccctggacaccatggctgatggcctgagcctggaggagcaggtgactggagagggcgctgaccgggagctgctggtgggggacagcatcgccaacagcacagacctgtttgatgaaattgtgacagccaccaccacagaaagtggggacctggagctggtgcacagcacccctggggccaacgtgctggagctgctgcccatcgtgatgggccaggaggagggctctgtggtggtggagagagctgtgcagacagatgtggtgccctacagccctgccatcagcgagctgatccagagcgtgctgcagaagctgcaggacccctgccccagcagcctggccagcccagatgagagcgagccagacagcatggagagcttccctgagagcctgagcgccctggtggtggacctgacccccaggaaccccaacagcgccatcctgctgagccctgtggagaccccctatgccaacgtggatgctgaggtgcacgccaaccggctgatgagggagctggactttgctgcctgtgtggaggagcggctggatggagtcatccccctggcccggggcggcgtggtgcggcagtactggagcagcagcttcctggtggacctgctggccgtggccgcccctgtggtgcccaccgtgctgtgggccttcagcacccagagaggaggaacagatcctgtgtacaacattggagccctgctgcggggctgctgcgtggtggccctgcacagcctgcggaggacagccttccgcatcaagacctag

SEQ ID NO: 39975 - DNA, 489 bp, Artificial Sequence
  derived and/or modified sequence
atgggccccctgcgggagagcaaggagcaccgggtgcagcaccacgacaaggagatcagccgcagccgcatccccaggctcatcctgcggccccacatgccccagcagcagcacaaggtgtccccagccagcgagagccccttcagcgaggaggagagccgggagttcaaccccagcagcagcggccgcagcgccaggacagtgagcagcaacagcttctgcagtgatgacaccggctgccccagcagccagagcgtgtcccctgtgaagacccccagtgatgctggcaacagccccatcggcttctgccccggcagtgatgagggcttcaccaggaagaagtgcaccatcggcatggtgggggagggcagcatccagagcagccgctacaagaaggagagcaagagcggcctggtgaagccaggcagcgaggccgacttcagcagcagcagcagcacaggcagcatcagcgcccctgaggtgcactag

SEQ ID NO: 39976 - DNA, 315 bp, Artificial Sequence
  derived and/or modified sequence
atgggccccctgcgggagagcaaggagcaccgggtgcagcaccacgacaaggagatcagccgcagccgcatccccaggctcatcctgcggccccacatgccccagcagcagcacaaggtgtccccagccagcgagagccccttcagcgaggaggagagccgggagttcaaccccagcagcagcggccgcagcgccaggacagtgagcagcaacagcttctgcagtgatgacaccggctgccccagcagccagagcgtgtcccctgtgaagacccccagtgatgctggcaacagccccatcggcttctgcccctag

SEQ ID NO: 39977 - DNA, 1989 bp, Artificial Sequence
  derived and/or modified sequence
atgggccccctgcgggagagcaaggagcaccgggtgcagcaccacgataaggaaatcagcaggtcaagaattcccaggcttattttaaggccgcacatgccacaacagcaacacaaagttagcccagcgtccgagtctccattctctgaagaagagagcagggagtttaaccctagctcgtccggacggagtgcccgaacagtctcgagcaactctttttgctccgatgacacgggctgtccctccagccagagtgtgtcccccgtcaaaaccccatccgacgctggcaatagcccgatcggtttctgtcctggatctgatgaaggcttcactcggaaaaaatgcactatcggcatggtgggtgagggcagcatacagtcatcacgttataagaaagagagcaaatccggtctggtaaagcctgggtctgaagcagatttctccagctcctcatccacagggtctataagcgctccagaagtgcatatgagcaccgccggcagtaagagaagcagctcaagccgaaaccgcggaccccatggcaggtctaacggtgcaagctcccataagccaggaagcagccccagttcccccagagaaaaagacctgctgtccatgctctgtcgcaaccaactgagcccagttaatatccacccgtcttatgccccctctagtccttcttcctctaacagcgggtcctataaaggatcagactgtagccccatcatgagacggtcagggcgctatatgagctgcggcgagaatcacggagttcgcccacccaaccctgagcagtatctcaccccacttcagcagaaggaggtgactgtccgacacctcaaaaccaagctcaaggagtctgaacggcgcctccacgagcgcgaatctgagatcgtagaactgaaatcgcagttggccagaatgcgagaggactggattgaggaggaatgtcaccgagttgaggcccaactggccctgaaagaggctcgcaaggaaatcaagcagttgaaacaagtcatcgaaaccatgcgcagctccttagccgataaagacaagggtattcagaagtatttcgttgatattaatattcagaataaaaagctggagtcactcctccagagcatggaaatggcccattctggctcactgagggatgagctctgtctggacttcccttgcgatagccccgaaaagtcgttgactctgaaccccccactggacaccatggctgatgggctcagtctagaagagcaggtgactggggagggggccgacagagaactactcgttggcgacagcatcgccaatagtacggatttgtttgatgaaatcgtgacggctacaaccacggaatccggggaccttgagctggtgcactctacgcctggtgccaatgtgctggaactcctgccaatcgtcatgggtcaggaagagggaagtgttgtggttgagcgtgcagtgcagaccgatgtcgtgccctactctcctgcgatctcagagctcattcagtccgtcctccagaaacttcaagatccatgcccgtctagtctggcatcccccgacgaaagcgaaccggactccatggagagctttccagagtctctgtccgccctcgtggtggacctcactccccggaatcccaactcagcaatccttctttcccccgtggagacaccctacgcgaacgtggatgccgaagtccacgccaatcggctcatgcgtgagttggactttgcagcgtgtgtggaagagaggctggatggcgtcatcccattggctcgcggaggcgtcgtccgtcagtactggagctccagctttctcgtcgacctcctcgccgttgccgctcccgtcgtgcccaccgttctctgggccttttcaacacagcgtggaggtacggatcccgtgtataatattggtgccctgctgcgaggatgctgcgtggtcgctttacattccctaagacgcacagcctttcgcattaagacctag

SEQ ID NO: 39978 - DNA, 1989 bp, Artificial Sequence
  derived and/or modified sequence
atgggccccctgcgggagagcaaggagcaccgggtgcagcaccacgacaaggaaatctctaggtcccggattccaagattaatacttaggccacacatgccccagcaacagcacaaagtgtcacccgcaagcgaatctcctttttctgaagaggagagtcgcgagtttaacccctcttcatctggacgaagtgccaggactgtaagctcaaattcattttgtagtgatgataccggttgcccttcttcgcaatcagtatctcccgttaaaactcccagcgatgcagggaattcccctatcgggttctgtcctggcagcgacgagggcttcaccagaaaaaagtgcacaatcgggatggtgggggaagggtccatacagagttcacgctacaagaaagagagtaaaagcggtctggttaagcctgggtctgaagctgacttttcctctagtagctctacaggttctataagcgcccccgaggtgcacatgtccacagctggctccaagagatcgtcttcttctcggaatagggggccacacgggagatcaaacggagccagtagtcataaacccggtagctctcctagctccccccgggagaaagacctgctctcaatgctgtgccggaaccagctgagccccgtgaatatccatccctcgtacgccccttcttctcccagcagcagcaacagtggcagttacaaaggaagcgattgctctcccatcatgaggcggtcaggacggtatatgtcctgcggcgaaaaccacggagtgagaccccctaatccagagcagtacctgacaccacttcagcaaaaagaagtaaccgtgcgccacctgaaaacaaagttgaaagaatccgaacggcgtttgcacgagagagagagcgagatcgtggaactgaagagccaactggccaggatgcgcgaggattggattgaggaagaatgtcaccgggtagaggcacagcttgcactgaaagaggcacgcaaagaaattaaacagctgaagcaggtcattgaaaccatgagaagctcacttgctgataaagacaaagggatccagaaatatttcgttgatattaacatacagaataaaaagttagaatcacttctgcagtcaatggagatggcacatagtggctccctgcgcgatgagctgtgtttagacttcccttgcgattcaccagaaaagagtttgaccctaaatccgccattagatacgatggccgacggattatctttagaggagcaagtcacaggtgagggcgctgacagggaattacttgtcggggatagtatcgccaactctacggatctgtttgacgaaatcgttaccgctacaaccacagagagtggggacctggaactggtacatagcacacctggagctaatgttctggaattactgcccattgtgatgggccaggaagaaggaagcgtggtcgttgaacgagccgtccagacagacgtggtcccatactcaccggctatctccgaattgatccaaagtgtcttacagaaactgcaggatccctgcccgtctagccttgcctctccagatgaaagcgagcctgatagtatggaaagctttccggagagtctgtccgcgctggtggtggaccttacaccaagaaaccctaatagcgctatcctccttagccccgtggaaaccccctatgctaacgtggacgctgaggtgcacgccaacagactgatgagagaactagattttgcagcctgcgtggaggagcgcctggatggggtgatccctctggcacgcggcggggtggtgagacaatattggagctcctcgtttctggtagacctcctagcagtcgctgctcccgtcgttcccacagtgctttgggcattttcaacacagagaggaggaaccgatcctgtctataacatcggcgccttgctaagaggctgttgtgtggttgccctgcactcactgcgccggacagcctttcggatcaagacgtag

SEQ ID NO: 39979 - DNA, 1989 bp, Artificial Sequence
  derived and/or modified sequence
atgggccccctgcgggagagcaaggagcaccgggtgcagcaccacgacaaggagattagcagatcccgcatacccagactgatattacggccccatatgccccagcagcagcacaaagtgtccccggcctcagagtcccctttctccgaagaagaatctcgcgaatttaaccccagttcctccggccgatcagcaaggacagtctcaagtaattctttctgcagcgacgataccggttgtccaagctcgcagtcggtaagtcctgtgaaaacgccgtctgacgctggcaattctcctatcggtttctgccctgggtctgacgagggcttcactcggaagaagtgcacaattggcatggtgggcgagggctcgattcagtcctcccgatacaagaaggagtcaaagtccggcctggtgaagcctggcagcgaggccgatttctctagcagcagctctaccggctccataagtgctccggaagtgcacatgagtacggctggaagcaaacgatcttctagttcgcgcaacagagggccacacggccggtcaaatggtgcgtcgagccataaacccgggagttcacctagctcccctcgggaaaaagatttgctttcaatgctctgccgaaaccagctgagtcccgtgaacattcatcccagctatgccccatcctccccttctagctcaaactccggctcttataaaggaagcgactgctcacctattatgaggcggtcagggcggtacatgtcatgcggagagaatcatggcgtacgcccaccgaatccagagcaataccttactcctctgcagcaaaaagaggttaccgtccgacaccttaaaaccaaactcaaagagtctgagcgcagactccacgagcgggagagcgaaattgtcgagctcaagagccagctcgcacgcatgcgagaggactggatcgaggaagagtgccaccgcgtggaagcacagctcgccctgaaagaagcccgcaaggagatcaaacagctgaagcaggtgatagaaacgatgaggtcctccctggccgataaggataaaggaatccaaaagtatttcgtggacattaatatacagaacaaaaagctcgaaagcctgctacagagcatggaaatggctcattcagggagccttagagatgaattgtgtctcgacttcccctgcgatagcccagaaaagtccttaacactgaacccccctctggacacaatggccgatgggctgtccctggaggaacaggtgactggggaaggcgctgacagagagctgctcgtcggcgacagcatcgccaattccacagatttgtttgacgaaatcgtcactgctacgacaacggagtcgggggacttggagttagtgcattctacccccggcgcaaacgtcctagaactgcttcccattgtaatggggcaagaagagggatcagtagtggtcgaaagagctgtgcagactgatgtggtgccttactctccagctatctccgagctgatccagtctgtgctgcagaaactgcaagacccatgtccctcttcactggcgagtcctgatgaatccgaaccagactctatggagtcctttccagagagcttgagtgctctggtggtcgatctgactccaaggaaccctaactctgctattctcctttctccagtggagacaccttatgctaacgtggatgctgaggttcacgccaatagactgatgagagagctcgatttcgccgcttgcgtagaagagcggctcgatggcgtaattcccttggcacgaggaggtgtcgtcaggcagtattggagttcctccttcctggtggacttattggcagtggcagcacctgtagtcccaacagtactgtgggccttttcaactcagaggggaggtacggacccagtctacaacatcggcgccctgctgcgtggatgctgcgtggtcgccctccactccttacgacgcactgcttttcggattaagacatag

SEQ ID NO: 39980 - DNA, 615 bp, Artificial Sequence
  derived and/or modified sequence
atgggccccctgcgggagagcaaggagcaccgggtgcagcaccacgataaggagatctcccgaagtaggatcccacggcttatattacggcctcacatgcctcaacagcagcacaaagtgagcccagcctcggaaagccccttctctgaagaagagagccgggagttcaacccgtcttcctcaggtagatccgcccggactgtttcctccaattccttttgtagcgatgacaccggatgccctagcagccaatcagtaagtcccgtcaaaacaccgtcagacgccggaaattcccccataggtttttgtccaggcagcgatgagggatttaccagaaaaaagtgcacgatcggaatggtgggggagggtagtatacaatccagtcgctacaagaaagagtctaagtcaggacttgtgaaacccggcagcgaagccgacttctcgagttcctccagcactggcagcattagcgcaccggaggtgcatatgtctactgccggctctaaaagatcaagcagttcgcggaatcgggggccccatggtagatcaaatggggcctcttcgcacaagccaggctcctccccgagttcacctcgtgagaaggaccttttgtag

SEQ ID NO: 39981 - DNA, 1788 bp, Artificial Sequence
  derived and/or modified sequence
atgggccccttctgggcccggaaggacgacaccggctgccccagcagtcagtctgtgtctcctgtgaagaccccttcagacgccgggaattctcccatcgggttctgccccgggagcgacgagggatttaccaggaaaaagtgtaccatcggcatggtgggcgaggggtctatacaatcaagcagatacaaaaaagagtccaagagcggtctagtgaaaccaggctcagaggccgacttctctagtagtagttctacaggcagtatcagcgcacccgaagtgcacatgtctaccgccggaagtaagcgtagcagctcctcaagaaatcggggcccacacgggagatccaacggtgctagctcacataaacccggaagctctcccagttccccgagagaaaaagatcttctgtcaatgttatgcaggaatcagctgagccctgtgaatattcatccctcctacgcaccaagctcacccagctcctctaattcagggtcttacaagggaagtgactgcagcccaatcatgcgtcgatctggccgctacatgtcctgcggggagaaccacggtgtgagaccaccaaatcctgagcaatatttaacccccctgcagcaaaaggaagtgaccgtccgtcacctaaagacgaagctaaaggaatccgagaggcgcctgcatgaacgggagagtgagatcgtggagctaaagagtcagttggcgaggatgcgcgaggattggatcgaggaagagtgtcatcgggttgaagcgcaactcgcactgaaggaagctcgtaaggaaattaaacagctcaaacaggtgattgagactatgagaagttctctggccgataaggataagggtatacagaagtacttcgtggacattaacattcagaataagaaactcgagtcccttctccagagtatggagatggcccactccggatcactacgcgatgagctttgcctagactttccctgcgactcaccagagaagagtctcacactgaaccccccactggataccatggctgacggtttatcccttgaggagcaagtgacaggggagggggctgatagggagctgcttgtgggcgactccatcgccaacagcactgatctgttcgacgaaatcgtgaccgctacaaccacagagtctggagatttggaactggtgcacagtactcctggtgccaatgtgctcgagttgcttcccatagtgatgggtcaggaagaaggctccgtcgtcgtcgaaagagctgttcagacggacgtggtgccgtatagtcccgccatttctgagctgatccagtccgtgctgcaaaagctgcaagatccgtgccctagctccctcgctagcccagacgaatcagagcctgacagtatggagtctttccccgaaagtctcagcgcactggtggtcgatctgacaccacgcaaccccaactctgccattttgctaagtcctgtggaaaccccctacgccaacgttgatgcagaggtacacgccaatcgactgatgcgggagctcgactttgcggcttgcgtagaagagagactggacggtgttatacctctggcaagggggggtgtcgtacggcaatattggtcgagctccttccttgtggatctgctggctgttgctgccccagttgtcccaaccgttttgtgggcttttagtactcagcgcggcggcaccgatccagtgtacaacataggcgcgctactgcgcggatgttgtgtggtcgctctccactctttgcgtcgcacagcctttcgcattaagacctag

SEQ ID NO: 39982 - DNA, 489 bp, Artificial Sequence
  derived and/or modified sequence
atgggccccctgcgggagagcaaggagcaccgggtgcagcaccacgacaaggaaatcagcagaagcaggattccccgcctgattctccggccccacatgcctcaacaacaacacaaagtgagccccgcatctgagtcaccattcagcgaagaggaatcccgagagtttaatcccagttccagcggccggagcgccagaacagtttccagtaattcgttctgttcagacgacactggctgcccatctagccaatctgtaagccctgtcaagacaccgtctgatgctggtaattccccaatagggttttgccccggctccgacgagggatttacgagaaagaagtgcacaattggaatggtgggagagggcagcatacaatctagtcggtacaaaaaagaaagcaagtctggccttgtgaaaccaggctctgaagcggacttcagttcctcttctagtactgggagcatctccgcccccgaggttcactag

SEQ ID NO: 39983 - DNA, 1989 bp, Artificial Sequence
  derived and/or modified sequence
atgggccccctgcgggagagcaaggagcaccgggtgcagcaccacgataaagagatttcccgcagtagaataccacgcttaattttgcgacctcatatgccccagcagcagcacaaggtgagtccagcttctgagagcccatttagtgaagaggagtcacgcgagtttaatccgagctctagcggccggtccgccagaacagtgtctagcaacagcttctgctcagacgacaccggctgtcccagtagccaatctgtgagtcccgtgaaaaccccaagtgatgccggaaattcaccaattggattctgcccagggtccgacgaaggatttactagaaagaaatgtacgataggaatggtgggggaaggtagtattcagagttcccggtataagaaggaatccaagagcggcctggttaaaccaggctcagaggctgatttctcctctagttcctcaactggctccatctctgctcctgaagtgcacatgtccaccgccggatcgaaaaggtcctcctcctctcggaatagaggcccacacggccgtagcaacggggctagttcccataaaccaggtagtagtccttccagtccccgggagaaggatctgttgagcatgttatgcagaaaccaactctcccccgtcaacattcatccttcctatgctccctcttctccatcatcttcgaactcgggatcctacaaggggagcgattgctcccctataatgagaaggagtggaagatatatgagttgtggagaaaatcacggggtccgccccccaaacccagagcagtacctcacccccctccagcaaaaggaggtcactgtaaggcatttgaagactaagctgaaggagtcagaacggaggctgcacgaaagagaaagcgagattgtcgagctgaagagccagttggcaagaatgcgggaggattggatagaggaggaatgtcaccgcgtagaggcccagcttgccttaaaggaggctcgaaaagagatcaagcagcttaagcaggtcatcgaaacaatgcggtcatcattggctgataaagataagggtatccagaaatactttgtagacattaatattcaaaacaagaagctcgagtctttactccagtctatggaaatggcccacagcggtagcctgcgcgacgagctgtgtctggatttcccctgcgactcccccgagaagtcccttactctgaacccgcccctggatacgatggcggacgggctctccctagaagaacaggtgacaggggaaggagcagatcgtgaattgcttgtcggtgattcaattgccaactctacggacctcttcgacgagatagtaaccgcgactacaaccgagtcgggggatctggagctggtacacagcacccccggtgccaatgtcttggagctactgcccatcgtgatggggcaggaagagggttccgtagtggtcgaacgggctgttcagacagatgtcgttccctattcgccggctatcagtgaactgatccagtcagtgcttcagaaactgcaagacccttgcccctcctctcttgcaagccctgacgagtctgaaccggacagcatggagagttttcctgaaagcctgtctgcgttagtcgtcgatttgactccacgtaacccaaacagtgctattttactcagtcctgttgaaaccccgtacgcaaatgttgatgccgaggtgcacgccaacagactcatgagggagctggactttgcggcttgcgtcgaggagaggctcgatggcgtcatccctctcgctagaggaggggtagtccggcagtactggagttcatcttttctcgttgacttattagcagtcgctgcaccagtagtacccaccgtcttgtgggcctttagtacccagcgcggtggcaccgaccccgtctacaatattggcgcgttactgagaggctgctgcgttgttgccctgcactctctaagacggactgccttcaggatcaaaacttag

SEQ ID NO: 39984 - DNA, 315 bp, Artificial Sequence
  derived and/or modified sequence
atgggccccctgcgggagagcaaggagcaccgggtgcagcaccacgacaaggaaattagtaggagtcgtatacctcgactgatcttacggccgcacatgcctcagcagcagcataaggtttccccggcctccgaaagccctttcagcgaggaagagtctagggagtttaatccatcttcctccgggcgaagtgcccgcacggtatctagcaatagtttctgcagcgatgacacaggctgcccttctagccagagcgtgagcccggtgaaaaccccctccgatgccggcaatagccccattggtttctgtccctag

SEQ ID NO: 39985 - DNA, 1989 bp, Artificial Sequence
  derived and/or modified sequence
atggggcctctgcgcgagagcaaagagcaccgggtgcaacatcatgacaaggaaatcagccggtcccgcatcccacggttgatcctccggccacacatgcctcaacaacagcacaaagtcagtccggcatccgagtctccctttagcgaggaggaatcacgagaatttaatccctcttcatccggacgcagcgctcggactgtgtcctctaattctttctgttcagatgacactggttgtcccagttcccagagcgtttcccccgttaagacgccaagtgatgcgggaaactcacccataggattctgtcccggttctgatgaaggcttcacccgaaagaagtgcactatcggtatggtgggggaggggtccattcaaagcagccgatataagaaagagagcaagagtggtctcgttaagcctggctctgaggccgacttctccagttcttcgagcactggaagcatcagtgcacccgaagtgcatatgagcactgctggcagtaagcgttcctcaagttcacgaaatcgcggtccccacggcagatctaatggagcctcttctcacaagcccggttcctcaccatcatccccacgcgaaaaggatttattgtccatgctttgtcggaatcagctctctcctgtcaatatacaccccagctatgccccaagtagtccatcctccagcaattctggctcctacaagggatcagattgctctccgataatgaggagaagcgggagatatatgagctgcggggagaaccatggagtcagaccgccaaacccagaacaatacctcaccccacttcagcagaaggaggtgaccgtcagacatttgaaaactaaactcaaggaatcggagcgacgactgcacgagcgggaatccgaaattgtagagctcaagtcacagctcgctcgtatgcgtgaagattggattgaggaggagtgccatcgcgtcgaagcccagctggcacttaaggaagccaggaaggaaatcaagcaattaaaacaagtgatagaaactatgagatcttcactcgcggacaaagataagggtatccagaagtattttgtggacatcaatatccagaataagaaattggagtctctgttgcagagcatggaaatggcccattcaggtagtcttcgcgacgaattgtgcttagacttcccctgcgactctcccgaaaagtccctgactctcaaccctcccttagataccatggcagatggtctgtctctagaggaacaggtcactggagagggtgctgatcgggagctgctcgtgggagattccattgccaactccactgatctctttgacgagatagtaaccgcaacgaccaccgagtccggcgacttggagttggtacactctacacccggagcgaatgtcctggagcttctacctatcgtaatgggccaggaagagggctctgtggtagtcgaaagagccgttcagactgacgtagtgccctattccccagccatctctgagctcatccagtccgttttgcaaaagctgcaggatccatgtccaagctcccttgcaagcccggatgagagcgagccagattcgatggagtcctttccagaaagtttaagtgccctcgttgttgacctaactccaagaaatcctaactccgctatccttctgtctccggtggaaactccttatgcaaacgttgatgcagaggtgcacgcaaaccggctgatgcgcgaattggactttgcagcttgtgtcgaagagcggctggacggagttattcctctcgcccgtggaggcgttgtgaggcagtactggtcatcatccttccttgtggatctcctggcagtcgctgctcctgtggtgcctacagtgctctgggccttctccacgcagagagggggaacagaccccgtctacaacatcggtgcactgctccgcggatgctgcgtggtagctctgcattccctcaggcgaacagcctttaggataaagacgtag

SEQ ID NO: 39986 - DNA, 1989 bp, Artificial Sequence
  derived and/or modified sequence
atggggcctctgagggagagtaaagaacatagagtccaacaccacgataaagaaatctcacggtcacgaataccccgactcattttaagaccccatatgccacaacaacaacacaaggtgtccccagctagcgagagtccgtttagtgaagaggagtcccgggagttcaatccttccagcagtggtaggagtgctagaacggtgtcatccaacagtttctgttctgacgacacagggtgccccagtagccagtctgttagtccggtcaaaacacctagcgacgctggcaatagtccgataggtttctgcccgggttcagatgaaggctttaccagaaagaaatgcacaatcggcatggtgggcgaggggagcatccaatcgtcgcgatacaaaaaggagagcaaatctggcctggtgaagccaggctccgaggctgacttctcatcgtcttcaagcacagggtccattagcgctccagaagttcatatgtccacggccggaagtaaaagatccagtagctcaaggaaccggggtccacatggtcgcagcaatggtgcctcatctcataaaccagggagcagtccgtccagccccagagaaaaggacctgctgagtatgctgtgtagaaatcagcttagtccagtgaacatccatccaagttacgccccttcctctccttcttcctccaatagcggctcatacaaagggagtgattgttctcccatcatgcgtcggtctggcaggtatatgagttgcggggaaaaccatggggtgaggcctccaaatcctgaacagtacctgaccccactgcagcagaaggaggttacagtccgacatctgaaaaccaaactcaaagagagcgagcggaggcttcatgagcgcgagagtgagatcgtggaactgaaatcccagcttgcgagaatgcgagaagattggattgaggaggaatgtcatcgcgtcgaagctcagctggctttaaaagaggctcgtaaagagatcaagcaactgaaacaagtcatagagacaatgcgcagctccctagctgacaaagataaaggaattcagaaatactttgtcgacataaatatccagaataagaaactggaaagtctactgcaatcgatggaaatggcacactcaggcagtttaagagatgagctctgcctggacttcccctgtgacagccctgaaaagagccttaccttgaatccccctttagacaccatggctgacgggctctcactggaagaacaggtaactggcgaaggggcagatagagaactcctggttggagactccatcgccaattccacggacctctttgatgagatcgtgacggccaccaccacagagagcggtgaccttgagctggtacattcgacgcccggtgccaatgtgcttgagctgctccccattgtgatggggcaagaagaagggtctgtggtggtggaacgtgctgtgcagactgatgtggtgccatacagccctgccatttctgagttgatacagtctgtgctgcagaagctgcaggacccctgtccgtccagtctggcttctcctgacgaaagtgagccggactccatggagagcttccctgagtctctttccgcacttgtggtggaccttacacccagaaacccaaacagtgctatattgttgtcccccgttgagactccttatgccaatgtggatgcggaagtgcacgctaatcggcttatgagggagctagacttcgccgcatgcgtcgaggagaggctggatggtgtgatccccctcgcgagaggaggagtggttagacagtattggagtagttctttcctcgtggatctcctggcggtggcagctcccgtggtgcctacggtcctctgggctttctccactcaaagaggaggcactgatcccgtgtataatataggtgccttgctccgcggttgctgcgtggttgccctgcatagtcttcgtcgcacagcctttcgcatcaaaacctag

SEQ ID NO: 39987 - DNA, 1989 bp, Artificial Sequence
  derived and/or modified sequence
atgggtcctttgcgggagtctaaagaacatcgagtgcagcatcatgataaagagatatcgcgctcccgaattcctaggctcattctgcgcccacacatgccacagcaacagcacaaggtctctccagccagcgagagccccttttccgaagaagaatcccgagagtttaatccttcaagtagcggacgtagtgctaggacagtctcaagcaactccttttgttctgatgacacagggtgccccagttcccagagcgtgtccccagtcaagacgcctagtgatgcaggcaattcgcctatcggattttgccccggatcagatgaaggcttcacccggaaaaagtgcacaatcgggatggtaggagaagggagtattcaaagctcccgttacaagaaggagagtaagtctgggctcgtgaagccgggttctgaggccgatttttccagcagtagcagcactggcagcatctccgcaccggaggttcatatgagcacggcaggtagcaaacgcagttctagcagtcggaaccggggtcctcatggaaggtcaaacggagccagctctcacaaaccgggatcttcacctagcagccccagggaaaaggatctactcagcatgctctgccggaaccagctttcaccagtaaacatccatccatcctatgccccaagttcgccctccagctctaactccggtagctacaaggggtcagattgctccccgattatgagacggtccggcaggtatatgagttgtggggagaaccatggcgtgcggccacccaaccctgaacagtatttgacgcctctacaacagaaagaggtgactgttcggcacctgaagacgaagttaaaagagagcgagcggaggttgcacgagcgcgagagcgagattgtcgagctgaaatcccagctcgcccgtatgagggaggactggatcgaggaggaatgccatcgcgtggaggctcagctggccttgaaggaggcgaggaaggagattaagcagctcaagcaggttattgagaccatgcgctcctcactggctgacaaagacaaaggcatacagaaatattttgtggatattaacattcagaacaaaaaattggagtcactgttgcagtctatggaaatggcccactctggcagtcttcgcgatgagctatgtctggattttccctgcgactccccagaaaagagcctgacacttaatcctcccctggacaccatggcggatggactgtcactggaggagcaggtgaccggcgaaggcgctgacagagaacttcttgtgggagatagtatcgccaatagtaccgatttgtttgatgagatcgtgactgccacgacgactgaatccggcgatctggaactggtccatagtactccgggagctaacgttttggagctcctgcctatcgtgatgggccaggaggaaggctccgttgtagtcgagcgcgcagtacagaccgacgtagtgccctactcgcccgctattagcgagttaattcagtcagtccttcagaaattacaggacccttgtcccagttccctggctagccccgacgaaagcgagcctgattcaatggaatcattcccagagtccctgtcggcacttgtagttgatctgacaccgaggaaccccaattccgcaattcttctctccccggtggaaacaccgtatgctaacgtggatgctgaggtccatgcaaaccgattgatgagggaactggacttcgcggcttgcgtagaggagcgtttagacggagtgataccactcgctaggggaggtgtggttaggcaatattggagtagcagtttccttgtcgatctgctcgccgtggccgcaccagtggtgcccacagttttgtgggcttttagtactcagcggggaggcaccgatccggtgtacaatatcggcgctctgctgaggggctgttgcgtcgtggcactccacagcctccggaggaccgcctttaggatcaagacctag

SEQ ID NO: 39988 - DNA, 615 bp, Artificial Sequence
  derived and/or modified sequence
atgggcccactccgagaatccaaggagcatcgtgtccagcaccatgataaggagatatcacgcagcaggatcccacgcctcatcttgcggccacatatgccccagcagcagcacaaggtttcacctgccagtgagtcgccttttagcgaagaagaatcgcgtgagttcaacccatcatccagcggccgatctgcgagaacagtctcctcaaattcgttttgcagtgacgacactggatgtccttctagccagtctgtttcacctgtaaaaacccctagtgatgcgggtaacagccccattggcttctgtcctggctcagatgagggatttactcgcaagaaatgcacaattggcatggtcggtgaaggctcaatccagtcctctaggtacaaaaaggagtccaaatccgggctcgtaaagcctggctccgaagccgatttctcatcctcctcctccacggggtcaatctcagcccctgaagtacatatgagcacagctggcagcaaaagatcctcatcatctcgcaacagagggcctcatggccgttcgaatggagccagcagccacaagcccggatcaagcccctccagtcctagggagaaagacctactctag

SEQ ID NO: 39989 - DNA, 1788 bp, Artificial Sequence
  derived and/or modified sequence
atgggccctttttgggcaaggaaggatgacaccgggtgtcctagtagtcagtctgtgtcccctgtgaagactccaagcgatgctggcaactctccaatcgggttttgtccagggagcgatgaggggttcactcggaaaaaatgtactataggcatggttggtgaaggctctatacaatcaagccggtacaaaaaggaatcaaagtcaggtcttgtgaagcctggttccgaggcggacttttcaagctctagttctaccggaagtatatcagccccagaggttcacatgtccaccgccggtagcaagaggagctcttccagtcgtaataggggacctcatggaaggagtaacggggcttcttcacacaaacctgggtctagcccttcctcaccacgcgaaaaagatctgctatctatgctctgtaggaatcagctaagccccgtgaacatccacccttcctacgcaccctcaagcccatctagctctaatagtggctcatacaaaggttccgattgttcaccgattatgcggcgtagcgggagatacatgtcatgtggagaaaatcatggtgtcaggccacctaatcctgaacagtacctgacgcctttgcagcaaaaagaggtgacagtacgtcacctcaagactaagctgaaagaaagcgaaaggcgcttgcatgagagggaatctgagatcgttgaactgaagtcccagctggccagaatgcgcgaggactggattgaggaggaatgtcatagagtggaagcccagcttgccctgaaggaagctaggaaggagatcaaacagttgaaacaggtcattgaaaccatgaggtctagtctggccgataaagataagggcattcagaagtacttcgtagatatcaacatccaaaataaaaagctcgagagcctgctccaatctatggagatggcccatagcggcagtttgcgcgacgagctttgtctcgattttccgtgcgacagtcctgagaaaagtttaacactgaacccacctctcgacaccatggctgacggactatcattggaagaacaggtgacaggcgaaggcgcagatcgcgagctgttggtgggcgactcaatcgcaaactcgacagatctttttgacgaaattgtcaccgctactaccacagagtcgggcgacctcgaactggtccactccacgccaggcgctaatgtgttggagttgctgcccatcgttatgggccaagaggagggaagcgttgttgtcgagcgagccgtgcagacggatgtggtgccttactcaccagctatatccgagctgatccagagtgttctccagaagctgcaagacccttgcccctcaagtctagcatctccagacgaatcggagcctgattcaatggagagttttcccgaaagcctgtcagcattagttgtggacttaacccccagaaatcctaactctgccatcctcttgagccccgtggaaacaccatatgccaatgtggacgcggaggttcacgctaacaggcttatgcgcgagctagattttgctgcctgcgtggaagagagactcgatggggtcataccacttgcgagagggggagtggtgaggcagtactggagcagttccttcctggtggacctactggccgttgccgctcctgtggtacccacagttttgtgggcattctcgactcaacgcggagggacagaccccgtctataacatcggcgctcttcttaggggctgttgcgtagtcgcgctgcacagcctgagacgcacggcattccggataaaaacttag

SEQ ID NO: 39990 - DNA, 489 bp, Artificial Sequence
  derived and/or modified sequence
atggggccattgagggaaagtaaagaacacagagtacagcaccatgataaggagatttcgaggtcccgcatccctcggctgatccttcggccacacatgccacagcagcagcacaaggtctctccagctagtgaaagcccattcagtgaggaagagtccagggagttcaatccatcaagcagcggcaggagtgccagaacagtgtccagcaactcattctgttctgacgataccggatgtcctagcagccaaagcgtttcccccgtgaagactccatccgacgcgggaaatagtcccatcggattctgcccaggatctgacgagggcttcacccgcaagaagtgtacaatcggaatggttggtgagggcagcattcagtcgagccggtacaagaaggagtctaaatctggcctggtcaagcccggatctgaagccgacttcagctcctctagctctactggctctattagcgcaccggaagtccactag

SEQ ID NO: 39991 - DNA, 1989 bp, Artificial Sequence
  derived and/or modified sequence
atggggcctttgcgtgagtccaaagaacaccgggtgcagcatcatgataaggagatatcccggtcaaggatccccagactgatcctcagaccccacatgccccagcagcagcacaaggtgagcccagcctcagaaagtcctttctcggaagaagaaagccgcgagttcaacccaagctcatccggcaggtcagccaggacagtgtcatccaattcgttttgctcagatgacactggttgtcccagctctcaaagcgtgtctcctgtgaagactccaagcgatgctggaaattctcccatagggttttgcccagggagtgacgaagggttcacgagaaagaaatgcaccattggtatggttggggagggctctattcagtccagccggtataagaaggaaagcaagtccggattggtgaaacccggatccgaggccgatttctcatcctcaagtagtactggcagtatcagcgctcccgaagttcatatgagcacagccggtagtaaacgcagctccagctccaggaacagagggccacatggtagatccaatggagcatctagccacaagcccggaagcagtccgtcaagcccccgtgaaaaagacctgctgagtatgttgtgtcgaaatcagctatcaccagtgaatattcaccccagttacgcaccaagcagtcccagcagttctaattccggcagctacaagggctctgattgcagccctattatgaggaggagcgggcgatatatgtcttgcggagagaaccacggcgtgaggccgcctaaccccgaacagtatctgacgccactccagcaaaaagaggttacagtgcgccaccttaagaccaaactgaaggaaagcgagaggcggctgcatgagcgagagagcgagattgtggagctgaagagccagctggccagaatgcgtgaggactggattgaggaagaatgtcacagggtggaggcccaattggccctgaaggaagctcgaaaggagattaagcagctcaagcaggtgatcgaaactatgcggtctagcctagcggacaaagataaaggaatccaaaaatacttcgtggatatcaatatacagaacaagaaactcgagtctctactgcagtctatggagatggctcactccggtagcctgcgtgacgagctctgtcttgacttcccgtgtgacagtcccgagaagagcctgacactcaaccctccactggacacgatggctgatgggctctctttggaggagcaggtaacgggcgaaggtgcagatagagaattgctcgtgggagactctatcgcaaatagtaccgatttgtttgacgaaatcgtgacagctacaaccaccgagagcggcgacctggagctcgtgcactccaccccgggtgccaacgtcctcgaactgctccctatcgttatgggtcaggaggaagggagtgtggtcgtggaacgcgcagtccagactgatgtggtgccatactcccccgcaattagcgaactgatacagagcgtcctgcagaagctgcaagacccgtgtccaagtagccttgcatctccagacgaaagcgaaccggactctatggaatccttccccgaaagcttatcggctcttgtagttgaccttacacctagaaacccaaacagcgccattcttttgagccccgtggaaacaccctacgctaatgtcgacgctgaggtgcacgccaatcgactaatgagagagttggactttgctgcgtgcgtagaggagcggctcgacggagttatccctctggcccgaggaggcgtcgttaggcagtactggtcctcatcgtttctggtcgacctcctggccgtcgccgcaccagtagttccaacagtcctttgggcgttttctacacaaagggggggtacggacccagtctacaatatcggcgctctcctgaggggctgttgtgtcgtcgccttacacagcctgcgcaggacagcgttccgcattaagacttag

SEQ ID NO: 39992 - DNA, 315 bp, Artificial Sequence
  derived and/or modified sequence
atgggcccactgcgggagtctaaggagcacagagtgcagcaccatgataaggaaattagtcggagcagaattccacgccttattctcagaccccatatgccccagcagcagcataaagtctcgcccgcaagcgaaagccctttctctgaggaggagtctagagaatttaacccatccagctcagggagatctgcgagaacagtttcttcaaactccttttgttccgatgacactgggtgtccctcctcccagtccgttagccctgtaaaaacccctagtgacgccggaaactcccccatcggcttctgtccctag

SEQ ID NO: 39993 - DNA, 2776 bp, Artificial Sequence
  derived and/or modified sequence
cccatcaggatatttaagctggaagctttgtcaggctgcgtcagtgttccctgagtaagcaggaatgcaaactgcaattttagcattagcattctacttagaacaaagggaggtgcccggaagcagtacacattagtgcagagttttctggtttccctttaaagagaaggcacagccatttgactcttgagcttatttaaacaagtcaccagtccttgactccagaactgaagctttatatgttctttctatttggctgagccagtaatttttgattgcttcttcttcccaagagatgacacaggctgtcctagcagccagtcagtgtctcctgtgaagacaccctcagatgctggaaacagccccattggcttttgccctggaagtgatgaaggcttcaccagaaagaaatgcacgattggaatggttggtgaaggaagcattcagtcctctcgatataagaaggaatcaaagtcaggccttgtgaaaccaggtagtgaagctgattttagctcctcgagcagcacaggcagcatttccgctcctgaggtccatatgtcgactgcgggaagcaagcggtcttcttcttcacgcaatcgaggtcctcatgggcggagtaatggagcttcgtcacacaagcctggcagcagcccatcatccccgcgggaaaaggaccttctgtccatgctgtgcaggaatcagctgagccctgtcaatatccatcccagttatgcaccttcttccccaagcagtagcaactcaggctcctacaaaggaagcgactgtagccccatcatgaggcgttctggaaggtacatgtcttgcggtgaaaatcatggtgtcagacccccaaacccagagcagtatttgactccactgcagcagaaagaggtgacagtgagacacctcaaaaccaagctgaaggaatctgagcgccgactccatgaaagggaaagtgaaatcgtggagcttaagtcccagctggcccgcatgcgagaggactggattgaggaggagtgtcaccgggtagaggcccagttggcactcaaagaagccaggaaagagattaaacagctcaaacaggtcatcgaaaccatgcggagcagcttggctgataaagataaaggcattcagaaatattttgtggacataaacatccaaaacaagaagctggagtctctccttcagagcatggagatggcacacagtggctctctgagggacgaactgtgcctagactttccatgtgattccccagagaagagcttaaccctcaacccccctcttgacacaatggcagatgggttatctctggaagagcaggtcacgggggaaggggctgacagggagctactggtaggagatagcatagccaacagcacagatttgttcgatgagatagtgacagccaccaccacagaatctggtgacctggagcttgtgcattccacccctggggctaacgtcctggagctgctgcccatagtcatgggtcaggaggagggcagtgtggtggtggagcgagccgttcagaccgacgtggtgccctacagcccagccatctcagagctcattcagagtgtgctgcagaagctccaggacccctgtccctcgagcttggcgtcccctgatgagtctgaaccagactcgatggagagcttcccagagtccctctctgccttagtggttgatttaactccaagaaatccaaactcagccatccttttgtctcccgtggagaccccctacgccaatgtggatgcagaagttcatgcaaaccgcctcatgagagagctggattttgcagcctgcgtggaagagaggttggatggtgtcatcccactggctcgcgggggcgtcgtgaggcagtactggagcagcagcttcctggtggatctcctggctgtggctgcccccgtggtccccacggttctgtgggcattcagtactcagagagggggaacggatcctgtgtataacatcggggccttgctcaggggctgttgcgtggttgccctgcattcgctccgccgcaccgccttccgtatcaaaacctaaatagaagttgttgttaccgtgtgccaatgtgtcccatgtgggttgtgccaggtagagaaacaggaagtcaatcatctgtgacagtctctattctgtcgttttgctccttggtatttgatttgcactatatttagttgaagcctgttcactgtttaaaaccggaggtatcttcaaaggcatggagacctggttccagtaaatgtcccaccagtggggtatagaaagcatgctcatgaccctgccgtgtcgtctgaggtacccgttcttatcctagtggttcaggaagagaaaacgcagtttgcactttcaagacagcttctctaaggctggcatgttatctccttgctttgctttttgccgttttaaaatgtgtaattgttccagcattccaatggtcttgtgcatagcaggggactgtaaccaaaaataaacatgtatttgtgtaattggtttgaagaagtcttgaatagctctttactgtcttacttggggttgataagatttgagtgtttgcaattttttactaaatgtagctccaaagtcttaaatggcttgtttgttcttaaactgttaattgatgaaactgtgcataagtttacaatgtactaacttattttgcttattatatatagtgttttattggaaattgtaaccacacacttcagcatgatgaaaataaagattagtgtttccatttaaataaatgttttatcctccc

SEQ ID NO: 39994 - DNA, 3223 bp, Artificial Sequence
  derived and/or modified sequence
agcggcttcttcaagaaacagatcctgcagcataatctgccagggccctggcaacaggaaccggtccttcaggcagcgagcccagggagcagaatcctggcgcccccggcgcgcggccctcagcgtgctcacgccgctgcgccccacccagcggtgcctgccctttggtcccccgcccttctctccattttgtcctcagccccagcagccgcccggctggctgcagaggccgaggggccgagggcaccggagcgcaagggattccgcggcaccacgtgtccaagccgggctaaggcgggcggagcgggccgggcccggctccccgggcctgagcgcaaaccagcagcgacgcggggtcccgtccgcaccggcacccggcccagccggggcccggtctcccgggcgcacgtaggtgcctcctcctggacagcgcgatggggcccttctgggcgagaaagggtgcctcctcctggacggcggcagcggcggcgcgaggagccggcgggcagcggcgcgatggggcccctccgcgagagcaaggagcacagagtgcagcatcatgacaaggagatttctcgaagccgaattccccggttgattcttcggccccatatgccccaacaacagcacaaagtgtccccagcctctgagtctcctttctctgaggaagagagcagagagttcaaccccagcagctctgggcgctcagcgaggaccgttagcagcaacagcttctgctcagatgacacaggctgtcctagcagccagtcagtgtctcctgtgaagacaccctcagatgctggaaacagccccattggcttttgccctggaagtgatgaaggcttcaccagaaagaaatgcacgattggaatggttggtgaaggaagcattcagtcctctcgatataagaaggaatcaaagtcaggccttgtgaaaccaggtagtgaagctgattttagctcctcgagcagcacaggcagcatttccgctcctgaggtccatatgtcgactgcgggaagcaagcggtcttcttcttcacgcaatcgaggtcctcatgggcggagtaatggagcttcgtcacacaagcctggcagcagcccatcatccccgcgggaaaaggaccttctgtccatgctgtgcaggaatcagctgagccctgtcaatatccatcccagttatgcaccttcttccccaagcagtagcaactcaggctcctacaaaggaagcgactgtagccccatcatgaggcgttctggaaggtacatgtcttgcggtgaaaatcatggtgtcagacccccaaacccagagcagtatttgactccactgcagcagaaagaggtgacagtgagacacctcaaaaccaagctgaaggaatctgagcgccgactccatgaaagggaaagtgaaatcgtggagcttaagtcccagctggcccgcatgcgagaggactggattgaggaggagtgtcaccgggtagaggcccagttggcactcaaagaagccaggaaagagattaaacagctcaaacaggtcatcgaaaccatgcggagcagcttggctgataaagataaaggcattcagaaatattttgtggacataaacatccaaaacaagaagctggagtctctccttcagagcatggagatggcacacagtggctctctgagggacgaactgtgcctagactttccatgtgattccccagagaagagcttaaccctcaacccccctcttgacacaatggcagatgggttatctctggaagagcaggtcacgggggaaggggctgacagggagctactggtaggagatagcatagccaacagcacagatttgttcgatgagatagtgacagccaccaccacagaatctggtgacctggagcttgtgcattccacccctggggctaacgtcctggagctgctgcccatagtcatgggtcaggaggagggcagtgtggtggtggagcgagccgttcagaccgacgtggtgccctacagcccagccatctcagagctcattcagagtgtgctgcagaagctccaggacccctgtccctcgagcttggcgtcccctgatgagtctgaaccagactcgatggagagcttcccagagtccctctctgccttagtggttgatttaactccaagaaatccaaactcagccatccttttgtctcccgtggagaccccctacgccaatgtggatgcagaagttcatgcaaaccgcctcatgagagagctggattttgcagcctgcgtggaagagaggttggatggtgtcatcccactggctcgcgggggcgtcgtgaggcagtactggagcagcagcttcctggtggatctcctggctgtggctgcccccgtggtccccacggttctgtgggcattcagtactcagagagggggaacggatcctgtgtataacatcggggccttgctcaggggctgttgcgtggttgccctgcattcgctccgccgcaccgccttccgtatcaaaacctaaatagaagttgttgttaccgtgtgccaatgtgtcccatgtgggttgtgccaggtagagaaacaggaagtcaatcatctgtgacagtctctattctgtcgttttgctccttggtatttgatttgcactatatttagttgaagcctgttcactgtttaaaaccggaggtatcttcaaaggcatggagacctggttccagtaaatgtcccaccagtggggtatagaaagcatgctcatgaccctgccgtgtcgtctgaggtacccgttcttatcctagtggttcaggaagagaaaacgcagtttgcactttcaagacagcttctctaaggctggcatgttatctccttgctttgctttttgccgttttaaaatgtgtaattgttccagcattccaatggtcttgtgcatagcaggggactgtaaccaaaaataaacatgtatttgtgtaattggtttgaagaagtcttgaatagctctttactgtcttacttggggttgataagatttgagtgtttgcaattttttactaaatgtagctccaaagtcttaaatggcttgtttgttcttaaactgttaattgatgaaactgtgcataagtttacaatgtactaacttattttgcttattatatatagtgttttattggaaattgtaaccacacacttcagcatgatgaaaataaagattagtgtttccatttaaataaatgttttatcctccc

SEQ ID NO: 39995 - DNA, 2919 bp, Artificial Sequence
  derived and/or modified sequence
agcacgtcagctgctccttgttgctgtgcagatcacccaacattaggtcaccgagagagacagcagctcttgctcacacagctgataggattaggagatggtgctttgtcagccctgattgagcccaagaaaaccccctgcatacacaggtgcctcctcctggacggcggcagcggcggcgcgaggagccggcgggcagcggcgcgatggggcccctccgcgagagcaaggagcacagagtgcagcatcatgacaaggagatttctcgaagccgaattccccggttgattcttcggccccatatgccccaacaacagcacaaagtgtccccagcctctgagtctcctttctctgaggaagagagcagagagttcaaccccagcagctctgggcgctcagcgaggaccgttagcagcaacagcttctgctcagatgacacaggctgtcctagcagccagtcagtgtctcctgtgaagacaccctcagatgctggaaacagccccattggcttttgccctggaagtgatgaaggcttcaccagaaagaaatgcacgattggaatggttggtgaaggaagcattcagtcctctcgatataagaaggaatcaaagtcaggccttgtgaaaccaggtagtgaagctgattttagctcctcgagcagcacaggcagcatttccgctcctgaggtccatatgtcgactgcgggaagcaagcggtcttcttcttcacgcaatcgaggtcctcatgggcggagtaatggagcttcgtcacacaagcctggcagcagcccatcatccccgcgggaaaaggaccttctgtccatgctgtgcaggaatcagctgagccctgtcaatatccatcccagttatgcaccttcttccccaagcagtagcaactcaggctcctacaaaggaagcgactgtagccccatcatgaggcgttctggaaggtacatgtcttgcggtgaaaatcatggtgtcagacccccaaacccagagcagtatttgactccactgcagcagaaagaggtgacagtgagacacctcaaaaccaagctgaaggaatctgagcgccgactccatgaaagggaaagtgaaatcgtggagcttaagtcccagctggcccgcatgcgagaggactggattgaggaggagtgtcaccgggtagaggcccagttggcactcaaagaagccaggaaagagattaaacagctcaaacaggtcatcgaaaccatgcggagcagcttggctgataaagataaaggcattcagaaatattttgtggacataaacatccaaaacaagaagctggagtctctccttcagagcatggagatggcacacagtggctctctgagggacgaactgtgcctagactttccatgtgattccccagagaagagcttaaccctcaacccccctcttgacacaatggcagatgggttatctctggaagagcaggtcacgggggaaggggctgacagggagctactggtaggagatagcatagccaacagcacagatttgttcgatgagatagtgacagccaccaccacagaatctggtgacctggagcttgtgcattccacccctggggctaacgtcctggagctgctgcccatagtcatgggtcaggaggagggcagtgtggtggtggagcgagccgttcagaccgacgtggtgccctacagcccagccatctcagagctcattcagagtgtgctgcagaagctccaggacccctgtccctcgagcttggcgtcccctgatgagtctgaaccagactcgatggagagcttcccagagtccctctctgccttagtggttgatttaactccaagaaatccaaactcagccatccttttgtctcccgtggagaccccctacgccaatgtggatgcagaagttcatgcaaaccgcctcatgagagagctggattttgcagcctgcgtggaagagaggttggatggtgtcatcccactggctcgcgggggcgtcgtgaggcagtactggagcagcagcttcctggtggatctcctggctgtggctgcccccgtggtccccacggttctgtgggcattcagtactcagagagggggaacggatcctgtgtataacatcggggccttgctcaggggctgttgcgtggttgccctgcattcgctccgccgcaccgccttccgtatcaaaacctaaatagaagttgttgttaccgtgtgccaatgtgtcccatgtgggttgtgccaggtagagaaacaggaagtcaatcatctgtgacagtctctattctgtcgttttgctccttggtatttgatttgcactatatttagttgaagcctgttcactgtttaaaaccggaggtatcttcaaaggcatggagacctggttccagtaaatgtcccaccagtggggtatagaaagcatgctcatgaccctgccgtgtcgtctgaggtacccgttcttatcctagtggttcaggaagagaaaacgcagtttgcactttcaagacagcttctctaaggctggcatgttatctccttgctttgctttttgccgttttaaaatgtgtaattgttccagcattccaatggtcttgtgcatagcaggggactgtaaccaaaaataaacatgtatttgtgtaattggtttgaagaagtcttgaatagctctttactgtcttacttggggttgataagatttgagtgtttgcaattttttactaaatgtagctccaaagtcttaaatggcttgtttgttcttaaactgttaattgatgaaactgtgcataagtttacaatgtactaacttattttgcttattatatatagtgttttattggaaattgtaaccacacacttcagcatgatgaaaataaagattagtgtttccatttaaataaatgttttatcctcccataaaa

SEQ ID NO: 39996 - DNA, 2636 bp, Artificial Sequence
  derived and/or modified sequence
agcacgtcagctgctccttgttgctgtgcagatcacccaacattaggtcaccgagagagacagcagctcttgctcacacagctgataggattaggagatggtgctttgtcagccctgattgagcccaagaaaaccccctgcatacacagatgacacaggctgtcctagcagccagtcagtgtctcctgtgaagacaccctcagatgctggaaacagccccattggcttttgccctggaagtgatgaaggcttcaccagaaagaaatgcacgattggaatggttggtgaaggaagcattcagtcctctcgatataagaaggaatcaaagtcaggccttgtgaaaccaggtagtgaagctgattttagctcctcgagcagcacaggcagcatttccgctcctgaggtccatatgtcgactgcgggaagcaagcggtcttcttcttcacgcaatcgaggtcctcatgggcggagtaatggagcttcgtcacacaagcctggcagcagcccatcatccccgcgggaaaaggaccttctgtccatgctgtgcaggaatcagctgagccctgtcaatatccatcccagttatgcaccttcttccccaagcagtagcaactcaggctcctacaaaggaagcgactgtagccccatcatgaggcgttctggaaggtacatgtcttgcggtgaaaatcatggtgtcagacccccaaacccagagcagtatttgactccactgcagcagaaagaggtgacagtgagacacctcaaaaccaagctgaaggaatctgagcgccgactccatgaaagggaaagtgaaatcgtggagcttaagtcccagctggcccgcatgcgagaggactggattgaggaggagtgtcaccgggtagaggcccagttggcactcaaagaagccaggaaagagattaaacagctcaaacaggtcatcgaaaccatgcggagcagcttggctgataaagataaaggcattcagaaatattttgtggacataaacatccaaaacaagaagctggagtctctccttcagagcatggagatggcacacagtggctctctgagggacgaactgtgcctagactttccatgtgattccccagagaagagcttaaccctcaacccccctcttgacacaatggcagatgggttatctctggaagagcaggtcacgggggaaggggctgacagggagctactggtaggagatagcatagccaacagcacagatttgttcgatgagatagtgacagccaccaccacagaatctggtgacctggagcttgtgcattccacccctggggctaacgtcctggagctgctgcccatagtcatgggtcaggaggagggcagtgtggtggtggagcgagccgttcagaccgacgtggtgccctacagcccagccatctcagagctcattcagagtgtgctgcagaagctccaggacccctgtccctcgagcttggcgtcccctgatgagtctgaaccagactcgatggagagcttcccagagtccctctctgccttagtggttgatttaactccaagaaatccaaactcagccatccttttgtctcccgtggagaccccctacgccaatgtggatgcagaagttcatgcaaaccgcctcatgagagagctggattttgcagcctgcgtggaagagaggttggatggtgtcatcccactggctcgcgggggcgtcgtgaggcagtactggagcagcagcttcctggtggatctcctggctgtggctgcccccgtggtccccacggttctgtgggcattcagtactcagagagggggaacggatcctgtgtataacatcggggccttgctcaggggctgttgcgtggttgccctgcattcgctccgccgcaccgccttccgtatcaaaacctaaatagaagttgttgttaccgtgtgccaatgtgtcccatgtgggttgtgccaggtagagaaacaggaagtcaatcatctgtgacagtctctattctgtcgttttgctccttggtatttgatttgcactatatttagttgaagcctgttcactgtttaaaaccggaggtatcttcaaaggcatggagacctggttccagtaaatgtcccaccagtggggtatagaaagcatgctcatgaccctgccgtgtcgtctgaggtacccgttcttatcctagtggttcaggaagagaaaacgcagtttgcactttcaagacagcttctctaaggctggcatgttatctccttgctttgctttttgccgttttaaaatgtgtaattgttccagcattccaatggtcttgtgcatagcaggggactgtaaccaaaaataaacatgtatttgtgtaattggtttgaagaagtcttgaatagctctttactgtcttacttggggttgataagatttgagtgtttgcaattttttactaaatgtagctccaaagtcttaaatggcttgtttgttcttaaactgttaattgatgaaactgtgcataagtttacaatgtactaacttattttgcttattatatatagtgttttattggaaattgtaaccacacacttcagcatgatgaaaataaagattagtgtttccatttaaataaatgttttatcctcccataaaa

SEQ ID NO: 39997 - DNA, 2995 bp, Artificial Sequence
  derived and/or modified sequence
gcagtgtgctggagctacttcctggagccgggcagctgcagggcagcgctggggaaaagactgttctctggctacatagcagcctggcttctccaagccggagggagctgcgctgaccactgaaggcctttctgatgcaaccccttccaagtagaatccatcgcagcctttcagatcccggaacccagaggctgtgtcggtcctgacgcactggcttggctgggctccggtgcctcctcctggacggcggcagcggcggcgcgaggagccggcgggcagcggcgcgatggggcccctccgcgagagcaaggagcacagagtgcagcatcatgacaaggagatttctcgaagccgaattccccggttgattcttcggccccatatgccccaacaacagcacaaagtgtccccagcctctgagtctcctttctctgaggaagagagcagagagttcaaccccagcagctctgggcgctcagcgaggaccgttagcagcaacagcttctgctcagatgacacaggctgtcctagcagccagtcagtgtctcctgtgaagacaccctcagatgctggaaacagccccattggcttttgccctggaagtgatgaaggcttcaccagaaagaaatgcacgattggaatggttggtgaaggaagcattcagtcctctcgatataagaaggaatcaaagtcaggccttgtgaaaccaggtagtgaagctgattttagctcctcgagcagcacaggcagcatttccgctcctgaggtccatatgtcgactgcgggaagcaagcggtcttcttcttcacgcaatcgaggtcctcatgggcggagtaatggagcttcgtcacacaagcctggcagcagcccatcatccccgcgggaaaaggaccttctgtccatgctgtgcaggaatcagctgagccctgtcaatatccatcccagttatgcaccttcttccccaagcagtagcaactcaggctcctacaaaggaagcgactgtagccccatcatgaggcgttctggaaggtacatgtcttgcggtgaaaatcatggtgtcagacccccaaacccagagcagtatttgactccactgcagcagaaagaggtgacagtgagacacctcaaaaccaagctgaaggaatctgagcgccgactccatgaaagggaaagtgaaatcgtggagcttaagtcccagctggcccgcatgcgagaggactggattgaggaggagtgtcaccgggtagaggcccagttggcactcaaagaagccaggaaagagattaaacagctcaaacaggtcatcgaaaccatgcggagcagcttggctgataaagataaaggcattcagaaatattttgtggacataaacatccaaaacaagaagctggagtctctccttcagagcatggagatggcacacagtggctctctgagggacgaactgtgcctagactttccatgtgattccccagagaagagcttaaccctcaacccccctcttgacacaatggcagatgggttatctctggaagagcaggtcacgggggaaggggctgacagggagctactggtaggagatagcatagccaacagcacagatttgttcgatgagatagtgacagccaccaccacagaatctggtgacctggagcttgtgcattccacccctggggctaacgtcctggagctgctgcccatagtcatgggtcaggaggagggcagtgtggtggtggagcgagccgttcagaccgacgtggtgccctacagcccagccatctcagagctcattcagagtgtgctgcagaagctccaggacccctgtccctcgagcttggcgtcccctgatgagtctgaaccagactcgatggagagcttcccagagtccctctctgccttagtggttgatttaactccaagaaatccaaactcagccatccttttgtctcccgtggagaccccctacgccaatgtggatgcagaagttcatgcaaaccgcctcatgagagagctggattttgcagcctgcgtggaagagaggttggatggtgtcatcccactggctcgcgggggcgtcgtgaggcagtactggagcagcagcttcctggtggatctcctggctgtggctgcccccgtggtccccacggttctgtgggcattcagtactcagagagggggaacggatcctgtgtataacatcggggccttgctcaggggctgttgcgtggttgccctgcattcgctccgccgcaccgccttccgtatcaaaacctaaatagaagttgttgttaccgtgtgccaatgtgtcccatgtgggttgtgccaggtagagaaacaggaagtcaatcatctgtgacagtctctattctgtcgttttgctccttggtatttgatttgcactatatttagttgaagcctgttcactgtttaaaaccggaggtatcttcaaaggcatggagacctggttccagtaaatgtcccaccagtggggtatagaaagcatgctcatgaccctgccgtgtcgtctgaggtacccgttcttatcctagtggttcaggaagagaaaacgcagtttgcactttcaagacagcttctctaaggctggcatgttatctccttgctttgctttttgccgttttaaaatgtgtaattgttccagcattccaatggtcttgtgcatagcaggggactgtaaccaaaaataaacatgtatttgtgtaattggtttgaagaagtcttgaatagctctttactgtcttacttggggttgataagatttgagtgtttgcaattttttactaaatgtagctccaaagtcttaaatggcttgtttgttcttaaactgttaattgatgaaactgtgcataagtttacaatgtactaacttattttgcttattatatatagtgttttattggaaattgtaaccacacacttcagcatgatgaaaataaagattagtgtttccatttaaataaatgttttatcctcccat

SEQ ID NO: 39998 - DNA, 1126 bp, Artificial Sequence
  derived and/or modified sequence
cggcttcttcaagaaacagatcctgcagcataatctgccagggccctggcaacaggaaccggtccttcaggcagcgagcccagggagcagaatcctggcgcccccggcgcgcggccctcagcgtgctcacgccgctgcgccccacccagcggtgcctgccctttggtcccccgcccttctctccattttgtcctcagccccagcagccgcccggctggctgcagaggccgaggggccgagggcaccggagcgcaagggattccgcggcaccacgtgtccaagccgggctaaggcgggcggagcgggccgggcccggctccccgggcctgagcgcaaaccagcagcgacgcggggtcccgtccgcaccggcacccggcccagccggggcccggtctcccgggcgcacgtaggtgcctcctcctggacagcgcgatggggcccttctgggcgagaaagggtgcctcctcctggacggcggcagcggcggcgcgaggagccggcgggcagcggcgcgatggggcccctccgcgagagcaaggagcacagagtgcagcatcatgacaaggagatttctcgaagccgaattccccggttgattcttcggccccatatgccccaacaacagcacaaagtgtccccagcctctgagtctcctttctctgaggaagagagcagagagttcaaccccagcagctctgggcgctcagcgaggaccgttagcagcaacagcttctgctcagatgacacaggctgtcctagcagccagtcagtgtctcctgtgaagacaccctcagatgctggaaacagccccattggcttttgccctggaagtgatgaaggcttcaccagaaagaaatgcacgattggaatggttggtgaaggaagcattcagtcctctcgatataagaaggaatcaaagtcaggccttgtgaaaccaggtagtgaagctgattttagctcctcgagcagcacaggcagcatttccgctcctgaggtccatatgtcgactgcgggaagcaagcggtcttcttcttcacgcaatcgaggtcctcatgggcggagtaatggagcttcgtcacacaagcctggcagcagcccatcatccccgcgggaaaaggaccttctg

SEQ ID NO: 39999 - DNA, 2765 bp, Artificial Sequence
  derived and/or modified sequence
ttttgtcctcagccccagcagccgcccggctggctgcagaggccgaggggccgagggcaccggagcgcaagggattccgcggcaccacgtgtccaagccgggctaaggcgggcggagcgggccgggcccggctccccgggcctgagcgcaaaccagcagcgacgcggggtcccgtccgcaccggcacccggcccagccggggcccggtctcccgggcgcacgtaggtgcctcctcctggacagcgcgatggggcccttctgggcgagaaaggatgacacaggctgtcctagcagccagtcagtgtctcctgtgaagacaccctcagatgctggaaacagccccattggcttttgccctggaagtgatgaaggcttcaccagaaagaaatgcacgattggaatggttggtgaaggaagcattcagtcctctcgatataagaaggaatcaaagtcaggccttgtgaaaccaggtagtgaagctgattttagctcctcgagcagcacaggcagcatttccgctcctgaggtccatatgtcgactgcgggaagcaagcggtcttcttcttcacgcaatcgaggtcctcatgggcggagtaatggagcttcgtcacacaagcctggcagcagcccatcatccccgcgggaaaaggaccttctgtccatgctgtgcaggaatcagctgagccctgtcaatatccatcccagttatgcaccttcttccccaagcagtagcaactcaggctcctacaaaggaagcgactgtagccccatcatgaggcgttctggaaggtacatgtcttgcggtgaaaatcatggtgtcagacccccaaacccagagcagtatttgactccactgcagcagaaagaggtgacagtgagacacctcaaaaccaagctgaaggaatctgagcgccgactccatgaaagggaaagtgaaatcgtggagcttaagtcccagctggcccgcatgcgagaggactggattgaggaggagtgtcaccgggtagaggcccagttggcactcaaagaagccaggaaagagattaaacagctcaaacaggtcatcgaaaccatgcggagcagcttggctgataaagataaaggcattcagaaatattttgtggacataaacatccaaaacaagaagctggagtctctccttcagagcatggagatggcacacagtggctctctgagggacgaactgtgcctagactttccatgtgattccccagagaagagcttaaccctcaacccccctcttgacacaatggcagatgggttatctctggaagagcaggtcacgggggaaggggctgacagggagctactggtaggagatagcatagccaacagcacagatttgttcgatgagatagtgacagccaccaccacagaatctggtgacctggagcttgtgcattccacccctggggctaacgtcctggagctgctgcccatagtcatgggtcaggaggagggcagtgtggtggtggagcgagccgttcagaccgacgtggtgccctacagcccagccatctcagagctcattcagagtgtgctgcagaagctccaggacccctgtccctcgagcttggcgtcccctgatgagtctgaaccagactcgatggagagcttcccagagtccctctctgccttagtggttgatttaactccaagaaatccaaactcagccatccttttgtctcccgtggagaccccctacgccaatgtggatgcagaagttcatgcaaaccgcctcatgagagagctggattttgcagcctgcgtggaagagaggttggatggtgtcatcccactggctcgcgggggcgtcgtgaggcagtactggagcagcagcttcctggtggatctcctggctgtggctgcccccgtggtccccacggttctgtgggcattcagtactcagagagggggaacggatcctgtgtataacatcggggccttgctcaggggctgttgcgtggttgccctgcattcgctccgccgcaccgccttccgtatcaaaacctaaatagaagttgttgttaccgtgtgccaatgtgtcccatgtgggttgtgccaggtagagaaacaggaagtcaatcatctgtgacagtctctattctgtcgttttgctccttggtatttgatttgcactatatttagttgaagcctgttcactgtttaaaaccggaggtatcttcaaaggcatggagacctggttccagtaaatgtcccaccagtggggtatagaaagcatgctcatgaccctgccgtgtcgtctgaggtacccgttcttatcctagtggttcaggaagagaaaacgcagtttgcactttcaagacagcttctctaaggctggcatgttatctccttgctttgctttttgccgttttaaaatgtgtaattgttccagcattccaatggtcttgtgcatagcaggggactgtaaccaaaaataaacatgtatttgtgtaattggtttgaagaagtcttgaatagctctttactgtcttacttggggttgataagatttgagtgtttgcaattttttactaaatgtagctccaaagtcttaaatggcttgtttgttcttaaactgttaattgatgaaactgtgcataagtttacaatgtactaacttattttgcttattatatatagtgttttattggaaattgtaaccacacacttcagcatgatgaaaataaagattagtgtttccatttaaataaatgttttatcctcccataaaataataa

SEQ ID NO: 40000 - DNA, 2645 bp, Artificial Sequence
  derived and/or modified sequence
aatcggcggcagtggcggcggcggcgcgttggagcctcaccaagagccgccgcccgcagcccgcgccggctcagcgcagtctcctcgctccgtgctcgcaggtgcctcctcctggacggcggcagcggcggcgcgaggagccggcgggcagcggcgcgatggggcccctccgcgagagcaagatgacacaggctgtcctagcagccagtcagtgtctcctgtgaagacaccctcagatgctggaaacagccccattggcttttgccctggaagtgatgaaggcttcaccagaaagaaatgcacgattggaatggttggtgaaggaagcattcagtcctctcgatataagaaggaatcaaagtcaggccttgtgaaaccaggtagtgaagctgattttagctcctcgagcagcacaggcagcatttccgctcctgaggtccatatgtcgactgcgggaagcaagcggtcttcttcttcacgcaatcgaggtcctcatgggcggagtaatggagcttcgtcacacaagcctggcagcagcccatcatccccgcgggaaaaggaccttctgtccatgctgtgcaggaatcagctgagccctgtcaatatccatcccagttatgcaccttcttccccaagcagtagcaactcaggctcctacaaaggaagcgactgtagccccatcatgaggcgttctggaaggtacatgtcttgcggtgaaaatcatggtgtcagacccccaaacccagagcagtatttgactccactgcagcagaaagaggtgacagtgagacacctcaaaaccaagctgaaggaatctgagcgccgactccatgaaagggaaagtgaaatcgtggagcttaagtcccagctggcccgcatgcgagaggactggattgaggaggagtgtcaccgggtagaggcccagttggcactcaaagaagccaggaaagagattaaacagctcaaacaggtcatcgaaaccatgcggagcagcttggctgataaagataaaggcattcagaaatattttgtggacataaacatccaaaacaagaagctggagtctctccttcagagcatggagatggcacacagtggctctctgagggacgaactgtgcctagactttccatgtgattccccagagaagagcttaaccctcaacccccctcttgacacaatggcagatgggttatctctggaagagcaggtcacgggggaaggggctgacagggagctactggtaggagatagcatagccaacagcacagatttgttcgatgagatagtgacagccaccaccacagaatctggtgacctggagcttgtgcattccacccctggggctaacgtcctggagctgctgcccatagtcatgggtcaggaggagggcagtgtggtggtggagcgagccgttcagaccgacgtggtgccctacagcccagccatctcagagctcattcagagtgtgctgcagaagctccaggacccctgtccctcgagcttggcgtcccctgatgagtctgaaccagactcgatggagagcttcccagagtccctctctgccttagtggttgatttaactccaagaaatccaaactcagccatccttttgtctcccgtggagaccccctacgccaatgtggatgcagaagttcatgcaaaccgcctcatgagagagctggattttgcagcctgcgtggaagagaggttggatggtgtcatcccactggctcgcgggggcgtcgtgaggcagtactggagcagcagcttcctggtggatctcctggctgtggctgcccccgtggtccccacggttctgtgggcattcagtactcagagagggggaacggatcctgtgtataacatcggggccttgctcaggggctgttgcgtggttgccctgcattcgctccgccgcaccgccttccgtatcaaaacctaaatagaagttgttgttaccgtgtgccaatgtgtcccatgtgggttgtgccaggtagagaaacaggaagtcaatcatctgtgacagtctctattctgtcgttttgctccttggtatttgatttgcactatatttagttgaagcctgttcactgtttaaaaccggaggtatcttcaaaggcatggagacctggttccagtaaatgtcccaccagtggggtatagaaagcatgctcatgaccctgccgtgtcgtctgaggtacccgttcttatcctagtggttcaggaagagaaaacgcagtttgcactttcaagacagcttctctaaggctggcatgttatctccttgctttgctttttgccgttttaaaatgtgtaattgttccagcattccaatggtcttgtgcatagcaggggactgtaaccaaaaataaacatgtatttgtgtaattggtttgaagaagtcttgaatagctctttactgtcttacttggggttgataagatttgagtgtttgcaattttttactaaatgtagctccaaagtcttaaatggcttgtttgttcttaaactgttaattgatgaaactgtgcataagtttacaatgtactaacttattttgcttattatatatagtgttttattggaaattgtaaccacacacttcagcatgatgaaaataaagattagtgtttccatttaaa

SEQ ID NO: 40001 - DNA, 575 bp, Artificial Sequence
  derived and/or modified sequence
aattttgtactgcaggctttgctctagaatgtgcctcctcctggacggcggcagcggcggcgcgaggagccggcgggcagcggcgcgatggggcccctccgcgagagcaaggagcacagagtgcagcatcatgacaaggagatttctcgaagccgaattccccggttgattcttcggccccatatgccccaacaacagcacaaagtgtccccagcctctgagtctcctttctctgaggaagagagcagagagttcaaccccagcagctctgggcgctcagcgaggaccgttagcagcaacagcttctgctcagatgacacaggctgtcctagcagccagtcagtgtctcctgtgaagacaccctcagatgctggaaacagccccattggcttttgccctggaagtgatgaaggcttcaccagaaagaaatgcacgattggaatggttggtgaaggaagcattcagtcctctcgatataagaaggaatcaaagtcaggccttgtgaaaccaggtagtgaagctgattttagctcctcgagcagcacaggcagcatttccgctcctgaggtccatat

SEQ ID NO: 40002 - DNA, 3244 bp, Artificial Sequence
  derived and/or modified sequence
agcacgtcagctgctccttgttgctgtgcagatcacccaacattaggtcaccgagagagacagcagctcttgctcacacagctgataggattaggagatggtgctttgtcagccctgattgagcccaagaaaaccccctgcatacacaggcatcaacaaatattgactggatcatctggacctgacttagctgccctttggaaagttctgttcaatcagctggatagagctgtttgttttcctcacctaaccctcacagctatcctagaggtgcctcctcctggacggcggcagcggcggcgcgaggagccggcgggcagcggcgcgatggggcccctccgcgagagcaaggagcacagagtgcagcatcatgacaaggagatttctcgaagccgaattccccggttgattcttcggccccatatgccccaacaacagcacaaagtgtccccagcctctgagtctcctttctctgaggaagagagcagagagttcaaccccagcagctctgggcgctcagcgaggaccgttagcagcaacagcttctgctcagatgacacaggctgtcctagcagccagtcagtgtctcctgtgaagacaccctcagatgctggaaacagccccattggcttttgccctggaagtgatgaaggcttcaccagaaagaaatgcacgattggaatggttggtgaaggaagcattcagtcctctcgatataagaaggaatcaaagtcaggccttgtgaaaccaggtagtgaagctgattttagctcctcgagcagcacaggcagcatttccgctcctgaggtccatatgtcgactgcgggaagcaagcggtcttcttcttcacgcaatcgaggtcctcatgggcggagtaatggagcttcgtcacacaagcctggcagcagcccatcatccccgcgggaaaaggaccttctgtccatgctgtgcaggaatcagctgagccctgtcaatatccatcccagttatgcaccttcttccccaagcagtagcaactcaggctcctacaaaggaagcgactgtagccccatcatgaggcgttctggaaggtacatgtcttgcggtgaaaatcatggtgtcagacccccaaacccagagcagtatttgactccactgcagcagaaagaggtgacagtgagacacctcaaaaccaagctgaaggaatctgagcgccgactccatgaaagggaaagtgaaatcgtggagcttaagtcccagctggcccgcatgcgagaggactggattgaggaggagtgtcaccgggtagaggcccagttggcactcaaagaagccaggaaagagattaaacagctcaaacaggtcatcgaaaccatgcggagcagcttggctgataaagataaaggcattcagaaatattttgtggacataaacatccaaaacaagaagctggagtctctccttcagagcatggagatggcacacagtggctctctgagggacgaactgtgcctagactttccatgtgattccccagagaagagcttaaccctcaacccccctcttgacacaatggcagatgggttatctctggaagagcaggtcacgggggaaggggctgacagggagctactggtaggagatagcatagccaacagcacagatttgttcgatgagatagtgacagccaccaccacagaatctggtgacctggagcttgtgcattccacccctggggctaacgtcctggagctgctgcccatagtcatgggtcaggaggagggcagtgtggtggtggagcgagccgttcagaccgacgtggtgccctacagcccagccatctcagagctcattcagagtgtgctgcagaagctccaggacccctgtccctcgagcttggcgtcccctgatgagtctgaaccagactcgatggagagcttcccagagtccctctctgccttagtggttgatttaactccaagaaatccaaactcagccatccttttgtctcccgtggagaccccctacgccaatgtggatgcagaagttcatgcaaaccgcctcatgagagagctggattttgcagcctgcgtggaagagaggttggatggtgtcatcccactggctcgcgggggcgtcgtgaggcagtactggagcagcagcttcctggtggatctcctggctgtggctgcccccgtggtccccacggttctgtgggcattcagtactcagagagggggaacggatcctgtgtataacatcggggccttgctcaggggctgttgcgtggttgccctgcattcgctccgccgcaccgccttccgtatcaaaacctaaatagaagttgttgttaccgtgtgccaatgtgtcccatgtgggttgtgccaggtagagaaacaggaagtcaatcatctgtgacagtctctattctgtcgttttgctccttggtatttgatttgcactatatttagttgaagcctgttcactgtttaaaaccggaggtatcttcaaaggcatggagacctggttccagtaaatgtcccaccagtggggtatagaaagcatgctcatgaccctgccgtgtcgtctgaggtacccgttcttatcctagtggttcaggaagagaaaacgcagtttgcactttcaagacagcttctctaaggctggcatgttatctccttgctttgctttttgccgttttaaaatgtgtaattgttccagcattccaatggtcttgtgcatagcaggggactgtaaccaaaaataaacatgtatttgtgtaattggtttgaagaagtcttgaatagctctttactgtcttacttggggttgataagatttgagtgtttgcaattttttactaaatgtagctccaaagtcttaaatggcttgtttgttcttaaactgttaattgatgaaactgtgcataagtttacaatgtactaacttattttgcttattatatatagtgttttattggaaattgtaaccacacacttcagcatgatgaaaataaagattagtgtttccatttaaataaatgttttatcctcccataaaataataattatttctgtgattttacttctatgtataagaaagacaatgaatagcagatcttacatctttatcaatagggggtctgtaaaaattgaattaaattaggaagagggaaaaagagttagttattaaagaaaatgaagatttcctacccttacttaaaaagcatcatttctgaataaaagtagatttgtttacttttaaa

SEQ ID NO: 40003 - DNA, 582 bp, Artificial Sequence
  derived and/or modified sequence
agcattagcattctacttagaacaaagggaggtgcccggaagcagtacacattagtgcagagttttctggtttccctttaaagagaaggcacagccatttgactcttgagcttatttaaacaagtcaccagtccttgactccagaactgaagctttatatgttctttctatttggctgagccagtaatttttgattgcttcttcttcccaagaggtgcctcctcctggacggcggcagcggcggcgcgaggagccggcgggcagcggcgcgatggggcccctccgcgagagcaaggagcacagagtgcagcatcatgacaaggagatttctcgaagccgaattccccggttgattcttcggccccatatgccccaacaacagcacaaagtgtccccagcctctgagtctcctttctctgaggaagagagcagagagttcaaccccagcagctctgggcgctcagcgaggaccgttagcagcaacagcttctgctcagatgacacaggctgtcctagcagccagtcagtgtctcctgtgaagacaccctcagatgctggaaacagccccattggcttttgccc

SEQ ID NO: 40004 - protein, 663 aa, Artificial Sequence
  derived and/or modified sequence
MGPLRESKKEHRVQHHDKEISRSRIPRLILRPHMPQQQHKVSPASESPFSEEESREFNPSSSGRSARTVSSNSFCSDDTGCPSSQSVSPVKTPSDAGNSPIGFCPGSDEGFTRKKCTIGMVGEGSIQSSRYKKESKSGLVKPGSEADFSSSSSTGSISAPEVHMSTAGSKRSSSSRNRGPHGRSNGASSHKPGSSPSSPREKDLLSMLCRNQLSPVNIHPSYAPSSPSSSNSGSYKGSDCSPIMRRSGRYMSCGENHGVRPPNPEQYLTPLQQKEVTVRHLKTKLKESERRLHERESEIVELKSQLARMREDWIEEECHRVEAQLALKEARKEIKQLKQVIETMRSSLADKDKGIQKYFVDINIQNKKLESLLQSMEMAHSGSLRDELCLDFPCDSPEKSLTLNPPLDTMADGLSLEEQVTGEGADRELLVGDSIANSTDLFDEIVTATTTESGDLELVHSTPGANVLELLPIVMGQEEGSVVVERAVQTDVVPYSPAISELIQSVLQKLQDPCPSSLASPDESEPDSMESFPESLSALVVDLTPRNPNSAILLSPVETPYANVDAEVHANRLMRELDFAACVEERLDGVIPLARGGVVRQYWSSSFLVDLLAVAAPVVPTVLWAFSTQRGGTDPVYNIGALLRGCCVVALHSLRRTAFRIKT

SEQ ID NO: 40005 - protein, 137 aa, Artificial Sequence
  derived and/or modified sequence
MGPLRESKKEHRVQHHDKEISRSRIPRLILRPHMPQQQHKVSPASESPFSEEESREFNPSSSGRSARTVSSNSFCSDDTGCPSSQSVSPVKTPSDAGNSPIGFCPGSDEGFTRKKCTIGMVGEGSIQSSRYKKESKS

SEQ ID NO: 40006 - protein, 76 aa, Artificial Sequence
  derived and/or modified sequence
MGPLRESKKEHRVQHHDKEISRSRIPRLILRPHMPQQQHKVSPASESPFSEEESREFNPSSSGRSARTVSSNSFCS

SEQ ID NO: 40007 - protein, 73 aa, Artificial Sequence
  derived and/or modified sequence
MGPLRESKKEHRVQHHDKEISRSRIPRLILRPHMPQQQHKVSPASESPFSEEESREFNPSSSGRSARTVSSNS

SEQ ID NO: 40008 - protein, 95 aa, Artificial Sequence
  derived and/or modified sequence
MGPLRESKKEHRVQHHDKEISRSRIPRLILRPHMPQQQHKVSPASESPFSEEESREFNPSSSGRSARTVSSNSFCSDDTGCPSSQSVSPVKTPSD

SEQ ID NO: 40009 - protein, 151 aa, Artificial Sequence
  derived and/or modified sequence
MGPLRESKKEHRVQHHDKEISRSRIPRLILRPHMPQQQHKVSPASESPFSEEESREFNPSSSGRSARTVSSNSFCSDDTGCPSSQSVSPVKTPSDAGNSPIGFCPGSDEGFTRKKCTIGMVGEGSIQSSRYKKESKSGLVKPGSEADFSSS

SEQ ID NO: 40010 - DNA, 1992 bp, Artificial Sequence
  derived and/or modified sequence
atgggccccctgagagagagcaagaaggagcacagagtgcagcaccacgacaaggagatcagcagaagcagaatccccagactgatcctgagaccccacatgccccagcagcagcacaaggtgagccccgccagcgagagccccttcagcgaggaggagagcagagagttcaaccccagcagcagcggcagaagcgccagaaccgtgagcagcaacagcttctgcagcgacgacaccggctgccccagcagccagagcgtgagccccgtgaagacccccagcgacgccggcaacagccccatcggcttctgccccggcagcgacgagggcttcaccagaaagaagtgcaccatcggcatggtgggcgagggcagcatccagagcagcagatacaagaaggagagcaagagcggcctggtgaagcccggcagcgaggccgacttcagcagcagcagcagcaccggcagcatcagcgcccccgaggtgcacatgagcaccgccggcagcaagagaagcagcagcagcagaaacagaggcccccacggcagaagcaacggcgccagcagccacaagcccggcagcagccccagcagccccagagagaaggacctgctgagcatgctgtgcagaaaccagctgagccccgtgaacatccaccccagctacgcccccagcagccccagcagcagcaacagcggcagctacaagggcagcgactgcagccccatcatgagaagaagcggcagatacatgagctgcggcgagaaccacggcgtgagaccccccaaccccgagcagtacctgacccccctgcagcagaaggaggtgaccgtgagacacctgaagaccaagctgaaggagagcgagagaagactgcacgagagagagagcgagatcgtggagctgaagagccagctggccagaatgagagaggactggatcgaggaggagtgccacagagtggaggcccagctggccctgaaggaggccagaaaggagatcaagcagctgaagcaggtgatcgagaccatgagaagcagcctggccgacaaggacaagggcatccagaagtacttcgtggacatcaacatccagaacaagaagctggagagcctgctgcagagcatggagatggcccacagcggcagcctgagagacgagctgtgcctggacttcccctgcgacagccccgagaagagcctgaccctgaacccccccctggacaccatggccgacggcctgagcctggaggagcaggtgaccggcgagggcgccgacagagagctgctggtgggcgacagcatcgccaacagcaccgacctgttcgacgagatcgtgaccgccaccaccaccgagagcggcgacctggagctggtgcacagcacccccggcgccaacgtgctggagctgctgcccatcgtgatgggccaggaggagggcagcgtggtggtggagagagccgtgcagaccgacgtggtgccctacagccccgccatcagcgagctgatccagagcgtgctgcagaagctgcaggacccctgccccagcagcctggccagccccgacgagagcgagcccgacagcatggagagcttccccgagagcctgagcgccctggtggtggacctgacccccagaaaccccaacagcgccatcctgctgagccccgtggagaccccctacgccaacgtggacgccgaggtgcacgccaacagactgatgagagagctggacttcgccgcctgcgtggaggagagactggacggcgtgatccccctggccagaggcggcgtggtgagacagtactggagcagcagcttcctggtggacctgctggccgtggccgcccccgtggtgcccaccgtgctgtgggccttcagcacccagagaggcggcaccgaccccgtgtacaacatcggcgccctgctgagaggctgctgcgtggtggccctgcacagcctgagaagaaccgccttcagaatcaagacctag

SEQ ID NO: 40011 - DNA, 414 bp, Artificial Sequence
  derived and/or modified sequence
atgggccccctgagagagagcaagaaggagcacagagtgcagcaccacgacaaggagatcagcagaagcagaatccccagactgatcctgagaccccacatgccccagcagcagcacaaggtgagccccgccagcgagagccccttcagcgaggaggagagcagagagttcaaccccagcagcagcggcagaagcgccagaaccgtgagcagcaacagcttctgcagcgacgacaccggctgccccagcagccagagcgtgagccccgtgaagacccccagcgacgccggcaacagccccatcggcttctgccccggcagcgacgagggcttcaccagaaagaagtgcaccatcggcatggtgggcgagggcagcatccagagcagcagatacaagaaggagagcaagagctag

SEQ ID NO: 40012 - DNA, 231 bp, Artificial Sequence
  derived and/or modified sequence
atgggccccctgagagagagcaagaaggagcacagagtgcagcaccacgacaaggagatcagcagaagcagaatccccagactgatcctgagaccccacatgccccagcagcagcacaaggtgagccccgccagcgagagccccttcagcgaggaggagagcagagagttcaaccccagcagcagcggcagaagcgccagaaccgtgagcagcaacagcttctgcagctag

SEQ ID NO: 40013 - DNA, 222 bp, Artificial Sequence
  derived and/or modified sequence
atgggccccctgagagagagcaagaaggagcacagagtgcagcaccacgacaaggagatcagcagaagcagaatccccagactgatcctgagaccccacatgccccagcagcagcacaaggtgagccccgccagcgagagccccttcagcgaggaggagagcagagagttcaaccccagcagcagcggcagaagcgccagaaccgtgagcagcaacagctag

SEQ ID NO: 40014 - DNA, 288 bp, Artificial Sequence
  derived and/or modified sequence
atgggccccctgagagagagcaagaaggagcacagagtgcagcaccacgacaaggagatcagcagaagcagaatccccagactgatcctgagaccccacatgccccagcagcagcacaaggtgagccccgccagcgagagccccttcagcgaggaggagagcagagagttcaaccccagcagcagcggcagaagcgccagaaccgtgagcagcaacagcttctgcagcgacgacaccggctgccccagcagccagagcgtgagccccgtgaagacccccagcgactag

SEQ ID NO: 40015 - DNA, 108 bp, Artificial Sequence
  derived and/or modified sequence
atggtgggcgagggcagcatccagagcagcagatacaagaaggagagcaagagcggcctggtgaagcccggcagcgaggccgacttcagcagcagcagcagcacctag

SEQ ID NO: 40016 - DNA, 105 bp, Artificial Sequence
  derived and/or modified sequence
atggtgggcgagggcagcatccagagcagcagatacaagaaggagagcaagagcggcctggtgaagcccggcagcgaggccgacttcagcagcagcagcagctag

SEQ ID NO: 40017 - DNA, 456 bp, Artificial Sequence
  derived and/or modified sequence
atgggccccctgagagagagcaagaaggagcacagagtgcagcaccacgacaaggagatcagcagaagcagaatccccagactgatcctgagaccccacatgccccagcagcagcacaaggtgagccccgccagcgagagccccttcagcgaggaggagagcagagagttcaaccccagcagcagcggcagaagcgccagaaccgtgagcagcaacagcttctgcagcgacgacaccggctgccccagcagccagagcgtgagccccgtgaagacccccagcgacgccggcaacagccccatcggcttctgccccggcagcgacgagggcttcaccagaaagaagtgcaccatcggcatggtgggcgagggcagcatccagagcagcagatacaagaaggagagcaagagcggcctggtgaagcccggcagcgaggccgacttcagcagcagctag

SEQ ID NO: 40018 - DNA, 1992 bp, Artificial Sequence
  derived and/or modified sequence
atggggcctctgcgtgagagtaaaaaagagcatcgggtccagcaccacgacaaggagatcagccggtctaggatcccacgtctcatactccggccccatatgccgcagcaacagcacaaagtgagccctgctagtgagagccccttttccgaagaggagtctagggaattcaacccttccagcagtggaagatcagctagaacagtctcatctaactccttctgctctgatgatactggctgcccttcctcccagtctgttagtcccgttaagaccccttccgacgctggtaattcccccatcggtttctgcccaggctccgatgagggcttcacgcgaaagaagtgtacaataggcatggtgggggaagggtcgatccagtccagccggtacaagaaagagtccaaaagcgggctggtgaaacccgggagtgaggctgacttctcctcctcatcatctactggcagtatcagtgcacccgaggtgcacatgtccacagctgggtccaagagatcttctagctctcggaatagaggaccccacggcaggtcaaatggcgcctccagtcacaagccaggtagtagcccatccagtccccgcgagaaagacctgctcagtatgctttgtagaaatcagttgtctcccgtgaacatccaccccagttacgccccaagctcaccaagctcctctaacagcggcagctataagggaagtgattgctcccctattatgcggaggtctggacgctacatgagttgcggagaaaaccatggcgttcgaccccccaatcctgagcagtacttgacccctctgcagcagaaagaggttaccgttaggcacttgaagaccaaactgaaagagtctgagcgcagactccatgaaagagagagcgaaattgtggagttgaagtcgcagttggcgagaatgcgtgaggattggatcgaagaggaatgccatcgtgtggaggcgcaactggccctcaaggaggcccgcaaggagatcaaacagttaaagcaagtgatcgagacaatgcggagttcactagctgataaggacaaaggtatacaaaagtatttcgttgatattaatatccaaaataagaagctagagagtctacttcagagcatggagatggcccacagtggttccctgcgagatgaactttgtttggactttccatgtgatagccccgaaaagtccctgaccctcaatccgccgctggacactatggccgatggcctgtccctggaggagcaggtcacgggcgagggtgctgaccgggaattgctggtgggcgacagcattgccaactcgaccgacctttttgacgagattgttacggccacgaccaccgagagcggtgatctggagctagtacatagtacccccggagccaatgtcctggaacttctacctatcgtcatgggtcaagaggaagggagcgtggtggtcgaacgtgccgtgcagaccgatgtggtgccttactcacccgctatctcagaactgattcagtccgttctgcagaaactgcaagacccttgtccatcgagcctggcctcaccagatgagagtgaaccggactctatggaaagcttccccgaatcattatccgcgcttgtggttgacctcacgccgaggaatccaaatagtgccatactcttatcacctgtcgaaacaccttacgcaaatgtggatgccgaagttcatgccaataggctgatgagggagctcgactttgccgcctgcgtcgaggagagactggacggcgtcatccctctggccagagggggagtggtgcgccagtactggagcagcagcttcctagtcgatcttctcgcggtagcagcccccgttgtcccaactgtcctgtgggcattttcgacacaacgtgggggcacagatcccgtgtacaatatcggagccttgctgaggggatgctgtgtggtagccctgcactccctgcgccgcaccgccttcagaatcaagacttag

SEQ ID NO: 40019 - DNA, 1992 bp, Artificial Sequence
  derived and/or modified sequence
atgggcccactacgggaaagcaaaaaggaacatcgcgtccagcaccatgataaggaaatctctcgctcacgcatcccaaggttgatcctcagaccccatatgccacagcagcagcataaggtgagtccagcttcggagtcacctttcagcgaagaagagtcacgggagtttaatcctagctcctctgggcgctcagctcggacagtgagttccaattcgttttgcagcgatgataccggctgcccatcttcacagagtgtgagtcccgtgaaaacaccatccgatgccggcaattctccaatcggcttttgccctggctctgacgaagggttcacacggaaaaaatgtactatcggaatggtgggggagggatccatccagtctagccgctataaaaaggaatccaagtcagggctggtgaaacccggcagcgaggcagacttctcatcgtcttcatctactggcagcatctccgcacctgaggttcatatgagcaccgctggatccaagaggagctctagtagtcggaacagaggcccacacggccgctcaaacggcgcctcaagccacaagcccggtagtagcccctcctcccccagggagaaggaccttctgagcatgctctgcagaaaccaactgtctcctgtgaacattcacccctcctacgcccctagttctccttccagttctaacagcgggagttacaagggatcggactgcagtccaattatgagaaggagtggtcggtacatgtcttgtggagaaaaccatggagttcgaccacccaacccagagcaatacctaactcccctgcagcagaaagaagttacagtgcgtcatttgaagactaagttgaaagagtcagagcggaggcttcatgaacgggagagcgagatcgtcgagcttaagtcacaactggccagaatgcgcgaagattggatcgaggaggagtgccaccgcgttgaagctcaacttgctctgaaagaagctaggaaggaaatcaagcaattgaagcaagtgatcgaaactatgcggagctctctcgctgacaaggacaagggcattcagaagtactttgttgatattaatattcagaataagaaactggaaagcctgctgcaaagtatggagatggcacacagcggcagcttgagggatgagctgtgtttggacttcccctgcgactccccagagaaaagcttgaccctcaatccccctctagacacaatggcagatggactgtctctggaggagcaggttactggggagggggcagatagagaactcctcgtcggggatagcattgcgaattccacggatctgttcgacgagattgtcactgccacaaccacagagtcaggcgatctggaactggttcactcaacacctggcgctaacgtgcttgagctactgccaattgtgatgggccaggaagaagggtcagtggtagtggaacgcgcagtgcagactgacgtcgtaccctacagccctgccatcagtgagttaatccagagcgtcttacagaaactgcaggatccctgccccagtagtttggcctctcccgatgaatctgaacctgactccatggagtcgtttcccgaatctctctccgccctagtggttgacctgaccccacggaatcccaattccgccatactgctcagtccagttgagaccccatacgctaacgtcgatgccgaggtccacgctaaccggctcatgagggaattggacttcgcagcatgtgtcgaggaacgcttagatggggtcattcctctagcccgtggaggtgttgttagacagtattggagctctagcttccttgtcgatttgttggctgtggcagcaccagtggtgccaaccgttctctgggcatttagcacacagagggggggtaccgatcctgtatacaacatcggggctctcctccgcggatgttgtgtggtagcgctgcattcactgcggagaacagccttccggataaagacttag

SEQ ID NO: 40020 - DNA, 1992 bp, Artificial Sequence
  derived and/or modified sequence
atgggcccattacgggaatccaagaaagagcatagggtgcagcatcacgacaaagagataagcaggtcacggattccccggcttattcttcggccccacatgccccagcagcaacataaggtgtcgcctgcctcagagtccccgttcagtgaagaggaatccagggagtttaacccttcctcatctggcaggagcgcccgaaccgtttcctccaattcattttgtagtgatgatacgggttgtcctagtagccagagcgtctcaccagtgaaaactcctagtgatgccgggaattctccaatcggtttctgtccaggctctgatgagggtttcaccagaaaaaagtgcacaatcgggatggtgggagaaggctctatccagagttctcggtataaaaaggaatcgaaatcaggactggtgaaacctggcagtgaagcggacttcagtagtagctccagtactgggagcatctccgctccagaggtgcacatgagtactgcgggcagcaaacggagctcctcctcaagaaacaggggcccacacggccggtctaatggagcgtcatctcataaacctggctcgagcccaagttcgccccgcgagaaggatctgctcagcatgctctgccgcaaccagttatcgcctgtgaacatccatccgtcttatgccccttcttcgccgtcctcttccaactctggcagttacaaggggagcgattgttcccccataatgcgccgtagtggtcggtacatgtcatgcggcgaaaatcatggcgttcgaccccccaaccccgaacagtacttgacccctcttcagcagaaagaggttaccgtcaggcacttgaagactaaactgaaggaaagtgagcggagactacatgagagggaatcggagatcgtggaattgaaatcccaactggcaagaatgagagaggactggatagaggaggagtgccaccgggttgaggcacaactcgcactaaaggaagctaggaaagagatcaaacaactgaagcaggttattgagactatgcgttcctcccttgcagacaaagataaaggcattcagaaatattttgtcgacatcaacattcagaataagaaactggaaagcctccttcagtccatggagatggcccatagtgggagcctcagagatgagttgtgccttgattttccttgtgacagccctgaaaaatcactgacactgaatccgccactggacacaatggctgatgggctttcactagaggagcaggttaccggagagggagccgatcgtgaactcttggtaggggacagcattgccaattccaccgatctgttcgacgagatagtaacagcaaccactaccgagtctggagatcttgagttggtgcattctacaccaggtgctaacgttctggagctgcttccaatagttatggggcaggaagaggggtccgtggtggtggagcgggctgttcaaactgacgtcgtgccatatagccccgctatatctgaactgattcaaagtgtgcttcagaagctccaggatccttgcccttccagcctggcttcacctgacgaatcggaacctgactccatggaatcattccccgagagcctttccgctctcgtagtggaccttaccccccgcaacccgaactctgcgattctgctgtcgccagtcgagaccccttacgctaacgttgatgccgaagttcatgctaaccgcctcatgcgcgagctggattttgccgcgtgcgtagaagaacgtttagacggagtgatccctctggcccggggaggggtggtgaggcaatactggagctcatccttcctggttgatctactggcagtggccgcccccgtcgttcccacggtcctctgggcgttctccacacagagagggggcactgatcctgtatacaacatcggcgccttgctacgcggctgctgtgttgtcgccctgcatagcctacgccggactgcttttcggatcaagacatag

SEQ ID NO: 40021 - DNA, 1992 bp, Artificial Sequence
  derived and/or modified sequence
atggggcctctgcgagagagcaaaaaagaacatcgggtacagcaccatgataaagagatatcccgctcccgcattccccgtcttattctccgcccacacatgcctcaacagcagcacaaagtgagtccagcatccgaatctccgttttctgaggaggaaagccgggagtttaacccatcctcctccggacgcagcgcaagaaccgtatccagcaattcgttctgctctgatgacacaggatgtcctagcagccaatccgttagccccgtaaagacccccagcgacgcaggtaatagcccaattggcttttgcccaggatccgacgagggttttacccggaaaaagtgtactatcgggatggtgggggagggctcaatacagtcctctcgctataaaaaagagagcaagagtggcttggtgaagccaggctctgaggctgacttttcctcttcatcttccaccggttcaatcagtgccccagaggtccacatgtccacagcagggtccaaaagaagcagctccagccgaaatagagggccacacgggagatctaatggtgcaagttcgcataaacctggatccagccctagcagtcctcgggaaaaagatcttctgtccatgctatgcagaaatcagttaagccccgtcaacattcatccctcatacgctccatcatctccttcctcatcgaactccggttcctataaaggctctgattgtagtccaataatgagacgtagtggccgctatatgtcgtgtggtgaaaatcacggagtgcgcccacccaatccagaacagtacctaacgcccctccagcagaaagaggtaactgtgagacacctgaaaacgaagctgaaagagtcagagcggagactccatgagcgggaatctgagatcgtcgaacttaaatctcagcttgcccggatgcgagaggactggatcgaggaagaatgccacagagttgaagcgcagctggctttgaaagaagccaggaaagagataaagcagttgaagcaggtaatcgaaaccatgaggagctccttggcagataaagataaagggattcagaagtactttgtcgacattaatattcaaaacaaaaaattggagagccttctccagtcaatggagatggcgcactcaggctctctgagagatgagttgtgcctagacttcccctgcgactcccccgaaaagtccttaaccctcaatccaccccttgataccatggccgacggccttagtctggaagaacaggtgacgggggagggggcagacagagaactgctggttggggattcaatcgccaattccactgacctgtttgatgagattgtgaccgctaccactaccgagagcggggatctggagctcgtccacagcacgccaggggccaatgttcttgaactactgcccatagtcatgggacaggaggagggatccgttgtggtcgaacgcgccgtccaaactgacgtggtcccctactcacccgccataagcgagttaatccagtcagtcctacagaaactgcaagacccatgcccgtccagcctggcttctccagatgagtcggaacctgacagtatggagtcgtttcccgaaagtctgagtgccctcgtcgtagatttaaccccgcgaaatcctaactccgcgattctgctgtcacctgtggaaacaccgtacgccaacgtagatgcagaggtgcacgccaaccgcctcatgcgagaactggactttgctgcgtgcgtggaggagagactggatggtgtgatacccctagcccgcggcggagttgtccgccagtactggtcttcatcctttctcgttgacctccttgctgtcgctgcccccgttgtgccaaccgtcctctgggctttctctacccaaaggggaggaaccgaccctgtttacaatatcggagcccttctcagggggtgctgtgtggtcgccctgcattcccttcgtaggactgcctttagaataaaaacctag

SEQ ID NO: 40022 - DNA, 1992 bp, Artificial Sequence
  derived and/or modified sequence
atgggaccactccgggagtcaaaaaaggaacacagagtgcagcatcatgataaggaaatctcaaggtcacggatcccgagactgatcctgcgtccccatatgccccaacagcaacataaagtgagcccagccagtgagagtcccttcagcgaggaggaatcaagagagtttaacccttcttcatctgggcgcagcgctcggactgtgtcttcgaactctttctgttccgacgacaccggctgccctagttctcagagcgtttccccggtcaagactccctctgacgccggcaacagtcctattgggttttgccctggatctgacgagggcttcacgaggaaaaaatgcaccattgggatggtcggcgaagggagcattcagtcgagtaggtataagaaggaatctaagagcggactggtgaagccaggctcagaggcagacttttcatcaagttccagcaccgggagtatttcggcaccggaggtgcacatgtcaaccgccggtagcaagcgatcttccagttcgagaaacaggggtccccacggcagaagcaacggcgcctcctcacacaaaccgggcagcagcccgtcttcccctcgcgagaaagatttgctatctatgctttgtcgaaatcagctcagtcccgtgaatattcatccttcttacgctccgagcagcccttccagtagtaatagcggcagctataaaggcagtgattgctccccaataatgaggagatccggtcggtatatgtcttgcggggagaatcatggcgttcggccccctaatccagagcagtacctgactcctctgcagcaaaaggaggtaaccgttagacacctgaagaccaaactgaaagaatcagaacggaggttgcatgagcgcgaatctgagatagtcgaattgaagtctcaactggctcgcatgcgagaggactggatcgaggaggaatgtcatcgcgtggaagcacagttggcccttaaggaggcacgaaaggagataaagcagttaaaacaagtgatcgagacgatgcgatcttccctggcagataaagataaagggattcagaagtacttcgtggacattaatatacaaaataaaaaactcgagtctctgcttcaatctatggagatggcccactccggaagcttaagggatgagctgtgcctcgactttccatgtgatagtcctgaaaaatccctgactcttaatccacctctcgataccatggcggacgggctgtccctcgaggaacaggtcacaggagaaggagcagaccgggagctgctcgttggagattccatagcgaacagtaccgacctcttcgatgagattgtgactgcaaccaccacggaaagtggggacctcgagctggtgcatagcacaccaggcgccaacgtgctggagctactgcccattgtcatgggtcaggaggagggctctgtggtagtcgagagagcagtgcaaaccgatgttgtcccgtatagcccagcgatatccgaactgatccaaagcgttctccaaaagctgcaagacccctgtccatcgtcacttgcctcccccgacgagtcggagccagatagcatggaatcattccccgagtcactgtcggccctggtcgtggatctgacgcctcgaaatcccaacagtgcaattctgctctcgccggtggagaccccttacgccaatgttgatgctgaagttcacgccaaccggcttatgagggagctagacttcgccgcatgcgtcgaggagaggttggatggcgtcattccactggctagaggcggtgttgtccgccagtattggagctcctcgttcctggtcgacctgctggcggtggccgccccggtggtaccaacagttctctgggcgttttccacacagcgaggtggcacggaccctgtgtataacattggagcacttttgcgaggctgctgcgtcgtcgctttgcattcactgagaagaactgccttccgaataaagacttag

SEQ ID NO: 40023 - DNA, 414 bp, Artificial Sequence
  derived and/or modified sequence
atgggaccactgcgggagtctaaaaaagaacatagagttcaacaccacgacaaggagatcagcagatcacgtatccctaggctcatactgagaccacacatgcctcagcaacaacacaaggtgtcccccgcatcggagagcccgttttctgaagaggaatcacgagaattcaacccttccagcagtggtcggtccgcacgcaccgtgtcaagtaattcattttgcagcgatgacacaggctgtccatcctcacagtctgtgtctcccgtcaaaactccgtcggatgctggcaacagccccattggtttctgcccaggtagcgatgaggggttcaccagaaagaagtgtacaatcgggatggtgggtgagggctctatccagagctctcgttataagaaagaatcaaagagctag

SEQ ID NO: 40024 - DNA, 231 bp, Artificial Sequence
  derived and/or modified sequence
atgggcccgctgagggaatctaaaaaggagcacagagtgcagcatcacgacaaggaaatttccagaagtcggatcccaaggttaatattaaggccacacatgccccagcagcagcacaaagtctctccagcttccgagtcgcccttttccgaagaagaatctagagaattcaatcctagtagctcaggccgctcggcgagaaccgtttcctccaactctttctgcagctag

SEQ ID NO: 40025 - DNA, 222 bp, Artificial Sequence
  derived and/or modified sequence
atgggtcccttgcgggagtctaaaaaagaacatagagtgcagcatcatgacaaggaaatctctaggtcaaggatcccccgcctcatcttaaggccacatatgccacaacagcagcacaaggtcagtccagcatccgagtcccctttctcagaagaggagtctcgggaatttaacccttcaagcagcgggagaagcgctcggacagtgtcatctaactcttag

SEQ ID NO: 40026 - DNA, 288 bp, Artificial Sequence
  derived and/or modified sequence
atggggccactgagggagagcaagaaagaacatcgcgtacaacaccatgacaaagaaatttccaggagtcggatacctaggctcatcctccgcccccatatgccacaacagcagcacaaggtttctcccgcctcagaaagtccatttagtgaggaagaatctcgcgagtttaatccaagctcctccggacgcagcgcccggacagtctcctccaatagcttttgcagcgacgacacgggttgtccatcttcccaaagtgtgagtcccgtcaagacgccgagtgattag

SEQ ID NO: 40027 - DNA, 108 bp, Artificial Sequence
  derived and/or modified sequence
atggttggagaaggaagtatacagtcttcccgatataagaaggaatccaagagtggattagtcaaaccgggctctgaggctgatttcagttccagttcttctacgtag

SEQ ID NO: 40028 - DNA, 105 bp, Artificial Sequence
  derived and/or modified sequence
atggtcggcgaggggtccattcagtcgtctcggtacaaaaaggagtctaagtctggcctagtgaaacctggctccgaggccgacttctctagctccagttcttag

SEQ ID NO: 40029 - DNA, 1992 bp, Artificial Sequence
  derived and/or modified sequence
atgggccctcttagggagtctaaaaaagaacatagggttcaacaccacgataaagaaatttcacggtcaagaatcccgcggcttattctgcggccgcacatgccccagcagcagcataaagtgtcgccagcctcagagtcaccgtttagcgaagaagaaagtagggagttcaatcccagcagttccggtaggtctgcacgcaccgtttcatctaactctttttgttctgacgacaccggttgtccttcatcccagtctgtgagtcccgtgaaaactccatccgacgcgggcaactctcccattgggttctgcccagggagtgatgaaggatttacacggaagaagtgcacaatcgggatggtgggcgaaggttcaatacagtcttctagatataagaaggaatccaagagtgggctcgtcaaacccgggtccgaggctgatttctctagcagcagctcaactggcagcataagcgctcccgaggtgcacatgtccacagccggaagcaaacgctcgagctccagccgcaacaggggaccacacggcagatctaatggagcttcgtcgcacaaacctggtagctctccctcctcgcctcgcgagaaagacctactaagcatgctctgtagaaaccagctgagtcccgttaacatccatcctagctatgcacccagcagtccctctagttccaattctggatcatacaagggttccgactgttcccctatcatgaggagatccggccgctatatgtcatgcggagagaaccacggcgtgaggccccccaatcctgaacagtacctgacccctctgcagcagaaggaagttacagtgcggcacttaaagacgaaattgaaggagtcggagcggaggctccacgaacgagagagcgagatcgtggagctcaaatctcaattggcccgtatgagggaggattggatcgaggaggagtgccatcgagttgaagcacagctcgccctgaaggaagctcgaaaagagattaaacagctaaagcaggtgattgaaaccatgcgctccagcctggccgataaggacaagggcatccagaaatactttgtcgacatcaatatccagaacaaaaaactggaaagcctgctgcaatccatggaaatggctcactctggatcacttagagacgagctctgtctagatttcccatgcgattccccagagaaaagtctcaccctgaaccctcccctggacaccatggccgacggcctaagcctggaggaacaggtcactggcgaaggagccgatcgtgagctgcttgtgggagactctattgcaaactcgaccgatcttttcgacgaaattgtgacagccactacaacagagtctggcgacctggagctcgtgcattccacaccaggcgctaatgttctggaactcctccccattgttatggggcaggaggaaggctctgtggttgtggaaagagctgttcagacggacgtggtaccctacagcccggcaatatctgaactgatccaaagcgtgttacagaagcttcaggacccctgccctagttccctcgcctcccctgatgagagtgaacctgattccatggagagtttcccagagtctctttcagcactggttgtcgatctaaccccacgcaatcccaattcggcaatcctactatcccccgtagagactccatacgcaaatgttgacgctgaggtgcatgccaaccgcctgatgcgtgagctagactttgctgcctgcgtagaggaacgactcgacggcgttatccctctggctcggggcggggttgtgaggcagtactggagctcttcctttttggtggacctgctggcagtagccgcgcctgttgtccccacagtgctgtgggcgtttagtacgcagagagggggcacagatccagtgtataacattggcgctctgttacggggatgctgtgtggtagcgctgcatagcctgagacgcaccgcatttcgcattaagacatag

SEQ ID NO: 40030 - DNA, 456 bp, Artificial Sequence
  derived and/or modified sequence
atggggccgctcagagagtccaagaaagagcatcgagtccagcaccacgataaggagatttcccgtagccggattccccggttaattttgcgcccccacatgccacagcagcagcacaaagtcagccctgcaagtgaatcccccttttcagaagaagagagcagggaattcaacccgagttcaagcggcagaagcgccaggaccgtatcctcaaactcgttttgtagcgacgataccggttgcccttcttcccaatctgtatcacctgtcaagacaccatctgacgccggtaactcaccaatcggcttctgtccgggttctgatgaggggtttacgcggaaaaagtgtaccatcggcatggttggtgagggctccatccagagctctcgttacaagaaagaaagcaaaagcggccttgtcaaaccggggagtgaggcggatttctctagctcctag

SEQ ID NO: 40031 - DNA, 231 bp, Artificial Sequence
  derived and/or modified sequence
atgggaccgctgcgggaaagtaaaaaggaacacagagtacagcatcacgataaagagataagtcggagtcggatcccccgtctgatactacgcccacatatgccgcagcagcagcacaaggtgagccctgcctccgaaagccctttctctgaagaagagagcagggaattcaaccccagtagctctggtaggtccgctaggactgtttcaagtaatagcttctgcagctag

SEQ ID NO: 40032 - DNA, 1992 bp, Artificial Sequence
  derived and/or modified sequence
atgggccccctgcgggagagcaagaaggagcaccgggtgcagcaccacgacaaggagatcagccgcagccgcatccccaggctcatcctgcggccccacatgccccagcagcagcacaaggtgtccccagccagcgagagccccttcagcgaggaggagagccgggagttcaaccccagcagcagcggccgcagcgccaggacagtgagcagcaacagcttctgcagtgatgacaccggctgccccagcagccagagcgtgtcccctgtgaagacccccagtgatgctggcaacagccccatcggcttctgccccggcagtgatgagggcttcaccaggaagaagtgcaccatcggcatggtgggggagggcagcatccagagcagccgctacaagaaggagagcaagagcggcctggtgaagccaggcagcgaggccgacttcagcagcagcagcagcacaggcagcatcagcgcccctgaggtgcacatgagcacagctggcagcaagaggagcagcagcagcaggaacagaggcccccacggccgcagcaatggagccagcagccacaagccaggcagcagccccagcagcccccgggagaaggacctgctgtccatgctgtgcaggaaccagctgagccctgtgaacatccaccccagctatgcccccagcagccccagcagcagcaacagcggcagctacaagggcagtgactgcagccccatcatgagaagaagtggccgctacatgagctgtggagaaaatcatggagtgcggccccccaaccctgagcagtacctgacccccctgcagcagaaggaggtgacagtgcgccacctgaagaccaagctgaaggagagcgagcggcggctgcacgagcgggagagcgagatcgtggagctgaagagccagctggccaggatgagggaggactggattgaggaggagtgccaccgggtggaggcccagctggccctgaaggaggccaggaaggagatcaagcagctgaagcaggtgattgagaccatgaggagcagcctggccgacaaggacaagggcatccagaagtactttgtggacatcaacatccagaacaagaagctggagagcctgctgcagagcatggagatggcccacagcggcagcctgagagatgagctgtgcctggacttcccctgtgacagccctgagaagagcctgaccctgaacccccccctggacaccatggctgatggcctgagcctggaggagcaggtgactggagagggcgctgaccgggagctgctggtgggggacagcatcgccaacagcacagacctgtttgatgaaattgtgacagccaccaccacagaaagtggggacctggagctggtgcacagcacccctggggccaacgtgctggagctgctgcccatcgtgatgggccaggaggagggctctgtggtggtggagagagctgtgcagacagatgtggtgccctacagccctgccatcagcgagctgatccagagcgtgctgcagaagctgcaggacccctgccccagcagcctggccagcccagatgagagcgagccagacagcatggagagcttccctgagagcctgagcgccctggtggtggacctgacccccaggaaccccaacagcgccatcctgctgagccctgtggagaccccctatgccaacgtggatgctgaggtgcacgccaaccggctgatgagggagctggactttgctgcctgtgtggaggagcggctggatggagtcatccccctggcccggggcggcgtggtgcggcagtactggagcagcagcttcctggtggacctgctggccgtggccgcccctgtggtgcccaccgtgctgtgggccttcagcacccagagaggaggaacagatcctgtgtacaacattggagccctgctgcggggctgctgcgtggtggccctgcacagcctgcggaggacagccttccgcatcaagacctag

SEQ ID NO: 40033 - DNA, 414 bp, Artificial Sequence
  derived and/or modified sequence
atgggccccctgcgggagagcaagaaggagcaccgggtgcagcaccacgacaaggagatcagccgcagccgcatccccaggctcatcctgcggccccacatgccccagcagcagcacaaggtgtccccagccagcgagagccccttcagcgaggaggagagccgggagttcaaccccagcagcagcggccgcagcgccaggacagtgagcagcaacagcttctgcagtgatgacaccggctgccccagcagccagagcgtgtcccctgtgaagacccccagtgatgctggcaacagccccatcggcttctgccccggcagtgatgagggcttcaccaggaagaagtgcaccatcggcatggtgggggagggcagcatccagagcagccgctacaagaaggagagcaagagctag

SEQ ID NO: 40034 - DNA, 231 bp, Artificial Sequence
  derived and/or modified sequence
atgggccccctgcgggagagcaagaaggagcaccgggtgcagcaccacgacaaggagatcagccgcagccgcatccccaggctcatcctgcggccccacatgccccagcagcagcacaaggtgtccccagccagcgagagccccttcagcgaggaggagagccgggagttcaaccccagcagcagcggccgcagcgccaggacagtgagcagcaacagcttctgcagctag

SEQ ID NO: 40035 - DNA, 222 bp, Artificial Sequence
  derived and/or modified sequence
atgggccccctgcgggagagcaagaaggagcaccgggtgcagcaccacgacaaggagatcagccgcagccgcatccccaggctcatcctgcggccccacatgccccagcagcagcacaaggtgtccccagccagcgagagccccttcagcgaggaggagagccgggagttcaaccccagcagcagcggccgcagcgccaggacagtgagcagcaacagctag

SEQ ID NO: 40036 - DNA, 288 bp, Artificial Sequence
  derived and/or modified sequence
atgggccccctgcgggagagcaagaaggagcaccgggtgcagcaccacgacaaggagatcagccgcagccgcatccccaggctcatcctgcggccccacatgccccagcagcagcacaaggtgtccccagccagcgagagccccttcagcgaggaggagagccgggagttcaaccccagcagcagcggccgcagcgccaggacagtgagcagcaacagcttctgcagtgatgacaccggctgccccagcagccagagcgtgtcccctgtgaagacccccagcgactag

SEQ ID NO: 40037 - DNA, 108 bp, Artificial Sequence
  derived and/or modified sequence
atggtgggggagggcagcatccagagcagccgctacaagaaggagagcaagagcggcctggtgaagccaggcagcgaggccgacttcagcagcagcagcagcacctag

SEQ ID NO: 40038 - DNA, 105 bp, Artificial Sequence
  derived and/or modified sequence
atggtgggggagggcagcatccagagcagccgctacaagaaggagagcaagagcggcctggtgaagccaggcagcgaggccgacttcagcagcagcagcagctag

SEQ ID NO: 40039 - DNA, 456 bp, Artificial Sequence
  derived and/or modified sequence
atgggccccctgcgggagagcaagaaggagcaccgggtgcagcaccacgacaaggagatcagccgcagccgcatccccaggctcatcctgcggccccacatgccccagcagcagcacaaggtgtccccagccagcgagagccccttcagcgaggaggagagccgggagttcaaccccagcagcagcggccgcagcgccaggacagtgagcagcaacagcttctgcagtgatgacaccggctgccccagcagccagagcgtgtcccctgtgaagacccccagtgatgctggcaacagccccatcggcttctgccccggcagtgatgagggcttcaccaggaagaagtgcaccatcggcatggtgggggagggcagcatccagagcagccgctacaagaaggagagcaagagcggcctggtgaagccaggcagcgaggccgacttcagcagcagctag

SEQ ID NO: 40040 - DNA, 1992 bp, Artificial Sequence
  derived and/or modified sequence
atgggccccctgcgggagagcaagaaggagcaccgggtgcagcaccacgacaaggagatatctaggtctcggatccctcggcttattctgcgacctcacatgccacagcagcagcacaaggtgagccctgctagcgagagcccgttcagcgaggaggagagtcgtgagttcaacccctcatcctccgggcgcagcgcacgtacagtgtcttcgaactccttttgcagcgacgataccgggtgtccttccagtcagagtgtgtcgccagtgaaaacccccagcgatgccggaaattctccaattggcttttgcccgggttccgatgaaggctttacccgtaagaagtgcacaatcgggatggtgggtgagggcagcattcagtcctctaggtacaaaaaggaatctaagtccgggttggtgaaacccggatcagaggccgacttctcgtcgtcatcctccactggcagcatcagtgcgcccgaagtgcatatgagcactgctggcagcaaaaggtctagctcaagccgaaaccggggcccacatgggcggtctaatggagctagttcccacaaacccgggtctagccccagctcacccagagagaaggatctgctgtccatgttgtgccgaaaccaattgtcacctgtgaacatccatccctcctatgctccctcctccccgagttcatccaacagcggctcgtataagggttccgactgcagcccgatcatgagacggtccggccgctatatgagttgtggtgagaatcacggggtcaggcctcccaacccagagcagtatctgacgccactgcagcaaaaagaagtcacagtccgacatctgaagacaaagctcaaagagtctgaacgcagactacatgagcgggaaagcgagattgtcgaactgaagtctcagcttgcgcgcatgcgcgaggactggattgaggaggagtgccacagggtggaagcgcaactggcgctcaaagaggcgaggaaggagatcaaacagcttaaacaggttattgagacaatgcggagctccttagctgataaagataagggcattcagaagtactttgtagacatcaacatccagaacaagaaattagagagcctcctccagtctatggagatggcacacagcgggtccttacgcgacgaactgtgtcttgacttcccatgtgatagccccgagaaaagcctgaccctgaacccgcccctcgacaccatggcggatggactatcacttgaagagcaggtgacaggggagggggcggacagggagctcctggtcggagacagtatagccaacagtacagatctctttgatgaaattgtcacagcgaccacgaccgaaagcggggatctggagctggtgcattccactccaggcgcaaacgtgcttgagctccttccaattgtcatgggtcaagaggaaggcagcgttgtggtcgagagagccgtgcaaaccgacgtggtgccatacagtccagctatcagcgagctgattcagtccgttcttcagaaactgcaagatccatgtccttcctctctggctagtcccgacgaatcagaaccagacagtatggagtcatttcctgagtccctctccgcgctcgtggtcgatcttacacccaggaatcccaactcagcgattctactgagcccagtcgagactccctacgcgaatgtggacgccgaggttcatgccaacagattgatgcgggaacttgacttcgccgcctgcgtggaagaacgcctcgacggcgttattccacttgccagggggggagtggtgcgacagtactggtcctcttcttttctggtcgatttgcttgcagtggctgcccccgtggtcccaacagtgctgtgggcatttagtacccaacgaggtggaacagatcctgtgtacaacattggagctctgctaaggggctgctgtgtcgttgccttgcactcattgagaaggaccgcatttcgaatcaaaacctag

SEQ ID NO: 40041 - DNA, 1992 bp, Artificial Sequence
  derived and/or modified sequence
atgggccccctgcgggagagcaagaaggagcaccgggtgcagcaccatgacaaggaaattagtcggagccggattcctcgcttgattctacgcccgcatatgccacagcaacagcacaaagtttcccctgcttctgaatctcccttctctgaggaggaaagtagagaatttaacccctcctcgagtggccggagtgccaggactgtatcatcgaacagcttttgctccgatgacaccggctgcccatcttcacagtccgtgtccccggtcaaaacaccaagtgatgcgggcaactcccccataggcttctgccccggctcagacgaaggattcactaggaagaagtgtaccattggtatggtcggagaaggatcaatccagtcatctcggtacaaaaaagagtcaaagagcggtctcgtgaagccggggagtgaggccgatttctcatcctcctcgtcgacgggcagcataagcgccccagaggtacatatgagcactgcgggcagcaagaggtctagttcttcccggaaccgcggccctcacggtaggagcaatggagcaagttctcacaaacccgggagcagcccgtcaagcccgcgagaaaaggatctcctgtcaatgctgtgtcgcaatcagctgtcacctgtcaacatccaccctagttacgccccatcctctccttcaagttccaactcaggaagttacaagggcagcgactgctctcccatcatgcggcgttctggcaggtacatgagttgtggggaaaatcacggagtccggcctccaaatcctgagcaatatctcacacccttgcagcagaaagaggtgaccgtgcgccacttgaagacaaagctgaaagagagcgaaagaaggttacatgagagggaatccgaaatcgtggaattaaaaagtcagctggctcggatgagagaggattggattgaagaggaatgtcacagggtcgaggctcagctggcactgaaggaggcgcgaaaagaaatcaagcaattgaaacaggtgatcgaaacgatgcggtctagcctggcagataaggataagggtattcaaaagtattttgtcgatataaatatacagaacaagaagctcgagtcactgctccagtccatggagatggcacatagcggcagcttgcgtgatgaactctgtcttgactttccatgtgattccccagagaaatccttgacactgaatccacccttagacacaatggcggatggactgtctctggaagagcaggttaccggagaaggggccgacagggaacttttagtgggggacagcattgccaacagcactgatttgtttgacgaaatagtgactgcaacaaccacggaatccggggacttggagctagttcacagcacaccaggggctaacgtgctggaacttctgcccatcgtgatgggtcaggaagaggggagtgtagtagtcgaaagggctgtgcaaacggatgtggttccctacagtcctgccatttcggagctgatacaatcagtgctacaaaaactccaggatccctgcccatcctctttagcttctccagacgaatctgaaccagactcgatggaaagttttccagagtctctgtccgccctggttgttgatcttacacctaggaaccccaatagtgccatattactcagtccagtggagacaccgtatgccaacgtcgatgctgaagttcacgctaaccgcttaatgagggaattggattttgctgcatgtgtggaagagcggctggatggcgtcattccactagctagaggaggagtcgtgcgtcaatattggtcgagttcatttttggtggacctgctcgcggtggccgctccggtcgtcccgactgtgctttgggcattttcaactcagcgcgggggcactgaccctgtctataatatcggcgcacttctcagaggctgttgtgtcgtagctctccatagcttacgtaggactgctttccgcattaagacatag

SEQ ID NO: 40042 - DNA, 1992 bp, Artificial Sequence
  derived and/or modified sequence
atgggccccctgcgggagagcaagaaggagcaccgggtgcagcaccatgacaaggaaatctctcggagccgaattccaagattgattctgcgaccccatatgccccagcagcagcacaaagtttccccagcaagcgagagccctttcagcgaagaagagagccgtgagttcaatccctccagtagtggaaggagtgctcggacggtgtctagcaactctttttgttcggacgataccggctgcccatcgtcacagagtgtgtctccagtgaaaacaccatcggacgccggcaactcaccaattgggttttgtccaggtagcgacgaagggttcacaaggaagaagtgtacaatcggcatggtcggcgaaggaagcatacagagtagtagatacaaaaaggagagcaaaagcgggctcgtgaaacccggctcagaagccgacttttcaagctcaagcagtacagggagtataagtgcccctgaagtccatatgtcaaccgctgggtccaagcgctccagctctagcaggaataggggacctcacgggagaagtaacggtgcaagcagccacaaaccaggctcttctccatccagcccccgcgagaaagatcttttgagtatgctgtgcaggaaccagctgtcacctgtgaatatacatccgtcctacgccccctcaagtccctcatcatctaattcaggcagctataaggggagtgattgttctcctattatgaggcggtctgggcggtacatgtcctgcggtgagaatcatggggtcaggccgcctaacccagagcagtatctcaccccactgcagcagaaggaggtgaccgtgcggcacctcaagacgaagttgaaagagagcgagagaaggttgcacgaacgtgaaagtgagatcgtggaactcaaatcccagcttgcccggatgagggaggattggatcgaggaagagtgtcaccgcgttgaggcccaactggcactgaaagaagcccgtaaagaaataaaacagctgaaacaggtaatcgaaactatgagatcgagcttggcggataaggataagggaattcagaaatattttgtggacatcaatatccagaataaaaagcttgaaagcctgttgcagtcaatggaaatggcccatagcggctccctgagagatgagctatgcctggattttccttgcgactctcccgagaagtcccttactttgaatcctcccttggatacgatggctgacggtttgtcgctggaagagcaggttaccggggagggagcagatcgggagttactggtcggagatagcattgcgaacagtaccgacctgttcgatgaaatcgtaaccgcaaccacaaccgaatctggtgacctggaattagtccattctaccccaggtgccaatgtgttagagctcctgcctatcgtgatgggacaggaggaagggagcgtggtcgtggagagagcagtacagaccgatgtggtgccttacagcccggcgatttcagagcttatacagtcagtcctccagaagctccaggatccttgcccatcctccttggcgtcacccgatgagagcgagcctgattcgatggaaagcttccctgagtccttgtctgcattagtcgtggatctaacaccccgcaaccctaacagtgctatcttgctttctcccgtggagaccccttacgccaatgtggatgccgaggtacacgctaatcgcctgatgagggaactggacttcgcagcctgcgtggaagaacgcctggacggggtgatacctctggcacgggggggagtggtccgtcaatattggtccagttcattccttgttgaccttctggccgtggctgcccctgtggtccccaccgtactgtgggccttttctactcaaagaggcgggactgaccctgtttataacatcggtgccttgctccgtggctgttgcgtcgtggcactgcatagcctgaggcggactgccttcagaattaaaacttag

SEQ ID NO: 40043 - DNA, 1992 bp, Artificial Sequence
  derived and/or modified sequence
atgggccccctgcgggagagcaagaaggagcaccgggtgcagcaccacgacaaggagatttcgaggagccgcattcctcgcctcattctgaggccacatatgccacaacagcagcacaaggtgagtcccgctagtgaatcaccattttccgaagaggaaagtcgcgagttcaatccaagcagctctgggagaagcgcacgtactgttagttctaattcattctgtagcgacgacaccgggtgtccttccagccagtccgtttccccagtgaaaacaccttccgacgctggcaacagccccattggcttttgtcccggaagcgatgaggggttcactcgtaagaagtgtacaattggaatggtcggggagggctccattcagagctcccgatacaagaaagagtccaagtctggcttggtgaagcctggcagcgaggcagatttttcttctagttcgagcaccggttccatctccgcgccagaagtacacatgtctacagcagggagcaaaagatcttcaagcagtcgcaaccggggcccccacgggcggtctaatggggcttcatcgcataagcctgggtctagtccatcctctccgcgggaaaaggaccttctctccatgctctgccggaatcagctatctccggtgaatatccacccgtcctacgccccctccagcccatcttcaagcaattcgggctcttacaaagggtcagattgttctccaatcatgagaagatcaggacggtatatgtcttgtggcgaaaaccacggggtaagaccccccaatcccgaacagtacctaacacctttgcagcagaaggaagtgaccgtgcgtcatctgaaaaccaagctgaaagaatccgaaaggcggctacacgaaagggaaagcgaaattgttgaactgaagagccaattagcccgcatgagggaggattggattgaagaagagtgtcatcgtgtcgaggctcagttagccctgaaagaggccagaaaagaaattaagcaactcaaacaggtaattgagacgatgaggagtagcctggccgacaaagacaagggcatccaaaagtattttgtggatattaatatccagaacaagaaactggaatccttgctgcagtctatggagatggcccactcaggcagcttgcgcgacgaattatgccttgatttcccctgcgactctcccgagaagtccctcacactcaacccaccactggacactatggcggatggtctgagcctcgaagaacaggtgaccggtgagggtgcagaccgggaactgttggttggcgatagcatagccaattccacagatctcttcgatgaaatcgtcactgctaccaccacagaatccggcgatcttgaactcgtgcattctactcctggcgccaacgtgctggaactgttgccaatcgtcatgggccaggaggagggtagcgtggtcgtggaacgagctgtgcagacagacgtcgtcccttacagcccagctatctcagaactcatccaatcagtgctgcagaagttgcaagacccttgtccgagttcgctggcaagcccagacgaatcagaacccgatagcatggaaagttttcctgaatccctgtcagctcttgtggtagacctgacaccgagaaaccccaactccgctattctcctgagtcctgtcgaaacgccttacgcaaatgtggacgctgaagtacacgcgaaccgactgatgcgagaacttgactttgccgcctgcgtcgaagagagactggacggtgttatccctctcgctcgggggggggtggtcaggcaatactggtcatccagcttcttggtggatctcctggcggtggctgcccctgtggtgccaacagtgctgtgggctttctctacacagaggggaggcaccgaccccgtctataacatcggtgccctgctgagaggttgctgcgtagttgctttgcatagtcttcgaaggactgcctttcgaattaagacctag

SEQ ID NO: 40044 - DNA, 1992 bp, Artificial Sequence
  derived and/or modified sequence
atgggccccctgcgggagagcaagaaggagcaccgggtgcagcaccacgacaaggagatctcccggtcacggatcccacgactcatcctgcgcccccacatgccacagcaacaacacaaggttagccctgcatccgaaagccctttcagcgaagaggaaagtcgggagttcaacccctctagctctggcaggtctgctcggactgtgtctagcaatagtttctgcagcgacgacactgggtgtccatcatcacaatcagtgtcccctgtaaagacaccaagcgacgctggtaatagtcctatcggattctgccccggctcagacgaggggttcacacggaaaaaatgtacaatcgggatggtcggcgaaggatccatacagtcatcacggtataaaaaagaatcgaagagtggtttggtgaagccagggtctgaggcggatttctcaagtagtagctccacaggaagcatatccgctcctgaggtgcatatgtcgactgccgggtcgaagcggagtagttcttctcggaaccgcggacctcacggtcgcagtaatggcgctagcagtcataagccaggcagctcccctagctctcccagggaaaaggatctgctgtcaatgctctgtcggaaccagctttcacccgtcaacattcaccctagctatgcgccctcatccccaagctccagtaatagcgggtcctataaagggtctgattgcagtccaatcatgcggcgctccggccgatacatgagctgcggcgagaatcacggtgtgcggccgccaaaccccgagcagtaccttactccactccaacagaaggaggttaccgtgcggcatcttaaaactaaactcaaggagtctgaacgacgtctacacgagagggaatccgagattgtcgaactaaaatcgcaacttgcccgtatgagagaggactggattgaggaggagtgccatcgggtggaggcccagctggctttaaaggaagctcgtaaggaaatcaagcaactgaaacaggtcattgagaccatgagatccagcctggccgataaggacaagggaatccagaagtatttcgttgacataaatatacagaataaaaaactggagtccctgctccagtctatggagatggcccactccggctcactgagagatgagctttgtctcgacttcccgtgcgatagccccgaaaagagtctaacactaaaccctccactcgatacaatggccgatggtctttccctggaggaacaggtcacaggagagggagccgatagggaactccttgtgggagatagcatcgccaattccacagatctgtttgacgaaatcgtaactgccactactaccgagtccggagacctcgaactggtccactctacacctggggccaatgttctggagctcctgccgatcgtaatgggccaagaagagggatcagttgtggtggagcgcgctgtccaaaccgacgtcgtgccatactctccagccatcagcgagctgattcagtccgtgctgcaaaaattgcaagatccctgtccctcgagtttggcgtcacctgatgagtcagagcccgacagtatggagtctttcccggagtctcttagcgcgctggtggtggacttaacacctcgcaaccccaactcggccatcctactctctcctgttgagacgccatacgctaacgtcgatgcagaggttcacgctaacaggttgatgcgtgagctggatttcgcggcatgcgtagaggaaagactggatggtgtgatcccactggcgcggggcggggtggttcggcaatattggagcagctcatttttggtggatcttttggctgtggcagctcctgtggtgccaaccgtgttgtgggcgttttccacccaaagaggtggaacggaccccgtctacaatatcggcgccctcctgaggggatgctgcgtggttgccttgcactctctccggagaacagccttcagaatcaaaacctag

SEQ ID NO: 40045 - DNA, 414 bp, Artificial Sequence
  derived and/or modified sequence
atgggccccctgcgggagagcaagaaggagcaccgggtgcagcaccatgacaaggagatatcacggagccggatcccacggctcatcctgaggccacacatgcctcagcaacagcacaaagtttcacctgctagtgagtctcccttttctgaggaagagtccagggagttcaacccctcgtcatccggaagatcagcgcggaccgttagtagtaactctttttgttcagacgacaccggctgcccttccagccaatctgtgagccctgtaaagaccccttccgatgctgggaatagccccatcggattttgtccaggctcggacgagggttttactaggaagaagtgcactatcggcatggtgggcgaggggagcatccaatctagccggtataagaaggagtctaagagctag

SEQ ID NO: 40046 - DNA, 231 bp, Artificial Sequence
  derived and/or modified sequence
atgggccccctgcgggagagcaagaaggagcaccgggtgcagcaccacgacaaagagatctcccgctcccggataccaagactgattctaagaccccacatgccccagcagcagcacaaggtgtccccggcttcagaatccccgttctcagaggaggagtcgagggaatttaacccttcatcatcaggcagaagcgcacgaactgtgtcctccaattctttttgtagttag

SEQ ID NO: 40047 - DNA, 222 bp, Artificial Sequence
  derived and/or modified sequence
atgggccccctgcgggagagcaagaaggagcaccgggtgcagcaccacgataaagagatttctcggtcccgcatcccccgactcatactaaggccacacatgcctcagcagcaacacaaggtgagtccggctagtgaatcgcccttcagcgaggaggagtctcgagaattcaaccccagtagctccggccgatccgctcgaaccgtcagctccaactcctag

SEQ ID NO: 40048 - DNA, 288 bp, Artificial Sequence
  derived and/or modified sequence
atgggccccctgcgggagagcaagaaggagcaccgggtgcagcaccacgataaagagatttcacgtagcagaattcccagactaatattgaggccccatatgccccagcaacagcacaaggtgtcacccgcatctgagtctccgttctccgaggaggagtcacgagaatttaaccctagtagttccggaaggtcagcccggaccgtaagctcgaacagtttttgcagcgatgacacaggctgccctagttcacagtctgtgtctccagtcaaaacgccgtccgactag

SEQ ID NO: 40049 - DNA, 108 bp, Artificial Sequence
  derived and/or modified sequence
atggtgggcgagggcagcatccagagcagccggtacaagaaggagtccaaatccggcctcgtgaagccaggatctgaagctgactttagtagctcctcttcaacatag

SEQ ID NO: 40050 - DNA, 105 bp, Artificial Sequence
  derived and/or modified sequence
atggtgggcgagggcagcatccagagcagccggtacaagaaggagtcgaaaagcggccttgtcaaaccaggctccgaagccgactttagctcttcatcgtcttag

SEQ ID NO: 40051 - DNA, 1992 bp, Artificial Sequence
  derived and/or modified sequence
atgggccccctgcgggagagcaagaaggagcaccgggtgcagcaccatgacaaagagatttcgcgaagcaggatccctcgcctcatccttcgcccacatatgccacagcaacaacacaaagtttcgcccgccagcgagtctcctttctccgaggaagaaagccgggagttcaacccaagttcctctgggcgttctgcgcgcacagtcagcagcaacagtttttgctccgacgacacaggctgcccctcaagtcagtcggtcagccctgtgaagacaccctctgacgcggggaactcaccaattggcttctgtcccggcagcgacgagggctttaccaggaagaagtgcaccattggaatggtcggggaaggaagcatacagtcaagcaggtataaaaaggaatcaaaatccgggcttgttaaacccgggtccgaagctgatttttcctcaagcagcagcacaggttctatctccgctccagaagtccacatgtccactgccggcagcaaaagatcgtcctcaagtagaaaccgcgggcctcatggccggtcaaatggcgccagctcacacaaacccggatcttcaccttcatcgccacgcgagaaggatctgcttagtatgctgtgtcggaatcaactttcacccgtgaacatccatccttcctatgctccgagctctccctctagctctaatagcgggtcttacaaaggtagcgattgttcccctatcatgagaaggtccgggcggtatatgagctgtggggagaaccacggtgtgagacctcctaaccccgagcagtacttgactcctctccagcaaaaagaggtgacagtgcgtcatttgaagactaagctgaaagagagcgaacgccggttacacgaaagggagagtgagatcgttgagctgaaatcccagctcgccaggatgcgggaggactggatcgaggaggagtgccacagggtagaagcccagctggcactgaaggaggctcgcaaggagatcaagcagctgaagcaggtgattgagaccatgaggtcttctctagccgacaaagacaaagggatacaaaagtacttcgtagatataaatattcagaacaagaaactagaatccctcctacaaagtatggagatggcccattctggatctctgagggatgagttgtgcctggattttccttgtgatagccccgagaaatccctgacattaaacccacctttagacacaatggccgacggactgtccttggaagaacaagtgaccggtgagggagctgatcgggaactgttagtgggagactctatcgccaatagtacagacctgtttgatgaaatcgtgacagctacaactactgagagcggagatcttgagttagtacatagcacgccgggtgcaaacgtgctggaactactgccaatcgtgatgggccaggaggaaggaagtgtagtggtcgagagggcggtacagaccgatgtcgtcccctattccccagcaattagcgagctaattcagagcgtgctgcagaagcttcaagacccttgtccctccagcttggcaagtcccgacgagagtgagcctgattctatggagtccttccccgagagcctttctgctctcgttgttgacctcaccccccgaaaccccaactctgcaatcctcctttcacctgtcgagacaccttacgcaaacgttgacgcagaggttcacgccaaccgcctgatgcgagagctggatttcgcagcctgcgttgaggagcgcttggatggagtgatcccgctcgcacgcggcggcgtggttcgtcagtattggtcatccagttttctggtagatctgttggctgtggcagctcctgtggtgccaactgtgctttgggcattctcaacccagcgaggcgggaccgaccctgtgtataacatcggagccctgcttcgcggctgttgtgtggtggccctccatagtctccggcgcacagcttttcgaataaagacatag

SEQ ID NO: 40052 - DNA, 456 bp, Artificial Sequence
  derived and/or modified sequence
atgggccccctgcgggagagcaagaaggagcaccgggtgcagcaccacgacaaagaaattagtcgcagtagaattccacggctaatcctgcgacctcatatgccccagcagcaacacaaggtctctcctgccagtgaatccccgtttagcgaagaggagtccagagagttcaacccttcttcgtctggacgctccgctcgaaccgtttctagcaactccttctgtagcgatgacaccggctgtcccagttcccagagcgtctctccagtgaagaccccctccgacgccggcaacagtcctatcggattttgtccaggcagcgatgaaggcttcacgcggaaaaagtgcaccatcggcatggtaggagaaggttcgattcagtcctctcgttataaaaaggagtccaagtcaggtctagtgaagcccggctccgaagcagatttctccagctcttag

SEQ ID NO: 40053 - DNA, 231 bp, Artificial Sequence
  derived and/or modified sequence
atgggccccctgcgggagagcaagaaggagcaccgggtgcagcaccacgataaggagatatcccgatctaggatcccaaggctaatactgcgacctcatatgccacagcagcagcataaggtgtcccccgcctccgagtcgcctttttccgaggaggagtcacgggaattcaacccctctagttccgggcggtccgcccgaacggttagcagtaacagcttctgttcctag

SEQ ID NO: 40054 - DNA, 1992 bp, Artificial Sequence
  derived and/or modified sequence
atggggcctctgcgtgaatctaagaaagagcacagggtgcagcatcacgacaaggaaatttcgaggtcccggattccacggctcattctccggccacacatgcctcagcagcagcataaggtctcccccgcatctgaatcacccttcagtgaagaggaatccagagaattcaatccatcatcttccggcaggagcgccaggactgtgtcttccaactcattctgcagtgacgacacaggatgtccatctagccagtccgtatcgcccgtgaagacaccatccgacgcaggtaatagcccaataggtttttgccccggttctgatgaaggttttaccagaaaaaagtgcaccatcgggatggtgggcgaaggatccatccaaagttccaggtacaaaaaggaatcaaagtctgggctcgttaagccgggatctgaggctgactttagcagcagttccagcacgggaagcatttcggctcccgaagtgcatatgtcaacagctggcagtaaacggagctcctccagcaggaatcggggaccgcatggcaggtctaacggcgcaagttcccacaaaccaggctcaagcccctcaagcccacgcgagaaagacctcctctctatgctgtgccgcaaccagctgtccccggttaatattcacccaagctacgcaccctcctccccatcttcctcaaactctggaagttacaagggctcagactgctcacctatcatgcggagatcgggtagatacatgtcttgtggcgagaatcacggagtgcgaccccctaacccagagcaatacttgacccccctccagcagaaggaggtgactgtgcgtcatctcaaaaccaagttgaaggagtcagagcgccgtctgcacgagagagagtctgaaatagttgagctgaaatcccaacttgctcgaatgcgggaggactggatcgaggaggagtgccatcgggtggaggcccagctggccctgaaggaggccagaaaggaaattaaacagctgaaacaggtgattgaaaccatgcgatctagcctcgccgacaaggacaagggaatccaaaaatattttgtggacatcaacattcagaacaagaaattggaaagcctacttcagagtatggaaatggctcattctggttccctgagggacgaattgtgcctcgacttcccttgcgacagccccgagaaaagtctgactttaaatcccccattagatactatggctgacggactcagcttggaggagcaggtaacgggagagggagctgatagagagttgcttgtcggcgactctattgcgaacagcacagacctctttgatgagattgtgactgcaacaacaacggaaagcggagacctggagctggtccatagcacccccggagcaaacgttctggaactgctgccgattgtgatgggtcaggaggaaggcagcgtggttgtggaacgagcagtgcagacagatgtagtcccgtactcgccagcaataagtgaacttatccaatcagtactacaaaagttacaggatccgtgccctagtagtcttgcatctcctgacgagtcagagcccgattctatggaaagctttcccgagtcactgtctgctctcgtcgtcgacctgacacctcgcaaccccaatagcgccatcctgttatcaccagtggagactccctacgccaacgtcgatgcggaagtccacgctaatcggctgatgagggagttggacttcgcggcatgtgtggaggaacgcctggacggagtgattccccttgccagaggcggtgtagtgcggcaatattggtccagcagctttctcgtggacctgcttgccgtggccgcacctgtggtgcccaccgtgctgtgggccttctctacgcagcggggaggtacagaccctgtatataacataggagctttgttaagaggatgctgcgtggtggccctccatagtcttcgccgtacagccttccgaatcaaaacctag

SEQ ID NO: 40055 - DNA, 1992 bp, Artificial Sequence
  derived and/or modified sequence
atgggccctttacgagagagtaaaaaggaacaccgcgtacaacaccatgataaggagataagccgcagtaggattcctcgcttaatactccgtccacacatgcctcagcagcagcacaaggtgagtcctgcttccgaaagcccgttcagcgaagaggagtctagagaattcaacccgagttcttctggccgttcagctcgcaccgtctcgtctaactctttctgttctgacgacaccggttgcccgtcctcacagtcagtgagcccggttaagacaccaagcgacgccggtaactcaccaataggattttgcccgggtagcgacgaaggcttcactcgaaaaaagtgtaccattggtatggtcggagagggctcaatccagtcctctagatacaaaaaggaaagcaaatccggactggtcaagcctggtagtgaggcagactttagctcttctagttcaacggggtctatcagtgctccagaagtccacatgagtacagccggaagcaagcgttcatcaagcagccgcaatcggggaccacacgggagatcgaacggcgcaagctctcacaaaccagggtcaagccccagctctccgagggagaaagatctgctgtccatgctctgccgcaatcagctcagtcccgtcaacatccaccctagctatgccccttcgtccccgtcctccagcaatagtggctcctataagggtagtgactgcagcccaattatgagaagatccggcaggtacatgagttgcggcgaaaaccacggtgttagacctcccaaccctgaacaataccttacccccctgcagcaaaaggaagtgactgtgcggcacctcaagacaaaactgaaggagtcggaacgcagactccacgagcgggaatcagaaatcgtagagctgaagagccagctcgcaagaatgcgagaggattggatagaggaagagtgccatagggtggaagctcaattagcactcaaggaggcaagaaaagaaataaagcagctgaagcaggtaatcgagacaatgagatccagccttgccgataaggataagggaatccagaagtacttcgtggacatcaacattcagaacaagaaacttgagtccctcctgcagagcatggaaatggcccattcagggagcctcagggacgagctatgcctggactttccatgcgactcacctgagaaatcactcacgttgaacccacctttagataccatggcagacgggctcagcttggaggaacaagtgaccggtgagggcgctgatcgcgagctgctcgtgggggactccattgccaactccaccgacctctttgacgagatcgtgactgccaccaccactgagtctggcgacctggaattggtgcactcaacccctggagccaacgtgttggagctccttcccatcgttatggggcaagaagaagggagcgtggttgtcgagcgcgcagtgcagactgacgtggtgccatactcacccgcaattagcgaacttatccagagtgttctgcagaaactgcaggatccctgccctagtagtctggcatctcctgacgaatccgaaccggactcaatggagtcctttcctgagagccttagcgctctggtcgtggaccttacaccacgcaaccctaacagcgcaatccttttgtctcccgtcgagacaccatacgcaaacgttgacgcggaagttcacgcgaatcgtctgatgcgagagctggacttcgctgcgtgtgtggaggagagactggatggcgtgatacctctcgccagagggggagtggtgcgtcagtactggagttcaagctttctggtggacctgctggccgtcgcagctccagttgtgccaactgtgctttgggcgtttagcacacaaagaggcggaactgatcccgtgtataacatcggtgctctgctgagagggtgttgtgtggtagctctccattctctgagacggactgccttcaggatcaagacttag

SEQ ID NO: 40056 - DNA, 1992 bp, Artificial Sequence
  derived and/or modified sequence
atgggaccactccgcgagagcaagaaagagcatcgggtgcagcatcacgacaaggagatttcccggagccggattccacgcctgattctccgtccacatatgcctcagcagcagcacaaagtcagccctgcctcagagagccccttttcagaggaagagagtagagaatttaacccttcatcatcagggagatccgcccgaaccgtgagctcaaacagcttttgttctgatgataccggatgcccaagttcccagtcagtgagtccagtaaagacaccctctgacgctggcaactctccaattggcttctgccccggttcagacgaagggtttacacggaagaaatgtacgatcgggatggtcggagaaggtagcattcagagttctcggtataagaaagagtcgaagtccggactggtcaagccaggctcagaagccgacttttcgagttcaagctccaccgggtctatttccgcccctgaggtgcacatgtccaccgctggtagcaaacggagcagcagcagtcgcaatcgtggcccacatggtagatccaatggagcctcctcacataaacctggctctagcccctctagtcccagggagaaggacctgcttagtatgttgtgtaggaatcagctgagtcccgtcaatatccatccctcttatgccccaagctccccctcctcttctaactccggttcgtacaaaggctccgactgctctccgattatgcgacgtagcggtagatatatgtcttgcggggagaaccatggcgttagaccacctaatccggaacagtatcttacgcccttacagcagaaggaggtgacagtgcgacacctgaagacaaaattgaaagaatccgagagacgcttacacgagagagagtcagagatagtggagctgaaaagtcagctggcacgaatgagagaggattggatcgaggaagagtgtcaccgggttgaggcacagctggcactaaaggaggccagaaaggaaatcaagcagcttaagcaggttatcgagacaatgcggagtagtctagctgacaaagataaagggatccagaaatactttgttgacatcaacattcagaacaaaaagctggaatcactccttcagtcgatggaaatggcccactcaggttctcttcgggacgaactctgtctggactttccatgcgatagtccagagaaatcattaaccctgaaccctccacttgacactatggctgatggactcagcctcgaggaacaggtgacaggggaaggggctgaccgggagctgttagtcggcgatagtattgccaacagtacagatcttttcgatgaaatcgtgaccgcaaccacaacagagtcaggcgacctggagctcgtgcactcaactcccggagccaacgtcctagaactgcttcccatagtaatggggcaggaagagggctccgtggttgtggaacgcgcagtccagacagacgtagtcccctacagccccgcaataagcgagctcatccagtctgtgctgcagaaactgcaagatccgtgtccctcctctctagccagccccgatgagagcgagcctgattctatggagtccttccctgagagcctgagcgctctggttgttgatctgacacctcgcaaccctaactcagccatacttctgtcccccgttgaaactccgtatgccaacgtggacgcagaggtacacgctaaccgattaatgagggagctggactttgccgcatgcgtcgaggaaaggctggatggggttatcccgctcgccaggggcggagtggtccggcagtattggtctagctcatttctcgttgatcttcttgcagttgctgccccagttgtccccactgttctatgggctttctcgacacaacgcggtggaacagaccccgtctacaacattggcgctctgctccggggttgctgcgtcgttgcgttgcattcattgcgcagaacagccttccgtataaaaacatag

SEQ ID NO: 40057 - DNA, 1992 bp, Artificial Sequence
  derived and/or modified sequence
atgggaccactccgggagagcaagaaggagcatcgagtacagcaccacgacaaggaaatcagcaggagcagaatcccaagactgattctaagaccccatatgccgcagcagcagcacaaggtgagccctgcaagcgagtcccccttctcagaagaagaaagtagagagttcaacccaagcagcagcggcaggtctgcacgcacagtgagcagcaattccttctgtagtgatgacaccggctgccccagtagccagtcagtcagcccggtcaaaacgccatccgatgccggaaacagcccaatcgggttctgcccgggttctgatgagggcttcacccgaaaaaaatgcactataggcatggtaggtgaagggagtattcagtctagcagatataaaaaagagtcaaaaagcggcttggtaaagcccggttctgaagcagattttagttcttcctcatcaaccggtagtatctctgccccagaggtgcatatgagtacagcaggctcaaagagatcgagttcctcccggaatcggggtcctcatggacggtctaacggtgctagctcccataagccgggatccagcccttcctccccaagagaaaaggacctcttgagcatgctgtgtcggaaccagctctcacccgtcaacatccatcctagctacgccccttcttcgccatcttcctctaattcgggaagttataagggtagcgattgttcacctattatgaggcggtctggacggtacatgtcctgtggcgaaaaccatggcgtccgccctcccaatccggaacagtatttgacccccttgcagcagaaagaggtgacggtcagacacctgaagactaaactaaaagagtctgaaaggcgtcttcatgaaagagagagtgaaatcgtggaactcaagagccagctagcgaggatgagagaggactggattgaagaggaatgtcacagggtcgaagctcaattagcccttaaggaggcacggaaggagatcaaacagcttaagcaggtgattgagacaatgcggagctcactagctgacaaagacaaggggattcagaagtactttgtggatataaatatccagaacaaaaaactggagtctctgctgcagtcaatggaaatggcccattctggcagcttacgcgacgagttgtgcctggactttccctgcgacagccccgagaagtccctcaccctcaatcctcctctggacactatggccgacggactgagcctcgaggagcaggtgaccggcgaaggcgctgaccgcgagctgctcgtcggtgatagtattgccaatagcactgacctatttgatgagatcgtgacagccaccacaaccgaaagtggcgacttggagttggtgcacagcactccgggagccaatgtgctggaactgctgccaatagttatgggacaagaggaggggagtgtcgttgtagagagggcagtgcagacagatgtcgtaccctacagtccagccatctcagaactcatacaaagcgtgctacaaaagctacaagatccctgcccctccagcttggcctcccctgatgagtcggagccagacagcatggagagttttccggaaagcctttctgcgctggtggttgacctcacacccagaaacccaaacagcgccatcctgctgtccccagttgagacaccatatgccaatgtggacgctgaggtacacgccaatcggttaatgagagagctcgactttgccgcatgcgttgaggaacgcctggatggggtcattcctctggcgcgagggggtgtggtgcgccagtattggtcaagcagttttctggtagacctgctggccgtagccgctcctgtagtacctactgtgctgtgggccttcagtacacagaggggtggtacagacccggtatacaacatcggcgcactgctgaggggctgctgtgtggtggctctgcacagccttcggcgaacagctttccgaatcaaaacttag

SEQ ID NO: 40058 - DNA, 1992 bp, Artificial Sequence
  derived and/or modified sequence
atggggccactgagggaaagcaaaaaagaacaccgtgtacaacatcacgataaagaaatctcccgctcccgcatacctagactgattttgcgccctcacatgccacagcaacaacataaggtctcccccgcatcagagtcccccttttcagaggaggagtcccgggagtttaatccgagctcatccggcaggtctgcccgtactgtgtccagtaactcattctgctccgatgataccggctgccctagctctcagtccgtgagccctgtgaaaacaccaagcgatgcgggaaacagtcctattgggttttgccctggttccgacgaggggttcacccggaagaaatgcaccatcggcatggtgggcgaaggatctatacagagctcccgttacaagaaagagagcaagtctggactggtcaaaccagggtccgaggctgattttagttccagcagcagtaccggctctatttccgcccctgaggtccatatgtcaaccgcgggtagcaagagatcatcctcctctcgcaaccgaggcccacacgggcgatctaacggcgcttcctcacataaaccagggagttcacccagctcccctcgagagaaggacctactgtctatgctgtgtcgcaaccagctgagccctgtgaacatccacccatcgtatgcccctagctccccttcgtcttccaactccggatcgtataaggggagtgactgtagccccatcatgcgcagatccgggaggtacatgagctgcggcgaaaaccacggagtgcgtccccctaacccagaacagtacctcacaccgttacaacaaaaagaagtgaccgttcggcacctgaaaactaaactcaaagagtcagagcgcaggttgcatgagcgggagagtgagatagttgagttgaagtctcagttggcgaggatgcgcgaagactggatcgaagaggaatgtcaccgggtcgaagcacagctggccctaaaggaagcgaggaaggagataaagcagctgaagcaggttatagaaactatgcgatcaagtcttgccgacaaggataagggcatccaaaagtatttcgtggacataaatatccaaaataagaagctggaaagcctcctgcagtctatggaaatggcccactccggctctctcagagacgagttatgcctggacttcccttgcgatagtccagagaaatccctgactctaaacccccctctggacaccatggccgatgggctctctttggaagagcaggtcactggcgagggagcggatcgcgagcttctcgtgggtgatagtattgcaaattcgactgatctgttcgatgaaatcgtgactgcaacaaccaccgaatccggagatttggagctagtgcactcgaccccgggtgccaacgttctggagttactgcccattgttatgggacaggaagaaggttccgtagtcgtggagagggcagtgcaaactgacgtggttccctacagtcctgccatttcagagttgatccagagcgtgttacagaagctgcaggatccctgcccttcatctctggctagtcctgacgagagtgaacctgattctatggagtcatttccggagtcgctgagcgcactcgtagtcgatctgaccccacgcaatcccaacagtgccatcctactttctcctgtggaaacgccatatgccaatgtggacgccgaagtgcatgctaatcggcttatgagggaactagactttgccgcatgcgtggaggaaagactggacggcgtgatccctttggccaggggtggcgttgttcgccagtactggagctctagcttcctagtagaccttctagctgttgctgcccctgtggttccaacggttctctgggctttcagcacccagcgaggtggcactgatcctgtgtataatatcggtgctctgttgaggggctgttgtgtagtggccttacatagtctccgcaggaccgcctttagaatcaagacctag

SEQ ID NO: 40059 - DNA, 414 bp, Artificial Sequence
  derived and/or modified sequence
atgggccctctgagggagagcaagaaagaacacagagtccagcaccacgataaagagatttcgaggtccagaatcccccgactgattcttcgtccccacatgccacagcaacagcacaaggtttctccagccagcgaatccccattcagtgaggaagaatctagagaattcaatccctcctcctctggacggtccgcaaggacagtgagcagtaattcattctgttctgacgatactggatgccccagcagccagtccgttagcccagtcaagacgccatccgatgctgggaactcccctatcggtttctgtcctgggtcagacgagggcttcaccaggaagaaatgcacgattggaatggtgggcgaaggtagcatccaaagctcaagatacaagaaagagagtaaaagctag

SEQ ID NO: 40060 - DNA, 231 bp, Artificial Sequence
  derived and/or modified sequence
atgggccctctccgggaaagcaaaaaagagcaccgagtacagcaccacgataaagaaatatccaggtctcgaattcctcggcttatacttcggccacacatgccccagcagcagcacaaggttagccccgctagcgaaagccctttctccgaagaagaatcacgcgaattcaaccccagcagctccggacggtcagcacgcacagtcagttcgaacagtttctgtagctag

SEQ ID NO: 40061 - DNA, 222 bp, Artificial Sequence
  derived and/or modified sequence
atgggcccacttcgggagagtaagaaggaacacagggtacagcatcacgataaggaaatttcccggtcccgcatcccccgactgatcctccgccctcacatgccacaacaacaacacaaagtaagtcctgctagcgagagtccgtttagtgaagaggaatctcgggagttcaatccatcctctagcggaagaagtgccaggactgtttcgtcgaactcttag

SEQ ID NO: 40062 - DNA, 288 bp, Artificial Sequence
  derived and/or modified sequence
atggggcctttacgagagagtaagaaggagcatcgggtgcagcatcacgacaaagagatctcaaggtctaggatcccccgattaatcttacgccctcacatgccacaacagcagcataaagtgtctccagcttccgagtctcccttctccgaggaagagtccagagaattcaatccttccagttcgggtcgtagcgctcgcactgtgagctccaactctttctgcagcgacgataccggctgtccatcctcccagagcgtgtctcctgttaagactcccagcgactag

SEQ ID NO: 40063 - DNA, 108 bp, Artificial Sequence
  derived and/or modified sequence
atggtcggggagggatcgatccagtcaagtcgctataaaaaggagtcgaagtccggactggtcaaacccggttccgaagcagacttctcctccagctcgtctacttag

SEQ ID NO: 40064 - DNA, 105 bp, Artificial Sequence
  derived and/or modified sequence
atggtgggagaaggctccatccaaagcagccggtacaaaaaggagtccaagtcgggcttggttaaaccaggttctgaagccgatttttcatcttcctccagttag

SEQ ID NO: 40065 - DNA, 1992 bp, Artificial Sequence
  derived and/or modified sequence
atgggcccattgcgtgaatccaaaaaagagcaccgtgtgcagcaccacgacaaggagatcagtcggagtcgaatcccaaggcttattctaaggccccatatgcctcagcagcagcacaaggtcagtccagccagcgaatcgccattttccgaagaagagagtcgcgaattcaaccccagctcttctggaagatctgcccgaacagtgtcttctaattctttttgttcggacgataccggctgcccttcttcgcagagcgtgtcccccgtgaagacaccttctgacgctggcaattctcctataggcttctgcccgggatcagatgagggtttcaccaggaaaaagtgcaccattggtatggtaggtgaaggctcgattcaatcttcacgatacaaaaaggaaagcaagtctggccttgtcaagccaggcagtgaggctgacttttcttcatcctcgtctaccgggtctatttcagcgccagaagtccatatgtccaccgccggatccaaaagaagtagctcctcacggaacagaggaccccatggtcgtagtaatggcgcttctagccacaaacccggttcaagtccttcttctccgcgagaaaaggacctgcttagtatgttatgccgcaaccagctttccccagttaatattcacccatcttatgctccatccagtccatcctcttcaaactctggctcatacaaagggagcgattgttcccccatcatgcgtcgaagcggcaggtatatgtcttgcggcgaaaatcacggagtccgaccaccgaaccctgaacagtacttaactccattacagcagaaggaagtaacggtcaggcatcttaagaccaaactgaaagagagcgagagacggcttcatgagagggaatccgagatcgtagagctgaagtcacagctggccaggatgcgagaagactggatcgaagaggagtgccatcgagtggaagcccagctagccctgaaggaggcacggaaagagataaaacagcttaaacaggtaatcgagacaatgaggtcgtctttggctgataaggacaaaggcattcaaaagtacttcgtagatatcaacatccagaacaaaaagctcgagtccttactgcaatccatggaaatggctcattccgggtcgctccgagatgaactctgtctggacttcccatgtgactctcctgagaagagtctgaccctcaacccacctctggacactatggcagacgggttgtccctggaagagcaagtgaccggcgaaggcgcagaccgggagctcctggttggagactctatagctaattctaccgacctgttcgatgaaatagtaactgccaccaccaccgagtccggtgacctcgaattggtgcacagtacacccggagctaatgtgctggaactactgcccatcgtgatgggccaggaggaggggagcgtggtggtggagagagccgtgcagactgacgttgtcccctactctcccgctatatccgaattaattcagtcggtgctccaaaagttgcaggatccatgtccctcctcgctcgcatctccagatgaatcagagcccgactccatggagtcctttcctgagtcgctatccgccttagtggttgatttgacgcctcggaaccctaactccgcgatcctgctctcgcctgtggaaacaccttatgctaatgtcgatgccgaagtacacgctaaccgcctgatgcgggagctggactttgccgcatgcgtggaggaacgcctcgacggcgttattcctctggccagagggggagttgtccgccagtactggtcctcgtcattcctcgtggacctcctcgcagttgccgctccagtcgtgcctaccgtcttatgggccttcagtacccagcggggaggcaccgatcctgtttataatataggcgcactactccggggatgttgtgtcgttgccctgcattcactgaggaggacagcattccgtataaagacatag

SEQ ID NO: 40066 - DNA, 456 bp, Artificial Sequence
  derived and/or modified sequence
atgggacccctgagagagagtaagaaagaacatagagtgcagcatcacgacaaggagatctctcgctcaaggattcctagactcattctgcgaccccatatgccccagcagcaacataaggtgtctccagcaagcgagagtccctttagcgaggaggaatcccgtgagttcaatccatccagttcagggaggtccgccagaactgtttcttcaaactcattctgttctgacgacacgggttgcccctcttcccagagcgtcagccctgtgaagacacctagcgatgccggaaattccccaataggcttctgtcccggtagtgatgaaggattcaccagaaagaaatgtactatcggcatggtaggggagggttccatccaatcaagtaggtataaaaaggaaagcaagtctgggttggtgaagcctgggtcagaggcagatttctctagctcttag

SEQ ID NO: 40067 - DNA, 231 bp, Artificial Sequence
  derived and/or modified sequence
atggggccattgcgcgaatccaagaaagaacatcgcgtgcagcatcatgataaggagatttcccgcagtcggatacctagactgattttaagaccacacatgccacaacagcagcacaaggttagtcccgctagcgaatcaccattttctgaggaggagagccgagaattcaacccctctagctctgggaggagtgctcgaactgtgagttccaatagtttttgtagctag

SEQ ID NO: 40068 - DNA, 2870 bp, Artificial Sequence
  derived and/or modified sequence
aatcggcggcagtggcggcggcggcgcgttggagcctcaccaagagccgccgcccgcagcccgcgccggctcagcgcagtctcctcgctccgtgctcgcaggtgcctcctcctggacggcggcagcggcggcgcgaggagccggcgggcagcggcgcgatggggcccctccgcgagagcaagaaggagcacagagtgcagcatcatgacaaggagatttctcgaagccgaattccccggttgattcttcggccccatatgccccaacaacagcacaaagtgtccccagcctctgagtctcctttctctgaggaagagagcagagagttcaaccccagcagctctgggcgctcagcgaggaccgttagcagcaacagcttctgctcagatgacacaggctgtcctagcagccagtcagtgtctcctgtgaagacaccctcagatgctggaaacagccccattggcttttgccctggaagtgatgaaggcttcaccagaaagaaatgcacgattggaatggttggtgaaggaagcattcagtcctctcgatataagaaggaatcaaagtcaggccttgtgaaaccaggtagtgaagctgattttagctcctcgagcagcacaggcagcatttccgctcctgaggtccatatgtcgactgcgggaagcaagcggtcttcttcttcacgcaatcgaggtcctcatgggcggagtaatggagcttcgtcacacaagcctggcagcagcccatcatccccgcgggaaaaggaccttctgtccatgctgtgcaggaatcagctgagccctgtcaatatccatcccagttatgcaccttcttccccaagcagtagcaactcaggctcctacaaaggaagcgactgtagccccatcatgaggcgttctggaaggtacatgtcttgcggtgaaaatcatggtgtcagacccccaaacccagagcagtatttgactccactgcagcagaaagaggtgacagtgagacacctcaaaaccaagctgaaggaatctgagcgccgactccatgaaagggaaagtgaaatcgtggagcttaagtcccagctggcccgcatgcgagaggactggattgaggaggagtgtcaccgggtagaggcccagttggcactcaaagaagccaggaaagagattaaacagctcaaacaggtcatcgaaaccatgcggagcagcttggctgataaagataaaggcattcagaaatattttgtggacataaacatccaaaacaagaagctggagtctctccttcagagcatggagatggcacacagtggctctctgagggacgaactgtgcctagactttccatgtgattccccagagaagagcttaaccctcaacccccctcttgacacaatggcagatgggttatctctggaagagcaggtcacgggggaaggggctgacagggagctactggtaggagatagcatagccaacagcacagatttgttcgatgagatagtgacagccaccaccacagaatctggtgacctggagcttgtgcattccacccctggggctaacgtcctggagctgctgcccatagtcatgggtcaggaggagggcagtgtggtggtggagcgagccgttcagaccgacgtggtgccctacagcccagccatctcagagctcattcagagtgtgctgcagaagctccaggacccctgtccctcgagcttggcgtcccctgatgagtctgaaccagactcgatggagagcttcccagagtccctctctgccttagtggttgatttaactccaagaaatccaaactcagccatccttttgtctcccgtggagaccccctacgccaatgtggatgcagaagttcatgcaaaccgcctcatgagagagctggattttgcagcctgcgtggaagagaggttggatggtgtcatcccactggctcgcgggggcgtcgtgaggcagtactggagcagcagcttcctggtggatctcctggctgtggctgcccccgtggtccccacggttctgtgggcattcagtactcagagagggggaacggatcctgtgtataacatcggggccttgctcaggggctgttgcgtggttgccctgcattcgctccgccgcaccgccttccgtatcaaaacctaaatagaagttgttgttaccgtgtgccaatgtgtcccatgtgggttgtgccaggtagagaaacaggaagtcaatcatctgtgacagtctctattctgtcgttttgctccttggtatttgatttgcactatatttagttgaagcctgttcactgtttaaaaccggaggtatcttcaaaggcatggagacctggttccagtaaatgtcccaccagtggggtatagaaagcatgctcatgaccctgccgtgtcgtctgaggtacccgttcttatcctagtggttcaggaagagaaaacgcagtttgcactttcaagacagcttctctaaggctggcatgttatctccttgctttgctttttgccgttttaaaatgtgtaattgttccagcattccaatggtcttgtgcatagcaggggactgtaaccaaaaataaacatgtatttgtgtaattggtttgaagaagtcttgaatagctctttactgtcttacttggggttgataagatttgagtgtttgcaattttttactaaatgtagctccaaagtcttaaatggcttgtttgttcttaaactgttaattgatgaaactgtgcataagtttacaatgtactaacttattttgcttattatatatagtgttttattggaaattgtaaccacacacttcagcatgatgaaaataaagattagtgtttccatttaaataaatgttttatcctcccat

SEQ ID NO: 40069 - DNA, 2983 bp, Artificial Sequence
  derived and/or modified sequence
accacacacacaaaaaaatctcacgatgccccagaatgcagtttctttccttcgtgacgtgttgtgaagcacgtcagctgctccttgttgctgtgcagatcacccaacattaggtcaccgagagagacagcagctcttgctcacacagctgataggattaggagatggtgctttgtcagccctgattgagcccaagaaaaccccctgcatacacaggtgcctcctcctggacggcggcagcggcggcgcgaggagccggcgggcagcggcgcgatggggcccctccgcgagagcaagaaggagcacagagtgcagcatcatgacaaggagatttctcgaagccgaattccccggttgattcttcggccccatatgccccaacaacagcacaaagtgtccccagcctctgagtctcctttctctgaggaagagagcagagagttcaaccccagcagctctgggcgctcagcgaggaccgttagcagcaacagcttctgctcagatgacacaggctgtcctagcagccagtcagtgtctcctgtgaagacaccctcagatgctggaaacagccccattggcttttgccctggaagtgatgaaggcttcaccagaaagaaatgcacgattggaatggttggtgaaggaagcattcagtcctctcgatataagaaggaatcaaagtcaggccttgtgaaaccaggtagtgaagctgattttagctcctcgagcagcacaggcagcatttccgctcctgaggtccatatgtcgactgcgggaagcaagcggtcttcttcttcacgcaatcgaggtcctcatgggcggagtaatggagcttcgtcacacaagcctggcagcagcccatcatccccgcgggaaaaggaccttctgtccatgctgtgcaggaatcagctgagccctgtcaatatccatcccagttatgcaccttcttccccaagcagtagcaactcaggctcctacaaaggaagcgactgtagccccatcatgaggcgttctggaaggtacatgtcttgcggtgaaaatcatggtgtcagacccccaaacccagagcagtatttgactccactgcagcagaaagaggtgacagtgagacacctcaaaaccaagctgaaggaatctgagcgccgactccatgaaagggaaagtgaaatcgtggagcttaagtcccagctggcccgcatgcgagaggactggattgaggaggagtgtcaccgggtagaggcccagttggcactcaaagaagccaggaaagagattaaacagctcaaacaggtcatcgaaaccatgcggagcagcttggctgataaagataaaggcattcagaaatattttgtggacataaacatccaaaacaagaagctggagtctctccttcagagcatggagatggcacacagtggctctctgagggacgaactgtgcctagactttccatgtgattccccagagaagagcttaaccctcaacccccctcttgacacaatggcagatgggttatctctggaagagcaggtcacgggggaaggggctgacagggagctactggtaggagatagcatagccaacagcacagatttgttcgatgagatagtgacagccaccaccacagaatctggtgacctggagcttgtgcattccacccctggggctaacgtcctggagctgctgcccatagtcatgggtcaggaggagggcagtgtggtggtggagcgagccgttcagaccgacgtggtgccctacagcccagccatctcagagctcattcagagtgtgctgcagaagctccaggacccctgtccctcgagcttggcgtcccctgatgagtctgaaccagactcgatggagagcttcccagagtccctctctgccttagtggttgatttaactccaagaaatccaaactcagccatccttttgtctcccgtggagaccccctacgccaatgtggatgcagaagttcatgcaaaccgcctcatgagagagctggattttgcagcctgcgtggaagagaggttggatggtgtcatcccactggctcgcgggggcgtcgtgaggcagtactggagcagcagcttcctggtggatctcctggctgtggctgcccccgtggtccccacggttctgtgggcattcagtactcagagagggggaacggatcctgtgtataacatcggggccttgctcaggggctgttgcgtggttgccctgcattcgctccgccgcaccgccttccgtatcaaaacctaaatagaagttgttgttaccgtgtgccaatgtgtcccatgtgggttgtgccaggtagagaaacaggaagtcaatcatctgtgacagtctctattctgtcgttttgctccttggtatttgatttgcactatatttagttgaagcctgttcactgtttaaaaccggaggtatcttcaaaggcatggagacctggttccagtaaatgtcccaccagtggggtatagaaagcatgctcatgaccctgccgtgtcgtctgaggtacccgttcttatcctagtggttcaggaagagaaaacgcagtttgcactttcaagacagcttctctaaggctggcatgttatctccttgctttgctttttgccgttttaaaatgtgtaattgttccagcattccaatggtcttgtgcatagcaggggactgtaaccaaaaataaacatgtatttgtgtaattggtttgaagaagtcttgaatagctctttactgtcttacttggggttgataagatttgagtgtttgcaattttttactaaatgtagctccaaagtcttaaatggcttgtttgttcttaaactgttaattgatgaaactgtgcataagtttacaatgtactaacttattttgcttattatatatagtgttttattggaaattgtaaccacacacttcagcatgatgaaaataaagattagtgtttccatttaaataaatgttttatcctccc

SEQ ID NO: 40070 - DNA, 3226 bp, Artificial Sequence
  derived and/or modified sequence
agcggcttcttcaagaaacagatcctgcagcataatctgccagggccctggcaacaggaaccggtccttcaggcagcgagcccagggagcagaatcctggcgcccccggcgcgcggccctcagcgtgctcacgccgctgcgccccacccagcggtgcctgccctttggtcccccgcccttctctccattttgtcctcagccccagcagccgcccggctggctgcagaggccgaggggccgagggcaccggagcgcaagggattccgcggcaccacgtgtccaagccgggctaaggcgggcggagcgggccgggcccggctccccgggcctgagcgcaaaccagcagcgacgcggggtcccgtccgcaccggcacccggcccagccggggcccggtctcccgggcgcacgtaggtgcctcctcctggacagcgcgatggggcccttctgggcgagaaagggtgcctcctcctggacggcggcagcggcggcgcgaggagccggcgggcagcggcgcgatggggcccctccgcgagagcaagaaggagcacagagtgcagcatcatgacaaggagatttctcgaagccgaattccccggttgattcttcggccccatatgccccaacaacagcacaaagtgtccccagcctctgagtctcctttctctgaggaagagagcagagagttcaaccccagcagctctgggcgctcagcgaggaccgttagcagcaacagcttctgctcagatgacacaggctgtcctagcagccagtcagtgtctcctgtgaagacaccctcagatgctggaaacagccccattggcttttgccctggaagtgatgaaggcttcaccagaaagaaatgcacgattggaatggttggtgaaggaagcattcagtcctctcgatataagaaggaatcaaagtcaggccttgtgaaaccaggtagtgaagctgattttagctcctcgagcagcacaggcagcatttccgctcctgaggtccatatgtcgactgcgggaagcaagcggtcttcttcttcacgcaatcgaggtcctcatgggcggagtaatggagcttcgtcacacaagcctggcagcagcccatcatccccgcgggaaaaggaccttctgtccatgctgtgcaggaatcagctgagccctgtcaatatccatcccagttatgcaccttcttccccaagcagtagcaactcaggctcctacaaaggaagcgactgtagccccatcatgaggcgttctggaaggtacatgtcttgcggtgaaaatcatggtgtcagacccccaaacccagagcagtatttgactccactgcagcagaaagaggtgacagtgagacacctcaaaaccaagctgaaggaatctgagcgccgactccatgaaagggaaagtgaaatcgtggagcttaagtcccagctggcccgcatgcgagaggactggattgaggaggagtgtcaccgggtagaggcccagttggcactcaaagaagccaggaaagagattaaacagctcaaacaggtcatcgaaaccatgcggagcagcttggctgataaagataaaggcattcagaaatattttgtggacataaacatccaaaacaagaagctggagtctctccttcagagcatggagatggcacacagtggctctctgagggacgaactgtgcctagactttccatgtgattccccagagaagagcttaaccctcaacccccctcttgacacaatggcagatgggttatctctggaagagcaggtcacgggggaaggggctgacagggagctactggtaggagatagcatagccaacagcacagatttgttcgatgagatagtgacagccaccaccacagaatctggtgacctggagcttgtgcattccacccctggggctaacgtcctggagctgctgcccatagtcatgggtcaggaggagggcagtgtggtggtggagcgagccgttcagaccgacgtggtgccctacagcccagccatctcagagctcattcagagtgtgctgcagaagctccaggacccctgtccctcgagcttggcgtcccctgatgagtctgaaccagactcgatggagagcttcccagagtccctctctgccttagtggttgatttaactccaagaaatccaaactcagccatccttttgtctcccgtggagaccccctacgccaatgtggatgcagaagttcatgcaaaccgcctcatgagagagctggattttgcagcctgcgtggaagagaggttggatggtgtcatcccactggctcgcgggggcgtcgtgaggcagtactggagcagcagcttcctggtggatctcctggctgtggctgcccccgtggtccccacggttctgtgggcattcagtactcagagagggggaacggatcctgtgtataacatcggggccttgctcaggggctgttgcgtggttgccctgcattcgctccgccgcaccgccttccgtatcaaaacctaaatagaagttgttgttaccgtgtgccaatgtgtcccatgtgggttgtgccaggtagagaaacaggaagtcaatcatctgtgacagtctctattctgtcgttttgctccttggtatttgatttgcactatatttagttgaagcctgttcactgtttaaaaccggaggtatcttcaaaggcatggagacctggttccagtaaatgtcccaccagtggggtatagaaagcatgctcatgaccctgccgtgtcgtctgaggtacccgttcttatcctagtggttcaggaagagaaaacgcagtttgcactttcaagacagcttctctaaggctggcatgttatctccttgctttgctttttgccgttttaaaatgtgtaattgttccagcattccaatggtcttgtgcatagcaggggactgtaaccaaaaataaacatgtatttgtgtaattggtttgaagaagtcttgaatagctctttactgtcttacttggggttgataagatttgagtgtttgcaattttttactaaatgtagctccaaagtcttaaatggcttgtttgttcttaaactgttaattgatgaaactgtgcataagtttacaatgtactaacttattttgcttattatatatagtgttttattggaaattgtaaccacacacttcagcatgatgaaaataaagattagtgtttccatttaaataaatgttttatcctccc

SEQ ID NO: 40071 - DNA, 3104 bp, Artificial Sequence
  derived and/or modified sequence
accacacacacaaaaaaatctcacgatgccccagaatgcagtttctttccttcgtgacgtgttgtgaagcacgtcagctgctccttgttgctgtgcagatcacccaacattaggtcaccgagagagacagcagctcttgctcacacagctgataggattaggagatggtgctttgtcagccctgattgagcccaagaaaaccccctgcatacacaggcatcaacaaatattgactggatcatctggacctgacttagctgccctttggaaagttctgttcaatcagctggatagagctgtttgttttcctcacctaaccctcacagctatcctagaggtgcctcctcctggacggcggcagcggcggcgcgaggagccggcgggcagcggcgcgatggggcccctccgcgagagcaagaaggagcacagagtgcagcatcatgacaaggagatttctcgaagccgaattccccggttgattcttcggccccatatgccccaacaacagcacaaagtgtccccagcctctgagtctcctttctctgaggaagagagcagagagttcaaccccagcagctctgggcgctcagcgaggaccgttagcagcaacagcttctgctcagatgacacaggctgtcctagcagccagtcagtgtctcctgtgaagacaccctcagatgctggaaacagccccattggcttttgccctggaagtgatgaaggcttcaccagaaagaaatgcacgattggaatggttggtgaaggaagcattcagtcctctcgatataagaaggaatcaaagtcaggccttgtgaaaccaggtagtgaagctgattttagctcctcgagcagcacaggcagcatttccgctcctgaggtccatatgtcgactgcgggaagcaagcggtcttcttcttcacgcaatcgaggtcctcatgggcggagtaatggagcttcgtcacacaagcctggcagcagcccatcatccccgcgggaaaaggaccttctgtccatgctgtgcaggaatcagctgagccctgtcaatatccatcccagttatgcaccttcttccccaagcagtagcaactcaggctcctacaaaggaagcgactgtagccccatcatgaggcgttctggaaggtacatgtcttgcggtgaaaatcatggtgtcagacccccaaacccagagcagtatttgactccactgcagcagaaagaggtgacagtgagacacctcaaaaccaagctgaaggaatctgagcgccgactccatgaaagggaaagtgaaatcgtggagcttaagtcccagctggcccgcatgcgagaggactggattgaggaggagtgtcaccgggtagaggcccagttggcactcaaagaagccaggaaagagattaaacagctcaaacaggtcatcgaaaccatgcggagcagcttggctgataaagataaaggcattcagaaatattttgtggacataaacatccaaaacaagaagctggagtctctccttcagagcatggagatggcacacagtggctctctgagggacgaactgtgcctagactttccatgtgattccccagagaagagcttaaccctcaacccccctcttgacacaatggcagatgggttatctctggaagagcaggtcacgggggaaggggctgacagggagctactggtaggagatagcatagccaacagcacagatttgttcgatgagatagtgacagccaccaccacagaatctggtgacctggagcttgtgcattccacccctggggctaacgtcctggagctgctgcccatagtcatgggtcaggaggagggcagtgtggtggtggagcgagccgttcagaccgacgtggtgccctacagcccagccatctcagagctcattcagagtgtgctgcagaagctccaggacccctgtccctcgagcttggcgtcccctgatgagtctgaaccagactcgatggagagcttcccagagtccctctctgccttagtggttgatttaactccaagaaatccaaactcagccatccttttgtctcccgtggagaccccctacgccaatgtggatgcagaagttcatgcaaaccgcctcatgagagagctggattttgcagcctgcgtggaagagaggttggatggtgtcatcccactggctcgcgggggcgtcgtgaggcagtactggagcagcagcttcctggtggatctcctggctgtggctgcccccgtggtccccacggttctgtgggcattcagtactcagagagggggaacggatcctgtgtataacatcggggccttgctcaggggctgttgcgtggttgccctgcattcgctccgccgcaccgccttccgtatcaaaacctaaatagaagttgttgttaccgtgtgccaatgtgtcccatgtgggttgtgccaggtagagaaacaggaagtcaatcatctgtgacagtctctattctgtcgttttgctccttggtatttgatttgcactatatttagttgaagcctgttcactgtttaaaaccggaggtatcttcaaaggcatggagacctggttccagtaaatgtcccaccagtggggtatagaaagcatgctcatgaccctgccgtgtcgtctgaggtacccgttcttatcctagtggttcaggaagagaaaacgcagtttgcactttcaagacagcttctctaaggctggcatgttatctccttgctttgctttttgccgttttaaaatgtgtaattgttccagcattccaatggtcttgtgcatagcaggggactgtaaccaaaaataaacatgtatttgtgtaattggtttgaagaagtcttgaatagctctttactgtcttacttggggttgataagatttgagtgtttgcaattttttactaaatgtagctccaaagtcttaaatggcttgtttgttcttaaactgttaattgatgaaactgtgcataagtttacaatgtactaacttattttgcttattatatatagtgttttattggaaattgtaaccacacacttcagcatgatgaaaataaagattagtgtttccatttaaataaatgttttatcctccc

SEQ ID NO: 40072 - DNA, 3072 bp, Artificial Sequence
  derived and/or modified sequence
actcaggctgaagggaccgattggagtgctggcttgaactcgtttttctgagttcaattccagtgctcttcccttagcagtgtgctggagctacttcctggagccgggcagctgcagggcagcgctggggaaaagactgttctctggctacatagcagcctggcttctccaagccggagggagctgcgctgaccactgaaggcctttctgatgcaaccccttccaagtagaatccatcgcagcctttcagatcccggaacccagaggctgtgtcggtcctgacgcactggcttggctgggctccggtgcctcctcctggacggcggcagcggcggcgcgaggagccggcgggcagcggcgcgatggggcccctccgcgagagcaagaaggagcacagagtgcagcatcatgacaaggagatttctcgaagccgaattccccggttgattcttcggccccatatgccccaacaacagcacaaagtgtccccagcctctgagtctcctttctctgaggaagagagcagagagttcaaccccagcagctctgggcgctcagcgaggaccgttagcagcaacagcttctgctcagatgacacaggctgtcctagcagccagtcagtgtctcctgtgaagacaccctcagatgctggaaacagccccattggcttttgccctggaagtgatgaaggcttcaccagaaagaaatgcacgattggaatggttggtgaaggaagcattcagtcctctcgatataagaaggaatcaaagtcaggccttgtgaaaccaggtagtgaagctgattttagctcctcgagcagcacaggcagcatttccgctcctgaggtccatatgtcgactgcgggaagcaagcggtcttcttcttcacgcaatcgaggtcctcatgggcggagtaatggagcttcgtcacacaagcctggcagcagcccatcatccccgcgggaaaaggaccttctgtccatgctgtgcaggaatcagctgagccctgtcaatatccatcccagttatgcaccttcttccccaagcagtagcaactcaggctcctacaaaggaagcgactgtagccccatcatgaggcgttctggaaggtacatgtcttgcggtgaaaatcatggtgtcagacccccaaacccagagcagtatttgactccactgcagcagaaagaggtgacagtgagacacctcaaaaccaagctgaaggaatctgagcgccgactccatgaaagggaaagtgaaatcgtggagcttaagtcccagctggcccgcatgcgagaggactggattgaggaggagtgtcaccgggtagaggcccagttggcactcaaagaagccaggaaagagattaaacagctcaaacaggtcatcgaaaccatgcggagcagcttggctgataaagataaaggcattcagaaatattttgtggacataaacatccaaaacaagaagctggagtctctccttcagagcatggagatggcacacagtggctctctgagggacgaactgtgcctagactttccatgtgattccccagagaagagcttaaccctcaacccccctcttgacacaatggcagatgggttatctctggaagagcaggtcacgggggaaggggctgacagggagctactggtaggagatagcatagccaacagcacagatttgttcgatgagatagtgacagccaccaccacagaatctggtgacctggagcttgtgcattccacccctggggctaacgtcctggagctgctgcccatagtcatgggtcaggaggagggcagtgtggtggtggagcgagccgttcagaccgacgtggtgccctacagcccagccatctcagagctcattcagagtgtgctgcagaagctccaggacccctgtccctcgagcttggcgtcccctgatgagtctgaaccagactcgatggagagcttcccagagtccctctctgccttagtggttgatttaactccaagaaatccaaactcagccatccttttgtctcccgtggagaccccctacgccaatgtggatgcagaagttcatgcaaaccgcctcatgagagagctggattttgcagcctgcgtggaagagaggttggatggtgtcatcccactggctcgcgggggcgtcgtgaggcagtactggagcagcagcttcctggtggatctcctggctgtggctgcccccgtggtccccacggttctgtgggcattcagtactcagagagggggaacggatcctgtgtataacatcggggccttgctcaggggctgttgcgtggttgccctgcattcgctccgccgcaccgccttccgtatcaaaacctaaatagaagttgttgttaccgtgtgccaatgtgtcccatgtgggttgtgccaggtagagaaacaggaagtcaatcatctgtgacagtctctattctgtcgttttgctccttggtatttgatttgcactatatttagttgaagcctgttcactgtttaaaaccggaggtatcttcaaaggcatggagacctggttccagtaaatgtcccaccagtggggtatagaaagcatgctcatgaccctgccgtgtcgtctgaggtacccgttcttatcctagtggttcaggaagagaaaacgcagtttgcactttcaagacagcttctctaaggctggcatgttatctccttgctttgctttttgccgttttaaaatgtgtaattgttccagcattccaatggtcttgtgcatagcaggggactgtaaccaaaaataaacatgtatttgtgtaattggtttgaagaagtcttgaatagctctttactgtcttacttggggttgataagatttgagtgtttgcaattttttactaaatgtagctccaaagtcttaaatggcttgtttgttcttaaactgttaattgatgaaactgtgcataagtttacaatgtactaacttattttgcttattatatatagtgttttattggaaattgtaaccacacacttcagcatgatgaaaataaagattagtgtttccatttaaataaatgttttatcctccc

SEQ ID NO: 40073 - DNA, 748 bp, Artificial Sequence
  derived and/or modified sequence
ctcttatgggaaaacaggcagctctctccctggtaagaaaaatatgggtctccaccccaccccaccacacacacaaaaaaatctcacgatgccccagaatgcagtttctttccttcgtgacgtgttgtgaagcacgtcagctgctccttgttgctgtgcagatcacccaacattaggtcaccgagagagacagcagctcttgctcacacagctgataggattaggagatggtgctttgtcagccctgattgagcccaagaaaaccccctgcatacacaggtgcctcctcctggacggcggcagcggcggcgcgaggagccggcgggcagcggcgcgatggggcccctccgcgagagcaagaaggagcacagagtgcagcatcatgacaaggagatttctcgaagccgaattccccggttgattcttcggccccatatgccccaacaacagcacaaagtgtccccagcctctgagtctcctttctctgaggaagagagcagagagttcaaccccagcagctctgggcgctcagcgaggaccgttagcagcaacagcttctgctcagatgacacaggctgtcctagcagccagtcagtgtctcctgtgaagacaccctcagatgctggaaacagccccattggcttttgccctggaagtgatgaaggcttcaccagaaagaaatgcacgattggaatggttggtgaaggaagcattcagtcctctcgatataagaaggaatcaaagtcag

SEQ ID NO: 40074 - DNA, 582 bp, Artificial Sequence
  derived and/or modified sequence
tttctttccttcgtgacgtgttgtgaagcacgtcagctgctccttgttgctgtgcagatcacccaacattaggtcaccgagagagacagcagctcttgctcacacagctgataggattaggagatggtgctttgtcagccctgattgagcccaagaaaaccccctgcatacacaggcatcaacaaatattgactggatcatctggacctgacttagctgccctttggaaagttctgttcaatcagctggatagagctgtttgttttcctcacctaaccctcacagctatcctagaggtgcctcctcctggacggcggcagcggcggcgcgaggagccggcgggcagcggcgcgatggggcccctccgcgagagcaagaaggagcacagagtgcagcatcatgacaaggagatttctcgaagccgaattccccggttgattcttcggccccatatgccccaacaacagcacaaagtgtccccagcctctgagtctcctttctctgaggaagagagcagagagttcaaccccagcagctctgggcgctcagcgaggaccgttagcagcaacagcttctgctcag

SEQ ID NO: 40075 - DNA, 559 bp, Artificial Sequence
  derived and/or modified sequence
atttgactcttgagcttatttaaacaagtcaccagtccttgactccagaactgaagctttatatgttctttctatttggctgagccagtaatttttgattgcttcttcttcccaagaggcatcaacaaatattgactggatcatctggacctgacttagctgccctttggaaagttctgttcaatcagctggatagagctgtttgttttcctcacctaaccctcacagctatcctagagcccgcgccggctcagcgcagtctcctcgctccgtgctcgcaggtgcctcctcctggacggcggcagcggcggcgcgaggagccggcgggcagcggcgcgatggggcccctccgcgagagcaagaaggagcacagagtgcagcatcatgacaaggagatttctcgaagccgaattccccggttgattcttcggccccatatgccccaacaacagcacaaagtgtccccagcctctgagtctcctttctctgaggaagagagcagagagttcaaccccagcagctctgggcgctcagcgaggaccgttagcagcaacagctt

SEQ ID NO: 40076 - DNA, 565 bp, Artificial Sequence
  derived and/or modified sequence
tatttaaacaagtcaccagtccttgactccagaactgaagctttatatgttctttctatttggctgagccagtaatttttgattgcttcttcttcccaagaggcatcaacaaatattgactggatcatctggacctgacttagctgccctttggaaagttctgttcaatcagctggatagagctgtttgttttcctcacctaaccctcacagctatcctagaggtgcctcctcctggacggcggcagcggcggcgcgaggagccggcgggcagcggcgcgatggggcccctccgcgagagcaagaaggagcacagagtgcagcatcatgacaaggagatttctcgaagccgaattccccggttgattcttcggccccatatgccccaacaacagcacaaagtgtccccagcctctgagtctcctttctctgaggaagagagcagagagttcaaccccagcagctctgggcgctcagcgaggaccgttagcagcaacagcttctgctcagatgacacaggctgtcctagcagccagtcagtgtctcctgtgaagacaccctcagat

SEQ ID NO: 40077 - DNA, 2498 bp, Artificial Sequence
  derived and/or modified sequence
cccatcaggatatttaagctggaagctttgtcaggctgcgtcagtgttccctgagtaagcaggaatgcaaactgcaattttagcattagcattctacttagaacaaagggaggtgcccggaagcagtacacattagtgcagagttttctggtttccctttaaagagaaggcacagccatttgactcttgagcttatttaaacaagtcaccagtccttgactccagaactgaagctttatatgttctttctatttggctgagccagtaatttttgattgcttcttcttcccaagaggtgcctcctcctggacggcggcagcggcggcgcgaggagccggcgggcagcggcgcgatggggcccctccgcgagagcaagaaggagcacagagtgcagcatcatgacaaggagatttctcgaagccgaattccccggttgattcttcggccccatatgccccaacaacagcacaaagtgtccccagcctctgagtctcctttctctgaggaagagagcagagagttcaaccccagcagctctgggcgctcagcgaggaccgttagcagcaacagcttctgctcagatgacacaggctgtcctagcagccagtcagtgtctcctgtgaagacaccctcagatgctggaaacagccccattggcttttgccctggaagtgatgaaggcttcaccagaaagaaatgcacgattggaatggttggtgaaggaagcattcagtcctctcgatataagaaggaatcaaagtcaggccttgtgaaaccaggtagtgaagctgattttagctcctcgagcagcacaggcagcatttccgctcctgaggtccatatgtcgactgcgggaagcaagcggtcttcttcttcacgcaatcgaggtcctcatgggcggagtaatggagcttcgtcacacaagcctggcagcagcccatcatccccgcgggaaaaggaccttctgtccatgctgtgcaggaatcagctgagccctgtcaatatccatcccagttatgcaccttcttccccaagcagtagcaactcaggctcctacaaaggaagcgactgtagccccatcatgaggcgttctggaaggtacatgtcttgcggtgaaaatcatggtgtcagacccccaaacccagagcagtatttgactccactgcagcagaaagaggtgacagtgagacacctcaaaaccaagctgaaggaatctgagcgccgactccatgaaagggaaagtgaaatcgtggagcttaagtcccagctggcccgcatgcgagaggactggattgaggaggagtgtcaccgggtagaggcccagttggcactcaaagaagccaggaaagagattaaacagctcaaacaggtcatcgaaaccatgcggagcagcttggctgataaagataaaggcattcagaaatattttgtggacataaacatccaaaacaagaagctggagtctctccttcagagcatggagatggcacacagtggctctctgagggacgaactgtgcctagactttccatgtgattccccagagaagagcttaaccctcaacccccctcttgacacaatggcagatgggttatctctggaagagcaggtcacgggggaaggggctgacagggagctactggtaggagatagcatagccaacagcacagatttgttcgatgagatagtgacagccaccaccacagaatctggtgacctggagcttgtgcattccacccctggggctaacgtcctggagctgctgcccatagtcatgggtcaggaggagggcagtgtggtggtggagcgagccgttcagaccgacgtggtgccctacagcccagccatctcagagctcattcagagtgtgctgcagaagctccaggacccctgtccctcgagcttggcgtcccctgatgagtctgaaccagactcgatggagagcttcccagagtccctctctgccttagtggttgatttaactccaagaaatccaaactcagccatccttttgtctcccgtggagaccccctacgccaatgtggatgcagaagttcatgcaaaccgcctcatgagagagctggattttgcagcctgcgtggaagagaggttggatggtgtcatcccactggctcgcgggggcgtcgtgaggcagtactggagcagcagcttcctggtggatctcctggctgtggctgcccccgtggtccccacggttctgtgggcattcagtactcagagagggggaacggatcctgtgtataacatcggggccttgctcaggggctgttgcgtggttgccctgcattcgctccgccgcaccgccttccgtatcaaaacctaaatagaagttgttgttaccgtgtgccaatgtgtcccatgtgggttgtgccaggtagagaaacaggaagtcaatcatctgtgacagtctctattctgtcgttttgctccttggtatttgatttgcactatatttagttgaagcctgttcactgttt

SEQ ID NO: 40078 - DNA, 613 bp, Artificial Sequence
  derived and/or modified sequence
tttctgatgcaaccccttccaagtagaatccatcgcagcctttcagatcccggaacccagaggctgtgtcggtcctgacgcactggcttggctgggctccggtgcctcctcctggacggcggcagcggcggcgcgaggagccggcgggcagcggcgcgatggggcccctccgcgagagcaagaaggagcacagagtgcagcatcatgacaaggagatttctcgaagccgaattccccggttgattcttcggccccatatgccccaacaacagcacaaagtgtccccagcctctgagtctcctttctctgaggaagagagcagagagttcaaccccagcagctctgggcgctcagcgaggaccgttagcagcaacagcttctgctcagatgacacaggctgtcctagcagccagtcagtgtctcctgtgaagacaccctcagatgctggaaacagccccattggcttttgccctggaagtgatgaaggcttcaccagaaagaaatgcacgattggaatggttggtgaaggaagcattcagtcctctcgatataagaaggaatcaaagtcaggccttgtgaaaccaggtagtgaagctgattttagctcctcgag

SEQ ID NO: 40079 - DNA, 559 bp, Artificial Sequence
  derived and/or modified sequence
attttgtcctcagccccagcagccgcccggctggctgcagaggccgaggggccgagggcaccggagcgcaagggattccgcggcaccacgtgtccaagccgggctaaggcgggcggagcgggccgggcccggctccccgggcctgagcgcaaaccagcagcgacgcggggtcccgtccgcaccggcacccggcccagccggggcccggtctcccgggcgcacgtaggtgcctcctcctggacagcgcgatggggcccttctgggcgagaaagggtgcctcctcctggacggcggcagcggcggcgcgaggagccggcgggcagcggcgcgatggggcccctccgcgagagcaagaaggagcacagagtgcagcatcatgacaaggagatttctcgaagccgaattccccggttgattcttcggccccatatgccccaacaacagcacaaagtgtccccagcctctgagtctcctttctctgaggaagagagcagagagttcaaccccagcagctctgggcgctcagcgaggaccgttagcagcaacagcttctgctcag

SEQ ID NO: 40080 - protein, 544 aa, Artificial Sequence
  derived and/or modified sequence
MVGEGSIQSSRYKKESKSGLVKPGSEADFSSSSSTGSISAPEVHMSTAGSKRSSSSRNRGPHGRSNGASSHKPGSSPSSPREKDLLSMLCRNQLSPVNIHPSYAPSSPSSSNSGSYKGSDCSPIMRRSGRYMSCGENHGVRPPNPEQYLTPLQQKEVTVRHLKTKLKESERRLHERESEIVELKSQLARMREDWIEEECHRVEAQLALKEARKEIKQLKQVIETMRSSLADKDKGIQKYFVDINIQNKKLESLLQSMEMAHSGSLRDELCLDFPCDSPEKSLTLNPPLDTMADGLSLEEQVTGEGADRELLVGDSIANSTDLFDEIVTATTTESGDLELVHSTPGANVLELLPIVMGQEEGSVVVERAVQTDVVPYSPAISELIQSVLQKLQDPCPSSLASPDESEPDSMESFPESLSALVVDLTPRNPNSAILLSPVETPYANVDAEVHANRLMRELDFAACVEERLDGVIPLARGGVVRQYWSSSFLVDLLAVAAPVVPTVLWAFSTQRGGTDPVYNIGALLRGCCVVALHSLRRTAFRIKT

SEQ ID NO: 40081 - protein, 125 aa, Artificial Sequence
  derived and/or modified sequence
MVGEGSIQSSRYKKESKSGLVKPGSEADFSSSSSTGSISAPEVHMSTAGSKRSSSSRNRGPHGRSNGASSHKPGSSPSSPREKDLLSMLCRNQLSPVNIHPSYAPSSPSSSNSGSYKGSDCSPIM

SEQ ID NO: 40082 - protein, 80 aa, Artificial Sequence
  derived and/or modified sequence
MVGEGSIQSSRYKKESKSGLVKPGSEADFSSSSSTGSISAPEVHMSTAGSKRSSSSRNRGPHGRSNGASSHKPGSSPSSP

SEQ ID NO: 40083 - protein, 35 aa, Artificial Sequence
  derived and/or modified sequence
MVGEGSIQSSRYKKESKSGLVKPGSEADFSSSSST

SEQ ID NO: 40084 - protein, 34 aa, Artificial Sequence
  derived and/or modified sequence
MVGEGSIQSSRYKKESKSGLVKPGSEADFSSSSS

SEQ ID NO: 40085 - DNA, 1635 bp, Artificial Sequence
  derived and/or modified sequence
atggtgggcgagggcagcatccagagcagcagatacaagaaggagagcaagagcggcctggtgaagcccggcagcgaggccgacttcagcagcagcagcagcaccggcagcatcagcgcccccgaggtgcacatgagcaccgccggcagcaagagaagcagcagcagcagaaacagaggcccccacggcagaagcaacggcgccagcagccacaagcccggcagcagccccagcagccccagagagaaggacctgctgagcatgctgtgcagaaaccagctgagccccgtgaacatccaccccagctacgcccccagcagccccagcagcagcaacagcggcagctacaagggcagcgactgcagccccatcatgagaagaagcggcagatacatgagctgcggcgagaaccacggcgtgagaccccccaaccccgagcagtacctgacccccctgcagcagaaggaggtgaccgtgagacacctgaagaccaagctgaaggagagcgagagaagactgcacgagagagagagcgagatcgtggagctgaagagccagctggccagaatgagagaggactggatcgaggaggagtgccacagagtggaggcccagctggccctgaaggaggccagaaaggagatcaagcagctgaagcaggtgatcgagaccatgagaagcagcctggccgacaaggacaagggcatccagaagtacttcgtggacatcaacatccagaacaagaagctggagagcctgctgcagagcatggagatggcccacagcggcagcctgagagacgagctgtgcctggacttcccctgcgacagccccgagaagagcctgaccctgaacccccccctggacaccatggccgacggcctgagcctggaggagcaggtgaccggcgagggcgccgacagagagctgctggtgggcgacagcatcgccaacagcaccgacctgttcgacgagatcgtgaccgccaccaccaccgagagcggcgacctggagctggtgcacagcacccccggcgccaacgtgctggagctgctgcccatcgtgatgggccaggaggagggcagcgtggtggtggagagagccgtgcagaccgacgtggtgccctacagccccgccatcagcgagctgatccagagcgtgctgcagaagctgcaggacccctgccccagcagcctggccagccccgacgagagcgagcccgacagcatggagagcttccccgagagcctgagcgccctggtggtggacctgacccccagaaaccccaacagcgccatcctgctgagccccgtggagaccccctacgccaacgtggacgccgaggtgcacgccaacagactgatgagagagctggacttcgccgcctgcgtggaggagagactggacggcgtgatccccctggccagaggcggcgtggtgagacagtactggagcagcagcttcctggtggacctgctggccgtggccgcccccgtggtgcccaccgtgctgtgggccttcagcacccagagaggcggcaccgaccccgtgtacaacatcggcgccctgctgagaggctgctgcgtggtggccctgcacagcctgagaagaaccgccttcagaatcaagacctag

SEQ ID NO: 40086 - DNA, 378 bp, Artificial Sequence
  derived and/or modified sequence
atggtgggcgagggcagcatccagagcagcagatacaagaaggagagcaagagcggcctggtgaagcccggcagcgaggccgacttcagcagcagcagcagcaccggcagcatcagcgcccccgaggtgcacatgagcaccgccggcagcaagagaagcagcagcagcagaaacagaggcccccacggcagaagcaacggcgccagcagccacaagcccggcagcagccccagcagccccagagagaaggacctgctgagcatgctgtgcagaaaccagctgagccccgtgaacatccaccccagctacgcccccagcagccccagcagcagcaacagcggcagctacaagggcagcgactgcagccccatcatgtag

SEQ ID NO: 40087 - DNA, 243 bp, Artificial Sequence
  derived and/or modified sequence
atggtgggcgagggcagcatccagagcagcagatacaagaaggagagcaagagcggcctggtgaagcccggcagcgaggccgacttcagcagcagcagcagcaccggcagcatcagcgcccccgaggtgcacatgagcaccgccggcagcaagagaagcagcagcagcagaaacagaggcccccacggcagaagcaacggcgccagcagccacaagcccggcagcagccccagcagcccctag

SEQ ID NO: 40088 - DNA, 1635 bp, Artificial Sequence
  derived and/or modified sequence
atggttggcgaaggttctattcaatctagccggtacaaaaaggaaagcaaaagtggcctcgtgaaaccaggctcggaggccgatttttcatcgtcgtcttccacggggtccatctctgcccctgaagtccatatgtctactgctgggtctaagcgctcatcctcatctcggaatcggggcccacacggaaggtccaacggagcctcttctcacaaacctggctccagcccttccagtcccagagaaaaggacctacttagtatgttatgtaggaaccaactgtctcctgtgaacattcacccttcctacgcaccaagctctccatcctcttccaatagtgggagctataaaggctcagattgcagccccattatgcggcgatctgggcgctacatgtcgtgtggagagaatcatggggtgaggccccccaatcctgagcagtatctcactcccctccaacagaaggaagtaaccgtacggcacctgaagaccaagctcaaagagtcggagcgccgcctgcatgagcgggaatccgagatcgtcgagctgaagagccaactggcgaggatgagagaggattggattgaggaagaatgtcatcgggtggaagcccagctagcactgaaagaggccaggaaggagataaagcaacttaaacaggttatagagacgatgcgatccagcctcgccgacaaagacaagggcatccagaaatactttgtagacatcaatattcagaacaagaagctggaatcactcctgcagtctatggaaatggctcatagcggtagcctgagggacgaactgtgcctggattttccctgcgactctccggagaaatcactcacacttaacccccctctagacacgatggctgacggcctatctcttgaggagcaggtgactggggaaggggccgatagagagctccttgtgggcgactccattgcaaattctaccgaccttttcgatgagatcgtcaccgccactactacagagtcaggagatcttgagctggtacattcgacacccggtgcaaacgtcctggagctgctgccaatcgtaatggggcaggaggaaggatctgtcgttgttgagcgggctgtgcaaacggatgtagtgccttacagtcccgccatatcggagctcattcagagcgtgctgcagaagctgcaggacccctgccccagctcactcgcatcgcctgacgaatccgagccagactcaatggagagtttccccgagtctctgagtgccctggttgttgatctaacaccacggaaccctaactccgcgattctcctgagtcccgtagaaacaccatacgctaacgtcgatgcggaggttcacgctaaccgcctcatgcgagaactagacttcgcagcatgtgtggaggagcggctggatggcgtgattcctttagcacggggcggagtagtgaggcagtactggagttccagcttcctcgttgatctgctggcggtggccgcgccagtggtgccaaccgttttgtgggccttctccacgcagcggggcggtactgatcccgtttacaatatcggggccctgctacgcggatgttgtgtggtggcgctccatagcctgcgccgaaccgcctttcggatcaaaacatag

SEQ ID NO: 40089 - DNA, 378 bp, Artificial Sequence
  derived and/or modified sequence
atggtgggtgaaggatccatccagtcctcccggtacaaaaaggagtcaaagtcaggtctggttaagcctgggagcgaggcagattttagctcctccagttccacgggctcaatctccgcccctgaggtgcatatgagcaccgctggcagcaagcggagctcctcaagcagaaatagagggccccatggccggtccaacggggcctcgtctcacaagccagggtcatcaccctcgagccccagagagaaggacttactcagtatgctatgtagaaaccaactaagtcccgtgaatatacatcccagttatgcccccagctcccccagctcatcgaacagcggatcctataagggctcggattgtagccctatcatgtag

SEQ ID NO: 40090 - DNA, 1635 bp, Artificial Sequence
  derived and/or modified sequence
atggtgggtgagggctcgatacagagctcacgttacaaaaaagaatcaaagagcggccttgtgaaaccgggatccgaagcagacttttcttcaagttctagtacagggtccatctcggctcccgaggtacatatgtctactgctggaagcaagcggagttcctcatctagaaaccgggggccccacggaagaagcaacggagcatcgagccacaaaccaggctcgagccccagcagcccgcgcgagaaagacctcctgtccatgctgtgcaggaatcagttgagcccagtcaatatacacccatcttacgccccctcctccccctcatctagcaattcgggatcctacaaaggaagcgactgctctcccataatgagacggagtggccggtacatgtcctgtggggaaaatcacggcgtcaggcctcccaatcctgagcaataccttactccactccagcagaaggaagtcaccgtacgtcacctcaagactaagctgaaggaatccgagcggaggctgcatgagcgggagagtgagatcgtggaattgaagagtcaactcgcaagaatgagggaagactggatcgaggaggagtgtcacagagtggaagcccagctggctctaaaagaagctaggaaggagatcaagcaattgaaacaagtgatcgagacgatgcgctcttccctcgcagacaaagacaaaggcattcagaagtatttcgtggacatcaatatccaaaataagaagttggaatctctcttacaatcaatggaaatggctcactctggaagcttaagagatgaactttgtttagactttccctgcgatagcccggaaaagagcctcaccctcaatccaccactggatactatggctgatggccttagccttgaggaacaggttacgggtgaaggtgctgatcgagagcttctggttggcgactccattgctaactcgacggacctgttcgatgaaatagtgacagccaccacaaccgaatccggcgacctggagttagtgcactctacccctggcgccaatgtgttggagctactacccatcgtcatgggacaggaagaaggcagcgttgtcgtcgagcgcgccgtacagacggatgtcgtgccatactcgcctgcaatctctgagcttatccaatctgttctgcaaaaactgcaggatccctgccctagctcattagcctcccccgatgaatcggagcctgatagtatggagtctttcccagaatccctgtccgcactagtggtggacctcactcctcgtaatccaaactcagccatcctgctgagccccgtggaaacgccatacgcaaatgtcgatgcagaggtccacgccaatcgtctgatgcgtgagttggacttcgccgcttgcgtggaagagagactggatggtgtcattccgttagctcgggggggcgtagtgaggcaatactggtcatccagctttctggtagatctgctcgcagtcgcagcccccgtggtgcctaccgttctgtgggcattcagtacacaacgtgggggcactgacccagtctacaacatcggcgccctgctccgggggtgttgtgtcgttgcacttcacagcttgagacggactgcctttcgtattaaaacgtag

SEQ ID NO: 40091 - DNA, 243 bp, Artificial Sequence
  derived and/or modified sequence
atggtgggggagggatcaatccaatcatcacgctacaaaaaagagtctaaatctggactggtgaaaccagggtccgaagcagatttctcatcttcatcaagcactgggagcatcagtgccccagaggtccacatgtctaccgccggctcaaagagaagcagttcttctcgcaacagaggcccccacgggcgatctaacggcgccagcagtcataagccgggtagttctccctcgtctccttag

SEQ ID NO: 40092 - DNA, 243 bp, Artificial Sequence
  derived and/or modified sequence
atggtcggtgaaggctcaattcaatcctccaggtataagaaggagagtaaatcaggtctggtcaaacctggttccgaagccgatttcagttccagctcttccacaggctccatttctgccccagaagtgcacatgagcacggcaggctccaaacgttcctcttccagcaggaatcgtgggccacatggacggtccaacggagcaagttcccataagccaggctccagcccaagcagtccatag

SEQ ID NO: 40093 - DNA, 1635 bp, Artificial Sequence
  derived and/or modified sequence
atggtgggcgaaggctccatccagagctcccgctacaaaaaggagagcaaatctgggctggtgaaacccggctccgaagcagacttttcgagttcttctagtactggcagcatatccgcacccgaggtccatatgtcaactgcgggatccaaaaggtcttcctcatcccgcaatcgcggcccccatggaagatccaatggagctagctcgcacaaaccaggtagcagcccatcttcccctcgggaaaaagacctgctctccatgctgtgtcggaaccagctgagccctgtgaacattcatccgtcctatgctccatctagcccctcttcatctaactccggctcttacaaaggcagtgactgttccccaatcatgcgtagaagcggccgttacatgagttgcggcgagaaccatggagtgcgaccacctaacccagagcagtacctgacccccctgcagcaaaaggaagtgaccgtgcgacacctgaagacgaagctgaaagagagtgagcgaaggctccacgaaagagaatctgaaatagtggagttaaaaagccagttagcacgaatgcgggaggactggattgaagaggaatgtcacagagtcgaggcacagttagccttgaaggaggctagaaaggaaatcaagcagctcaagcaagtaatcgagacaatgcggagctccctagcagataaggataagggcatccaaaaatatttcgtggacatcaatatacagaataaaaagctcgaaagtctgctgcagagtatggaaatggcacatagcggcagccttagagacgagctgtgcctggatttcccttgcgatagccccgagaaatcactgaccctgaacccccctctggacactatggcagacggcctgtcactcgaagagcaggtgacaggcgaaggagcagacagggaactcctagtgggtgactctatagccaattcaaccgacctcttcgatgagatcgttacagccaccacaactgagtcgggggatctggaactggtccattccacacctggggctaacgtgcttgagcttctccccattgtcatgggtcaggaagaaggcagtgtagtagtggagagggcagtccaaacagacgtagtgccttacagcccagccatcagtgaattaatacagagcgtgcttcagaagctgcaggacccctgtccttccagccttgcctcacctgacgaatccgagcctgacagcatggagagttttcccgagtctctatcagccctggtggtcgaccttacgccaagaaatcccaacagtgcaattctcctttcccctgtggagacgccctatgcaaatgtcgatgctgaggttcacgctaatcggttaatgcgggagctcgatttcgccgcatgcgttgaggagaggctcgacggggtgatcccactcgcccggggcggggtggtgcgacagtactggagcagtagtttcttggtcgatttgcttgcagtcgctgcccccgtggtgcccactgtcctgtgggctttctcaactcaacgcggtggcacagaccctgtctacaacattggagcactccttaggggttgttgcgtagtagctttgcacagcttgcgtagaaccgcctttaggataaagacttag

SEQ ID NO: 40094 - DNA, 1635 bp, Artificial Sequence
  derived and/or modified sequence
atggtgggggagggcagcatccagagcagccgctacaagaaggagagcaagagcggcctggtgaagccaggcagcgaggccgacttcagcagcagcagcagcacaggcagcatcagcgcccctgaggtgcacatgagcacagctggcagcaagaggagcagcagcagcaggaacagaggcccccacggccgcagcaatggagccagcagccacaagccaggcagcagccccagcagcccccgggagaaggacctgctgtccatgctgtgcaggaaccagctgagccctgtgaacatccaccccagctatgcccccagcagccccagcagcagcaacagcggcagctacaagggcagtgactgcagccccatcatgaggaggagcggccgctacatgagctgtggggagaaccacggcgtgcggccccccaaccctgagcagtacctgacccccctgcagcagaaggaggtgacagtgcgccacctgaagaccaagctgaaggagagcgagcggcggctgcacgagcgggagagcgagatcgtggagctgaagagccagctggccaggatgagggaggactggattgaggaggagtgccaccgggtggaggcccagctggccctgaaggaggccaggaaggagatcaagcagctgaagcaggtgattgagaccatgaggagcagcctggccgacaaggacaagggcatccagaagtactttgtggacatcaacatccagaacaagaagctggagagcctgctgcagagcatggagatggcccacagcggcagcctgagagatgagctgtgcctggacttcccctgtgacagccctgagaagagcctgaccctgaacccccccctggacaccatggctgatggcctgagcctggaggagcaggtgactggagagggcgctgaccgggagctgctggtgggggacagcatcgccaacagcacagacctgtttgatgagatcgtgacagccaccaccacagagagcggggacctggagctggtgcacagcacccctggggccaacgtgctggagctgctgcccatcgtgatgggccaggaggagggctctgtggtggtggagagagctgtgcagacagatgtggtgccctacagccctgccatcagcgagctgatccagagcgtgctgcagaagctgcaggacccctgccccagcagcctggccagcccagatgaaagtgagccagacagcatggagagcttccctgagagcctgagcgccctggtggtggacctgaccccaagaaaccccaacagcgccatcctgctgagccctgtggagaccccctatgccaacgtggatgctgaggtgcacgccaaccggctgatgagggagctggactttgctgcctgtgtggaggagcggctggatggagtcatccccctggcccggggcggcgtggtgcggcagtactggagcagcagcttcctggtggacctgctggccgtggccgcccctgtggtgcccaccgtgctgtgggccttcagcacccagaggggcggcacagatcctgtgtacaacatcggggccctgctgcggggctgctgcgtggtggccctgcacagcctgcggaggacagccttccgcatcaagacctag

SEQ ID NO: 40095 - DNA, 378 bp, Artificial Sequence
  derived and/or modified sequence
atggtgggggagggcagcatccagagcagccgctacaagaaggagagcaagagcggcctggtgaagccaggcagcgaggccgacttcagcagcagcagcagcacaggcagcatcagcgcccctgaggtgcacatgagcacagctggcagcaagaggagcagcagcagcaggaacagaggcccccacggccgcagcaatggagccagcagccacaagccaggcagcagccccagcagcccccgggagaaggacctgctgtccatgctgtgcaggaaccagctgagccctgtgaacatccaccccagctatgcccccagcagccccagcagcagcaacagcggcagctacaagggcagtgactgcagccccatcatgtag

SEQ ID NO: 40096 - DNA, 243 bp, Artificial Sequence
  derived and/or modified sequence
atggtgggggagggcagcatccagagcagccgctacaagaaggagagcaagagcggcctggtgaagccaggcagcgaggccgacttcagcagcagcagcagcacaggcagcatcagcgcccctgaggtgcacatgagcacagctggcagcaagaggagcagcagcagcaggaacagaggcccccacggccgcagcaatggagccagcagccacaagccaggcagcagccccagcagcccctag

SEQ ID NO: 40097 - DNA, 1635 bp, Artificial Sequence
  derived and/or modified sequence
atggtgggcgagggcagcatccagagcagccggtacaagaaggagtcgaaatccggcttagtcaagcccggatccgaagcggacttctcatcctcttcaagcaccggttcaatttctgctccagaagtgcacatgtcgacggccggatctaaaagatcctccagctcacggaatagaggaccccacggccggtccaacggtgcctcatctcacaagcctggcagctcgccgtcatcacccagggagaaggacctgctcagcatgctgtgtcgcaaccagctgtcccccgtgaatattcacccttcctatgctcctagcagccctagtagcagtaattcgggttcatacaaggggagtgactgctcgcccattatgcgaaggtccggaaggtacatgtcttgcggcgaaaaccatggggtgcgcccgcccaaccccgagcagtatctgactcctctgcaacaaaaagaagttaccgttaggcacttgaagacgaaactcaaggagagtgaacggaggcttcatgagagagaatctgagattgtcgaattgaaatcgcagctggctagaatgagagaagattggatcgaagaggagtgtcaccgggtggaggcacagctcgcgcttaaggaggctcggaaagaaatcaagcaactgaagcaggttattgagacgatgcgcagtagcctcgctgacaaggacaaaggcattcaaaaatacttcgtagatattaatatacaaaataaaaagctcgagtctcttctgcaaagcatggagatggcacattcaggatctctccgcgatgaattatgtttggattttccttgcgattctcccgaaaagagtctgacactaaacccaccattagatactatggcagatggactgtccctggaagaacaagttacaggggagggcgcagatagagagctgctggttggagacagcattgccaactctactgacttgttcgacgaaatcgtaactgctactaccaccgagtcaggggacttggagctggttcattcgactcccggtgcaaatgtgttggagctcttacctatcgtcatgggccaggaggagggctcagttgtggtcgaacgcgcagttcagactgacgtggtgccctactctcccgcaatcagtgagcttattcagtccgtcttacagaagctgcaagatccctgcccgtcttcactggctagccctgatgagtcagagcccgattcaatggaaagcttccccgagtctctgagcgctctggtggtggatctcacgcctaggaaccccaacagcgcaatcctgctcagtcccgttgaaacgccgtacgctaatgtggatgctgaggtacacgccaatcggctgatgcgagagttggactttgccgcatgtgtagaagagagactggacggcgtgatcccgctggcccgaggcggggtagtacggcaatactggtcttctagcttcctcgtggacctactggccgttgccgctcccgtagtaccaacagtgttgtgggcgttcagcacccaaagaggtggcactgacccagtgtacaatattggggccctgttgagagggtgctgcgtagtagcccttcactcacttaggcgcactgccttcagaataaaaacctag

SEQ ID NO: 40098 - DNA, 378 bp, Artificial Sequence
  derived and/or modified sequence
atggtgggcgagggcagcatccagagcagccggtacaagaaggagtctaagtctggcctggttaagcctgggagcgaggcagacttctcaagcagctcctctaccggcagtatctctgcacccgaggtacatatgtccactgccggctcgaaacgctcttcctcaagcaggaataggggaccacacggccgcagcaacggcgctagttctcacaaacctggctcctccccatcatcccctcgcgagaaggacctgctatcaatgctgtgccggaaccaactcagcccagtaaacatacatccgagttacgcccccagctcgccttcttcctcgaactctgggtcctacaaagggagcgattgttcccccatcatgtag

SEQ ID NO: 40099 - DNA, 1635 bp, Artificial Sequence
  derived and/or modified sequence
atggtgggcgagggcagcatccagagcagccggtacaagaaggagagcaaatcaggcttagtcaaacccgggtcagaagcggatttctccagttcttccagcacgggctccattagcgcccctgaagttcacatgagcaccgccggcagtaaacgaagctcttcgagtaggaacaggggcccacatgggcgctccaacggcgcatcctctcacaagcctgggtcttctccaagcagtcctcgagaaaaggacctactgtctatgctgtgtcgcaaccaattgtccccagtgaacatacatccaagctatgccccatcatcacctagtagctctaacagcgggtcctataagggaagcgactgcagccccatcatgagacgcagcggaaggtacatgagttgcggcgaaaatcacggagtaagacctccgaatcccgaacagtatttaacgccccttcaacagaaggaggtgactgtgagacatttaaagaccaagctaaaggagtccgagcgtagattgcatgaaagagagagcgagatcgtcgaactgaagtctcaactggcacgaatgagagaggattggattgaagaagagtgccacagggtggaggcccaactcgccctgaaagaggcccgcaaagagattaagcagctgaaacaagtcatagagactatgcggagctcactggccgacaaagacaaagggatccagaagtacttcgtggacattaatatacagaataagaagctcgagtccttactgcagagtatggaaatggctcatagcggcagtttgagagatgaactgtgcctggacttcccctgcgatagccccgagaagtctctgaccctgaacccccccttggataccatggccgacggcctgtccctagaggaacaagtgacaggggagggagctgatagggaattgcttgttggggattcaatcgcaaactcaaccgacctgtttgacgaaatcgtcaccgccaccaccactgagagtggagacttggaattggtacatagcacccccggcgctaacgtcctcgaactcctgccaattgtgatgggacaggaagagggatcagttgtcgttgagagagcggtacagaccgacgtcgtcccttattcacccgcaatctctgagctgatccagagcgtgttgcagaaactacaggatccctgtcccagtagtctcgcctcgcccgacgaaagtgaacccgatagtatggaatccttcccagaatccttaagcgccctggttgtggacttgaccccaagaaaccctaattctgcgatccttctgtccccggttgaaacaccttacgccaatgtagacgctgaggtccacgcaaataggcttatgcgggagttggatttcgctgcctgtgtagaagagcgtctggatggggtcattcccctcgcccgaggcggagtggtgcgtcagtactggtcgtcaagctttctggtagacctgctggcggtggctgcaccagttgtacctaccgtactgtgggcatttagcacacaaagaggcggcacagatcccgtgtacaatataggtgctctgctgcgcggatgttgtgtggttgccctgcacagtctgagaaggactgccttcagaattaagacatag

SEQ ID NO: 40100 - DNA, 243 bp, Artificial Sequence
  derived and/or modified sequence
atggtgggcgagggcagcatccagagcagccggtacaagaaggagtccaaaagcggattggtaaagcctggaagcgaggctgacttcagtagcagcagctctaccggaagcatctccgctccagaagtacatatgagtacagcgggttctaagcgctcgagtagctccaggaacaggggtcctcacggacggagcaacggggcatcctctcacaaaccgggtagttcgccgtcgtccccttag

SEQ ID NO: 40101 - DNA, 243 bp, Artificial Sequence
  derived and/or modified sequence
atggtgggcgagggcagcatccagagcagccggtacaagaaggagtccaagagtgggctggtcaagcctggttccgaggccgacttttcatctagcagctctacaggatccatttcagcccctgaggttcacatgagtaccgcgggctccaagagaagttcatcaagtcgcaatagagggccccatggcagaagcaatggcgcttcttcacacaagccaggatctagcccgagcagtccatag

SEQ ID NO: 40102 - DNA, 1635 bp, Artificial Sequence
  derived and/or modified sequence
atggtgggcgagggcagcatccagagcagccggtacaagaaggagtccaagagtgggttagtaaagccagggtccgaagctgacttctcaagctccagcagtacagggagtatctctgcccccgaggtgcacatgtccactgcaggctctaagcggtcctctagttctcgcaaccgaggcccacacggtcggtccaacggcgcatcatcacataagccaggcagcagtccgtctagccccagggagaaggatctcctcagcatgttatgtaggaatcagctgagcccagtgaatattcatccgtcctacgcaccatcaagccctagctcaagcaattcaggcagctataaaggatctgactgctcgcccatcatgagacgctctggccggtacatgtcctgtggtgaaaaccatggcgttcggccccctaaccctgagcagtacctgacccctctccaacagaaagaggtgaccgttcgtcacctgaagaccaagctgaaggagtctgaacgaagattacatgagagggaaagtgaaatcgttgagctaaagtcccaactcgcaaggatgcgcgaagactggattgaagaagaatgtcaccgagtggaggctcagctggctctgaaggaggcgcgaaaagagatcaaacagctgaaacaagtcatagaaaccatgcgtagctctctggctgataaggataagggtatccagaaatattttgtggacattaacatccagaacaagaaattagagtctttgctgcagagcatggaaatggctcactctggcagccttcgggacgagctgtgcttagacttcccatgcgactctccggaaaagtcgttgacgctgaatcctccactagatacaatggccgatgggcttagtttggaggagcaggtcaccggggaaggagctgaccgcgagttgctcgtgggagactcaattgcaaatagcactgatttgttcgacgagatcgtgactgctactacgacagaaagcggagatctagaactcgtgcattccactccaggagcaaacgtgctcgagctgctgcccatagtgatgggccaggaggaaggcagcgttgtggtggagagagcagtccagaccgatgttgtgccgtactctcctgcaatatccgaactcattcagtctgtgcttcagaagctgcaagatccctgtcctagcagtctcgccagtcccgacgagtctgagccagactcgatggaatccttccccgagagtctgtctgccctggtagtggacctgacgccgagaaaccctaactcagcgatactcctgtctccagtcgagaccccttacgccaatgtggacgccgaggtacatgccaaccgcctgatgcgagagttggattttgccgcttgtgttgaagaaaggctggatggtgtgatcccacttgcccgaggcggagtggtccggcagtactggagttctagttttctcgtcgacctactggccgttgcagcgcccgtagtccctacggtgctgtgggccttttccacacaacgcggcggaactgacccagtttataacataggtgcccttttacggggatgctgcgtggtcgcgcttcactccctgcgccgaactgccttccgcattaaaacttag

SEQ ID NO: 40103 - DNA, 1635 bp, Artificial Sequence
  derived and/or modified sequence
atggtaggcgagggaagcatacagtcgtcccggtacaaaaaggaatcaaagtcagggctggtcaaacccggaagcgaagctgacttctcaagctcatctagtaccggctccatcagcgcacctgaggtgcacatgtctactgccggatctaaacggtcctcctcttcacgcaatcgcggacctcacggtcgctccaatggcgcttctagtcacaagcctggtagctcaccatcctcccccagagagaaagacctgcttagcatgctgtgcagaaaccagctgtctccagtgaacatccatccctcctacgccccttcatcaccgagctcttccaactctggatcatacaaggggtccgactgttcccctataatgcggagaagcggcagatacatgagctgtggggaaaaccatggcgttaggcctccaaaccctgaacaatatctaaccccactgcagcagaaagaggtcacagttcgccacctaaagactaagcttaaggagagtgagagaaggcttcacgagagagagtccgagatcgtggaactgaagtctcaattggcacgcatgcgcgaggattggattgaggaggaatgtcacagagtggaagctcagctggcactgaaggaagctcgcaaagagatcaagcaattgaagcaagtcatcgagacaatgagatcctctctggccgacaaagataagggcattcagaagtactttgtggatattaacatacagaacaaaaagctggaatccttactacaatctatggaaatggcacattctgggtctctgagggatgagctttgtctagacttcccttgtgatagccctgagaagtccctgacgctgaacccccctttagacactatggcagacggtctcagtctcgaagagcaagttacaggcgaaggcgcagacagagagcttctcgtcggagattccatcgccaacagtaccgatctctttgatgagatagtaacagcaacaactactgaaagtggggacctcgagctggtgcattcaacaccaggggcaaatgtgcttgagctgttaccaatcgtaatgggacaggaggaggggtctgtggtcgtcgagagagctgtgcagactgacgtcgtaccatactctccggcaatctcagaactcatccagagtgtgctgcagaaactgcaggatccctgccctagcagcctcgcctcaccagacgaatctgagccagacagcatggagtcattcccggagagcctgagcgccctggtcgtggacctgacgcccagaaaccctaattccgccatcttgttgtcgccagttgagaccccttatgctaacgtggacgctgaggtgcatgctaacagactgatgcgagagctcgattttgccgcatgcgtggaagagagactggacggggtgatccctctggctaggggtggtgtcgtccgtcaatactggtcctcatctttcctggtggacctcctcgccgtggcagcccctgtggtgccgactgtcctgtgggcattctctacacaacggggtggtaccgaccccgtgtataacatcggcgcactgctcaggggttgttgcgtagtcgccctccacagccttcgacgcacggcctttcgcataaaaacctag

SEQ ID NO: 40104 - DNA, 378 bp, Artificial Sequence
  derived and/or modified sequence
atggtcggagaaggttcaatacaaagttctcgctacaagaaggaatctaaatcaggattggtgaaaccaggctctgaggctgatttctcatcatccagctccaccggctccattagtgccccagaggtgcatatgtcgacagccggtagcaagaggagctctagctctagaaataggggacctcacggtcgatccaatggagccagttcccacaagccgggatcctcaccttctagccccagggaaaaggacctgctcagcatgctgtgtagaaatcagttgagccctgtgaatatccatccatcatatgcaccttcctctccatcatcctccaattcaggctcctataagggatctgactgttcaccaattatgtag

SEQ ID NO: 40105 - DNA, 1635 bp, Artificial Sequence
  derived and/or modified sequence
atggttggagagggctccattcagagtagcagatacaagaaggaaagcaagtccggcctagtgaagcccggtagcgaagccgatttctcctcgtcctccagtactggatcgattagcgctcctgaggtgcatatgtccactgccggatcaaagcggtcatcttcttctagaaaccgaggacctcacggaagatcaaacggagctagctctcacaagccaggctcttcccccagctcaccaagggaaaaagatttattatcaatgctatgccggaatcagctcagtcctgtgaacatccatccgagctatgcaccttcatccccttctagttccaactcaggcagctacaagggatctgattgttccccaattatgagaagaagtggtcgctatatgtcctgtggtgaaaaccacggggttcgccctcccaaccccgagcaatacctcactccactgcagcagaaggaggtgaccgtgagacatctgaagacgaagttaaaagaaagtgaacgtcggctgcatgaacgggagtcagaaattgtcgaactcaagtcccagctggcaagaatgagagaagattggattgaggaggagtgccatagagtggaggcacagctggctctgaaggaggctcgcaaggagatcaaacagctaaagcaggtcatcgagaccatgcgcagttcgcttgctgataaggacaaaggaattcagaaatatttcgttgacattaacattcagaataaaaagctagagagcctattgcaaagcatggagatggcacattctgggtctctgagggacgagctctgcctggattttccctgcgattccccagagaaaagcttgaccctgaatccaccattggataccatggccgacgggctctccttagaagaacaagttaccggggagggtgcagatagggagctgttagtgggggactctatagccaattcgaccgacctgtttgatgagatcgtcaccgcaaccaccacagaaagcggagatttggagttagtgcacagtactccgggagccaatgtgctggaactactgccaattgttatggggcaagaggaggggtccgttgtcgtggaacgggcagtccagaccgatgtggtgccatatagtccagccatttctgaattaatccagtcagtcctacaaaagcttcaggatccgtgtccgagtagtctggcgagtcccgacgaatcagagcccgatagcatggaatcgttccccgagagtctctcagccctggttgtggatttgactcctcgcaatcctaactctgcaatactgttgtcacccgtcgaaaccccgtatgctaatgtcgatgcagaagtacacgcaaatcgtctgatgcgggagctggactttgccgcttgcgtcgaggagaggctggatggcgttatccccctggcaagaggcggagttgttcgccagtactggtcgtcgtctttccttgtcgaccttttagctgtggctgcgcctgtggtaccaaccgtgctgtgggccttttctacacagcgcggaggaaccgatcccgtctacaatatcggcgctctgctgcggggttgctgcgtggtagccctgcattcgctccggagaaccgcctttaggatcaagacctag

SEQ ID NO: 40106 - DNA, 243 bp, Artificial Sequence
  derived and/or modified sequence
atggtgggcgagggaagcatccagtcaagccggtacaaaaaagagtccaaaagcggactcgtcaaaccgggtagtgaagcagacttcagcagcagctcgtcgactgggagcatctccgcaccggaggtgcacatgtctaccgcagggtccaaaaggtcttcatcctcccggaatagaggaccacatggcagaagcaatggcgcttcatcccacaagcctgggagttcaccttcatctccttag

SEQ ID NO: 40107 - DNA, 243 bp, Artificial Sequence
  derived and/or modified sequence
atggtcggggaaggttccattcagtcatccaggtataagaaagagagtaagtctggcctcgtaaagcccggtagtgaagccgacttcagttctagttcttcgacaggctctatcagcgccccagaggtccatatgtccacagccggaagcaaaaggtctagctcatcaagaaatagagggccacatggacgatcaaatggcgcttccagtcataagccaggatccagcccatcttctccttag

SEQ ID NO: 40108 - DNA, 1635 bp, Artificial Sequence
  derived and/or modified sequence
atggtgggtgaaggctctattcagagctctaggtacaagaaagaatccaaaagcggattggttaaacccggaagtgaggctgattttagttcctcttccagcacggggtcgatcagtgccccagaggtgcatatgtcgactgctgggagcaagcggagtagttccagcaggaatcgtggcccacacggccgttccaacggggcatcatcccacaagccaggatcatctccatcttcacccagggagaaagatctgctatcaatgctgtgcagaaaccagctgtcacctgttaatattcacccatcttacgcaccctcttcacccagcagcagcaattccggcagctacaaggggagcgattgctcacctatcatgcgcagatcaggcagatatatgtcctgcggagagaaccacggtgttagacctcccaacccggaacagtacttaacccctttgcagcaaaaagaggtcaccgttaggcatctgaaaacaaaactgaaagagtccgagaggaggctccacgagagggaatctgagatcgtggaactgaagtcccagctggcacgcatgcgcgaggactggatcgaggaggagtgtcatagagtcgaggctcagctcgcactcaaagaagcaagaaaagagattaagcagttgaagcaagtaatagagacgatgcgcagttcactagctgacaaagacaaggggatccagaagtacttcgtcgacataaacattcagaataaaaagctggagtccctgctccagtctatggaaatggcccactcaggcagtctgagagacgagctatgccttgattttccttgtgatagtccggagaagagcctgacgttgaacccgccactcgacacaatggccgatggactctccttggaagagcaggtgacgggcgagggtgctgatcgcgaattacttgtcggtgacagcatagcaaatagtacagatctttttgatgagatcgttacagcaacgaccaccgaaagcggcgatctggagctggtccactctacccccggagctaacgtcctggagctcctgccaattgtgatgggccaggaggaaggctccgtagtagtcgagcgggctgttcagactgacgtagtgccatattctcctgcaatttcggaactgatccagtctgttctccagaagcttcaagacccctgcccatcaagcctcgccagccccgacgagagtgagcctgatagtatggagagcttccccgagtctctatcagctcttgtggtggacctgaccccacgtaatccaaattcagccattcttttgagtcccgtcgagactccatatgccaacgtcgacgctgaagttcatgcaaaccggcttatgcgggagctagattttgccgcttgcgtggaggaacggctggatggggtgatcccattggcacgtggcggtgtcgtaaggcagtattggagcagctctttccttgtggacctcctggctgtcgccgctcccgtcgtccccaccgtcttgtgggccttcagcacgcagaggggaggtactgacccggtatataatatcggcgctctgttaagaggatgctgtgtcgtcgcgctccactccctccgacgaacagccttccggataaaaacatag

SEQ ID NO: 40109 - protein, 660 aa, Artificial Sequence
  derived and/or modified sequence
MSNFEKEHRVQHHDKEISRSRIPRLILRPHMPQQQHKVSPASESPFSEEESREFNPSSSGRSARTVSSNSFCSDDTGCPSSQSVSPVKTPSDAGNSPIGFCPGSDEGFTRKKCTIGMVGEGSIQSSRYKKESKSGLVKPGSEADFSSSSSTGSISAPEVHMSTAGSKRSSSSRNRGPHGRSNGASSHKPGSSPSSPREKDLLSMLCRNQLSPVNIHPSYAPSSPSSSNSGSYKGSDCSPIMRRSGRYMSCGENHGVRPPNPEQYLTPLQQKEVTVRHLKTKLKESERRLHERESEIVELKSQLARMREDWIEEECHRVEAQLALKEARKEIKQLKQVIETMRSSLADKDKGIQKYFVDINIQNKKLESLLQSMEMAHSGSLRDELCLDFPCDSPEKSLTLNPPLDTMADGLSLEEQVTGEGADRELLVGDSIANSTDLFDEIVTATTTESGDLELVHSTPGANVLELLPIVMGQEEGSVVVERAVQTDVVPYSPAISELIQSVLQKLQDPCPSSLASPDESEPDSMESFPESLSALVVDLTPRNPNSAILLSPVETPYANVDAEVHANRLMRELDFAACVEERLDGVIPLARGGVVRQYWSSSFLVDLLAVAAPVVPTVLWAFSTQRGGTDPVYNIGALLRGCCVVALHSLRRTAFRIKT

SEQ ID NO: 40110 - protein, 595 aa, Artificial Sequence
  derived and/or modified sequence
MGPFWARKDDTGCPSSQSVSPVKTPSDAGNSPIGFCPGSDEGFTRKKCTIGMVGEGSIQSSRYKKESKSGLVKPGSEADFSSSSSTGSISAPEVHMSTAGSKRSSSSRNRGPHGRSNGASSHKPGSSPSSPREKDLLSMLCRNQLSPVNIHPSYAPSSPSSSNSGSYKGSDCSPIMRRSGRYMSCGENHGVRPPNPEQYLTPLQQKEVTVRHLKTKLKESERRLHERESEIVELKSQLARMREDWIEEECHRVEAQLALKEARKEIKQLKQVIETMRSSLADKDKGIQKYFVDINIQNKKLESLLQSMEMAHSGSLRDELCLDFPCDSPEKSLTLNPPLDTMADGLSLEEQVTGEGADRELLVGDSIANSTDLFDEIVTATTTESGDLELVHSTPGANVLELLPIVMGQEEGSVVVERAVQTDVVPYSPAISELIQSVLQKLQDPCPSSLASPDESEPDSMESFPESLSALVVDLTPRNPNSAILLSPVETPYANVDAEVHANRLMRELDFAACVEERLDGVIPLARGGVVRQYWSSSFLVDLLAVAAPVVPTVLWAFSTQRGGTDPVYNIGALLRGCCVVALHSLRRTAFRIKT

SEQ ID NO: 40111 - DNA, 1983 bp, Artificial Sequence
  derived and/or modified sequence
atgagcaacttcgagaaggagcacagagtgcagcaccacgacaaggagatcagcagaagcagaatccccagactgatcctgagaccccacatgccccagcagcagcacaaggtgagccccgccagcgagagccccttcagcgaggaggagagcagagagttcaaccccagcagcagcggcagaagcgccagaaccgtgagcagcaacagcttctgcagcgacgacaccggctgccccagcagccagagcgtgagccccgtgaagacccccagcgacgccggcaacagccccatcggcttctgccccggcagcgacgagggcttcaccagaaagaagtgcaccatcggcatggtgggcgagggcagcatccagagcagcagatacaagaaggagagcaagagcggcctggtgaagcccggcagcgaggccgacttcagcagcagcagcagcaccggcagcatcagcgcccccgaggtgcacatgagcaccgccggcagcaagagaagcagcagcagcagaaacagaggcccccacggcagaagcaacggcgccagcagccacaagcccggcagcagccccagcagccccagagagaaggacctgctgagcatgctgtgcagaaaccagctgagccccgtgaacatccaccccagctacgcccccagcagccccagcagcagcaacagcggcagctacaagggcagcgactgcagccccatcatgagaagaagcggcagatacatgagctgcggcgagaaccacggcgtgagaccccccaaccccgagcagtacctgacccccctgcagcagaaggaggtgaccgtgagacacctgaagaccaagctgaaggagagcgagagaagactgcacgagagagagagcgagatcgtggagctgaagagccagctggccagaatgagagaggactggatcgaggaggagtgccacagagtggaggcccagctggccctgaaggaggccagaaaggagatcaagcagctgaagcaggtgatcgagaccatgagaagcagcctggccgacaaggacaagggcatccagaagtacttcgtggacatcaacatccagaacaagaagctggagagcctgctgcagagcatggagatggcccacagcggcagcctgagagacgagctgtgcctggacttcccctgcgacagccccgagaagagcctgaccctgaacccccccctggacaccatggccgacggcctgagcctggaggagcaggtgaccggcgagggcgccgacagagagctgctggtgggcgacagcatcgccaacagcaccgacctgttcgacgagatcgtgaccgccaccaccaccgagagcggcgacctggagctggtgcacagcacccccggcgccaacgtgctggagctgctgcccatcgtgatgggccaggaggagggcagcgtggtggtggagagagccgtgcagaccgacgtggtgccctacagccccgccatcagcgagctgatccagagcgtgctgcagaagctgcaggacccctgccccagcagcctggccagccccgacgagagcgagcccgacagcatggagagcttccccgagagcctgagcgccctggtggtggacctgacccccagaaaccccaacagcgccatcctgctgagccccgtggagaccccctacgccaacgtggacgccgaggtgcacgccaacagactgatgagagagctggacttcgccgcctgcgtggaggagagactggacggcgtgatccccctggccagaggcggcgtggtgagacagtactggagcagcagcttcctggtggacctgctggccgtggccgcccccgtggtgcccaccgtgctgtgggccttcagcacccagagaggcggcaccgaccccgtgtacaacatcggcgccctgctgagaggctgctgcgtggtggccctgcacagcctgagaagaaccgccttcagaatcaagacctag

SEQ ID NO: 40112 - DNA, 1983 bp, Artificial Sequence
  derived and/or modified sequence
atgtccaatttcgagaaagagcaccgcgtgcagcaccacgacaaagaaattagtcgctctcggattcctcggctgattctgcggccacatatgccacagcagcagcacaaagtgtcaccagcaagcgagtcacccttcagtgaagaggaatcaagggaattcaacccttcttcaagtgggcgcagtgcacggacagtcagcagcaactctttttgttctgatgacactgggtgcccttcttctcagtcggtgtctccggtgaagaccccctcggacgctggtaattcccccatcggcttttgtcctgggtcagatgagggcttcacaagaaaaaaatgtaccatcgggatggtgggtgaagggagcatacaatcaagtcgctataagaaagagtcaaaatcgggcttggtgaagccaggatctgaagctgacttctcctcctcaagtagtactggctcgataagcgcccctgaagtgcatatgtccactgcagggagcaagaggtcttcgtcttcacgtaaccgaggcccacacggccggtcaaatggcgcctcatcccacaagccgggcagtagcccttctagtcccagagagaaggacttgctgtcaatgctgtgcaggaaccaactgagccccgtcaatatccatccttcttatgcaccatcctctcccagcagcagcaactcaggctcttacaagggtagcgactgctcccccattatgcgacggagtggacgctacatgtcatgcggggaaaatcacggagttcgcccccccaacccggagcaatacctgactccactccaacagaaggaggtgacagtcagacacctcaagactaagctgaaggaaagcgagcgccgcctacatgaacgcgagagtgagatcgtggaactaaagagccagctcgctcgcatgagggaggattggatcgaagaggaatgtcatagggtagaagcccagctggcccttaaagaagccagaaaggagattaagcagctgaaacaggtgattgagacaatgaggtcttctctcgctgacaaggacaaaggaatccagaagtattttgtggacatcaatatccaaaataagaagctcgagtccctgctccagtccatggaaatggcccattccgggtccttgcgcgatgaattgtgcttggactttccttgtgactcacctgaaaaatctcttaccctgaatccccctctcgatacaatggccgacggcctgtccctggaggagcaggtaacaggggagggagctgaccgggagctgctagtaggagacagcattgccaacagtaccgatttgtttgatgagatcgtgacggccaccactactgaatctggagacctggaactcgtacattccacccccggcgcgaacgttctggagcttctgccaatcgtgatggggcaggaagagggttctgtggtagtggaacgggctgttcagactgatgttgttccgtactcccccgccatcagcgaactgatacagtccgtgctccaaaaattgcaggacccttgcccgtccagcctcgccagtcctgacgagagcgagccagatagtatggaatcgtttcctgagagtctgtccgccttagttgttgacctgacacctcggaatccaaactccgccattctcttatcccctgttgagacaccttacgcaaacgtagatgcggaagtgcatgctaatcgcttgatgcgggagttggacttcgcagcttgcgtggaggaacgactggatggtgttatccctcttgcacgagggggagtggttaggcagtactggtccagctctttcttggtggacctcctggcagtggccgcacccgtagtgcctaccgttctctgggccttctctacccagcggggggggacggaccccgtctataatataggcgctctgctgcggggctgctgtgtagtggcgctgcacagcctcaggaggaccgcatttagaatcaagacctag

SEQ ID NO: 40113 - DNA, 1983 bp, Artificial Sequence
  derived and/or modified sequence
atgagcaactttgagaaggagcaccgggtgcagcaccacgacaaggagatcagccgcagccgcatccccaggctcatcctgcggccccacatgccccagcagcagcacaaggtgtccccagccagcgagagccccttcagcgaggaggagagccgggagttcaaccccagcagcagcggccgcagcgccaggacagtgagcagcaacagcttctgcagtgatgacaccggctgccccagcagccagagcgtgtcccctgtgaagacccccagtgatgctggcaacagccccatcggcttctgccccggcagtgatgagggcttcaccaggaagaagtgcaccatcggcatggtgggggagggcagcatccagagcagccgctacaagaaggagagcaagagcggcctggtgaagccaggcagcgaggccgacttcagcagcagcagcagcacaggcagcatcagcgcccctgaggtgcacatgagcacagctggcagcaagaggagcagcagcagcaggaacagaggcccccacggccgcagcaatggagccagcagccacaagccaggcagcagccccagcagcccccgggagaaggacctgctgtccatgctgtgcaggaaccagctgagccctgtgaacatccaccccagctatgcccccagcagccccagcagcagcaacagcggcagctacaagggcagtgactgcagccccatcatgaggaggagcggccgctacatgagctgtggggagaaccacggcgtgcggccccccaaccctgagcagtacctgacccccctgcagcagaaggaggtgacagtgcgccacctgaagaccaagctgaaggagagcgagcggcggctgcacgagcgggagagcgagatcgtggagctgaagagccagctggccaggatgagggaggactggattgaggaggagtgccaccgggtggaggcccagctggccctgaaggaggccaggaaggagatcaagcagctgaagcaggtgattgagaccatgaggagcagcctggccgacaaggacaagggcatccagaagtactttgtggacatcaacatccagaacaagaagctggagagcctgctgcagagcatggagatggcccacagcggcagcctgagagatgagctgtgcctggacttcccctgtgacagccctgagaagagcctgaccctgaacccccccctggacaccatggctgatggcctgagcctggaggagcaggtgactggagagggcgctgaccgggagctgctggtgggggacagcatcgccaacagcacagacctgtttgatgagatcgtgacagccaccaccacagagagcggggacctggagctggtgcacagcacccctggggccaacgtgctggagctgctgcccatcgtgatgggccaggaggagggctctgtggtggtggagagagctgtgcagacagatgtggtgccctacagccctgccatcagcgagctgatccagagcgtgctgcagaagctgcaggacccctgccccagcagcctggccagcccagatgaaagtgagccagacagcatggagagcttccctgagagcctgagcgccctggtggtggacctgaccccaagaaaccccaacagcgccatcctgctgagccctgtggagaccccctatgccaacgtggatgctgaggtgcacgccaaccggctgatgagggagctggactttgctgcctgtgtggaggagcggctggatggagtcatccccctggcccggggcggcgtggtgcggcagtactggagcagcagcttcctggtggacctgctggccgtggccgcccctgtggtgcccaccgtgctgtgggccttcagcacccagaggggcggcacagatcctgtgtacaacatcggggccctgctgcggggctgctgcgtggtggccctgcacagcctgcggaggacagccttccgcatcaagacctag

SEQ ID NO: 40114 - DNA, 1983 bp, Artificial Sequence
  derived and/or modified sequence
atgagcaacttcgagaaggagcaccgggtgcagcaccacgacaaggagattagccggtcccggatacccagactcatcctacgccctcacatgccccagcagcagcacaaagtatctccagcctcggagagccccttcagcgaggaagaatcaagggagttcaaccctagctcctctggacggagcgctaggacagtgtcatccaactcgttctgcagcgatgatacgggatgcccatcctcccagtcagtttctcctgtaaagacacccagcgacgctggaaactctcccataggtttttgcccgggctctgatgaggggtttactcgcaaaaagtgtacaataggcatggtgggagagggaagcatccagtcaagccgatacaagaaagagtcaaagagtgggctcgtaaaaccgggtagcgaggctgatttttcctcaagttcatctacaggctctatatcagcccctgaggttcatatgtctaccgccggctctaagcggagcagcagctcaagaaaccgcggtccccatggcagaagcaacggggcctcaagtcataaaccaggtagctctccttcatccccccgcgaaaaagatctgctgtcaatgctgtgccgcaatcagctgagtcccgtcaatatacacccttcatacgctccgagttcaccttccagttctaattctggttcatataaagggtcagactgtagtccaatcatgcgacgaagcggtcggtatatgagttgtggagagaaccacggggtgcggcctccaaaccccgagcaatacctcactcctctgcaacagaaggaggtgacggttcggcatctaaaaacgaaattgaaggagtcagaaagaaggctccatgaacgcgagtccgaaatcgtggagctgaaaagccagctcgccaggatgagagaagactggatcgaagaagagtgccacagagtagaagcccagctcgccctgaaggaagccagaaaggagataaaacagttaaagcaggtgattgagacaatgcgcagttcactagccgataaggacaagggcattcagaagtattttgtggacattaatattcaaaataaaaagcttgagagtcttctccagtccatggaaatggcccattctggttctctgagagacgagctgtgtttagattttccgtgcgattctccggaaaaatcactgactctgaacccccccctggataccatggctgatgggctcagcttggaagagcaggtaacaggagagggtgccgatcgtgagctcttagtgggcgacagtatcgctaatagcactgacctgttcgacgagattgtaactgccacaacaacagaatcaggagacctcgaattggtccactccactccgggcgcaaatgtcctggagctgctgcctatcgttatgggacaggaggagggatcagttgtggtggaacgggctgttcagactgatgttgtaccctactcacctgccatatctgagcttatccagagtgtgctgcagaagctccaagacccgtgtccatcttccctcgcatcccccgacgaatccgagcccgacagcatggagtcctttccagagtccctgtctgccctggtcgtagacctcactcctcgcaaccctaattctgctattctgctgtcccccgtggaaaccccttatgccaacgttgacgctgaggtgcacgcaaatcgcttgatgagggagctcgacttcgccgcctgtgtggaggaaaggttggatggagtaatacctctggcacgaggaggcgttgtgcgtcagtactggtccagttctttcctggtggacttgctggcagtggctgcacctgtagtaccaacagtgctatgggcttttagcacccagcggggcggaaccgacccagtgtataatattggtgccctgctaagaggatgttgtgttgtcgcacttcactctctccggcggactgctttccggatcaaaacgtag

SEQ ID NO: 40115 - DNA, 1983 bp, Artificial Sequence
  derived and/or modified sequence
atgtcaaatttcgagaaagagcatcgggtgcagcatcacgacaaggaaatcagcagatcacgaattcctcgcctgatccttcggccacatatgcctcagcaacagcataaggtctctccagcgagcgagtcacccttctccgaggaggagagccgcgaatttaatcccagcagctcagggagatccgcacgtacggtgtcatccaatagcttttgctctgacgatacaggctgcccaagtagccagagcgtatctcccgtcaagaccccgtcagatgccggaaatagccctattggcttttgtcctggttccgatgagggttttacgagaaagaagtgcaccatcggaatggtgggagagggatctatccagagttcgagatacaaaaaggaaagtaagtcgggcctggtcaagcccggtagcgaagcggattttagctcctccagcagcacaggaagtatctcagcccctgaggtgcatatgtcgactgcaggttcaaagcggtcatcctccagcaggaataggggccctcacggcagatcgaatggcgcttcctctcacaagccgggtagcagcccttcctcccctcgcgagaaggatcttctcagcatgctctgccgcaatcaattgtcgccggtgaatatccaccctagttatgcgccatcctcacccagttcttccaactcgggaagctataaaggctccgattgctcccccattatgagacgctccggacggtatatgtcatgcggggaaaaccatggcgtacgacctcctaatccagagcaatatctgacccccctccagcagaaggaagtgacagttagacacttgaagactaagcttaaagagtccgaaagaagactgcacgaacgggagtcggaaatagtcgagctgaaaagccagttagcgcgaatgcgagaggactggatcgaggaagaatgccatcgagtggaggctcagctcgccctgaaggaggcaagaaaagagatcaagcaattaaagcaggtcatcgaaacaatgcgtagttctctcgcggataaagataagggaatacaaaagtactttgtggacattaacatccaaaacaaaaaactggagtccctcctgcaaagtatggagatggctcactcagggagcttacgggacgagctgtgtctggattttccgtgcgacagcccggagaaatcactgacgctaaatccccctctggacacaatggcggacggtctctcactcgaggagcaggtcaccggcgagggcgctgacagagaattattagtaggagattcgatagctaacagtaccgacttgttcgatgaaatcgtgactgccacaacgactgagtcaggggacctggagttggtacattcaactccaggcgctaatgtgttggaactgttgcctatagtcatggggcaggaagagggaagtgtggtggttgaaagggctgttcagactgatgtagtgccatacagtcctgcaatatcagaactgatccagtctgtgctgcagaaactgcaggatccttgcccgagtagtctggcttccccagatgaaagcgagccggattctatggagagctttccggagtctctgtccgctctggtggttgatttgactccacggaatcccaatagtgccatcttattgagccccgtggaaaccccttatgccaacgtggacgcagaagtacacgccaacagacttatgcgtgaactggactttgcggcttgcgtggaagaaagactcgatggagtgattccactcgccagagggggtgtcgtgaggcaatactggagctcttcatttctcgtagacctgttggctgtggcggctcccgtggtgcccactgtcctgtgggctttctcgacccagcgaggaggtacggacccggtgtataatattggtgcccttctacggggatgctgcgtggtggccctacacagcctgcgccgaactgcctttcggatcaagacgtag

SEQ ID NO: 40116 - DNA, 3435 bp, Artificial Sequence
  derived and/or modified sequence
atttttaaaaccacgaaatggcagggtacttcatgctgcgtttttaaggagaaagaaaaatctcttcttatggatgtcctgtaaggaaaacaaaaattaaagatgatgtaaaaggtggagccatcttcccgagtatcggatttgtgtttgcttttctgttggcaacaagccttgtgtaccaggatattaacgaataattaagatcctgtccagaagaggagggattttaaagataattgtgtgtgagctatcaggaaataactgttccaggtatagggttcaactttgtgaggagacaagaaaacaagtcagactgtcacagctaatttagggaaagcaaaatggaagtctgaaggctatcaagtaagccagagtgtggtgttaataaagagcctttgggaggcagaagcttgaatgtgatagaagtcagggtgggaaggtgagtcaggaccagcatagggaagtaggatggccttccagctagtgagtggaggtgtgtatatgtgtgtgtgtgtgtgtgtgtgtgtgccacacagacatgtgctattcagtagattagaaaggttaactcattggaagagttttgaagctcatttcagcaactgagataagaaggactactctgtgaagactcaatactcagaaatgtgatttcttagaaattgatccttgaaggaaccgacaggagttaagagagggaaacgcgtttccttttgttttcttttttgatgtccaattttgagaaggagcacagagtgcagcatcatgacaaggagatttctcgaagccgaattccccggttgattcttcggccccatatgccccaacaacagcacaaagtgtccccagcctctgagtctcctttctctgaggaagagagcagagagttcaaccccagcagctctgggcgctcagcgaggaccgttagcagcaacagcttctgctcagatgacacaggctgtcctagcagccagtcagtgtctcctgtgaagacaccctcagatgctggaaacagccccattggcttttgccctggaagtgatgaaggcttcaccagaaagaaatgcacgattggaatggttggtgaaggaagcattcagtcctctcgatataagaaggaatcaaagtcaggccttgtgaaaccaggtagtgaagctgattttagctcctcgagcagcacaggcagcatttccgctcctgaggtccatatgtcgactgcgggaagcaagcggtcttcttcttcacgcaatcgaggtcctcatgggcggagtaatggagcttcgtcacacaagcctggcagcagcccatcatccccgcgggaaaaggaccttctgtccatgctgtgcaggaatcagctgagccctgtcaatatccatcccagttatgcaccttcttccccaagcagtagcaactcaggctcctacaaaggaagcgactgtagccccatcatgaggcgttctggaaggtacatgtcttgcggtgaaaatcatggtgtcagacccccaaacccagagcagtatttgactccactgcagcagaaagaggtgacagtgagacacctcaaaaccaagctgaaggaatctgagcgccgactccatgaaagggaaagtgaaatcgtggagcttaagtcccagctggcccgcatgcgagaggactggattgaggaggagtgtcaccgggtagaggcccagttggcactcaaagaagccaggaaagagattaaacagctcaaacaggtcatcgaaaccatgcggagcagcttggctgataaagataaaggcattcagaaatattttgtggacataaacatccaaaacaagaagctggagtctctccttcagagcatggagatggcacacagtggctctctgagggacgaactgtgcctagactttccatgtgattccccagagaagagcttaaccctcaacccccctcttgacacaatggcagatgggttatctctggaagagcaggtcacgggggaaggggctgacagggagctactggtaggagatagcatagccaacagcacagatttgttcgatgagatagtgacagccaccaccacagaatctggtgacctggagcttgtgcattccacccctggggctaacgtcctggagctgctgcccatagtcatgggtcaggaggagggcagtgtggtggtggagcgagccgttcagaccgacgtggtgccctacagcccagccatctcagagctcattcagagtgtgctgcagaagctccaggacccctgtccctcgagcttggcgtcccctgatgagtctgaaccagactcgatggagagcttcccagagtccctctctgccttagtggttgatttaactccaagaaatccaaactcagccatccttttgtctcccgtggagaccccctacgccaatgtggatgcagaagttcatgcaaaccgcctcatgagagagctggattttgcagcctgcgtggaagagaggttggatggtgtcatcccactggctcgcgggggcgtcgtgaggcagtactggagcagcagcttcctggtggatctcctggctgtggctgcccccgtggtccccacggttctgtgggcattcagtactcagagagggggaacggatcctgtgtataacatcggggccttgctcaggggctgttgcgtggttgccctgcattcgctccgccgcaccgccttccgtatcaaaacctaaatagaagttgttgttaccgtgtgccaatgtgtcccatgtgggttgtgccaggtagagaaacaggaagtcaatcatctgtgacagtctctattctgtcgttttgctccttggtatttgatttgcactatatttagttgaagcctgttcactgtttaaaaccggaggtatcttcaaaggcatggagacctggttccagtaaatgtcccaccagtggggtatagaaagcatgctcatgaccctgccgtgtcgtctgaggtacccgttcttatcctagtggttcaggaagagaaaacgcagtttgcactttcaagacagcttctctaaggctggcatgttatctccttgctttgctttttgccgttttaaaatgtgtaattgttccagcattccaatggtcttgtgcatagcaggggactgtaaccaaaaataaacatgtatttgtgtaattggtttgaagaagtcttgaatagctctttactgtcttacttggggttgataagatttgagtgtttgcaattttttactaaatgtagctccaaagtcttaaatggcttgtttgttcttaaactgttaattgatgaaactgtgcataagtttacaatgtactaacttattttgcttattatatatagtgttttattggaaattgtaaccacacacttcagcatgatgaaaataaagattagtgtttccatttaaataaatgttttatcctcccataaaa

SEQ ID NO: 40117 - DNA, 564 bp, Artificial Sequence
  derived and/or modified sequence
ttaggagatggtgctttgtcagccctgattgagcccaagaaaaccccctgcatacacagatgacacaggctgtcctagcagccagtcagtgtctcctgtgaagacaccctcagatgctggaaacagccccattggcttttgccctggaagtgatgaaggcttcaccagaaagaaatgcacgattggaatggttggtgaaggaagcattcagtcctctcgatataagaaggaatcaaagtcaggccttgtgaaaccaggtagtgaagctgattttagctcctcgagcagcacaggcagcatttccgctcctgaggtccatatgtcgactgcgggaagcaagcggtcttcttcttcacgcaatcgaggtcctcatgggcggagtaatggagcttcgtcacacaagcctggcagcagcccatcatccccgcgggaaaaggaccttctgtccatgctgtgcaggaatcagctgagccctgtcaatatccatcccagttatgcaccttcttccccaagcagtagcaactcaggctcctacaaaggaagcgactgtagccccatcatgag

SEQ ID NO: 40118 - DNA, 558 bp, Artificial Sequence
  derived and/or modified sequence
atcaggaaataactgttccaggtatagggttcaactttgtgaggagacaagaaaacaagtcagactgtcacagctaatttagggaaagcaaaatggaagtctgaaggctatcaagtaagccagagtgtggtgttaataaagagcctttgggaggcagaagcttgaatgtgatagaagtcagggtgggaagatgacacaggctgtcctagcagccagtcagtgtctcctgtgaagacaccctcagatgctggaaacagccccattggcttttgccctggaagtgatgaaggcttcaccagaaagaaatgcacgattggaatggttggtgaaggaagcattcagtcctctcgatataagaaggaatcaaagtcaggccttgtgaaaccaggtagtgaagctgattttagctcctcgagcagcacaggcagcatttccgctcctgaggtccatatgtcgactgcgggaagcaagcggtcttcttcttcacgcaatcgaggtcctcatgggcggagtaatggagcttcgtcacacaagcctggcagcagcccatcatccccg

SEQ ID NO: 40119 - DNA, 545 bp, Artificial Sequence
  derived and/or modified sequence
agcagtgtgctggagctacttcctggagccgggcagctgcagggcagcgctggggaaaagactgttctctggctacatagcagcctggcttctccaagccggagggagctgcgctgaccactgaaggcctttctgatgcaaccccttccaagtagaatccatcgcagcctttcagatcccggaacccagaggctgtgtcggtcctgacgcactggcttggctgggctccggtgcctcctcctggacggcggcagcggcggcgcgaggagccggcgggcagcggcgcgatggggcccctccgcgagagcaagatgacacaggctgtcctagcagccagtcagtgtctcctgtgaagacaccctcagatgctggaaacagccccattggcttttgccctggaagtgatgaaggcttcaccagaaagaaatgcacgattggaatggttggtgaaggaagcattcagtcctctcgatataagaaggaatcaaagtcaggccttgtgaaaccaggtagtgaagctgattttagctcctcgagcagcacag

SEQ ID NO: 40120 - DNA, 516 bp, Artificial Sequence
  derived and/or modified sequence
ttctacttagaacaaagggaggtgcccggaagcagtacacattagtgcagagttttctggtttccctttaaagagaaggcacagccatttgactcttgagcttatttaaacaagtcaccagtccttgactccagaactgaagctttatatgttctttctatttggctgagccagtaatttttgattgcttcttcttcccaagaggtgcctcctcctggacggcggcagcggcggcgcgaggagccggcgggcagcggcgcgatggggcccctccgcgagagcaagatgacacaggctgtcctagcagccagtcagtgtctcctgtgaagacaccctcagatgctggaaacagccccattggcttttgccctggaagtgatgaaggcttcaccagaaagaaatgcacgattggaatggttggtgaaggaagcattcagtcctctcgatataagaaggaatcaaagtcaggccttgtgaaaccaggtagtgaagctgattttagctcctcgagcagca

SEQ ID NO: 40121 - DNA, 573 bp, Artificial Sequence
  derived and/or modified sequence
attctacttagaacaaagggaggtgcccggaagcagtacacattagtgcagagttttctggtttccctttaaagagaaggcacagccatttgactcttgagcttatttaaacaagtcaccagtccttgactccagaactgaagctttatatgttctttctatttggctgagccagtaatttttgattgcttcttcttcccaagagatgacacaggctgtcctagcagccagtcagtgtctcctgtgaagacaccctcagatgctggaaacagccccattggcttttgccctggaagtgatgaaggcttcaccagaaagaaatgcacgattggaatggttggtgaaggaagcattcagtcctctcgatataagaaggaatcaaagtcaggccttgtgaaaccaggtagtgaagctgattttagctcctcgagcagcacaggcagcatttccgctcctgaggtccatatgtcgactgcgggaagcaagcggtcttcttcttcacgcaatcgaggtcctcatgggcggagtaatggagcttcgtcacacaagcctggcagcagcccatcatccccg

SEQ ID NO: 40122 - protein, 1075 aa, Artificial Sequence
  derived and/or modified sequence
MVVEVDSMPAASSVKKPFGLRSKMGKWCCRCFPCCRESGKSNVGTSGDHDDSAMKTLRSKMGKWCRHCFPCCRGSGKSNVGASGDHDDSAMKTLRNKMGKWCCHCFPCCRGSSKSKVGAWGDYDDSAFMEPRYHVRGEDLDKLHRAAWWGKVPRKDLIVMLRDTDVNKQDKQKRTALHLASANGNSEVVKLLLDRRCQLNVLDNKKRTALIKAVQCQEDECALMLLEHGTDPNIPDEYGNTTLHYAIYNEDKLMAKALLLYGADIESKNKHGLTPLLLGVHEQKQQVVKFLIKKKANLNALDRYGRTALILAVCCGSASIVSLLLEQNIDVSSQDLSGQTAREYAVSSHHHVICQLLSDYKEKQMLKISSENSNPEQDLKLTSEEESQRFKGSENSQPEKMSQEPEINKDGDREVEEEMKKHESNNVGLLENLTNGVTAGNGDNGLIPQRKSRTPENQQFPDNESEEYHRICELLSDYKEKQMPKYSSENSNPEQDLKLTSEEESQRLKGSENGQPEKRSQEPEINKDGDRELENFMAIEEMKKHRSTHVGFPENLTNGATAGNGDDGLIPPRKSRTPESQQFPDTENEEYHSDEQNDTQKQFCEEQNTGILHDEILIHEEKQIEVVEKMNSELSLSCKKEKDILHENSTLREEIAMLRLELDTMKHQSQLREKKYLEDIESVKKRNDNLLKALQLNELTMDDDTAVLVIDNGSGMCKAGFAGDDAPRAVFPSIVGRPRQQGMMGGMHQKESYVGKEAQSKRGILTLKYPMEHGIITNWDDMEKIWHHTFYNELRVAPEEHPVLLTEATLNPKANREKMTQIMFETFNTPAMYVAIQAVLSLYTSGRTTGIVMDSGDGVTHTVPIYEGNALPHATLRLDLAGRELPDYLMKILTEHGYRFTTMAEREIVRDIKEKLCYVALDFEQEMATVASSSSLEKSYELPDGQVITIGNERFRCPEALFQPCFLGMESCGIHETTFNSIMKSDVDIRKDLYTNTVLSGGTTMYPGMAHRMQKEIAALAPSMMKIRIIAPPKRKYSVWVGGSILASLSTFQQMWISKQEYDESGPSIVHRKCL

SEQ ID NO: 40123 - protein, 376 aa, Artificial Sequence
  derived and/or modified sequence
MVVEVDSMPAASSVKKPFGLRSKMGKWCCRCFPCCRESGKSNVGTSGDHDDSAMKTLRSKMGKWCRHCFPCCRGSGKSNVGASGDHDDSAMKTLRNKMGKWCCHCFPCCRGSSKSKVGAWGDYDDSAFMEPRYHVRGEDLDKLHRAAWWGKVPRKDLIVMLRDTDVNKQDKQKRTALHLASANGNSEVVKLLLDRRCQLNVLDNKKRTALIKAVQCQEDECALMLLEHGTDPNIPDEYGNTTLHYAIYNEDKLMAKALLLYGADIESKNKHGLTPLLLGVHEQKQQVVKFLIKKKANLNALDRYGRTALILAVCCGSASIVSLLLEQNIDVSSQDLSGQTAREYAVSSHHHVICQLLSDYKEKQMLKISSENSNPG

SEQ ID NO: 40124 - protein, 394 aa, Artificial Sequence
  derived and/or modified sequence
MVVEVDSMPAASSVKKPFGLRSKMGKWCCRCFPCCRESGKSNVGTSGDHDDSAMKTLRSKMGKWCRHCFPCCRGSGKSNVGASGDHDDSAMKTLRNKMGKWCCHCFPCCRGSSKSKVGAWGDYDDSAFMEPRYHVRGEDLDKLHRAAWWGKVPRKDLIVMLRDTDVNKQDKQKRTALHLASANGNSEVVKLLLDRRCQLNVLDNKKRTALIKVCSSQLYQHEAVQCQEDECALMLLEHGTDPNIPDEYGNTTLHYAIYNEDKLMAKALLLYGADIESKNKHGLTPLLLGVHEQKQQVVKFLIKKKANLNALDRYGRTALILAVCCGSASIVSLLLEQNIDVSSQDLSGQTAREYAVSSHHHVICQLLSDYKEKQMLKISSENSNPENVSRTRNK

SEQ ID NO: 40125 - DNA, 3228 bp, Artificial Sequence
  derived and/or modified sequence
atggtggtggaggtggacagcatgcccgccgccagcagcgtgaagaagcccttcggcctgagaagcaagatgggcaagtggtgctgcagatgcttcccctgctgcagagagagcggcaagagcaacgtgggcaccagcggcgaccacgacgacagcgccatgaagaccctgagaagcaagatgggcaagtggtgcagacactgcttcccctgctgcagaggcagcggcaagagcaacgtgggcgccagcggcgaccacgacgacagcgccatgaagaccctgagaaacaagatgggcaagtggtgctgccactgcttcccctgctgcagaggcagcagcaagagcaaggtgggcgcctggggcgactacgacgacagcgccttcatggagcccagataccacgtgagaggcgaggacctggacaagctgcacagagccgcctggtggggcaaggtgcccagaaaggacctgatcgtgatgctgagagacaccgacgtgaacaagcaggacaagcagaagagaaccgccctgcacctggccagcgccaacggcaacagcgaggtggtgaagctgctgctggacagaagatgccagctgaacgtgctggacaacaagaagagaaccgccctgatcaaggccgtgcagtgccaggaggacgagtgcgccctgatgctgctggagcacggcaccgaccccaacatccccgacgagtacggcaacaccaccctgcactacgccatctacaacgaggacaagctgatggccaaggccctgctgctgtacggcgccgacatcgagagcaagaacaagcacggcctgacccccctgctgctgggcgtgcacgagcagaagcagcaggtggtgaagttcctgatcaagaagaaggccaacctgaacgccctggacagatacggcagaaccgccctgatcctggccgtgtgctgcggcagcgccagcatcgtgagcctgctgctggagcagaacatcgacgtgagcagccaggacctgagcggccagaccgccagagagtacgccgtgagcagccaccaccacgtgatctgccagctgctgagcgactacaaggagaagcagatgctgaagatcagcagcgagaacagcaaccccgagcaggacctgaagctgaccagcgaggaggagagccagagattcaagggcagcgagaacagccagcccgagaagatgagccaggagcccgagatcaacaaggacggcgacagagaggtggaggaggagatgaagaagcacgagagcaacaacgtgggcctgctggagaacctgaccaacggcgtgaccgccggcaacggcgacaacggcctgatcccccagagaaagagcagaacccccgagaaccagcagttccccgacaacgagagcgaggagtaccacagaatctgcgagctgctgagcgactacaaggagaagcagatgcccaagtacagcagcgagaacagcaaccccgagcaggacctgaagctgaccagcgaggaggagagccagagactgaagggcagcgagaacggccagcccgagaagagaagccaggagcccgagatcaacaaggacggcgacagagagctggagaacttcatggccatcgaggagatgaagaagcacagaagcacccacgtgggcttccccgagaacctgaccaacggcgccaccgccggcaacggcgacgacggcctgatcccccccagaaagagcagaacccccgagagccagcagttccccgacaccgagaacgaggagtaccacagcgacgagcagaacgacacccagaagcagttctgcgaggagcagaacaccggcatcctgcacgacgagatcctgatccacgaggagaagcagatcgaggtggtggagaagatgaacagcgagctgagcctgagctgcaagaaggagaaggacatcctgcacgagaacagcaccctgagagaggagatcgccatgctgagactggagctggacaccatgaagcaccagagccagctgagagagaagaagtacctggaggacatcgagagcgtgaagaagagaaacgacaacctgctgaaggccctgcagctgaacgagctgaccatggacgacgacaccgccgtgctggtgatcgacaacggcagcggcatgtgcaaggccggcttcgccggcgacgacgcccccagagccgtgttccccagcatcgtgggcagacccagacagcagggcatgatgggcggcatgcaccagaaggagagctacgtgggcaaggaggcccagagcaagagaggcatcctgaccctgaagtaccccatggagcacggcatcatcaccaactgggacgacatggagaagatctggcaccacaccttctacaacgagctgagagtggcccccgaggagcaccccgtgctgctgaccgaggccaccctgaaccccaaggccaacagagagaagatgacccagatcatgttcgagaccttcaacacccccgccatgtacgtggccatccaggccgtgctgagcctgtacaccagcggcagaaccaccggcatcgtgatggacagcggcgacggcgtgacccacaccgtgcccatctacgagggcaacgccctgccccacgccaccctgagactggacctggccggcagagagctgcccgactacctgatgaagatcctgaccgagcacggctacagattcaccaccatggccgagagagagatcgtgagagacatcaaggagaagctgtgctacgtggccctggacttcgagcaggagatggccaccgtggccagcagcagcagcctggagaagagctacgagctgcccgacggccaggtgatcaccatcggcaacgagagattcagatgccccgaggccctgttccagccctgcttcctgggcatggagagctgcggcatccacgagaccaccttcaacagcatcatgaagagcgacgtggacatcagaaaggacctgtacaccaacaccgtgctgagcggcggcaccaccatgtaccccggcatggcccacagaatgcagaaggagatcgccgccctggcccccagcatgatgaagatcagaatcatcgccccccccaagagaaagtacagcgtgtgggtgggcggcagcatcctggccagcctgagcaccttccagcagatgtggatcagcaagcaggagtacgacgagagcggccccagcatcgtgcacagaaagtgcctgtag

SEQ ID NO: 40126 - DNA, 1131 bp, Artificial Sequence
  derived and/or modified sequence
atggtggtggaggtggacagcatgcccgccgccagcagcgtgaagaagcccttcggcctgagaagcaagatgggcaagtggtgctgcagatgcttcccctgctgcagagagagcggcaagagcaacgtgggcaccagcggcgaccacgacgacagcgccatgaagaccctgagaagcaagatgggcaagtggtgcagacactgcttcccctgctgcagaggcagcggcaagagcaacgtgggcgccagcggcgaccacgacgacagcgccatgaagaccctgagaaacaagatgggcaagtggtgctgccactgcttcccctgctgcagaggcagcagcaagagcaaggtgggcgcctggggcgactacgacgacagcgccttcatggagcccagataccacgtgagaggcgaggacctggacaagctgcacagagccgcctggtggggcaaggtgcccagaaaggacctgatcgtgatgctgagagacaccgacgtgaacaagcaggacaagcagaagagaaccgccctgcacctggccagcgccaacggcaacagcgaggtggtgaagctgctgctggacagaagatgccagctgaacgtgctggacaacaagaagagaaccgccctgatcaaggccgtgcagtgccaggaggacgagtgcgccctgatgctgctggagcacggcaccgaccccaacatccccgacgagtacggcaacaccaccctgcactacgccatctacaacgaggacaagctgatggccaaggccctgctgctgtacggcgccgacatcgagagcaagaacaagcacggcctgacccccctgctgctgggcgtgcacgagcagaagcagcaggtggtgaagttcctgatcaagaagaaggccaacctgaacgccctggacagatacggcagaaccgccctgatcctggccgtgtgctgcggcagcgccagcatcgtgagcctgctgctggagcagaacatcgacgtgagcagccaggacctgagcggccagaccgccagagagtacgccgtgagcagccaccaccacgtgatctgccagctgctgagcgactacaaggagaagcagatgctgaagatcagcagcgagaacagcaaccccggctag

SEQ ID NO: 40127 - DNA, 1185 bp, Artificial Sequence
  derived and/or modified sequence
atggtggtggaggtggacagcatgcccgccgccagcagcgtgaagaagcccttcggcctgagaagcaagatgggcaagtggtgctgcagatgcttcccctgctgcagagagagcggcaagagcaacgtgggcaccagcggcgaccacgacgacagcgccatgaagaccctgagaagcaagatgggcaagtggtgcagacactgcttcccctgctgcagaggcagcggcaagagcaacgtgggcgccagcggcgaccacgacgacagcgccatgaagaccctgagaaacaagatgggcaagtggtgctgccactgcttcccctgctgcagaggcagcagcaagagcaaggtgggcgcctggggcgactacgacgacagcgccttcatggagcccagataccacgtgagaggcgaggacctggacaagctgcacagagccgcctggtggggcaaggtgcccagaaaggacctgatcgtgatgctgagagacaccgacgtgaacaagcaggacaagcagaagagaaccgccctgcacctggccagcgccaacggcaacagcgaggtggtgaagctgctgctggacagaagatgccagctgaacgtgctggacaacaagaagagaaccgccctgatcaaggtgtgcagcagccagctgtaccagcacgaggccgtgcagtgccaggaggacgagtgcgccctgatgctgctggagcacggcaccgaccccaacatccccgacgagtacggcaacaccaccctgcactacgccatctacaacgaggacaagctgatggccaaggccctgctgctgtacggcgccgacatcgagagcaagaacaagcacggcctgacccccctgctgctgggcgtgcacgagcagaagcagcaggtggtgaagttcctgatcaagaagaaggccaacctgaacgccctggacagatacggcagaaccgccctgatcctggccgtgtgctgcggcagcgccagcatcgtgagcctgctgctggagcagaacatcgacgtgagcagccaggacctgagcggccagaccgccagagagtacgccgtgagcagccaccaccacgtgatctgccagctgctgagcgactacaaggagaagcagatgctgaagatcagcagcgagaacagcaaccccgagaacgtgagcagaaccagaaacaagtag

SEQ ID NO: 40128 - DNA, 4031 bp, Artificial Sequence
  derived and/or modified sequence
gattggaaacccggagttacctgctagttggtgaaactggttggtagacgcgatctgttggctactactggcttctcctggctgttaaaagcagatggtggttgaggttgattccatgccggctgcctcttctgtgaagaagccatttggtctcaggagcaagatgggcaagtggtgctgccgttgcttcccctgctgcagggagagcggcaagagcaacgtgggcacttctggagaccacgacgactctgctatgaagacactcaggagcaagatgggcaagtggtgccgccactgcttcccctgctgcagggggagtggcaagagcaacgtgggcgcttctggagaccacgacgactctgctatgaagacactcaggaacaagatgggcaagtggtgctgccactgcttcccctgctgcagggggagcagcaagagcaaggtgggcgcttggggagactacgatgacagtgccttcatggagcccaggtaccacgtccgtggagaagatctggacaagctccacagagctgcctggtggggtaaagtccccagaaaggatctcatcgtcatgctcagggacactgacgtgaacaagcaggacaagcaaaagaggactgctctacatctggcctctgccaatgggaattcagaagtagtaaaactcctgctggacagacgatgtcaacttaatgtccttgacaacaaaaagaggacagctctgataaaggccgtacaatgccaggaagatgaatgtgcgttaatgttgctggaacatggcactgatccaaatattccagatgagtatggaaataccactctgcactacgctatctataatgaagataaattaatggccaaagcactgctcttatatggtgctgatatcgaatcaaaaaacaagcatggcctcacaccactgttacttggtgtacatgagcaaaaacagcaagtcgtgaaatttttaattaagaaaaaagcgaatttaaatgcactggatagatatggaagaactgctctcatacttgctgtatgttgtggatcagcaagtatagtcagccttctacttgagcaaaatattgatgtatcttctcaagatctatctggacagacggccagagagtatgctgtttctagtcatcatcatgtaatttgccagttactttctgactacaaagaaaaacagatgctaaaaatctcttctgaaaacagcaatccagaacaagacttaaagctgacatcagaggaagagtcacaaaggttcaaaggcagtgaaaatagccagccagagaaaatgtctcaagaaccagaaataaataaggatggtgatagagaggttgaagaagaaatgaagaagcatgaaagtaataatgtgggattactagaaaacctgactaatggtgtcactgctggcaatggtgataatggattaattcctcaaaggaagagcagaacacctgaaaatcagcaatttcctgacaacgaaagtgaagagtatcacagaatttgtgaattactttctgactacaaagaaaagcagatgccaaaatactcttctgaaaacagcaacccagaacaagacttaaagctgacatcagaggaagagtcacaaaggcttaaaggcagtgaaaatggccagccagagaaaagatctcaagaaccagaaataaataaggatggtgatagagagctagaaaattttatggctatcgaagaaatgaagaagcacagaagtactcatgtcggattcccagaaaacctgactaatggtgccactgctggcaatggtgatgatggattaattcctccaaggaagagcagaacacctgaaagccagcaatttcctgacactgagaatgaagagtatcacagtgacgaacaaaatgatactcagaagcaattttgtgaagaacagaacactggaatattacacgatgagattctgattcatgaagaaaagcagatagaagtggttgaaaaaatgaattctgagctttctcttagttgtaagaaagaaaaagacatcttgcatgaaaatagtacgttgcgggaagaaattgccatgctaagactggagctagacacaatgaaacatcagagccagctaagagaaaagaaatatttggaggatattgaaagtgtgaaaaaaaggaatgataatcttttaaaggctctacaattgaatgagctcaccatggatgatgataccgctgtgctcgtcattgacaacggctctggcatgtgcaaggccggctttgcgggcgacgatgccccccgggctgtcttcccttccatcgtggggcgccccaggcagcagggcatgatggggggcatgcatcagaaagagtcctatgtgggcaaggaggcccagagcaaaagaggcatcctgaccctgaagtaccccatggaacacggcatcatcaccaactgggatgacatggagaagatctggcaccacaccttctacaacgagctgcgtgtggctcccgaggagcaccccgtcctgctgaccgaggccaccctgaaccctaaggccaaccgcgagaagatgacccagatcatgtttgagaccttcaacaccccagccatgtacgtggccatccaggctgtgctgtccctgtacacctctggccgtactactggcatcgtgatggactctggtgacggggtcacccacactgtgcccatctatgaggggaatgccctcccccatgccaccctgcgcctagacctggctgggcgggaactgcctgactacctcatgaagatcctcaccgagcatggctataggttcaccaccatggccgagcgggaaatcgtgcgtgacatcaaagagaagctgtgctatgttgccctggacttcgagcaggagatggccacggtggcctccagctcctccctagagaagagctacgagctgcccgatggccaggtcatcaccatcggcaacgagcggttccgctgccccgaggcgctcttccagccttgcttcctgggcatggaatcctgtggcatccatgaaactaccttcaactccatcatgaagtctgatgtggacatccgcaaagacctgtacaccaacacagtgctgtctggcggcaccaccatgtaccctggcatggcccacagaatgcagaaggagatcgctgccctggcgcctagcatgatgaagatcaggatcattgctcctcccaagcgcaagtactccgtgtgggtcggtggctccatcctggcctcgctgtccaccttccagcagatgtggatcagcaagcaggagtatgatgagtcaggcccctccattgtccaccgcaaatgcttgtaggtggactctgacttagttgcgttacaccctttcttgacaaaaccaaacttctcagaaaacaacatgagattggcatggctttatttgttttcttgtttcattttttgttttgttttttattggcttgactcaggatttaaaaaccggaatggtgaaggtgacagcagtcggttggaggaagcttcctccaaagttctacaatgtggccaaggactttgattgtaccttgttcttcttttcaatagtcattccaaatattgtgagacgcattgtttcaggaagccccttgccctgctaaaagccaccccacttctctctaaggagaatggcccagtcctctccctagttcacacaggggaggtgatagcattgcttttgtgcaaattacataatgcaaaattttttgaatcttcgccttaatactttttaattttgttttattttgaatgatcagccttcgtggcccccctcttttgtaccccaacttggggtgtatgaaggcttttggtctccctgagagtggctggaggcagccagggcttacctgtactctgacttgaggagagttggataaaagtgcacaccttaaaacaaattgaggaagcacagtatttcagtacagtggacagcttagcatgttgacaactgagaataaaatgctcagttctgaactggacaatgtaagacacaacgaggaaacactggaaat

SEQ ID NO: 40129 - DNA, 3228 bp, Artificial Sequence
  derived and/or modified sequence
atggtggtagaagtagactctatgccagctgccagcagtgtgaagaagcccttcggactccgctccaagatgggcaagtggtgctgccgatgtttcccttgctgtcgtgaatcaggcaagagcaacgttggcacttctggcgaccatgatgacagtgcaatgaagactctgagaagtaagatggggaaatggtgtcggcattgttttccctgctgccgtgggagtggcaagtctaacgtcggtgctagtggcgaccacgacgattctgctatgaagaccttgcgaaataaaatgggtaaatggtgttgtcactgcttcccttgctgcagaggatcaagcaagtcgaaagttggggcttggggcgactatgatgactctgccttcatggagccacgctatcacgttcgaggcgaggatctggataagcttcaccgcgcagcgtggtgggggaaggtgccccgcaaggatctcatagtgatgctgcgggacaccgacgtcaacaaacaagacaaacagaaaagaacagcccttcatctggcctccgcaaacggcaattcggaggtggtcaagctgctgcttgaccggcgctgtcaacttaacgtactcgacaataaaaaacgtactgcattaataaaggcggtgcaatgccaggaggatgaatgtgcgctgatgctgttggaacatggtacagaccccaatatccctgacgaatacgggaatacgacactccattatgccatatacaatgaggacaaacttatggctaaggctctcctgctgtacggggccgacattgagtctaagaacaaacacgggctcaccccattactgctgggggtccatgagcaaaaacagcaggtcgttaagtttctgatcaagaaaaaagccaatctcaacgccctggaccgctacggcaggactgcgctcatcctggctgtatgttgcgggtcagctagcattgtatcactcctgctggagcagaatatcgacgttagtagccaggacctgtcggggcagaccgcgcgcgagtacgccgtgtccagccatcatcatgttatttgtcagctcttgtcggactataaggagaagcaaatgttaaaaatctcctctgagaatagtaaccccgagcaggacttgaaactgacaagtgaagaggaaagtcagcgttttaaggggtcagaaaattcacaacccgaaaaaatgagtcaggagcctgaaattaataaggatggcgatcgggaggtcgaggaagagatgaaaaaacacgaaagtaacaatgtgggcctactcgagaatcttaccaacggtgtcactgccggcaatggcgataatggtctcatccctcagcgaaagagtcggacacccgagaaccagcagtttcccgataatgaatctgaggaatatcaccgtatctgcgaactgctctctgactacaaggagaaacagatgccaaagtattcatctgagaactctaaccctgaacaagacttgaaacttacctccgaggaggagagtcagcgcctaaaaggctccgaaaatggacagcctgagaaacgtagtcaggagcctgagataaataaggatggagaccgtgagctcgaaaacttcatggctatcgaggagatgaaaaagcatcggagtacacatgtagggttccctgaaaacttgactaatggcgctactgccgggaacggggacgatggcttaatacctcctagaaaatccagaacccctgagtcccagcagttcccggacactgagaacgaagagtaccactcagatgagcaaaacgacacccagaagcagttttgtgaggaacagaatacgggcatcctgcacgatgaaattctgattcatgaagagaagcagatcgaagtcgtcgagaaaatgaattcagaactgtcactgtcatgcaagaaagaaaaggatatcctgcacgaaaatagtactttaagggaggaaatcgctatgctgcggctggaattggacacaatgaaacaccaatcacagctccgggagaaaaagtatctggaagatatcgagtctgtcaaaaaaaggaatgacaatctgctaaaggctctacagctgaatgaactcaccatggatgatgatactgcagtcctcgttatcgataatggttctggaatgtgcaaggcaggcttcgccggtgacgatgctcctagggccgtgttcccatccattgtcggacggccgcgtcaacagggtatgatgggcggcatgcaccaaaaggaatcctatgttggtaaagaagcccaaagcaagcgtggcatcctgactctaaaataccccatggagcatggcataattaccaattgggatgacatggagaagatttggcaccatacgttctacaacgaactgagagttgccccagaggagcaccctgtgctcctgacagaggccactctgaatcccaaggcaaatcgtgagaaaatgactcaaatcatgttcgagacctttaatacccccgccatgtatgtggccatccaagccgtgctgagtctgtatacaagtgggaggactaccggtatcgtgatggattcgggagatggcgtgacccatactgttcccatctacgaaggcaacgctctgccccacgccacactccgcttggaccttgccggcagggagctaccggattatttgatgaaaattctcactgagcacgggtaccgcttcactaccatggctgaacgtgagatcgtgagagatatcaaagagaagctttgttacgtcgcacttgatttcgagcaggagatggctacagtcgcctcaagtagcagtctggagaaatcttatgaattaccagatggtcaagtcattaccatcggcaatgagcgcttccggtgccccgaggcgctgtttcaaccatgctttcttggtatggagtcatgcgggatccacgagaccactttcaacagcataatgaagtccgatgtcgatatccgcaaggacctctacaccaacacagtgctctctggcgggacaactatgtatcctggcatggcacaccggatgcaaaaggaaattgccgctcttgctccttccatgatgaagatccgaattattgcaccacccaaacgcaagtattctgtttgggtgggtggcagcatcctggcctcactcagtacatttcagcagatgtggataagtaaacaggaatacgatgaatctggcccatccattgtgcatagaaagtgtttatag

SEQ ID NO: 40130 - DNA, 1131 bp, Artificial Sequence
  derived and/or modified sequence
atggtcgtggaggtcgatagtatgcctgccgctagttcagtcaagaagccgtttggccttagaagtaagatggggaagtggtgttgcagatgctttccttgttgtcgcgagtctggcaagtccaatgtggggactagtggcgatcacgatgactcagccatgaagacccttaggtccaaaatgggaaagtggtgccggcactgcttcccgtgttgtcgaggcagcggcaaatccaatgtgggagcttccggcgatcacgacgacagcgccatgaaaacactgcgaaacaagatggggaagtggtgctgtcactgttttccgtgttgccgaggatctagtaaatccaaggtcggagcctggggcgattatgatgactctgcattcatggaacctaggtaccacgtgaggggcgaagatctcgacaagctgcatagggccgcgtggtgggggaaggtccccaggaaggacttgattgtgatgttgcgcgacacagacgtaaacaagcaagacaaacagaagagaaccgcccttcacctcgcgtccgccaatggcaactctgaagtggttaaattgcttttagacagacggtgccagctgaatgtgctggataacaaaaagaggactgcactcatcaaggccgtgcaatgccaggaagacgagtgcgccttaatgctcctggagcacggcacagaccctaacattcctgatgagtatgggaataccactctgcactacgcaatatataatgaagacaagctcatggccaaagcgctgttgctgtacggcgccgatattgagagtaagaataagcacggattgacgcctctgctactgggggtacacgagcagaaacagcaggtggtgaaattcctcataaagaaaaaggccaatctgaatgccctagaccgatatggcagaaccgctctaatcctggccgtgtgctgcggcagcgcctcaattgtgagcctcctgctcgagcagaatatcgacgtaagcagtcaggatctgtccggccaaactgcccgcgaatatgccgtgagtagccaccatcacgtgatctgccagctgctcagcgactacaaggagaagcaaatgttaaaaatctcttccgagaattcaaatccgggctag

SEQ ID NO: 40131 - DNA, 1185 bp, Artificial Sequence
  derived and/or modified sequence
atggttgtggaggtggacagtatgccggctgcctcgtccgtaaaaaagccgtttggtctgaggagcaagatgggcaagtggtgctgccgttgcttcccctgttgcagggaatcagggaagtctaatgttggaacaagcggggaccatgacgactccgcgatgaaaacactgaggtctaagatggggaaatggtgccgccattgtttcccttgctgccggggttctggtaagagcaacgtgggagctagcggggaccatgacgattccgccatgaaaacattacgtaacaaaatgggaaagtggtgctgccattgctttccctgttgtcggggctcgagtaagagtaaagtgggagcttggggggactacgacgacagcgcatttatggagccacgttaccacgtcaggggagaagatctggataaacttcatcgagcagcatggtgggggaaggttccacgcaaggacctcatcgtgatgcttcgagacaccgatgtgaataaacaggacaagcaaaaaagaaccgcattgcacctggcctccgccaacgggaactcagaagtcgtcaagctgcttctagatcgcagatgccagttaaacgtgctggataacaagaagaggacggcgcttattaaggtgtgttctagccaactctaccagcatgaagcagtgcagtgtcaggaggatgaatgtgctcttatgcttctggagcacggcacagacccaaacatcccagacgagtacgggaacacgaccctccattatgccatctacaatgaagacaaactgatggctaaagccctcctgctgtacggggcagacatcgagagcaaaaacaaacacggactcaccccactcttactaggcgtgcacgagcaaaaacaacaagtcgtgaaattcctgatcaagaaaaaagccaatctgaacgcactcgaccggtacggccgcaccgcactaattctggccgtgtgctgtggctcagcatccattgttagcctgctgctggagcagaatatcgacgtgtcatcccaggacctctctggccaaactgcccgagaatatgccgtctcttcacatcatcatgtgatctgtcagctcctgagcgactacaaagagaaacaaatgctgaaaatctcatcagaaaattcaaatcctgagaatgtatcacggacacggaacaagtag

SEQ ID NO: 40132 - DNA, 2072 bp, Artificial Sequence
  derived and/or modified sequence
ggtagacgcgatctgttggctactactggcttctcctggctgttaaaagcagatggtggttgaggttgattccatgccggctgcctcttctgtgaagaagccatttggtctcaggagcaagatgggcaagtggtgctgccgttgcttcccctgctgcagggagagcggcaagagcaacgtgggcacttctggagaccacgacgactctgctatgaagacactcaggagcaagatgggcaagtggtgccgccactgcttcccctgctgcagggggagtggcaagagcaacgtgggcgcttctggagaccacgacgactctgctatgaagacactcaggaacaagatgggcaagtggtgctgccactgcttcccctgctgcagggggagcagcaagagcaaggtgggcgcttggggagactacgatgacagtgccttcatggagcccaggtaccacgtccgtggagaagatctggacaagctccacagagctgcctggtggggtaaagtccccagaaaggatctcatcgtcatgctcagggacactgacgtgaacaagcaggacaagcaaaagaggactgctctacatctggcctctgccaatgggaattcagaagtagtaaaactcctgctggacagacgatgtcaacttaatgtccttgacaacaaaaagaggacagctctgataaaggccgtacaatgccaggaagatgaatgtgcgttaatgttgctggaacatggcactgatccaaatattccagatgagtatggaaataccactctgcactacgctatctataatgaagataaattaatggccaaagcactgctcttatatggtgctgatatcgaatcaaaaaacaagcatggcctcacaccactgttacttggtgtacatgagcaaaaacagcaagtcgtgaaatttttaattaagaaaaaagcgaatttaaatgcactggatagatatggaagaactgctctcatacttgctgtatgttgtggatcagcaagtatagtcagccttctacttgagcaaaatattgatgtatcttctcaagatctatctggacagacggccagagagtatgctgtttctagtcatcatcatgtaatttgccagttactttctgactacaaagaaaaacagatgctaaaaatctcttctgaaaacagcaatccaggttgaagaagaaatgaagaagcatgaaagtaataatgtgggattactagaaaacctgactaatggtgtcactgctggcaatggtgataatggattaattcctcaaaggaagagcagaacacctgaaaatcagcaatttcctgacaacgaaagtgaagagtatcacagaatttgtgaattactttctgactacaaagaaaagcagatgccaaaatactcttctgaaaacagcaacccagaacaagacttaaagctgacatcagaggaagagtcacaaaggcttaaaggcagtgaaaatggccagccagagaaaagatctcaagaaccagaaataaataaggatggtgatagagagctagaaaattttatggctatcgaagaaatgaagaagcacagaagtactcatgtcggattcccagaaaacctgactaatggtgccactgctggcaatggtgatgatggattaattcctccaaggaagagcagaacacctgaaagccagcaatttcctgacactgagaatgaagagtatcacagtgacgaacaaaatgatactcagaagcaattttgtgaagaacagaacactggaatattacacgatgagattctgattcatgaagaaaagcagatagaagtggttgaaaaaatgaattctgagctttctcttagttgtaagaaagaaaaagacatcttgcatgaaaatagtacgttgcgggaagaaattgccatgctaagactggagctagacacaatgaaacatcagagccagctaagagaaaagaaatatttggaggatattgaaagtgtgaaaaaaaggaatgataatcttttaaaggctctacaattgaatgagctcaccatggatgatgataccgctgtgctcgtcattgacaac

SEQ ID NO: 40133 - DNA, 2147 bp, Artificial Sequence
  derived and/or modified sequence
ggtagacgcgatctgttggctactactggcttctcctggctgttaaaagcagatggtggttgaggttgattccatgccggctgcctcttctgtgaagaagccatttggtctcaggagcaagatgggcaagtggtgctgccgttgcttcccctgctgcagggagagcggcaagagcaacgtgggcacttctggagaccacgacgactctgctatgaagacactcaggagcaagatgggcaagtggtgccgccactgcttcccctgctgcagggggagtggcaagagcaacgtgggcgcttctggagaccacgacgactctgctatgaagacactcaggaacaagatgggcaagtggtgctgccactgcttcccctgctgcagggggagcagcaagagcaaggtgggcgcttggggagactacgatgacagtgccttcatggagcccaggtaccacgtccgtggagaagatctggacaagctccacagagctgcctggtggggtaaagtccccagaaaggatctcatcgtcatgctcagggacactgacgtgaacaagcaggacaagcaaaagaggactgctctacatctggcctctgccaatgggaattcagaagtagtaaaactcctgctggacagacgatgtcaacttaatgtccttgacaacaaaaagaggacagctctgataaaggtatgcagtagccaactatatcagcatgaggccgtacaatgccaggaagatgaatgtgcgttaatgttgctggaacatggcactgatccaaatattccagatgagtatggaaataccactctgcactacgctatctataatgaagataaattaatggccaaagcactgctcttatatggtgctgatatcgaatcaaaaaacaagcatggcctcacaccactgttacttggtgtacatgagcaaaaacagcaagtcgtgaaatttttaattaagaaaaaagcgaatttaaatgcactggatagatatggaagaactgctctcatacttgctgtatgttgtggatcagcaagtatagtcagccttctacttgagcaaaatattgatgtatcttctcaagatctatctggacagacggccagagagtatgctgtttctagtcatcatcatgtaatttgccagttactttctgactacaaagaaaaacagatgctaaaaatctcttctgaaaacagcaatccagaaaatgtctcaagaaccagaaataaataaggatggtgatagagaggttgaagaagaaatgaagaagcatgaaagtaataatgtgggattactagaaaacctgactaatggtgtcactgctggcaatggtgataatggattaattcctcaaaggaagagcagaacacctgaaaatcagcaatttcctgacaacgaaagtgaagagtatcacagaatttgtgaattactttctgactacaaagaaaagcagatgccaaaatactcttctgaaaacagcaacccagaacaagacttaaagctgacatcagaggaagagtcacaaaggcttaaaggcagtgaaaatggccagccagagaaaagatctcaagaaccagaaataaataaggatggtgatagagagctagaaaattttatggctatcgaagaaatgaagaagcacagaagtactcatgtcggattcccagaaaacctgactaatggtgccactgctggcaatggtgatgatggattaattcctccaaggaagagcagaacacctgaaagccagcaatttcctgacactgagaatgaagagtatcacagtgacgaacaaaatgatactcagaagcaattttgtgaagaacagaacactggaatattacacgatgagattctgattcatgaagaaaagcagatagaagtggttgaaaaaatgaattctgagctttctcttagttgtaagaaagaaaaagacatcttgcatgaaaatagtacgttgcgggaagaaattgccatgctaagactggagctagacacaatgaaacatcagagccagctaagagaaaagaaatatttggaggatattgaaagtgtgaaaaaaaggaatgataatcttttaaaggctctacaattgaatgagctcaccatggatgatgataccgctgtgctcgtcattgacaac

SEQ ID NO: 40134 - DNA, 3228 bp, Artificial Sequence
  derived and/or modified sequence
atggttgtagaggtcgattccatgccagccgcctcctcagtcaagaagcccttcggtttacggtccaaaatgggaaaatggtgctgccgatgttttccatgctgcagggaaagtggaaaatccaacgtggggacttccggtgaccacgatgatagtgctatgaagaccttaaggtccaagatgggaaaatggtgtcgccactgtttcccatgttgccggggaagcggcaagtcaaacgtcggcgcaagcggggaccatgatgactctgccatgaagacactgagaaataagatgggaaaatggtgttgccattgtttcccatgttgccggggctcctcaaaatcaaaagtgggagcatggggagactacgacgacagtgcgttcatggaaccacgataccacgtgaggggggaagacttggacaagctccaccgggccgcctggtggggcaaagtccccagaaaagacctgattgtgatgctgagagacactgacgtcaataaacaggataagcagaaaagaaccgcactccacctggcttccgccaatggaaactctgaggttgttaaactcctgttagaccggcgttgccagcttaacgttttggacaataaaaaacgtactgccctgatcaaggccgtgcagtgccaggaggatgaatgcgcacttatgttgctagagcatggaacagatccaaacatacccgacgagtatggaaacacgacactccattatgcaatatacaacgaggacaagttgatggctaaggctcttctcctgtacggcgccgacattgagagcaagaataaacacggcctgaccccactcctgcttggagtgcacgagcagaaacagcaagtcgtgaaattcttgatcaaaaagaaagccaacctgaacgctctagatagatacggcaggacagctttgattttggccgtgtgctgtggatcagcaagcattgtttccctcttgcttgagcaaaatatcgatgtcagctcccaagacttgagcggccagactgctcgcgagtacgccgtaagctctcatcaccacgtaatctgccagctgctatccgattataaagagaaacagatgcttaaaatatcatctgaaaacagtaatccagagcaggacctcaagctgacgagcgaagaggagagtcagagatttaagggaagtgagaacagccaacccgaaaagatgagccaagaacccgaaattaacaaggacggcgaccgtgaggtggaggaggagatgaaaaagcacgaaagcaacaatgtgggcttgttagaaaatctcacaaatggcgtaacagcaggcaatggcgacaatgggctgattccccagcggaagtcccgcacgccagagaatcaacagttcccagacaatgagtccgaagagtatcacagaatctgtgaactcctctccgactataaggagaagcaaatgcccaagtatagttccgagaactctaacccagagcaagacctgaaattaacttccgaagaggagtcgcaacgactgaagggcagcgagaacgggcaaccagagaagcggagccaggaaccggagattaataaagatggtgaccgcgagctcgaaaacttcatggccattgaggagatgaagaaacaccgttccactcacgttggattccctgaaaatctgaccaacggggctacagccggtaacggagatgatggattaatcccgccaagaaaatcccggaccccagagtctcagcagtttcctgacactgagaatgaggaatatcatagcgacgaacagaacgacacacagaaacagttctgcgaggagcaaaacaccgggatactccatgacgaaattctgattcacgaggagaaacagatagaggtagttgagaaaatgaactcagaactgtctttgtcctgcaaaaaagagaaggacattttacatgaaaactccaccctccgggaagaaatcgccatgttgaggcttgaactggatacaatgaagcatcagtcccagctgagagaaaagaaatacttggaggacattgagtcagtgaaaaaacgaaatgacaatcttctcaaagccctccaattgaatgaacttaccatggacgacgatactgcggtgctggtgatcgacaacggatctggcatgtgcaaggctggtttcgctggtgacgacgcgcccagagcagtgttcccctctatagtgggccggcccagacaacagggtatgatgggcggaatgcatcaaaaggagagctatgtgggcaaagaggcccaaagtaaaagagggattttaacactgaaataccctatggagcatgggattattactaactgggacgatatggagaaaatctggcaccatacattctacaacgagttgagagttgcccccgaggagcaccccgtgctgcttaccgaggcaaccctgaatccaaaggctaacagagaaaaaatgacccagataatgtttgaaacttttaacactccagccatgtacgtcgccatacaggcagttttatccttatacacgagcggaaggacgaccggcattgtgatggactccggagatggcgtaacacatacagtccccatttacgaaggcaacgcgctaccccatgcgacccttcggttggatctcgccggaagagaactaccagactacctcatgaagattctgacagaacacggttacagattcaccacaatggctgagagagagatcgttcgggacatcaaagagaaactgtgctacgttgcattggactttgagcaagagatggcaaccgtggcttctagcagctcgttagagaagtcttatgagctgcctgatggtcaagtgattactatcggcaacgaaaggtttcggtgcccagaagcgctgtttcagccctgttttctcggcatggaatcatgtggtattcacgaaactactttcaatagcatcatgaaatcggacgtggacattcgaaaggatctgtatactaatactgtgttgtcaggggggaccactatgtaccctggtatggcacaccggatgcagaaggaaatcgctgcactggccccttcaatgatgaaaattaggattatcgcacccccgaagagaaaatactctgtttgggtcggggggagcatcctggcctcactatccaccttccagcagatgtggatctctaaacaggagtatgatgagagcggaccgtctatagtccatcgcaagtgtctctag

SEQ ID NO: 40135 - DNA, 3228 bp, Artificial Sequence
  derived and/or modified sequence
atggtggtggaggtggacagcatgcctgctgccagctctgtgaagaagcccttcggcctgcggagcaagatgggcaagtggtgctgccgctgcttcccctgctgccgggagagcggcaagagcaatgtgggcaccagcggggaccatgatgacagcgccatgaagaccctgcggagcaagatgggcaagtggtgccgccactgcttcccctgctgccggggcagcggcaagagcaatgtgggcgccagcggggaccatgatgattctgccatgaagaccctgaggaacaagatgggcaagtggtgctgccactgcttcccctgctgccggggcagcagcaagagcaaggtgggcgcctggggagactatgatgacagcgccttcatggagccccgctaccacgtgcggggggaggacctggacaagctgcaccgggccgcctggtggggcaaggtgcccaggaaggacctgattgtgatgctgcgggacacagatgtgaacaagcaggacaagcagaagaggacagccctgcacctggccagcgccaatggaaacagcgaggtggtgaagctgctgctggaccggcgctgccagctgaatgtgctggacaacaagaagaggacagccctgatcaaggctgtgcagtgccaggaggatgaatgtgccctgatgctgctggagcacggcacagaccccaacatcccagatgaatatggcaacaccaccctgcactacgccatctacaatgaagacaagctgatggccaaggccctgctgctgtatggagctgacatcgagagcaagaacaagcacggcctgacccccctgctgctgggcgtgcatgagcagaagcagcaggtggtgaagttcctgatcaagaagaaggccaacctgaatgccctggacagatatggccgcacagccctgatcctggccgtgtgctgcggcagcgccagcatcgtgtccctgctgctggagcagaacattgatgtgagcagccaggacctgagcggccagacagcccgggagtatgctgtgagcagccaccaccacgtgatctgccagctgctgagtgactacaaggagaagcagatgctgaagatcagcagcgagaacagcaaccctgagcaggacctgaagctgaccagcgaggaggagagccagcgcttcaagggcagcgagaacagccagcctgagaagatgagccaggagcctgagatcaacaaggatggagaccgggaggtggaggaggagatgaagaagcatgagagcaacaacgtgggcctgctggagaacctgaccaatggagtgacagctggaaatggagacaatggcctcatcccccagaggaagagcaggaccccagagaaccagcagttcccagacaatgaaagtgaggagtaccaccgcatctgtgagctgctgagtgactacaaggagaagcagatgcccaagtacagcagcgagaacagcaaccctgagcaggacctgaagctgaccagcgaggaggagagccagaggctgaagggctctgaaaatggccagcctgagaagaggagccaggagcctgagatcaacaaggatggagaccgggagctggagaacttcatggccatcgaggagatgaagaagcacaggagcacccacgtgggcttccctgagaacctgaccaacggggccacagctggaaatggagatgatggcctcatcccccccaggaagagcaggaccccagagagccagcagttcccagacacagaaaatgaggagtaccacagtgatgagcagaatgacacccagaagcagttctgtgaggagcagaacacaggcatcctgcatgatgagatcctgattcatgaggagaagcagatcgaggtggtggagaagatgaacagcgagctgagcctgagctgcaagaaggagaaggacatcctgcacgagaacagcaccctgcgggaggagatcgccatgctgcggctggagctggacaccatgaagcaccagagccagctgcgggagaagaagtacctggaggacatcgagagcgtgaagaagagaaatgacaacctgctgaaggccctgcagctgaatgagctgaccatggatgatgacacagctgtgctggtgattgacaatggcagcggcatgtgcaaggccggctttgctggagatgatgcccccagggctgtgttccccagcatcgtgggccggccccggcagcagggcatgatgggcggcatgcaccagaaggagagctatgtgggcaaggaggcccagagcaagaggggcatcctgaccctgaagtaccccatggagcacggcatcatcaccaactgggatgacatggagaagatctggcaccacaccttctacaatgagctgcgggtggcccctgaggagcaccctgtgctgctgacagaggccaccctgaaccccaaggccaaccgggagaagatgacccagatcatgtttgagaccttcaacaccccagccatgtatgtggccatccaggccgtgctgagcctgtacaccagcggccgcaccactggaattgtgatggattctggagatggagtgacccacacagtgcccatctatgagggcaatgccctgccccacgccaccctgcggctggacctggccggccgggagctgcctgactacctgatgaagatcctgacagagcacggctaccgcttcaccaccatggccgagcgggagatcgtgcgggacatcaaggagaagctgtgctacgtggccctggactttgagcaggagatggccaccgtggccagcagcagcagcctggagaagagctatgagctgcctgatggccaggtgatcaccatcggaaatgaacgcttccgctgcccagaggccctcttccagccctgcttcctgggcatggagagctgtggcatccacgagaccaccttcaacagcatcatgaagagtgatgtggacatcaggaaggacctgtacaccaacacagtgctgagcggcggcaccaccatgtacccaggcatggcccacaggatgcagaaggagattgctgccctggcccccagcatgatgaagatccgcatcatcgccccacccaagaggaagtacagcgtgtgggtgggcggcagcatcctggccagcctgagcaccttccagcagatgtggatcagcaagcaggagtatgatgaaagtggccccagcatcgtgcacaggaagtgcctgtag

SEQ ID NO: 40136 - DNA, 1131 bp, Artificial Sequence
  derived and/or modified sequence
atggtggtggaggtggacagcatgcctgctgccagctctgtgaagaagcccttcggcctgcggagcaagatgggcaagtggtgctgccgctgcttcccctgctgccgggagagcggcaagagcaatgtgggcaccagcggggaccatgatgacagcgccatgaagaccctgcggagcaagatgggcaagtggtgccgccactgcttcccctgctgccggggcagcggcaagagcaatgtgggcgccagcggggaccatgatgattctgccatgaagaccctgaggaacaagatgggcaagtggtgctgccactgcttcccctgctgccggggcagcagcaagagcaaggtgggcgcctggggagactatgatgacagcgccttcatggagccccgctaccacgtgcggggggaggacctggacaagctgcaccgggccgcctggtggggcaaggtgcccaggaaggacctgattgtgatgctgcgggacacagatgtgaacaagcaggacaagcagaagaggacagccctgcacctggccagcgccaatggaaacagcgaggtggtgaagctgctgctggaccggcgctgccagctgaatgtgctggacaacaagaagaggacagccctgatcaaggctgtgcagtgccaggaggatgaatgtgccctgatgctgctggagcacggcacagaccccaacatcccagatgaatatggcaacaccaccctgcactacgccatctacaatgaagacaagctgatggccaaggccctgctgctgtatggagctgacatcgagagcaagaacaagcacggcctgacccccctgctgctgggcgtgcatgagcagaagcagcaggtggtgaagttcctgatcaagaagaaggccaacctgaatgccctggacagatatggccgcacagccctgatcctggccgtgtgctgcggcagcgccagcatcgtgtccctgctgctggagcagaacattgatgtgagcagccaggacctgagcggccagacagcccgggagtatgctgtgagcagccaccaccacgtgatctgccagctgctgagtgactacaaggagaagcagatgctgaagatcagcagcgagaacagcaaccctggatag

SEQ ID NO: 40137 - DNA, 1185 bp, Artificial Sequence
  derived and/or modified sequence
atggtggtggaggtggacagcatgcctgctgccagctctgtgaagaagcccttcggcctgcggagcaagatgggcaagtggtgctgccgctgcttcccctgctgccgggagagcggcaagagcaatgtgggcaccagcggggaccatgatgacagcgccatgaagaccctgcggagcaagatgggcaagtggtgccgccactgcttcccctgctgccggggcagcggcaagagcaatgtgggcgccagcggggaccatgatgattctgccatgaagaccctgaggaacaagatgggcaagtggtgctgccactgcttcccctgctgccggggcagcagcaagagcaaggtgggcgcctggggagactatgatgacagcgccttcatggagccccgctaccacgtgcggggggaggacctggacaagctgcaccgggccgcctggtggggcaaggtgcccaggaaggacctgattgtgatgctgcgggacacagatgtgaacaagcaggacaagcagaagaggacagccctgcacctggccagcgccaatggaaacagcgaggtggtgaagctgctgctggaccggcgctgccagctgaatgtgctggacaacaagaagaggacagccctgatcaaggtgtgcagcagccagctgtaccagcatgaagctgtgcagtgccaggaggatgaatgtgccctgatgctgctggagcacggcacagaccccaacatcccagatgaatatggcaacaccaccctgcactacgccatctacaatgaagacaagctgatggccaaggccctgctgctgtatggagctgacatcgagagcaagaacaagcacggcctgacccccctgctgctgggcgtgcatgagcagaagcagcaggtggtgaagttcctgatcaagaagaaggccaacctgaatgccctggacagatatggccgcacagccctgatcctggccgtgtgctgcggcagcgccagcatcgtgtccctgctgctggagcagaacattgatgtgagcagccaggacctgagcggccagacagcccgggagtatgctgtgagcagccaccaccacgtgatctgccagctgctgagtgactacaaggagaagcagatgctgaagatcagcagcgagaacagcaacccagaaaatgtgtccaggaccaggaacaagtag

SEQ ID NO: 40138 - DNA, 3228 bp, Artificial Sequence
  derived and/or modified sequence
atggtggtggaggtggacagcatgcccgccgccagcagcgtgaagaaacctttcgggctgagatctaaaatgggaaaatggtgctgtagatgtttcccatgttgcagggagagcggtaagagcaacgtgggcacttccggcgaccacgacgactccgctatgaagaccctccgctcaaaaatgggtaaatggtgtcgccattgtttcccgtgttgtcggggctcagggaaatccaatgtgggcgcctcaggcgaccacgatgacagcgccatgaaaacgcttcgaaataagatgggaaaatggtgctgtcattgcttcccctgctgtcggggctcctctaagtccaaggtcggagcatggggggattatgatgactctgcctttatggaaccgagatatcatgtcaggggtgaggatctcgataaactgcatagagcagcttggtggggtaaggtgcctcgtaaagacctgatcgtgatgctgcgagacactgatgtaaataagcaggataagcaaaagcgaactgcccttcatctggcttctgctaacggaaattctgaggtcgtgaaattactactggacaggagatgccagctcaatgttttggataataaaaaacggacggcgctcattaaagccgtccagtgccaggaggatgagtgcgctctaatgctcttggagcacggaacggacccaaacattcccgatgaatatggaaacactactctgcactacgcaatttataacgaggataaactcatggcgaaggctctgctgctttatggggctgacatcgaatcgaagaataagcatggactgacaccacttctgctgggcgtgcatgagcaaaaacagcaggttgtcaaatttctgatcaagaagaaggcaaatctcaacgccctggacaggtatgggcgaacagccttgatacttgctgtttgctgcggtagtgcttctatcgtgtcattactgcttgagcagaatattgacgtctccagccaggatctttccggccagacagcaagggaatatgcagtctctagccaccatcacgtgatatgccaattacttagcgactacaaggagaagcagatgttaaagatatcatctgaaaacagcaaccccgagcaagacctcaagttgacctccgaggaagaatcacagcgattcaaagggagcgagaactcacaacctgaaaaaatgtctcaggaacccgagatcaacaaagacggagacagagaggtagaggaggagatgaagaagcatgaatcaaacaatgttggcctgctggaaaacctgacaaacggagtgactgcgggcaacggcgacaatggtctgatccctcagcgtaaaagccgtacccctgaaaaccagcagtttcctgacaacgagtccgaggagtatcacagaatctgcgaactgcttagcgattataaagagaaacagatgcctaagtattcttccgagaactccaaccccgagcaggacctaaagctgacctccgaagaagaatcacaacgcctcaagggcagtgaaaatggccagccagagaaaagatcacaggagcccgagatcaacaaagatggagatcgagaactggaaaattttatggctatcgaagagatgaaaaagcaccggagcacacacgtggggtttcccgagaatcttaccaatggcgcaactgccggcaacggtgatgacggactgattcccccacgcaaatccagaactcctgaatcacagcagtttcctgacacagagaatgaggagtatcactccgacgagcagaatgacacccagaaacagttttgtgaagaacagaacactggcatcctgcacgacgagatactgatccacgaggaaaagcaaatagaagtggtggaaaaaatgaacagcgaacttagcctgagttgcaagaaggagaaagacatcctgcatgaaaacagcacgcttcgggaggaaatcgccatgttgagactggagttggatacaatgaagcaccagtcacagctccgagaaaaaaaatatcttgaggacattgaatccgtgaaaaagagaaacgataatctgttaaaggcgcttcagctcaacgagctgacaatggatgatgacaccgccgtcttggtgatcgacaatggtagcggtatgtgtaaggctggattcgccggcgatgacgccccaagagccgtgttcccttccatcgtggggaggcctcgacagcaaggtatgatgggcggcatgcatcaaaaggaaagctatgtcggaaaagaggcccagtctaagcggggcatcctcaccctgaagtaccctatggagcatggaatcatcaccaactgggacgacatggagaagatttggcatcacacattctacaatgaactgcgggtcgcgcctgaagagcaccccgtgctgctcaccgaggcgaccctaaaccccaaggctaatagagaaaaaatgacacaaattatgttcgagacgtttaatacccctgcaatgtacgtggcgatccaggccgtccttagcctgtatacgtccggccggaccaccggaatagtcatggacagcggggacggcgtgacccatactgtgcccatctatgagggcaacgcattgccccatgctactctccggttggatctggcaggtcgcgaactgcccgactacttgatgaaaattttaactgagcatggatatagattcactacaatggcagagagagaaattgtgcgcgacatcaaggagaaactctgctacgtggccctggattttgaacaagagatggcgaccgtagcttcatcttcttccctggaaaagtcctatgagctgccagacggacaggtgattaccataggtaatgaacggttcaggtgtccagaagcgctcttccagccctgtttccttggaatggagtcctgcgggattcatgaaacaacctttaacagcatcatgaagtcagacgtagacatccgcaaagacttatatacaaataccgtcctctctggaggcaccacaatgtaccccggaatggcacacaggatgcagaaggagatcgcggcgctggcccccagcatgatgaagatccggattatcgcccccccaaaaagaaagtacagtgtctgggtgggcgggagcattctggcctcactgtcaacgtttcaacagatgtggatcagcaagcaagaatatgacgagtcaggtccctctatagtgcatcgaaagtgcttgtag

SEQ ID NO: 40139 - DNA, 1131 bp, Artificial Sequence
  derived and/or modified sequence
atggtggtggaggtggacagcatgcccgccgccagcagcgtgaagaagccttttgggttgcggtcgaagatggggaagtggtgctgccgttgttttccctgctgtagggagtccgggaaaagcaacgttggaaccagcggggaccatgacgattctgctatgaaaacattgcggtctaagatggggaagtggtgccgccactgctttccatgctgccggggatcaggcaaatcaaacgtgggcgcgagcggcgatcacgatgattcagcaatgaagacactcagaaataaaatgggaaaatggtgttgtcattgcttcccctgctgcaggggctcctccaaaagtaaagtgggtgcctggggcgattatgacgattctgcttttatggaaccaaggtaccatgtcagaggtgaagaccttgacaaactgcacagagccgcctggtggggaaaggtgcccagaaaagacctgattgttatgctcagagacacggacgtcaataaacaggacaagcaaaaacgaactgcactgcatcttgcttcagctaatgggaattctgaagtggtcaagctgctgctggacaggaggtgccaactgaatgtccttgacaacaagaaacgaaccgccctgatcaaggctgttcagtgccaggaggacgagtgcgccctcatgttgctagagcatggtactgaccccaatattcctgacgagtatggtaacaccaccctccactatgcaatttataacgaagataagctgatggctaaggccttgctgctgtacggagccgatattgaaagcaagaacaagcacggtctgaccccgctccttttgggtgtacatgagcaaaagcagcaagttgtcaagttcctgattaagaaaaaggctaaccttaatgcgttggataggtacggaaggactgccctcatccttgcagtttgttgcgggtctgctagcatcgtaagcctattattagagcagaacatcgacgtgtcttctcaggatctttcaggccagaccgccagggagtacgcagtcagctcccatcaccatgtaatctgccagctgttgtccgactacaaggaaaaacagatgttgaagatctcaagtgagaatagtaatccggggtag

SEQ ID NO: 40140 - DNA, 1185 bp, Artificial Sequence
  derived and/or modified sequence
atggtggtggaggtggacagcatgcccgccgccagcagcgtgaagaagccattcggcctgagaagtaaaatgggcaagtggtgttgccgctgcttcccatgctgtcgcgagagtggcaaaagtaatgtcgggaccagcggggatcatgacgactcggcaatgaagaccctgcgttctaagatggggaagtggtgccgccactgtttcccttgctgcagggggtcaggtaaatccaacgtgggggccagtggcgaccacgatgattcagctatgaaaacccttcggaacaagatgggcaagtggtgctgtcattgttttccctgctgcagggggagtagtaaaagcaaagtcggggcttggggagattacgatgacagtgccttcatggagccccggtaccatgtccggggcgaggacttggataagctgcaccgagctgcttggtgggggaaagtccctcgcaaagatctgattgtgatgctacgcgataccgacgtgaataagcaagacaagcagaagcgaacggccttacatctggcaagcgcaaacggaaactccgaagtggtgaaattactgcttgatcgtcgttgccagctgaatgtccttgataacaaaaaaaggacagctctgataaaagtgtgctcctcacagctatatcagcacgaagccgtccagtgccaagaggatgagtgcgccctcatgctgctggagcatgggaccgatcctaacatcccagatgaatacgggaacacgacactgcattatgctatctataacgaagacaaattaatggctaaggccctgctgctttacggtgcggatatcgaaagcaaaaacaaacatgggctgacccccttactgctgggcgtgcacgagcaaaaacagcaagtggtaaagttcctgatcaagaaaaaagcaaatcttaatgcacttgataggtacggccgcacagctctaatccttgccgtgtgctgtgggagtgcgtcaatagtgtctctgcttctcgagcagaatatcgatgtgagctcacaagatctttctggccagacagcccgagaatatgccgtctcatcccatcaccacgtgatctgccagttgctgtcggattacaaagaaaagcagatgctcaaaatctcatcggaaaattcgaatcccgagaacgtcagtcgcacaagaaataaatag

SEQ ID NO: 40141 - DNA, 3228 bp, Artificial Sequence
  derived and/or modified sequence
atggtggtggaggtggacagcatgcccgccgccagcagcgtgaagaagccgtttggactgaggagcaagatgggaaagtggtgttgtcggtgctttccctgctgccgcgaatccgggaaatccaacgtcgggacctctggggaccatgacgatagcgctatgaaaacccttcgcagtaaaatggggaaatggtgtcggcactgctttccttgttgtcgcggttcaggcaaaagcaatgtcggggcctccggggaccacgacgactccgccatgaaaacactccgaaacaagatgggaaaatggtgctgtcactgctttccttgctgcaggggctctagtaaatccaaggtcggtgcatggggagactacgatgatagtgcctttatggaaccacgctatcatgtgcgtggcgaggacctggacaagctgcacagagccgcatggtgggggaaggtcccgcgcaaggatttgattgtgatgctccgtgatacagatgtgaataaacaggataagcaaaaacggaccgccttacacctggcctccgcaaatggcaactcagaggttgtcaagttactcctggaccggcggtgtcagcttaacgtgttggacaataaaaaaaggactgctttgattaaagccgtgcaatgccaggaggatgaatgtgccctaatgttgctggaacacggcaccgaccccaacattccagatgaatacggtaacactaccctgcattacgcaatctataatgaggataagcttatggcaaaagccctgcttctgtacggtgccgacattgaaagcaagaataaacatgggctgacccccctcctgctaggggtccacgaacagaaacagcaggttgtgaagtttctaattaaaaagaaagctaatctcaatgcactcgaccggtatggcagaacggccttaatcctggctgtttgctgcggctcggcttcaattgtttccctgcttctggagcagaacatagatgtatcgtcacaggacctgtccggccaaacggcacgggaatatgctgttagtagtcatcatcacgtgatttgccagcttctgagcgactacaaagaaaagcagatgttgaagataagcagcgagaactcaaaccccgagcaagatcttaagcttacctccgaagaggaaagccagcgttttaagggaagcgaaaattcccagcctgaaaagatgagtcaggagccagaaattaacaaagacggcgacagggaagtagaggaggagatgaagaaacatgaatcaaataacgtgggcctgctagaaaacctgactaatggagtgaccgcggggaacggtgacaacgggttgattccacagcgaaagagcagaacacccgaaaatcaacaattccctgataatgagtccgaggagtatcaccggatttgtgaactgctgagtgactacaaggaaaaacagatgcccaaatattcttcggagaattcgaacccagagcaggacctaaagctgacctcggaagaggagtctcaaaggcttaaagggtctgaaaacggccagcctgagaagcgcagccaggagcctgaaattaataaagatggagaccgcgagctcgagaacttcatggcgattgaggaaatgaagaaacaccgctccacccacgtgggctttcctgagaatctcacaaatggcgcaaccgctggcaatggcgacgatgggctcataccaccaaggaagtctcgcacccctgaatcccagcagttccctgatacagagaacgaagagtaccattcagatgaacaaaatgacacacagaagcagttctgtgaggagcagaacaccgggattctgcatgacgagatcctaatccacgaagagaaacagatcgaggtcgtggagaagatgaattctgagttaagcctctcttgcaagaaggagaaagatattttgcacgaaaattctacgctgcgggaggagatagccatgctgcgactggagttggacactatgaaacatcaatcccagctaagagagaagaaatacctggaagatatcgaaagtgtcaaaaaacggaatgacaacctccttaaggcactccaactcaacgagctgacaatggatgacgatacagccgtgctcgtcatcgacaatgggagtggaatgtgcaaggccggcttcgccggggacgacgcccccagagcagtgtttccatcaatcgtgggaagacctcggcagcaggggatgatgggcggtatgcaccagaaagaatcatacgtaggtaaagaagcacagtcaaagaggggaatcctcacccttaagtaccccatggaacacggaatcataactaactgggacgacatggagaagatctggcaccacacattttacaatgaactacgcgtagcccctgaagagcacccagtgctgcttaccgaggcaacacttaacccgaaagccaaccgagagaagatgactcaaataatgtttgaaacattcaatactcctgccatgtacgtggccatccaggcggtcctctctttgtatacgtcgggacgtactacggggatagtgatggattccggtgatggtgtgacacacactgtccctatctacgagggtaacgccctcccgcacgcaaccctccgtctagacctggcaggcagggaactgcctgactacctgatgaagattctgacggaacatgggtataggtttaccacaatggccgagcgtgaaattgttagagacattaaggagaagctgtgttacgtggctcttgacttcgagcaggagatggccacagtcgcttcttcatcgtctcttgaaaaaagctacgagttaccagacggacaggtgatcacaatcggcaacgagcgtttccgctgtccagaagcactgttccagccctgtttcttgggaatggagtcctgtggcatacacgagacgacttttaactctattatgaaatctgacgtcgacatcaggaaagatctgtacactaatacagttctgagcggcggtactaccatgtatcccgggatggcccataggatgcagaaagaaatcgctgcattggcaccttccatgatgaaaatccgtatcattgcccccccgaagaggaaatactcagtgtgggtggggggcagtatactggcatccctgtctactttccaacagatgtggataagtaaacaagaatacgacgagtccggaccctccatcgtgcatcggaagtgtctgtag

SEQ ID NO: 40142 - DNA, 3842 bp, Artificial Sequence
  derived and/or modified sequence
gcgggagcttctcctgccaggcaggaagacgagtagaagggagcggcatgctggaggctggagcctgagcccctggggctcgccttgctgtgtttggtggtgacgtgggacactgcagctcggccagagtggtagaaatgtcctggtgtaggcttttctggctttgcccgtctagctgctccaagccaggctggaggaggaggagaaggaatcacctgtggtacgctggagcctgcatgtggcgtgactctgcagctcgcctcgtgtgactgatggcagccacggagactgcagctcgacaggagtgattggaaacccggagttacctgctagttggtgaaactggttggtagacgcgatctgttggctactactggcttctcctggctgttaaaagcagatggtggttgaggttgattccatgccggctgcctcttctgtgaagaagccatttggtctcaggagcaagatgggcaagtggtgctgccgttgcttcccctgctgcagggagagcggcaagagcaacgtgggcacttctggagaccacgacgactctgctatgaagacactcaggagcaagatgggcaagtggtgccgccactgcttcccctgctgcagggggagtggcaagagcaacgtgggcgcttctggagaccacgacgactctgctatgaagacactcaggaacaagatgggcaagtggtgctgccactgcttcccctgctgcagggggagcagcaagagcaaggtgggcgcttggggagactacgatgacagtgccttcatggagcccaggtaccacgtccgtggagaagatctggacaagctccacagagctgcctggtggggtaaagtccccagaaaggatctcatcgtcatgctcagggacactgacgtgaacaagcaggacaagcaaaagaggactgctctacatctggcctctgccaatgggaattcagaagtagtaaaactcctgctggacagacgatgtcaacttaatgtccttgacaacaaaaagaggacagctctgataaaggccgtacaatgccaggaagatgaatgtgcgttaatgttgctggaacatggcactgatccaaatattccagatgagtatggaaataccactctgcactacgctatctataatgaagataaattaatggccaaagcactgctcttatatggtgctgatatcgaatcaaaaaacaagcatggcctcacaccactgttacttggtgtacatgagcaaaaacagcaagtcgtgaaatttttaattaagaaaaaagcgaatttaaatgcactggatagatatggaagaactgctctcatacttgctgtatgttgtggatcagcaagtatagtcagccttctacttgagcaaaatattgatgtatcttctcaagatctatctggacagacggccagagagtatgctgtttctagtcatcatcatgtaatttgccagttactttctgactacaaagaaaaacagatgctaaaaatctcttctgaaaacagcaatccagaacaagacttaaagctgacatcagaggaagagtcacaaaggttcaaaggcagtgaaaatagccagccagagaaaatgtctcaagaaccagaaataaataaggatggtgatagagaggttgaagaagaaatgaagaagcatgaaagtaataatgtgggattactagaaaacctgactaatggtgtcactgctggcaatggtgataatggattaattcctcaaaggaagagcagaacacctgaaaatcagcaatttcctgacaacgaaagtgaagagtatcacagaatttgtgaattactttctgactacaaagaaaagcagatgccaaaatactcttctgaaaacagcaacccagaacaagacttaaagctgacatcagaggaagagtcacaaaggcttaaaggcagtgaaaatggccagccagagaaaagatctcaagaaccagaaataaataaggatggtgatagagagctagaaaattttatggctatcgaagaaatgaagaagcacagaagtactcatgtcggattcccagaaaacctgactaatggtgccactgctggcaatggtgatgatggattaattcctccaaggaagagcagaacacctgaaagccagcaatttcctgacactgagaatgaagagtatcacagtgacgaacaaaatgatactcagaagcaattttgtgaagaacagaacactggaatattacacgatgagattctgattcatgaagaaaagcagatagaagtggttgaaaaaatgaattctgagctttctcttagttgtaagaaagaaaaagacatcttgcatgaaaatagtacgttgcgggaagaaattgccatgctaagactggagctagacacaatgaaacatcagagccagctaagagaaaagaaatatttggaggatattgaaagtgtgaaaaaaaggaatgataatcttttaaaggctctacaattgaatgagctcaccatggatgatgataccgctgtgctcgtcattgacaacggctctggcatgtgcaaggccggctttgcgggcgacgatgccccccgggctgtcttcccttccatcgtggggcgccccaggcagcagggcatgatggggggcatgcatcagaaagagtcctatgtgggcaaggaggcccagagcaaaagaggcatcctgaccctgaagtaccccatggaacacggcatcatcaccaactgggatgacatggagaagatctggcaccacaccttctacaacgagctgcgtgtggctcccgaggagcaccccgtcctgctgaccgaggccaccctgaaccctaaggccaaccgcgagaagatgacccagatcatgtttgagaccttcaacaccccagccatgtacgtggccatccaggctgtgctgtccctgtacacctctggccgtactactggcatcgtgatggactctggtgacggggtcacccacactgtgcccatctatgaggggaatgccctcccccatgccaccctgcgcctagacctggctgggcgggaactgcctgactacctcatgaagatcctcaccgagcatggctataggttcaccaccatggccgagcgggaaatcgtgcgtgacatcaaagagaagctgtgctatgttgccctggacttcgagcaggagatggccacggtggcctccagctcctccctagagaagagctacgagctgcccgatggccaggtcatcaccatcggcaacgagcggttccgctgccccgaggcgctcttccagccttgcttcctgggcatggaatcctgtggcatccatgaaactaccttcaactccatcatgaagtctgatgtggacatccgcaaagacctgtacaccaacacagtgctgtctggcggcaccaccatgtaccctggcatggcccacagaatgcagaaggagatcgctgccctggcgcctagcatgatgaagatcaggatcattgctcctcccaagcgcaagtactccgtgtgggtcggtggctccatcctggcctcgctgtccaccttccagcagatgtggatcagcaagcaggagtatgatgagtcaggcccctccattgtccaccgcaaatgcttgtaggtggactctgacttagttgcgttacaccctttcttgacaaaaccaaacttctcagaaaacaacatgagattggcatggctttatttgttttcttgtttcattttttgttttgttttttattggcttgactcaggatttaaaaaccggaatggtgaaggtgacagcagtcggttggaggaagcttcctccaaagttctacaatgtggccaaggac

SEQ ID NO: 40143 - DNA, 3228 bp, Artificial Sequence
  derived and/or modified sequence
atggtggtggaggtggactcaatgcccgcagctagtagcgtgaaaaagccatttggccttcgaagcaagatgggaaaatggtgttgtaggtgcttcccatgctgtcgcgagagcgggaaatcaaatgtgggaacatccggcgatcacgatgatagcgctatgaaaacactgagatccaaaatgggtaaatggtgccgacattgtttcccctgttgccgcggaagcggcaagtccaacgtcggggcttctggtgatcatgacgattctgctatgaaaacactcaggaacaaaatgggaaagtggtgttgccattgcttcccttgttgcagagggagctcaaaatccaaggtgggcgcatggggcgattacgacgactccgcatttatggaaccacgctaccacgtcaggggagaagacctcgacaaattgcaccgagcagcttggtggggcaaagtgccgaggaaggacttgatcgttatgctcagggacaccgatgtgaataagcaagataagcagaaaagaacagcactgcatctggcttcggctaacggcaactctgaggtggtcaagctcctgcttgataggagatgccaattgaacgttctggataataagaaacgcacagcactgattaaagcggttcagtgtcaggaagatgaatgcgctcttatgctcctcgaacatgggactgatcctaacattcctgatgagtacggcaacactaccctgcattatgcaatctacaatgaagacaagctcatggctaaagccctgctgctgtatggcgctgatatagaatccaagaacaaacatgggctgacccccttgctgctgggagtgcatgagcaaaagcaacaggtcgtgaagttcttgatcaagaaaaaggccaatctgaacgcgctggatcgctatggtagaaccgctttgatccttgccgtgtgctgcggcagtgcaagcattgtatctttgcttttagaacaaaatattgatgtgtccagccaggacctctccgggcaaaccgcgagagagtacgctgtgagcagccatcaccacgtgatctgtcagcttctgtctgactataaggaaaaacagatgctgaagatatccagcgagaactccaaccccgagcaagatctcaagctcacgagcgaagaggagtcgcagcggtttaagggaagcgaaaacagccaacccgaaaagatgagccaagagccggaaatcaacaaggatggggatcgcgaggtggaagaggaaatgaaaaaacacgaatctaacaacgtaggcctgttagaaaatctgacgaacggggtgacagccggaaatggcgacaatggactgattccacagcgcaagtcacggacgcctgaaaaccagcagttccctgataatgaaagtgaggaatatcatcggatatgtgaactgctcagtgactataaggaaaaacagatgccaaaatattcctccgaaaacagcaaccctgaacaggacctcaagctcacttcagaggaggagtcacagcgactcaaaggttccgaaaatggccagcctgagaaaagatcccaggaacctgagattaacaaggacggtgaccgggaactggagaacttcatggccatcgaagagatgaaaaagcacagaagtactcacgtgggattccctgagaatctgacaaatggtgccaccgctggaaatggagatgatggcctcatcccccctcgcaagtctcgcacccccgagtcccagcagtttcccgatactgagaacgaggagtaccattcagacgagcagaatgacacccagaagcagttttgcgaggagcagaacacaggaattttgcacgacgaaattctgattcacgaagagaagcagattgaggttgtggagaagatgaacagcgagctgagcctttcatgtaagaaggagaaagacattctgcatgagaactcaacgctccgggaagaaatagccatgcttcgcctggaacttgacaccatgaagcaccagtcgcagctgcgcgagaaaaaatacctcgaagatattgaaagtgtgaagaagcggaatgataacctgttgaaagcactccagctgaacgagttaaccatggacgacgacaccgccgttctggtgattgacaacggtagtggcatgtgcaaggccggatttgcaggtgatgatgcaccgcgtgcagtgttcccaagcatcgtgggcagaccaagacagcagggaatgatggggggaatgcaccagaaggaaagttacgttggcaaggaggcgcagtctaagagaggaattttgactcttaaataccccatggagcacggtatcatcactaattgggacgacatggaaaagatctggcatcacacattctataatgagttgcgcgtggctcccgaagagcaccctgtgctattaacagaagccactttaaacccgaaggcaaaccgagaaaagatgactcagattatgtttgagaccttcaacacccctgccatgtacgtggccattcaggccgttctgtcgttgtacactagcggacggaccacaggcatagtaatggacagtggtgatggcgtgacacacactgtccccatttatgaggggaacgccctgccacatgcgacactgcggttagatctcgccggtcgcgaactgccggattatttgatgaagatactgaccgagcatggttatcgattcaccacaatggccgagagagagattgtccgcgacataaaagagaagctgtgctacgtcgctctggattttgagcaggaaatggccacagtcgcgtcctcctcttctctggagaagtcttacgagctcccggacggccaggtgattaccatcggaaacgaacggttccgctgtcctgaagctttgttccaaccttgtttcttgggaatggaatcgtgtggtatccacgagacaacctttaatagcatcatgaaaagcgacgttgacattcgaaaggacctatacacaaataccgtcttaagtggaggtacaactatgtaccctgggatggcccaccgtatgcagaaggaaatcgccgcactggccccttctatgatgaaaatccgaattattgctcccccaaagcgcaagtatagcgtgtgggttgggggtagcattttagcctctttgtcaactttccagcagatgtggatcagtaaacaggaatacgacgaatctggaccgtcaatcgtgcaccgcaagtgtctgtag

SEQ ID NO: 40144 - DNA, 1131 bp, Artificial Sequence
  derived and/or modified sequence
atggttgtggaggtagattcaatgcccgcagcctcatccgtgaaaaaacccttcggccttaggtccaaaatggggaagtggtgctgtcgctgcttcccgtgttgcagagaatccgggaagtcaaacgtcggcacgtccggtgatcacgatgattccgccatgaaaacgttgagatcaaagatggggaaatggtgccggcattgctttccctgctgtcgtggctccggtaaaagcaatgttggcgcttcaggtgatcacgacgatagcgcgatgaaaaccttgcgcaataaaatgggcaaatggtgctgtcattgcttcccttgctgccggggatcctctaaaagtaaggtgggagcatggggtgactacgatgatagcgcattcatggaaccccgatatcacgtgcgcggtgaagatctggataagcttcatcgggctgcatggtggggaaaagtgccacgcaaggacctgatagttatgctgagggacaccgacgtcaacaagcaggacaagcaaaagcgcacggctttgcatctggcttcagcgaacggcaacagcgaggtcgtgaagctactgttagaccgtaggtgccagcttaatgtcctagataacaagaagagaacggcactcatcaaagcagttcagtgccaagaagatgagtgtgcattaatgcttttggagcacggcactgatccaaatatccccgatgaatatggaaacaccaccctccattatgcgatatacaacgaagataagctgatggcgaaggccttgctgctctatggtgccgatatagagtcaaaaaataagcatgggttgacgccgttgctcttgggggtgcatgagcagaagcaacaggtggtgaaattcctaattaaaaagaaagcaaatctgaacgcgttagatcggtacgggaggactgcactgatcttggctgtgtgctgtggtagtgcttctatcgtctcattgttgctagaacagaacatcgatgtctccagtcaggacctctccggtcagactgccagagagtacgccgtgtcctcgcaccatcatgtcatctgccagttgctttccgattacaaagaaaagcagatgctgaagatctcgtccgaaaattctaatccaggatag

SEQ ID NO: 40145 - DNA, 1185 bp, Artificial Sequence
  derived and/or modified sequence
atggttgtggaggtcgattcaatgcctgctgccagttcagtcaagaaacctttcggtctgcggtccaagatgggcaaatggtgctgccggtgcttcccctgctgtagagagagcggaaagtctaatgttgggacctccggcgatcacgacgattccgctatgaagacactgcgatccaagatggggaagtggtgccggcactgcttcccttgctgtcgaggtagtggaaaatcgaacgtcggtgcctccggagaccacgacgattctgccatgaagactctccgaaacaaaatgggcaaatggtgttgtcattgttttccctgctgtagggggagcagtaaatccaaagtaggcgcatggggggactatgacgattctgccttcatggaacccaggtaccacgttcgcggtgaggatctggacaagctacatcgtgccgcttggtggggaaaagtcccccgtaaggatctgatcgtgatgctgcgtgataccgacgtcaataaacaagacaagcagaaaagaaccgccctccatctggccagcgctaatggtaactcggaagtggtcaaactccttctcgatcggaggtgccagctgaatgtcctggataataaaaagcgcaccgctctgatcaaggtgtgcagctcccagctgtaccaacatgaggccgtgcagtgtcaggaggacgagtgcgcccttatgctgctcgaacacgggacagaccccaatattcccgacgagtatggcaatactaccctgcactacgccatctataacgaagacaagctgatggccaaggctttgctattgtacggtgcagatattgaatccaagaacaaacatgggctgacccccctgcttctcggtgtacatgagcagaagcaacaggtggtgaaattcctcatcaagaaaaaagccaacttgaatgccctggacaggtacggcagaactgccttaattttggcagtgtgttgtgggagcgcgtctatcgtgtccctgctactggagcagaatatcgacgtgtcttcccaggatctgtcaggacagacagcgagagagtacgccgtcagttcccatcaccacgtcatctgtcaactcttgagcgactacaaggagaaacaaatgctgaaaatttcctctgagaattctaaccccgagaatgtcagccgcactcggaataagtag

SEQ ID NO: 40146 - DNA, 3228 bp, Artificial Sequence
  derived and/or modified sequence
atggtcgtagaggttgactcgatgcctgccgcttcctccgtaaaaaaaccattcggccttcgatcgaaaatgggtaaatggtgttgtcgctgtttcccttgctgcagggagtccggaaagtcaaatgtggggacgtccggggatcacgatgatagcgccatgaagacgttaaggtcgaagatgggtaaatggtgtcgccactgcttcccttgttgccggggtagtggaaaatctaatgttggggcatctggggaccatgatgattccgcaatgaagacactgcgcaataaaatgggcaagtggtgctgtcactgctttccatgctgcagaggctcatccaaaagtaaggtaggcgcttggggcgattacgacgactccgctttcatggagcccaggtatcacgtcagaggggaggacctcgataaacttcaccgcgcagcttggtggggtaaggtgccgaggaaggacttgattgtgatgctgcgcgatactgacgttaacaagcaggacaagcagaaaaggacagcccttcaccttgctagtgccaacgggaatagtgaggtggtgaaattattgctggacaggcggtgccagcttaacgtcctagacaacaagaaaagaactgcattgattaaggccgtccagtgtcaggaagacgaatgtgctcttatgctgctagagcacggtacagatccgaatattccagacgaatacggcaacaccactctccactatgcaatatacaacgaagacaaactgatggctaaagctcttctgctgtatggcgctgacatcgagtcaaagaataaacacggtctgacaccattgctgttgggggtccatgagcagaaacagcaggtcgtgaaattcctgattaaaaaaaaagctaatcttaacgcgctggaccggtacggccgtaccgctcttatcctggccgtttgttgcggcagtgcttccatagtctctctgctcttagagcagaatattgatgtctcttctcaggacctgtctggacagacggccagagagtacgccgtgtcaagtcaccaccatgtcatctgccaacttctcagtgattataaggagaagcaaatgttaaagattagcagcgagaatagcaatcccgagcaggatctgaagttgactagcgaagaagagtcccagaggttcaaggggagtgagaactcacagcccgagaagatgagccaggaacctgaaataaataaggacggcgatcgggaggtggaggaagagatgaaaaaacacgagagtaacaatgtcggacttctcgaaaacctgaccaatggggttacagctgggaacggggacaacggtcttatccctcagcgcaagtcacgtactccagaaaaccagcaatttcccgacaacgagtcagaggagtatcacagaatctgtgaactgttatccgactataaggagaagcagatgccaaaatacagcagtgagaactctaacccagagcaggacctcaagcttacctccgaggaagaaagccaaaggttaaagggctccgaaaacggccagcccgaaaagagatctcaagagcctgagattaacaaggatggggatcgcgaacttgaaaacttcatggctatagaggaaatgaaaaagcatcgcagcacccatgtcggctttcctgagaacctgactaacggggctaccgctggcaacggcgatgatggtctcattccacctaggaagagcaggacacctgagtctcaacagttccctgatacagaaaacgaggagtaccactctgacgagcagaacgatacacaaaagcagttttgtgaggaacaaaacaccggcatcctgcatgacgagattctgattcacgaagaaaagcagatagaggttgttgagaaaatgaactcggagctaagtttgtcatgcaaaaaggagaaggacatcttgcacgagaacagcacacttagagaggaaatagctatgttaaggctggaattggacaccatgaagcaccagagtcagttacgcgagaagaagtacctggaggatattgagagtgtgaaaaagagaaacgataacctgctcaaagccctgcagttgaacgagcttactatggatgatgacactgccgtgctggtgattgacaacggttccggcatgtgcaaggccggttttgccggagacgacgccccacgagccgtgtttccgagcattgtgggacggcctaggcaacaaggcatgatggggggaatgcaccaaaaggagtcctatgtggggaaggaagctcagtctaaaaggggcattttaacgctcaagtaccccatggagcacggtattattaccaattgggatgacatggaaaaaatctggcaccacacgttttataacgagctcagggtggcgcctgaggagcaccctgtgctcctcacagaggctacacttaatccgaaggcaaatcgtgaaaagatgacacagatcatgtttgagacattcaatacgcctgcgatgtatgtcgccatccaggctgttctgtcgttgtacacctccggcagaactacaggcatcgtgatggattccggcgacggagtgacgcacactgtgccaatttacgagggtaacgccctgccccatgccactcttcgactggacctggcaggacgagagctgcctgattacttaatgaagatacttactgagcatggctatagatttactactatggcagaacgcgagattgtgagagatattaaggagaagttgtgctacgtagctttggactttgagcaggagatggccacagtggctagtagctccagcctcgaaaagtcctacgaactgccagacggacaagtcataaccattggaaacgagaggtttcggtgtccggaggccctgtttcagccgtgcttcctaggcatggaatcttgtggcatccacgagaccacatttaattccattatgaaatccgacgtggatataaggaaagacttgtacaccaacacagtgctgagcggcggtaccacaatgtaccctggaatggcccatcgcatgcagaaggagatcgctgccctcgccccttccatgatgaaaattcgcataatcgccccacctaagcgcaaatattccgtttgggtggggggatccatactcgcctctctgtcaaccttccagcagatgtggatctcaaaacaggaatatgatgagagtggcccttccatcgtgcatcggaaatgcctgtag

SEQ ID NO: 40147 - protein, 363 aa, Artificial Sequence
  derived and/or modified sequence
MAPEATKNFLPLLDAVSRDFVSVLHRRIKKAGSGNYSGDISDDLFRFAFESITNVIFGERQGMLEEVVNPEAQRFIDAIYQMFHTSVPMLNLPPDLFRLFRTKTWKDHVAAWDVIFSKADIYTQNFYWELRQKGSVHHDYRGILYRLLGDSKMSFEDIKANVTEMLAGGVDTTSMTLQWHLYEMARNLKVQDMLRAEVLAARHQAQGDMATMLQLVPLLKASIKETLRLHPISVTLQRYLVNDLVLRDYMIPAKTLVQVAIYALGREPTFFFDPENFDPTRWLSKDKNITYFRNLGFGWGVRQCLGRRIAELEMTIFLINMLENFRVEIQHLSDVGTTFNLILMPEKPISFTFWPFNQEATQQ

SEQ ID NO: 40148 - protein, 286 aa, Artificial Sequence
  derived and/or modified sequence
MPSTRCSTPASPCSTFPQTCSVCSGPRPKDHVAAWDVIFSKADIYTQNFYWELRQKGSVHHDYRGILYRLLGDSKMSFEDIKANVTEMLAGGVDTTSMTLQWHLYEMARNLKVQDMLRAEVLAARHQAQGDMATMLQLVPLLKASIKETLRLHPISVTLQRYLVNDLVLRDYMIPAKTLVQVAIYALGREPTFFFDPENFDPTRWLSKDKNITYFRNLGFGWGVRQCLGRRIAELEMTIFLINMLENFRVEIQHLSDVGTTFNLILMPEKPISFTFWPFNQEATQQ

SEQ ID NO: 40149 - DNA, 1092 bp, Artificial Sequence
  derived and/or modified sequence
atggcccccgaggccaccaagaacttcctgcccctgctggacgccgtgagcagagacttcgtgagcgtgctgcacagaagaatcaagaaggccggcagcggcaactacagcggcgacatcagcgacgacctgttcagattcgccttcgagagcatcaccaacgtgatcttcggcgagagacagggcatgctggaggaggtggtgaaccccgaggcccagagattcatcgacgccatctaccagatgttccacaccagcgtgcccatgctgaacctgccccccgacctgttcagactgttcagaaccaagacctggaaggaccacgtggccgcctgggacgtgatcttcagcaaggccgacatctacacccagaacttctactgggagctgagacagaagggcagcgtgcaccacgactacagaggcatcctgtacagactgctgggcgacagcaagatgagcttcgaggacatcaaggccaacgtgaccgagatgctggccggcggcgtggacaccaccagcatgaccctgcagtggcacctgtacgagatggccagaaacctgaaggtgcaggacatgctgagagccgaggtgctggccgccagacaccaggcccagggcgacatggccaccatgctgcagctggtgcccctgctgaaggccagcatcaaggagaccctgagactgcaccccatcagcgtgaccctgcagagatacctggtgaacgacctggtgctgagagactacatgatccccgccaagaccctggtgcaggtggccatctacgccctgggcagagagcccaccttcttcttcgaccccgagaacttcgaccccaccagatggctgagcaaggacaagaacatcacctacttcagaaacctgggcttcggctggggcgtgagacagtgcctgggcagaagaatcgccgagctggagatgaccatcttcctgatcaacatgctggagaacttcagagtggagatccagcacctgagcgacgtgggcaccaccttcaacctgatcctgatgcccgagaagcccatcagcttcaccttctggcccttcaaccaggaggccacccagcagtag

SEQ ID NO: 40150 - DNA, 861 bp, Artificial Sequence
  derived and/or modified sequence
atgcccagcaccagatgcagcacccccgccagcccctgcagcaccttcccccagacctgcagcgtgtgcagcggccccagacccaaggaccacgtggccgcctgggacgtgatcttcagcaaggccgacatctacacccagaacttctactgggagctgagacagaagggcagcgtgcaccacgactacagaggcatcctgtacagactgctgggcgacagcaagatgagcttcgaggacatcaaggccaacgtgaccgagatgctggccggcggcgtggacaccaccagcatgaccctgcagtggcacctgtacgagatggccagaaacctgaaggtgcaggacatgctgagagccgaggtgctggccgccagacaccaggcccagggcgacatggccaccatgctgcagctggtgcccctgctgaaggccagcatcaaggagaccctgagactgcaccccatcagcgtgaccctgcagagatacctggtgaacgacctggtgctgagagactacatgatccccgccaagaccctggtgcaggtggccatctacgccctgggcagagagcccaccttcttcttcgaccccgagaacttcgaccccaccagatggctgagcaaggacaagaacatcacctacttcagaaacctgggcttcggctggggcgtgagacagtgcctgggcagaagaatcgccgagctggagatgaccatcttcctgatcaacatgctggagaacttcagagtggagatccagcacctgagcgacgtgggcaccaccttcaacctgatcctgatgcccgagaagcccatcagcttcaccttctggcccttcaaccaggaggccacccagcagtag

SEQ ID NO: 40151 - DNA, 1071 bp, Artificial Sequence
  derived and/or modified sequence
atgccatctaccagatgttccacaccagcgtccccatgctcaaccttcccccagacctgttccgtctgttcaggaccaagacctaaggaccatgtggctgcatgggacgtgattttcagtaaagctgacatatacacccagaacttctactgggaattgagacagaaaggaagtgttcaccacgattaccgtggcatcctctacagactcctgggagacagcaagatgtccttcgaggacatcaaggccaacgtcacagagatgctggcaggaggggtggacacgacgtccatgaccctgcagtggcacttgtatgagatggcacgcaacctgaaggtgcaggatatgctgcgggcagaggtcttggctgcgcggcaccaggcccagggagacatggccacgatgctacagctggtccccctcctcaaagccagcatcaaggagacactaagacttcaccccatctccgtgaccctgcagagatatcttgtaaatgacttggttcttcgagattacatgattcctgccaagacactggtgcaagtggccatctatgctctgggccgagagcccaccttcttcttcgacccggaaaattttgacccaacccgatggctgagcaaagacaagaacatcacctacttccggaacttgggctttggctggggtgtgcggcagtgtctgggacggcggatcgctgagctagagatgaccatcttcctcatcaatatgctggagaacttcagagttgaaatccaacacctcagcgatgtgggcaccacattcaacctcattctgatgcctgaaaagcccatctccttcaccttctggccctttaaccaggaagcaacccagcagtgatcagagaggatggcctgcagccacatgggaggaaggcccaggggtggggcccatggggtctctgcatcttcagtcgtctgtcccaagtcctgctcctttctgcccagcctgctcagcaggttgaatgggttctcagtggtcaccttcctcagctcagctgggccactcctcttcacccaccccatggagacaataaacagctgaaccatg

SEQ ID NO: 40152 - DNA, 1092 bp, Artificial Sequence
  derived and/or modified sequence
atggcccctgaagccacaaagaattttctgccacttctagacgcagttagcagagattttgtctccgtactccacagacgcatcaagaaggcgggaagcggaaactactccggagacatctctgatgatttgtttcgattcgcatttgaatctatcaccaacgtgatcttcggggaaaggcaggggatgctcgaggaagtggttaatcccgaagcccagcgattcatcgacgctatctaccagatgttccatacctccgtgcctatgctaaacctacctcccgatctattcagactgttccggaccaaaacttggaaggaccacgtcgcggcttgggacgtcatatttagcaaggccgacatttacacccagaatttctattgggagttaagacagaagggctccgtgcaccacgattatagaggaattctgtatcgcctcctaggcgacagtaagatgagctttgaagatattaaggccaatgtaacagagatgctggccggcggagttgacacaacgagcatgacattgcaatggcatttgtatgagatggctcggaatctcaaagtgcaggatatgctgcgtgccgaagtgctagcagctcgccaccaggcacaaggtgacatggctacaatgttgcaattggtgccactcctgaaagcatctatcaaagaaactctcaggctccatcccataagcgttactctgcagaggtacttggtgaacgacctcgtgctgagggactatatgattcctgctaagacactggttcaggttgccatctacgccctgggtagagaaccaacattcttctttgatccggagaacttcgatcccacccgctggctgagtaaggataaaaacattacatacttcagaaacctgggcttcgggtggggcgtacggcaatgtctgggccggcgcattgctgagctagaaatgacaatctttctcattaacatgctggagaacttccgcgtggaaatccagcacttatcggacgtcggcactaccttcaatttaatcctcatgccagaaaaacccatcagctttactttttggcccttcaaccaggaagccacacagcagtag

SEQ ID NO: 40153 - DNA, 1092 bp, Artificial Sequence
  derived and/or modified sequence
atggccccagaggcaactaaaaacttcctgcccctgctggacgccgtgtctcgagatttcgtaagcgtgctccacagacgcatcaagaaggcgggatctggcaactacagcggcgacatttccgatgacctctttaggttcgcctttgagagtatcaccaacgtgattttcggggaacgacagggtatgctcgaggaggtcgtaaaccctgaagcacaaaggttcatcgatgccatctaccaaatgtttcacacttctgtgcctatgttgaacctccccccagatctgttcagactttttcggaccaaaacgtggaaagaccacgtggccgcctgggacgtaattttttcaaaagcggatatctacacgcagaacttctattgggaactgcgacagaaagggtccgtgcaccacgactatagaggcatcttgtacaggctgctgggggatagcaagatgtcttttgaagatattaaggccaacgtaacggaaatgctcgctggtggcgtggataccacgtctatgacactccagtggcatctatatgaaatggctcggaacctgaaggtgcaagacatgctgagagctgaggtattagcagcccgccaccaggcacagggcgacatggctacaatgttgcagctggtccctctgctgaaagcttcaattaaggaaacactcagattacaccccatatcagtgacattacagaggtatctggttaatgatctggtgctccgggattatatgataccagccaagacattagtgcaggtggccatttatgcactggggagagagcccacatttttttttgaccctgagaattttgaccccaccagatggctctccaaggacaagaatatcacctacttccgcaacctgggattcgggtggggggttagacagtgtttgggtaggcggattgccgaattggagatgacaattttccttataaacatgctggaaaattttcgggtggagatccagcacttaagtgacgtcggtaccacgttcaatctgatcctgatgcctgagaagccgatttcctttaccttttggccatttaatcaggaggcaacgcaacagtag

SEQ ID NO: 40154 - DNA, 861 bp, Artificial Sequence
  derived and/or modified sequence
atgccatcaacccgctgctctacacctgcgagtccatgtagtaccttcccgcagacttgtagcgtatgctccgggcctagacccaaggaccacgttgccgcctgggacgttattttttccaaagctgacatctacacccagaacttttattgggaactccggcagaagggctccgtccatcatgattataggggaatcctttataggcttctgggcgactctaaaatgtcattcgaagacatcaaggccaatgtgaccgagatgcttgctggaggggttgacacaacctctatgaccctgcagtggcatctgtacgagatggcccggaacctgaaagtgcaggatatgttgagggccgaagttttggccgcgcgtcaccaggcccaaggcgatatggccaccatgcttcagctggtgcccttgctcaaagccagtattaaggagaccctgcggctacatcccatcagcgtgactctccagaggtacctagtgaatgacctggtcctccgcgactatatgatcccagccaagactctcgtgcaggtggcaatctatgccttgggtagggaaccaacattcttctttgatccggaaaacttcgaccccactcgctggctgtccaaggacaagaacatcacttatttccggaatctcggtttcggttggggtgtgcggcagtgtctcgggagacgaatcgcagaattagagatgacaatctttttgataaatatgttagagaatttccgcgtagagattcagcacctcagcgacgtcggaactacctttaatctgattttgatgccagaaaagcccattagctttaccttttggcctttcaatcaggaggccacacagcaatag

SEQ ID NO: 40155 - DNA, 1092 bp, Artificial Sequence
  derived and/or modified sequence
atggcccctgaggccaccaagaacttcctgcccctgctggatgctgtgtcccgggactttgtgtctgtgctgcaccggcgcatcaagaaggccggcagcggcaactacagcggggacatcagtgatgacctcttccgctttgcctttgagagcatcaccaacgtcatctttggagagcggcagggcatgctggaggaggtggtgaaccctgaggcccagcgcttcattgatgccatctaccagatgttccacacctctgtgcccatgctgaacctgcccccagacctcttccgcctcttccgcaccaagacctggaaggaccacgtggccgcctgggatgtgatcttcagcaaggctgacatctacacccagaacttctactgggagctgcggcagaagggctctgtgcaccacgactaccggggcatcctgtaccgcctgctgggggacagcaagatgagctttgaggacatcaaggccaacgtgacagagatgctggccggcggcgtggacaccacctccatgaccctgcagtggcacctgtatgagatggccaggaacctgaaggtgcaggacatgctgcgggcagaggtgctggccgcccggcaccaggcccagggcgacatggccaccatgctgcagctggtgcccctgctgaaggccagcatcaaggagaccctgcggctgcaccccatctctgtgaccctgcagcgctacctggtgaatgacctggtgctgcgggactacatgatcccagccaagaccctggtgcaggtggccatctatgccctgggccgggagcccaccttcttctttgatcctgaaaattttgaccccacccgctggctgagcaaggacaagaacatcacctacttcaggaacctgggcttcggctggggcgtgcggcagtgcctgggcagaagaattgctgagctggagatgaccatcttcctgatcaacatgctggagaacttccgggtggagatccagcacctgagtgatgtgggcaccaccttcaacctgatcctgatgcctgagaagcccatctccttcaccttctggcccttcaaccaggaggccacccagcagtag

SEQ ID NO: 40156 - DNA, 861 bp, Artificial Sequence
  derived and/or modified sequence
atgcccagcacccgctgcagcaccccagccagcccctgcagcaccttcccccagacctgcagcgtgtgcagcggcccccggcccaaggaccacgtggccgcctgggatgtgatcttcagcaaggctgacatctacacccagaacttctactgggagctgcggcagaagggctctgtgcaccacgactaccggggcatcctgtaccgcctgctgggggacagcaagatgagctttgaggacatcaaggccaacgtgacagagatgctggccggcggcgtggacaccacctccatgaccctgcagtggcacctgtatgagatggccaggaacctgaaggtgcaggacatgctgcgggcagaggtgctggccgcccggcaccaggcccagggcgacatggccaccatgctgcagctggtgcccctgctgaaggccagcatcaaggagaccctgcggctgcaccccatctctgtgaccctgcagcgctacctggtgaatgacctggtgctgcgggactacatgatcccagccaagaccctggtgcaggtggccatctatgccctgggccgggagcccaccttcttctttgatcctgagaactttgaccccacccgctggctgagcaaggacaagaacatcacctacttcaggaacctgggcttcggctggggcgtgcggcagtgcctgggcagaagaattgctgagctggagatgaccatcttcctgatcaacatgctggagaacttccgggtggagatccagcacctgagtgatgtgggcaccaccttcaacctgatcctgatgcctgagaagcccatctccttcaccttctggcccttcaaccaggaggccacccagcagtag

SEQ ID NO: 40157 - DNA, 1092 bp, Artificial Sequence
  derived and/or modified sequence
atggcccccgaggccaccaagaacttcctgcccctgctggacgccgtgtctagagactttgtgtccgtactgcacagacgcatcaaaaaggccggctccggaaactactctggagacattagtgatgacctgtttcgatttgccttcgagtctattactaatgtgattttcggcgaacgccaagggatgctggaggaggtagtgaatcccgaggcccagaggttcattgacgctatttaccaaatgttccacacaagtgtgcctatgctgaatctccctcctgacctcttccggctctttcgtacgaagacgtggaaggaccacgtggctgcttgggacgtaatcttctcgaaggccgacatttacacacagaatttttactgggagctgaggcagaaagggtccgttcaccacgactataggggtatcctgtacaggctgctcggggattctaaaatgtcttttgaagacatcaaggcgaacgtgacagaaatgcttgctgggggcgtcgatactacctccatgacactccagtggcatctgtacgagatggcccgtaacttgaaggttcaggacatgctgcgagcagaagtattggctgcccgccaccaggctcagggtgacatggccactatgctgcagctggtgccactgctcaaggcaagtatcaaggaaactctgaggctgcaccccatctccgtgacgttgcagcggtacctggtgaatgacttggtactgcgggactacatgattccagcgaaaaccctagtgcaggtggcgatctacgccctgggtcgcgaacccaccttcttttttgatccagagaatttcgacccgacccgctggctctccaaggacaaaaacatcacgtacttccgcaatctgggctttggctggggggttcggcaatgcctaggaaggagaatcgccgaactggagatgactatctttcttataaatatgttggagaacttcagggtcgagatccaacacctgtccgatgttggtaccacgttcaatctgattctgatgcctgaaaaaccaataagttttaccttttggccatttaaccaagaggcgacccagcagtag

SEQ ID NO: 40158 - DNA, 1092 bp, Artificial Sequence
  derived and/or modified sequence
atggcccccgaggccaccaagaacttcctgcccctgctggacgccgtaagtcgagatttcgtgagcgtcctgcacaggcgaataaagaaagctggctccggtaattactctggagacatcagtgatgatttgtttaggtttgccttcgaatccatcacgaacgtgatatttggtgagcgtcagggtatgctggaggaggtggtgaatcccgaggcccagagattcatcgatgctatttatcagatgtttcatacctccgtccccatgctgaacttgcccccagatctctttcgcctgttcagaacaaaaacatggaaggaccacgtggccgcatgggacgtcattttcagtaaggcagatatctacacccagaacttctattgggaacttcgccaaaagggctccgttcaccacgactataggggcattctgtatcgactcttaggagacagtaaaatgtctttcgaggatatcaaggccaatgtgactgaaatgttggcgggaggagtcgacacgacgagcatgacattacagtggcacctgtacgagatggctagaaatctcaaggttcaagacatgttgagggctgaggtcttagccgccagacaccaggcccagggcgacatggccacaatgctgcagctggtgccactgttaaaggcctccattaaagaaacccttaggctgcaccctatttccgtgacattgcaacgctatctggtcaacgacctggtgctaagggattacatgatccccgccaagaccctagtccaggtggctatttacgctctcggccgggaacctacattcttctttgacccagagaattttgatccaactagatggctgtcgaaggacaagaatatcacttacttcagaaatcttggtttcggctggggagtgcggcagtgcctgggcagaagaatagcggaactcgagatgacaattttcctgatcaatatgctggagaattttcgcgtggagatccagcacctgagcgatgtaggcaccaccttcaacctgattctgatgccagaaaaacccatctccttcactttttggccgttcaatcaagaggccactcagcagtag

SEQ ID NO: 40159 - DNA, 861 bp, Artificial Sequence
  derived and/or modified sequence
atgcccagcacccggtgcagcacccccgccagcccctgcagcaccttcccccagacttgttctgtttgcagcggccctcggccgaaagatcacgtggcagcctgggatgttatcttttccaaagctgatatctacactcagaacttctactgggaactcaggcaaaagggctctgtgcaccacgactataggggcatactgtaccggctgctgggcgatagtaagatgagctttgaggacattaaggctaatgtaaccgagatgctggctgggggtgtggataccacatcaatgacactacagtggcatctgtacgaaatggcaagaaacctcaaagtgcaagatatgctcagggcagaagttcttgcagcacgtcaccaggcacagggcgatatggctacaatgctacagctggttccactattgaaggcctcgatcaaggagacccttcggttgcaccccatctcagtgacgctgcagaggtatttggtgaatgatctcgtgctgcgagactatatgatacccgctaaaacccttgtgcaggtggcaatctacgctctaggcagagagcccaccttttttttcgatccagagaactttgacccaacacggtggctctccaaagacaaaaacatcacctatttcaggaatctaggattcggatggggcgtgaggcagtgtttgggccgccgcattgctgaattggagatgacaatctttctgattaacatgttggaaaactttagagtggagattcagcacctcagcgatgtcggtaccacatttaatctgatcctgatgccagaaaagcccatttcgtttacgttttggcctttcaaccaggaggccactcagcaatag

SEQ ID NO: 40160 - DNA, 1092 bp, Artificial Sequence
  derived and/or modified sequence
atggctcctgaggcaacgaagaatttcctccccctactggatgcggtgagtagagacttcgtttccgtactgcatagacgcatcaaaaaagctggatctgggaactactcaggcgatatttctgacgatctgttcaggtttgcatttgaatcaattacaaatgttatatttggagaaaggcaaggtatgctggaggaggttgtgaatcctgaggctcaaagattcattgacgccatctatcaaatgtttcatacgtccgttccaatgcttaatctgcctcccgacttatttcgactgttccggaccaaaacatggaaagatcatgttgctgcatgggacgtgatcttctcgaaagctgacatctacacacagaacttttattgggaactgcggcagaagggcagtgtacatcacgattaccggggtattttgtatcgcctcctcggggactccaaaatgtctttcgaggacattaaggccaacgtcactgaaatgctagctggtggagtcgataccaccagcatgactctccaatggcatttatacgagatggccaggaacctgaaagtccaggacatgctgcgagcagaggtgctggcagcccgtcatcaggctcaaggggacatggctacaatgctgcagcttgtgccccttctgaaagcttccattaaggaaaccctgcgccttcacccaatctcggtgaccctgcagaggtacctcgtgaacgatctggtgctgcgggattatatgatccccgcaaaaaccctcgttcaggtcgcaatttatgccctgggcagggagcccacattcttttttgaccccgaaaattttgaccctacccggtggctcagtaaggataagaatataacctatttccgcaacttgggatttggctggggtgtaaggcagtgtctggggcgtcgcatcgcagaactggagatgaccattttcctgatcaacatgttagaaaattttcgtgtggaaatccagcatttgtccgacgttgggacaactttcaacctgatactgatgcctgaaaagccaatttcattcactttctggccctttaaccaggaggccacccaacagtag

SEQ ID NO: 40161 - DNA, 1092 bp, Artificial Sequence
  derived and/or modified sequence
atggcccctgaagcaacaaagaacttcctcccgctgctagatgcggtgtcacgggatttcgtgtccgtgctccatcgtagaattaaaaaggctggttccgggaactatagcggggatatatcggacgacctcttccggttcgcttttgagagcataaccaacgtgatctttggcgaaagacaaggaatgctcgaggaggtggtaaatcctgaagcccagcggttcattgatgctatttaccagatgtttcacacaagcgttcccatgctgaatctgccccctgatctgttccggctgttccgaacaaagacctggaaagatcacgtcgcagcttgggacgtgattttttcaaaagcagacatatacacacagaacttctactgggagctgcgccaaaagggcagcgtccatcatgactaccgcggtatactgtacaggcttctgggcgattcaaagatgtctttcgaggacatcaaagccaacgttactgagatgcttgccggtggggtggatactacctccatgaccctgcagtggcatctgtatgagatggcaaggaacctgaaagtacaagacatgctgcgcgcagaagtgctggccgcacgccaccaggcacagggagacatggctaccatgctgcagttggtgccactactcaaagcctccatcaaagagacacttcgcctgcacccaattagtgtgacactccagcgctaccttgtaaatgacttagtccttagggactacatgattcccgctaaaactttggttcaggtagccatttatgctctgggacgcgaaccaactttcttttttgaccccgagaattttgatcctacccgatggctgagtaaagataaaaacatcacctacttccggaatctgggcttcggttggggggtgcgacagtgcttggggagacgcatcgcggaacttgaaatgaccatctttcttatcaacatgttagagaattttagggttgagatccagcacctgagcgatgttggcacaacctttaatcttatcttgatgcccgaaaaacccattagctttaccttttggccatttaatcaagaggcaacacagcagtag

SEQ ID NO: 40162 - DNA, 861 bp, Artificial Sequence
  derived and/or modified sequence
atgccctcaactaggtgcagtacgcctgcttccccctgcagcacatttccacagacatgctctgtgtgcagcggccctcgccctaaggatcatgttgccgcatgggatgtgatattctccaaggctgacatctacacccagaacttctactgggagttgcgccagaagggatcggtccatcatgattacagaggcatcctatatcggcttttgggcgattctaagatgtctttcgaagacatcaaggccaatgtgactgaaatgctggctggtggggtggatacaacaagcatgacactgcagtggcacctctatgaaatggctcgaaacttaaaagtacaagatatgctgcgcgcagaggtcctcgcagcaaggcaccaggctcagggcgacatggccaccatgctgcagctggtccccctcctcaaagctagcattaaagaaactctgagactgcaccccatctctgtgaccctgcaacgatacctggtgaacgatttagtcctccgcgattatatgataccggctaaaacactggtgcaggtggccatttacgcgctcggcagagaacctacattcttctttgatcctgagaattttgaccctaccagatggcttagtaaggacaagaatattacctactttagaaacctggggttcggctggggagtgagacaatgcttgggaagacgtatcgccgagctggaaatgaccattttcctgatcaatatgctggagaatttcagagtggaaatccaacaccttagcgacgtcgggacaacgtttaacttgatcctgatgcccgagaagcccatcagtttcactttctggccctttaaccaagaggctacccaacaatag

SEQ ID NO: 40163 - protein, 587 aa, Artificial Sequence
  derived and/or modified sequence
MARGYGATVSLVLLGLGLALAVIVLAVVLSRHQAPCGPQAFAHAAVAADSKVCSDIGRAILQQQGSPVDATIAALVCTSVVNPQSMGLGGGVIFTIYNVTTGKVEVINARETVPASHAPSLLDQCAQALPLGTGAQWIGVPGELRGYAEAHRRHGRLPWAQLFQPTIALLRGGHVVAPVLSRFLHNSILRPSLQASTLRQLFFNGTEPLRPQDPLPWPALATTLETVATEGVEVFYTGRLGQMLVEDIAKEGSQLTLQDLAKFQPEVVDALEVPLGDYTLYSPPPPAGGAILSFILNVLRGFNFSTESMARPEGRVNVYHHLVETLKFAKGQRWRLGDPRSHPKLQNASRDLLGETLAQLIRQQIDGRGDHQLSHYSLAEAWGHGTGTSHVSVLGEDGSAVAATSTINTPFGAMVYSPRTGIILNNELLDLCERCPRGSGTTPSPAVSGDRVGGAPGRCWPPVPGERSPSSMVPSILINKAQGSKLVIGGAGGELIISAVAQAIMSKLWLGFDLRAAIAAPILHVNSKGCVEYEPNFSQEVQRGLQDRGQNQTQRPFFLNVVQAVSQEGACVYAVSDLRKSGEAAGY

SEQ ID NO: 40164 - DNA, 1764 bp, Artificial Sequence
  derived and/or modified sequence
atggcacggggatacggagcaacagtttcgttagtgctactgggacttggtctggccctggctgttatcgtgcttgcagttgtgctctccagacatcaagccccatgtgggcctcaggcttttgcccacgctgcggtagcagcggactccaaggtatgcagcgacataggcagggccatcctacagcagcaaggtagccctgtcgacgcaacaattgccgcactggtatgcacaagcgtggtaaatcctcagagtatgggcttgggtggcggagtcatctttacaatttacaacgttacgaccggaaaggtggaggtgatcaacgctagggagactgtgcccgcaagccacgcacctagtctgcttgaccaatgcgcccaggccctgcccctgggcaccggggctcaatggatcggggtcccgggagagctccgggggtatgctgaagcccatagaaggcacggccgcttaccatgggctcagctctttcagcccacaatagccctcctgcggggaggacacgtagtggccccagtactgagtcgatttctccacaacagcattttgcgtccatctctccaggctagtactcttagacagttgttttttaatggcactgagcctctgagaccacaagatccactgccttggcccgcgctggccaccaccctcgagaccgtggccaccgaaggagtggaggtcttttataccggacgcttgggacagatgcttgtggaggacatcgccaaggagggcagtcaactgaccttacaggatttggctaagttccagcccgaggttgtggatgcccttgaggttcccctaggcgattacacactctactctccaccacctcccgcgggaggcgccattttgtcttttattctgaatgttctacgaggatttaacttctccacagagtcaatggcaagacctgaaggaagggtgaacgtgtaccatcatttggtcgagacccttaagttcgcaaagggtcagcgatggcggctcggtgatccccgctctcatccaaagctgcaaaacgcgtctagagacttgcttggagagactttggcccaactaattaggcagcagattgatggacgcggcgaccaccagctcagtcactactctctggcggaggcttggggtcacggaacaggcacatctcacgtgagcgtgctgggcgaagacgggtcggccgtggcggccacttctacaatcaacaccccgtttggagcgatggtttactccccccgaacaggaattatccttaataacgagctcctggacctgtgtgagagatgcccaagggggagtgggaccacaccctctcccgctgtgagcggagatcgcgtcggcggcgcccccggcaggtgctggcccccggtccccggggagcgttcaccttcaagtatggtgccgtctatccttatcaataaggctcaaggttcgaaactagtcatcggcggcgcaggtggcgaattgattattagtgccgtggcacaggcaatcatgtccaaactgtggctagggtttgacctaagagctgcgatagccgctccaatcctccatgtcaatagtaagggttgcgtagaatacgagcccaattttagccaagaggtccaaaggggactgcaggaccgagggcagaaccaaacccagagacctttcttcttgaatgtggtgcaagccgtttcacaggaaggagcatgcgtttatgccgtatctgacctcaggaaatctggcgaggcggcgggctattag

SEQ ID NO: 40165 - DNA, 2408 bp, Artificial Sequence
  derived and/or modified sequence
gtgagggcagcagctcgccacagctgccagccatctgtccattcacccatctgtccatctggcagcccgctgttcagacctgtctgtctgtccgcccatctgtaagcccatctctgtcccattgtctatctgaccatctttctcttactgtcctctttgtctagctatctggcctatctgtcgatccatcttcgtgtctgtcttcagcccccacctgtttgtccatctgtccaattacctgtgactctgtgcatcttcttgtccattcatctgcccacccatccgtccctccgtctgcccaccagccgcccctctcctcctgggctgcagagccatggcccggggctacggggccacggtcagcctagtcctgctgggtctggggctggcgctggctgtcattgtgctggctgtggtcctctctcgacaccaggccccatgtggcccccaggcctttgcccacgctgctgttgccgccgactccaaggtctgctcggatattggacgagccatcctccagcagcagggctcacccgtggatgccaccatcgcggctctggtctgcaccagcgtcgtcaaccctcagagcatgggcctgggcggaggggtcatcttcaccatctacaatgtgacaacagggaaggtggaggtcatcaatgcccgggagacggtgccggccagccacgccccgagcctgctggaccagtgtgcacaggctctgccactgggcacaggggcccagtggatcggggtgcccggggagctccgtggctatgccgaggcccaccgccgccatggccgcctgccctgggcgcagctgttccagcccaccatcgcgctgctccgaggggggcatgtggtggcccctgtcctcagccgtttcctgcacaacagcatcctgcggccttccttgcaggcgtcaaccctgcgccagctcttcttcaacgggacagaacccctgaggcctcaggacccactcccatggcctgcactggccaccaccctggagaccgtggccacagagggcgtggaggtcttctacacggggaggctgggccagatgctggtggaggacattgccaaggaagggagccagctgacgctgcaggacctggccaagttccagcccgaggtggtggatgccctggaggtgcccctgggggactataccctgtactcaccaccgccgcctgcagggggtgccattctcagctttatcctcaacgtgctaagagggttcaacttctcaacagagtctatggccaggcctgaagggagggtgaacgtgtaccaccaccttgtagagacgctcaagtttgccaaggggcagaggtggaggctgggggaccctcgaagccacccgaagctccagaatgcctcccgggacctgctgggggagaccctggcccagctcatccgccaacagatcgatggccggggggaccaccagctcagccactacagcttggccgaggcctggggccacgggacaggcacgtcccatgtgtctgtgctgggggaggatggcagcgccgtggctgccaccagcaccatcaacacaccctttggagcgatggtgtattcaccacggacaggcatcatcctcaacaacgagctcctggacttatgcgagcgatgcccccggggttccggcaccaccccctcacctgcagtgagtggagacagggtgggtggagctcccggaaggtgctggcccccagttccaggcgagcgttccccatcctccatggtgccctccatcttgatcaacaaagcccaggggtcgaagctagtgattggcggggctggcggggagctcatcatctctgctgtggcccaggccatcatgagcaagctgtggcttggctttgacctgagagcggccattgcagcccccatcctgcatgtcaacagcaagggctgtgtggagtacgagcccaacttcagccaggaggtgcagaggggactccaagaccgtggccagaaccagacccagaggcccttcttcctgaacgtggtccaggctgtgtcccaggagggggcctgtgtgtacgccgtctcggacctgaggaagagtggggaggccgcaggctactaagacactgctctgcccagagctgaagtctggccccaccatgagtcctgtgtccaggccggacatggctgggggaccaactactctggcaggatctggacccctggcaggggagtccagctgagagtggaagaggtggcggggaccagctgggcagatgagaggctgagcctcatccctaaccccctttcccagagcccctggtggtcctgaaccggcccctctatccctccgcaggcctcttgcctggggccactctcccaccctctcgatctgtatatcctccagtccaagattaaagaggcggactgtg

SEQ ID NO: 40166 - DNA, 1764 bp, Artificial Sequence
  derived and/or modified sequence
atggcccggggctatggagccaccgtgtccctggtgctgctgggcctgggcctggccctggccgtgattgtgctggccgtggtgctgagccgccaccaggccccctgtggcccccaggcctttgcccacgccgctgtggccgctgacagcaaggtgtgcagcgacatcggccgggccatcctgcagcagcagggcagccctgtggatgccaccatcgccgccctggtgtgcacctctgtggtgaacccccagagcatgggcctgggcggcggcgtcatcttcaccatctacaacgtgaccaccgggaaggtggaggtgatcaatgcccgggagaccgtgcctgccagccacgcccccagcctgctggaccagtgtgcccaggccctgcccctgggcactggagcccagtggattggagtgcctggagagctgcggggctacgccgaggcccaccggcggcacggccgcctgccctgggcccagctgttccagcccaccatcgccctgctgcggggcggccacgtggtggcccctgtgctgagccgcttcctgcacaacagcatcctgcggcccagcctgcaggccagcaccctgcggcagctgttcttcaacggcacagagcccctgcggccccaggaccccctgccctggccagccctggccaccaccctggagaccgtggccacagaaggagtggaggtgttctacacaggccgcctgggccagatgctggtggaggacatcgccaaggagggcagccagctgaccctgcaggacctggccaagttccagcctgaggtggtggatgccctggaggtgcccctgggggactacaccctgtacagccccccacctcctgctggaggagccatcctgtccttcatcctgaatgtgctgcggggcttcaacttcagcacagagagcatggcccggcctgagggccgggtgaatgtgtaccaccacctggtggagaccctgaagtttgccaagggccagcgctggaggctgggggaccccaggagccaccccaagctgcagaatgccagccgggacctgctgggggagaccctggcccagctgatccggcagcagattgatggccgcggggaccaccagctgagccactacagcctggccgaggcctggggccacggcaccggcaccagccacgtgtctgtgctgggggaggatggcagcgctgtggccgccaccagcaccatcaacaccccatttggagccatggtgtacagccccaggacaggcatcatcctgaacaatgagctgctggacctgtgtgagcgctgcccccggggcagcggcaccacccccagccctgctgtgtctggggacagagtgggcggggcccctggccgctgctggccccctgtgcctggagagaggagccccagctccatggtgcccagcatcctgatcaacaaggcccagggcagcaagctggtgattggaggagctggaggagagctgatcatctctgctgtggcccaggccatcatgagcaagctgtggctgggctttgacctgcgggccgccatcgccgcccccatcctgcacgtgaacagcaagggctgtgtggagtatgagcccaacttcagccaggaggtgcagaggggcctgcaggaccggggccagaaccagacccagaggcccttcttcctgaatgtggtgcaggccgtgtcccaggagggcgcctgtgtgtatgctgtgtctgacctgaggaagtctggagaggccgccggctactag

SEQ ID NO: 40167 - DNA, 1764 bp, Artificial Sequence
  derived and/or modified sequence
atggcccggggctacggcgccaccgtgagcctggtgctgctgggcctcgggctggctctagccgtcatcgtcctcgctgtagtgctgtctagacaccaggccccttgcgggccccaggcctttgcccatgctgctgttgccgcagatagcaaggtctgcagcgacatcggccgggcaattctacaacaacagggaagtccagttgatgccaccatcgcagcactagtgtgcacctccgtcgtgaacccacagagtatgggcctggggggcggggtgatctttactatttataacgtaacgacaggaaaagttgaagtgataaatgcccgcgagactgtgcccgcctcccatgcaccctcacttcttgatcagtgcgctcaggcactgccgctgggcacaggggcccagtggatcggagtccctggcgaattacggggctacgcggaggcccacaggagacacggacgccttccctgggcacagctatttcagcccactattgcacttctcagggggggtcatgtcgttgccccagtgctcagccgatttctgcacaatagcattctgagacccagcctgcaggctagtactttacgtcagttgttttttaacggcaccgagcctctaaggccccaggaccctcttccctggccggcactggctacaacactggagacagttgctactgaaggcgtggaggtgttttataccggacggctcggacagatgctggtggaagacattgccaaagaaggcagccagctgacacttcaggatctggctaagtttcagcctgaggtcgtcgacgcccttgaagttcctcttggcgattacaccctatattcaccgccgccccctgctgggggcgccatcctcagtttcatcctgaatgtcctgcgcgggtttaacttcagcacagagtccatggctcggcccgagggtcgggtaaacgtttaccatcacttggtggagacattgaagttcgccaaagggcaacgctggaggctgggcgaccctcgcagccaccctaagctgcaaaacgcctcccgcgatttgctcggcgagactctggcccagctaattcggcagcaaatcgacgggaggggggatcaccaactgtcccattacagcctggcagaagcttggggacatgggactggcacgagccatgtatctgtcctgggagaggatggatctgcggtggcggccacctctaccataaataccccattcggggccatggtctatagccctcgaacaggtattatcctcaacaacgagctgctggacctgtgtgaacgttgcccaaggggcagcgggacaacaccatcacctgccgtaagcggcgacagagttggtggagcccctgggaggtgttggcctcctgtgccgggcgagagaagcccttctagtatggtgcctagcatcctgatcaacaaggctcagggtagcaaattagtaatagggggcgccgggggagagctgatcatatcagccgtcgctcaggctattatgagtaaattgtggctcggcttcgatctgcgggctgcaattgccgcgcctatcctacatgtgaactccaaggggtgtgtagagtacgaaccaaatttctcccaggaggtgcagcgaggcctacaggatagaggccaaaaccaaacacagcgccctttttttttgaatgtggtgcaggccgtgtcccaagaaggcgcttgcgtttatgccgtttcagacttacggaaaagcggcgaggcagccggctactag

SEQ ID NO: 40168 - DNA, 1764 bp, Artificial Sequence
  derived and/or modified sequence
atggcccgaggatacggcgcaacagtatcactggtgctgctgggcctcgggctggcgctggctgtgatcgttcttgcagtggtgttaagtcggcaccaggcaccctgcggccctcaagccttcgctcacgcagccgtggccgctgattccaaagtctgctctgacatcggacgagcgatcctccagcagcagggctcaccggtggacgctaccattgcagccctcgtgtgtacgagtgtggtgaatcctcagtctatggggttaggtggcggagtcatctttaccatctataacgttaccacaggcaaagtcgaagttatcaatgcgagggagaccgtacccgcaagtcatgccccttctctgctcgaccaatgcgcccaggctttacccctcggcaccggagcacagtggattggtgtcccaggcgagcttaggggatacgctgaagctcataggagacacggcaggttgccatgggcgcagctcttccaaccaactatagcactgttgcgaggcggacacgtagtggcacccgtactgtcgcgttttctccacaattccattctgcggccttctttgcaagctagcacgctgcgacagctttttttcaatgggacggagccgttgagaccacaggaccctcttccttggcccgctcttgcgactaccctggagactgtggccacagagggagttgaggtgttttacactggacgactgggtcagatgctcgtcgaggatatcgcaaaagaggggagtcagttgactctccaggatctcgctaagttccagccagaagtggttgatgccctcgaggttccccttggcgattataccctttactccccaccacccccagcagggggtgccatcctctccttcatactcaacgtcctgagaggatttaatttctcaactgagtccatggctcggccagagggaagggtgaacgtgtaccatcacctcgtcgagaccctcaaatttgcaaagggacagaggtggcgactcggtgacccgagatcacatccaaagctgcagaatgcctcgcgtgatctcctgggggaaaccctggcccaactaatccggcagcaaattgacggcagaggagaccatcagctgagccactattcattagccgaggcatgggggcacggaaccggcacttctcacgtatcagttctgggagaagacggttcagctgtagccgctacctcaactatcaacaccccgttcggcgcaatggtttacagccccagaacaggtatcattctcaacaatgagctgcttgatctgtgtgagagatgtccccgaggcagtggcaccacacctagtccagctgtgtcgggtgatagagtggggggagcgcctggcagatgctggccccctgtccctggagagaggtccccttcttctatggtccccagtatccttattaataaagcacagggtagcaaactagtgattggcggagcaggcggtgaactgattatcagcgctgtggcccaggcaataatgtccaaactgtggctcggctttgatctgcgggcagcgatcgctgccccaatccttcacgttaattccaaaggatgtgtggagtatgagcctaatttttctcaagaggtgcagaggggtctgcaggaccggggacaaaaccagacacagagaccattcttccttaatgtggtccaagctgtatctcaggaaggcgcatgtgtttacgctgtgagcgatctcagaaagagtggcgaggcagcaggatactag

SEQ ID NO: 40169 - DNA, 1764 bp, Artificial Sequence
  derived and/or modified sequence
atggccagaggctacggcgccaccgtgagcctggtgctgctgggcctgggcctggccctggccgtgatcgtgctggccgtggtgctgagcagacaccaggccccctgcggcccccaggccttcgcccacgccgccgtggccgccgacagcaaggtgtgcagcgacatcggcagagccatcctgcagcagcagggcagccccgtggacgccaccatcgccgccctggtgtgcaccagcgtggtgaacccccagagcatgggcctgggcggcggcgtgatcttcaccatctacaacgtgaccaccggcaaggtggaggtgatcaacgccagagagaccgtgcccgccagccacgcccccagcctgctggaccagtgcgcccaggccctgcccctgggcaccggcgcccagtggatcggcgtgcccggcgagctgagaggctacgccgaggcccacagaagacacggcagactgccctgggcccagctgttccagcccaccatcgccctgctgagaggcggccacgtggtggcccccgtgctgagcagattcctgcacaacagcatcctgagacccagcctgcaggccagcaccctgagacagctgttcttcaacggcaccgagcccctgagaccccaggaccccctgccctggcccgccctggccaccaccctggagaccgtggccaccgagggcgtggaggtgttctacaccggcagactgggccagatgctggtggaggacatcgccaaggagggcagccagctgaccctgcaggacctggccaagttccagcccgaggtggtggacgccctggaggtgcccctgggcgactacaccctgtacagcccccccccccccgccggcggcgccatcctgagcttcatcctgaacgtgctgagaggcttcaacttcagcaccgagagcatggccagacccgagggcagagtgaacgtgtaccaccacctggtggagaccctgaagttcgccaagggccagagatggagactgggcgaccccagaagccaccccaagctgcagaacgccagcagagacctgctgggcgagaccctggcccagctgatcagacagcagatcgacggcagaggcgaccaccagctgagccactacagcctggccgaggcctggggccacggcaccggcaccagccacgtgagcgtgctgggcgaggacggcagcgccgtggccgccaccagcaccatcaacacccccttcggcgccatggtgtacagccccagaaccggcatcatcctgaacaacgagctgctggacctgtgcgagagatgccccagaggcagcggcaccacccccagccccgccgtgagcggcgacagagtgggcggcgcccccggcagatgctggccccccgtgcccggcgagagaagccccagcagcatggtgcccagcatcctgatcaacaaggcccagggcagcaagctggtgatcggcggcgccggcggcgagctgatcatcagcgccgtggcccaggccatcatgagcaagctgtggctgggcttcgacctgagagccgccatcgccgcccccatcctgcacgtgaacagcaagggctgcgtggagtacgagcccaacttcagccaggaggtgcagagaggcctgcaggacagaggccagaaccagacccagagacccttcttcctgaacgtggtgcaggccgtgagccaggagggcgcctgcgtgtacgccgtgagcgacctgagaaagagcggcgaggccgccggctactag

SEQ ID NO: 40170 - protein, 554 aa, Artificial Sequence
  derived and/or modified sequence
MARGYGATVSLVLLGLGLALAVIVLAVVLSRHQAPCGPQAFAHAAVAADSKVCSDIGRAILQQQGSPVDATIAALVCTSVVNPQSMGLGGGVIFTIYNVTTGAQWIGVPGELRGYAEAHRRHGRLPWAQLFQPTIALLRGGHVVAPVLSRFLHNSILRPSLQASTLRQLFFNGTEPLRPQDPLPWPALATTLETVATEGVEVFYTGRLGQMLVEDIAKEGSQLTLQDLAKFQPEVVDALEVPLGDYTLYSPPPPAGGAILSFILNVLRGFNFSTESMARPEGRVNVYHHLVETLKFAKGQRWRLGDPRSHPKLQNASRDLLGETLAQLIRQQIDGRGDHQLSHYSLAEAWGHGTGTSHVSVLGEDGSAVAATSTINTPFGAMVYSPRTGIILNNELLDLCERCPRGSGTTPSPVSGDRVGGAPGRCWPPVPGERSPSSMVPSILINKAQGSKLVIGGAGGELIISAVAQAIMSKLWLGFDLRAAIAAPILHVNSKGCVEYEPNFSQEVQRGLQDRGQNQTQRPFFLNVVQAVSQEGACVYAVSDLRKSGEAAGY

SEQ ID NO: 40171 - DNA, 1665 bp, Artificial Sequence
  derived and/or modified sequence
atggctcggggctacggcgcaaccgttagtctggttctgctgggccttggccttgctctggctgtcattgtcctggcggtggtcctgtctagacaccaggctccttgcggaccgcaggctttcgcccacgcagctgtcgccgccgatagtaaggtgtgctcagatatcggacgggccatcctgcagcagcagggcagccctgtggacgccactattgctgctctagtatgcaccagcgtcgtcaacccgcagagcatgggactggggggtggtgtgatcttcaccatctataatgtgaccaccggcgcccagtggattggagtgcctggcgaacttcgcggctacgccgaggcccatagacgccatgggagactgccatgggcacaattattccagccaaccatagcactcctgcggggaggacacgttgtggctccagtgctgtcccgcttcctgcacaacagcattcttcggcccagcctccaagcctctacactgcgccagctgtttttcaatggtaccgaaccactgagaccccaggatccactgccatggcctgcgcttgctaccaccctcgagactgtcgcaaccgagggcgtcgaggtgttttataccggaaggctggggcagatgcttgtcgaggacattgctaaagaagggtcccagctgactcttcaggatctcgccaaatttcagcccgaggtggtggatgcccttgaggtgccccttggggactacacgctctactcgccgccaccgccagccgggggagccatccttagcttcattctaaatgttttgagggggttcaatttttccactgaatccatggcccggcccgaaggacgcgtgaacgtctaccaccacctggtcgaaaccctgaaatttgccaagggccaaaggtggaggctgggagacccgaggagtcaccctaaactgcaaaatgcctcaagggacctgttgggcgagacattggctcagctcatccggcagcaaattgatgggcggggggaccaccagcttagccattatagcctggcagaggcttggggccatggaaccggaacatcccatgtgtccgtcctcggcgaggacggctctgccgtggccgctacctcaactatcaatacccccttcggagccatggtatattctccaagaacagggattatattaaacaacgaactgttagatctgtgtgagcgctgcccacgaggcagcggaaccacccctagccctgtgtccggagatagagtcggtggtgcccctggacggtgttggcccccagtgcccggggagcgcagccctagtagcatggtcccttccatcctgattaacaaagcccaaggatcaaagcttgtcatcggcggggcaggcggtgagctcattatctctgctgtcgcgcaagctatcatgtcgaaattgtggttaggattcgatctacgggctgcgatcgctgcccccatcctgcatgtgaacagcaaaggatgtgtggaatatgagcctaatttctcccaggaagtacaaaggggactccaagatcggggccaaaaccagacacagcgacccttctttctcaatgtggtgcaagccgtttcgcaagaaggggcctgtgtgtatgcggtcagcgaccttaggaagtcaggtgaggccgccggctactag

SEQ ID NO: 40172 - DNA, 2334 bp, Artificial Sequence
  derived and/or modified sequence
actccgtagtgtgcacttggtgagggcagcagctcgccacagctgccagccatctgtccattcacccatctgtccatctggcagcccgctgttcagacctgtctgtctgtccgcccatctgtaagcccatctctgtcccattgtctatctgaccatctttctcttactgtcctctttgtctagctatctggcctatctgtcgatccatcttcgtgtctgtcttcagcccccacctgtttgtccatctgtccaattacctgtgactctgtgcatcttcttgtccattcatctgcccacccatccgtccctccgtctgcccaccagccgcccctctcctcctgggctgcagagccatggcccggggctacggggccacggtcagcctagtcctgctgggtctggggctggcgctggctgtcattgtgctggctgtggtcctctctcgacaccaggccccatgtggcccccaggcctttgcccacgctgctgttgccgccgactccaaggtctgctcggatattggacgagccatcctccagcagcagggctcacccgtggatgccaccatcgcggctctggtctgcaccagcgtcgtcaaccctcagagcatgggcctgggcggaggggtcatcttcaccatctacaatgtgacaacaggggcccagtggatcggggtgcccggggagctccgtggctatgccgaggcccaccgccgccatggccgcctgccctgggcgcagctgttccagcccaccatcgcgctgctccgaggggggcatgtggtggcccctgtcctcagccgtttcctgcacaacagcatcctgcggccttccttgcaggcgtcaaccctgcgccagctcttcttcaacgggacagaacccctgaggcctcaggacccactcccatggcctgcactggccaccaccctggagaccgtggccacagagggcgtggaggtcttctacacggggaggctgggccagatgctggtggaggacattgccaaggaagggagccagctgacgctgcaggacctggccaagttccagcccgaggtggtggatgccctggaggtgcccctgggggactataccctgtactcaccaccgccgcctgcagggggtgccattctcagctttatcctcaacgtgctaagagggttcaacttctcaacagagtctatggccaggcctgaagggagggtgaacgtgtaccaccaccttgtagagacgctcaagtttgccaaggggcagaggtggaggctgggggaccctcgaagccacccgaagctccagaatgcctcccgggacctgctgggggagaccctggcccagctcatccgccaacagatcgatggccggggggaccaccagctcagccactacagcttggccgaggcctggggccacgggacaggcacgtcccatgtgtctgtgctgggggaggatggcagcgccgtggctgccaccagcaccatcaacacaccctttggagcgatggtgtattcaccacggacaggcatcatcctcaacaacgagctcctggacttatgcgagcgatgcccccggggttccggcaccaccccctcacctgtgagtggagacagggtgggtggagctcccggaaggtgctggcccccagttccaggcgagcgttccccatcctccatggtgccctccatcttgatcaacaaagcccaggggtcgaagctagtgattggcggggctggcggggagctcatcatctctgctgtggcccaggccatcatgagcaagctgtggcttggctttgacctgagagcggccattgcagcccccatcctgcatgtcaacagcaagggctgtgtggagtacgagcccaacttcagccaggaggtgcagaggggactccaagaccgtggccagaaccagacccagaggcccttcttcctgaacgtggtccaggctgtgtcccaggagggggcctgtgtgtacgccgtctcggacctgaggaagagtggggaggccgcaggctactaagacactgctctgcccagagctgaagtctggccccaccatgagtcctgtgtccaggccggacatggctgggggaccaactactctggcaggatctggacccctggcaggggagtccagctgagagtggaagaggtggcggggaccagctgggcagatgagaggctgagcctcatccctaaccccctttcccagagcccctggtggtcctgaaccggcccctctatccctccgcaggcctcttgcctggggccactctcccaccctctcgatctgtatatcctccagtccaagattaaagaggcggactgtggcctga

SEQ ID NO: 40173 - DNA, 1665 bp, Artificial Sequence
  derived and/or modified sequence
atggcccggggctatggagccaccgtgtccctggtgctgctgggcctgggcctggccctggccgtgattgtgctggccgtggtgctgagccgccaccaggccccctgtggcccccaggcctttgcccacgccgctgtggccgctgacagcaaggtgtgcagcgacatcggccgggccatcctgcagcagcagggcagccctgtggatgccaccatcgccgccctggtgtgcacctctgtggtgaacccccagagcatgggcctgggcggcggcgtcatcttcaccatctacaacgtgaccactggagcccagtggattggagtgcctggagagctgcggggctacgccgaggcccaccggcggcacggccgcctgccctgggcccagctgttccagcccaccatcgccctgctgcggggcggccacgtggtggcccctgtgctgagccgcttcctgcacaacagcatcctgcggcccagcctgcaggccagcaccctgcggcagctgttcttcaacggcacagagcccctgcggccccaggaccccctgccctggccagccctggccaccaccctggagaccgtggccacagaaggagtggaggtgttctacacaggccgcctgggccagatgctggtggaggacatcgccaaggagggcagccagctgaccctgcaggacctggccaagttccagcctgaggtggtggatgccctggaggtgcccctgggggactacaccctgtacagccccccacctcctgctggaggagccatcctgtccttcatcctgaatgtgctgcggggcttcaacttcagcacagagagcatggcccggcctgagggccgggtgaatgtgtaccaccacctggtggagaccctgaagtttgccaagggccagcgctggaggctgggggaccccaggagccaccccaagctgcagaatgccagccgggacctgctgggggagaccctggcccagctgatccggcagcagattgatggccgcggggaccaccagctgagccactacagcctggccgaggcctggggccacggcaccggcaccagccacgtgtctgtgctgggggaggatggcagcgctgtggccgccaccagcaccatcaacaccccatttggagccatggtgtacagccccaggacaggcatcatcctgaacaatgagctgctggacctgtgtgagcgctgcccccggggcagcggcaccacccccagccctgtgtctggggacagagtgggcggggcccctggccgctgctggccccctgtgcctggagagaggagccccagctccatggtgcccagcatcctgatcaacaaggcccagggcagcaagctggtgattggaggagctggaggagagctgatcatctctgctgtggcccaggccatcatgagcaagctgtggctgggctttgacctgcgggccgccatcgccgcccccatcctgcacgtgaacagcaagggctgtgtggagtatgagcccaacttcagccaggaggtgcagaggggcctgcaggaccggggccagaaccagacccagaggcccttcttcctgaatgtggtgcaggccgtgtcccaggagggcgcctgtgtgtatgctgtgtctgacctgaggaagagcggggaggccgccggctactag

SEQ ID NO: 40174 - DNA, 1665 bp, Artificial Sequence
  derived and/or modified sequence
atggcccggggctacggcgccaccgtgagcctggtgctgctgggcctgggtctggcattggccgtgatagttttagcagtggtgcttagtagacatcaggctccctgtggcccacaggcttttgcccacgccgccgtagctgccgatagtaaggtctgttccgacattggacgcgcaattctgcaacagcagggctctcctgtcgatgcgaccatcgccgccctcgtctgtacatccgtcgtcaatcctcagtccatggggttgggtggcggagtaatattcaccatatacaacgttaccactggggcccagtggatcggagtgccaggcgaattgagaggctatgctgaggctcatagacggcacggccgcctcccctgggcacagctcttccagcctacaattgctctgcttcgaggcggacacgtggttgcccctgtcctgtcgcgcttcctccacaatagcattctacgaccgagcctgcaggcctctactctaagacagctgttctttaacggaaccgagccactccggccccaagacccactcccctggcctgctctggccaccactctggagacagtagccacagaaggggtggaggtcttctacaccggaaggctgggccagatgctggttgaggacattgctaaggaggggagccagttaaccttacaagacttggccaagttccaacctgaagtcgtggacgccctggaggtacctttaggagactatacactgtactctcctccacccccggctgggggcgcgatcctgtcttttattcttaacgtgctccgtggattcaattttagcacagagtccatggctagaccggagggcagagtgaacgtgtatcatcaccttgtagaaacactcaaattcgccaagggccaaagatggcgattgggcgacccacggtcccatcctaagttgcaaaacgcatcccgggacctgctcggggaaacactcgctcagctaatcagacagcaaatcgatggccggggggaccatcagcttagccattacagtctggccgaagcctggggtcacggaacgggcaccagccatgtttccgtgctaggcgaagatggctcggccgtggccgctacgtcaacaatcaacacccccttcggagctatggtgtattctccgcgaacgggcataatcctgaataatgaattgctggacctgtgcgagcgctgtccgagggggtctgggacgaccccttccccagtctctggggatcgagtgggcggggcaccaggacgatgttggccgcccgtgcccggcgagagatccccgtcatctatggtgccaagcatacttatcaataaagcgcaggggtccaagttggtcatcggaggggcgggaggtgagctcatcatcagcgctgtggcacaggccataatgtccaaactgtggctgggattcgatttgcgggctgccatcgccgctcccattcttcacgttaattctaaagggtgtgttgaatatgaaccaaatttttcgcaggaggtgcagaggggtcttcaagacagaggacagaaccagacacagagacctttctttttgaatgtggtccaggcagtctctcaggagggtgcatgcgtgtacgcagttagtgatttgcggaagagcggggaggcagcaggctactag

SEQ ID NO: 40175 - DNA, 1665 bp, Artificial Sequence
  derived and/or modified sequence
atggcaaggggttatggagctactgttagcctggtcctgctgggactgggattggcattagcggtcatagtgttggctgtggtgttgtccagacaccaggcaccatgcggaccacaggccttcgcacacgcagccgtggctgcagactctaaggtgtgttccgatattggacgcgcaatccttcagcagcaggggtctccggtggatgccaccatagctgccctagtttgcacatctgtcgtgaacccccagtctatgggactggggggtggagtgatattcacgatctacaacgttacaaccggtgcccagtggataggcgtccccggagagttacgtggctatgcggaggcacaccggcgacacggaaggctgccttgggcacagctgtttcagcccacaattgctttattaaggggaggtcacgtcgtggcacctgtcctgagccggttcctgcataattcaattttaagaccctccttgcaggcctccaccctgcggcagctctttttcaacggaactgaacctctgagaccgcaagatccactcccctggccagccctggctacaactttggagaccgtcgctaccgagggggttgaagtgttttatactggaaggcttggacagatgctcgtggaggacattgctaaggaggggagccagctgacacttcaagatctggccaagttccaacctgaggtggtcgacgcactcgaggttcccctcggcgattataccttgtactccccaccgccacccgctggaggggcaatcctgtcttttatactgaacgtgttgagagggttcaatttcagcacggaaagcatggctcgccctgaggggagagttaatgtttaccatcacctagtggagacactgaagtttgctaaggggcagcggtggagactgggagaccccaggtcccatccaaaattacagaacgcatcgagagacctgctgggcgaaacgctggctcagctgatcagacagcagattgatgggaggggagaccaccagctcagccactactctctagcagaggcttgggggcacggcacagggacatcccatgtttcagtgcttggggaagatggatcggccgtggccgcaacttctactataaataccccttttggtgccatggtatacagtccacggaccggcatcatcctcaacaacgagttgctggatttgtgcgagagatgcccacggggtagcggaaccactccctccccagtgagtggcgaccgcgtggggggagcacctgggaggtgctggccccctgttccgggagaacggagcccgtccagcatggtgccatctatactcataaacaaggcccagggaagcaagcttgtgatcggtggagccggaggcgagctgatcattagtgccgtcgcacaggcgataatgagcaaattatggctgggcttcgacctcagagctgccatcgcggcacccattctgcacgttaactccaaaggctgtgttgagtacgaaccaaactttagccaggaggttcagcggggtcttcaggatcgaggccaaaaccagacccaacggccttttttcctaaatgttgtgcaggccgtgagccaagagggggcatgcgtctacgccgtctccgacctgcgcaagtccggcgaggccgctggctactag

SEQ ID NO: 40176 - DNA, 1665 bp, Artificial Sequence
  derived and/or modified sequence
atggccagaggctacggcgccaccgtgagcctggtgctgctgggcctgggcctggccctggccgtgatcgtgctggccgtggtgctgagcagacaccaggccccctgcggcccccaggccttcgcccacgccgccgtggccgccgacagcaaggtgtgcagcgacatcggcagagccatcctgcagcagcagggcagccccgtggacgccaccatcgccgccctggtgtgcaccagcgtggtgaacccccagagcatgggcctgggcggcggcgtgatcttcaccatctacaacgtgaccaccggcgcccagtggatcggcgtgcccggcgagctgagaggctacgccgaggcccacagaagacacggcagactgccctgggcccagctgttccagcccaccatcgccctgctgagaggcggccacgtggtggcccccgtgctgagcagattcctgcacaacagcatcctgagacccagcctgcaggccagcaccctgagacagctgttcttcaacggcaccgagcccctgagaccccaggaccccctgccctggcccgccctggccaccaccctggagaccgtggccaccgagggcgtggaggtgttctacaccggcagactgggccagatgctggtggaggacatcgccaaggagggcagccagctgaccctgcaggacctggccaagttccagcccgaggtggtggacgccctggaggtgcccctgggcgactacaccctgtacagcccccccccccccgccggcggcgccatcctgagcttcatcctgaacgtgctgagaggcttcaacttcagcaccgagagcatggccagacccgagggcagagtgaacgtgtaccaccacctggtggagaccctgaagttcgccaagggccagagatggagactgggcgaccccagaagccaccccaagctgcagaacgccagcagagacctgctgggcgagaccctggcccagctgatcagacagcagatcgacggcagaggcgaccaccagctgagccactacagcctggccgaggcctggggccacggcaccggcaccagccacgtgagcgtgctgggcgaggacggcagcgccgtggccgccaccagcaccatcaacacccccttcggcgccatggtgtacagccccagaaccggcatcatcctgaacaacgagctgctggacctgtgcgagagatgccccagaggcagcggcaccacccccagccccgtgagcggcgacagagtgggcggcgcccccggcagatgctggccccccgtgcccggcgagagaagccccagcagcatggtgcccagcatcctgatcaacaaggcccagggcagcaagctggtgatcggcggcgccggcggcgagctgatcatcagcgccgtggcccaggccatcatgagcaagctgtggctgggcttcgacctgagagccgccatcgccgcccccatcctgcacgtgaacagcaagggctgcgtggagtacgagcccaacttcagccaggaggtgcagagaggcctgcaggacagaggccagaaccagacccagagacccttcttcctgaacgtggtgcaggccgtgagccaggagggcgcctgcgtgtacgccgtgagcgacctgagaaagagcggcgaggccgccggctactag

SEQ ID NO: 40177 - protein, 199 aa, Artificial Sequence
  derived and/or modified sequence
MDFKIEHTWDGFPVKHEPVFIRLNPGDRGVMMDISAPFFRDPPAPLGEPGKPFNELWDYEVVEAFFLNDITEQYLEVELCPHGQHLVLLLSGRRNVWKQELPLSFRMSRGETKWEGKAYLPWSYFPPNVTKFNSFAIHGSKDKRSYEALYPVPQHELQQGQKPDFHCLEYFKSFNFNTLLGEEWKQPESDLWLIEKCDI

SEQ ID NO: 40178 - DNA, 2862 bp, Artificial Sequence
  derived and/or modified sequence
gaagattgctggggactccacgttcaaccgaatcccacgctggtgggaagaggacgcggtcgatacaggcgtcccgcgggtcactctgggtctcgtcgggccacctaggagagtgccgcgggagcttgacggcagcctgagagcggcgttctacgcggagcggcgggggttggagaggacaacgccaagacggctgggaagccccaggccagcagcggaagtccactcggcccgccctgcgactttgaaaccggtgccccggaccactccttggagacggtggcgcctcttgcgtcatcacgcgggcgttggagcttacgccatcgcgcgtcctagagtcctagcacgctattggctggctgtcaagcaatgggaggagtcgtgagaacctggatgacagcgggctgagccaccggcttggcgcggcggccaaactggtgggacagtgtctccaggtagtgaggcccaacctctttaaaacaaacaaacaaacaaacaaaaaaccaaaatgcaaacgtgagtagagaatgaaatacacagtttaaatgccctcactatctttgggttactaatatactaagcctttctggactaagtaaaagatgcaggttcctgcggctagggatagaagccagactggcgtcttcagaatctcccaccaaggctgtacctctggaggagttctaggtttggatttggtcatctcaagaagagacttcagatggattttaaaattgaacacacttgggatggttttccagtgaagcatgagcccgtatttatcaggctgaatccaggtgacagaggagtgatgatggacattagtgctccatttttcagggatcctccagccccacttggagaaccaggaaaacctttcaatgaactgtgggattatgaagttgtggaagcatttttcttgaatgatataactgagcaatatttagaagttgaactttgtccccacggacagcatttagtgcttttactttctggaagaagaaatgtgtggaaacaagaacttcctttatcgttcagaatgtccagaggagagacaaaatgggaaggcaaagcttatctcccttggagttattttccaccaaatgtgacaaaattcaattcatttgcaattcatggatcaaaagataaacgaagttatgaagctctttaccctgtacctcagcatgaactgcagcaaggacaaaaacctgatttccattgcctagaatacttcaagtctttcaattttaacacactgcttggagaagagtggaaacaaccggaatcagacctgtggctaatagagaaatgtgatatataggagtaatagataaccataccgatcattttttcctctataccttttaagataaacaaaaaataaatatcaattttttaagatgtcatgcatacatttcaacaacaaatatcttcatagaagtcactgaaaatatagtatctgtggcaaattgtatatgattaacaagaaaatatatgattctttgtagatgatttcatctgtaaagtcacaatgtttctcagagtcacttagtccaggatgttgcattcccagcacacagtacagttattcttgaaaactacaagtgaaaaagggggaacaattgaggttgtccaaggccacctagaggactgtcttgcactaccttgtgattcaaccatttcattcctagatatataccccagaaaaatgactgctcatagcagctttattcataatagcacaaaattgtaaacagtgaaatttccatccataggaaaatggatagacaaactacaatatagtcagtggaatactgttcatttaaaaaaggactgctgatacatgcaacaacctgtatgaatctcaaaaacattaagttgagcaaaacaaaccaaacataacatactatctaattacttttatattaaagccacttccaggcaaaactaatatttgatgatagataccagaacagtggctgcttagagtgagggcagggaattcaaattgaatggaaaaggggcctgaggaaattttccggggtgattgaaatgttttgtattttgatctggatgatggttatgtagctgcatatatttgtcaacattcctcatgctgtatgtttagatttgtgattttactatatgtaaattaattccttaataaaatactattataaaataagctgtaaattaaatggaattaacttcaagtttacattgagtttatatgtttccattgaacaatcactagtgatggttaaatgtggcttatcgacttactcatttcttatatatgttctctatctaaaaagagagctggtgtaagataaatgctaacttttacaaaaggtattattaagtatcctgactacacatcatggtggcagtgttaggcatcttagataaattgagaaattattcttaaaactgacaatagcaactaattaatttgatatagaaacgatctgcctgttttagatacgaatggcatattttaaataacctaggacgatttatttataaattacctgaataattttataaatgcatataaaactatcaaaataaaaacaagatatattttagagcatcttgattttagaagcgaatcgaacactgtgaatcacagtttcagatataaatcataactatttataatatggataaaaatgaagcacaaatatgatagatacaatcacaacaatataaaatactgaatttgaatgttgtagcttgtgagctttctcaaatctaatgtgtatctttttaaaatttgtttagatgttttttaaacatctcttaactttctttcatctagataaggcatttccttttcttccaataccaagcaagcaaaaa

SEQ ID NO: 40179 - DNA, 1588 bp, Artificial Sequence
  derived and/or modified sequence
gcagctgggtggagcctaaagccgagccctctcctgtgacctcggctgaaaagaagaagccagtgtttgagaaaagcttcgtgagacttcagatggattttaaaattgaacacacttgggatggttttccagtgaagcatgagcccgtatttatcaggctgaatccaggtgacagaggagtgatgatggacattagtgctccatttttcagggatcctccagccccacttggagaaccaggaaaacctttcaatgaactgtgggattatgaagttgtggaagcatttttcttgaatgatataactgagcaatatttagaagttgaactttgtccccacggacagcatttagtgcttttactttctggaagaagaaatgtgtggaaacaagaacttcctttatcgttcagaatgtccagaggagagacaaaatgggaaggcaaagcttatctcccttggagttattttccaccaaatgtgacaaaattcaattcatttgcaattcatggatcaaaagataaacgaagttatgaagctctttaccctgtacctcagcatgaactgcagcaaggacaaaaacctgatttccattgcctagaatacttcaagtctttcaattttaacacactgcttggagaagagtggaaacaaccggaatcagacctgtggctaatagagaaatgtgatatataggagtaatagataaccataccgatcattttttcctctataccttttaagataaacaaaaaataaatatcaattttttaagatgtcatgcatacatttcaacaacaaatatcttcatagaagtcactgaaaatatagtatctgtggcaaattgtatatgattaacaagaaaatatatgattctttgtagatgatttcatctgtaaagtcacaatgtttctcagagtcacttagtccaggatgttgcattcccagcacacagtacagttattcttgaaaactacaagtgaaaaagggggaacaattgaggttgtccaaggccacctagaggactgtcttgcactaccttgtgattcaaccatttcattcctagatatataccccagaaaaatgactgctcatagcagctttattcataatagcacaaaattgtaaacagtgaaatttccatccataggaaaatggatagacaaactacaatatagtcagtggaatactgttcatttaaaaaaggactgctgatacatgcaacaacctgtatgaatctcaaaaacattaagttgagcaaaacaaaccaaacataacatactatctaattacttttatattaaagccacttccaggcaaaactaatatttgatgatagataccagaacagtggctgcttagagtgagggcagggaattcaaattgaatggaaaaggggcctgaggaaattttccggggtgattgaaatgttttgtattttgatctggatgatggttatgtagctgcatatatttgtcaacattcctcatgctgtatgtttagatttgtgattttactatatgtaaattaattccttaataaaatactattataaaataagctgtaaattaaatggaattaacttcaagttt

SEQ ID NO: 40180 - DNA, 600 bp, Artificial Sequence
  derived and/or modified sequence
atggacttcaagatcgagcacacctgggacggcttccccgtgaagcacgagcccgtgttcatcagactgaaccccggcgacagaggcgtgatgatggacatcagcgcccccttcttcagagacccccccgcccccctgggcgagcccggcaagcccttcaacgagctgtgggactacgaggtggtggaggccttcttcctgaacgacatcaccgagcagtacctggaggtggagctgtgcccccacggccagcacctggtgctgctgctgagcggcagaagaaacgtgtggaagcaggagctgcccctgagcttcagaatgagcagaggcgagaccaagtgggagggcaaggcctacctgccctggagctacttcccccccaacgtgaccaagttcaacagcttcgccatccacggcagcaaggacaagagaagctacgaggccctgtaccccgtgccccagcacgagctgcagcagggccagaagcccgacttccactgcctggagtacttcaagagcttcaacttcaacaccctgctgggcgaggagtggaagcagcccgagagcgacctgtggctgatcgagaagtgcgacatctag

SEQ ID NO: 40181 - DNA, 600 bp, Artificial Sequence
  derived and/or modified sequence
atggactttaagatcgagcatacctgggacggctttcctgtgaagcacgagcctgtctttatccggctgaacccgggagaccgcggggtcatgatggatatatcagcgcctttttttagagaccctcccgccccgctgggagagccagggaaaccattcaacgagctgtgggactatgaagtcgttgaagcgttcttccttaatgatatcactgagcagtatctggaagttgaattgtgcccgcacggtcagcatttagttcttctcttgtccgggcggagaaacgtatggaaacaggaactgccactcagctttcggatgtcgcgcggcgagacaaagtgggagggcaaagcatatctgccttggagttacttccccccaaatgtcactaagtttaattctttcgccatccatgggtctaaagataaacgatcttacgaagctctgtatcctgtccctcagcacgaactgcagcagggtcagaaacccgacttccattgcctcgaatacttcaaaagttttaatttcaatacgctgttaggagaggaatggaaacagccagagtcagatctgtggctgattgagaagtgtgacatatag

SEQ ID NO: 40182 - DNA, 600 bp, Artificial Sequence
  derived and/or modified sequence
atggatttcaaaatagaacacacgtgggatggtttcccggtcaagcacgaaccagtgttcatacgtttaaaccctggggatcgcggtgtgatgatggatattagtgctccttttttcagagatcctccagcgcccctgggagaacccgggaagccattcaacgagctgtgggactacgaggtggtcgaagccttttttttaaacgatattactgagcagtatctggaagtggagctgtgtccccatggacaacatttggtactcctgctgtcagggagaaggaatgtgtggaagcaggagcttccccttagcttccggatgtctaggggcgagacaaagtgggaaggcaaagcctaccttccgtggtcctattttcctcccaatgtcacaaagttcaatagctttgccatccatggaagtaaagacaaacgtagttatgaggcactctaccccgtacctcaacacgagctgcagcagggccagaaacctgatttccactgtctagaatactttaaatcttttaattttaacaccctcctgggggaggaatggaagcaaccagagtctgatctgtggctgattgaaaaatgtgacatatag

SEQ ID NO: 40183 - DNA, 600 bp, Artificial Sequence
  derived and/or modified sequence
atggacttcaagattgagcacacctgggatggcttccctgtgaagcatgagcccgtcttcatccggctgaaccctggggacagaggagtgatgatggacatcagcgcccccttcttccgggaccccccagcccccctgggggagcccgggaagcccttcaatgagctgtgggactatgaggtggtggaggccttcttcctgaatgacatcacagagcagtacctggaggtggagctgtgcccccacggccagcacctggtgctgctgctgtctggaagaagaaatgtgtggaagcaggagctgcccctgtccttcaggatgagcagaggagagaccaagtgggagggcaaggcctacctgccctggagctacttcccccccaacgtgaccaagttcaacagctttgccatccacggcagcaaggacaagaggagctatgaggccctgtaccctgtgccccagcacgagctgcagcagggccagaagccagacttccactgcctggagtacttcaagagcttcaacttcaacaccctgctgggggaggagtggaagcagcctgagagtgacctgtggctgattgagaagtgtgacatctag

SEQ ID NO: 40184 - DNA, 600 bp, Artificial Sequence
  derived and/or modified sequence
atggacttcaagatcgagcacacctgggacggcttccccgtgaagcacgaacccgtttttatcagactcaatcctggcgacagaggcgtgatgatggacatatctgccccgttctttagagaccctcccgctccactcggtgagccgggcaagccattcaacgagttgtgggattatgaggtcgttgaggccttcttccttaatgacataactgagcaatatctcgaagtggagctatgccctcatggacagcacttggtcctgctactgtcagggaggaggaatgtttggaagcaggaactgcctctgtctttcagaatgagccgaggtgagaccaaatgggagggcaaggcctatttgccctggtcatactttcctcctaatgtgaccaaatttaattccttcgctattcacggctccaaggacaaaaggagttatgaagccctgtatccagtcccccagcatgagctccagcaggggcagaaacctgattttcactgcttagagtacttcaagagcttcaactttaacaccttgctgggcgaggagtggaagcagccggaatctgacctttggttgatcgagaagtgtgacatctag

SEQ ID NO: 40185 - DNA, 600 bp, Artificial Sequence
  derived and/or modified sequence
atggacttcaagatcgagcacacctgggacggcttccccgtgaagcacgagcctgtgttcatacgcctgaacccaggtgacaggggcgtgatgatggacatctccgcaccattcttccgggacccaccagcccctttgggtgaaccaggtaagccatttaatgaactgtgggattacgaggtggtggaagcattttttctgaacgatatcactgaacagtaccttgaggttgaactgtgtccacacgggcagcatctcgttcttttactgtccggtagaaggaatgtatggaaacaggaattgccactgtcatttagaatgagtcggggtgagactaagtgggagggcaaggcctatctgccttggtcttacttcccccctaacgttacgaaattcaatagctttgccatacacgggagcaaagataaaaggtcctacgaggcactgtaccctgttccccagcatgagctgcagcagggtcagaaacctgacttccactgccttgaatatttcaagagctttaatttcaataccctgctaggcgaggagtggaagcagcccgagagcgacctgtggcttatcgaaaagtgtgacatctag

SEQ ID NO: 40186 - DNA, 600 bp, Artificial Sequence
  derived and/or modified sequence
atggacttcaaaatcgaacatacatgggacggctttcccgtgaaacatgaaccggtcttcatacggctgaatccaggagacaggggcgtcatgatggatatcagtgcgccatttttccgcgacccccctgcccctctgggcgaacctgggaagcccttcaacgaactctgggactatgaggtggttgaggccttttttttaaatgacattactgagcagtatctcgaggtggagctatgtccacatgggcaacacctggtgttgcttttgagcggtagacggaacgtctggaagcaggaactgcctctgtcatttcgaatgtcacgcggtgagacgaaatgggaggggaaggcttatctaccctggtcatacttcccacctaatgtgaccaagttcaacagctttgccattcatggcagtaaagacaagcgcagttatgaggcactctacccagtgccgcagcacgagctgcagcaaggtcagaaacctgactttcactgcctggagtattttaagtcctttaactttaacaccttgctgggagaggagtggaagcagcctgagtcagacctgtggctaatcgagaaatgcgatatttag

SEQ ID NO: 40187 - DNA, 600 bp, Artificial Sequence
  derived and/or modified sequence
atggattttaagatagagcatacatgggacggcttccccgtcaagcacgaacctgtgttcatccgtctgaatcctggcgatcgcggagtaatgatggatatcagtgcgcctttcttccgcgatcccccagctcctttgggcgagcccggaaaacccttcaatgaactttgggattatgaggtggtagaagccttttttctgaacgatatcaccgagcaatacttagaggtggaattgtgcccccatggccagcatttggtcctgctgctctctggcagacgaaacgtatggaaacaggagttgccactatctttccgcatgagtagaggtgagactaagtgggaagggaaggcatatctcccttggagctattttcctcccaacgttactaaatttaactctttcgccattcacggcagcaaagacaaacggtcttatgaggctctatatcctgttccccagcatgagctgcagcaaggacagaagcccgacttccattgcctggagtactttaaatcgttcaattttaacacgttactgggcgaggaatggaagcagcccgaaagtgatctatggctgattgagaaatgcgatatctag

SEQ ID NO: 40188 - protein, 674 aa, Artificial Sequence
  derived and/or modified sequence
MSSSSRGPGAGARRRRTRCRRCRACVRTECGDCHFCRDMKKFGGPGRMKQSCLLRQCTAPVLPHTAVCLLCGEAGKEDTVEGEEEKFGLSLMECTICNEIVHPGCLKMGKAEGVINAEIPNCWECPRCTQEGRTSKDSGEGPGRRRADNGEEGASLGSGWKLTEEPPLPPPPPRRKGPLPAGPPPEDVPGPPKRKEREAGNEPPTPRKKVKGGRERHLKKVGGDACLLRGSDPGGPGLLPPRVLNPSQAFSSCHPGLPPENWEKPKPPLASAEGPAVPSPSPQREKLERFKRMCQLLERVPDTSSSSSDSDSDSDSSGTSLSEDEAPGEARNGRRPARGSSGEKENRGGRRAVRPGSGGPLLSWPLGPAPPPRPPQLERHVVRPPPRSPEPDTLPLAAGSDHPLPRAAWLRVFQHLGPRELCICMRVCRTWSRWCYDKRLWPRMDLSRRKSLTPPMLSGVVRRQPRALDLSWTGVSKKQLMWLLNRLQGLQELVLSGCSWLSVSALGSAPLPALRLLDLRWIEDVKDSQLRELLLPPPDTKPGQTESRGRLQGVAELRLAGLELTDASLRLLLRHAPQLSALDLSHCAHVGDPSVHLLTAPTSPLRETLVHLNLAGCHRLTDHCLPLFRRCPRLRRLDLRSCRQLSPEACARLAAAGPPGPFRCPEEKLLLKDS

SEQ ID NO: 40189 - protein, 694 aa, Artificial Sequence
  derived and/or modified sequence
MGMKVPGKGESGPSALLTPPMSSSSRGPGAGARRRRTRCRRCRACVRTECGDCHFCRDMKKFGGPGRMKQSCLLRQCTAPVLPHTAVCLLCGEAGKEDTVEGEEEKFGLSLMECTICNEIVHPGCLKMGKAEGVINAEIPNCWECPRCTQEGRTSKDSGEGPGRRRADNGEEGASLGSGWKLTEEPPLPPPPPRRKGPLPAGPPPEDVPGPPKRKEREAGNEPPTPRKKVKGGRERHLKKVGGDACLLRGSDPGGPGLLPPRVLNPSQAFSSCHPGLPPENWEKPKPPLASAEGPAVPSPSPQREKLERFKRMCQLLERVPDTSSSSSDSDSDSDSSGTSLSEDEAPGEARNGRRPARGSSGEKENRGGRRAVRPGSGGPLLSWPLGPAPPPRPPQLERHVVRPPPRSPEPDTLPLAAGSDHPLPRAAWLRVFQHLGPRELCICMRVCRTWSRWCYDKRLWPRMDLSRRKSLTPPMLSGVVRRQPRALDLSWTGVSKKQLMWLLNRLQGLQELVLSGCSWLSVSALGSAPLPALRLLDLRWIEDVKDSQLRELLLPPPDTKPGQTESRGRLQGVAELRLAGLELTDASLRLLLRHAPQLSALDLSHCAHVGDPSVHLLTAPTSPLRETLVHLNLAGCHRLTDHCLPLFRRCPRLRRLDLRSCRQLSPEACARLAAAGPPGPFRCPEEKLLLKDS

SEQ ID NO: 40190 - protein, 586 aa, Artificial Sequence
  derived and/or modified sequence
  misc_feature (1)..(1): Xaa can be any naturally occurring amino acid
XRMKQSCLLRQCTAPVLPHTAVCLLCGEAGKEDTVEGEEEKFGLSLMECTICNEIVHPGCLKMGKAEGVINAEIPNCWECPRCTQEGRTSKDSGEGPGRRRADNGEEGASLGSGWKLTEEPPLPPPPPRRKGPLPAGPPPEDVPGPPKRKEREAGNEPPTPRKKVKGGRERHLKKKPKPPLASAEGPAVPSPSPQREKLERFKRMCQLLERVPDTSSSSSDSDSDSDSSGTSLSEDEAPGEARNGRRPARGSSGEKENRGGRRAVRPGSGGPLLSWPLGPAPPPRPPQLERHVVRPPPRSPEPDTLPLAAGSDHPLPRAAWLRVFQHLGPRELCICMRVCRTWSRWCYDKRLWPRMDLSRRKSLTPPMLSGVVRRQPRALDLSWTGVSKKQLMWLLNRLQGLQELVLSGCSWLSVSALGSAPLPALRLLDLRWIEDVKDSQLRELLLPPPDTKPGQTESRGRLQGVAELRLAGLELTDASLRLLLRHAPQLSALDLSHCAHVGDPSVHLLTAPTSPLRETLVHLNLAGCHRLTDHCLPLFRRCPRLRRLDLRSCRQLSPEACARLAAAGPPGPFRCPEEKLLLKDS

SEQ ID NO: 40191 - DNA, 3965 bp, Artificial Sequence
  derived and/or modified sequence
gggaggggagctgggactcggacccgggactgagtgggccccgggcagaagctgagcaccctgcgcccaaggagcccccgttggcctgggggggctgagggactgagcctcccagagcaggacctccccctggaagggccgcgccgcagcccgtgggagggcctcgcccccggcgccccccatctccactcgccgccgtcccggcctccgccggagggaggggccgagcgccctcggggggccgtggaccccggcgttctgagcgttccgcgccccgcgccgcccggcccccccgccgccgatggccgccgacccgccgggagctgccgagaagggagagatggctcccgggacacgtgtgagccctcggcgttgctgacgcccccaatgtcgtcgagcagccgggggccgggggccggagcgcgccgacgccgaacccgctgccgccgctgccgggcctgtgtgcgaactgagtgcggggattgccacttctgccgagacatgaagaagttcggggggcccgggcgcatgaagcagtcgtgcctgctccggcagtgcactgcccccgtgctcccacacacagctgtgtgcctcttgtgtggggaggctgggaaggaggacacggtggagggagaggaagagaaatttggtttgagcctcatggagtgtacaatctgcaacgagatcgtccaccccggctgcctgaagatggggaaggctgagggtgtcatcaatgcagagatccccaactgctgggagtgccctcgctgcacccaggaaggccgcaccagcaaggattcaggtgaggggcctggccgccgtagggccgacaacggcgaggagggcgccagcttggggagcggatggaagctgacagaggagccaccgcttccaccgcccccgcccaggcgcaagggccccctgcctgccgggccccccccggaggacgtgcctgggccccccaaacgaaaggaaagggaggcagggaatgagcctcccaccccaaggaaaaaggtgaaaggaggccgagagaggcacctgaagaaggtgggtggagacgcctgcctcctccgaggatcggacccaggcggcccgggcctgctgccccccagggttctgaatccgagccaggctttctcatcctgccaccctgggctccctcccgagaactgggagaaaccaaagccgcctttggcctctgcagagggcccagcggtgccgtccccgtccccgcagagggagaagctagagcgtttcaagcggatgtgccagctgctggaacgggtgcctgacacctcctcttcctcctcggactcagactccgactccgactcttcgggcacatcgctgagtgaggacgaagcccccggcgaggcccggaatgggcgacggccagcccggggcagctctggcgagaaggagaaccgtggggggcggcgggctgtgcgccctggcagtggggggcccctactcagctggcccctgggcccagccccaccaccccggcctccacagctggagcggcacgtggtgcggcccccgcctcgaagccctgagcccgacacactccccttggctgctggatccgaccaccccctgccccgggccgcctggcttcgcgtcttccagcacctcgggccgcgggagctgtgtatctgcatgcgagtctgccgaacttggagccgctggtgctatgacaagcgtctgtggcctcgaatggacctgagccggcggaagtcactgaccccgcccatgctcagtggtgtggttcgccgccagccccgtgccctggacctcagctggacaggtgtctccaagaagcagctcatgtggcttctgaaccgactacaaggcctgcaggagctggtgctctctggctgctcctggctctctgtctctgccctgggctcagccccactgccagccctgcggctcctggacctccgctggatcgaggatgttaaagactcccagctccgggagttgctgctgcctccaccagacaccaaaccagggcaaacagagagccgtggtcggctgcagggggtggcagaactgcgtctggcaggtttggagctgacagatgcctccctgcgtctcctgctgcgtcacgcaccccagctgagcgccctggacctgagccactgcgcccacgtcggggaccccagtgttcacctcctcacggcccccacgtccccactccgcgagaccctggtgcacctcaatcttgctggttgccaccgcctaacggaccactgcctcccgctgttccgccgctgccctcgtctacgccgcctagacctgcgctcctgccgccagctctcacccgaagcttgtgcccggctggcagctgccgggccccctggccccttccgctgccctgaggagaagctgcttctcaaggacagctagttgggcgccccccaccctcccccggactcgacaggagcctggacctccggcttcatttcacccctgctgggaggccaggttcccacctcaccaccctgggattcctgagtgtcagtgacttgggattcccacccagggactcaagccagccacccccttctttcccccctgcactgatatctctgggggtttctccttcctatgtcctgcccctgctacctgcttcattgtccatcccctgggggagtgggtcagaggtactggagggtgctgagccgaagggacggtgggaggggggttatggtgcaagtgttgggggggagaatggggaaaggacacacacaggatatgggagccaggggctgggggaggtggaaggggcggggggcggggcagacagcagaccaccaagggttcagggaacaaagaccagttacttggagtggggggtgggggtggggccacaaaaggaaaaccggaggagcaattggggatccaggtgtcagaggtaggggaaccaggggcaagctggggctgagctggaggtggggatgagagcaggtgtggggacagcaatacccccttgggggtcacctctctgcttcccccctccccaggcttcagttccttccccctgaccctgactccttgaacgtcactgaaaacggcagctattgcaaggagtgggggccgcgggcagccgctcttcagctcgcggcccaggggagtggcgaggggcgccccaaccccctgcccgcctctccgcacaatacttgaacattcatctgtactgaagtgttacttgaaccgggggaatctcggacctgggggagccggggtgtgaggggactggaccagcttggactgagacctgagaccgggccggtgggcgcccatttgggactgcgccacccccaggcttgttcttgttttactgtattgagcggcggcacccgccggacccgcattatggctgggggcgccagcccaagaatggggaccatgggactcctccagcctggctcttcccactctttcatcgtcatggaaacttgtatcccatttgcccagggaactgccactcctggttgccatggaaatagcagccaacggacacctcccgatgccagtgctaaggctggaaatggccccctcttagttgccatgggaacctagtaacagactctgctggccctccttccctgccccttcctcgagcgcggggtggggcttcgggaccccggggatgagccgggccaggtcccgcccctccgcgcaggcctccggggggccggggcttaccatgtaggggaggggagatctatccacatacctcaggtaacagggaggtgcgcgggtggggggagggctgggcggaccaaaggccggaggggtggggcctggggatagcgagaggcttgagaatggggccgcttgggggagggaagaggcagcccggcgaggggcaagcgggggacccagccgggctgggcccctgggccccgggtctgtacaatacggtttgctataaaactcaaaatcttccagccggg

SEQ ID NO: 40192 - DNA, 3796 bp, Artificial Sequence
  derived and/or modified sequence
aaactcatctccagccctccttcctatgacctctccaccctggggaactggccctccttcctagaccctgcttccccttgaaagcccccacccccgcctgcagtcgccgccctccaggcccctcccctggagcgctggagggccccttagccccatggatgggtatgaaagtccccggaaagggggaatctgggccctcggcgttgctgacgcccccaatgtcgtcgagcagccgggggccgggggccggagcgcgccgacgccgaacccgctgccgccgctgccgggcctgtgtgcgaactgagtgcggggattgccacttctgccgagacatgaagaagttcggggggcccgggcgcatgaagcagtcgtgcctgctccggcagtgcactgcccccgtgctcccacacacagctgtgtgcctcttgtgtggggaggctgggaaggaggacacggtggagggagaggaagagaaatttggtttgagcctcatggagtgtacaatctgcaacgagatcgtccaccccggctgcctgaagatggggaaggctgagggtgtcatcaatgcagagatccccaactgctgggagtgccctcgctgcacccaggaaggccgcaccagcaaggattcaggtgaggggcctggccgccgtagggccgacaacggcgaggagggcgccagcttggggagcggatggaagctgacagaggagccaccgcttccaccgcccccgcccaggcgcaagggccccctgcctgccgggccccccccggaggacgtgcctgggccccccaaacgaaaggaaagggaggcagggaatgagcctcccaccccaaggaaaaaggtgaaaggaggccgagagaggcacctgaagaaggtgggtggagacgcctgcctcctccgaggatcggacccaggcggcccgggcctgctgccccccagggttctgaatccgagccaggctttctcatcctgccaccctgggctccctcccgagaactgggagaaaccaaagccgcctttggcctctgcagagggcccagcggtgccgtccccgtccccgcagagggagaagctagagcgtttcaagcggatgtgccagctgctggaacgggtgcctgacacctcctcttcctcctcggactcagactccgactccgactcttcgggcacatcgctgagtgaggacgaagcccccggcgaggcccggaatgggcgacggccagcccggggcagctctggcgagaaggagaaccgtggggggcggcgggctgtgcgccctggcagtggggggcccctactcagctggcccctgggcccagccccaccaccccggcctccacagctggagcggcacgtggtgcggcccccgcctcgaagccctgagcccgacacactccccttggctgctggatccgaccaccccctgccccgggccgcctggcttcgcgtcttccagcacctcgggccgcgggagctgtgtatctgcatgcgagtctgccgaacttggagccgctggtgctatgacaagcgtctgtggcctcgaatggacctgagccggcggaagtcactgaccccgcccatgctcagtggtgtggttcgccgccagccccgtgccctggacctcagctggacaggtgtctccaagaagcagctcatgtggcttctgaaccgactacaaggcctgcaggagctggtgctctctggctgctcctggctctctgtctctgccctgggctcagccccactgccagccctgcggctcctggacctccgctggatcgaggatgttaaagactcccagctccgggagttgctgctgcctccaccagacaccaaaccagggcaaacagagagccgtggtcggctgcagggggtggcagaactgcgtctggcaggtttggagctgacagatgcctccctgcgtctcctgctgcgtcacgcaccccagctgagcgccctggacctgagccactgcgcccacgtcggggaccccagtgttcacctcctcacggcccccacgtccccactccgcgagaccctggtgcacctcaatcttgctggttgccaccgcctaacggaccactgcctcccgctgttccgccgctgccctcgtctacgccgcctagacctgcgctcctgccgccagctctcacccgaagcttgtgcccggctggcagctgccgggccccctggccccttccgctgccctgaggagaagctgcttctcaaggacagctagttgggcgccccccaccctcccccggactcgacaggagcctggacctccggcttcatttcacccctgctgggaggccaggttcccacctcaccaccctgggattcctgagtgtcagtgacttgggattcccacccagggactcaagccagccacccccttctttcccccctgcactgatatctctgggggtttctccttcctatgtcctgcccctgctacctgcttcattgtccatcccctgggggagtgggtcagaggtactggagggtgctgagccgaagggacggtgggaggggggttatggtgcaagtgttgggggggagaatggggaaaggacacacacaggatatgggagccaggggctgggggaggtggaaggggcggggggcggggcagacagcagaccaccaagggttcagggaacaaagaccagttacttggagtggggggtgggggtggggccacaaaaggaaaaccggaggagcaattggggatccaggtgtcagaggtaggggaaccaggggcaagctggggctgagctggaggtggggatgagagcaggtgtggggacagcaatacccccttgggggtcacctctctgcttcccccctccccaggcttcagttccttccccctgaccctgactccttgaacgtcactgaaaacggcagctattgcaaggagtgggggccgcgggcagccgctcttcagctcgcggcccaggggagtggcgaggggcgccccaaccccctgcccgcctctccgcacaatacttgaacattcatctgtactgaagtgttacttgaaccgggggaatctcggacctgggggagccggggtgtgaggggactggaccagcttggactgagacctgagaccgggccggtgggcgcccatttgggactgcgccacccccaggcttgttcttgttttactgtattgagcggcggcacccgccggacccgcattatggctgggggcgccagcccaagaatggggaccatgggactcctccagcctggctcttcccactctttcatcgtcatggaaacttgtatcccatttgcccagggaactgccactcctggttgccatggaaatagcagccaacggacacctcccgatgccagtgctaaggctggaaatggccccctcttagttgccatgggaacctagtaacagactctgctggccctccttccctgccccttcctcgagcgcggggtggggcttcgggaccccggggatgagccgggccaggtcccgcccctccgcgcaggcctccggggggccggggcttaccatgtaggggaggggagatctatccacatacctcaggtaacagggaggtgcgcgggtggggggagggctgggcggaccaaaggccggaggggtggggcctggggatagcgagaggcttgagaatggggccgcttgggggagggaagaggcagcccggcgaggggcaagcgggggacccagccgggctgggcccctgggccccgggtctgtacaatacggtttgctataaaactcaaaatcttccagccggg

SEQ ID NO: 40193 - DNA, 3312 bp, Artificial Sequence
  derived and/or modified sequence
gcgcatgaagcagtcgtgcctgctccggcagtgcactgcccccgtgctcccacacacagctgtgtgcctcttgtgtggggaggctgggaaggaggacacggtggagggagaggaagagaaatttggtttgagcctcatggagtgtacaatctgcaacgagatcgtccaccccggctgcctgaagatggggaaggctgagggtgtcatcaatgcagagatccccaactgctgggagtgccctcgctgcacccaggaaggccgcaccagcaaggattcaggtgaggggcctggccgccgtagggccgacaacggcgaggagggcgccagcttggggagcggatggaagctgacagaggagccaccgcttccaccgcccccgcccaggcgcaagggccccctgcctgccgggccccccccggaggacgtgcctgggccccccaaacgaaaggaaagggaggcagggaatgagcctcccaccccaaggaaaaaggtgaaaggaggccgagagaggcacctgaagaagaaaccaaagccgcctttggcctctgcagagggcccagcggtgccgtccccgtccccgcagagggagaagctagagcgtttcaagcggatgtgccagctgctggaacgggtgcctgacacctcctcttcctcctcggactcagactccgactccgactcttcgggcacatcgctgagtgaggacgaagcccccggcgaggcccggaatgggcgacggccagcccggggcagctctggcgagaaggagaaccgtggggggcggcgggctgtgcgccctggcagtggggggcccctactcagctggcccctgggcccagccccaccaccccggcctccacagctggagcggcacgtggtgcggcccccgcctcgaagccctgagcccgacacactccccttggctgctggatccgaccaccccctgccccgggccgcctggcttcgcgtcttccagcacctcgggccgcgggagctgtgtatctgcatgcgagtctgccgaacttggagccgctggtgctatgacaagcgtctgtggcctcgaatggacctgagccggcggaagtcactgaccccgcccatgctcagtggtgtggttcgccgccagccccgtgccctggacctcagctggacaggtgtctccaagaagcagctcatgtggcttctgaaccgactacaaggcctgcaggagctggtgctctctggctgctcctggctctctgtctctgccctgggctcagccccactgccagccctgcggctcctggacctccgctggatcgaggatgttaaagactcccagctccgggagttgctgctgcctccaccagacaccaaaccagggcaaacagagagccgtggtcggctgcagggggtggcagaactgcgtctggcaggtttggagctgacagatgcctccctgcgtctcctgctgcgtcacgcaccccagctgagcgccctggacctgagccactgcgcccacgtcggggaccccagtgttcacctcctcacggcccccacgtccccactccgcgagaccctggtgcacctcaatcttgctggttgccaccgcctaacggaccactgcctcccgctgttccgccgctgccctcgtctacgccgcctagacctgcgctcctgccgccagctctcacccgaagcttgtgcccggctggcagctgccgggccccctggccccttccgctgccctgaggagaagctgcttctcaaggacagctagttgggcgccccccaccctcccccggactcgacaggagcctggacctccggcttcatttcacccctgctgggaggccaggttcccacctcaccaccctgggattcctgagtgtcagtgacttgggattcccacccagggactcaagccagccacccccttctttcccccctgcactgatatctctgggggtttctccttcctatgtcctgcccctgctacctgcttcattgtccatcccctgggggagtgggtcagaggtactggagggtgctgagccgaagggacggtgggaggggggttatggtgcaagtgttgggggggagaatggggaaaggacacacacaggatatgggagccaggggctgggggaggtggaaggggcggggggcggggcagacagcagaccaccaagggttcagggaacaaagaccagttacttggagtggggggtgggggtggggccacaaaaggaaaaccggaggagcaattggggatccaggtgtcagaggtaggggaaccaggggcaagctggggctgagctggaggtggggatgagagcaggtgtggggacagcaatacccccttgggggtcacctctctgcttcccccctccccaggcttcagttccttccccctgaccctgactccttgaacgtcactgaaaacggcagctattgcaaggagtgggggccgcgggcagccgctcttcagctcgcggcccaggggagtggcgaggggcgccccaaccccctgcccgcctctccgcacaatacttgaacattcatctgtactgaagtgttacttgaaccgggggaatctcggacctgggggagccggggtgtgaggggactggaccagcttggactgagacctgagaccgggccggtgggcgcccatttgggactgcgccacccccaggcttgttcttgttttactgtattgagcggcggcacccgccggacccgcattatggctgggggcgccagcccaagaatggggaccatgggactcctccagcctggctcttcccactctttcatcgtcatggaaacttgtatcccatttgcccagggaactgccactcctggttgccatggaaatagcagccaacggacacctcccgatgccagtgctaaggctggaaatggccccctcttagttgccatgggaacctagtaacagactctgctggccctccttccctgccccttcctcgagcgcggggtggggcttcgggaccccggggatgagccgggccaggtcccgcccctccgcgcaggcctccggggggccggggcttaccatgtaggggaggggagatctatccacatacctcaggtaacagggaggtgcgcgggtggggggagggctgggcggaccaaaggccggaggggtggggcctggggatagcgagaggcttgagaatggggccgcttgggggagggaagaggcagcccggcgaggggcaagcgggggacccagccgggctgggcccctgggccccgggtctgtacaatacggtttgctataaaactcaaaatcttccagccggg

SEQ ID NO: 40194 - DNA, 2025 bp, Artificial Sequence
  derived and/or modified sequence
atgtcgtcttcaagtcgaggccccggcgccggggcaaggcggcgcagaactcgttgcagacgctgtcgcgcatgcgtgaggactgagtgcggcgattgccacttttgcagggacatgaagaagtttggcggtccaggccgcatgaaacaaagttgcttgttgagacagtgcactgcgccagttcttcctcacaccgcagtttgtttactgtgtggcgaggcgggcaaggaggacactgttgaaggagaggaggaaaaattcggcctgtcactgatggagtgtactatctgcaacgagattgtgcatccaggctgcctcaagatggggaaagccgagggggtaattaatgctgagatacccaactgctgggaatgtccccggtgtacccaggagggaagaactagtaaggattccggagagggtccgggtagacgcagagcagataatggagaagagggtgcctctcttgggtcgggttggaaactcaccgaagaacctccacttcctccacctccgccaagacggaaaggccccctgccagctggacccccaccagaggacgtgcctggtccacccaagagaaaggaacgcgaagccggcaacgagcctcccacaccccgcaaaaaggtgaagggcgggcgtgaaaggcacctcaagaaggtggggggggatgcttgcctactcagggggtctgacccaggcggacccggattgctgccaccccgcgttctcaacccgtcacaggccttttcctcttgccaccccggactgcctccggagaactgggagaaacccaaaccaccactcgcatccgccgagggccccgcagtgcctagcccttccccccagcgcgagaaattggaacggtttaaaagaatgtgtcagctcctggaaagagttcccgacactagcagctcaagctcagactcagacagcgactccgattccagcggcacttccctgtctgaagatgaggccccgggggaagccaggaacgggcggaggcctgcccggggaagcagtggggagaaggagaaccgtggtggcagacgcgcggttaggcctgggagtggagggccccttttatcctggccactcggccccgcacctccaccacggccacctcagctggagcggcatgtggttcgccccccaccgcgtagccctgagccggacactctgcctctggctgctggctccgaccatcccctgcctagagctgcatggcttcgggtgttccagcatctgggacccagggaactgtgtatctgtatgcgcgtttgtaggacctggtctcggtggtgctacgacaagcgactctggcctagaatggacctctcgcggcgcaagtccctgacgccgcccatgctgagtggcgtcgtgcggcggcagccacgggctctggatctttcgtggactggagtttccaaaaagcagttgatgtggctcctcaatcggttgcaaggcttgcaggaattagtcctcagcggttgctcgtggcttagcgtcagcgccctgggatccgcacctctaccagcactccgcctcctggacctgcggtggattgaagatgttaaagactcacaacttcgagaactcctgcttcctcctcccgacaccaaacccggccaaacggaatcacggggcagactccaaggagtcgcagagcttcggctcgccgggctcgaacttactgatgccagcctgcggctactgttgcgccatgccccccaactttctgccctggacctatcccattgtgcacacgttggcgacccatctgtacatcttctgaccgctcctactagcccgctgagagaaacactcgtgcatttaaatttggcaggctgccatagattgaccgaccactgcttacccctgttccggcggtgtcctcgcctgcgtcgccttgacctgcgctcttgtcgccagttaagtcccgaggcatgcgcaaggctcgccgccgcaggcccacctggtccctttcgctgtcccgaggaaaagttgcttttgaaggacagttag

SEQ ID NO: 40195 - DNA, 2085 bp, Artificial Sequence
  derived and/or modified sequence
atgggtatgaaagttccgggaaaaggggaatccgggccctcggctttactaacgccccctatgtcttccagctccaggggccccggggcaggagcacgcaggaggagaacccgctgcagaagatgccgggcctgtgttagaacagaatgtggggactgccacttttgcagagacatgaaaaagttcggcggacccggccgcatgaagcaatcctgtctcctgcggcagtgcaccgcccctgttctgcctcacacagcggtatgcctactgtgtggagaggccggaaaagaggataccgtggagggtgaagaagagaagtttggcttatctttaatggagtgcaccatctgcaatgagatcgttcatccaggatgtctcaagatgggaaaggcggagggggtgatcaacgccgagatcccaaattgttgggagtgcccccgctgtactcaggagggccggacaagcaaggacagtggggagggaccaggacgcagacgtgctgacaacggagaggaaggggccagtcttggttctggctggaagctaacggaagagccccctttgcccccacctccacctcgacggaaaggacccttgcccgcaggtcccccgcctgaggacgtgcctggaccgccaaaacggaaggagcgggaagctggcaatgaacccccaacccccagaaagaaggtgaaagggggtagagaacggcacctgaagaaggtgggtggtgacgcatgtctgctccgcggtagtgatcccggtggccccggcctgttgcctcctagagtgcttaatccctctcaggcattttcttcctgccatcccggcctgcctccagaaaattgggagaagccaaagcccccactggccagcgccgagggtcccgccgtgccttcaccatccccacagcgagaaaaactggagcgttttaagcgtatgtgccagttattggaacgggtgccggataccagtagctcatcatccgatagcgattcagatagcgacagttccggaacatccctctctgaggacgaagctcctggcgaggcaagaaacggcagacgtcctgccagaggatcttcaggagaaaaagaaaaccgcgggggcagacgggcagtgaggcccgggagtgggggaccgcttctcagctggccactgggccctgcccctcctccccggccccctcagctggagcgccacgtggttaggccccccccacgctcccccgagcctgacactctccctctggccgcaggatctgaccaccctctccctagagcagcatggctgcgggtattccaacacttaggccctcgagagctttgcatctgtatgcgagtttgtcggacctggtctaggtggtgttatgacaagcgcctctggcctagaatggacctgtctcgaaggaagagtctgacgcctcccatgttatcaggggtcgtccgtcgccaaccaagagcacttgacctgtcatggaccggggtatcaaagaagcagctgatgtggctcctgaaccgcctgcagggccttcaggaactggtgctgtctggttgttcttggctttccgtgtccgcgctcgggagcgctccgttgccggccttgcgcctgctggacctgcggtggatcgaagacgtgaaagacagccagttgcgcgagctgcttctgcctcccccagatacaaagccaggacagactgaatctagagggcggctgcaaggcgtcgctgaattgcgccttgccgggcttgagctgactgatgcctctctgcgcctgctgttacgccatgccccgcagctttccgccttggatctgtcgcactgtgcccacgtgggcgatccatccgtgcatctcctgaccgccccaaccagccccttgagggaaactctagtgcatctgaacttggccggatgtcaccgactcaccgatcactgtctccccctcttccgtaggtgcccacgcctgcgcagactggacctgaggtcttgtcgtcagctatcccccgaagcctgtgctcggctggcagctgcagggccgcccggtccattccggtgtccggaagagaaactcctgctcaaggactcctag

SEQ ID NO: 40196 - DNA, 1761 bp, Artificial Sequence
  derived and/or modified sequence
taaagaatgaagcagtcctgtctgttgcgccaatgtacagctcccgtgctgcctcacacggctgtctgtctcctatgcggtgaagccgggaaggaagatacagtagagggcgaagaagagaaatttggcctttccctgatggaatgcaccatctgcaacgagatcgtgcatccagggtgcctcaagatgggtaaggctgaaggggtaataaacgccgagatccccaattgctgggagtgtcctagatgcacccaggaaggaaggaccagcaaagatagcggagagggaccaggaaggagacgggccgacaacggggaggaaggtgctagccttggcagcggctggaagcttacggaagagccaccgctccctcctccaccccctagacgcaagggcccgctcccggccgggcccccccctgaggacgtcccaggcccacctaaacggaaagaacgagaagctggcaacgagcctcctaccccacgcaagaaggtgaagggagggagagagaggcatctgaagaaaaagccaaaacctcctctggcaagcgccgagggccctgccgttccctcgcccagtccacagcgcgaaaagctggagcgattcaaaaggatgtgtcaactgctggagcgagttcctgacaccagctcaagctcttcggactccgactcggatagtgatagctcaggcacttccctctcggaggacgaagcccctggggaggcccgaaacgggcggcgcccagcacgtggtagcagcggagagaaggagaatagagggggtcgcagagcagtgcgccccggctctggaggtccactcctgtcttggccactggggcctgccccgccgcccagaccaccccaactggaacgtcacgtcgtccggcccccccctcgatcccctgaaccagacacccttccattggctgctggctcagatcatccactcccccgagctgcctggctacgggtttttcagcacctaggtccgcgcgaactgtgcatctgtatgcgcgtctgtcgcacttggtcccgatggtgctacgacaagcgcctatggccgaggatggacctctcacgtaggaagtcattaacaccacctatgctctccggagtggtaagaaggcagcctcgagctttggacttgagctggaccggagtttccaaaaaacagctgatgtggctcctgaaccgcctccaggggctacaggagttggtgctttctggatgttcctggctttccgttagcgccttagggtcagcacccttaccagccctacggctgctggacctcagatggattgaagacgtgaaagacagtcagttgcgcgagctgctgctcccaccgcccgacacaaaaccagggcagaccgaaagtagagggcgcctgcagggagttgcggagctccgcctagctggcttggaactgaccgacgcttccctgcgccttctgctgcggcacgcacctcagctttctgctctggacctgagccactgcgcacacgtcggcgaccccagtgttcacctgctgaccgcgcccacctcccccttgagagagactctggtccacctcaatctggccggctgccaccgcctcaccgaccactgtctgcccctgttccggagatgtcctaggttgcgaagattggatctaagatcatgtcgccagttatcccccgaagcatgcgcacgtttggctgctgcggggcctcctgggccatttcgctgcccggaggagaaactgctgctgaaagactcttag

SEQ ID NO: 40197 - DNA, 2025 bp, Artificial Sequence
  derived and/or modified sequence
atgagcagcagcagccggggccctggggccggggccaggagaagaaggacccgctgccgccgctgccgggcctgtgtgaggacagaatgtggggactgccacttctgccgggacatgaagaagtttggaggccctggccgcatgaagcagagctgcctgctgcggcagtgcacagcccctgtgctgccccacacagctgtgtgcctgctgtgtggggaggccggcaaggaggacacagtggagggggaggaggagaagtttggcctgagcctgatggagtgcaccatctgcaatgagatcgtgcaccctggctgcctgaagatgggcaaggccgagggcgtcatcaatgctgagatccccaactgctgggagtgcccccgctgcacccaggagggccgcaccagcaaggacagcggggagggccctggaagaagaagagctgacaatggagaggagggcgccagcctgggcagcggctggaagctgacagaggagccccccctgcccccacctccacccaggaggaagggccccctgcctgctggccccccaccagaagatgtgcccggcccccccaagaggaaggagcgggaggccggaaatgaaccacccacccccaggaagaaggtgaagggcggccgggagcggcacctgaagaaggtgggcggagatgcctgcctgctgcggggcagtgaccccggcggccctggcctgctgcccccccgggtgctgaaccccagccaggccttcagcagctgccaccctggcctgcccccagagaactgggagaagcccaagccacccctggccagcgctgagggccctgctgtgcccagccccagcccccagcgggagaagctggagcgcttcaagaggatgtgccagctgctggagcgggtgcctgacaccagcagcagcagcagtgacagcgacagcgacagcgacagcagcggcaccagcctgtctgaagatgaggcccctggagaggccagaaatggccggcggcctgcccggggcagcagtggagagaaggaaaatagaggaggccggcgggctgtgcggcccggcagcggcggccccctgctgtcctggcccctgggccctgcccccccaccccggcccccccagctggagcggcacgtggtgcggcccccacccaggagccctgagccagacaccctgcccctggccgccggcagtgaccaccccctgcccagggctgcctggctgcgggtcttccagcacctgggcccccgggagctgtgcatctgcatgagggtgtgcaggacctggagccgctggtgctatgacaagaggctgtggcccaggatggacctgagcaggaggaagagcctgaccccacccatgctgagcggcgtggtgcggcggcagccccgggccctggacctgtcctggacaggagtgtccaagaagcagctgatgtggctgctgaaccggctgcagggcctgcaggagctggtgctgagcggctgctcctggctgtctgtgtctgccctgggcagcgcccccctgcctgccctgcggctgctggacctgcgctggattgaagatgtgaaggacagccagctgcgggagctgctgctgcccccaccagacaccaagccaggccagacagagagccggggccgcctgcagggcgtggccgagctgcggctggccggcctggagctgacagatgccagcctgcggctgctgctgcggcatgccccccagctgagcgccctggacctgagccactgtgcccacgtgggggaccccagcgtgcacctgctgacagcccccaccagccccctgcgggagaccctggtgcacctgaacctggccggctgccaccggctgacagaccactgcctgcccctcttccgccgctgcccccggctgcggcggctggacctgcggagctgccggcagctgagccctgaggcctgtgcccggctggccgccgccggccccccaggccccttccgctgcccagaggagaagctgctgctgaaggacagctag

SEQ ID NO: 40198 - DNA, 2085 bp, Artificial Sequence
  derived and/or modified sequence
atgggcatgaaggtgcctgggaagggggagagcggccccagcgccctgctgaccccacccatgagcagcagcagccggggccctggggccggggccaggagaagaaggacccgctgccgccgctgccgggcctgtgtgaggacagaatgtggggactgccacttctgccgggacatgaagaagtttggaggccctggccgcatgaagcagagctgcctgctgcggcagtgcacagcccctgtgctgccccacacagctgtgtgcctgctgtgtggggaggccggcaaggaggacacagtggagggggaggaggagaagtttggcctgagcctgatggagtgcaccatctgcaatgagatcgtgcaccctggctgcctgaagatgggcaaggccgagggcgtcatcaatgctgagatccccaactgctgggagtgcccccgctgcacccaggagggccgcaccagcaaggacagcggggagggccctggaagaagaagagctgacaatggagaggagggcgccagcctgggcagcggctggaagctgacagaggagccccccctgcccccacctccacccaggaggaagggccccctgcctgctggccccccaccagaagatgtgcccggcccccccaagaggaaggagcgggaggccggaaatgaaccacccacccccaggaagaaggtgaagggcggccgggagcggcacctgaagaaggtgggcggagatgcctgcctgctgcggggcagtgaccccggcggccctggcctgctgcccccccgggtgctgaaccccagccaggccttcagcagctgccaccctggcctgcccccagagaactgggagaagcccaagccacccctggccagcgctgagggccctgctgtgcccagccccagcccccagcgggagaagctggagcgcttcaagaggatgtgccagctgctggagcgggtgcctgacaccagcagcagcagcagtgacagcgacagcgacagcgacagcagcggcaccagcctgtctgaagatgaggcccctggagaggccagaaatggccggcggcctgcccggggcagcagtggagagaaggaaaatagaggaggccggcgggctgtgcggcccggcagcggcggccccctgctgtcctggcccctgggccctgcccccccaccccggcccccccagctggagcggcacgtggtgcggcccccacccaggagccctgagccagacaccctgcccctggccgccggcagtgaccaccccctgcccagggctgcctggctgcgggtcttccagcacctgggcccccgggagctgtgcatctgcatgagggtgtgcaggacctggagccgctggtgctatgacaagaggctgtggcccaggatggacctgagcaggaggaagagcctgaccccacccatgctgagcggcgtggtgcggcggcagccccgggccctggacctgtcctggacaggagtgtccaagaagcagctgatgtggctgctgaaccggctgcagggcctgcaggagctggtgctgagcggctgctcctggctgtctgtgtctgccctgggcagcgcccccctgcctgccctgcggctgctggacctgcgctggattgaagatgtgaaggacagccagctgcgggagctgctgctgcccccaccagacaccaagccaggccagacagagagccggggccgcctgcagggcgtggccgagctgcggctggccggcctggagctgacagatgccagcctgcggctgctgctgcggcatgccccccagctgagcgccctggacctgagccactgtgcccacgtgggggaccccagcgtgcacctgctgacagcccccaccagccccctgcgggagaccctggtgcacctgaacctggccggctgccaccggctgacagaccactgcctgcccctcttccgccgctgcccccggctgcggcggctggacctgcggagctgccggcagctgagccctgaggcctgtgcccggctggccgccgccggccccccaggccccttccgctgcccagaggagaagctgctgctgaaggacagctag

SEQ ID NO: 40199 - DNA, 1761 bp, Artificial Sequence
  derived and/or modified sequence
tgaagaatgaagcagagctgcctgctgcggcagtgcacagcccctgtgctgccccacacagctgtgtgcctgctgtgtggggaggccggcaaggaggacacagtggagggggaggaggagaagtttggcctgagcctgatggagtgcaccatctgcaatgaaattgtgcaccctggctgcctgaagatgggcaaggccgagggcgtcatcaatgctgagatccccaactgctgggagtgcccccgctgcacccaggagggccgcaccagcaaggacagcggggagggccctggaagaagaagagctgacaacggggaggagggcgccagcctgggcagcggctggaagctgacagaggagccccccctgcccccacctccacccaggaggaagggccccctgcctgctggccccccaccagaagatgtgcccggcccccccaagaggaaggagcgggaggccggaaatgagccccccacccccaggaagaaggtgaagggcggccgggagcggcacctgaagaagaagcccaagccacccctggccagcgctgagggccctgctgtgcccagccccagcccccagcgggagaagctggagcgcttcaagaggatgtgccagctgctggagcgggtgcctgacaccagcagcagcagcagtgacagcgacagcgacagcgacagcagcggcaccagcctgtctgaagatgaggcccctggagaggccagaaatggccggcggcctgcccggggcagcagtggagagaaggaaaatagaggaggccggcgggctgtgcggcccggcagcggcggccccctgctgtcctggcccctgggccctgcccccccaccccggcccccccagctggagcggcacgtggtgcggcccccacccaggagccctgagccagacaccctgcccctggccgccggcagtgaccaccccctgcccagggctgcctggctgcgggtcttccagcacctgggcccccgggagctgtgcatctgcatgagggtgtgcaggacctggagccgctggtgctatgacaagaggctgtggcccaggatggacctgagcaggaggaagagcctgaccccacccatgctgagcggcgtggtgcggcggcagccccgggccctggacctgtcctggacaggagtgtccaagaagcagctgatgtggctgctgaaccggctgcagggcctgcaggagctggtgctgagcggctgctcctggctgtctgtgtctgccctgggcagcgcccccctgcctgccctgcggctgctggacctgcgctggattgaagatgtgaaggacagccagctgcgggagctgctgctgcccccaccagacaccaagccaggccagacagagagccggggccgcctgcagggcgtggccgagctgcggctggccggcctggagctgacagatgccagcctgcggctgctgctgcggcatgccccccagctgagcgccctggacctgagccactgtgcccacgtgggggaccccagcgtgcacctgctgacagcccccaccagccccctgcgggagaccctggtgcacctgaacctggccggctgccaccggctgacagaccactgcctgcccctcttccgccgctgcccccggctgcggcggctggacctgcggagctgccggcagctgagccctgaggcctgtgcccggctggccgccgccggccccccaggccccttccgctgcccagaggagaagctgctgctgaaggacagctag

SEQ ID NO: 40200 - DNA, 2025 bp, Artificial Sequence
  derived and/or modified sequence
atgagcagcagcagccggggccccggcgccggcgcccggcggcggagaactaggtgcaggcgctgtagggcttgtgtgagaacagaatgcggggactgtcatttttgccgggatatgaagaagtttggggggccgggtcgcatgaaacagagttgtctcctacgtcagtgcaccgctcccgtcctcccccataccgcggtgtgcttactttgcggggaggccggcaaggaagatacagtggaaggcgaagaagaaaagtttggcctctctctaatggaatgcactatctgtaatgaaatcgtccaccccggatgtcttaaaatgggcaaagcagagggagtgataaatgcagagatccctaattgttgggagtgtccacgatgtacccaggaagggagaacatccaaggatagtggggaaggacctgggcggcgacgagctgacaacggtgaagaaggagctagtttgggctctggttggaaactgaccgaagaaccccctctcccgccaccgcccccccgacgcaagggcccattaccagctggccccccccctgaagatgtgccaggtcccccaaaacgcaaggagagggaggccgggaacgagcctccaaccccccgcaaaaaagtgaaaggtggccgcgagcggcatctaaaaaaagtcggtggcgatgcgtgcctcttacggggttcagatcccggcggtcccggactcttacctccaagagtgcttaacccgtctcaggcattcagttcctgccatcccggccttcctcccgagaattgggagaagcctaaaccccctcttgccagcgctgagggaccggccgtgccctccccgtctccccagcgcgagaaactcgaacgctttaaacgaatgtgtcagcttctggagagagtaccagacaccagtagtagctctagcgacagcgactccgacagcgattcgtccggtactagtctctcggaggatgaggcaccgggggaagcccggaacggcaggcggcccgctcgcggctccagtggcgaaaaagagaatcgcggagggcgcagagccgtgcggccaggctcaggaggccctctcctgtcatggcccctgggtccggcccctcctccccgcccgccacagctagagcgccatgttgtaagaccgcctccacgcagcccggagcccgataccctgcccctcgccgcaggatccgaccatcccctccctcgcgcagcgtggctcagagttttccaacacctgggcccaagggagttatgcatatgcatgcgggtatgtcgcacatggtcacgctggtgttacgataaacggctctggccccgtatggatctgtccaggaggaaaagtcttaccccgcctatgctctccggcgtggttcgccgccagccacgggccctcgatctgtcttggactggggtgagtaagaagcagctgatgtggcttctgaatagactccaggggctccaggaactggtactgtccggctgttcctggctcagcgtttccgccttgggctccgcccccctacctgcactgaggctgctcgacctcaggtggattgaggatgtcaaggattcccaattgagggagttacttcttccaccgccagatactaagcctggccagaccgaaagtcgcggcagactacagggcgtggcagaactgcgcctggcaggccttgagctgaccgatgcatccctgcggctgctgctcagacacgcacctcaactctctgcattggatctcagtcattgtgctcatgtcggagatcctagtgtgcacctgctcaccgcacctacttctcccctccgtgagacccttgtgcacttgaatcttgccgggtgtcatcgtttaactgaccactgtctgcctctattccggcgctgtccccggctgaggaggctagatttaaggagctgccgacagttgagcccggaggcatgtgcacggttagctgccgcagggccccccgggcccttccgatgtcccgaggagaagctgctgctcaaggacagttag

SEQ ID NO: 40201 - DNA, 2085 bp, Artificial Sequence
  derived and/or modified sequence
atgggcatgaaggtgcccggcaagggcgagagcggccccagcgccctgctcacccctcctatgagtagttcaagtcgcggccctggcgccggcgcaagacgacgacgcactagatgcagacggtgcagggcttgtgtaaggaccgagtgtggcgactgtcatttttgcagagacatgaaaaagttcggtggccccgggaggatgaagcaatcttgtctgctgagacagtgtacggctccggtactgcctcacacagccgtgtgcctgctatgcggggaagcaggcaaagaagacacagtggagggggaggaggaaaagttcggactgtctcttatggagtgtaccatctgtaatgagatcgtgcacccagggtgcctgaagatgggaaaggcagagggggtgattaacgccgagatacccaattgctgggaatgcccccgatgcactcaggagggacggactagtaaagactcaggagaaggtccaggccggagacgggctgacaacggagaggagggcgcttcgctcggcagcggctggaagctcactgaggagccccccctgccgccgcccccccccaggaggaaaggacccctgccggcaggcccgccacctgaagacgtgcccggaccgcctaagcggaaagagagagaagcaggtaatgaacctcctactccaaggaagaaagtaaagggtggacgcgaacgccaccttaaaaaggtgggtggggatgcatgcttgctgagggggagcgaccctggcggaccgggacttctgccaccacgtgtgctgaatccctcgcaagccttttcctcatgtcaccccggcttaccccccgagaattgggagaagcctaaacctcccctggcatcagccgagggacccgctgtgccatccccgtctccccagcgggaaaaactggaaaggttcaaacgcatgtgccagttgctcgagcgtgtgcctgatacctcgtcctccagctctgattctgatagtgatagcgacagcagcggcactagcctgtccgaagatgaggcaccaggtgaggctcgtaacggacggaggccagccaggggatcgtctggcgagaaggagaaccgtggaggccgcagggccgttcggccaggtagcgggggtccactgttgagctggcccctaggtccagcaccacctcccagaccacctcaacttgaacgccatgtggtgaggccccccccccggtcaccagaacccgatacattgccgctggcggctgggagtgatcaccccctgccacgggccgcgtggctgcgtgttttccaacatctgggcccgcgggagctgtgcatctgtatgagggtctgcagaacatggagcagatggtgttatgacaagcgtctttggccccggatggacctgtctagaaggaaaagtctcaccccccctatgctgtctggggtggtcaggcggcagccgcgcgctctggatctaagttggaccggtgtgagcaagaaacagttgatgtggctcctgaatcgcctgcagggcctgcaagaattggtactgagtggttgctcttggctgagcgtgagtgccctcggcagcgcgcctctgcctgccctgagactgctcgacttgcggtggatcgaagatgtcaaggattctcagttacgggaactattgttacctcctcccgacactaagcccggtcagaccgagtcgcggggcaggttgcagggcgttgctgaactccgacttgccgggctggagctcaccgatgcatctctcaggctcctgctcagacacgcgccacaactgtcagccttagatctgtcacactgtgcccacgtgggggatcctagcgtgcacctgcttaccgctccaacttcgcccctccgcgaaacgttggtccatctcaatctggctgggtgccaccggctcacggaccactgccttcctctcttccgaagatgcccgagattgcgccgcctggatcttcgaagctgtcgccagctttcacccgaggcctgcgctcggttggccgctgccgggccgcccggtcccttccgatgccctgaggagaagctcctgctcaaagacagctag

SEQ ID NO: 40202 - DNA, 1761 bp, Artificial Sequence
  derived and/or modified sequence
tgacggatgaagcagagctgcctgctgcggcagtgcaccgcccccgtgctgcctcacacagccgtctgtttgctctgcggggaggccgggaaagaagatactgtcgagggagaagaagaaaagtttggactctctcttatggaatgtactatctgcaacgaaattgtccacccaggatgcctcaagatgggaaaggccgagggcgtaatcaacgccgagatccctaactgttgggaatgccctagatgcacgcaggaagggcggacatctaaagacagtggggaagggccaggtcgtcgtcgtgccgataacggcgaggaaggcgcttccctgggatccgggtggaaactaactgaagagcctcccttaccgcccccccctccacggagaaaaggacctctcccagctgggccacctcccgaagacgtcccaggacctccaaagcgaaaggagagagaagcaggcaatgaacctcccacgccgcgtaagaaagtgaagggcggtcgcgagcggcatttgaagaaaaagccgaaacctcccctggcctcagcagaaggccctgccgtgcccagtccatcacctcaaagagagaaactggaaaggtttaagagaatgtgccagctcctggagcgcgttcctgacacttcttcaagttccagcgacagtgattccgacagcgattcatcaggaacttctttatcagaggatgaggctcccggggaggcaagaaatggtagaagacccgcacgaggctcatcaggagagaaggagaacaggggaggacggagggcagtgagaccgggctctggcggacctctgctgagttggcctctgggccccgccccccccccaaggccgcctcagctggagcgacatgttgtcaggccacccccccggtcgccggagccggacactctgccattagctgccggctcagaccaccctctgcctcgagccgcatggcttagagtgttccagcacctaggacccagagaactttgcatttgcatgagagtgtgtcgaacttggtcccggtggtgttatgacaaacggttgtggccaaggatggacctgagtcgccggaagtcattgacccctcccatgttatccggagttgttcggaggcagccacgagccctcgatttgtcttggaccggtgtttccaagaagcaacttatgtggcttttgaatcgactccagggacttcaggagttggtcctgagcggctgtagctggctttccgttagcgcgctagggtccgcccctctgcccgctttaagactcctcgacctgcgttggattgaggacgtgaaagattcacagttgcgggaactgctgctgcctccacccgataccaaacccggtcaaacggagtcccggggccgactccagggggtggcggaactgcgcctggcagggcttgagcttactgacgcctccttgcgcctactactcaggcacgcccctcagctcagtgcacttgatctcagtcactgcgcccacgtcggggatccatcagttcatctgctcacagccccgactagccctctgagggaaaccctggtgcacctgaacttggcaggatgtcatcgtcttactgaccattgcctgccgctatttcgaagatgcccaaggctcagaaggctggacctaaggtcatgccgccagttaagtccagaggcctgtgcacggctcgcagctgccggcccccccggcccttttcgttgccctgaggagaagttattactgaaagactcatag

SEQ ID NO: 40203 - DNA, 2025 bp, Artificial Sequence
  derived and/or modified sequence
atgtcaagttccagtcggggaccaggcgctggcgctagacggagacgcacgcggtgtcgacgttgccgggcatgtgttcggacagagtgtggagactgccatttctgtcgagatatgaagaaattcggcggaccaggtcgtatgaaacagagctgcctgctgagacaatgcacagcacccgtgttgccccatacggctgtctgtcttctgtgtggggaggctggcaaggaggacaccgtcgagggcgaagaggagaagtttggactaagcctgatggagtgcactatctgcaatgaaattgtgcacccaggttgcctgaaaatgggcaaggccgagggcgtgataaatgcggagattccaaattgctgggagtgtcccagatgtactcaagagggcaggacctcaaaggactctggggagggacctggccgaaggcgagcagacaacggcgaagaaggtgcatcgctcgggagtggttggaaacttacagaagaaccgcctcttccacccccacccccacgtcgaaagggacccctgcccgcaggccctccacctgaagatgttcccggacctcccaaacgcaaagagcgggaagcagggaatgaaccacctactcctcggaagaaagtaaaaggtggccgtgagcggcaccttaaaaaggttggaggtgatgcctgtctacttagagggtcggaccccggaggccctggcttgctgccacccagagtcctaaatccttcacaggccttcagttcctgtcatcctgggctacctcctgaaaactgggaaaagccaaagcctcccctggctagtgccgagggacccgcagtgccaagccccagtcctcagcgtgaaaaactggagagatttaaaaggatgtgccagctgcttgaacgcgtacccgatactagctcttcctcctctgactctgattccgacagtgactcgtctgggacttcgctctccgaggacgaagcccctggtgaggcgaggaacggtagacgcccagcgagaggcagtagcggcgaaaaggagaacaggggcggtagacgggctgtgaggcctggatctggagggcctctcctgtcctggcccctcggccctgcgccacctcccaggccaccccaactcgaacgacatgtggtaaggccaccgccaagatctcctgagcccgacacgcttccactcgcagctggcagtgaccacccactgccacgagccgcttggctccgcgtctttcagcacctgggacccagagaactgtgcatttgcatgcgggtgtgcaggacgtggtcacggtggtgctatgacaagagactctggcccagaatggatctgtcacgcaggaagagcttaaccccaccaatgctgagcggtgtggtcagacggcagcccagagcacttgacttgtcatggacaggcgtgagcaaaaaacaactgatgtggttactaaacagacttcaaggcctgcaagaactggtactctctggttgtagctggctgagcgttagcgccctggggtccgccccattacctgccctacgcttactggacctcagatggattgaggatgtgaaggatagccagttgcgagaactgctactgcctccgcctgacaccaagcccggtcagacagaaagccggggacggctacagggcgtggcagagctgagactcgcagggttggaattaacggatgcatcactccggttgctcttaagacacgcccctcagttgtccgcgctggacctctctcactgtgcccacgtgggggaccctagcgtgcatctgctgacagcacctacaagcccacttcgggaaactctggtgcacctcaatctcgccggatgccacaggctgaccgatcattgtctgcctttattcagacggtgtccacggctccgccgtctcgatttgagaagctgcagacagctttctccagaagcctgcgccagacttgcagcagcagggccacctgggccttttcgctgtccagaagagaagctcctgctcaaagactcctag

SEQ ID NO: 40204 - DNA, 2085 bp, Artificial Sequence
  derived and/or modified sequence
atgggtatgaaggtgcctggcaagggagaatctgggccatcagcactgctgacgcccccaatgtctagttcctccagaggccctggcgctggcgcacgtagacggaggacaagatgtagacggtgccgcgcttgtgtgagaaccgagtgcggagattgtcatttttgtagagatatgaagaaattcggaggccctgggcgtatgaagcagtcatgcctgctgcgacagtgtactgctcctgtactaccgcacactgcagtttgtttgctctgcggggaggccggtaaagaggataccgtcgagggcgaggaagaaaagtttggactgtcgttgatggagtgtacaatctgcaacgagattgtgcaccccggttgtctgaagatgggcaaagccgagggtgtcatcaatgctgaaataccgaactgctgggaatgcccaagatgtacacaggagggcaggacgtccaaggattctggggaaggtccaggacgacgtagggccgataacggggaggagggggcaagcctagggagcggttggaagttgaccgaagaacctccattacctccacccccaccacgccgaaaaggtcccctgcctgccggtcccccaccagaggatgtgcccggtcctcctaaaaggaaagagagggaggccggaaacgagccaccgactcctagaaaaaaagtcaagggcggtagggaaaggcatcttaaaaaagtaggaggcgacgcgtgcctcctacgcggttccgaccccggaggtccaggactgctcccacccagggtactgaatccctcccaggcattcagctcttgccaccctggtctcccccctgagaactgggagaagcctaagcctccgctcgcctccgccgaggggccagcagttccctctccaagtccacaacgggagaagctggagagatttaaacgaatgtgtcaacttctcgagcgcgtgccggatacttcaagttccagtagcgacagcgatagtgattctgattcgagcggcacctccctcagcgaggatgaagctcccggtgaggccaggaatggtagacggcctgcacgagggagcagcggggaaaaggagaaccggggtggtaggagagctgtgcggccaggcagtggaggccctctcctaagctggcctttaggtccggcaccacccccacgccctcctcaactcgaacggcatgtcgttcggccaccaccacgcagtcctgaaccagatacactgcctttggctgccggtagcgaccatccactccctcgcgcagcgtggctgcgcgtcttccagcacctcggacctcgcgagctgtgtatctgtatgcgcgtctgtagaacctggtccagatggtgttatgataagaggctttggccgaggatggacctaagccgtaggaaatccctgacaccaccaatgcttagcggggtggttcggaggcagcctagagctctggacttgtcctggaccggtgtctcaaagaaacagcttatgtggctcttaaatcgccttcaaggacttcaggaactagtgttgtctggatgtagttggctgtccgtctctgccctcggctctgcacctttgcccgctctgcggttgcttgacctccgctggatagaggacgtaaaggactcccaactgcgagaactattgttgcctccgcctgataccaaacctggacagacagagtctcgtgggaggctgcaaggagtggccgagttaaggctggcgggacttgaactcacggacgcgagcctaaggcttctgctgcgacacgcccctcagctgtcggccctcgatctttcccactgtgcgcatgtaggcgatcccagcgtgcacctgttgacggcaccaacgagtccactgcgagaaactttggtccatttaaatctcgcaggatgtcaccgattaactgaccactgtctgcccttatttcgtaggtgcccacggctccgccgactggacctgcgctcatgccgccagctctccccagaggcctgcgccaggctcgctgctgccggtcctccaggaccctttaggtgtcctgaagagaagttgctgctcaaggattcttag

SEQ ID NO: 40205 - DNA, 1761 bp, Artificial Sequence
  derived and/or modified sequence
taacggatgaagcaatcttgcctgctccggcaatgcaccgcaccagtgctgccccataccgcagtgtgtcttttgtgcggcgaagccggaaaggaggataccgttgagggcgaggaggaaaagtttggattaagcctgatggaatgtacaatctgtaacgagatcgtgcatccaggctgtttgaagatgggcaaggccgagggcgttataaatgccgaaattcctaattgttgggagtgtcctcgctgtacccaggagggaagaacgagcaaggactccggtgaagggccaggcaggcggcgagccgacaacggggaagaaggggcatccctggggagcggctggaagttgacggaagagcccccacttccacccccaccgcctagacgcaaggggcctctgccagccggaccaccacctgaggatgttcccggaccccctaaaaggaaagagagggaagccggaaatgagccccctactccacggaagaaggtgaagggtggcagggaacgccatctcaaaaagaaaccaaagcctcccctagcaagcgccgagggccctgctgtcccgagcccgtccccccagcgagaaaagctcgaaagatttaaacgcatgtgtcagctcctggaacgcgtgcctgatacaagtagctcgtcctctgattctgattctgactcagatagttctggcacctccctgagcgaggatgaggcacccggagaggcgaggaacgggcgaagaccagccagagggtcctctggcgagaaagagaatagaggtggaaggcgagccgttaggcccggaagtggaggtcctctgttatcttggccccttgggcctgctcctccacctagaccccctcagcttgagcggcacgtggtccgcccaccccctcgctcccccgagccggatactcttccactggcagctgggtctgatcacccattgccccgtgctgcctggttgagggtgttccaacacctcggaccaagagaactgtgtatatgtatgcgtgtgtgcaggacgtggtcacgctggtgttatgataagcgactgtggcccagaatggacctgtcaagacgcaaatctcttacccctcctatgctttcaggtgtggtacgtcgacagccacgcgctctggacctgtcctggaccggcgtctccaaaaagcagctcatgtggctgctgaaccgcctccagggactgcaggaattagttttgtctggctgcagctggctgagcgtttcagccctcggtagtgcgccactgccagccctgaggctgctggacctgaggtggattgaagacgtcaaggatagccagttgagagaactgctcctgccccctccagataccaaaccgggacagactgagtccagaggccgattacagggcgtcgctgagcttcggctcgcagggctggaattgactgatgcgagcctgcgcctgttgctgaggcatgccccacaactgtcggcgctcgacctgtcgcattgcgcacatgtgggcgacccgtcagtacatctgctgaccgcccctacttctcccttaagggaaaccttggtccaccttaacctggctggatgccaccggctgaccgaccattgtctgccactttttcggagatgtccacggcttagaagactggatctgcgatcctgccgccagctgagcccagaggcctgtgccagactcgcggcagcagggcctccaggcccattccggtgtccggaggaaaaactgctattgaaggactcctag

SEQ ID NO: 40206 - DNA, 2025 bp, Artificial Sequence
  derived and/or modified sequence
atgagcagcagcagcagaggccccggcgccggcgccagaagaagaagaaccagatgcagaagatgcagagcctgcgtgagaaccgagtgcggcgactgccacttctgcagagacatgaagaagttcggcggccccggcagaatgaagcagagctgcctgctgagacagtgcaccgcccccgtgctgccccacaccgccgtgtgcctgctgtgcggcgaggccggcaaggaggacaccgtggagggcgaggaggagaagttcggcctgagcctgatggagtgcaccatctgcaacgagatcgtgcaccccggctgcctgaagatgggcaaggccgagggcgtgatcaacgccgagatccccaactgctgggagtgccccagatgcacccaggagggcagaaccagcaaggacagcggcgagggccccggcagaagaagagccgacaacggcgaggagggcgccagcctgggcagcggctggaagctgaccgaggagccccccctgcccccccccccccccagaagaaagggccccctgcccgccggccccccccccgaggacgtgcccggcccccccaagagaaaggagagagaggccggcaacgagccccccacccccagaaagaaggtgaagggcggcagagagagacacctgaagaaggtgggcggcgacgcctgcctgctgagaggcagcgaccccggcggccccggcctgctgccccccagagtgctgaaccccagccaggccttcagcagctgccaccccggcctgccccccgagaactgggagaagcccaagccccccctggccagcgccgagggccccgccgtgcccagccccagcccccagagagagaagctggagagattcaagagaatgtgccagctgctggagagagtgcccgacaccagcagcagcagcagcgacagcgacagcgacagcgacagcagcggcaccagcctgagcgaggacgaggcccccggcgaggccagaaacggcagaagacccgccagaggcagcagcggcgagaaggagaacagaggcggcagaagagccgtgagacccggcagcggcggccccctgctgagctggcccctgggccccgcccccccccccagacccccccagctggagagacacgtggtgagacccccccccagaagccccgagcccgacaccctgcccctggccgccggcagcgaccaccccctgcccagagccgcctggctgagagtgttccagcacctgggccccagagagctgtgcatctgcatgagagtgtgcagaacctggagcagatggtgctacgacaagagactgtggcccagaatggacctgagcagaagaaagagcctgaccccccccatgctgagcggcgtggtgagaagacagcccagagccctggacctgagctggaccggcgtgagcaagaagcagctgatgtggctgctgaacagactgcagggcctgcaggagctggtgctgagcggctgcagctggctgagcgtgagcgccctgggcagcgcccccctgcccgccctgagactgctggacctgagatggatcgaggacgtgaaggacagccagctgagagagctgctgctgcccccccccgacaccaagcccggccagaccgagagcagaggcagactgcagggcgtggccgagctgagactggccggcctggagctgaccgacgccagcctgagactgctgctgagacacgccccccagctgagcgccctggacctgagccactgcgcccacgtgggcgaccccagcgtgcacctgctgaccgcccccaccagccccctgagagagaccctggtgcacctgaacctggccggctgccacagactgaccgaccactgcctgcccctgttcagaagatgccccagactgagaagactggacctgagaagctgcagacagctgagccccgaggcctgcgccagactggccgccgccggcccccccggccccttcagatgccccgaggagaagctgctgctgaaggacagctag

SEQ ID NO: 40207 - DNA, 2085 bp, Artificial Sequence
  derived and/or modified sequence
atgggcatgaaggtgcccggcaagggcgagagcggccccagcgccctgctgaccccccccatgagcagcagcagcagaggccccggcgccggcgccagaagaagaagaaccagatgcagaagatgcagagcctgcgtgagaaccgagtgcggcgactgccacttctgcagagacatgaagaagttcggcggccccggcagaatgaagcagagctgcctgctgagacagtgcaccgcccccgtgctgccccacaccgccgtgtgcctgctgtgcggcgaggccggcaaggaggacaccgtggagggcgaggaggagaagttcggcctgagcctgatggagtgcaccatctgcaacgagatcgtgcaccccggctgcctgaagatgggcaaggccgagggcgtgatcaacgccgagatccccaactgctgggagtgccccagatgcacccaggagggcagaaccagcaaggacagcggcgagggccccggcagaagaagagccgacaacggcgaggagggcgccagcctgggcagcggctggaagctgaccgaggagccccccctgcccccccccccccccagaagaaagggccccctgcccgccggccccccccccgaggacgtgcccggcccccccaagagaaaggagagagaggccggcaacgagccccccacccccagaaagaaggtgaagggcggcagagagagacacctgaagaaggtgggcggcgacgcctgcctgctgagaggcagcgaccccggcggccccggcctgctgccccccagagtgctgaaccccagccaggccttcagcagctgccaccccggcctgccccccgagaactgggagaagcccaagccccccctggccagcgccgagggccccgccgtgcccagccccagcccccagagagagaagctggagagattcaagagaatgtgccagctgctggagagagtgcccgacaccagcagcagcagcagcgacagcgacagcgacagcgacagcagcggcaccagcctgagcgaggacgaggcccccggcgaggccagaaacggcagaagacccgccagaggcagcagcggcgagaaggagaacagaggcggcagaagagccgtgagacccggcagcggcggccccctgctgagctggcccctgggccccgcccccccccccagacccccccagctggagagacacgtggtgagacccccccccagaagccccgagcccgacaccctgcccctggccgccggcagcgaccaccccctgcccagagccgcctggctgagagtgttccagcacctgggccccagagagctgtgcatctgcatgagagtgtgcagaacctggagcagatggtgctacgacaagagactgtggcccagaatggacctgagcagaagaaagagcctgaccccccccatgctgagcggcgtggtgagaagacagcccagagccctggacctgagctggaccggcgtgagcaagaagcagctgatgtggctgctgaacagactgcagggcctgcaggagctggtgctgagcggctgcagctggctgagcgtgagcgccctgggcagcgcccccctgcccgccctgagactgctggacctgagatggatcgaggacgtgaaggacagccagctgagagagctgctgctgcccccccccgacaccaagcccggccagaccgagagcagaggcagactgcagggcgtggccgagctgagactggccggcctggagctgaccgacgccagcctgagactgctgctgagacacgccccccagctgagcgccctggacctgagccactgcgcccacgtgggcgaccccagcgtgcacctgctgaccgcccccaccagccccctgagagagaccctggtgcacctgaacctggccggctgccacagactgaccgaccactgcctgcccctgttcagaagatgccccagactgagaagactggacctgagaagctgcagacagctgagccccgaggcctgcgccagactggccgccgccggcccccccggccccttcagatgccccgaggagaagctgctgctgaaggacagctag

SEQ ID NO: 40208 - DNA, 1761 bp, Artificial Sequence
  derived and/or modified sequence
tgaagaatgaagcagagctgcctgctgagacagtgcaccgcccccgtgctgccccacaccgccgtgtgcctgctgtgcggcgaggccggcaaggaggacaccgtggagggcgaggaggagaagttcggcctgagcctgatggagtgcaccatctgcaacgagatcgtgcaccccggctgcctgaagatgggcaaggccgagggcgtgatcaacgccgagatccccaactgctgggagtgccccagatgcacccaggagggcagaaccagcaaggacagcggcgagggccccggcagaagaagagccgacaacggcgaggagggcgccagcctgggcagcggctggaagctgaccgaggagccccccctgcccccccccccccccagaagaaagggccccctgcccgccggccccccccccgaggacgtgcccggcccccccaagagaaaggagagagaggccggcaacgagccccccacccccagaaagaaggtgaagggcggcagagagagacacctgaagaagaagcccaagccccccctggccagcgccgagggccccgccgtgcccagccccagcccccagagagagaagctggagagattcaagagaatgtgccagctgctggagagagtgcccgacaccagcagcagcagcagcgacagcgacagcgacagcgacagcagcggcaccagcctgagcgaggacgaggcccccggcgaggccagaaacggcagaagacccgccagaggcagcagcggcgagaaggagaacagaggcggcagaagagccgtgagacccggcagcggcggccccctgctgagctggcccctgggccccgcccccccccccagacccccccagctggagagacacgtggtgagacccccccccagaagccccgagcccgacaccctgcccctggccgccggcagcgaccaccccctgcccagagccgcctggctgagagtgttccagcacctgggccccagagagctgtgcatctgcatgagagtgtgcagaacctggagcagatggtgctacgacaagagactgtggcccagaatggacctgagcagaagaaagagcctgaccccccccatgctgagcggcgtggtgagaagacagcccagagccctggacctgagctggaccggcgtgagcaagaagcagctgatgtggctgctgaacagactgcagggcctgcaggagctggtgctgagcggctgcagctggctgagcgtgagcgccctgggcagcgcccccctgcccgccctgagactgctggacctgagatggatcgaggacgtgaaggacagccagctgagagagctgctgctgcccccccccgacaccaagcccggccagaccgagagcagaggcagactgcagggcgtggccgagctgagactggccggcctggagctgaccgacgccagcctgagactgctgctgagacacgccccccagctgagcgccctggacctgagccactgcgcccacgtgggcgaccccagcgtgcacctgctgaccgcccccaccagccccctgagagagaccctggtgcacctgaacctggccggctgccacagactgaccgaccactgcctgcccctgttcagaagatgccccagactgagaagactggacctgagaagctgcagacagctgagccccgaggcctgcgccagactggccgccgccggcccccccggccccttcagatgccccgaggagaagctgctgctgaaggacagctag

SEQ ID NO: 40209 - protein, 275 aa, Artificial Sequence
  derived and/or modified sequence
MSSFGYRTLTVALFTLICCPGSDEKVFEVHVRPKKLAVEPKGSLEVNCSTTCNQPEVGGLETSLDKILLDEQAQWKHYLVSNISHDTVLQCHFTCSGKQESMNSNVSVYQPPRQVILTLQPTLVAVGKSFTIECRVPTVEPLDSLTLFLFRGNETLHYETFGKAAPAPQEATATFNSTADREDGHRNFSCLAVLDLMSRGGNIFHKHSAPKMLEIYEPVSDSQMVIIVTVVSVLLSLFVTSVLLCFIFGQHLRQQRMGTYGVRAAWRRLPQAFRP

SEQ ID NO: 40210 - DNA, 828 bp, Artificial Sequence
  derived and/or modified sequence
atgagttcctttgggtataggaccctaacagtagccctgtttactttgatttgttgtcccggcagtgatgagaaagtctttgaggtacacgtgcgcccaaagaagctggctgtggaacccaaaggctccttagaggtgaattgcagcactacatgcaaccagcccgaggtcggtggactggaaacctccctggacaaaatcctgcttgacgaacaggctcagtggaagcattatttggttagcaacatttcccatgataccgtcctgcagtgtcatttcacatgttccgggaaacaggaatctatgaactcaaatgtgagcgtgtaccagccccctagacaggtgatcttaacattacagcctactctggtcgcagtgggtaaaagcttcactattgagtgcagagtcccgacagtcgagccactcgattctctgaccttgtttttatttagggggaacgaaacactacactacgagacctttgggaaggctgccccagccccgcaggaggccactgcaacctttaacagcacagctgatagagaagatggccacaggaatttcagctgcctcgcagtcctcgacttgatgtcccgggggggcaacatttttcacaagcacagcgcaccaaagatgctggaaatctatgaaccagttagcgactcacagatggtgatcatcgtgaccgtggtgtccgtgctgctgagcctgttcgttacatctgtacttttatgtttcattttcggacagcaccttaggcagcagcggatgggcacatacggagtgagagcagcttggcgtagacttcctcaggcctttcgtccctag

SEQ ID NO: 40211 - DNA, 828 bp, Artificial Sequence
  derived and/or modified sequence
atgtcctcctttggatataggaccctgacagtcgctctgttcacactaatctgctgccctgggtccgatgagaaagtgttcgaagtccatgtccggccaaaaaagttagcagtggaaccaaaaggatccctcgaagttaattgctcaactacatgtaatcaacccgaagtcggcgggctcgagacaagtcttgataaaattcttctggacgaacaggcccagtggaagcattacttagtcagcaatatcagccacgacacagtgcttcagtgccactttacctgttcgggaaagcaggaaagcatgaattccaatgtgagcgtttaccagccgccccgtcaggttatcttaacactacaacctacattggtagctgtgggaaaaagtttcactattgagtgccgagtcccaaccgttgaaccgctcgatagcctaactctttttttattccgcgggaacgagaccctgcattacgaaacattcggtaaggcagcaccagcccctcaagaagcgaccgccacatttaacagcactgccgacagagaggacggacaccgtaacttttcttgcttggccgtgctggacctgatgtcaagagggggtaatatctttcacaagcacagcgccccaaagatgctcgagatctatgaaccggtttctgattcccagatggtgatcatcgtcacagtggtgagcgtgctgctctccttgtttgtgacatcagtcctgttatgttttatattcggacagcaccttcggcagcaaagaatgggcacctacggtgtgcgggccgcttggcgccggctgcctcaggcattcaggccctag

SEQ ID NO: 40212 - DNA, 828 bp, Artificial Sequence
  derived and/or modified sequence
atgtcatcttttggttaccgcaccctgactgtcgctttgttcaccctcatctgttgcccagggagcgacgagaaggtgttcgaggtccacgtcaggccaaagaagctggctgtggagccaaagggaagcctggaggtgaactgctcaactacgtgtaatcagccagaagttggcggcctagaaactagcctggacaaaattctgcttgatgaacaggcccaatggaagcactacctagtctccaatatcagccacgacaccgtactgcagtgccactttacatgttccggaaagcaggaatcaatgaattctaacgtgtcagtgtaccagccccctaggcaggtgatcttgaccctgcaacctaccctggttgctgtcggtaagtcttttacaatcgagtgccgcgttccgaccgtggaaccactggacagcctcacactgttcctttttcggggcaacgagactctgcactacgagacgtttgggaaggcagcaccagccccccaagaagctaccgctacttttaactcaaccgccgacagggaggacgggcacaggaacttttcctgtctggcagttcttgatcttatgtctcgaggaggtaacatatttcacaagcactctgcccctaagatgttggaaatatacgaacccgtgtctgatagccaaatggtcattatcgtgaccgtggtgagtgtactgctctcattgttcgttactagtgtactgctctgctttatcttcggtcagcatctcagacaacagcggatggggacttacggggttcgtgcagcgtggaggcgactcccccaggcattccgcccttag

SEQ ID NO: 40213 - DNA, 828 bp, Artificial Sequence
  derived and/or modified sequence
atgtcaagttttggataccggacactcaccgtggccctatttaccttaatctgctgcccaggtagcgacgagaaagttttcgaagtgcacgtgcgcccaaagaaactagctgtggaacccaagggcagtctggaggtcaattgttccactacatgcaatcagcccgaggtggggggactggagacatcactggacaaaattctcctggacgagcaggcacagtggaagcattatctagtgagcaatatctcccacgataccgtcctccagtgtcattttacttgttcaggcaagcaggagagtatgaacagtaacgtatcagtgtatcaacctccaaggcaagtgatattgacactgcaacccacattggtggcagtggggaagagttttaccattgaatgccgggtccccactgtcgagccactcgatagccttacactgtttctattccgtggaaatgaaactttgcactacgaaacctttggtaaggccgcgccggctcctcaggaagcaacggccacttttaactctactgctgaccgggaagatggacaccggaacttctcctgccttgccgtgttagacttgatgtcacggggaggcaatattttccataagcatagcgctccaaaaatgcttgaaatttatgagcctgtttccgacagccagatggtgatcatcgtgacagtggtcagcgtcctgttgagccttttcgtcacctcagtgttgctctgtttcattttcggccagcacctcaggcaacagagaatgggcacctacggcgttcgcgctgcttggagacgcctgcctcaggcatttcgcccctag

SEQ ID NO: 40214 - DNA, 828 bp, Artificial Sequence
  derived and/or modified sequence
atgagctctttcggctaccggacgctgaccgtggccttgttcacgctgatctgttgccccgggtcagatgagaaagtgtttgaagtgcatgtgaggcctaaaaaactggccgttgaacccaaagggagcctggaagtcaactgctccaccacctgtaatcaaccagaggtggggggcctggaaacttctctggataaaattctgttagatgagcaggcccaatggaaacattacttagttagtaacatctctcacgacactgtgctgcagtgtcacttcacctgctctggtaaacaggagagcatgaatagtaatgtgtccgtctaccaacctccccggcaagtaatcctcaccctacagccgaccttggttgctgtcgggaagtcatttactatcgaatgcagggtccccaccgtggagccactggatagtctgactctttttctattccggggaaacgaaacactgcactatgaaacctttggcaaagcggctcccgcccctcaggaggcaacagcaacctttaacagcactgctgatagggaagacggccatcgtaacttttcatgtcttgcggttctcgatctgatgtctcggggaggaaacatctttcacaaacactctgcacccaaaatgctcgagatttacgaaccggtctccgatagtcagatggtcattatcgtgactgtggtgagcgtgcttctctctctgtttgtgacctccgtcctgttgtgtttcattttcggacaacatcttaggcagcaaaggatgggaacatacggtgtaagggcggcttggcgcagactcccccaggcctttcgcccttag

SEQ ID NO: 40215 - DNA, 1334 bp, Artificial Sequence
  derived and/or modified sequence
ggagaagactgaataagccgtgaactgggcagctgtgacacgcgcaccttgtcaccttgtcaccaatttcctgcccgggatcccagagctacccttcttggagcccacaggggtaaggttgagcttctcactttccctccaatgaagcgtggcagcatgggaaggattttggcagtgtcgaggtctgagttttagtccgttcccctctctgggtctcagtttctcgctggaataaagtgaaacacctcaggctccaaccctcccaacccaaggctccctcctggagggagagagaggatggaggacatcaggcagcccttggctggtccctgcgagcccgtggagactgccagagatgtcctctttcggttacaggaccctgactgtggccctcttcaccctgatctgctgtccaggatcggatgagaaggtattcgaggtacacgtgaggccaaagaagctggcggttgagcccaaagggtccctcgaggtcaactgcagcaccacctgtaaccagcctgaagtgggtggtctggagacctctctagataagattctgctggacgaacaggctcagtggaaacattacttggtctcaaacatctcccatgacacggtcctccaatgccacttcacctgctccgggaagcaggagtcaatgaattccaacgtcagcgtgtaccagcctccaaggcaggtcatcctgacactgcaacccactttggtggctgtgggcaagtccttcaccattgagtgcagggtgcccaccgtggagcccctggacagcctcaccctcttcctgttccgtggcaatgagactctgcactatgagaccttcgggaaggcagcccctgctccgcaggaggccacagccacattcaacagcacggctgacagagaggatggccaccgcaacttctcctgcctggctgtgctggacttgatgtctcgcggtggcaacatctttcacaaacactcagccccgaagatgttggagatctatgagcctgtgtcggacagccagatggtcatcatagtcacggtggtgtcggtgttgctgtccctgttcgtgacatctgtcctgctctgcttcatcttcggccagcacttgcgccagcagcggatgggcacctacggggtgcgagcggcttggaggaggctgccccaggccttccggccatagcaaccatgagtggcatggccaccaccacggtggtcactggaactcagtgtgactcctcagggttgaggtccagccctggctgaaggactgtgacaggcagcagagacttgggacattgccttttctagcccgaatacaaacacctggactt

SEQ ID NO: 40216 - DNA, 1252 bp, Artificial Sequence
  derived and/or modified sequence
ggagaagactgaataagccgtgaactgggcagctgtgacacgcgcaccttgtcaccttgtcaccaatttcctgcccgggatcccagagctacccttcttggagcccacaggggtaaggttgagcttctcactttccctccaatgaagcgtggcagcatgggaaggattttggcagtgtcgaggtctgagttttagtccgttcccctctctgggtctcagtttctcgctggcagcccttggctggtccctgcgagcccgtggagactgccagagatgtcctctttcggttacaggaccctgactgtggccctcttcaccctgatctgctgtccaggatcggatgagaaggtattcgaggtacacgtgaggccaaagaagctggcggttgagcccaaagggtccctcgaggtcaactgcagcaccacctgtaaccagcctgaagtgggtggtctggagacctctctagataagattctgctggacgaacaggctcagtggaaacattacttggtctcaaacatctcccatgacacggtcctccaatgccacttcacctgctccgggaagcaggagtcaatgaattccaacgtcagcgtgtaccagcctccaaggcaggtcatcctgacactgcaacccactttggtggctgtgggcaagtccttcaccattgagtgcagggtgcccaccgtggagcccctggacagcctcaccctcttcctgttccgtggcaatgagactctgcactatgagaccttcgggaaggcagcccctgctccgcaggaggccacagccacattcaacagcacggctgacagagaggatggccaccgcaacttctcctgcctggctgtgctggacttgatgtctcgcggtggcaacatctttcacaaacactcagccccgaagatgttggagatctatgagcctgtgtcggacagccagatggtcatcatagtcacggtggtgtcggtgttgctgtccctgttcgtgacatctgtcctgctctgcttcatcttcggccagcacttgcgccagcagcggatgggcacctacggggtgcgagcggcttggaggaggctgccccaggccttccggccatagcaaccatgagtggcatggccaccaccacggtggtcactggaactcagtgtgactcctcagggttgaggtccagccctggctgaaggactgtgacaggcagcagagacttgggacattgccttttctagcccgaatacaaacacctggactt

SEQ ID NO: 40217 - DNA, 1211 bp, Artificial Sequence
  derived and/or modified sequence
gccctgcttatcagcagcttcccagcttcctctgcctggattcttagaggcctggggtcctagaacgagctggtgcacgtggcttcccaaagatctctcagataatgagaggaaatgcagtcatcagtttgcagaaggctagggattctgggccatagctcagacctgcgcccaccatctccctccaggcagcccttggctggtccctgcgagcccgtggagactgccagagatgtcctctttcggttacaggaccctgactgtggccctcttcaccctgatctgctgtccaggatcggatgagaaggtattcgaggtacacgtgaggccaaagaagctggcggttgagcccaaagggtccctcgaggtcaactgcagcaccacctgtaaccagcctgaagtgggtggtctggagacctctctagataagattctgctggacgaacaggctcagtggaaacattacttggtctcaaacatctcccatgacacggtcctccaatgccacttcacctgctccgggaagcaggagtcaatgaattccaacgtcagcgtgtaccagcctccaaggcaggtcatcctgacactgcaacccactttggtggctgtgggcaagtccttcaccattgagtgcagggtgcccaccgtggagcccctggacagcctcaccctcttcctgttccgtggcaatgagactctgcactatgagaccttcgggaaggcagcccctgctccgcaggaggccacagccacattcaacagcacggctgacagagaggatggccaccgcaacttctcctgcctggctgtgctggacttgatgtctcgcggtggcaacatctttcacaaacactcagccccgaagatgttggagatctatgagcctgtgtcggacagccagatggtcatcatagtcacggtggtgtcggtgttgctgtccctgttcgtgacatctgtcctgctctgcttcatcttcggccagcacttgcgccagcagcggatgggcacctacggggtgcgagcggcttggaggaggctgccccaggccttccggccatagcaaccatgagtggcatggccaccaccacggtggtcactggaactcagtgtgactcctcagggttgaggtccagccctggctgaaggactgtgacaggcagcagagacttgggacattgccttttctagcccgaatacaaacacctggactt

SEQ ID NO: 40218 - DNA, 1154 bp, Artificial Sequence
  derived and/or modified sequence
ggcagctgtgacacgcgcaccttgtcaccttgtcaccaatttcctgcccgggatcccagagctacccttcttggagcccacaggggaataaagtgaaacacctcaggctccaaccctcccaacccaaggctccctcctggagggagagagaggatggaggacatcaggcagcccttggctggtccctgcgagcccgtggagactgccagagatgtcctctttcggttacaggaccctgactgtggccctcttcaccctgatctgctgtccaggatcggatgagaaggtattcgaggtacacgtgaggccaaagaagctggcggttgagcccaaagggtccctcgaggtcaactgcagcaccacctgtaaccagcctgaagtgggtggtctggagacctctctagataagattctgctggacgaacaggctcagtggaaacattacttggtctcaaacatctcccatgacacggtcctccaatgccacttcacctgctccgggaagcaggagtcaatgaattccaacgtcagcgtgtaccagcctccaaggcaggtcatcctgacactgcaacccactttggtggctgtgggcaagtccttcaccattgagtgcagggtgcccaccgtggagcccctggacagcctcaccctcttcctgttccgtggcaatgagactctgcactatgagaccttcgggaaggcagcccctgctccgcaggaggccacagccacattcaacagcacggctgacagagaggatggccaccgcaacttctcctgcctggctgtgctggacttgatgtctcgcggtggcaacatctttcacaaacactcagccccgaagatgttggagatctatgagcctgtgtcggacagccagatggtcatcatagtcacggtggtgtcggtgttgctgtccctgttcgtgacatctgtcctgctctgcttcatcttcggccagcacttgcgccagcagcggatgggcacctacggggtgcgagcggcttggaggaggctgccccaggccttccggccatagcaaccatgagtggcatggccaccaccacggtggtcactggaactcagtgtgactcctcagggttgaggtccagccctggctgaaggactgtgacaggcagcagagacttgggaca

SEQ ID NO: 40219 - DNA, 1103 bp, Artificial Sequence
  derived and/or modified sequence
ctgtgacacgcgcaccttgtcaccttgtcaccaatttcctgcccgggatcccagagctacccttcttggagcccacaggggcagcccttggctggtccctgcgagcccgtggagactgccagagatgtcctctttcggttacaggaccctgactgtggccctcttcaccctgatctgctgtccaggatcggatgagaaggtattcgaggtacacgtgaggccaaagaagctggcggttgagcccaaagggtccctcgaggtcaactgcagcaccacctgtaaccagcctgaagtgggtggtctggagacctctctagataagattctgctggacgaacaggctcagtggaaacattacttggtctcaaacatctcccatgacacggtcctccaatgccacttcacctgctccgggaagcaggagtcaatgaattccaacgtcagcgtgtaccagcctccaaggcaggtcatcctgacactgcaacccactttggtggctgtgggcaagtccttcaccattgagtgcagggtgcccaccgtggagcccctggacagcctcaccctcttcctgttccgtggcaatgagactctgcactatgagaccttcgggaaggcagcccctgctccgcaggaggccacagccacattcaacagcacggctgacagagaggatggccaccgcaacttctcctgcctggctgtgctggacttgatgtctcgcggtggcaacatctttcacaaacactcagccccgaagatgttggagatctatgagcctgtgtcggacagccagatggtcatcatagtcacggtggtgtcggtgttgctgtccctgttcgtgacatctgtcctgctctgcttcatcttcggccagcacttgcgccagcagcggatgggcacctacggggtgcgagcggcttggaggaggctgccccaggccttccggccatagcaaccatgagtggcatggccaccaccacggtggtcactggaactcagtgtgactcctcagggttgaggtccagccctggctgaaggactgtgacaggcagcagagacttgggacattgccttttctagcccgaatacaaacacctggactt

SEQ ID NO: 40220 - DNA, 828 bp, Artificial Sequence
  derived and/or modified sequence
atgagcagctttggctaccgcaccctgactgtggccctcttcaccctcatctgctgccccggcagtgatgagaaggtgtttgaggtgcacgtgcggcccaagaagctggccgtggagcccaagggcagcctggaggtgaactgcagcaccacctgcaaccagcctgaggtgggcggcctggagaccagcctggacaagatcctgctggatgagcaggcccagtggaagcactacctggtgagcaacatcagccatgacacagtgctgcagtgccacttcacctgcagcggcaagcaggagagcatgaacagcaatgtgtctgtgtaccagcccccccggcaggtgatcctgaccctgcagcccaccctggtggccgtgggcaagagcttcaccattgaatgtcgggtgcccaccgtggagcccctggacagcctgaccctcttcctgttcagaggaaatgagaccctgcactatgagaccttcggcaaggccgccccagccccccaggaggccacagccaccttcaacagcacagctgaccgggaggatggccacaggaacttcagctgcctggccgtgctggacctgatgagccggggcggcaacatcttccacaagcacagcgcccccaagatgctggagatctatgagcctgtgtctgacagccagatggtgatcatcgtgacagtggtgtctgtgctgctgagcctgtttgtgacctctgtgctgctgtgcttcatcttcggccagcacctgcggcagcagaggatgggcacctacggcgtgcgggccgcctggaggcggctgccccaggccttccggccctag

SEQ ID NO: 40221 - DNA, 828 bp, Artificial Sequence
  derived and/or modified sequence
atgagcagcttcggctaccggaccctgaccgtggccctgttcaccttgatctgctgccccgggtccgacgaaaaggtgttcgaagtccatgtgcgcccaaaaaagctggcggtggaaccaaagggcagtttagaggtcaattgcagcacaacctgcaaccagcctgaagtgggcggcctcgagacctctttagacaaaattctattggatgaacaggcacagtggaaacactatctagtgtctaacatctcccatgacactgtcttgcagtgccatttcacctgctcgggcaaacaagaaagtatgaattctaatgttagtgtctatcagccacctcgccaagtgattctcaccttgcagcctaccctggtggccgtcggcaagtcattcacaattgagtgccgtgtgccaactgtcgagcccctcgacagtctgactttatttctctttagggggaacgagacgctgcactatgaaaccttcggcaaagccgcccctgcacctcaagaggccaccgccacatttaatagcacagcggatcgcgaggatggacataggaatttcagctgtctcgccgttttagatctcatgtctcgcggcggtaacatatttcataaacatagtgccccaaagatgctggagatttatgaacctgtgtcagattcccagatggtgattattgtgactgtggtctcagttctcttaagcctctttgtgacctcagtgcttctctgcttcatcttcgggcagcacctgaggcagcagcgtatgggtacatatggagtcagggccgcctggcgcagacttccccaagcctttcggccgtag

SEQ ID NO: 40222 - DNA, 828 bp, Artificial Sequence
  derived and/or modified sequence
atgagcagcttcggctaccggaccctgaccgtggccctgttcaccttgatatgctgccctggctccgacgagaaagtgtttgaggtgcacgttcgcccaaagaagctggcagtggagccaaagggatccctcgaggtaaactgttccactacctgcaatcaacctgaggtgggagggttggaaaccagcctggacaagattctcctggacgagcaagctcagtggaagcactatctggtttctaacataagccacgataccgtactccagtgtcattttacctgctccgggaaacaggagtccatgaattcaaacgtctccgtgtaccaaccgccaaggcaggtgatcctcacactacagcctactttggtggcagtgggcaaatcttttaccatagagtgccgggtgcctacagtggagccactggacagtctgacattatttttgtttcgaggcaacgaaactctgcattatgagacattcggaaaagcagccccagcaccgcaagaagcgacagctacatttaactctaccgcagaccgagaagacggccaccgaaatttcagctgcctcgcagtcctggatttaatgagtagaggggggaacatcttccacaaacacagcgctcccaaaatgctggagatctatgaacctgtttcagatagccaaatggtgataattgtaactgttgtttccgtcctcctctcactttttgttacctcagtactgctatgcttcatttttggccaacacctccgccagcagaggatgggtacatatggggtgagggccgcctggcgacggctgccccaggcttttcgcccttag

SEQ ID NO: 40223 - DNA, 828 bp, Artificial Sequence
  derived and/or modified sequence
atgagcagcttcggctaccggaccctgaccgtggccctgttcaccctcatttgttgccccggcagcgacgaaaaggtcttcgaagtgcatgtgcgacctaaaaagctggccgtggaacctaaaggctcactggaagttaactgttctactacgtgtaatcagcctgaagttggaggactcgagacttctctggataagattctgttggacgaacaggctcaatggaagcattatctggtgagcaacatttctcacgacaccgtactccagtgccattttacttgtagcggaaaacaggaatcaatgaattcaaacgtcagtgtttaccagcctccccgacaggtcattctgacccttcaacccacattagtcgcagttggcaagagttttactattgaatgtagggtccccactgtggagccactagatagcctcaccttgtttctgttcaggggcaacgagacactgcattatgaaacctttgggaaggcagcgccagcccctcaggaagccactgccaccttcaacagcacggcagaccgggaggatgggcataggaacttctcttgtctggctgtgctcgacctgatgtccagaggaggaaacatattccataagcatagcgccccgaagatgcttgagatttacgaaccggtctcagattcccaaatggtcatcatcgtaacagtggttagcgtgctgttaagtctgtttgtgactagcgttcttctgtgctttattttcgggcagcatctgaggcagcagcgaatgggcacttacggtgttagggcggcctggaggaggctacctcaagcattcagaccctag

SEQ ID NO: 40224 - DNA, 828 bp, Artificial Sequence
  derived and/or modified sequence
atgagcagcttcggctaccggaccctgaccgtggccctgttcaccctgatctgctgccccgggagtgatgaaaaggtgtttgaagttcacgtgaggccaaagaaactcgcagttgaacccaagggatctttggaagtcaattgctccactacatgcaaccaaccagaagtgggtggtctggaaacaagtctagacaaaattcttttagacgaacaggcccaatggaagcattacctggtgagcaatatctcacacgacacggtgctccagtgtcacttcacatgctccggaaagcaagaaagcatgaacagcaacgtgtccgtttatcagcctccacgacaggtcattctgacgttgcagccaacacttgtcgctgtcggtaaatccttcactattgaatgccgggtccccacagtagagccccttgattcactcactctatttctgttcagaggcaatgaaaccctgcattatgaaacttttggtaaagcagcacctgctcctcaggaggctaccgccacattcaactcgaccgctgatcgggaggacggtcacagaaatttctcatgtttggctgtactggacctcatgtcccggggaggaaatattttccacaaacacagtgccccaaagatgttggagatttatgaacctgtgtctgatagtcaaatggttatcatagtgactgtcgtatcagttctgttatctcttttcgtgacctcggtgttgctctgcttcatcttcggccagcatctacggcagcagaggatggggacatacggtgtgcgcgccgcttggcggcgtctgccacaggccttcagaccctag

SEQ ID NO: 40225 - DNA, 828 bp, Artificial Sequence
  derived and/or modified sequence
atgagcagcttcggctaccggaccctgaccgtggccctgttcaccctgatatgttgccccggcagcgatgaaaaggtgttcgaggtacacgtgcggcccaagaagctcgccgtggagcccaagggctccctagaggtcaattgctccacaacatgtaaccaacccgaggttggtggacttgagacatctctggacaagatcttactcgacgagcaggcacagtggaagcattatttggtctctaatatctcccatgataccgtactccagtgccactttacctgtagtgggaagcaggaaagcatgaactccaacgtctcggtgtaccaaccccccagacaggtgatactgacattgcagcctaccctagtagcagtggggaagagcttcacaattgaatgcagggtgcctaccgtggaacccctcgactcactgacgctctttttgttcagaggcaatgagaccctgcactatgagaccttcggcaaggcagctccagctcctcaggaagccacggccacattcaacagtaccgcagacagggaggacggccaccgcaacttttcttgcctggcagttctggatctgatgtcccggggagggaacatttttcacaagcattctgctcctaaaatgttggagatatatgaaccagtaagcgacagccaaatggttatcatcgtcacggtggtgtctgttctcctctcgttgttcgtaactagtgtacttctgtgcttcatcttcggccagcacttgcgccagcagagaatgggcacatacggcgtccgtgcggcatggcgtagactgcctcaggcttttaggccttag

SEQ ID NO: 40226 - DNA, 828 bp, Artificial Sequence
  derived and/or modified sequence
atgtccagtttcggctatcggaccctgaccgtggctctcttcacccttatatgctgtcctggttcggatgagaaggtttttgaagtgcatgtgcggcctaagaagctggccgtggaacctaaagggtcactcgaggttaattgcagcaccacgtgtaaccaacccgaagtgggcggtttagaaactagcctggataagattcttctggacgagcaggctcagtggaagcactatctggtctccaacatttcccacgatacagtgcttcagtgccacttcacctgctccggcaagcaagaatccatgaacagcaatgtgtctgtttaccagccccctcgccaggtgatactcactctacagccgaccctggtcgccgtgggtaagtctttcacaatcgaatgtagagtccctactgtggagcccctggatagccttactcttttcctttttcgcggtaacgaaactctgcattacgaaacgttcgggaaagcagcgcctgcccctcaagaagccactgctacttttaactccacggcagatcgtgaggatggtcacagaaatttttcgtgtctggctgtgctggacttgatgtcgcgcggaggcaatatatttcataagcattcagcccctaagatgttagagatctacgaacccgtttctgactcccagatggtcattattgtcaccgtcgtatcggtgttgctttcactgttcgtgacatcagtgctgctgtgtttcattttcggccagcacctgaggcagcagcggatggggacttacggggtgcgtgccgcttggcggcgactgcctcaggcttttagaccatag

SEQ ID NO: 40227 - DNA, 828 bp, Artificial Sequence
  derived and/or modified sequence
atgtcctcctttggctatagaacacttaccgtcgcactattcacactaatctgctgccccggttctgatgaaaaggtctttgaggtgcatgttcgccctaaaaaactggctgtggaaccaaaagggtcactcgaggtaaactgcagtacgacctgcaatcaacctgaggtaggcggactagaaacgtctctagataagattttactcgatgaacaggcacagtggaaacactacctggtctcgaatatttcgcatgacacagtgctacagtgtcactttacctgcagcggaaaacaggagtctatgaactctaacgtctctgtctaccaacctcccagacaggtgattttaaccctccaacctacgcttgtcgccgtgggcaagtcctttaccattgagtgccgcgtcccaacggtcgaaccactcgatagtcttacattgtttctgtttcggggaaatgaaacgcttcactatgaaacttttgggaaagccgctccagcaccccaggaggccactgctacctttaactccaccgcagatcgcgaggatggccatcggaattttagctgcctcgctgttctggacctcatgtccagaggcggtaacattttccataaacattcagcccctaagatgctggaaatttacgaaccagtttctgattcacaaatggtcattatagtgacggtggtgtccgtcctgttgtccctgtttgttaccagcgtgctgttgtgttttatttttggtcagcatctccgtcagcagcgcatgggcacttatggagttagggccgcatggcggcgtttgccacaggctttcaggccttag

SEQ ID NO: 40228 - DNA, 828 bp, Artificial Sequence
  derived and/or modified sequence
atgtccagctttgggtaccggactctgacggtggctcttttcactctaatttgttgtccgggatcagatgaaaaagtattcgaggtccacgttagacccaaaaagctagccgtagagcctaaagggtctcttgaagttaattgttccacaacatgtaatcagccagaggtggggggtctggagacatctctggataagatcctcctggacgagcaggcgcaatggaaacattacctcgtgagtaatatctctcatgacactgtcctgcaatgccactttacctgttccggtaaacaggagagtatgaacagtaacgtctctgtgtaccagccaccacggcaggtaatcctgaccctgcagcccacgctcgtagccgtcggaaagtcattcactatagaatgcagggtgcctacagtggaacctctggattccctaaccctgttcctattcagggggaatgagactctccactacgaaactttcggaaaagctgcccctgccccacaggaagcaaccgctaccttcaattcaaccgccgatagagaggacggccatcggaactttagttgtcttgcagtgcttgatttgatgagtcgtgggggaaacatctttcataagcacagcgcgccaaaaatgctggagatctatgagcctgtttcggattcccaaatggtcataatagtcaccgtggtgtctgtgttgctgtccctctttgtgacgagtgtcctgttatgctttatcttcggacaacacttgcggcagcagagaatgggcacatacggtgtgcgagccgcatggagacgccttccgcaagcgtttcgcccttag

SEQ ID NO: 40229 - DNA, 828 bp, Artificial Sequence
  derived and/or modified sequence
atgagctcattcgggtaccggactctcacggtggcgctctttaccctcatctgctgtccaggtagtgatgagaaggttttcgaagtacatgttagacccaaaaagttggctgtggagcctaaaggaagcttggaggttaattgcagtacaacttgcaatcagcccgaggtcggcggtctcgagacgtctctggataagatcctgttagatgagcaggctcaatggaagcattacttagtcagcaacatttctcacgatacggtgcttcagtgtcactttacatgcagtgggaagcaagagtcaatgaacagcaacgtgagcgtataccaaccacctcgccaggtgatactgactctccagccaactttagtggccgtgggcaagtcttttactatcgagtgtcgagttccgaccgtggaaccccttgactccctgactctcttcctattccgaggtaacgaaactctgcactatgagaccttcggcaaagctgcgcctgccccacaggaggccaccgcgacattcaactcaacagccgacagagaagacggacacagaaacttttcctgtctcgctgttctggacctcatgagtaggggcggtaacatctttcataagcactccgcccctaagatgttggaaatctatgagcccgtgagtgacagtcagatggtgattatcgttacggtcgttagcgtgctcctcagcctcttcgttacgagcgttttgctctgttttatatttgggcagcatttgagacaacagagaatgggcacctacggcgttcgcgcagcttggcgaaggctcccccaggctttccgtccatag

SEQ ID NO: 40230 - DNA, 828 bp, Artificial Sequence
  derived and/or modified sequence
atgtcttccttcggatacaggacactgactgttgctctgttcaccctaatctgctgcccaggtagcgacgagaaggtcttcgaggtgcacgtacggcctaagaaacttgctgttgagccaaagggatcactggaagtgaattgcagtacaacatgtaaccagccggaagtcggaggactggaaacatctctcgacaagatcctcctggacgaacaggcccagtggaagcactatctggtctcaaatatatctcatgacactgtgctgcagtgtcattttacctgctcaggaaagcaggagtcaatgaacagcaacgtatctgtgtaccaacctcctaggcaggtgattcttacgcttcagccaacacttgttgccgtgggtaagtccttcaccatcgagtgcagagtccccaccgtggagcctttagactccctgaccttgttcctgttcagaggaaatgagactttgcactatgaaacatttggcaaagctgcacccgctccccaagaagcaactgccacgtttaatagcactgcagatagggaagatggacacaggaatttttcatgcctggccgtccttgacttgatgtctcgagggggaaatattttccacaagcacagcgctccaaaaatgttggagatctacgaacctgtttccgattcacagatggtcattatagttaccgtcgttagcgttcttctaagcctgttcgtgacgtctgtgctcctctgtttcatctttggtcaacacctgcggcagcagcgtatgggtacttacggagtcagggccgcttggcgcagactcccccaggcttttagaccgtag

SEQ ID NO: 40231 - DNA, 828 bp, Artificial Sequence
  derived and/or modified sequence
atgagcagcttcggctacagaaccctgaccgtggccctgttcaccctgatctgctgccccggcagcgacgagaaggtgttcgaggtgcacgtgagacccaagaagctggccgtggagcccaagggcagcctggaggtgaactgcagcaccacctgcaaccagcccgaggtgggcggcctggagaccagcctggacaagatcctgctggacgagcaggcccagtggaagcactacctggtgagcaacatcagccacgacaccgtgctgcagtgccacttcacctgcagcggcaagcaggagagcatgaacagcaacgtgagcgtgtaccagccccccagacaggtgatcctgaccctgcagcccaccctggtggccgtgggcaagagcttcaccatcgagtgcagagtgcccaccgtggagcccctggacagcctgaccctgttcctgttcagaggcaacgagaccctgcactacgagaccttcggcaaggccgcccccgccccccaggaggccaccgccaccttcaacagcaccgccgacagagaggacggccacagaaacttcagctgcctggccgtgctggacctgatgagcagaggcggcaacatcttccacaagcacagcgcccccaagatgctggagatctacgagcccgtgagcgacagccagatggtgatcatcgtgaccgtggtgagcgtgctgctgagcctgttcgtgaccagcgtgctgctgtgcttcatcttcggccagcacctgagacagcagagaatgggcacctacggcgtgagagccgcctggagaagactgccccaggccttcagaccctag

SEQ ID NO: 40232 - protein, 985 aa, Artificial Sequence
  derived and/or modified sequence
MQDIAFLSGGRGKDNAWIITFPENCNFRCIPEEVIAKVLTYLTSIARQNGSDSRFTIILDRRLDTWSSLKISLQKISASFPGNLHLVLVLRPTSFLQRTFTDIGFWFSQEDFMLKLPVVMLSSVSDLLTYIDDKQLTPELGGTLQYCHSEWIIFRNAIENFALTVKEMAQMLQSFGTELAETELPDDIPSIEEILAIRAERYHLLKNDITAVTKEGKILLTNLEVPDTEGAVSSRLECHRQISGDWQTINKLLTQVHDMETAFDGFWEKHQLKMEQYLQLWKFEQDFQQLVTEVEFLLNQQAELADVTGTIAQVKQKIKKLENLDENSQELLSKAQFVILHGHKLAANHHYALDLICQRCNELRYLSDILVNEIKAKRIQLSRTFKMHKLLQQARQCCDEGECLLANQEIDKFQSKEDAQKALQDIENFLEMALPFINYEPETLQYEFDVILSPELKVQMKTIQLKLENIRSIFENQQAGFRNLADKHVRPIQFVVPTPENLVTSGTPFFSSKQGKKTWRQNQSNLKIEVVPDCQEKRSSGPSSSLDNGNSLDVLKNHVLNELIQTERVYVRELYTVLLGYRAEMDNPEMFDLMPPLLRNKKDILFGNMAEIYEFHNDIFLSSLENCAHAPERVGPCFLERKDDFQMYAKYCQNKPRSETIWRKYSECAFFQECQRKLKHRLRLDSYLLKPVQRITKYQLLLKELLKYSKDCEGSALLKKALDAMLDLLKSVNDSMHQIAINGYIGNLNELGKMIMQGGFSVWIGHKKGATKMKDLARFKPMQRHLFLYEKAIVFCKRRVESGEGSDRYPSYSFKHCWKMDEVGITEYVKGDNRKFEIWYGEKEEVYIVQASNVDVKMTWLKEIRNILLKQQELLTVKKRKQQDQLTERDKFQISLQQNDEKQQGAFISTEETELEHTSTVVEVCEAIASVQAEANTVWTEASQSAEISEEPAEWSSNYFYPTYDENEEENRPLMRPVSEMALLY

SEQ ID NO: 40233 - DNA, 2958 bp, Artificial Sequence
  derived and/or modified sequence
atgcaggacattgcgtttttaagtggtggtcgaggcaaggataatgcttggatcattacgttccccgagaactgcaattttaggtgcataccggaagaagtgatagctaaagttcttacttatttaacgagcatcgctagacagaatggaagcgactcgagattcacaatcattttggacaggcgtttggacacatggagctctttgaagatttcacttcaaaagatttcggcgtccttccctggaaatttgcacctcgtgctagtattgcgcccgacttcgttcctccagcgaacgttcaccgatattggtttttggtttagtcaagaggacttcatgcttaagctgcccgtagttatgctgtccagcgtctctgatttacttacctacatcgatgataagcagctgacccctgaactgggaggcactcttcagtattgccactctgaatggattatctttagaaacgctatcgaaaactttgcactcacagtcaaggagatggcccagatgctccagtccttcggaaccgagcttgcagagaccgaactacctgatgacatcccatccatcgaggagatccttgccatcagggcagaaagatatcacttgctcaagaatgacattaccgccgtcacaaaagaaggaaagattcttttaaccaacttagaagtgccagatactgagggcgcagtaagctcaagactggagtgtcataggcaaattagcggagactggcaaaccataaataagcttcttacccaggtgcatgatatggaaacagcctttgatggattctgggaaaagcatcaattgaaaatggagcagtatctccagctgtggaaatttgagcaggactttcaacagctcgttacggaggtggaatttctcctcaatcagcaggctgagctcgcagacgttacaggcacaatagcccaagtcaagcaaaagattaagaaactcgagaatctcgatgagaacagtcaggagctccttagcaaggcgcaatttgtgatccttcacggacataagcttgcagctaaccaccactacgctttggacttgatctgccagaggtgcaatgagctgcgctacctatcagatatcctggtgaacgaaattaaagccaagagaattcagctgagcagaaccttcaagatgcataaactgctgcagcaagcaagacagtgttgtgacgaaggagagtgcctgctggccaaccaggaaattgataagttccagagcaaagaggacgcgcaaaaggctttgcaggacatcgagaacttcctagagatggccctgccatttatcaactacgagcccgagacactgcaatatgagtttgacgtgatactctcccctgagctgaaagttcagatgaagaccattcaattgaagttagagaacatccgctctatctttgagaaccagcaggctgggttcaggaacctggcagataagcacgtgagaccaattcagttcgtcgtgcctaccccagagaatctcgtgacatccgggaccccctttttttcctcgaagcagggaaagaagacctggcgacagaatcagtctaacttgaagatagaagtggttcctgactgccaggaaaagcgatcaagtgggccgagctcctccctggataacggcaactctcttgacgttctgaagaatcacgttcttaatgagctgatccagaccgaacgggtctatgtacgggagctctacactgtgttgctgggataccgagcagaaatggataatcctgaaatgttcgatcttatgcctccactgctgcgcaataagaaagacatcctgttcgggaacatggcggagatttacgaatttcataacgacatttttctgtccagcttggagaactgtgctcatgcccctgagcgggtggggccgtgtttcctggagcgtaaggacgattttcagatgtatgcaaagtattgtcagaataagccaagatccgaaaccatctggaggaagtattccgagtgcgcattttttcaggaatgtcagagaaaactgaagcatagacttcgtttagatagttacctgctcaagcccgtccagaggatcactaaataccagctgttactgaaggagttgttaaagtattctaaggactgtgaggggtctgcgctgctcaagaaagctcttgatgctatgctcgatctgctaaagtccgtcaatgattccatgcatcaaatagccattaacggctacatagggaacctgaacgagctcgggaaaatgattatgcaaggggggttttcggtgtggatcggacacaaaaaaggggctacaaagatgaaggatctggcccggttcaagccaatgcagaggcatctatttttatacgagaaggctattgtcttttgcaagaggcgggttgagtctggcgaaggctccgacaggtaccctagttactcttttaagcattgttggaagatggatgaagtggggataaccgagtatgtcaagggtgacaacagaaaattcgaaatctggtatggagaaaaggaggaagtgtacatcgtgcaagcatctaacgttgatgtgaagatgacctggctgaaggaaattcgaaacatactgctgaaacaacaagaactcctcaccgtgaagaaaagaaaacagcaggatcagctaaccgagagagataagtttcagataagcctgcagcagaacgacgaaaaacaacagggcgctttcattagtaccgaagaaactgagttggagcatacctcgaccgtggtagaagtttgtgaggcaatagcaagcgtgcaagccgaagccaataccgtgtggaccgaggcttcacagtccgccgaaattagtgaagagccagccgagtggagttctaattatttctatccaacctacgatgagaatgaagaggaaaatcgccccttgatgagacccgtgagcgagatggcactgctatattag

SEQ ID NO: 40234 - DNA, 1587 bp, Artificial Sequence
  derived and/or modified sequence
gtgcagatgaagaccatccagctgaagctggagaatatcagaagcatcttcgaaaatcagcaagcgggcttcaggaatcttgcagacaaacacgtcaggccaatacagttcgtcgttccaaccccggaaaacctcgtgacgtctgggacccccttctttagtagcaaacaggggaagaaaacatggcggcagaatcagagcaatctgaagatcgaggtggtaccggattgtcaagagaagcgatcttccggccccagcagtagtctcgataacggcaactccctcgatgtgctgaaaaatcatgttctgaacgagttgatccagacagagcgggtttacgtcagggaattgtacaccgtgctgctgggctaccgtgcggaaatggacaaccctgagatgttcgatctgatgccaccgttgcttcgcaacaagaaagacatcctcttcggaaatatggccgaaatctatgaatttcataacgacatttttctgagcagcctagaaaattgtgctcacgctccagagagagtgggcccgtgtttcctcgaacgcaaggacgattttcagatgtatgctaaatactgtcaaaacaagccgcgcagcgaaactatttggcgaaaatactcagagtgtgcattcttccaggagtgtcagcggaaattgaagcacagattgcggctggactcttacttgctgaagccggtgcagcgaattacaaagtaccagctgttactgaaggaactcctgaaatactccaaggactgcgaaggatcagctctgctcaaaaaagccctagatgccatgctggacctactgaagtccgttaatgattctatgcaccagatcgcgatcaacggatacatcggaaatctgaatgaactgggcaagatgatcatgcagggaggctttagtgtttggatcggacacaaaaagggcgctacgaaaatgaaggaccttgccaggtttaagccaatgcagcgccatctgtttctttacgaaaaagccatcgtcttttgtaagaggcgtgtagagagtggggaaggctcagaccggtatccaagttattcgttcaagcattgttggaagatggacgaagtgggtatcaccgaatacgtaaagggcgataatcggaaattcgagatctggtacggagaaaaggaagaggtgtatatagtgcaggccagcaacgtggatgtcaaaatgacctggttgaaggaaataaggaatatccttctgaagcaacaggagctactgacagtgaagaagaggaagcaacaggaccagctgactgaaagagataagtttcaaatttctctgcagcagaacgatgagaagcagcagggtgcattcatttcaaccgaggaaactgagttggaacacaccagtaccgtcgtggaggtatgcgaggctattgcttcagttcaggcagaagctaacactgtctggacagaggcaagccagagcgccgagataagcgaggagcccgcagaatggagctcaaattacttttatcccacgtacgatgaaaatgaggaggaaaatcgacctctgatgaggccagttagcgagatggcccttctgtactag

SEQ ID NO: 40235 - DNA, 2958 bp, Artificial Sequence
  derived and/or modified sequence
atgcaggatattgcatttctctccgggggcaggggtaaggataatgcctggataattacattccccgaaaattgtaactttcgctgtatccccgaggaagtgattgccaaagtgctgacttacttgacctctatcgccagacagaatggcagcgactctaggtttaccatcatactggatcgacgcctcgatacctggagctccctcaagattagccttcagaaaatcagcgcgtccttccccgggaatctgcatctggtgctcgttttgagacctacgtcatttctacaaagaacattcactgacatcgggttctggttctctcaggaagacttcatgctcaagctgccagtggtaatgctttcctccgtgtcggatttgcttacttacatcgatgataaacaactaacaccagaactgggcggaacgcttcagtactgccatagcgagtggattatatttcgcaacgctatcgagaacttcgcgctaacagtcaaggaaatggctcagatgctgcagagcttcggaaccgaactagccgaaacagaacttcccgatgacataccaagcatcgaagagatcctagctatccgggccgagcgataccacttactaaaaaatgatattaccgctgtcacaaaggaaggcaaaattctcttgactaaccttgaggttccagacactgagggagccgtgagctccagactggaatgtcacagacagatatctggcgactggcagactattaacaagctcctcactcaggtccacgacatggagaccgctttcgacggcttttgggagaagcaccaacttaagatggaacagtacctccaactctggaaattcgagcaggatttccagcaactggtgacagaggtggaatttctgttgaaccagcaggcagagctggcggacgtgaccgggactatcgcacaagtgaagcagaaaataaaaaagcttgaaaaccttgatgaaaattcgcaggagctcctttctaaagcgcagtttgtgatcctgcacgggcataagctggctgccaatcatcattatgctttagaccttatatgccagagatgcaatgagttgagatatctatccgacatcctggtaaacgagataaaggccaagaggatccagctgagcaggacatttaaaatgcacaagctccttcagcaggcccgacagtgctgcgacgagggagaatgtctgttagctaaccaggaaatcgataagttccagtctaaggaagacgctcaaaaggccctgcaggacatcgagaactttttagagatggcgttgccttttatcaattacgagcctgagacattgcagtacgagtttgacgtaatcctcagccctgaattgaaggtgcagatgaagactattcaattaaagctggagaacatccgttccatctttgagaaccaacaggccggctttagaaatctcgccgacaaacacgttagacccatccaattcgtggtacccacccccgagaaccttgtaaccagtggaacaccctttttttcaagcaagcaggggaagaaaacctggcgccaaaaccaaagcaatctgaagatagaagtggttccagactgccaggagaagaggagtagtggcccttcatccagcttggacaatgggaatagcttggatgtcctcaaaaatcatgtgttaaatgagctgatccaaactgagcgagtgtatgtgagggaactctatacagtgctgttggggtacagagctgagatggacaatcccgagatgttcgatcttatgcccccactactgcggaacaagaaagacattctttttgggaatatggcagagatctacgaattccacaacgacattttcttgagctccctcgaaaactgcgcacatgctcctgagagggtcggcccctgtttcctggagagaaaggacgattttcagatgtatgcaaaatattgtcagaacaaaccccgctccgagactatctggcggaagtactcggagtgtgcattctttcaggagtgtcaacgcaaactgaagcaccggttgcgtctggactcatatctgctgaaacccgtccagcggattacgaaatatcagttattgctgaaggaactgctgaaatactccaaggattgtgagggaagcgctcttcttaaaaaggccctggacgccatgctggacctgctgaagtccgtcaatgattctatgcaccagatcgctatcaacgggtatatcggcaacctgaatgagcttggcaaaatgatcatgcaggggggattctcagtgtggattggacacaaaaagggagccaccaagatgaaggatctggctagattcaaacctatgcagaggcatctatttctctatgagaaagccatcgtcttttgcaagcggcgcgtggaatctggtgagggcagcgacaggtacccgtcctattccttcaaacattgctggaaaatggacgaggtgggtattactgaatacgtaaagggcgacaacagaaagttcgaaatctggtatggggagaaggaggaggtttatatcgtccaggcctcgaatgtggacgttaagatgacttggctcaaggaaataaggaatattctgcttaagcagcaggagctgctcacagtcaagaaaaggaagcagcaagatcagcttacggagagagacaagtttcaaatttcactacagcagaacgatgagaagcagcagggagcttttatcagcaccgaggagaccgagcttgagcacacatccacagtggtagaagtctgcgaggccatcgccagtgtgcaggcagaggccaataccgtgtggactgaggcctctcagagcgccgagatcagcgaggagcccgctgaatggtcctctaactacttttatccgacatacgacgagaacgaagaagaaaatcgaccactcatgagacccgtctccgagatggctttattgtattag

SEQ ID NO: 40236 - DNA, 2958 bp, Artificial Sequence
  derived and/or modified sequence
atgcaggacatcgccttcctgagcggcggccggggcaaggacaatgcctggatcatcaccttccctgagaactgcaacttccgctgcatccctgaggaggtgattgccaaggtgctgacctacctgaccagcatcgcccggcagaatggaagtgacagccgcttcaccatcatcctggaccggcggctggacacctggagcagcctgaagatcagcctgcagaagatcagcgccagcttccctggcaacctgcacctggtgctggtgctgcggcccaccagcttcctgcagaggaccttcacagacatcggcttctggttcagccaggaggacttcatgctgaagctgcctgtggtgatgctgagctctgtgtctgacctgctgacctacattgatgacaagcagctgaccccagagctgggcggcaccctgcagtactgccacagcgagtggatcatcttcagaaatgccattgaaaattttgccctgactgtgaaggagatggcccagatgctgcagagctttggaacagagctggccgagacagagctgcctgatgacatccccagcattgaggagatcctggccatccgggcagagcgctaccacctgctgaagaatgacatcacagctgtgaccaaggagggcaagatcctgctgaccaacctggaggtgcctgacacagagggcgctgtgagcagccggctggagtgccaccggcagatcagcggggactggcagaccatcaacaagctgctgacccaggtgcatgacatggagacagcctttgatggcttctgggagaagcaccagctgaagatggagcagtacctgcagctgtggaagtttgagcaggacttccagcagctggtgacagaggtggagttcctgctgaaccagcaggccgagctggctgatgtgacaggcaccatcgcccaggtgaagcagaagatcaagaagctggagaacctggatgagaacagccaggagctgctgagcaaggcccagtttgtgatcctgcacggccacaagctggccgccaaccaccactacgccctggacctgatctgccagcgctgcaatgagctgcgctacctgagtgacatcctggtgaatgagatcaaggccaagaggatccagctgagcaggaccttcaagatgcacaagctgctgcagcaggcccggcagtgctgtgatgaaggagagtgcctgctggccaaccaggagattgacaagttccagagcaaagaagatgcccagaaggccctgcaggacatcgagaacttcctggagatggccctgcccttcatcaactatgagcctgagaccctgcagtatgaatttgatgtgatcctgagccctgagctgaaggtgcagatgaagaccatccagctgaagctggagaacatccgcagcatctttgagaaccagcaggccggcttcaggaacctggccgacaagcacgtgcggcccatccagtttgtggtgcccaccccagagaacctggtgaccagcggcacccccttcttcagcagcaagcagggcaagaagacctggaggcagaaccagagcaacctgaagattgaggtggtgcctgactgccaggagaagaggagcagcggccccagcagcagcctggacaatggaaacagcctggatgtgctgaagaaccacgtgctgaatgaactcatccagacagagcgggtgtatgtgcgggagctgtacacagtgctgctgggctacagagctgagatggacaaccctgagatgtttgacctgatgccacccctgctgaggaacaagaaggacatcctgtttggaaacatggccgagatctatgagttccacaatgacatcttcctgagcagcctggagaactgtgcccacgcccctgagcgggtgggcccctgcttcctggagaggaaggatgacttccagatgtatgccaagtactgccagaacaagcccaggtctgagaccatctggaggaagtacagtgaatgtgccttcttccaggagtgccagaggaagctgaagcaccggctgcggctggacagctacctgctgaagcctgtgcagaggatcaccaagtaccagctgctgctgaaggagctgctgaagtacagcaaggactgtgagggcagcgccctgctgaagaaggccctggatgccatgctggacctgctgaagtctgtgaatgacagcatgcaccagatcgccatcaatggctacatcggcaacctgaatgagctgggcaagatgatcatgcagggcggcttctctgtgtggattggccacaagaagggggccaccaagatgaaggacctggcccgcttcaagcccatgcagaggcacctgttcctgtatgagaaggccatcgtgttctgcaagagaagagtggagagcggggagggcagtgaccgctaccccagctacagcttcaagcactgctggaagatggatgaggtgggcatcacagaatatgtgaagggggacaacaggaagtttgagatctggtacggggagaaggaggaggtgtacatcgtgcaggccagcaatgtggatgtgaagatgacctggctgaaggagatccggaacatcctgctgaagcagcaggagctgctgactgtgaagaagaggaagcagcaggaccagctgacagagcgggacaagttccagatcagcctgcagcagaatgatgagaagcagcagggcgccttcatcagcacagaggagacagagctggagcacaccagcacagtggtggaggtgtgtgaggccatcgcctctgtgcaggccgaggccaacacagtgtggacagaggccagccagagcgctgagatcagcgaggagcctgctgagtggagcagcaactacttctaccccacctatgatgaaaatgaggaggagaaccggcccctgatgaggcctgtgtctgagatggccctgctgtactag

SEQ ID NO: 40237 - DNA, 1587 bp, Artificial Sequence
  derived and/or modified sequence
gtgcagatgaagaccatccagctgaagctggagaacatccgcagcatctttgagaaccagcaggccggcttcaggaacctggccgacaagcacgtgcggcccatccagtttgtggtgcccaccccagagaacctggtgaccagcggcacccccttcttcagcagcaagcagggcaagaagacctggaggcagaaccagagcaacctgaagattgaggtggtgcctgactgccaggagaagaggagcagcggccccagcagcagcctggacaatggaaacagcctggatgtgctgaagaaccacgtgctgaatgagctgatccagacagagcgggtgtatgtgcgggagctgtacacagtgctgctgggctacagagctgagatggacaaccctgagatgtttgacctgatgccacccctgctgaggaacaagaaggacatcctgtttggaaacatggccgagatctatgagttccacaatgacatcttcctgagcagcctggagaactgtgcccacgcccctgagcgggtgggcccctgcttcctggagaggaaggatgacttccagatgtatgccaagtactgccagaacaagcccaggtctgagaccatctggaggaagtacagtgaatgtgccttcttccaggagtgccagaggaagctgaagcaccggctgcggctggacagctacctgctgaagcctgtgcagaggatcaccaagtaccagctgctgctgaaggagctgctgaagtacagcaaggactgtgagggcagcgccctgctgaagaaggccctggatgccatgctggacctgctgaagtctgtgaatgacagcatgcaccagatcgccatcaatggctacatcggcaacctgaatgagctgggcaagatgatcatgcagggcggcttctctgtgtggattggccacaagaagggggccaccaagatgaaggacctggcccgcttcaagcccatgcagaggcacctgttcctgtatgagaaggccatcgtgttctgcaagagaagagtggagagcggggagggcagtgaccgctaccccagctacagcttcaagcactgctggaagatggatgaggtgggcatcacagaatatgtgaagggggacaacaggaagtttgagatctggtatggagagaaggaggaggtgtacatcgtgcaggccagcaatgtggatgtgaagatgacctggctgaaggagatccggaacatcctgctgaagcagcaggagctgctgactgtgaagaagaggaagcagcaggaccagctgacagagcgggacaagttccagatcagcctgcagcagaatgatgagaagcagcagggcgccttcatcagcacagaggagacagagctggagcacaccagcacagtggtggaggtgtgtgaggccatcgcctctgtgcaggccgaggccaacacagtgtggacagaggccagccagagcgctgagatcagcgaggagcctgctgagtggagcagcaactacttctaccccacctatgatgaaaatgaggaggagaaccggcccctgatgaggcctgtgtctgagatggccctgctgtactag

SEQ ID NO: 40238 - DNA, 1916 bp, Artificial Sequence
  derived and/or modified sequence
gttcaaatgaagactatacaactcaagcttgaaaacattcgaagtatatttgagaaccagcaggctggtttcaggaacctggcagataagcatgtgaggccaatccaatttgtggtacccacacctgaaaatttggtcacatctgggacaccatttttttcatctaaacaagggaagaagacttggagacaaaatcagagcaacttaaaaattgaagtggtgcctgattgtcaggagaagagaagttctggtccatcctccagtttggacaatggcaatagcttggatgttttaaagaaccacgtactaaatgaactgatacagactgagagagtttatgttcgagaactgtatactgttttgttgggttatagagcggagatggataatccagagatgtttgatcttatgccacctctcctgagaaataaaaaggacattctctttggaaacatggcagaaatatatgaattccataacgacattttcttgagcagcctggaaaattgtgctcatgctccagaaagagtgggaccttgtttcctggaaaggaaggatgattttcagatgtatgcaaaatattgtcagaataagcccagatcagaaacaatttggaggaagtattcagaatgcgcatttttccaggaatgtcaaagaaagttaaaacacagacttagactggattcctatttactcaaaccagtgcaacgaatcactaaatatcagttattgttgaaggagctattaaaatatagcaaagactgtgaaggatctgctctgttgaagaaggcactcgatgcaatgctggatttactgaagtcagttaatgattctatgcatcagattgcaataaatggctatattggaaacttaaatgaactgggcaagatgataatgcaaggtggattcagcgtttggatagggcacaagaaaggtgctacaaaaatgaaggatttggctagattcaaaccaatgcagcgacaccttttcttgtatgaaaaagccattgttttttgcaaaaggcgtgttgaaagtggagaaggctctgacagatacccgtcatacagttttaaacactgttggaaaatggatgaagttggaatcactgaatatgtaaaaggtgataaccgcaagtttgaaatctggtatggtgaaaaggaagaagtttatattgtccaggcttctaatgtagatgtgaagatgacgtggctaaaagaaataagaaatattttgttgaagcagcaggaacttttgacagttaaaaaaagaaagcaacaggatcaattaacagaacgggataagtttcagatttctcttcagcagaatgatgaaaagcaacagggagcttttataagtactgaggaaactgaattggaacacaccagcactgtggtggaggtctgtgaggcaattgcgtcagttcaggcagaagcaaatacagtttggactgaggcatcacaatctgcagaaatctctgaagaacctgcggaatggtcaagcaactatttctaccctacttatgatgaaaatgaagaagaaaataggcccctcatgagacctgtgtcggagatggctctcctatattgatgaagctactatgtcaaatggcaagtagctctttcctgcctgcttctcagctcatttggaaaaatactgcgcaaaagacattgagctcaaatgatgcagatgttgttttcaggttaatggacacgcaaagaaaccacagcacatacttcttttctttcatttaataaagcttttaattatggtacgctgtctttttaaaatcatgtatttaatgtgtcagatattgtgcttgaaagattctcatctcagaatacttttggacttgaaaattatttcttctctactttgtaaccaaatgcaatcggtgtgccttggattatttagtttat

SEQ ID NO: 40239 - DNA, 2958 bp, Artificial Sequence
  derived and/or modified sequence
atgcaggacatcgccttcctgagcggcggccggggcaaggacaacgcatggataatcaccttccccgagaactgtaacttcaggtgcatcccagaagaggtcatagctaaggtgcttacttacctgacctcaatcgctcgccaaaatggttctgacagcaggttcaccatcatcttggatagaagactggacacttggtccagcctaaagatttctctgcagaaaatttcggcttcattccccggcaacctccatctcgttctcgtgctgcggcccacaagctttctccaacggacatttactgacattgggttctggttctcccaggaagactttatgctgaagctacccgtggtcatgctgtcttccgtgagtgacctcctcacgtatattgatgacaagcagctgacccccgaactgggtggaacattgcagtactgccattcagagtggattatttttagaaatgccattgagaacttcgcactgaccgtaaaagaaatggctcaaatgctccaaagttttgggacagagctcgcagaaaccgagctgcccgacgacattccttccattgaagaaatactggctatccgcgccgaacgatatcacctgctcaaaaatgacatcacagctgtcacgaaggagggaaaaatactacttacaaatctggaagtgcctgataccgaaggcgcggttagcagtagactcgagtgccataggcagataagtggcgactggcagacgatcaataagctgctgactcaggttcatgatatggagactgctttcgacggcttttgggagaaacaccagctgaaaatggagcagtacctacagctgtggaaattcgaacaagacttccagcagctggttaccgaggttgaatttctgctcaaccagcaggccgagttggcagacgtcaccgggaccattgctcaagtgaagcaaaaaatcaagaagctggaaaatctggatgaaaattctcaggagttgctcagtaaagcccagtttgtgattctccacggccacaaattggctgctaatcaccattacgccctggacctgatttgtcaaagatgtaacgaattgcgctatttgtccgacattcttgtcaatgagataaaggctaaacgcatccagctttcccgaacatttaagatgcataagctgcttcagcaagcccgccagtgctgcgatgaaggggagtgtctgcttgcgaatcaagaaattgataagtttcaatccaaggaggatgctcagaaagctctgcaggacatcgagaattttctcgagatggccttgccatttattaattacgaacctgagaccctgcagtacgaattcgatgtgatcctttccccagagctgaaagtgcagatgaagacaatccagcttaaactggagaatattcggtcgatttttgagaaccaacaagctggctttaggaatctggctgacaaacatgtgcggccgatccagttcgtggtccctaccccagaaaacttggtcaccagcggtacaccgtttttttcctcaaaacaggggaagaaaacatggcgccaaaaccagtccaacctgaagatcgaagtggtgccggactgtcaggagaaaaggagtagcggcccctcctcctccttggataatggaaatagcctggacgttctgaagaatcatgtgctaaatgagctgatccagacagaacgcgtgtacgtgcgggagctatacacggtgcttctggggtaccgcgcagagatggacaaccctgagatgttcgatctgatgcctcctctgttgcgcaataagaaagatatactcttcgggaacatggctgaaatctatgagttccataatgacatttttctgtctagtctggaaaactgtgctcacgcccccgagcgggtgggcccttgcttcctggaacggaaggatgactttcagatgtatgctaaatattgtcagaataaaccgaggagcgagacgatctggcggaaatatagtgaatgtgctttcttccaggaatgccaacggaagttgaagcaccggctgcggctagatagctacctcctaaagccagtgcagcgcattactaagtatcagctgttacttaaagaattattaaaatacagtaaagactgcgaaggttctgccctcctgaagaaggctctcgacgcaatgctggatcttcttaaatctgttaacgactcaatgcaccaaatcgccatcaatgggtacatcggcaacttaaacgagttagggaaaatgatcatgcaggggggcttttctgtatggataggccataaaaagggtgctacaaagatgaaagacttggctcggttcaagccgatgcagcgtcacctttttctatatgaaaaagctatagtgttctgcaaacggagagtggaaagtggagagggttctgaccgatatccctcttacagcttcaaacactgttggaagatggatgaggtcggtattaccgagtacgtcaagggcgacaaccgcaaattcgaaatctggtacggcgagaaggaagaagtgtacatcgttcaggcctctaacgtggatgtgaagatgacctggttgaaggagatcaggaacatcttactcaagcagcaggaactgcttacggtgaagaagcgcaaacagcaggatcaattgactgaacgtgacaagttccagatcagcctgcagcagaatgatgaaaagcaacagggagcattcataagcactgaagaaaccgaactcgagcacaccagcacagtggtcgaagtctgcgaggccatcgctagcgtacaggcggaggctaacacggtgtggaccgaggccagtcagtccgctgaaatcagcgaggagcccgctgagtggagctctaactacttttatcccacttacgacgagaatgaggaggaaaatcggcccctaatgcggccggttagcgagatggccctgctgtattag

SEQ ID NO: 40240 - DNA, 1587 bp, Artificial Sequence
  derived and/or modified sequence
gtgcagatgaagaccatccagctgaagctggagaacatccggagcattttcgaaaaccagcaggccggcttccgcaaccttgccgacaagcatgtacgaccaatccagttcgtggttcccacacccgagaatctggtaacttcaggaaccccatttttcagctcaaagcaaggcaaaaagacctggaggcagaaccagtccaatttaaagatcgaagtggttccagattgccaggaaaaacggtcaagcggcccttcgtcatccctggataatggcaactcactcgacgtgttgaagaaccacgttctgaacgagctgatccagaccgagagggtgtacgttagagaactttacacagtacttttggggtatagggccgagatggataatcctgaaatgtttgacctcatgccaccgttgttgagaaacaagaaggacatactatttggaaacatggctgagatctatgaatttcataatgatattttcctctccagcctggagaactgcgctcatgcgcccgaacgtgtgggcccatgttttctcgaacggaaggatgatttccagatgtatgccaaatattgccagaacaagcctagatctgagactatctggaggaaatattccgaatgcgcgttttttcaggaatgccagcgcaaactcaagcacagactaagactggacagctacctgctaaagcctgtgcagcgtatcactaagtatcagcttctgctgaaggagctgttgaaatactcaaaggactgtgaggggagtgcgctgctgaagaaagcacttgatgccatgctggatctgctgaagagcgtaaatgacagcatgcaccagatcgcgataaatgggtatatcggaaatctcaatgaactgggaaagatgatcatgcagggaggattttccgtgtggatcggccacaaaaagggcgccacaaaaatgaaggacctagcacggttcaagcccatgcagagacatcttttcctctatgagaaagcaatagttttctgtaaacggagagtggagagtggcgagggatctgatcgctaccccagctatagtttcaagcactgctggaaaatggatgaggtgggaattacagaatacgtcaaaggagacaacagaaaattcgaaatttggtatggcgaaaaggaagaagtgtacatcgtgcaggcatctaacgtggacgtgaagatgacctggttaaaagagatccggaacatactgctgaaacagcaggaactcctgactgttaagaaaagaaaacagcaggatcaactcaccgagagggataaattccagatcagtctccaacaaaatgacgagaaacagcagggtgcctttatctctaccgaagagaccgagttggaacacacatcaactgtggtcgaggtgtgcgaagcaatcgcatcagtccaagcagaggccaacacagtgtggaccgaagccagtcagagtgcagaaatatctgaggaacctgccgagtggagctccaactatttctatccgacatatgatgagaacgaggaagaaaatagacctttgatgcgcccagtttcagagatggccctgctttattag

SEQ ID NO: 40241 - DNA, 2958 bp, Artificial Sequence
  derived and/or modified sequence
atgcaggacatcgccttcctgagcggcggccggggcaaggacaacgcttggatcataacctttccggaaaactgtaacttcaggtgcattcccgaagaggtgatcgcaaaggtgctgacctatctgaccagcattgctcggcagaacggctccgattccagattcacgatcattttagacaggcgcctggatacctggtcatcgctaaagatctccctgcaaaagatctccgcaagtttccccggcaacttgcatctagttctcgttctgcggcccactagttttctgcaacgcaccttcactgacattggattctggttttctcaggaggacttcatgcttaagcttccggtcgtgatgctgtcaagcgtgtccgacttgctaacgtacatagatgataagcagctgacaccagagttgggcggtaccctccagtattgccattcagaatggattatctttagaaatgccattgagaattttgccctcacggtcaaagaaatggcacagatgctgcagtcgtttggaactgagctggcggagactgaactgcccgacgacatcccatcaatcgaagagatcctggccattcgagctgaaaggtaccacctgcttaagaacgacatcaccgcagtgacaaaggaaggaaaaatactccttacaaatctagaggtaccagacaccgaaggcgccgttagctcaagacttgaatgccaccgccagatctccggcgattggcagacaattaacaagctgctgactcaggtgcacgacatggaaaccgcttttgatggcttttgggagaagcaccagctgaagatggagcagtacttacagctttggaagttcgaacaggatttccagcagctcgtgacagaagtggaatttctgctgaatcagcaagcagagttggccgacgtgactggcacaatcgctcaggtgaagcaaaagataaagaaactcgagaacctggatgagaatagccaggaactgctatctaaagctcaattcgtcattctccatggacacaagttggccgctaatcaccattacgcacttgaccttatctgtcagcgctgtaatgagctccgctatctctccgacatattggttaacgagatcaaggccaaacgcatccagttaagtagaacgttcaagatgcacaagctcctacagcaggcgcgtcagtgttgtgatgaaggagaatgtcttctggcaaaccaagaaattgacaaattccagtcaaaagaggacgcgcaaaaggctctacaggacattgaaaatttcctggagatggccctgcctttcatcaattacgaacctgagacactacagtacgagtttgacgtcatcctatctcccgaattaaaagtccagatgaagaccatccaacttaaattggagaatatccgtagtatatttgaaaaccagcaggcgggatttcgtaatcttgcagataaacacgtccggcccattcaattcgtggtcccaactcccgagaatttggtgaccagtggcaccccgttcttttctagcaagcaggggaagaagacttggcgacagaaccaaagcaaccttaagatcgaggtagtgcccgattgtcaggaaaaaagatcgagtggaccctcaagctccctggataatggtaacagtctggatgtgttgaagaaccatgtccttaacgagctcatccagacagagagggtgtatgttcgggagctatataccgtcctcctgggatacagagccgaaatggataaccctgagatgtttgatctcatgccacctctcttaagaaataagaaagacatcctgtttggcaatatggccgagatatatgaattccataacgatatattcctttctagtttggaaaattgtgcccatgcaccggaacgagtcggcccttgttttctcgagaggaaggatgattttcagatgtatgccaaatactgtcaaaacaagccacgatctgaaaccatttggcggaaatattctgagtgcgcttttttccaggagtgccagcgaaagctgaagcatagactccgcctagacagctacttgctgaagcccgtgcagagaatcactaagtaccaactactactgaaagagctcctgaagtactccaaggattgcgagggttctgcactcttaaaaaaggccctagatgccatgttagacttgctaaaatcagtcaatgactcgatgcatcagatcgccatcaatgggtacatcggtaatctgaatgaattggggaagatgataatgcaggggggttttagtgtgtggattggccataaaaagggcgctacaaagatgaaagatttggctcgctttaaacccatgcagagacacctttttctgtacgagaaagcgatcgtgttctgtaagcggagggtcgagagcggcgaaggctccgataggtatccttcttatagcttcaaacactgctggaaaatggatgaagtggggatcacagaatacgtaaaaggggataatcgaaagttcgaaatctggtatggcgagaaggaagaagtttacattgtgcaggccagcaatgtggacgtcaaaatgacctggctgaaggaaatcagaaacatcctcctgaaacagcaggagttgttgactgttaagaaaagaaagcagcaggaccagctgactgagcgcgataaattccaaatttccctgcagcaaaatgacgagaagcaacaaggggctttcatctcgaccgaggagacggaactggagcatacctcgactgtggtggaggtgtgcgaggctattgcaagcgtccaggccgaggcaaatactgtgtggacagaagccagccaatctgctgaaatttcagaagagccagctgagtggtccagtaattacttctacccaacctacgatgaaaacgaagaagagaaccggcccctgatgcgcccggtgagcgaaatggctctgctgtattag

SEQ ID NO: 40242 - DNA, 2958 bp, Artificial Sequence
  derived and/or modified sequence
atgcaggatatcgctttcctgtccggcggtcgaggtaaggacaacgcttggatcatcacctttccagagaattgcaatttcagatgtatacccgaggaggttattgcaaaggtgcttacatacttaaccagtatcgcccgacagaacgggagcgacagtcgcttcaccatcatcctcgaccgccgtctggacacatggagctcattaaagattagccttcagaaaatctcggcatcttttccgggaaatctacacctggtcttagtgctcaggccgacttcctttctccaacggaccttcactgacattgggttctggttctctcaagaagatttcatgctcaaactgccggtggtgatgctatcttcagtatctgacctgctcacttacattgatgataaacaactcaccccggaactggggggtactttacagtattgccatagcgaatggattatctttaggaatgctatcgaaaacttcgctcttacggtgaaggagatggcacagatgttgcagtccttcggaactgaattagcagagacagagttgcctgacgatattccttccattgaggaaatcctcgcaattagagccgaacggtatcacctgctgaaaaatgatatcaccgccgtgaccaaggaaggaaagatactcctcacgaacctcgaggtgccagacaccgaaggagcggtctcaagccgtttggagtgccaccgccaaatctctggagattggcaaactatcaataagctgctgacccaagtccatgatatggaaaccgccttcgacgggttctgggaaaagcaccaacttaagatggagcagtacctacagctctggaagtttgaacaggatttccaacagctcgtgacggaagtggagtttttgcttaatcagcaagccgagctagccgatgtgaccggtaccattgcccaggtcaagcaaaaaatcaagaagctggagaacctggatgagaacagccaggaactgcttagcaaagcccagtttgtgatcctccacggtcacaaactggcggcaaaccatcactatgccttggacctgatctgccagaggtgtaatgagctgcgatacctttcagatattcttgtcaatgagattaaggctaaaaggatccagctgtcaagaacctttaaaatgcataagctcctgcagcaagccagacaatgctgtgacgaaggcgaatgcctcctagcaaatcaggagattgataaattccagagcaaggaggacgcgcaaaaggcactgcaagacattgaaaatttcctggagatggccctcccatttatcaactacgagcccgagacccttcagtacgagttcgatgtgatcctgagtccggagctcaaggtccagatgaaaactattcaactgaaactcgagaatatcagatctatcttcgaaaaccaacaggcaggttttcgcaatctggccgataagcacgtgcggccaatacagtttgtggtacctacccccgagaatctggtgacatctggtacacccttcttcagctctaagcaggggaagaagacctggagacagaatcagagtaacctgaaaatcgaagtggttccagattgccaggaaaaacgctccagtggacccagcagctcgcttgacaacggaaattcgctcgacgtgcttaaaaaccacgtgctcaacgaactgattcaaacggaacgcgtatatgtgagggagctgtacacagtattgctgggctacagggcggagatggacaacccagagatgttcgatctgatgccgccactcctgcggaacaagaaggacatactgttcggcaatatggccgagatttatgagttccacaatgatatctttctttctagcctggagaactgtgctcacgctcctgagagagtggggccttgctttctggaaagaaaggacgattttcagatgtatgccaagtactgccagaataaaccacggtccgagactatctggcgaaaatacagcgaatgtgcattctttcaggagtgtcagcgaaaacttaagcacagattaaggctggacagctacctattgaagccagtccagcggattacaaaatatcaactgctgcttaaagagctgctgaaatactctaaggattgtgaaggaagcgctttactaaagaaggctctcgatgccatgctcgatttgctcaagtcagtgaatgacagcatgcatcaaatcgctataaacgggtacattggcaatctcaacgagctgggaaaaatgattatgcaaggcggattctctgtgtggattggccataaaaaaggtgcaaccaaaatgaaggatcttgcgcgatttaagccgatgcagaggcatttgtttctgtacgagaaggccatcgtcttttgtaagcggagagtggagtccggcgaaggctctgacagatatcccagctactccttcaaacattgctggaagatggacgaagtggggatcacagaatacgttaagggtgacaatcgaaaattcgaaatttggtatggcgagaaggaggaggtgtacattgttcaagcgtcaaatgtagacgtcaaaatgacgtggttgaaagaaattcgcaatattctcctgaagcaacaggagcttcttacagtcaagaagagaaagcaacaggatcagcttactgagagagataagtttcaaatttcactccagcagaatgatgaaaaacaacagggggctttcatcagtacagaagagaccgaattagaacatacgagcactgtggtcgaggtgtgtgaggccatagcgtctgtacaggccgaagcaaatacagtgtggacagaagcctcgcagagcgccgagatcagcgaggagcccgcagagtggagtagcaactatttttacccaacgtatgatgagaacgaggaagaaaatcggcctctgatgcggccagtgtctgagatggccctactttattag

SEQ ID NO: 40243 - DNA, 1587 bp, Artificial Sequence
  derived and/or modified sequence
gttcagatgaagacaatccagctgaaactggagaatattcgcagtatatttgaaaatcagcaagctggctttaggaacctggctgataagcacgtgcgccctatacagttcgtggtgcccacacccgagaacctggttactagtggcacaccctttttcagcagcaagcagggcaagaaaacttggcgtcagaaccagagcaacttgaaaatagaggtggttcccgattgtcaggaaaagagatcttctggaccaagctcaagcttagacaatggtaattccctggatgttcttaagaaccacgtactcaacgaactcattcagacagaacgtgtgtacgtccgggaattgtacaccgtcctgctcggctaccgggctgaaatggataaccctgagatgtttgatctgatgccaccccttttacgcaataagaaggacatcttattcggaaatatggccgaaatttatgaattccacaatgacatttttcttagtagtttggaaaattgcgctcacgcgccagagcgtgtgggcccatgttttctggagagaaaagacgatttccaaatgtacgccaagtattgccagaacaagcctagatcggagaccatctggaggaagtattctgaatgcgctttctttcaagagtgccaacgcaaactgaaacataggttgcgcctagactcctacctgcttaagcctgttcagcggattacaaaataccaacttcttttgaaggaactgttaaagtatagtaaggactgtgaaggctccgccctgctgaaaaaggccctggatgccatgctcgatctcctcaagagtgttaacgatagtatgcatcagatcgctattaatggctacattggaaatctgaatgaattaggaaagatgatcatgcaagggggtttttccgtgtggatcggtcacaagaagggggctactaaaatgaaggacctcgcccgattcaaacctatgcagcgccatctatttctgtacgagaaagccatagtgttttgcaagcgaagggtcgagagtggcgaaggaagcgacaggtacccctcctattcctttaaacactgttggaagatggacgaggtcggtattaccgaatacgtcaagggcgataacagaaaatttgagatctggtacggagagaaagaagaagtctatatcgtgcaggcaagcaacgtcgatgtcaagatgacatggttgaaagaaatccgaaacatcctgctgaagcaacaggaattgttaaccgtgaagaagcggaaacagcaagaccagctaactgaacgcgacaaattccaaatcagtctgcagcagaatgatgaaaagcagcaaggcgcttttatctctactgaggagacagagctggagcacacctctacagtggtggaagtgtgcgaagctattgcgtcggtccaggccgaagcaaacacagtatggacggaagccagccagtccgcagagatctctgaagaaccagccgagtggtcatcaaattacttctacccaacgtacgacgagaatgaggaggaaaacagacccctgatgaggccagtcagtgaaatggccctgctgtactag

SEQ ID NO: 40244 - DNA, 2958 bp, Artificial Sequence
  derived and/or modified sequence
atgcaagatatcgcctttctgtccggcggaagaggaaaagacaatgcatggattataacatttcctgagaattgtaacttccgctgtattccagaggaagtgattgcaaaggtgctcacctatctaactagcatagccagacaaaacggatctgattctcgatttacaattattctggatcgacgcctggatacatggtcctccctgaagatctctctgcagaagatttccgcatctttcccaggcaacctgcacttagtgttggtacttaggcccacttcgttcctgcagaggacttttactgatattgggttttggtttagccaggaagactttatgttaaaactgccagtggtgatgctcagcagcgtttccgatttgttgacatatatcgacgacaagcaattgacccccgaactggggggtacgcttcagtattgccattctgaatggattatattccgcaatgccattgagaacttcgcactcactgttaaggagatggcgcaaatgctgcagagcttcggaacggagctggccgaaaccgaacttcccgatgacatcccaagcattgaagaaattctcgcaatccgcgctgaacgataccacctcctcaaaaacgatataacggccgttactaaggagggaaaaatacttctcaccaatctggaggtgccggacaccgagggagccgtatctagtaggctggaatgtcacaggcagatttcaggggactggcagaccatcaacaaactgttaactcaggtccatgatatggagacagccttcgatggattctgggaaaaacatcagcttaagatggaacaatacttacagctttggaaattcgaacaggacttccagcaactggtaaccgaggtagagttcctgttaaaccagcaggctgaattagctgatgtgactggcactatcgcacaggttaagcagaagatcaagaagctggagaatctggatgagaactctcaggaacttctgtcaaaagctcaatttgttatcctgcacggacacaaacttgcagcgaaccaccactacgctttagatctcatttgccagcggtgcaatgagctgagatatctgagcgacatcttagtgaatgagattaaagccaagcggatccagctgagcagaacatttaaaatgcacaagcttcttcagcaggccagacagtgttgcgacgagggagagtgtctgctggccaaccaggaaattgacaagtttcagtccaaggaggacgcacagaaagcattgcaagatatcgagaattttctggagatggccctgccattcatcaattacgagcctgagaccctgcaatatgaatttgacgtgatcctgtcacccgagctcaaggtccagatgaaaaccattcaacttaagctcgagaacattcggagcattttcgagaaccagcaggcgggttttagaaatcttgctgacaagcacgttcgacctatacagttcgttgtccctacccctgagaatctcgtgacctcaggcacccccttcttctcatctaagcaaggaaagaagacgtggaggcaaaatcagtccaatctgaagatcgaagtggtgcctgactgtcaagaaaagcgttcctctggtccctcatcttcactggataacggcaattcgctggacgtgctcaaaaatcatgtgctgaacgaactaatccagactgagagggtctacgtgcgggagttgtacaccgtcctgctgggatatagggctgagatggacaatcctgagatgttcgacctgatgccacctttattaagaaataagaaagatatcctcttcggcaatatggctgaaatctatgagttccacaacgacatatttctgagttctcttgaaaattgcgctcatgcacccgaacgcgttggcccatgcttcttggagagaaaggatgattttcaaatgtacgccaaatactgccagaacaaaccaaggagtgaaaccatctggcgaaaatactccgaatgtgccttctttcaggaatgccaacggaagctgaaacatcggttacgactggatagctacctcctgaagcctgtccagagaatcacgaagtaccagctgctcctcaaggagctcctgaaatatagtaaagactgcgagggctccgcgctacttaagaaggctttggacgctatgctggacctgttgaaatcagtgaatgactctatgcaccagattgcaatcaacggctacatcgggaacttgaatgagctcggaaagatgattatgcaggggggattcagtgtgtggatagggcacaagaaaggcgctacaaaaatgaaagatttggcaagatttaagcccatgcagcggcatctttttctgtacgagaaagccatagtattttgtaagagaagagttgaaagtggcgaaggaagtgaccggtacccgtcttattcatttaaacactgttggaaaatggacgaggtcggtataaccgagtacgtgaagggcgacaacaggaagttcgagatttggtacggtgagaaggaagaggtttatattgtgcaggcctctaacgtcgacgtgaagatgacctggctgaaggaaattcgcaatatcctactcaaacaacaagagttgctgaccgtcaagaagagaaaacagcaggaccagctgaccgaacgggataagttccagataagtctgcaacagaatgacgagaagcagcagggggcttttattagcacagaggagacagagctggagcacaccagcacagtagtggaggtgtgtgaggccattgcctctgtccaggccgaggctaacaccgtctggacggaggcttcacagtctgcggagatcagtgaggaaccagctgaatggtcttccaattatttttaccctacttacgacgagaatgaagaagaaaacagacctctgatgcggcctgtctcggaaatggctttgctgtattag

SEQ ID NO: 40245 - DNA, 2958 bp, Artificial Sequence
  derived and/or modified sequence
atgcaggacatcgccttcctgagcggcggcagaggcaaggacaacgcctggatcatcaccttccccgagaactgcaacttcagatgcatccccgaggaggtgatcgccaaggtgctgacctacctgaccagcatcgccagacagaacggcagcgacagcagattcaccatcatcctggacagaagactggacacctggagcagcctgaagatcagcctgcagaagatcagcgccagcttccccggcaacctgcacctggtgctggtgctgagacccaccagcttcctgcagagaaccttcaccgacatcggcttctggttcagccaggaggacttcatgctgaagctgcccgtggtgatgctgagcagcgtgagcgacctgctgacctacatcgacgacaagcagctgacccccgagctgggcggcaccctgcagtactgccacagcgagtggatcatcttcagaaacgccatcgagaacttcgccctgaccgtgaaggagatggcccagatgctgcagagcttcggcaccgagctggccgagaccgagctgcccgacgacatccccagcatcgaggagatcctggccatcagagccgagagataccacctgctgaagaacgacatcaccgccgtgaccaaggagggcaagatcctgctgaccaacctggaggtgcccgacaccgagggcgccgtgagcagcagactggagtgccacagacagatcagcggcgactggcagaccatcaacaagctgctgacccaggtgcacgacatggagaccgccttcgacggcttctgggagaagcaccagctgaagatggagcagtacctgcagctgtggaagttcgagcaggacttccagcagctggtgaccgaggtggagttcctgctgaaccagcaggccgagctggccgacgtgaccggcaccatcgcccaggtgaagcagaagatcaagaagctggagaacctggacgagaacagccaggagctgctgagcaaggcccagttcgtgatcctgcacggccacaagctggccgccaaccaccactacgccctggacctgatctgccagagatgcaacgagctgagatacctgagcgacatcctggtgaacgagatcaaggccaagagaatccagctgagcagaaccttcaagatgcacaagctgctgcagcaggccagacagtgctgcgacgagggcgagtgcctgctggccaaccaggagatcgacaagttccagagcaaggaggacgcccagaaggccctgcaggacatcgagaacttcctggagatggccctgcccttcatcaactacgagcccgagaccctgcagtacgagttcgacgtgatcctgagccccgagctgaaggtgcagatgaagaccatccagctgaagctggagaacatcagaagcatcttcgagaaccagcaggccggcttcagaaacctggccgacaagcacgtgagacccatccagttcgtggtgcccacccccgagaacctggtgaccagcggcacccccttcttcagcagcaagcagggcaagaagacctggagacagaaccagagcaacctgaagatcgaggtggtgcccgactgccaggagaagagaagcagcggccccagcagcagcctggacaacggcaacagcctggacgtgctgaagaaccacgtgctgaacgagctgatccagaccgagagagtgtacgtgagagagctgtacaccgtgctgctgggctacagagccgagatggacaaccccgagatgttcgacctgatgccccccctgctgagaaacaagaaggacatcctgttcggcaacatggccgagatctacgagttccacaacgacatcttcctgagcagcctggagaactgcgcccacgcccccgagagagtgggcccctgcttcctggagagaaaggacgacttccagatgtacgccaagtactgccagaacaagcccagaagcgagaccatctggagaaagtacagcgagtgcgccttcttccaggagtgccagagaaagctgaagcacagactgagactggacagctacctgctgaagcccgtgcagagaatcaccaagtaccagctgctgctgaaggagctgctgaagtacagcaaggactgcgagggcagcgccctgctgaagaaggccctggacgccatgctggacctgctgaagagcgtgaacgacagcatgcaccagatcgccatcaacggctacatcggcaacctgaacgagctgggcaagatgatcatgcagggcggcttcagcgtgtggatcggccacaagaagggcgccaccaagatgaaggacctggccagattcaagcccatgcagagacacctgttcctgtacgagaaggccatcgtgttctgcaagagaagagtggagagcggcgagggcagcgacagataccccagctacagcttcaagcactgctggaagatggacgaggtgggcatcaccgagtacgtgaagggcgacaacagaaagttcgagatctggtacggcgagaaggaggaggtgtacatcgtgcaggccagcaacgtggacgtgaagatgacctggctgaaggagatcagaaacatcctgctgaagcagcaggagctgctgaccgtgaagaagagaaagcagcaggaccagctgaccgagagagacaagttccagatcagcctgcagcagaacgacgagaagcagcagggcgccttcatcagcaccgaggagaccgagctggagcacaccagcaccgtggtggaggtgtgcgaggccatcgccagcgtgcaggccgaggccaacaccgtgtggaccgaggccagccagagcgccgagatcagcgaggagcccgccgagtggagcagcaactacttctaccccacctacgacgagaacgaggaggagaacagacccctgatgagacccgtgagcgagatggccctgctgtactag

SEQ ID NO: 40246 - DNA, 1587 bp, Artificial Sequence
  derived and/or modified sequence
gtgcagatgaagaccatccagctgaagctggagaacatcagaagcatcttcgagaaccagcaggccggcttcagaaacctggccgacaagcacgtgagacccatccagttcgtggtgcccacccccgagaacctggtgaccagcggcacccccttcttcagcagcaagcagggcaagaagacctggagacagaaccagagcaacctgaagatcgaggtggtgcccgactgccaggagaagagaagcagcggccccagcagcagcctggacaacggcaacagcctggacgtgctgaagaaccacgtgctgaacgagctgatccagaccgagagagtgtacgtgagagagctgtacaccgtgctgctgggctacagagccgagatggacaaccccgagatgttcgacctgatgccccccctgctgagaaacaagaaggacatcctgttcggcaacatggccgagatctacgagttccacaacgacatcttcctgagcagcctggagaactgcgcccacgcccccgagagagtgggcccctgcttcctggagagaaaggacgacttccagatgtacgccaagtactgccagaacaagcccagaagcgagaccatctggagaaagtacagcgagtgcgccttcttccaggagtgccagagaaagctgaagcacagactgagactggacagctacctgctgaagcccgtgcagagaatcaccaagtaccagctgctgctgaaggagctgctgaagtacagcaaggactgcgagggcagcgccctgctgaagaaggccctggacgccatgctggacctgctgaagagcgtgaacgacagcatgcaccagatcgccatcaacggctacatcggcaacctgaacgagctgggcaagatgatcatgcagggcggcttcagcgtgtggatcggccacaagaagggcgccaccaagatgaaggacctggccagattcaagcccatgcagagacacctgttcctgtacgagaaggccatcgtgttctgcaagagaagagtggagagcggcgagggcagcgacagataccccagctacagcttcaagcactgctggaagatggacgaggtgggcatcaccgagtacgtgaagggcgacaacagaaagttcgagatctggtacggcgagaaggaggaggtgtacatcgtgcaggccagcaacgtggacgtgaagatgacctggctgaaggagatcagaaacatcctgctgaagcagcaggagctgctgaccgtgaagaagagaaagcagcaggaccagctgaccgagagagacaagttccagatcagcctgcagcagaacgacgagaagcagcagggcgccttcatcagcaccgaggagaccgagctggagcacaccagcaccgtggtggaggtgtgcgaggccatcgccagcgtgcaggccgaggccaacaccgtgtggaccgaggccagccagagcgccgagatcagcgaggagcccgccgagtggagcagcaactacttctaccccacctacgacgagaacgaggaggagaacagacccctgatgagacccgtgagcgagatggccctgctgtactag

SEQ ID NO: 40247 - protein, 487 aa, Artificial Sequence
  derived and/or modified sequence
MALVIQVGKLRPREVRTPQTINPSLFPSLPVKLSSIIEVPSGGERCCSRRTLVYKARAFWKGAPLPCWMNRHLWKSQLCEMVQPSGGPAADQDVLGEESPLGKPAMLHLPSEQGAPETLQRCLEENQELRDAIRQSNQILRERCEELLHFQASQREEKEFLMCKFQEARKLVERLGLEKLDLKRQKEQALREVEHLKRCQQQMAEDKASVKAQVTSLLGELQESQSRLEAATKECQALEGRARAASEQARQLESEREALQQQHSVQVDQLRMQGQSVEAALRMERQAASEEKRKLAQLQVAYHQLFQEYDNHIKSSVVGSERKRGMQLEDLKQQLQQAEEALVAKQEVIDKLKEEAEQHKIVMETVPVLKAQADIYKADFQAERQAREKLAEKKELLQEQLEQLQREYSKLKASCQESARIEDMRKRHVEVSQAPLPPAPAYLSSPLALPSQRRSPPEEPPDFCCPKCQYQAPDMDTLQIHVMECIE

SEQ ID NO: 40248 - DNA, 2258 bp, Artificial Sequence
  derived and/or modified sequence
gattcctcccccggagagggcggggcggccgagcgccccgaggctagacgccgccgtccgagagacgagggggcgtgtaggcggtgacgccctgcaaagtggccggcgtgcttatcattaccgagcttccgcgggcctgcagagcctggcggactcagacttctctccggagcgggatgcggccctaccgcggcctcacacttctcgccggcttcccgagttctcgggggcggggcttgtgtttttacttccggatcccacagctatgacaccggaagccggaagcgtggtagggaagggcgaccgcgaaactgggactttctcggagcgccggggccctaccagcgttcacagtccgccgctcccacccttctcacgtctgacggactctgctgacagcccttgccctgttggatgaataggcacctctggaagagccaactgtgtgagatggtgcagcccagtggtggcccggcagcagatcaggacgtactgggcgaagagtctcctctggggaagccagccatgctgcacctgccttcagaacagggcgctcctgagaccctccagcgctgcctggaggagaatcaagagctccgagatgccatccggcagagcaaccagattctgcgggagcgctgcgaggagcttctgcatttccaagccagccagagggaggagaaggagttcctcatgtgcaagttccaggaggccaggaaactggtggagagactcggcctggagaagctcgatctgaagaggcagaaggagcaggctctgcgggaggtggagcacctgaagagatgccagcagcagatggctgaggacaaggcctctgtgaaagcccaggtgacgtccttgctcggggagctgcaggagagccagagtcgcttggaggctgccactaaggaatgccaggctctggagggtcgggcccgggcggccagcgagcaggcgcggcagctggagagtgagcgcgaggcgctgcagcagcagcacagcgtgcaggtggaccagctgcgcatgcagggccagagcgtggaggccgcgctccgcatggagcgccaggccgcctcggaggagaagaggaagctggcccagttgcaggtggcctatcaccagctcttccaagaatacgacaaccacatcaagagcagcgtggtgggcagtgagcggaagcgaggaatgcagctggaagatctcaaacagcagctccagcaggccgaggaggccctggtggccaaacaggaggtgatcgataagctgaaggaggaggccgagcagcacaagattgtgatggagaccgttccggtgctgaaggcccaggcggatatctacaaggcggacttccaggctgagaggcaggcccgggagaagctggccgagaagaaggagctcctgcaggagcagctggagcagctgcagagggagtacagcaaactgaaggccagctgtcaggagtcggccaggatcgaggacatgaggaagcggcatgtcgaggtctcccaggcccccttgccccccgcccctgcctacctctcctctcccctggccctgcccagccagaggaggagcccccccgaggagccacctgacttctgctgtcccaagtgccagtatcaggcccctgatatggacaccctgcagatacatgtcatggagtgcattgagtagggccggccagtgcaaggccactgcctgccgaggacgtgcccgggaccgtgcagtctgcgctttcctctcccgcctgcctagcccaggatgaagggctgggtggccacaactgggatgccacctggagccccacccaggagctggccgcggcaccttacgcttcagctgttgatccgctggtcccctcttttggggtagatgcggccccgatcaggcctgactcgctgctctttttgttcccttctgtctgctcgaaccacttgcctcgggctaatccctccctcttcctccacccggcactggggaagtcaagaatggggcctggggctctcagggagaactgcttcccctggcagagctgggtggccgctcttcctcccaccggacaccgacccgcccgccgctgtgccctgggagtgctgccctcttaccatgcacacgggtgctctccttttgggctgcatgctattccattttgcagccagaccgatgtgtatttaaccagtcactattgatggacatttgggttgtttcccatctttttgttaccataaataatggcatagtaaaaatccttgtgcatt

SEQ ID NO: 40249 - DNA, 1464 bp, Artificial Sequence
  derived and/or modified sequence
atggccttggtcatacaggttgggaagctgagacctcgagaagtccggacacctcaaacaattaacccctccctgttcccttctctccccgttaagctgtcgagcatcatcgaggtgccgagtgggggagagcggtgttgctctcgccggacattggtttacaaagcgagagcattctggaaaggcgccccgctcccttgttggatgaaccgccatctgtggaagagccagctgtgcgagatggtgcagccgagcggaggccccgccgccgatcaggatgtgttgggcgaggaatcacccctcgggaagccagcgatgttacaccttccatcagagcaaggagcccccgagacgctgcagagatgtttggaggagaatcaggagctgagggacgccatccgtcaaagtaatcagattctgagagagaggtgtgaggagttgttgcattttcaagcctcccagcgagaggagaaggagttcctcatgtgcaagttccaggaggcccgcaaactggttgagaggcttggcctcgaaaagctggatctcaaaagacagaaggagcaggccctccgcgaggttgaacacttgaagcgctgccagcaacagatggctgaagataaggccagtgtaaaagctcaggtcaccagcctattgggtgaactgcaagaatcacaatcccgactcgaagctgccacaaaagagtgtcaagccctggaaggcagagcaagagccgccagtgaacaagctagacagctcgaaagcgagagggaggcactgcagcagcagcattcagtccaggtggatcagttgcgcatgcagggtcaatctgtggaagctgctctgcggatggagaggcaggctgctagtgaagaaaagaggaagttggcccagctgcaggtcgcgtaccaccagctgtttcaggagtatgacaatcacataaagtcgagtgtggttggctctgaacggaaaagaggtatgcagttagaagacctcaagcaacagctacagcaggccgaagaggcccttgtggccaagcaggaagtgatagataagctgaaggaagaggcggagcaacacaaaatcgtcatggagactgtgcctgtgttgaaggcccaggccgacatctataaagctgatttccaggccgaacggcaagctcgcgagaaactggccgagaagaaggaattattacaggagcaacttgagcagctgcagagagaatattcaaaattaaaggctagctgccaggagagcgctcgcatcgaggacatgaggaaacggcatgtggaggtatctcaagccccccttccaccagcccccgcttatctgagtagccctctcgctcttcctagccagcggcgctcaccgcccgaggagcccccagatttctgttgtcctaagtgccagtaccaggctcctgatatggacacgttacaaattcacgttatggagtgcattgaatag

SEQ ID NO: 40250 - DNA, 2103 bp, Artificial Sequence
  derived and/or modified sequence
agcccgttcctgctccgcgcttctggagcactggccaaggcgggccgattcaggacccaggttacttgggcggcgagctggactgtttctactcctccctcctcctccactgcggggtctgaccctactccttgtgtgaggactcctctagttcagagacatattctgttcaccaaacttgactgcgctctatcgaggtcgttaaattcttcggaaatgcctcacatatagtttggcagctagcccttgccctgttggatgaataggcacctctggaagagccaactgtgtgagatggtgcagcccagtggtggcccggcagcagatcaggacgtactgggcgaagagtctcctctggggaagccagccatgctgcacctgccttcagaacagggcgctcctgagaccctccagcgctgcctggaggagaatcaagagctccgagatgccatccggcagagcaaccagattctgcgggagcgctgcgaggagcttctgcatttccaagccagccagagggaggagaaggagttcctcatgtgcaagttccaggaggccaggaaactggtggagagactcggcctggagaagctcgatctgaagaggcagaaggagcaggctctgcgggaggtggagcacctgaagagatgccagcagcagatggctgaggacaaggcctctgtgaaagcccaggtgacgtccttgctcggggagctgcaggagagccagagtcgcttggaggctgccactaaggaatgccaggctctggagggtcgggcccgggcggccagcgagcaggcgcggcagctggagagtgagcgcgaggcgctgcagcagcagcacagcgtgcaggtggaccagctgcgcatgcagggccagagcgtggaggccgcgctccgcatggagcgccaggccgcctcggaggagaagaggaagctggcccagttgcaggtggcctatcaccagctcttccaagaatacgacaaccacatcaagagcagcgtggtgggcagtgagcggaagcgaggaatgcagctggaagatctcaaacagcagctccagcaggccgaggaggccctggtggccaaacaggaggtgatcgataagctgaaggaggaggccgagcagcacaagattgtgatggagaccgttccggtgctgaaggcccaggcggatatctacaaggcggacttccaggctgagaggcaggcccgggagaagctggccgagaagaaggagctcctgcaggagcagctggagcagctgcagagggagtacagcaaactgaaggccagctgtcaggagtcggccaggatcgaggacatgaggaagcggcatgtcgaggtctcccaggcccccttgccccccgcccctgcctacctctcctctcccctggccctgcccagccagaggaggagcccccccgaggagccacctgacttctgctgtcccaagtgccagtatcaggcccctgatatggacaccctgcagatacatgtcatggagtgcattgagtagggccggccagtgcaaggccactgcctgccgaggacgtgcccgggaccgtgcagtctgcgctttcctctcccgcctgcctagcccaggatgaagggctgggtggccacaactgggatgccacctggagccccacccaggagctggccgcggcaccttacgcttcagctgttgatccgctggtcccctcttttggggtagatgcggccccgatcaggcctgactcgctgctctttttgttcccttctgtctgctcgaaccacttgcctcgggctaatccctccctcttcctccacccggcactggggaagtcaagaatggggcctggggctctcagggagaactgcttcccctggcagagctgggtggcagctcttcctcccaccggacaccgacccgcccgctgctgtgccctgggagtgctgccctcttaccatgcacacgggtgctctccttttgggctgcatgctattccattttgcagccagaccgatgtgtatttaaccagtcactattgatggacatttgggttgtttcccatctttttgttaccataaataatggcatagtaaaaatccttgtgcatta

SEQ ID NO: 40251 - DNA, 2286 bp, Artificial Sequence
  derived and/or modified sequence
gttcgcgggtcaagccggccctattgggcagtctcttcttgattcctcccccggagagggcggggcggccgagcgccccgaggctagacgccgccgtccgagagacgagggggcgtgtaggcggtgacgccctgcaaagtggccggcgtgcttatcattaccgagcttccgcgggcctgcagagcctggcggactcagacttctctccggagcgggatgcggccctaccgcggcctcacacttctcgccggcttcccgagttctcgggggcggggcttgtgtttttacttccggatcccacagctatgacaccggaagccggaagcgtggtagggaagggcgaccgcgaaactgggactttctcggagcgccggggccctaccagcgttcacagtccgccgctcccacccttctcacgtctgacggactctgctgacagcccttgccctgttggatgaataggcacctctggaagagccaactgtgtgagatggtgcagcccagtggtggcccggcagcagatcaggacgtactgggcgaagagtctcctctggggaagccagccatgctgcacctgccttcagaacagggcgctcctgagaccctccagcgctgcctggaggagaatcaagagctccgagatgccatccggcagagcaaccagattctgcgggagcgctgcgaggagcttctgcatttccaagccagccagagggaggagaaggagttcctcatgtgcaagttccaggaggccaggaaactggtggagagactcggcctggagaagctcgatctgaagaggcagaaggagcaggctctgcgggaggtggagcacctgaagagatgccagcagcagatggctgaggacaaggcctctgtgaaagcccaggtgacgtccttgctcggggagctgcaggagagccagagtcgcttggaggctgccactaaggaatgccaggctctggagggtcgggcccgggcggccagcgagcaggcgcggcagctggagagtgagcgcgaggcgctgcagcagcagcacagcgtgcaggtggaccagctgcgcatgcagggccagagcgtggaggccgcgctccgcatggagcgccaggccgcctcggaggagaagaggaagctggcccagttgcaggtggcctatcaccagctcttccaagaatacgacaaccacatcaagagcagcgtggtgggcagtgagcggaagcgaggaatgcagctggaagatctcaaacagcagctccagcaggccgaggaggccctggtggccaaacaggaggtgatcgataagctgaaggaggaggccgagcagcacaagattgtgatggagaccgttccggtgctgaaggcccaggcggatatctacaaggcggacttccaggctgagaggcaggcccgggagaagctggccgagaagaaggagctcctgcaggagcagctggagcagctgcagagggagtacagcaaactgaaggccagctgtcaggagtcggccaggatcgaggacatgaggaagcggcatgtcgaggtctcccaggcccccttgccccccgcccctgcctacctctcctctcccctggccctgcccagccagaggaggagcccccccgaggagccacctgacttctgctgtcccaagtgccagtatcaggcccctgatatggacaccctgcagatacatgtcatggagtgcattgagtagggccggccagtgcaaggccactgcctgccgaggacgtgcccgggaccgtgcagtctgcgctttcctctcccgcctgcctagcccaggatgaagggctgggtggccacaactgggatgccacctggagccccacccaggagctggccgcggcaccttacgcttcagctgttgatccgctggtcccctcttttggggtagatgcggccccgatcaggcctgactcgctgctctttttgttcccttctgtctgctcgaaccacttgcctcgggctaatccctccctcttcctccacccggcactggggaagtcaagaatggggcctggggctctcagggagaactgcttcccctggcagagctgggtggcagctcttcctcccaccggacaccgacccgcccgctgctgtgccctgggagtgctgccctcttaccatgcacacgggtgctctccttttgggctgcatgctattccattttgcagccagaccgatgtgtatttaaccagtcactattgatggacatttgggttgtttcccatctttttgttaccataaataatggcatagtaaaaa

SEQ ID NO: 40252 - DNA, 1972 bp, Artificial Sequence
  derived and/or modified sequence
catggcccttgtgatccaggtggggaaactaaggcccagagaagtgaggaccccgcagactatcaatcccagtctcttcccctcactccctgtgaagctctccagcatcatcgaggtcccatcagcccttgccctgttggatgaataggcacctctggaagagccaactgtgtgagatggtgcagcccagtggtggcccggcagcagatcaggacgtactgggcgaagagtctcctctggggaagccagccatgctgcacctgccttcagaacagggcgctcctgagaccctccagcgctgcctggaggagaatcaagagctccgagatgccatccggcagagcaaccagattctgcgggagcgctgcgaggagcttctgcatttccaagccagccagagggaggagaaggagttcctcatgtgcaagttccaggaggccaggaaactggtggagagactcggcctggagaagctcgatctgaagaggcagaaggagcaggctctgcgggaggtggagcacctgaagagatgccagcagcagatggctgaggacaaggcctctgtgaaagcccaggtgacgtccttgctcggggagctgcaggagagccagagtcgcttggaggctgccactaaggaatgccaggctctggagggtcgggcccgggcggccagcgagcaggcgcggcagctggagagtgagcgcgaggcgctgcagcagcagcacagcgtgcaggtggaccagctgcgcatgcagggccagagcgtggaggccgcgctccgcatggagcgccaggccgcctcggaggagaagaggaagctggcccagttgcaggtggcctatcaccagctcttccaagaatacgacaaccacatcaagagcagcgtggtgggcagtgagcggaagcgaggaatgcagctggaagatctcaaacagcagctccagcaggccgaggaggccctggtggccaaacaggaggtgatcgataagctgaaggaggaggccgagcagcacaagattgtgatggagaccgttccggtgctgaaggcccaggcggatatctacaaggcggacttccaggctgagaggcaggcccgggagaagctggccgagaagaaggagctcctgcaggagcagctggagcagctgcagagggagtacagcaaactgaaggccagctgtcaggagtcggccaggatcgaggacatgaggaagcggcatgtcgaggtctcccaggcccccttgccccccgcccctgcctacctctcctctcccctggccctgcccagccagaggaggagcccccccgaggagccacctgacttctgctgtcccaagtgccagtatcaggcccctgatatggacaccctgcagatacatgtcatggagtgcattgagtagggccggccagtgcaaggccactgcctgccgaggacgtgcccgggaccgtgcagtctgcgctttcctctcccgcctgcctagcccaggatgaagggctgggtggccacaactgggatgccacctggagccccacccaggagctggccgcggcaccttacgcttcagctgttgatccgctggtcccctcttttggggtagatgcggccccgatcaggcctgactcgctgctctttttgttcccttctgtctgctcgaaccacttgcctcgggctaatccctccctcttcctccacccggcactggggaagtcaagaatggggcctggggctctcagggagaactgcttcccctggcagagctgggtggcagctcttcctcccaccggacaccgacccgcccgctgctgtgccctgggagtgctgccctcttaccatgcacacgggtgctctccttttgggctgcatgctattccattttgcagccagaccgatgtgtatttaaccagtcactattgatggacatttgggttgtttcccatctttttgttaccataaataatggcatagtaaaaa

SEQ ID NO: 40253 - DNA, 2056 bp, Artificial Sequence
  derived and/or modified sequence
cctgaacgcccatcaagcccatggcccttgtgatccaggtggggaaactaaggcccagagaagtgaggaccccgcagactatcaatcccagtctcttcccctcactccctgtgaagctctccagcatcatcgaggtcccatcaggtggggaaagatgctgttccaggcgcacactagtctacaaggccagagctttctggaagggggcacccttgccctgttggatgaataggcacctctggaagagccaactgtgtgagatggtgcagcccagtggtggcccggcagcagatcaggacgtactgggcgaagagtctcctctggggaagccagccatgctgcacctgccttcagaacagggcgctcctgagaccctccagcgctgcctggaggagaatcaagagctccgagatgccatccggcagagcaaccagattctgcgggagcgctgcgaggagcttctgcatttccaagccagccagagggaggagaaggagttcctcatgtgcaagttccaggaggccaggaaactggtggagagactcggcctggagaagctcgatctgaagaggcagaaggagcaggctctgcgggaggtggagcacctgaagagatgccagcagcagatggctgaggacaaggcctctgtgaaagcccaggtgacgtccttgctcggggagctgcaggagagccagagtcgcttggaggctgccactaaggaatgccaggctctggagggtcgggcccgggcggccagcgagcaggcgcggcagctggagagtgagcgcgaggcgctgcagcagcagcacagcgtgcaggtggaccagctgcgcatgcagggccagagcgtggaggccgcgctccgcatggagcgccaggccgcctcggaggagaagaggaagctggcccagttgcaggtggcctatcaccagctcttccaagaatacgacaaccacatcaagagcagcgtggtgggcagtgagcggaagcgaggaatgcagctggaagatctcaaacagcagctccagcaggccgaggaggccctggtggccaaacaggaggtgatcgataagctgaaggaggaggccgagcagcacaagattgtgatggagaccgttccggtgctgaaggcccaggcggatatctacaaggcggacttccaggctgagaggcaggcccgggagaagctggccgagaagaaggagctcctgcaggagcagctggagcagctgcagagggagtacagcaaactgaaggccagctgtcaggagtcggccaggatcgaggacatgaggaagcggcatgtcgaggtctcccaggcccccttgccccccgcccctgcctacctctcctctcccctggccctgcccagccagaggaggagcccccccgaggagccacctgacttctgctgtcccaagtgccagtatcaggcccctgatatggacaccctgcagatacatgtcatggagtgcattgagtagggccggccagtgcaaggccactgcctgccgaggacgtgcccgggaccgtgcagtctgcgctttcctctcccgcctgcctagcccaggatgaagggctgggtggccacaactgggatgccacctggagccccacccaggagctggccgcggcaccttacgcttcagctgttgatccgctggtcccctcttttggggtagatgcggccccgatcaggcctgactcgctgctctttttgttcccttctgtctgctcgaaccacttgcctcgggctaatccctccctcttcctccacccggcactggggaagtcaagaatggggcctggggctctcagggagaactgcttcccctggcagagctgggtggcagctcttcctcccaccggacaccgacccgcccgctgctgtgccctgggagtgctgccctcttaccatgcacacgggtgctctccttttgggctgcatgctattccattttgcagccagaccgatgtgtatttaaccagtcactattgatggacatttgggttgtttcccatctttttgttaccataaataatggcatagtaaaaa

SEQ ID NO: 40254 - DNA, 1464 bp, Artificial Sequence
  derived and/or modified sequence
atggccctggtgatccaggtgggcaagctgcggccccgggaggtgaggaccccccagaccatcaaccccagcctcttccccagcctgcctgtgaagctgagcagcatcatcgaggtgcccagcggcggggagcgctgctgcagcaggaggaccctggtgtacaaggcccgggccttctggaagggggcccccctgccctgctggatgaacagacacctgtggaagagccagctgtgtgagatggtgcagcccagcggcggccctgctgctgaccaggatgtgctgggggaggagagccccctgggcaagccagccatgctgcacctgcccagcgagcagggcgcccctgagaccctgcagcgctgcctggaggagaaccaggagctgagagatgccatccggcagagcaaccagatcctgcgggagcgctgtgaggagctgctgcacttccaggccagccagcgggaggagaaggagttcctgatgtgcaagttccaggaggccaggaagctggtggagcggctgggcctggagaagctggacctgaagaggcagaaggagcaggccctgcgggaggtggagcacctgaagcgctgccagcagcagatggccgaggacaaggcctctgtgaaggcccaggtgaccagcctgctgggggagctgcaggagagccagagccggctggaggccgccaccaaggagtgccaggccctggagggccgggcccgggccgccagcgagcaggcccggcagctggagagcgagcgggaggccctgcagcagcagcacagcgtgcaggtggaccagctgaggatgcagggccagagcgtggaggccgccctgaggatggagcggcaggccgccagcgaggagaagaggaagctggcccagctgcaggtggcctaccaccagctgttccaggagtatgacaaccacatcaagagctctgtggtgggcagcgagaggaagaggggcatgcagctggaggacctgaagcagcagctgcagcaggccgaggaggccctggtggccaagcaggaggtgattgacaagctgaaggaggaggccgagcagcacaagatcgtgatggagaccgtgcctgtgctgaaggcccaggccgacatctacaaggctgacttccaggccgagcggcaggcccgggagaagctggccgagaagaaggagctgctgcaggagcagctggagcagctgcagcgggagtacagcaagctgaaggccagctgccaggagagcgccagaattgaggacatgaggaagagacatgtggaggtgtcccaggcccccctgcccccagccccagcctacctgagcagccccctggccctgcccagccagaggaggagccccccagaggagcccccagacttctgctgccccaagtgccagtaccaggccccagacatggacaccctgcagatccacgtgatggagtgcatcgagtag

SEQ ID NO: 40255 - DNA, 1464 bp, Artificial Sequence
  derived and/or modified sequence
atggccctggtgatccaggtgggcaagctgcggccccgggaggtgcggacgcctcaaaccattaacccctcgctgtttccaagcctgcctgtgaaactttcctctatcatagaggttccgtctggtggcgaaagatgttgctcgagacggaccctggtgtacaaagcccgcgctttctggaagggggcgcctctgccatgttggatgaacaggcatctgtggaaaagtcagctgtgtgagatggtccagccgagtgggggacctgcagctgaccaagacgtcctgggagaagagtcaccactcggtaagcccgctatgctccacctgcctagtgaacagggcgctccagagactctgcaacggtgcctggaggaaaatcaagagttgcgtgatgccataagacagtccaatcagattttgcgagagagatgtgaagagctgctgcacttccaggcgagtcaaagggaggagaaggagttcctgatgtgtaagtttcaagaagccaggaagcttgtggagcgcctaggcctggaaaagctggatctgaaacggcagaaagaacaggcgctgagagaggttgaacacctgaagcgatgtcagcagcagatggccgaggataaggcatccgtgaaggcccaggtaacatcacttcttggtgagttgcaggaatcccaatcccgcctggaagctgcgacaaaggagtgccaggccttggagggccgtgctagagccgcatccgagcaggcaagacaactggagtcggagagggaggcattgcagcaacagcactccgtccaggtcgatcagttgcggatgcagggacaaagtgtggaggccgcgctgaggatggagaggcaggcagcgagtgaagaaaagcgcaagcttgctcagctacaggttgcttaccaccagctgtttcaggaatatgataaccacattaaaagcagtgtggtcgggagcgagcgtaagcgcggtatgcaactggaagacctgaaacagcaacttcagcaggccgaagaagcactagttgccaagcaggaggtgatcgacaaactgaaagaagaggcagaacagcataaaatcgtgatggagacagtacccgtgctgaaagcacaagcagatatctataaagccgacttccaggctgagaggcaagctcgtgagaaactggctgaaaagaaagaactgctacaggagcagcttgagcagttgcaacgcgagtactcaaaactcaaagctagctgtcaagaatcagcccggatcgaagatatgcgcaagcggcacgttgaggtatcacaggctccactgccacccgctcccgcgtacctcagttcccccctggccctgccttcacaacgacggagcccccctgaagagcccccagatttctgctgccccaaatgccagtaccaagcccctgatatggacacccttcagatacacgtcatggaatgcatcgaatag

SEQ ID NO: 40256 - DNA, 1464 bp, Artificial Sequence
  derived and/or modified sequence
atggcgctggttattcaggttggaaagcttcggccaagagaggttagaactcctcaaaccattaacccttcgctgttcccatctcttcccgttaaactcagcagcatcattgaggtcccctccgggggagaaagatgctgtagccgcagaacgctagtttataaggcccgagcattttggaaaggagcgccactgccgtgctggatgaataggcatctgtggaaatctcagctctgtgagatggttcaaccaagtggagggccagccgcagatcaggatgtccttggcgaggagtctccactaggaaagcccgctatgctccatctgcccagcgaacaaggcgctccagagacgctgcagcgctgcctggaggagaaccaggagctccgagacgctatccgacaatctaaccagatactgcgggagagatgcgaggaactactgcactttcaggcttcccaacgagaggaaaaggaatttcttatgtgtaaatttcaggaagctcggaagctcgttgagcggctgggactggaaaaactggacctgaagaggcagaaggaacaggcattgcgagaagtggaacacctgaagagatgtcagcagcagatggccgaggataaggcgtcggtgaaagcccaggtaacctccttgctgggtgagctccaggaaagtcaaagccgcctcgaagctgctactaaggaatgtcaggccctcgaaggaagagcacgggcagctagcgagcaagcacgacagttagagtcagagcgggaggccctccagcaacagcactccgttcaggttgatcaactcaggatgcagggccagtccgtggaagcagccctccgcatggagcgacaggccgcaagcgaggagaaacgaaaattagcccagctgcaagtggcttatcatcagcttttccaagagtatgacaatcatatcaaatccagtgtggtaggaagtgagaggaagagagggatgcaactcgaagatctgaaacagcagctccagcaagctgaagaggcactcgtggctaaacaggaggtaatcgataagctgaaggaggaggctgagcagcataagattgttatggaaaccgttccagttctcaaggcgcaggctgatatatacaaggccgatttccaagccgaacgacaagccagggaaaagcttgcggaaaaaaaagaactgttgcaagagcagctcgagcagcttcagcgggagtactctaaattgaaagctagctgccaggaatctgcacggattgaggatatgcgtaagagacacgttgaggttagtcaagctcctcttcccccagctcctgcctacctgtcctctccgctggcattgccctctcagagacggtccccaccagaggagcctccggacttttgttgtccgaagtgccaataccaggccccagatatggacactctgcagattcatgtcatggagtgcatcgagtag

SEQ ID NO: 40257 - DNA, 1464 bp, Artificial Sequence
  derived and/or modified sequence
atggccctggtgatccaggtgggcaagctgagacccagagaggtgagaaccccccagaccatcaaccccagcctgttccccagcctgcccgtgaagctgagcagcatcatcgaggtgcccagcggcggcgagagatgctgcagcagaagaaccctggtgtacaaggccagagccttctggaagggcgcccccctgccctgctggatgaacagacacctgtggaagagccagctgtgcgagatggtgcagcccagcggcggccccgccgccgaccaggacgtgctgggcgaggagagccccctgggcaagcccgccatgctgcacctgcccagcgagcagggcgcccccgagaccctgcagagatgcctggaggagaaccaggagctgagagacgccatcagacagagcaaccagatcctgagagagagatgcgaggagctgctgcacttccaggccagccagagagaggagaaggagttcctgatgtgcaagttccaggaggccagaaagctggtggagagactgggcctggagaagctggacctgaagagacagaaggagcaggccctgagagaggtggagcacctgaagagatgccagcagcagatggccgaggacaaggccagcgtgaaggcccaggtgaccagcctgctgggcgagctgcaggagagccagagcagactggaggccgccaccaaggagtgccaggccctggagggcagagccagagccgccagcgagcaggccagacagctggagagcgagagagaggccctgcagcagcagcacagcgtgcaggtggaccagctgagaatgcagggccagagcgtggaggccgccctgagaatggagagacaggccgccagcgaggagaagagaaagctggcccagctgcaggtggcctaccaccagctgttccaggagtacgacaaccacatcaagagcagcgtggtgggcagcgagagaaagagaggcatgcagctggaggacctgaagcagcagctgcagcaggccgaggaggccctggtggccaagcaggaggtgatcgacaagctgaaggaggaggccgagcagcacaagatcgtgatggagaccgtgcccgtgctgaaggcccaggccgacatctacaaggccgacttccaggccgagagacaggccagagagaagctggccgagaagaaggagctgctgcaggagcagctggagcagctgcagagagagtacagcaagctgaaggccagctgccaggagagcgccagaatcgaggacatgagaaagagacacgtggaggtgagccaggcccccctgccccccgcccccgcctacctgagcagccccctggccctgcccagccagagaagaagcccccccgaggagccccccgacttctgctgccccaagtgccagtaccaggcccccgacatggacaccctgcagatccacgtgatggagtgcatcgagtag

SEQ ID NO: 40258 - protein, 1137 aa, Artificial Sequence
  derived and/or modified sequence
MKCVFVTVGTTSFDDLIACVSAPDSLQKIESLGYNRLILQIGRGTVVPEPFSTESFTLDVYRYKDSLKEDIQKADLVISHAGAGSCLETLEKGKPLVVVINEKLMNNHQLELAKQLHKEGHLFYCTCRVLTCPGQAKSIASAPGKCQDSAALTSTAFSGLDFGLLSGYLHKQALVTATHPTCTLLFPSCHAFFPLPLTPTLYKMHKGWKNYCSQKSLNEASMDEYLGSLGLFRKLTAKDASCLFRAISEQLFCSQVHHLEIRKACVSYMRENQQTFESYVEGSFEKYLERLGDPKESAGQLEIRALSLIYNRDFILYRFPGKPPTYVTDNGYEDKILLCYSSSGHYDSVYSKQFQSSAAVCQAVLYEILYKDVFVVDEEELKTAIKLFRSGSKKNRNNAVTGSEDAHTDYKSSNQNRMEEWGACYNAENIPEGYNKGTEETKSPENPSKMPFPYKVLKALDPEIYRNVEFDVWLDSRKELQKSDYMEYAGRQYYLGDKCQVCLESEGRYYNAHIQEVGNENNSVTVFIEELAEKHVVPLANLKPVTQVMSVPAWNAMPSRKGRGYQKMPGGYVPEIVISEMDIKQQKKMFKKIRGKEVYMTMAYGKGDPLLPPRLQHSMHYGHDPPMHYSQTAGNVMSNEHFHPQHPSPRQGRGYGMPRNSSRFINRHNMPGPKVDFYPGPGKRCCQSYDNFSYRSRSFRRSHRQMSCVNKESQYGFTPGNGQMPRGLEETITFYEVEEGDETAYPTLPNHGGPSTMVPATSGYCVGRRGHSSGKQTLNLEEGNGQSENGRYHEEYLYRAEPDYETSGVYSTTASTANLSLQDRKSCSMSPQDTVTSYNYPQKMMGNIAAVAASCANNVPAPVLSNGAAANQAISTTSVSSQNAIQPLFVSPPTHGRPVIASPSYPCHSAIPHAGASLPPPPPPPPPPPPPPPPPPPPPPPPPPPALDVGETSNLQPPPPLPPPPYSCDPSGSDLPQDTKVLQYYFNLGLQCYYHSYWHSMVYVPQMQQQLHVENYPVYTEPPLVDQTVPQCYSEVRREDGIQAEASANDTFPNADSSSVPHGAVYYPVMSDPYGQPPLPGFDSCLPVVPDYSCVPPWHPVGTAYGGSSQIHGAINPGPIGCIAPSPPASHYVPQGM

SEQ ID NO: 40259 - DNA, 3414 bp, Artificial Sequence
  derived and/or modified sequence
atgaaatgcgtgttcgtgactgtgggcacgacatctttcgatgatttgatagcttgcgtttcagctcctgacagtctgcaaaagatagaatcactcgggtacaacagactcattctgcaaatcggaagaggcactgtggtacctgaaccgttctccacagaatcctttactttagacgtgtacaggtacaaggattcactcaaagaagacatccagaaggccgatcttgtcatctctcatgcgggtgccggatcatgcctcgagacgctggaaaaaggtaaaccattggttgtggtcataaatgaaaaactgatgaataatcaccagttggagctggcaaagcagttgcataaagaggggcatctattttattgtacctgcagagtattgacttgcccagggcaggctaagtctattgctagcgcccctgggaagtgccaggacagcgccgctctcaccagtaccgccttcagtgggctcgacttcgggctgctgagcgggtacctgcacaagcaggcactcgtcacagccacccaccctacgtgtaccctgctattcccttcctgccatgctttcttccctctgcctctgacaccgacactctacaaaatgcacaaaggctggaagaattactgctcacagaagtcactgaacgaagcctcgatggacgaatatctcggttccctcggattattcagaaaactgacagccaaggacgccagttgcctctttcgtgcgatcagcgaacagctcttctgctcgcaagtccaccatctagagataaggaaagcgtgtgtgagttatatgcgagagaaccagcaaacatttgaatcctacgttgaggggtcctttgaaaagtacctcgaacgacttggagaccccaaggagtcagccggccaacttgagatacgtgccctgagccttatatacaatcgggatttcatactctatagattccctggcaagcccccgacgtatgtgacagacaatggttatgaggacaaaatccttctctgttattctagctcagggcactacgacagcgtgtatagtaaacagttccagtccagtgcggcggtctgccaggcagtactgtatgagattctgtacaaggacgtattcgtggtggatgaagaagaactaaagaccgcgatcaagttgttccggagtggtagcaaaaaaaatcgcaacaacgccgtgaccgggagcgaggatgcccatactgattacaaatctagcaaccagaacaggatggaggagtggggggcttgctataacgcagaaaacatcccggagggctacaataagggaactgaagagaccaaatcgcccgaaaatcctagtaagatgccctttccctataaagttttgaaagccctggatcccgaaatctacaggaacgtcgagttcgacgtctggctcgatagtcgaaaggagctccagaaatcggattacatggagtacgcgggtcgtcagtactatctgggcgataagtgtcaagtgtgcctggagtctgaaggaaggtactataatgcccacatccaggaagtgggcaacgaaaacaacagtgtaacagtgttcatcgaggaactggctgaaaagcacgttgtgcctctcgcaaatcttaaaccagtaacacaggttatgtcagtgcccgcctggaatgccatgccatcacgcaaagggcgaggttaccagaagatgcccggaggatacgtgcctgagattgtgatctctgaaatggacatcaaacagcagaagaagatgtttaaaaaaattcgaggaaaagaagtgtacatgaccatggcatacgggaagggggacccgttgttgccccccaggctgcagcattcaatgcactatggccatgaccctcctatgcattattctcagaccgctggcaacgtcatgagcaatgaacacttccatccgcagcacccaagtccccggcagggccgcggatacggaatgccccgcaactctagccgtttcattaaccggcacaacatgcctggtcccaaagtcgacttctatccaggtcctggtaagcgatgttgtcagagttatgacaatttctcttaccgatcgcgtagcttcaggagaagccatcgacagatgtcttgtgtaaacaaagaatcacagtacggtttcacacccggcaacgggcagatgccgcggggcctggaggagacgatcactttctacgaggtagaagaaggagatgagacagcctatcccacactgcctaaccacggcggcccttcgacaatggtcccagccacatctggttattgtgttggccgcaggggccactcgtctggcaaacagaccctgaatctcgaggaaggcaatgggcagtcggagaacggtcgctaccacgaagaatatctgtaccgggctgagcctgattacgaaacgagcggtgtgtacagcactactgcatccactgccaacctgtcgcttcaagacaggaagtcttgcagcatgtccccacaggacacagttacgagttacaactacccccagaaaatgatgggcaacatcgccgctgtggctgcatcctgcgccaacaatgtcccagctccagtgctgagcaacggagccgcagcaaatcaggccatttcaacaacaagcgtgtcatcccaaaatgcaatccaaccgctgttcgttagtcccccaacccacggccgacctgtgattgcgtccccgtcctatccttgtcactccgccataccgcatgccggcgcttcattgcccccaccgcctccacctccaccaccccccccgcctccaccaccgccaccgcctcctccacctccgccacccccaccaccagccctggacgtaggggaaacttccaatctccagcctccaccacctctgcccccaccgccgtactcatgcgatcccagcggctcagatttacctcaggacaccaaagtgttgcagtattactttaacctcggtttgcagtgctattatcacagctattggcactctatggtgtatgtgccacaaatgcagcaacagctccacgtcgaaaactatcctgtgtacaccgaacccccattggtggaccaaaccgtaccgcagtgttattcagaagtgcggagggaggacgggatacaggcagaggcctctgccaacgacactttccccaatgccgatagcagctccgtgccccacggagcagtgtactatcctgtcatgagtgacccttacggacaacctccactgccagggtttgattcttgcctccctgtggtacccgactattcgtgtgtgcccccatggcaccccgtggggaccgcctatgggggatcctcccagatacatggagctattaaccctggccccattgggtgcatcgcaccctctcccccagcatcacattacgttccacagggcatgtag

SEQ ID NO: 40260 - DNA, 3414 bp, Artificial Sequence
  derived and/or modified sequence
atgaagtgtgtgtttgtgacagtgggcaccaccagctttgatgacctgattgcctgtgtgtctgccccagacagcctgcagaagattgagagcctgggctacaacagactcatcctgcagatcggccggggcaccgtggtgcctgagcccttcagcacagagagcttcaccctggatgtgtaccgctacaaggacagcctgaaggaggacatccagaaggctgacctggtgatcagccatgctggagctggcagctgcctggagaccctggagaagggcaagcccctggtggtggtgatcaatgagaagctgatgaacaaccaccagctggagctggccaagcagctgcacaaggagggccacctgttctactgcacctgccgggtgctgacctgccccggccaggccaagagcatcgccagcgcccctgggaagtgccaggacagcgctgccctgaccagcacagccttcagcggcctggactttggcctgctgagcggctacctgcacaagcaggccctggtgacagccacccaccccacctgcaccctgctcttccccagctgccacgccttcttccccctgcccctgacccccaccctgtacaagatgcacaagggctggaagaactactgcagccagaagagcctgaatgaggcctccatggatgagtacctgggcagcctgggcctcttcaggaagctgacagccaaggatgccagctgcctcttccgggccatcagcgagcagctgttctgcagccaggtgcaccacctggagatcaggaaggcctgtgtgtcctacatgagggagaaccagcagacctttgagagctatgtggagggcagctttgagaagtacctggagcggctgggggaccccaaggagagcgctggccagctggagatccgggccctgagcctcatctacaacagagacttcatcctgtaccgcttccctgggaagccacccacctacgtgacagacaatggctatgaggacaagatcctgctgtgctacagcagcagcggccactatgacagcgtgtacagcaagcagttccagagcagcgctgctgtgtgccaggccgtgctgtatgagatcctgtacaaggatgtgtttgtggtggatgaggaggagctgaagacagccatcaagctgttccgcagcggcagcaagaagaacagaaataatgctgtgactggaagtgaagatgcccacacagactacaagagcagcaaccagaacaggatggaggagtggggcgcctgctacaatgctgagaacatccctgagggctacaacaagggcacagaggagaccaagagccctgagaaccccagcaagatgcccttcccctacaaggtgctgaaggccctggaccctgagatctacagaaatgtggagtttgatgtgtggctggacagcaggaaggagctgcagaagagtgactacatggagtatgccggccggcagtactacctgggggacaagtgccaggtgtgcctggagagcgagggccgctactacaatgcccacatccaggaggtgggcaatgaaaacaacagcgtgacagtgttcatcgaggagctggccgagaagcacgtggtgcccctggccaacctgaagcctgtgacccaggtgatgtctgtgcctgcctggaatgccatgcccagcaggaagggccggggctaccagaagatgcctgggggctacgtgcctgagatcgtcatcagcgagatggacatcaagcagcagaagaagatgttcaagaagatccggggcaaggaggtgtacatgaccatggcctacggcaagggggaccccctgctgcccccccggctgcagcacagcatgcactacggccatgacccccccatgcactacagccagacagctggaaatgtgatgagcaatgagcacttccacccccagcaccccagcccccggcagggccggggctacggcatgcccaggaacagcagccgcttcatcaacagacacaacatgcctggccccaaggtggacttctacccaggccctgggaagcgctgctgccagagctatgacaacttctcctaccgcagccgctccttccgccgcagccaccggcagatgagctgtgtgaacaaggagagccagtatggcttcaccccaggaaatggccagatgccccggggcctggaggagaccatcaccttctatgaggtggaggagggagatgaaacagcctaccccaccctgcccaaccacggcggccccagcaccatggtgcctgccaccagcggctactgtgtgggccggcggggccacagcagcggcaagcagaccctgaacctggaggagggcaatggccagagtgaaaatggccgctaccacgaggagtacctgtacagagctgagccagactatgagaccagcggcgtgtacagcaccacagccagcacagccaacctgagcctgcaggacaggaagagctgcagcatgagcccccaggacacagtgaccagctacaactacccccagaagatgatgggcaacattgctgctgtggccgccagctgtgccaacaacgtgcctgcccctgtgctgagcaatggagctgctgccaaccaggccatcagcaccacctctgtgagcagccagaatgccatccagcccctgtttgtgagcccccccacccacggccggcctgtgattgccagccccagctacccctgccacagcgccatcccccacgccggggccagcctgcccccacctcctcctcctcctcctcctcctcctcctcctcctcctcctcctcctcctcctcctcctcctcctcctcctccagccctggatgtgggggagaccagcaacctgcagcccccaccacccctgcccccaccaccctacagctgtgaccccagcggcagtgacctgccccaggacaccaaggtgctgcagtactacttcaacctgggcctgcagtgctactaccacagctactggcacagcatggtgtatgtgccccagatgcagcagcagctgcacgtggagaactaccctgtgtacacagagccccccctggtggaccagacagtgccccagtgctacagcgaggtgagaagagaagatggcatccaggccgaggccagcgccaatgacaccttccccaatgctgacagcagctctgtgccccacggggctgtgtactaccctgtgatgtctgacccctacggccagccccccctgcccggctttgacagctgcctgcctgtggtgcctgactacagctgtgtgcccccctggcaccctgtgggcacagcctatggaggcagcagccagatccacggggccatcaaccctggccccatcggctgcatcgcccccagccccccagccagccactacgtgccccagggcatgtag

SEQ ID NO: 40261 - DNA, 3414 bp, Artificial Sequence
  derived and/or modified sequence
atgaagtgcgtgttcgtgaccgtgggcaccaccagcttcgacgacctgatcgcatgtgtgagcgcccctgactctctgcagaagatagaatccctcggttacaatcggcttattctacagatcggacgtggtaccgttgtacctgagccatttagtactgagtcctttacactggatgtgtacaggtataaggattccctgaaggaggacattcaaaaggctgacctggtgatctcgcacgctggggcgggctcatgcctggagaccctcgaaaaaggaaaaccacttgttgttgtcattaacgaaaaacttatgaataatcaccaattggaactggctaaacagttgcacaaggaaggccatctgttttactgcacatgtagggttcttacctgcccagggcaagctaaaagcatcgcctccgctcctggcaagtgccaagattccgccgctctgacatcaactgcgttctctggcctagattttgggcttctcagcggctacctacataagcaggccctcgtcaccgccacacatccaacttgtactttgctcttcccctcttgccacgccttttttccactgcctttgactccaaccctttacaaaatgcataagggatggaaaaactactgctcccagaagtctttgaacgaagccagcatggatgaatatctgggaagcctcggactattccggaagctgaccgcgaaggacgctagttgtctgtttcgggcgatttcggagcagctcttctgtagtcaggtgcaccatcttgagatccgcaaggcctgtgtgtcatacatgagggaaaatcagcagacattcgagagctacgtggagggctccttcgagaaatatctggagcggctgggggatccaaaggaatccgccggtcagctcgagattcgcgcgctcagtcttatctataatagggattttattctttatcgtttccccggaaaaccacccacctatgtgacggataacggctatgaagacaagattctcctgtgctatagctcatctggccattacgacagcgtgtacagcaagcaatttcagtcttcggctgctgtctgtcaagccgtgctctatgagattttgtataaagatgtctttgtggtggatgaagaggaactcaagacggctatcaagttgttccggagcgggagtaagaagaaccggaacaacgccgtgacaggctcggaggacgctcacactgattacaagtcctctaaccagaaccgcatggaagaatggggagcctgctacaacgcagagaacataccagagggctacaacaaaggcactgaggaaacaaagtcccccgagaatccatccaagatgccgtttccatacaaagtcctgaaagcactggatcctgagatctacaggaacgtggagttcgatgtgtggctcgactctcggaaagagctgcagaagagtgattatatggaatacgctggcaggcagtattatttgggagacaagtgccaagtatgcctcgaatctgaaggacgctactataacgcccatatccaggaagtgggtaatgaaaataattcagtgactgtgttcattgaggagcttgccgagaaacatgttgtccccctggccaacctgaagcctgtgacccaggtgatgtctgtcccggcatggaacgcaatgccaagccgaaaaggcaggggatatcagaaaatgccaggcggttatgttccagagattgtgatcagcgaaatggacataaaacagcagaagaagatgtttaaaaaaattagaggcaaggaagtgtacatgacaatggcttacggaaagggggaccctctcttgcctcccaggctgcagcactcgatgcactacgggcacgacccccccatgcactacagtcagaccgcaggcaacgtgatgtctaacgaacacttccatccccagcatccgtcaccaaggcaggggcgcggctatgggatgccacgtaactccagccgattcatcaatcgccataatatgcctggccccaaggtggatttttatcctggacccggaaagcgctgttgtcagtcatacgacaacttctcctacagaagccggtcttttagaagaagccaccgacagatgtcttgtgtaaacaaagagagccaatacgggtttaccccgggcaatgggcagatgccacgcggactagaagaaactattaccttctacgaagtggaggaaggcgacgaaacggcctatcctactctgcctaaccatggagggccttcaaccatggtgcctgcaaccagcggatattgtgtcggcagacgggggcactcctctggcaaacaaacactaaacttggaggagggaaacggacagtcggagaatggccgataccatgaagagtacctctaccgcgctgagccagactacgaaacgtcgggcgtatattctactactgcttccaccgccaacttgtccctgcaggatcgtaaatcctgtagcatgagcccacaggacaccgtgactagttacaattatccccaaaagatgatggggaacatagctgccgtggccgcgagttgcgccaataacgtcccggcccccgtcttgtccaacggggccgcggctaaccaggctatttccaccacttcagtatcttcccaaaatgccatacaacccttgttcgtctctccgcctacccatggaaggccagttatcgcatcaccttcgtatccctgccacagcgccataccgcatgctggggcctccctccctcctccacctcctcctcccccacctcccccccccccgccgcccccccccccccctccaccaccccccccccctcctccagcattggacgttggtgaaacttctaacctccagccccctcctccactgcctccacccccatattcctgtgaccctagtggctctgatttgccgcaggatacaaaagtgctccagtactatttcaacctcggccttcagtgttattatcactcctactggcatagcatggtctacgttccccagatgcagcaacagctgcatgtggagaactaccccgtgtatacagagcccccgctggtggaccagaccgtgccacaatgctacagtgaggtcagacgggaagacggaatacaggcagaggcctcagcgaacgatacatttccgaatgctgactcgtcaagcgtgccccatggagccgtgtactatccagtcatgtctgatccatacggtcagccaccactacctggctttgactcatgcctgcctgtagtgccagattattcctgtgtgccaccctggcaccccgtggggactgcctacgggggaagcagccagatccacggcgccatcaaccctggcccgataggctgtatcgccccaagtccacctgcaagccactacgttccacagggcatgtag

SEQ ID NO: 40262 - DNA, 3414 bp, Artificial Sequence
  derived and/or modified sequence
atgaaatgcgtcttcgttacagtgggaactacctcgtttgacgatctcatagcttgtgtatcagccccagactctctgcagaagatcgagagcctggggtacaaccgtttgattctgcaaattggcagaggcactgtggtccccgaacccttttccactgagtcctttaccttggatgtttacaggtataaggacagtttaaaagaagacattcagaaagccgacttagtgatcagtcatgctggcgcaggatcgtgtctcgagacgttggagaagggaaaaccactggtcgtggtcatcaacgagaaacttatgaacaatcatcagttggagctcgccaagcagctgcacaaggaaggccacctcttctattgtacttgtcgtgtgttaacttgccctggccaggccaaaagtatcgccagcgctccgggtaagtgccaggactctgccgcattgacctccacagctttcagtggcttggatttcggactcttaagcggatatctacacaagcaggccttagtcacggccactcatccaacctgcacactgttgtttcctagctgccatgccttctttcccttgcctttgactcccactctgtacaaaatgcacaagggctggaaaaactactgttctcagaagagtctgaatgaggcaagcatggatgaatatctcgggtccctgggattattccgtaaactgacggccaaagatgcctcgtgtctgtttagagcgatttctgagcagctgttttgctctcaggtacatcatttggagatcaggaaggcatgtgtttcctacatgcgcgaaaaccagcagacattcgaaagctatgttgaaggctctttcgaaaagtacctggaacggctaggcgatcctaaagagtccgccggtcagctagaaatccgcgctctcagtttaatttataatagggatttcatcttatatcgattcccaggcaagcccccaacttatgtcaccgacaacggatacgaggacaagatactactgtgctacagttcctctggccactatgactcagtatatagcaagcagttccagagcagtgcagctgtgtgccaagccgtgctctacgagattctatacaaagatgtattcgtcgtagatgaagaggaacttaaaaccgcaatcaagttgttcagaagcggcagtaagaaaaatcggaacaacgctgtcacaggtagcgaggacgcgcacaccgattataaaagctctaaccaaaatagaatggaagagtggggagcctgctataatgctgaaaatattcctgagggttataataagggcacagaggagacaaagtcccctgagaaccctagcaagatgccatttccgtacaaggtgttaaaggcactcgatccagagatctatcggaatgtggagttcgatgtatggctcgacagtcgtaaagagctccagaagtcagattacatggagtatgccggaaggcagtattaccttggcgataaatgccaggtgtgcctggagtccgaaggccgttattacaacgcccacattcaggaggtgggaaatgaaaataattcagtgaccgttttcatcgaggaactggccgagaagcatgtagtgcccttagccaatctaaagccggtcacccaggtgatgagtgtgcctgcctggaacgctatgcctagtcgcaagggtcggggttaccagaagatgcctggcggatacgtgcctgagatcgtcatcagcgaaatggatataaaacagcagaagaaaatgtttaagaagattagaggcaaagaggtttatatgaccatggcatacggaaaaggtgatcctctgctaccacccaggttgcaacacagtatgcactatggccatgacccacctatgcactacagccagacagccggaaacgtcatgtcgaacgaacatttccaccctcagcatccctctcctaggcaaggcagaggctatggcatgcctcgcaattcaagcagattcatcaatagacacaatatgccgggacctaaggtcgatttttatccaggtcccggaaagaggtgctgccaatcctacgacaacttcagttacaggagccgcagcttcagaaggtctcacagacagatgtcttgtgttaacaaagagtcacagtatggcttcacccctggcaatggccagatgcctagaggtctggaggaaactatcactttctatgaagtggaagaaggtgatgagactgcctacccaactctaccaaatcacggaggaccatccacaatggttccagccacatcaggctattgcgttggaagaagaggccatagttccggcaagcagacattaaacctggaggagggcaacgggcaatccgagaacggtcggtaccatgaggagtatctctaccgcgcagaacctgactacgagacctccggcgtttatagtaccacagccagcacagccaacctaagtcttcaggatcggaaatcctgctctatgtcaccgcaagacacagtaacgagttacaactatccccagaagatgatgggcaacatcgcagccgtggctgcttcttgtgccaacaacgttcccgcaccagtactgtcaaatggcgcagcagccaaccaggcgataagtaccactagcgtaagcagtcaaaatgcgatacaaccactgtttgtgagtcccccaactcacggcagacctgttatagctagcccttcctacccttgtcactccgcaataccgcatgctggcgcttcactgccacctccacccccaccaccccctcccccaccaccccctcccccaccaccacctccgccacccccacctccccctcccccagcactcgacgtgggggagactagcaacttacaacctcccccaccactgccaccacctccctactcctgtgacccctcaggatccgacctgcctcaagacacaaaggtccttcagtattactttaatctcggactgcagtgctactatcattcctactggcactccatggtatacgttccccagatgcagcagcaacttcatgtcgaaaactacccagtatatactgagccaccattagtcgaccaaactgtgccccagtgttattccgaggtgcgaagagaggatgggatacaggcagaggcaagcgccaacgacacatttcccaatgcggattcctcttccgtgccacatggcgctgtatactacccggtgatgtccgacccctacggacagcctcccctgcctggcttcgactcatgcctgcctgtcgttccagactattcatgtgtcccaccgtggcaccccgttggcactgcctacggcggatcctcgcagattcatggggctatcaacccgggacccattggctgcatcgccccatctccacctgcctctcattacgtcccacaaggaatgtag

SEQ ID NO: 40263 - DNA, 4071 bp, Artificial Sequence
  derived and/or modified sequence
ggaacccgcgccatgaagtgcgtgtttgttaccgtagggaccaccagctttgacgacctcattgcgtgtgtgtcggcgcccgacagtctgcaaaaaatcgagagccttggttacaaccgacttatcctgcaaattggtagaggaacggtggtacctgaacccttcagtactgagtcgtttactctggatgtttacaggtacaaggattccttgaaagaagacattcagaaagcagatcttgttattagtcacgcaggtgcaggaagctgtttggagactctggaaaaaggaaagccactcgtagtggttataaacgaaaagttgatgaacaatcatcagctggaactggcaaagcagctacacaaagagggtcatctcttctattgtacctgcagggtcctgacttgtcctgggcaagccaagtccattgcttctgctcctgggaagtgccaagattctgcagcgctgacttcaactgccttttcaggcctagactttgggctgctttccggatacctgcataagcaagcccttgttactgctacccatcctacctgcaccctgctttttccctcttgccacgctttttttcctctccctcttacccccaccctgtacaaaatgcataaaggatggaaaaactactgcagccagaagtctttgaatgaggcatcaatggatgaatatttaggcagcttagggctgtttcgaaagctgactgccaaggatgcctcttgcctctttcgggccatttcggagcagttgttttgcagccaggtccatcatttggaaatcaggaaggcttgtgtctcatatatgagggaaaatcaacaaacttttgagtcttatgtggagggatcttttgagaaatacctggaacggttgggagatcccaaggaaagtgctggccagctggaaataagagctctttctctaatttataatcgggatttcattctttatcgctttcctggaaaacctccaacttatgtcacagataatggctatgaagacaagattctactctgctactcaagtagtggtcactatgattctgtgtactcaaaacaatttcagtcaagtgcagctgtttgtcaggctgtattgtacgaaattctctataaagatgtgtttgttgtggatgaagaagagttgaagactgcgattaaattgtttcgaagtggttctaagaagaacagaaataatgctgtaactggaagcgaggatgcccatactgattacaagagttcaaatcagaataggatggaagagtggggtgcctgctacaatgctgaaaatataccagagggctacaataaaggaacagaagaaacaaagtctccagaaaatccatcaaagatgcccttcccctataaggtgctcaaagccctggatccagaaatctatcgtaatgtagaatttgatgtttggttggacagcagaaaagaacttcaaaaatctgattacatggagtatgctgggagacagtactatttgggagacaagtgtcaggtttgcttggaatcagaaggaagatattataatgctcatatccaggaagttggaaatgagaacaattcagtaacagtcttcattgaagaattggcggaaaagcatgttgttccactggctaacttaaaaccagttacccaagtgatgtctgttcctgcctggaatgctatgcccagtcggaaaggaagaggttaccagaaaatgcctgggggttatgtcccggaaatagttatatcagagatggacataaagcaacagaagaagatgttcaagaaaattcgagggaaagaagtttacatgactatggcttacggcaagggagaccccctcctcccacccaggctgcagcacagtatgcattatgggcacgatcctccaatgcactactcacagacagctggcaatgttatgtctaatgaacattttcatcctcagcatccatctccgagacaaggtcggggatatgggatgcccaggaattcatctcggtttataaacaggcacaacatgccgggccctaaagttgatttttacccaggcccaggtaaaaggtgctgccagagctatgataacttctcttatagatctcgttcatttagacgtagtcaccgccagatgagttgtgtgaataaggagtcccagtatggatttaccccagggaatggacagatgcccaggggcttggaagaaactattactttttatgaagttgaagaaggggatgagactgcttatccaactttacctaatcatggaggtccctctacaatggttcctgctacttcaggatactgtgttggaaggcggggacatagctcaggcaaacagactttgaatttagaggagggcaatggccagagtgaaaatgggcgatatcatgaagaatatctttatcgtgcagagccagactatgaaacttcaggtgtttatagcacaactgcatctacagcaaacttgtctcttcaggacagaaagtcatgttctatgtctcctcaggacacagttacctcatacaactacccccagaagatgatgggaaatattgcagcagttgcagcttcctgtgccaataatgttccagctccagtcttatctaacggtgcagcggctaatcaagctattagtaccacttcagtttcctcacagaatgctatacagcctctctttgtatctccacctacacacggcaggccagtgattgcctcaccatcctatccatgccattctgctattcctcatgctggtgcctctctaccaccaccaccaccaccaccaccaccaccaccaccaccaccacctcctcctcctcctcctcctcctcctcctcctcctcctgctcttgatgtgggagagacttcaaacttacaaccaccaccaccactaccacctccaccttattcctgtgatccaagcggcagtgatttgcctcaagatacaaaagttttgcagtactatttcaatctaggattgcagtgctattaccacagctactggcactccatggtctatgtgccacagatgcagcagcagcttcatgtagagaattatccagtctatactgagccacctctggtagatcaaaccgttcctcaatgctacagtgaggtgaggagagaagatggcatacaggcggaagcatcagcaaatgatacttttccgaatgctgattcttcatctgtccctcatggagcagtctattatccagtaatgtcagatccctatgggcagccacctttgccaggttttgactcctgccttccggttgtgccagattattcctgtgttcccccctggcatccagttggtacagcatatggtggttcttctcaaattcatggtgctataaatcctgggccaattggctgtattgctccatctcccccagcttctcattatgtacctcagggtatgtaagatccagcagtatgaagtattcttgcactgccattttcttgctgtttttgtttttaaaaagtattttatgttagtggttaaatgatttaggtgattagtgtttactattgtatttgtctttaaaattattttatcttttgatttaaaatagtactttaaaattaaggggtattattttgggctgtgactaaggaaattgagatggatgtacaactagccccatattgagcatacttcattgtattcagctgttttcctgtcagccatttgtcagctttatattagctgatggtaccaattgataaaatgaatataaagtatttcattggttcaaaaatcacacatcatattaaaccatgcagaattggagtaacttccacttttttctagaaagtaaaaccaagagcctttgcttctggataactcacttaatattaaattaaagagctcttcacgtttcttgagaattatctgaagccagttgcattctgtgatatcagttttgaaggcacatggttctctgctttagatttatcccatatgctattgtttaatactggatgtatgtaagtgttttactgcactgtattgaattggtgtcttttgcacagttagcagtaaataaaaattagcatttaaaattgc

SEQ ID NO: 40264 - DNA, 3414 bp, Artificial Sequence
  derived and/or modified sequence
atgaagtgcgtgttcgtgaccgtgggcaccaccagcttcgacgacctgatcgcctgcgtgagcgcccccgacagcctgcagaagatcgagagcctgggctacaacagactgatcctgcagatcggcagaggcaccgtggtgcccgagcccttcagcaccgagagcttcaccctggacgtgtacagatacaaggacagcctgaaggaggacatccagaaggccgacctggtgatcagccacgccggcgccggcagctgcctggagaccctggagaagggcaagcccctggtggtggtgatcaacgagaagctgatgaacaaccaccagctggagctggccaagcagctgcacaaggagggccacctgttctactgcacctgcagagtgctgacctgccccggccaggccaagagcatcgccagcgcccccggcaagtgccaggacagcgccgccctgaccagcaccgccttcagcggcctggacttcggcctgctgagcggctacctgcacaagcaggccctggtgaccgccacccaccccacctgcaccctgctgttccccagctgccacgccttcttccccctgcccctgacccccaccctgtacaagatgcacaagggctggaagaactactgcagccagaagagcctgaacgaggccagcatggacgagtacctgggcagcctgggcctgttcagaaagctgaccgccaaggacgccagctgcctgttcagagccatcagcgagcagctgttctgcagccaggtgcaccacctggagatcagaaaggcctgcgtgagctacatgagagagaaccagcagaccttcgagagctacgtggagggcagcttcgagaagtacctggagagactgggcgaccccaaggagagcgccggccagctggagatcagagccctgagcctgatctacaacagagacttcatcctgtacagattccccggcaagccccccacctacgtgaccgacaacggctacgaggacaagatcctgctgtgctacagcagcagcggccactacgacagcgtgtacagcaagcagttccagagcagcgccgccgtgtgccaggccgtgctgtacgagatcctgtacaaggacgtgttcgtggtggacgaggaggagctgaagaccgccatcaagctgttcagaagcggcagcaagaagaacagaaacaacgccgtgaccggcagcgaggacgcccacaccgactacaagagcagcaaccagaacagaatggaggagtggggcgcctgctacaacgccgagaacatccccgagggctacaacaagggcaccgaggagaccaagagccccgagaaccccagcaagatgcccttcccctacaaggtgctgaaggccctggaccccgagatctacagaaacgtggagttcgacgtgtggctggacagcagaaaggagctgcagaagagcgactacatggagtacgccggcagacagtactacctgggcgacaagtgccaggtgtgcctggagagcgagggcagatactacaacgcccacatccaggaggtgggcaacgagaacaacagcgtgaccgtgttcatcgaggagctggccgagaagcacgtggtgcccctggccaacctgaagcccgtgacccaggtgatgagcgtgcccgcctggaacgccatgcccagcagaaagggcagaggctaccagaagatgcccggcggctacgtgcccgagatcgtgatcagcgagatggacatcaagcagcagaagaagatgttcaagaagatcagaggcaaggaggtgtacatgaccatggcctacggcaagggcgaccccctgctgccccccagactgcagcacagcatgcactacggccacgacccccccatgcactacagccagaccgccggcaacgtgatgagcaacgagcacttccacccccagcaccccagccccagacagggcagaggctacggcatgcccagaaacagcagcagattcatcaacagacacaacatgcccggccccaaggtggacttctaccccggccccggcaagagatgctgccagagctacgacaacttcagctacagaagcagaagcttcagaagaagccacagacagatgagctgcgtgaacaaggagagccagtacggcttcacccccggcaacggccagatgcccagaggcctggaggagaccatcaccttctacgaggtggaggagggcgacgagaccgcctaccccaccctgcccaaccacggcggccccagcaccatggtgcccgccaccagcggctactgcgtgggcagaagaggccacagcagcggcaagcagaccctgaacctggaggagggcaacggccagagcgagaacggcagataccacgaggagtacctgtacagagccgagcccgactacgagaccagcggcgtgtacagcaccaccgccagcaccgccaacctgagcctgcaggacagaaagagctgcagcatgagcccccaggacaccgtgaccagctacaactacccccagaagatgatgggcaacatcgccgccgtggccgccagctgcgccaacaacgtgcccgcccccgtgctgagcaacggcgccgccgccaaccaggccatcagcaccaccagcgtgagcagccagaacgccatccagcccctgttcgtgagcccccccacccacggcagacccgtgatcgccagccccagctacccctgccacagcgccatcccccacgccggcgccagcctgcccccccccccccccccccccccccccccccccccccccccccccccccccccccccccccccccccccccccccccccccgccctggacgtgggcgagaccagcaacctgcagccccccccccccctgcccccccccccctacagctgcgaccccagcggcagcgacctgccccaggacaccaaggtgctgcagtactacttcaacctgggcctgcagtgctactaccacagctactggcacagcatggtgtacgtgccccagatgcagcagcagctgcacgtggagaactaccccgtgtacaccgagccccccctggtggaccagaccgtgccccagtgctacagcgaggtgagaagagaggacggcatccaggccgaggccagcgccaacgacaccttccccaacgccgacagcagcagcgtgccccacggcgccgtgtactaccccgtgatgagcgacccctacggccagccccccctgcccggcttcgacagctgcctgcccgtggtgcccgactacagctgcgtgcccccctggcaccccgtgggcaccgcctacggcggcagcagccagatccacggcgccatcaaccccggccccatcggctgcatcgcccccagcccccccgccagccactacgtgccccagggcatgtag

SEQ ID NO: 40265 - protein, 2710 aa, Artificial Sequence
  derived and/or modified sequence
MSDKMSSFLHIGDICSLYAEGSTNGFISTLGLVDDRCVVQPETGDLNNPPKKFRDCLFKLCPMNRYSAQKQFWKAAKPGANSTTDAVLLNKLHHAADLEKKQNETENRKLLGTVIQYGNVIQLLHLKSNKYLTVNKRLPALLEKNAMRVTLDEAGNEGSWFYIQPFYKLRSIGDSVVIGDKVVLNPVNAGQPLHASSHQLVDNPGCNEVNSVNCNTSWKIVLFMKWSDNKDDILKGGDVVRLFHAEQEKFLTCDEHRKKQHVFLRTTGRQSATSATSSKALWEVEVVQHDPCRGGAGYWNSLFRFKHLATGHYLAAEVDPDFEEECLEFQPSVDPDQDASRSRLRNAQEKMVYSLVSVPEGNDISSIFELDPTTLRGGDSLVPRNSYVRLRHLCTNTWVHSTNIPIDKEEEKPVMLKIGTSPVKEDKEAFAIVPVSPAEVRDLDFANDASKVLGSIAGKLEKGTITQNERRSVTKLLEDLVYFVTGGTNSGQDVLEVVFSKPNRERQKLMREQNILKQIFKLLQAPFTDCGDGPMLRLEELGDQRHAPFRHICRLCYRVLRHSQQDYRKNQEYIAKQFGFMQKQIGYDVLAEDTITALLHNNRKLLEKHITAAEIDTFVSLVRKNREPRFLDYLSDLCVSMNKSIPVTQELICKAVLNPTNADILIETKLVLSRFEFEGVSSTGENALEAGEDEEEVWLFWRDSNKEIRSKSVRELAQDAKEGQKEDRDVLSYYRYQLNLFARMCLDRQYLAINEISGQLDVDLILRCMSDENLPYDLRASFCRLMLHMHVDRDPQEQVTPVKYARLWSEIPSEIAIDDYDSSGASKDEIKERFAQTMEFVEEYLRDVVCQRFPFSDKEKNKLTFEVVNLARNLIYFGFYNFSDLLRLTKILLAILDCVHVTTIFPISKMAKGEENKGSNVMRSIHGVGELMTQVVLRGGGFLPMTPMAAAPEGNVKQAEPEKEDIMVMDTKLKIIEILQFILNVRLDYRISCLLCIFKREFDESNSQTSETSSGNSSQEGPSNVPGALDFEHIEEQAEGIFGGSEENTPLDLDDHGGRTFLRVLLHLTMHDYPPLVSGALQLLFRHFSQRQEVLQAFKQVQLLVTSQDVDNYKQIKQDLDQLRSIVEKSELWVYKGQGPDETMDGASGENEHKKTEEGNNKPQKHESTSSYNYRVVKEILIRLSKLCVQESASVRKSRKQQQRLLRNMGAHAVVLELLQIPYEKAEDTKMQEIMRLAHEFLQNFCAGNQQNQALLHKHINLFLNPGILEAVTMQHIFMNNFQLCSEINERVVQHFVHCIETHGRNVQYIKFLQTIVKAEGKFIKKCQDMVMAELVNSGEDVLVFYNDRASFQTLIQMMRSERDRMDENSPLMYHIHLVELLAVCTEGKNVYTEIKCNSLLPLDDIVRVVTHEDCIPEVKIAYINFLNHCYVDTEVEMKEIYTSNHMWKLFENFLVDICRACNNTSDRKHADSILEKYVTEIVMSIVTTFFSSPFSDQSTTLQTRQPVFVQLLQGVFRVYHCNWLMPSQKASVESCIRVLSDVAKSRAIAIPVDLDSQVNNLFLKSHSIVQKTAMNWRLSARNAARRDSVLAASRDYRNIIERLQDIVSALEDRLRPLVQAELSVLVDVLHRPELLFPENTDARRKCESGGFICKLIKHTKQLLEENEEKLCIKVLQTLREMMTKDRGYGEKGEALRQVLVNRYYGNVRPSGRRESLTSFGNGPLSAGGPGKPGGGGGGSGSSSMSRGEMSLAEVQCHLDKEGASNLVIDLIMNASSDRVFHESILLAIALLEGGNTTIQHSFFCRLTEDKKSEKFFKVFYDRMKVAQQEIKATVTVNTSDLGNKKKDDEVDRDAPSRKKAKEPTTQITEEVRDQLLEASAATRKAFTTFRREADPDDHYQPGEGTQATADKAKDDLEMSAVITIMQPILRFLQLLCENHNRDLQNFLRCQNNKTNYNLVCETLQFLDCICGSTTGGLGLLGLYINEKNVALINQTLESLTEYCQGPCHENQNCIATHESNGIDIITALILNDINPLGKKRMDLVLELKNNASKLLLAIMESRHDSENAERILYNMRPKELVEVIKKAYMQGEVEFEDGENGEDGAASPRNVGHNIYILAHQLARHNKELQSMLKPGGQVDGDEALEFYAKHTAQIEIVRLDRTMEQIVFPVPSICEFLTKESKLRIYYTTERDEQGSKINDFFLRSEDLFNEMNWQKKLRAQPVLYWCARNMSFWSSISFNLAVLMNLLVAFFYPFKGVRGGTLEPHWSGLLWTAMLISLAIVIALPKPHGIRALIASTILRLIFSVGLQPTLFLLGAFNVCNKIIFLMSFVGNCGTFTRGYRAMVLDVEFLYHLLYLVICAMGLFVHEFFYSLLLFDLVYREETLLNVIKSVTRNGRSIILTAVLALILVYLFSIVGYLFFKDDFILEVDRLPNETAVPETGESLASEFLFSDVCRVESGENCSSPAPREELVPAEETEQDKEHTCETLLMCIVTVLSHGLRSGGGVGDVLRKPSKEEPLFAARVIYDLLFFFMVIIIVLNLIFGVIIDTFADLRSEKQKKEEILKTTCFICGLERDKFDNKTVTFEEHIKEEHNMWHYLCFIVLVKVKDSTEYTGPESYVAEMIKERNLDWFPRMRAMSLVSSDSEGEQNELRNLQEKLESTMKLVTNLSGQLSELKDQMTEQRKQKQRIGLLGHPPHMNVNPQQPA

SEQ ID NO: 40266 - protein, 2710 aa, Artificial Sequence
  derived and/or modified sequence
MSDKMSSFLHIGDICSLYAEGSTNGFISTLGLVDDRCVVQPETGDLNNPPKKFRDCLFKLCPMNRYSAQKQFWKAAKPGANSTTDAVLLNKLHHAADLEKKQNETENRKLLGTVIQYGNVIQLLHLKSNKYLTVNKRLPALLEKNAMRVTLDEAGNEGSWFYIQPFYKLRSIGDSVVIGDKVVLNPVNAGQPLHASSHQLVDNPGCNEVNSVNCNTSWKIVLFMKWSDNKDDILKGGDVVRLFHAEQEKFLTCDEHRKKQHVFLRTTGRQSATSATSSKALWEVEVVQHDPCRGGAGYWNSLFRFKHLATGHYLAAEVDPDFEEECLEFQPSVDPDQDASRSRLRNAQEKMVYSLVSVPEGNDISSIFELDPTTLRGGDSLVPRNSYVRLRHLCTNTWVHSTNIPIDKEEEKPVMLKIGTSPVKEDKEAFAIVPVSPAEVRDLDFANDASKVLGSIAGKLEKGTITQNERRSVTKLLEDLVYFVTGGTNSGQDVLEVVFSKPNRERQKLMREQNILKQIFKLLQAPFTDCGDGPMLRLEELGDQRHAPFRHICRLCYRVLRHSQQDYRKNQEYIAKQFGFMQKQIGYDVLAEDTITALLHNNRKLLEKHITAAEIDTFVSLVRKNREPRFLDYLSDLCVSMNKSIPVTQELICKAVLNPTNADILIETKLVLSRFEFEGVSSTGENALEAGEDEEEVWLFWRDSNKEIRSKSVRELAQDAKEGQKEDRDVLSYYRYQLNLFARMCLDRQYLAINEISGQLDVDLILRCMSDENLPYDLRASFCRLMLHMHVDRDPQEQVTPVKYARLWSEIPSEIAIDDYDSSGASKDEIKERFAQTMEFVEEYLRDVVCQRFPFSDKEKNKLTFEVVNLARNLIYFGFYNFSDLLRLTKILLAILDCVHVTTIFPISKMAKGEENKGSNVMRSIHGVGELMTQVVLRGGGFLPMTPMAAAPEGNVKQAEPEKEDIMVMDTKLKIIEILQFILNVRLDYRISCLLCIFKREFDESNSQTSETSSGNSSQEGPSNVPGALDFEHIEEQAEGIFGGRKENTPLDLDDHGGRTFLRVLLHLTMHDYPPLVSGALQLLFRHFSQRQEVLQAFKQVQLLVTSQDVDNYKQIKQDLDQLRSIVEKSELWVYKGQGPDETMDGASGENEHKKTEEGNNKPQKHESTSSYNYRVVKEILIRLSKLCVQESASVRKSRKQQQRLLRNMGAHAVVLELLQIPYEKAEDTKMQEIMRLAHEFLQNFCAGNQQNQALLHKHINLFLNPGILEAVTMQHIFMNNFQLCSEINERVVQHFVHCIETHGRNVQYIKFLQTIVKAEGKFIKKCQDMVMAELVNSGEDVLVFYNDRASFQTLIQMMRSERDRMDENSPLMYHIHLVELLAVCTEGKNVYTEIKCNSLLPLDDIVRVVTHEDCIPEVKIAYINFLNHCYVDTEVEMKEIYTSNHMWKLFENFLVDICRACNNTSDRKHADSILEKYVTEIVMSIVTTFFSSPFSDQSTTLQTRQPVFVQLLQGVFRVYHCNWLMPSQKASVESCIRVLSDVAKSRAIAIPVDLDSQVNNLFLKSHSIVQKTAMNWRLSARNAARRDSVLAASRDYRNIIERLQDIVSALEDRLRPLVQAELSVLVDVLHRPELLFPENTDARRKCESGGFICKLIKHTKQLLEENEEKLCIKVLQTLREMMTKDRGYGEKGEALRQVLVNRYYGNVRPSGRRESLTSFGNGPLSAGGPGKPGGGGGGSGSSSMSRGEMSLAEVQCHLDKEGASNLVIDLIMNASSDRVFHESILLAIALLEGGNTTIQHSFFCRLTEDKKSEKFFKVFYDRMKVAQQEIKATVTVNTSDLGNKKKDDEVDRDAPSRKKAKEPTTQITEEVRDQLLEASAATRKAFTTFRREADPDDHYQPGEGTQATADKAKDDLEMSAVITIMQPILRFLQLLCENHNRDLQNFLRCQNNKTNYNLVCETLQFLDCICGSTTGGLGLLGLYINEKNVALINQTLESLTEYCQGPCHENQNCIATHESNGIDIITALILNDINPLGKKRMDLVLELKNNASKLLLAIMESRHDSENAERILYNMRPKELVEVIKKAYMQGEVEFEDGENGEDGAASPRNVGHNIYILAHQLARHNKELQSMLKPGGQVDGDEALEFYAKHTAQIEIVRLDRTMEQIVFPVPSICEFLTKESKLRIYYTTERDEQGSKINDFFLRSEDLFNEMNWQKKLRAQPVLYWCARNMSFWSSISFNLAVLMNLLVAFFYPFKGVRGGTLEPHWSGLLWTAMLISLAIVIALPKPHGIRALIASTILRLIFSVGLQPTLFLLGAFNVCNKIIFLMSFVGNCGTFTRGYRAMVLDVEFLYHLLYLVICAMGLFVHEFFYSLLLFDLVYREETLLNVIKSVTRNGRSIILTAVLALILVYLFSIVGYLFFKDDFILEVDRLPNETAVPETGESLASEFLFSDVCRVESGENCSSPAPREELVPAEETEQDKEHTCETLLMCIVTVLSHGLRSGGGVGDVLRKPSKEEPLFAARVIYDLLFFFMVIIIVLNLIFGVIIDTFADLRSEKQKKEEILKTTCFICGLERDKFDNKTVTFEEHIKEEHNMWHYLCFIVLVKVKDSTEYTGPESYVAEMIKERNLDWFPRMRAMSLVSSDSEGEQNELRNLQEKLESTMKLVTNLSGQLSELKDQMTEQRKQKQRIGLLGHPPHMNVNPQQPA

SEQ ID NO: 40267 - DNA, 8133 bp, Artificial Sequence
  derived and/or modified sequence
atgtccgataaaatgagtagttttctacatatcggcgacatatgttccctctacgcagagggctcaacgaacggcttcattagcactttgggcctggtggacgaccgttgtgtagtgcaaccagaaactggcgatcttaataacccccccaagaagttccgggactgtttgttcaagctgtgtcctatgaaccggtacagtgcgcagaagcagttctggaaggccgcgaagccaggcgctaattccaccacggacgcagtgctgcttaataaacttcaccatgctgccgacctcgaaaaaaagcagaacgaaaccgagaataggaaactactggggactgtgattcagtacgggaatgtcattcagctactgcacttgaaaagcaataagtatctcacagtcaacaaaaggcttcccgctctgctggagaagaatgccatgagggtcacactcgatgaagcgggcaatgaaggtagctggttttacatccagcccttttataagcttaggagcattggcgattcggtggtgatcggcgataaggtagtgcttaaccctgtgaacgctggacagccactgcacgcatcatcccatcagctcgtggacaatcccggctgcaacgaggtaaatagcgtgaactgcaatacaagctggaagattgtgctctttatgaaatggtcggacaataaggatgacattctaaagggcggtgacgtggttcggctttttcacgccgagcaggaaaagttcttgacgtgcgacgagcacagaaagaaacagcacgtgttcttgaggacaactggccgccagtcggcgaccagcgccaccagctctaaggccctgtgggaggttgaggttgtgcagcatgacccgtgcaggggcggtgctggctattggaacagtcttttccgcttcaaacacctggccacgggtcactaccttgctgcagaagttgatccggattttgaagaggagtgtctggaattccagccctctgtggaccccgaccaagacgcttcacgctcaaggctacgaaacgcccaggagaagatggtgtattccttagtgtctgtgccagaagggaatgacatatccagtattttcgaattggaccccacaaccctgagagggggcgatagccttgtgccccgaaattcctacgtgagactccggcacctttgcaccaacacctgggtgcattctacaaacattccgatcgacaaggaggaggagaagcccgtgatgctgaaaattgggacttcgcccgtaaaagaggacaaggaagcattcgccattgtaccagtgtccccagctgaagtgagggatctggattttgccaacgacgcaagcaaagttttaggctcaattgctggaaagctagaaaaaggcaccatcacacagaacgaaaggaggtccgtcaccaagttgctggaagacctcgtatactttgtcacaggcggcaccaacagcgggcaggatgttctggaggttgttttctctaaacctaaccgggagagacagaaattgatgagggagcaaaacatactgaaacagattttcaaactccttcaggctcctttcaccgactgtggcgacggccctatgttaagattggaagaactgggcgatcagaggcatgctcctttccggcatatttgtcggctgtgctaccgggttcttcggcattcacagcaggactaccgaaagaatcaggaatacattgctaaacagttcggttttatgcagaagcagataggttacgacgttctggctgaagatacaatcacagccttgcttcacaataacagaaaactgctggagaagcatattacagccgccgaaatcgacacttttgtctctctcgttcgcaaaaatagggaacccaggtttctggactacctgtcggacctttgtgtgtcgatgaacaaatcaatacccgtgactcaggaactgatatgcaaggcggtgctcaaccccacaaatgctgacatactaattgagaccaaactggttctaagccgcttcgagtttgaaggagtatcttcaactggcgagaatgccctcgaggcgggggaggatgaggaagaagtgtggttattttggagggactctaacaaagagattagaagcaaatccgtgcgcgaattggcccaggatgccaaggaaggacagaaggaggaccgggacgtgctgagttattatcggtaccaactaaacctgttcgcccgcatgtgtctggatagacagtatctggcaatcaacgagatcagcggacagctggacgtagacttaattttgcgatgcatgagtgacgagaatctgccttatgacttgcgggcctccttctgtagactgatgctacacatgcatgtggacagggatccacaggagcaagttacgcccgtgaaatatgcacgcctctggagtgaaatccccagtgaaattgctatcgacgactatgactcaagtggagcaagcaaagacgagatcaaggagcgcttcgcccagaccatggagtttgtggaggaatatctcagggatgttgtctgccagagattccctttttctgataaggagaagaacaaactgacattcgaagtcgttaacctggcccgaaatctgatctattttggtttttataacttcagtgatctactgaggttaaccaagatcctgctcgcgattcttgattgtgttcacgtgactaccatattccccatcagcaaaatggcaaagggcgaggaaaataaaggctctaacgtcatgaggagtatccacggtgtgggcgagctcatgacccaagtggtgctgcggggcgggggttttctacccatgactccgatggccgccgccccagaaggcaacgttaagcaggccgagccagagaaggaggacataatggttatggataccaagctcaagattatagagatcctacaatttatcttgaatgtgcgccttgattatcgaatcagctgtttgctatgcatctttaagcgagagttcgacgagagtaacagccagacgtctgagacctctagcgggaattcatcacaagagggaccgagcaatgtgccaggggctctggatttcgagcacatagaggagcaagccgaaggcatttttgggggctctgaggagaacacccccctagatcttgatgatcatggcggccgcacctttctcagagtgctgctccatctaaccatgcacgattacccccctctcgtctccggggctcttcagctgctttttcgtcacttttcacagagacaggaagtcctgcaggccttcaagcaggtacaattgcttgtcacttctcaggatgtggacaactacaagcaaataaagcaggatctggaccagctacgcagcatcgttgagaaatccgagttgtgggtttacaagggtcaggggcccgatgagactatggacggagctagcggagaaaacgaacataagaagaccgaagagggaaataataagccgcagaaacacgaatcaacttcttcatataactaccgagtcgtcaaggagatcctgattcggctcagcaagctctgtgtccaagagagcgcaagcgtaagaaagagccggaagcagcagcaaagactcctgagaaacatgggggcacatgcagttgtcttggagctgctccagatcccttacgagaaagctgaggacactaagatgcaggagattatgcgcctggcccacgaatttctgcagaacttctgcgccgggaaccaacagaatcaggctctgttacacaaacacattaatctgttcctaaatcctggcattctcgaagcggtcacaatgcagcacattttcatgaacaacttccaactgtgctcagagatcaacgagagagtagtccaacatttcgtgcactgtatcgaaacccacgggagaaatgtgcagtacattaaattcttgcaaacaatcgtaaaggccgagggcaagtttattaaaaaatgtcaggatatggtgatggctgagctggtgaatagcggggaggacgtactcgtcttttataatgatcgtgcaagtttccaaacacttatccagatgatgaggagcgagagggaccgaatggatgagaacagtcctctgatgtatcatatccacctggtggagctccttgccgtgtgcacagagggaaaaaatgtgtacacagagatcaagtgtaactctcttttgcccctggacgatatcgtacgagtggtgacccacgaagactgcatccccgaagtgaagatcgcttacatcaactttctaaaccactgctacgtagatacggaggtggaaatgaaagagatatataccagcaaccacatgtggaagctctttgagaattttttggtcgatatttgcagagcatgtaataatacctccgaccgaaagcacgctgactctattctcgaaaaatacgtcaccgaaatcgtgatgagtatcgtcacgactttcttctcctctccgttttccgatcaaagcacaacgttgcagactcggcagcctgtgtttgtacaactgctccagggtgtttttagagtgtaccactgtaattggctgatgccatctcaaaaggcgtctgtcgagagctgtattagggttctgtcagacgttgccaaaagtagagccattgccatcccggtcgatttggactcacaagtcaacaacctttttctgaagtcccactccattgtgcagaagacggcaatgaattggaggctgtccgcaagaaacgccgctaggagagattcagtcctcgccgcctccagagattaccgaaacatcatcgagcggctgcaggatattgtgtcagcgcttgaagacaggctcaggcctctggtccaggctgaactgtccgtcctagtagacgttctgcataggcccgaactacttttcccagaaaacacagacgcaaggagaaagtgcgagtctggcggtttcatttgtaagctcattaagcacactaaacagctgcttgaagagaacgaggaaaaactgtgcatcaaagtgctccagaccttacgcgagatgatgacgaaggacagaggatacggcgagaagggagaagctttgagacaggtgttagtaaataggtactatggtaatgtgcgaccgtcaggccggcgagaatcactgactagcttcggcaacggacctctctctgccggcgggcccggaaagcctggcggcgggggaggaggatccgggtcttcaagcatgtcgcgtggcgagatgagtcttgctgaggtgcagtgtcacttagataaggaaggagcaagcaacctggttatcgatctgatcatgaatgccagttccgacagagtttttcatgagtccatacttctggctatagccctgctggagggagggaacacaaccatccagcacagttttttttgtcgcttaacagaggacaagaaatcggagaaattctttaaagtcttctacgatcgcatgaaagtggcccagcaggaaatcaaggctacggtgactgttaacacctcagatttgggcaacaagaaaaaggacgacgaagtggacagggacgctccaagcaggaaaaaagccaaagagcccactacccaaatcacggaggaagttagggaccaactactagaggccagtgctgccacgaggaaagcttttacaacttttcgccgggaggccgatcctgacgatcattaccagcccggtgagggaacccaggcaacagccgataaggctaaggatgacttggagatgagcgccgtgattaccattatgcagcctatcctgaggtttctccaattgctttgcgagaatcacaatcgggacctgcagaatttcctccgatgtcaaaacaataagaccaattataatctggtctgtgaaaccctacagttcctggattgcatctgtggatccactaccggcgggctagggctcctgggattgtacataaatgagaagaatgtggcccttatcaatcagactctggagtctctgacagagtactgccaagggccgtgccatgagaaccagaattgcatagcaacccacgagagtaatgggatcgacatcattaccgctctgattttgaacgatatcaacccactgggcaagaagcggatggatcttgtacttgagcttaagaataatgccagcaaattgttgttagccatcatggagtcccggcatgattcggaaaatgcagaaaggattctgtataacatgcggcctaaagagctggtggaggtaataaagaaagcgtatatgcaaggcgaagtcgagttcgaggatggcgaaaacggcgaagacggggccgcttcaccccggaatgtgggccataatatctacattctagctcaccagctggcaagacacaacaaagagctacagtctatgctcaagcccggcggccaagtggacggcgacgaagctctggaattttacgctaagcacacagctcagattgagatcgttcgccttgaccgtaccatggagcaaattgttttccccgttcctagcatctgcgagtttcttaccaaggagtctaagctacggatctactacacaaccgagcgagacgaacagggctcaaaaattaacgacttcttcctgaggagcgaagatctcttcaacgaaatgaactggcagaagaagctgagagcccagcccgtgctttattggtgcgccaggaacatgtccttttggtccagtatttcgtttaacttggccgtgcttatgaacctcctggtagcgttcttttacccctttaagggtgtcagaggaggcacgctggaaccccactggtccgggttactctggactgccatgttaatatcccttgccattgtcattgctctgccgaagcctcacggaatacgagctctgatcgcctctacaattctaaggcttatcttctccgtaggtctgcagccaacattgttcctgctcggcgcttttaatgtctgtaataagatcatcttcttgatgagcttcgtagggaattgcggtacgttcacacgaggataccgggcaatggtgctggacgtagaatttctctatcatttgctgtaccttgttatctgcgccatggggttgtttgttcatgagttcttctactcattattgctgtttgacctcgtctacagagaggagacactgctgaacgtgatcaagagcgtgactcgcaacggccgctcaattatcctgaccgccgtgctcgctttgattcttgtttatcttttctcaatagtcggctatctgttttttaaagacgacttcatactcgaggttgatcgccttccaaatgaaacagcggtgccagagacgggcgagagtctggcctcagagttcctcttcagtgacgtctgtagggtcgagtccggagagaactgctcatctccagccccccgcgaggagttggtgccagcagaggaaacagaacaagataaggagcatacgtgtgaaacgttacttatgtgcattgtgacagtcctgagtcatgggctgcgttcagggggtggcgtgggcgatgtgctgaggaagccttctaaggaggagcctctgtttgctgctagggtaatctacgatctcttgtttttcttcatggtcatcataattgtcctgaaccttatcttcggcgtcataatcgataccttcgccgaccttcgctcagaaaaacaaaagaaggaggaaatcctcaagactacatgtttcatttgtggcctcgaaagggacaagtttgacaataagacagtcacatttgaggagcatattaaagaggaacacaatatgtggcattacctctgcttcatagtgttggttaaggttaaggactcaactgagtacacagggcctgaatcctatgtcgctgaaatgatcaaggaacgaaatttggactggtttccaagaatgcgtgcaatgagcttggtctcctccgattcggagggtgaacagaacgagctgcgtaacctccaggaaaaactggagtccacaatgaaactggtcactaatctgtcaggccagctttcagaactaaaagaccaaatgactgagcagaggaaacagaaacaacgcattggcctgctcggacaccctcctcatatgaatgtgaatccacagcagcctgcctag

SEQ ID NO: 40268 - DNA, 8133 bp, Artificial Sequence
  derived and/or modified sequence
atgtcggataaaatgagcagcttcttgcacataggagacatctgcagtctatatgccgagggtagtacaaatggctttatctccactttggggctcgtcgacgatcgatgcgtggttcagccggaaaccggcgacctgaacaatcctcccaaaaaattccgggactgcctgttcaaattatgtccaatgaataggtacagtgcacagaagcagttttggaaggcagccaaacccggggcgaatagtaccaccgatgccgtcctgttgaataagctgcatcatgctgccgatctcgaaaagaagcagaatgaaaccgaaaatcggaagctgctaggcaccgtgattcaatacggtaatgtgatacagttgctccacctgaaatccaacaagtatcttactgtaaacaagaggttgccggctttgttggaaaaaaacgctatgcgcgttaccctggatgaggcagggaatgagggatcctggttctatatccagcccttctataagctgcggtctatcggggactcggtagtgatcggcgataaggtagtgcttaacccagtcaacgctggccagcccctccatgcctcctcacaccagctagtagacaatccaggatgtaacgaggtgaattcagtgaactgtaatacatcttggaagatcgtgctgttcatgaaatggagcgataacaaagacgacattctgaagggcggcgacgtcgtcagactgttccacgccgaacaagaaaaattcctcacttgcgacgaacacagaaagaagcagcatgtgttccttcgcacaaccggtcgccaatcagccaccagtgccacttccagcaaggcactatgggaagtcgaagtcgtgcagcatgacccctgtagaggcggcgctgggtattggaattctctcttcagattcaaacatctagctaccggacattacctggccgcagaagtggatcctgatttcgaggaagaatgtctcgaattccagccgtccgttgacccggaccaggatgcttccagaagccggttacggaatgcccaggagaagatggtctattctctggttagtgtgcccgagggtaacgacatttcttcgatttttgagctcgaccctaccacactgcgaggtggagactccctggtgccccggaatagttatgttcggctcaggcatctgtgtaccaacacctgggtacatagtactaacattcctatagataaggaggaggagaagcctgtcatgctgaaaatcgggacttcacccgttaaggaagataaagaggcattcgccatcgttcctgtttcccccgccgaggtgagagatctggacttcgcaaacgacgcgagcaaggtgctgggctcgattgcgggaaaacttgagaaggggacgatcacccagaatgaacgccgtagcgtgacaaaactgctggaagatctggtgtacttcgttaccggcgggactaattccggacaggatgtcctagaagtggtgttctcgaaaccaaatagggaaaggcagaaacttatgcgcgagcagaacatcctcaaacagatcttcaaattactgcaagctccttttaccgattgtggcgatggtccaatgttgaggttggaggaactcggtgaccagagacatgcacctttcagacatatttgtcgcctgtgttaccgtgtattgcgacatagccagcaggactatagaaagaaccaggaatacatcgctaagcagtttgggttcatgcagaagcagattggttacgatgtgctggcggaagatacaatcactgctctgcttcacaataatcgcaagcttttagagaaacacatcacagccgctgagatcgatacttttgtttcccttgtccggaaaaacagagaaccccggttcctggactatctcagtgacctttgcgtgtccatgaataagtctatacctgtcacacaggaactgatctgtaaggctgtattaaaccctacaaacgccgacattcttatcgagaccaagcttgtactgagccgttttgaatttgagggggtaagcagcaccggtgaaaatgcacttgaagctggcgaggatgaggaggaggtctggctgttttggcgcgatagtaacaaagaaattcgctccaaaagcgtgagggagctggcccaggatgctaaagagggccagaaggaggaccgcgacgtcctgtcgtactaccggtaccaactgaatctgtttgccaggatgtgtctggaccgacagtaccttgccataaacgaaatttccggacagttagatgtggaccttatcctgagatgtatgtccgacgagaacctgccctacgacctgagggcatcattctgtcgcttgatgctgcacatgcatgttgatagggatcctcaggagcaagtgaccccagttaagtatgcccggctgtggtctgaaattccctccgagatagccatcgacgattatgattcttcaggtgcttcaaaagacgagataaaagagcgttttgctcagacaatggaattcgtcgaagaatatctgcgtgatgtcgtttgtcagcgcttcccttttagcgataaagagaagaacaagctgacttttgaggtcgttaatctcgctcgcaatctgatttactttgggttctataactttagcgacctgctcaggcttaccaaaattctgctcgccatcttagactgtgtccacgtgacaacgatttttccaattagcaagatggctaagggcgaggagaataaaggttctaatgtgatgaggtctatacatggagtaggcgagctgatgacccaggtagtgttacgaggaggcggctttttgccaatgactcctatggccgctgcccctgaggggaacgttaaacaagctgaacccgaaaaggaagatataatggtcatggacaccaaactgaagatcatagaaattctgcagttcatccttaacgtacggctggattatagaatcagctgcctactttgtatctttaaacgcgagtttgacgagtctaattctcagaccagtgaaactagttccggtaacagtagccaggagggtcccagtaatgttcccggcgctctcgacttcgagcatatcgaggagcaggccgaaggcatctttggggggcgcaaagagaacactccgcttgatctggatgaccatggcgggagaactttcctgcgtgttctcctccatttgactatgcacgactatcctcctttggtttccggtgccctccagctgctatttcgtcatttctcccagcggcaggaagtgctgcaagcctttaagcaagtacagctgttggtaaccagccaggacgtggataactacaagcagattaagcaggatctggatcagttaagatcgatagtggaaaagagcgagttgtgggtttacaagggccagggacctgatgaaaccatggacggcgcaagcggtgaaaatgagcataaaaagaccgaggaaggcaataataagccacagaaacacgaaagcacgtcctcttataactatcgtgtcgtgaaagagattctgatacgcttgagcaaactgtgcgtgcaggaatctgcctccgtgcgcaaaagtaggaagcagcagcagaggctgctgcgaaacatgggtgctcacgctgtggtcctggagctgttacaaatcccatatgagaaggcagaggacaccaagatgcaggagattatgcggcttgcccatgaatttctccagaatttttgtgctgggaaccaacagaatcaagcgcttctacataagcatatcaacctatttctgaacccggggattctcgaagcagttaccatgcagcacattttcatgaataatttccagctgtgttctgagatcaatgaacgggtagtacaacatttcgtgcattgcattgaaacccacggcagaaacgtgcaatatatcaaattcctgcagacaatagtgaaggctgaagggaaattcattaagaagtgccaggatatggttatggccgagctcgtgaatagtggggaggacgtgcttgtgttttataatgacagagcatcatttcagacacttatacagatgatgaggagcgaaagagacagaatggatgagaacagcccgctcatgtaccacatccatcttgttgagttgctcgcagtttgtacggagggcaagaatgtttatactgagataaaatgcaactcattgttgcccctggatgacattgtcagggtcgtgacacatgaggactgtatcccggaggtgaagattgcttacatcaattttctgaaccattgctatgtcgacaccgaggttgaaatgaaagagatctacacttccaaccatatgtggaaactgttcgaaaatttcttggtggatatatgcagagcttgcaataacacaagcgataggaaacatgccgactctatattggaaaaatatgttaccgaaattgtaatgtcgatcgtgactacttttttttcatctccatttagcgatcagtctacaaccctgcagacaaggcagcctgtgttcgtgcagctactccaaggagttttccgggtctaccattgcaactggctcatgccctcgcagaaggccagtgttgaaagctgcattagagttctgagcgatgtggccaaatcccgggccatcgcaataccggtggatctcgattctcaggtgaataatctgtttctgaagagccattcaatcgtgcagaagactgcgatgaattggcgcctcagcgctaggaatgctgcgcgcagagatagtgtgttggccgcgtccagggactacaggaacattatagagcggttgcaggatatagtctcagccctggaggaccgcctgagaccacttgtacaggcagagttaagcgtgcttgttgatgtcctgcaccgccccgagctgttgttcccagaaaatactgatgcccgcagaaaatgtgagagcggcggatttatctgcaaattaatcaaacatacaaagcagctccttgaagaaaatgaggaaaaactttgtataaaggtgttacagacactcagggagatgatgacaaaggataggggctatggagagaagggcgaggccctccgacaggtgctcgttaacagatactacggtaatgtacgaccctccggccggcgggagagtttaacttcctttggcaacggcccgcttagtgccggtggccctggtaagcctggcggtggaggggggggctccggatccagctctatgagtaggggcgagatgtctttggcagaagtccaatgccacctagacaaggaaggcgcatctaacttagtgattgatctcatcatgaacgccagtagcgatagggtcttccacgaatcaatcctcctcgccatcgccttactggaagggggcaacaccacaattcagcattctttcttttgtcggctgaccgaggataagaagtccgaaaagttttttaaggtgttctacgacagaatgaaggtggcccagcaagagattaaggcgactgtgaccgtgaacacctctgaccttggaaataaaaagaaagatgacgaggtagatcgggacgcaccttctcgcaagaaagccaaagagcccaccacgcagataacagaggaggtgagggatcagcttctggaagcctctgcagctacccggaaggctttcaccactttccgcagggaggcagaccctgacgaccattaccagcctggtgaaggtacccaagcaacagccgacaaagcaaaggatgatttggagatgtccgcggtgatcactatcatgcaacctatcttgagatttctacagctgttgtgcgaaaaccacaatcgggacttgcaaaactttctacgatgccagaacaacaagacaaactacaacctcgtctgcgaaaccttgcagttcctagactgtatatgcggaagtactaccggtggcctgggcttgttgggactctacataaacgaaaaaaatgtagcattgatcaatcagacactggagtccctcactgagtactgccagggcccctgccacgagaaccagaactgtatagccacacatgagagcaatggaatcgatatcataacagcccttattcttaacgatatcaacccactcgggaagaagaggatggatctggtgctcgagctcaaaaataacgctagtaagcttctgctagcaatcatggagtctcggcacgacagcgagaacgcagagaggatactgtacaacatgagacccaaggagctagtcgaggtaattaaaaaggcctacatgcaaggggaagtggaattcgaggatggagaaaatggtgaagacggggcagcctcccccaggaatgtggggcacaacatttacatcctggcccaccagttagcaaggcataataaagagctgcaatctatgctcaaacctggcggtcaggtggacggggacgaagcacttgaattttacgcgaagcacaccgctcaaattgagatagtcaggctggaccggaccatggaacagatcgtgtttccagtgcccagtatatgcgaatttctgactaaggagagcaagctccggatttactatacaactgagcgtgatgagcagggctccaagattaacgacttctttctccggtccgaggacctgttcaatgagatgaactggcagaagaagctcagggcacaacctgttctttattggtgtgccaggaacatgagcttctggtctagcatttcgttcaaccttgccgtcctcatgaatttgctggtggcattcttttatccctttaagggtgtgcgcggaggaacccttgagccacactggtcggggttgctttggactgcaatgctgattagtctggcaattgtgattgccttgccgaagccacacggcattcgggctctgatcgcatcgactattcttcgactcattttcagcgttggattgcagccgaccctgtttctgctgggggcattcaacgtgtgcaataagataatctttctgatgtccttcgtcgggaactgcggcacctttacaaggggttacagggctatggttttggacgtagaatttctctatcatttgctttacttagttatttgtgccatgggcctctttgtacacgagtttttctatagtctgcttctatttgacctggtatatcgtgaagaaacactccttaacgtgattaagtcagtgacaaggaacggccggagcatcatcttgacagccgttctcgccttgattctggtttatctgttcagtatcgttggctatctcttcttcaaagacgactttattctggaagtagaccgactccccaacgaaaccgcagtgcctgaaaccggagagtcccttgcttccgaatttcttttttctgatgtgtgtcgggtggagtcaggggaaaattgtagtagccccgccccaagggaagagctggtgcccgcggaggagactgagcaggataaagaacacacatgtgaaacacttttgatgtgcattgttacagtactatcacacggccttcggagtggaggaggcgtcggcgacgtgcttcgcaagccctctaaagaagagccgctgtttgcagcccgggttatttacgatttactgttcttcttcatggtgataataatcgttctcaatcttatttttggtgtcattatcgataccttcgcagatctgcgctctgaaaagcagaaaaaagaagaaatcctgaagacgacatgtttcatctgcggcctagaacgagataagtttgacaataagactgtaacttttgaggaacatataaaagaggaacataatatgtggcattatctatgttttattgtattggtcaaggtgaaggactcaaccgaatacacgggccctgagagttacgttgcagaaatgatcaaggaacgcaacctagactggtttcccaggatgagagctatgtctctggtgtcctcagatagcgaaggcgagcaaaacgagctgcggaacctgcaggagaagctggagagcaccatgaaactggtcaccaaccttagcggtcagctgtctgagttgaaagaccagatgaccgaacagaggaagcagaagcaacgcatcggtctcttgggtcaccctccccatatgaacgtgaatccccagcaacctgcgtag

SEQ ID NO: 40269 - DNA, 9858 bp, Artificial Sequence
  derived and/or modified sequence
agtaaccatgtggatgtgctgctgaagcgtttcctcaagctcgctggggtgggaggagaggaggaggaggaggtggtggtggaggaggaggcagggggtggagagagagaaagcgcacgccgagaggaggtgtgggtgttccgcttccatcctaacggaacgagctccctcttcgcggacatgggattacccagcggctgctaacccctctcctcgccctgctcccccaaaccggcgtggctccccgggcaccaaggagctgactacagaggagcaggatttgcacccctcgctgggcttgctttggcaacagagtgcctgacccaggtcaggattttcaagaaagacatgtctgacaaaatgtctagcttcctacatattggagacatttgttctctgtacgcggagggatcgacaaatggatttattagcaccttgggcctggttgatgatcgttgtgttgtacagccagaaaccggggaccttaacaatccacctaagaaattcagagactgcctctttaagctatgtcccatgaaccgctactctgcccaaaagcagttctggaaagccgctaagcctggggccaacagcaccacagacgcagtgctactcaacaaactgcaccacgctgcagacttggaaaagaagcagaatgagacagaaaacaggaaattgctggggaccgtaatccagtatggcaatgtgatccagctcctgcatttgaaaagtaataaatacctaacagtgaataagaggcttcctgctctgttggagaagaatgccatgagagtcacattggacgaggctggaaatgaagggtcctggttttatattcagccattctacaagctgcgatccattggagacagcgtggtcataggtgacaaggtggttctgaaccccgtcaatgctggtcagcccctacatgctagcagccatcaactggtagataacccaggctgcaatgaggtcaattccgtcaactgcaatacaagctggaaaatagtccttttcatgaaatggagtgataacaaagacgacatattaaaggggggtgacgtggtgaggctgtttcatgctgagcaggagaagtttctcacctgtgacgaacacaggaagaagcagcacgtcttcctgagaaccacgggccggcagtcggccacatctgccaccagttcaaaagccctgtgggaggtggaggtggtccagcatgacccatgtcggggcggagcagggtattggaacagccttttccgtttcaagcatctggccacggggcattacttggcagcagaggtagaccctgactttgaggaagaatgcctggagtttcagccctcagtggaccctgatcaggacgcctctcgaagtaggttgcggaatgcccaagaaaagatggtatactccctggtctctgtgcctgaaggcaatgacatctcctccattttcgagctagatcccaccactctgcgtggaggtgacagccttgtcccaaggaactcttatgttcggctcagacacctatgtactaatacctgggttcacagcacaaatattcctattgacaaggaagaagaaaagcccgtgatgctgaaaattggcacctctcctgtgaaggaggataaggaagcatttgccatagttccggtttctcctgctgaagttcgggacctggactttgccaatgatgccagcaaggtgctgggctccattgctgggaagctagagaagggcaccatcacccagaatgaaaggaggtctgtaaccaagctgctagaagatttggtttacttcgtcactggtggaactaattctggtcaagatgttctcgaagttgtcttctccaagcccaacagagaacggcagaaactgatgagagaacagaatattctcaagcagatcttcaagttgttacaagccccattcacagactgcggtgatggcccaatgcttcggctggaagagctcggggaccagcggcacgctcctttcagacacatctgccggctctgctacagggtgctgagacactcgcagcaagactacaggaagaaccaggagtatatagccaagcagtttggcttcatgcagaagcagattggctatgatgtgttggctgaagacactatcactgccctgctccacaataatcggaaactcctggaaaaacacattaccgcggcagagattgacacatttgtcagcctggtgcgaaagaacagggagcccagattcttagattacctctccgacctctgtgtctccatgaacaaatcaattccagtgacccaggaactgatatgtaaagctgtgctgaaccccaccaacgctgacatcctgattgagaccaagttggttctttctcgttttgaatttgaaggtgtctcttccactggagagaatgctctggaggcaggagaagacgaggaagaggtgtggctgttttggagggacagcaacaaagagattcgcagcaagagtgtgagggaattggctcaggatgctaaagaagggcagaaggaggaccgagacgttctcagctactacagatatcagctgaacctctttgcgaggatgtgtctggaccgccaatacctggccatcaacgaaatctcaggccagctggatgtcgatctcattctccgctgcatgtctgacgagaacctgccctatgacctcagggcgtccttctgccgcctcatgcttcacatgcatgtggaccgagatccccaggaacaagtcacccccgtgaaatatgcccgcctctggtcggagattccctcggagatcgccattgacgactatgatagtagtggagcttccaaagatgaaattaaggagagatttgctcagaccatggagtttgtggaggagtatttaagagatgtggtttgtcagaggttccctttctctgataaagagaagaataagcttacgtttgaggttgtaaatttagctaggaatctcatatactttggtttctacaacttctctgaccttctacgattaactaagatccttctggccatattggactgtgtacatgtgacaacaatcttccccattagcaagatggcgaaaggagaagagaataaaggcagtaacgtgatgagatctattcatggcgtgggagagctgatgacccaggtggtgctccggggaggaggctttttgcccatgactcccatggctgctgcccctgaaggcaatgtgaagcaggcagagcctgagaaggaggacatcatggtcatggacaccaagctgaagatcattgagatactccagtttattttgaatgtgaggttggattataggatctcctgcctcctgtgtatatttaagcgagagtttgatgaaagcaattcccagacttcagaaacatcctccggaaacagcagccaagaagggccaagtaatgtaccaggtgctcttgactttgaacacattgaagaacaagcagaaggcatctttggaggaagtgaggagaacaccccactggacttggatgaccacggcggcagaacctttctccgtgtcctgctccacttgacgatgcatgactacccacccctggtgtcaggggccctgcagctcctcttccggcacttcagccagaggcaggaggtgctccaggccttcaaacaggttcaactgctggttaccagccaagatgtggacaactacaaacagatcaaacaagacttggatcaactgaggtccatcgtggaaaagtcagagctttgggtgtacaaagggcagggccccgatgagactatggatggtgcatctggagaaaatgaacataagaaaacggaggagggaaataacaagccacaaaagcatgaaagcaccagcagctacaactacagagtggtcaaagagattttgattcggcttagcaaactctgtgttcaagagagtgcctcagtgagaaagagcaggaagcagcaacagcgtctgctccggaacatgggcgcgcacgccgtggtgctggagctgctgcagattccctatgagaaggccgaagataccaagatgcaagagataatgaggttggctcatgaatttttgcagaatttctgcgcaggcaaccagcagaatcaagctttgctacataaacacataaacctgtttctcaacccagggatcctggaggcagtaaccatgcagcacatcttcatgaacaatttccagctttgcagtgagatcaacgagagagttgttcagcacttcgttcactgcatagagactcacggtcggaatgtccagtatataaagttcttacagacaattgtcaaggcagaagggaaatttattaaaaaatgccaagacatggttatggccgagctggtcaattcgggagaggatgtcctcgtgttctacaacgacagagcctctttccagactctgatccagatgatgcggtcagaacgggatcggatggatgagaacagccctctcatgtaccacatccacttggtcgagctcctggctgtgtgcacggagggtaagaatgtctacacagagatcaagtgcaactccctgctcccgctggatgacatcgttcgcgtggtgacccacgaggactgcatccctgaggttaaaattgcatacattaacttcctgaatcactgctatgtggatacagaggtggaaatgaaggagatttataccagcaatcacatgtggaaattgtttgagaatttccttgtagacatctgcagggcctgtaacaacactagtgacaggaaacatgcagactcgattttggagaagtatgtcaccgaaatcgtcatgagtattgttactactttcttcagctctcccttctcagaccagagtacgactttgcagactcgccagcctgtctttgtgcaactgctgcaaggcgtgttcagggtttaccactgcaactggttaatgccaagccaaaaagcctccgtggagagctgtattcgggtgctgtctgatgtagccaagagccgggccattgccattcccgtggacctggacagccaagtcaacaacctctttctcaagtcccacagcattgtgcagaaaacagccatgaactggcggctctcagcccgcaatgccgcacgcagggactctgttctggcagcttccagagactaccggaatatcattgagagattgcaggacatcgtctccgcgctggaggaccgtctcaggcccctggtgcaggcagagttatctgtgctcgtggatgttctccacagacccgagctgcttttcccagagaacacagacgccagaaggaaatgtgaaagtggcggtttcatttgcaagttaataaagcatacaaaacagctgctagaagaaaatgaagagaagctctgcattaaggtcctacagaccctgagggaaatgatgaccaaagatagaggctatggagaaaagggtgaggcgctcaggcaagttctggtcaaccgttactatggaaacgtcagaccttcgggacgaagagagagccttaccagctttggcaatggcccactgtcagcaggaggacccggcaagcccgggggaggagggggaggttccggatccagctctatgagcaggggtgagatgagtctggccgaggttcagtgtcaccttgacaaggagggggcttccaatctagttatcgacctcatcatgaacgcatccagtgaccgagtgttccatgaaagcattctcctggccattgcccttctggaaggaggcaacaccaccatccagcactcctttttctgtcgcttgacagaagataagaagtcagagaaattctttaaggtgttttatgaccggatgaaggtggcccagcaagaaatcaaagcaacagtgacagtgaacaccagtgacttgggaaataaaaagaaagacgatgaggtagacagggatgccccatcacggaaaaaagctaaagagcccacaacacagataacagaagaggtccgggatcagctcctggaggcctccgctgccaccaggaaagccttcaccactttcaggagggaggctgatcccgacgaccactaccagcctggagagggcacccaggccactgccgacaaggccaaggacgacctggagatgagcgcggtcatcaccatcatgcagcccatcctccgcttccttcagctcctgtgtgaaaaccacaaccgagacctgcagaacttcctccgttgccaaaataacaagaccaactacaatttggtatgtgagaccctgcagtttctggactgtatttgtggaagcacaactggaggccttggtcttctgggcttgtatataaatgaaaagaatgtagcgcttatcaaccaaaccctggaaagtctgaccgaatactgtcaaggaccttgccatgagaaccagaactgcatagccacccatgaatccaatggcattgacatcatcacagccctgatcctcaatgatatcaatcctttgggaaagaagaggatggaccttgtgttagaactgaagaacaatgcctcgaagttgctcctggccatcatggaaagcaggcacgacagtgaaaacgcagagaggatactttataacatgaggcccaaggaactggtggaagtgatcaagaaagcctacatgcaaggtgaagtggaatttgaggatggagaaaacggtgaggatggggcggcgtcccccaggaacgtggggcacaacatctacatattagcccatcagttggctcggcataacaaagaacttcagagcatgctgaaacctggtggccaagtggacggagatgaagccctggagttttatgccaagcacacggcgcagatagagattgtcagattagaccgaacaatggaacagatagtctttcccgtgcccagcatatgtgaattcctaaccaaggagtcaaaactacgaatttactatactacagagagagacgaacaaggcagcaaaatcaatgatttctttctgcggtctgaagacctcttcaatgaaatgaattggcagaagaaactgagagcccagcccgtgttgtactggtgtgcccgcaacatgtctttctggagcagcatttcgtttaacctggccgtcctgatgaacctgctggtggcgtttttctacccgtttaagggagtccgaggaggaaccctggagccccactggtcgggactcctgtggacagccatgctcatctctctggccatcgtcattgccctccccaagccccatggcatccgggccttaattgcctccacaattctacgactgatattttcagtcgggttacaacccacgttgtttcttctgggcgctttcaatgtatgcaataaaatcatctttctaatgagctttgtgggcaactgtgggacattcacaagaggctaccgagccatggttctggatgttgagttcctctatcatttgttgtatctggtgatctgtgccatggggctctttgtccatgaattcttctacagtctgctgctttttgatttagtgtacagagaagagactttgcttaatgtcattaaaagtgtcactcgcaatggacggtccatcatcctgacagcagttctggctctgatcctcgtttacctgttctcaatagtgggctatcttttcttcaaggatgactttatcttggaagtagataggctgcccaatgaaacagctgttccagaaaccggcgagagtttggcaagcgagttcctgttctccgatgtgtgtagggtggagagtggggagaactgctcctctcctgcacccagagaagagctggtccctgcagaagagacggaacaggataaagagcacacatgtgagacgctgctgatgtgcattgtcactgtgctgagtcacgggctgcggagcgggggtggagtaggagatgtactcaggaagccgtccaaagaggaacccctgtttgctgctagagttatttatgacctcttgttcttcttcatggtcatcatcattgttcttaacctgatttttggggttatcattgacacttttgctgacctgaggagtgagaagcagaagaaggaagagatcttgaagaccacgtgctttatctgtggcttggaaagagacaagtttgacaacaagactgtcacctttgaagagcacatcaaggaagaacacaacatgtggcactatctgtgcttcatcgtcctggtgaaagtaaaggactccaccgaatatactgggcctgagagttacgtggcagaaatgatcaaggaaagaaaccttgactggttccccaggatgagagccatgtcattggtcagcagtgattctgaaggagaacagaatgagctgagaaacctgcaggagaagctggagtccaccatgaaacttgtcacgaacctttctggccagctgtcggaattaaaggatcagatgacagaacaaaggaagcagaaacaaagaattggtcttctaggacatcctcctcacatgaatgtcaacccacaacaaccagcataagcaaatgaaagaaaggaattgtatttaccttttataattattattagtgtgggtatggctaatgagttctgattcacccacgaaggttacatttatgctgaatacatttgtaaatactcagttttatactgtatgtatatgattgctactctaaaggtttggatatatgtattgtaattagaattgttggcatgatgacatttcatttgtgccaaaaatattaaaaatgccttttttggaaggactaacagaaagcacctgatttgcacttgaaccagattatagatttaaaagtatatgacatgtattttgtatttaaaactagaatagccagtatttatgttttttataaaactgtgcaatacgaattatgcaatcacaatacatttgtagctcccgagtgtcctaaagggagtgcacttctttgaagctggtgtgttaatactatgtaataaatggttaactttcaaatgatgctgctgccaaaattatattaatagtgagtttcaggcccctgggcattttgtaccatgtaattatcctctggtgatgctgtttctcgttagtggcagtagtgcctccgtctcctagtgataatgctccaagtctatgaactgttaaatcagcattcattttaagaaaagcaactttagtttcaaagatacttttaagcttctaaattgatcatttaaactatttctttaaataagagagccaaattagaggctcatactttagcttgtgaagaagataatgaattttttaaagggaactttctatgcaatgttcaggataaatgcatactgctggccaatcagtgtcatctcctgggtaaattttgatgtcgcattataaagacatgcataattgatggtttctagattatctagtccaaacaatagagtttattttttcttcatctgaaccaacatgctacagtagctaagaagtattaaaactatatacatccatataaagatgaaatatgaactatctcattagaagtcatagttgaccacagacatgttattcttctgaaagagccacattttggttttatttcttgtcacatgatttcttttcttgatggatgaaaaatatgaaaggaaacttttatatctgttgcctagttttgtacatggatctcattttacaagagaatctctctgcaaaaaaaaaaaaaacagtttaaaaatgcattgaaagcagagttctgaaatgagtaaagtttgtaaatgcatatataaaaatatttaataaatgatgcagaatatacagtgactggttggtggctttcatttggcatttgtgacttaactgctattccatttatgtactttctttaggatcagtttgaagtacagtcggtttgattac

SEQ ID NO: 40270 - DNA, 10098 bp, Artificial Sequence
  derived and/or modified sequence
gcagtaaccatgtggatgtgctgctgaagcgtttcctcaagctcgctggggtgggaggagaggaggaggaggaggtggtggtggaggaggaggcagggggtggagagagagaaagcgcacgccgagaggaggtgtgggtgttccgcttccatcctaacggaacgagctccctcttcgcggacatgggattacccagcggctgctaacccctctcctcgccctgctcccccaaaccggcgtggctccccgggcaccaaggagctgactacagaggagcaggatttgcacccctcgctgggcttgctttggcaacagagtgcctgacccaggtcaggattttcaagaaagacatgtctgacaaaatgtctagcttcctacatattggagacatttgttctctgtacgcggagggatcgacaaatggatttattagcaccttgggcctggttgatgatcgttgtgttgtacagccagaaaccggggaccttaacaatccacctaagaaattcagagactgcctctttaagctatgtcccatgaaccgctactctgcccaaaagcagttctggaaagccgctaagcctggggccaacagcaccacagacgcagtgctactcaacaaactgcaccacgctgcagacttggaaaagaagcagaatgagacagaaaacaggaaattgctggggaccgtaatccagtatggcaatgtgatccagctcctgcatttgaaaagtaataaatacctaacagtgaataagaggcttcctgctctgttggagaagaatgccatgagagtcacattggacgaggctggaaatgaagggtcctggttttatattcagccattctacaagctgcgatccattggagacagcgtggtcataggtgacaaggtggttctgaaccccgtcaatgctggtcagcccctacatgctagcagccatcaactggtagataacccaggctgcaatgaggtcaattccgtcaactgcaatacaagctggaaaatagtccttttcatgaaatggagtgataacaaagacgacatattaaaggggggtgacgtggtgaggctgtttcatgctgagcaggagaagtttctcacctgtgacgaacacaggaagaagcagcacgtcttcctgagaaccacgggccggcagtcggccacatctgccaccagttcaaaagccctgtgggaggtggaggtggtccagcatgacccatgtcggggcggagcagggtattggaacagccttttccgtttcaagcatctggccacggggcattacttggcagcagaggtagaccctgactttgaggaagaatgcctggagtttcagccctcagtggaccctgatcaggacgcctctcgaagtaggttgcggaatgcccaagaaaagatggtatactccctggtctctgtgcctgaaggcaatgacatctcctccattttcgagctagatcccaccactctgcgtggaggtgacagccttgtcccaaggaactcttatgttcggctcagacacctatgtactaatacctgggttcacagcacaaatattcctattgacaaggaagaagaaaagcccgtgatgctgaaaattggcacctctcctgtgaaggaggataaggaagcatttgccatagttccggtttctcctgctgaagttcgggacctggactttgccaatgatgccagcaaggtgctgggctccattgctgggaagctagagaagggcaccatcacccagaatgaaaggaggtctgtaaccaagctgctagaagatttggtttacttcgtcactggtggaactaattctggtcaagatgttctcgaagttgtcttctccaagcccaacagagaacggcagaaactgatgagagaacagaatattctcaagcagatcttcaagttgttacaagccccattcacagactgcggtgatggcccaatgcttcggctggaagagctcggggaccagcggcacgctcctttcagacacatctgccggctctgctacagggtgctgagacactcgcagcaagactacaggaagaaccaggagtatatagccaagcagtttggcttcatgcagaagcagattggctatgatgtgttggctgaagacactatcactgccctgctccacaataatcggaaactcctggaaaaacacattaccgcggcagagattgacacatttgtcagcctggtgcgaaagaacagggagcccagattcttagattacctctccgacctctgtgtctccatgaacaaatcaattccagtgacccaggaactgatatgtaaagctgtgctgaaccccaccaacgctgacatcctgattgagaccaagttggttctttctcgttttgaatttgaaggtgtctcttccactggagagaatgctctggaggcaggagaagacgaggaagaggtgtggctgttttggagggacagcaacaaagagattcgcagcaagagtgtgagggaattggctcaggatgctaaagaagggcagaaggaggaccgagacgttctcagctactacagatatcagctgaacctctttgcgaggatgtgtctggaccgccaatacctggccatcaacgaaatctcaggccagctggatgtcgatctcattctccgctgcatgtctgacgagaacctgccctatgacctcagggcgtccttctgccgcctcatgcttcacatgcatgtggaccgagatccccaggaacaagtcacccccgtgaaatatgcccgcctctggtcggagattccctcggagatcgccattgacgactatgatagtagtggagcttccaaagatgaaattaaggagagatttgctcagaccatggagtttgtggaggagtatttaagagatgtggtttgtcagaggttccctttctctgataaagagaagaataagcttacgtttgaggttgtaaatttagctaggaatctcatatactttggtttctacaacttctctgaccttctacgattaactaagatccttctggccatattggactgtgtacatgtgacaacaatcttccccattagcaagatggcgaaaggagaagagaataaaggcagtaacgtgatgagatctattcatggcgtgggagagctgatgacccaggtggtgctccggggaggaggctttttgcccatgactcccatggctgctgcccctgaaggcaatgtgaagcaggcagagcctgagaaggaggacatcatggtcatggacaccaagctgaagatcattgagatactccagtttattttgaatgtgaggttggattataggatctcctgcctcctgtgtatatttaagcgagagtttgatgaaagcaattcccagacttcagaaacatcctccggaaacagcagccaagaagggccaagtaatgtaccaggtgctcttgactttgaacacattgaagaacaagcagaaggcatctttggaggaaggaaagagaacaccccactggacttggatgaccacggcggcagaacctttctccgtgtcctgctccacttgacgatgcatgactacccacccctggtgtcaggggccctgcagctcctcttccggcacttcagccagaggcaggaggtgctccaggccttcaaacaggttcaactgctggttaccagccaagatgtggacaactacaaacagatcaaacaagacttggatcaactgaggtccatcgtggaaaagtcagagctttgggtgtacaaagggcagggccccgatgagactatggatggtgcatctggagaaaatgaacataagaaaacggaggagggaaataacaagccacaaaagcatgaaagcaccagcagctacaactacagagtggtcaaagagattttgattcggcttagcaaactctgtgttcaagagagtgcctcagtgagaaagagcaggaagcagcaacagcgtctgctccggaacatgggcgcgcacgccgtggtgctggagctgctgcagattccctatgagaaggccgaagataccaagatgcaagagataatgaggttggctcatgaatttttgcagaatttctgcgcaggcaaccagcagaatcaagctttgctacataaacacataaacctgtttctcaacccagggatcctggaggcagtaaccatgcagcacatcttcatgaacaatttccagctttgcagtgagatcaacgagagagttgttcagcacttcgttcactgcatagagactcacggtcggaatgtccagtatataaagttcttacagacaattgtcaaggcagaagggaaatttattaaaaaatgccaagacatggttatggccgagctggtcaattcgggagaggatgtcctcgtgttctacaacgacagagcctctttccagactctgatccagatgatgcggtcagaacgggatcggatggatgagaacagccctctcatgtaccacatccacttggtcgagctcctggctgtgtgcacggagggtaagaatgtctacacagagatcaagtgcaactccctgctcccgctggatgacatcgttcgcgtggtgacccacgaggactgcatccctgaggttaaaattgcatacattaacttcctgaatcactgctatgtggatacagaggtggaaatgaaggagatttataccagcaatcacatgtggaaattgtttgagaatttccttgtagacatctgcagggcctgtaacaacactagtgacaggaaacatgcagactcgattttggagaagtatgtcaccgaaatcgtcatgagtattgttactactttcttcagctctcccttctcagaccagagtacgactttgcagactcgccagcctgtctttgtgcaactgctgcaaggcgtgttcagggtttaccactgcaactggttaatgccaagccaaaaagcctccgtggagagctgtattcgggtgctgtctgatgtagccaagagccgggccattgccattcccgtggacctggacagccaagtcaacaacctctttctcaagtcccacagcattgtgcagaaaacagccatgaactggcggctctcagcccgcaatgccgcacgcagggactctgttctggcagcttccagagactaccggaatatcattgagagattgcaggacatcgtctccgcgctggaggaccgtctcaggcccctggtgcaggcagagttatctgtgctcgtggatgttctccacagacccgagctgcttttcccagagaacacagacgccagaaggaaatgtgaaagtggcggtttcatttgcaagttaataaagcatacaaaacagctgctagaagaaaatgaagagaagctctgcattaaggtcctacagaccctgagggaaatgatgaccaaagatagaggctatggagaaaagggtgaggcgctcaggcaagttctggtcaaccgttactatggaaacgtcagaccttcgggacgaagagagagccttaccagctttggcaatggcccactgtcagcaggaggacccggcaagcccgggggaggagggggaggttccggatccagctctatgagcaggggtgagatgagtctggccgaggttcagtgtcaccttgacaaggagggggcttccaatctagttatcgacctcatcatgaacgcatccagtgaccgagtgttccatgaaagcattctcctggccattgcccttctggaaggaggcaacaccaccatccagcactcctttttctgtcgcttgacagaagataagaagtcagagaaattctttaaggtgttttatgaccggatgaaggtggcccagcaagaaatcaaagcaacagtgacagtgaacaccagtgacttgggaaataaaaagaaagacgatgaggtagacagggatgccccatcacggaaaaaagctaaagagcccacaacacagataacagaagaggtccgggatcagctcctggaggcctccgctgccaccaggaaagccttcaccactttcaggagggaggctgatcccgacgaccactaccagcctggagagggcacccaggccactgccgacaaggccaaggacgacctggagatgagcgcggtcatcaccatcatgcagcccatcctccgcttccttcagctcctgtgtgaaaaccacaaccgagacctgcagaacttcctccgttgccaaaataacaagaccaactacaatttggtatgtgagaccctgcagtttctggactgtatttgtggaagcacaactggaggccttggtcttctgggcttgtatataaatgaaaagaatgtagcgcttatcaaccaaaccctggaaagtctgaccgaatactgtcaaggaccttgccatgagaaccagaactgcatagccacccatgaatccaatggcattgacatcatcacagccctgatcctcaatgatatcaatcctttgggaaagaagaggatggaccttgtgttagaactgaagaacaatgcctcgaagttgctcctggccatcatggaaagcaggcacgacagtgaaaacgcagagaggatactttataacatgaggcccaaggaactggtggaagtgatcaagaaagcctacatgcaaggtgaagtggaatttgaggatggagaaaacggtgaggatggggcggcgtcccccaggaacgtggggcacaacatctacatattagcccatcagttggctcggcataacaaagaacttcagagcatgctgaaacctggtggccaagtggacggagatgaagccctggagttttatgccaagcacacggcgcagatagagattgtcagattagaccgaacaatggaacagatagtctttcccgtgcccagcatatgtgaattcctaaccaaggagtcaaaactacgaatttactatactacagagagagacgaacaaggcagcaaaatcaatgatttctttctgcggtctgaagacctcttcaatgaaatgaattggcagaagaaactgagagcccagcccgtgttgtactggtgtgcccgcaacatgtctttctggagcagcatttcgtttaacctggccgtcctgatgaacctgctggtggcgtttttctacccgtttaagggagtccgaggaggaaccctggagccccactggtcgggactcctgtggacagccatgctcatctctctggccatcgtcattgccctccccaagccccatggcatccgggccttaattgcctccacaattctacgactgatattttcagtcgggttacaacccacgttgtttcttctgggcgctttcaatgtatgcaataaaatcatctttctaatgagctttgtgggcaactgtgggacattcacaagaggctaccgagccatggttctggatgttgagttcctctatcatttgttgtatctggtgatctgtgccatggggctctttgtccatgaattcttctacagtctgctgctttttgatttagtgtacagagaagagactttgcttaatgtcattaaaagtgtcactcgcaatggacggtccatcatcctgacagcagttctggctctgatcctcgtttacctgttctcaatagtgggctatcttttcttcaaggatgactttatcttggaagtagataggctgcccaatgaaacagctgttccagaaaccggcgagagtttggcaagcgagttcctgttctccgatgtgtgtagggtggagagtggggagaactgctcctctcctgcacccagagaagagctggtccctgcagaagagacggaacaggataaagagcacacatgtgagacgctgctgatgtgcattgtcactgtgctgagtcacgggctgcggagcgggggtggagtaggagatgtactcaggaagccgtccaaagaggaacccctgtttgctgctagagttatttatgacctcttgttcttcttcatggtcatcatcattgttcttaacctgatttttggggttatcattgacacttttgctgacctgaggagtgagaagcagaagaaggaagagatcttgaagaccacgtgctttatctgtggcttggaaagagacaagtttgacaacaagactgtcacctttgaagagcacatcaaggaagaacacaacatgtggcactatctgtgcttcatcgtcctggtgaaagtaaaggactccaccgaatatactgggcctgagagttacgtggcagaaatgatcaaggaaagaaaccttgactggttccccaggatgagagccatgtcattggtcagcagtgattctgaaggagaacagaatgagctgagaaacctgcaggagaagctggagtccaccatgaaacttgtcacgaacctttctggccagctgtcggaattaaaggatcagatgacagaacaaaggaagcagaaacaaagaattggtcttctaggacatcctcctcacatgaatgtcaacccacaacaaccagcataagcaaatgaaagaaaggaattgtatttaccttttataattattattagtgtgggtatggctaatgagttctgattcacccacgaaggttacatttatgctgaatacatttgtaaatactcagttttatactgtatgtatatgattgctactctaaaggtttggatatatgtattgtaattagaattgttggcatgatgacatttcatttgtgccaaaaatattaaaaatgccttttttggaaggactaacagaaagcacctgatttgcacttgaaccagattatagatttaaaagtatatgacatgtattttgtatttaaaactagaatagccagtatttatgttttttataaaactgtgcaatacgaattatgcaatcacaatacatttgtagctcccgagtgtcctaaagggagtgcacttctttgaagctggtgtgttaatactatgtaataaatggttaactttcaaatgatgctgctgccaaaattatattaatagtgagtttcaggcccctgggcattttgtaccatgtaattatcctctggtgatgctgtttctcgttagtggcagtagtgcctccgtctcctagtgataatgctccaagtctatgaactgttaaatcagcattcattttaagaaaagcaactttagtttcaaagatacttttaagcttctaaattgatcatttaaactatttctttaaataagagagccaaattagaggctcatactttagcttgtgaagaagataatgaattttttaaagggaactttctatgcaatgttcaggataaatgcatactgctggccaatcagtgtcatctcctgggtaaattttgatgtcgcattataaagacatgcataattgatggtttctagattatctagtccaaacaatagagtttattttttcttcatctgaaccaacatgctacagtagctaagaagtattaaaactatatacatccatataaagatgaaatatgaactatctcattagaagtcatagttgaccacagacatgttattcttctgaaagagccacattttggttttatttcttgtcacatgatttcttttcttgatggatgaaaaatatgaaaggaaacttttatatctgttgcctagttttgtacatggatctcattttacaagagaatctctctgcaaaaaaaaaaaaaacagtttaaaaatgcattgaaagcagagttctgaaatgagtaaagtttgtaaatgcatatataaaaatatttaataaatgatgcagaatatacagtgactggttggtggctttcatttggcatttgtgacttaactgctattccatttatgtactttctttaggatcagtttgaagtacagtcggtttgattaccaggttaattcagaaaatgtttacctgattatttaaaaaaacacttgctgttgttatgacagctctgaggagaattattagaacaaacattggggagtatttagtacaacattcattcattcttctggattagtgactgccagccaggctgtcgggagcgccctactaaatctcctgtctcttctgcttttactgggggatctttaatttgctgtgtgccatgtggaagtatcgggaa

SEQ ID NO: 40271 - DNA, 8133 bp, Artificial Sequence
  derived and/or modified sequence
atgtctgacaagatgagcagcttcctgcacatcggggacatctgcagcctgtatgcagagggcagcaccaacggcttcatcagcaccctgggcctggtggatgacagatgtgtggtgcagcctgagactggagacctgaacaacccccccaagaagttccgggactgcctcttcaagctgtgccccatgaaccgctacagcgcccagaagcagttctggaaggccgccaagccaggggccaacagcaccacagatgctgtgctgctgaacaagctgcaccacgccgctgacctggagaagaagcagaatgaaacagagaacaggaagctgctgggcaccgtcatccagtatggaaatgtcatccagctgctgcacctgaagagcaacaagtacctgactgtgaacaagaggctgcctgccctgctggagaagaatgccatgagggtgaccctggatgaggccggaaatgaaggctcctggttctacatccagcccttctacaagctgcggagcatcggggacagcgtggtgattggagacaaggtggtgctgaaccctgtgaatgccggccagcccctgcacgccagcagccaccagctggtggacaaccctggctgcaatgaggtgaacagcgtgaactgcaacacctcctggaagatcgtgctcttcatgaagtggagcgacaacaaggatgacatcctgaagggaggagatgtggtgcggctcttccacgccgagcaggagaagttcctgacctgtgatgagcacaggaagaagcagcacgtgttcctgcggaccaccggccggcagagcgccaccagcgccaccagcagcaaggccctgtgggaggtggaggtggtgcagcacgacccctgccggggcggggccggctactggaacagcctcttccgcttcaagcacctggccaccggccactacctggccgctgaggtggaccctgactttgaggaggagtgcctggagttccagcccagcgtggaccctgaccaggatgccagccgcagccggctgagaaatgcccaggagaagatggtgtacagcctggtgtctgtgcctgagggcaatgacatcagcagcatctttgagctggaccccaccaccctgcggggcggggacagcctggtgcccaggaacagctatgtgcggctgcggcacctgtgcaccaacacctgggtgcacagcaccaacatccccatcgacaaggaggaggagaagcctgtgatgctgaagattggcaccagccctgtgaaggaggacaaggaggcctttgccatcgtgcctgtgtccccagctgaggtgcgggacctggactttgccaatgatgccagcaaggtgctgggcagcattgctgggaagctggagaagggcaccatcacccagaatgaaagaagatctgtgaccaagctgctggaggacctggtgtactttgtgactggaggcaccaacagcggccaggatgtgctggaggtggtgttcagcaagcccaaccgggagcggcagaagctgatgagggagcagaacatcctgaagcagatcttcaagctgctgcaggcccccttcacagactgtggagatggccccatgctgcggctggaggagctgggggaccagagacatgcccccttccgccacatctgccgcctgtgctacagagtgctgcggcacagccagcaggactacaggaagaaccaggagtacatcgccaagcagtttggcttcatgcagaagcagatcggctatgatgtgctggccgaggacaccatcacagccctgctgcacaacaacaggaagctgctggagaagcacatcacagctgctgagattgacacctttgtgtccctggtgaggaagaaccgggagccccgcttcctggactacctgagtgacctgtgtgtgtccatgaacaagagcatccctgtgacccaggagctgatctgcaaggctgtgctgaaccccaccaatgctgacatcctgattgagaccaagctggtgctgagcagatttgaatttgaaggagtgagcagcactggagaaaatgccctggaggccggggaggatgaggaggaggtgtggctgttctggagggacagcaacaaggagatccgcagcaagtctgtgcgggagctggcccaggatgccaaggagggccagaaggaggacagagatgtgctgagctactaccgctaccagctgaacctgtttgccaggatgtgcctggaccggcagtacctggccatcaatgagatcagcggccagctggatgtggacctgatcctgcgctgcatgtctgatgagaacctgccctatgacctgcgggccagcttctgccgcctgatgctgcacatgcacgtggaccgggacccccaggagcaggtgacccctgtgaagtatgcccggctgtggagcgagatccccagcgagatcgccattgatgattatgacagcagcggggccagcaaggatgagatcaaggagagatttgcccagaccatggagtttgtggaggagtacctgagagatgtggtgtgccagcgcttccccttcagtgacaaggagaagaacaagctgacctttgaggtggtgaacctggccaggaacctgatctacttcggcttctacaacttcagtgacctgctgcggctgaccaagatcctgctggccatcctggactgtgtgcacgtgaccaccatcttccccatcagcaagatggccaagggggaggagaacaagggcagcaatgtgatgaggagcatccacggcgtgggggagctgatgacccaggtggtgctgcggggcggcggcttcctgcccatgacccccatggccgccgcccctgagggcaatgtgaagcaggccgagcctgagaaggaggacatcatggtgatggacaccaagctgaagatcatcgagatcctgcagttcatcctgaatgtgcggctggactaccgcatcagctgcctgctgtgcatcttcaagcgggagtttgatgagagcaacagccagaccagcgagaccagcagcggcaacagcagccaggagggccccagcaatgtgcctggggccctggactttgagcacatcgaggagcaggccgagggcatctttggaggcagcgaggagaacacccccctggacctggatgaccacggcggccgcaccttcctgcgggtgctgctgcacctgaccatgcatgactacccacccctggtgtctggggccctgcagctgctcttccgccacttcagccagaggcaggaggtgctgcaggccttcaagcaggtgcagctgctggtgaccagccaggatgtggacaactacaagcagatcaagcaggacctggaccagctgcggagcatcgtggagaagtctgagctgtgggtgtacaagggccagggcccagatgagaccatggatggagccagcggggagaatgagcacaagaagacagaggagggcaacaacaagccccagaagcatgagagcaccagcagctacaactacagagtggtgaaggagatcctgatccggctgagcaagctgtgtgtgcaggagagcgcctctgtgaggaagagcaggaagcagcagcagaggctgctgaggaacatgggcgcccatgctgtggtgctggagctgctgcagatcccctatgagaaggccgaggacaccaagatgcaggagatcatgaggctggcccacgagttcctgcagaacttctgtgccggcaaccagcagaaccaggccctgctgcacaagcacatcaacctcttcctgaaccctggcatcctggaggccgtgaccatgcagcacatcttcatgaacaacttccagctgtgcagcgagatcaatgaaagagtggtgcagcactttgtgcactgcatcgagacccatggaagaaatgtgcagtacatcaagttcctgcagaccatcgtgaaggccgagggcaagttcatcaagaagtgccaggacatggtgatggccgagctggtgaacagcggggaggatgtgctggtgttctacaatgaccgggccagcttccagaccctcatccagatgatgaggtctgagcgggacaggatggatgagaacagccccctgatgtaccacatccacctggtggagctgctggccgtgtgcacagagggcaagaatgtgtacacagagatcaagtgcaacagcctgctgcccctggatgacatcgtgcgggtggtgacccatgaggactgcatccctgaggtgaagatcgcctacatcaacttcctgaaccactgctacgtggacacagaggtggagatgaaggagatctacaccagcaaccacatgtggaagctgtttgagaacttcctggtggacatctgccgggcctgcaacaacaccagtgacaggaagcatgctgacagcatcctggagaagtatgtgacagagatcgtgatgagcatcgtgaccaccttcttcagcagccccttcagtgaccagagcaccaccctgcagacccggcagcctgtgtttgtgcagctgctgcagggcgtcttccgggtgtaccactgcaactggctgatgcccagccagaaggcctctgtggagagctgcatccgggtgctgagtgatgtggccaagagccgggccatcgccatccctgtggacctggacagccaggtgaacaacctcttcctgaagagccacagcatcgtgcagaagacagccatgaactggaggctgagcgccagaaatgctgcccggcgggacagcgtgctggccgccagccgggactacagaaacatcatcgagcggctgcaggacatcgtgtctgccctggaggaccggctgcggcccctggtgcaggccgagctgtctgtgctggtggatgtgctgcacaggcctgagctgctcttcccagaaaatacagatgcccggaggaaatgtgagagcggcggcttcatctgcaagctgatcaagcacaccaagcagctgctggaggagaatgaggagaagctgtgcatcaaggtgctgcagaccctgcgggagatgatgaccaaggaccggggctatggagagaagggggaggccctgcggcaggtgctggtgaaccgctactatggaaatgtgcggcccagcggcagaagagagagcctgaccagctttggaaatggccccctgtctgctgggggccctgggaagccaggcggcggcggcggcggcagcggcagcagctccatgagcagaggagagatgagcctggccgaggtgcagtgccacctggacaaggagggcgccagcaacctggtgattgacctgatcatgaatgccagcagtgacagagtcttccacgagagcatcctgctggccatcgccctgctggagggcggcaacaccaccatccagcacagcttcttctgccgcctgacagaggacaagaagtctgagaagttcttcaaggtgttctatgacaggatgaaggtggcccagcaggagatcaaggccaccgtgacagtgaacaccagtgacctgggcaacaagaagaaggatgatgaggtggacagagatgcccccagcaggaagaaggccaaggagcccaccacccagatcacagaggaggtgcgggaccagctgctggaggccagcgctgccaccaggaaggccttcaccaccttcagaagagaggccgaccctgatgaccactaccagcccggggagggcacccaggccacagctgacaaggccaaggatgacctggagatgtctgctgtgatcaccatcatgcagcccatcctgcgcttcctgcagctgctgtgtgagaaccacaacagagacctgcagaacttcctgcgctgccagaacaacaagaccaactacaacctggtgtgtgagaccctgcagttcctggactgcatctgtggcagcaccactggaggcctgggcctgctgggcctgtacatcaatgagaagaatgtggccctgatcaaccagaccctggagagcctgacagagtactgccagggcccctgccacgagaaccagaactgcatcgccacccatgagagcaatggaattgacatcatcacagccctgatcctgaatgacatcaaccccctgggcaagaagaggatggacctggtgctggagctgaagaacaatgccagcaagctgctgctggccatcatggagagcagacatgacagtgaaaatgctgagcgcatcctgtacaacatgaggcccaaggagctggtggaggtgatcaagaaggcctacatgcagggcgaggtggagtttgaagatggagaaaatggagaagatggagctgccagccccagaaatgtgggccacaacatctacatcctggcccaccagctggcccggcacaacaaggagctgcagagcatgctgaagccaggcggccaggtggatggagatgaggccctggagttctacgccaagcacacagcccagatcgagatcgtgcggctggacaggaccatggagcagatcgtgtttcctgtgcccagcatctgtgagttcctgaccaaggagagcaagctgcgcatctactacaccacagaaagagatgagcagggcagcaagatcaatgacttcttcctgcggtctgaggacctcttcaatgagatgaactggcagaagaagctgcgggcccagcctgtgctgtactggtgtgccaggaacatgtccttctggagcagcatctccttcaacctggccgtgctgatgaacctgctggtggccttcttctaccccttcaagggcgtgcggggcggcaccctggagccccactggagcggcctgctgtggacagccatgctgatcagcctggccatcgtgattgccctgcccaagccccacggcatccgggccctgattgccagcaccatcctgcggctcatcttctctgtgggcctgcagcccaccctcttcctgctgggcgccttcaacgtgtgcaacaagatcatcttcctgatgagctttgtgggcaactgtggcaccttcacccggggctaccgggccatggtgctggatgtggagttcctgtaccacctgctgtacctggtgatctgtgccatgggcctgtttgtgcatgagttcttctacagcctgctgctgtttgacctggtgtaccgggaggagaccctgctgaatgtcatcaagtctgtgaccagaaatggccgcagcatcatcctgacagctgtgctggccctgatcctggtgtacctgttcagcatcgtgggctacctgttcttcaaggatgacttcatcctggaggtggaccggctgcccaatgaaacagctgtgcctgagactggagagagcctggccagcgagttcctgttcagtgatgtgtgccgggtggagagcggggagaactgcagcagccctgccccccgggaggagctggtgcctgctgaggagacagagcaggacaaggagcacacctgtgagaccctgctgatgtgcatcgtgacagtgctgagccacggcctgcggagcggcggcggcgtgggagatgtgctgaggaagcccagcaaggaggagcccctgtttgctgcccgggtcatctatgacctgctcttcttcttcatggtgatcatcatcgtgctgaacctgatctttggagtcatcatcgacacctttgctgacctgcggtctgagaagcagaagaaggaggagatcctgaagaccacctgcttcatctgtggcctggagcgggacaagtttgacaacaagacagtgacctttgaggagcacatcaaggaggagcacaacatgtggcactacctgtgcttcatcgtgctggtgaaggtgaaggacagcacagagtacacaggccctgagagctatgtggccgagatgatcaaggagaggaacctggactggttccccaggatgagggccatgagcctggtgtccagtgacagcgagggggagcagaatgagctgaggaacctgcaggagaagctggagagcaccatgaagctggtgaccaacctgagcggccagctgtctgagctgaaggaccagatgacagagcagaggaagcagaagcagagaattggcctgctgggccaccccccccacatgaatgtgaacccccagcagcctgcctag

SEQ ID NO: 40272 - DNA, 8133 bp, Artificial Sequence
  derived and/or modified sequence
atgtctgacaagatgagcagcttcctgcacatcggggacatctgcagcctgtatgcagagggcagcaccaacggcttcatcagcaccctgggcctggtggatgacagatgtgtggtgcagcctgagactggagacctgaacaacccccccaagaagttccgggactgcctcttcaagctgtgccccatgaaccgctacagcgcccagaagcagttctggaaggccgccaagccaggggccaacagcaccacagatgctgtgctgctgaacaagctgcaccacgccgctgacctggagaagaagcagaatgaaacagagaacaggaagctgctgggcaccgtcatccagtatggaaatgtcatccagctgctgcacctgaagagcaacaagtacctgactgtgaacaagaggctgcctgccctgctggagaagaatgccatgagggtgaccctggatgaggccggaaatgaaggctcctggttctacatccagcccttctacaagctgcggagcatcggggacagcgtggtgattggagacaaggtggtgctgaaccctgtgaatgccggccagcccctgcacgccagcagccaccagctggtggacaaccctggctgcaatgaggtgaacagcgtgaactgcaacacctcctggaagatcgtgctcttcatgaagtggagcgacaacaaggatgacatcctgaagggaggagatgtggtgcggctcttccacgccgagcaggagaagttcctgacctgtgatgagcacaggaagaagcagcacgtgttcctgcggaccaccggccggcagagcgccaccagcgccaccagcagcaaggccctgtgggaggtggaggtggtgcagcacgacccctgccggggcggggccggctactggaacagcctcttccgcttcaagcacctggccaccggccactacctggccgctgaggtggaccctgactttgaggaggagtgcctggagttccagcccagcgtggaccctgaccaggatgccagccgcagccggctgagaaatgcccaggagaagatggtgtacagcctggtgtctgtgcctgagggcaatgacatcagcagcatctttgagctggaccccaccaccctgcggggcggggacagcctggtgcccaggaacagctatgtgcggctgcggcacctgtgcaccaacacctgggtgcacagcaccaacatccccatcgacaaggaggaggagaagcctgtgatgctgaagattggcaccagccctgtgaaggaggacaaggaggcctttgccatcgtgcctgtgtccccagctgaggtgcgggacctggactttgccaatgatgccagcaaggtgctgggcagcattgctgggaagctggagaagggcaccatcacccagaatgaaagaagatctgtgaccaagctgctggaggacctggtgtactttgtgactggaggcaccaacagcggccaggatgtgctggaggtggtgttcagcaagcccaaccgggagcggcagaagctgatgagggagcagaacatcctgaagcagatcttcaagctgctgcaggcccccttcacagactgtggagatggccccatgctgcggctggaggagctgggggaccagagacatgcccccttccgccacatctgccgcctgtgctacagagtgctgcggcacagccagcaggactacaggaagaaccaggagtacatcgccaagcagtttggcttcatgcagaagcagatcggctatgatgtgctggccgaggacaccatcacagccctgctgcacaacaacaggaagctgctggagaagcacatcacagctgctgagattgacacctttgtgtccctggtgaggaagaaccgggagccccgcttcctggactacctgagtgacctgtgtgtgtccatgaacaagagcatccctgtgacccaggagctgatctgcaaggctgtgctgaaccccaccaatgctgacatcctgattgagaccaagctggtgctgagcagatttgaatttgaaggagtgagcagcactggagaaaatgccctggaggccggggaggatgaggaggaggtgtggctgttctggagggacagcaacaaggagatccgcagcaagtctgtgcgggagctggcccaggatgccaaggagggccagaaggaggacagagatgtgctgagctactaccgctaccagctgaacctgtttgccaggatgtgcctggaccggcagtacctggccatcaatgagatcagcggccagctggatgtggacctgatcctgcgctgcatgtctgatgagaacctgccctatgacctgcgggccagcttctgccgcctgatgctgcacatgcacgtggaccgggacccccaggagcaggtgacccctgtgaagtatgcccggctgtggagcgagatccccagcgagatcgccattgatgattatgacagcagcggggccagcaaggatgagatcaaggagagatttgcccagaccatggagtttgtggaggagtacctgagagatgtggtgtgccagcgcttccccttcagtgacaaggagaagaacaagctgacctttgaggtggtgaacctggccaggaacctgatctacttcggcttctacaacttcagtgacctgctgcggctgaccaagatcctgctggccatcctggactgtgtgcacgtgaccaccatcttccccatcagcaagatggccaagggggaggagaacaagggcagcaatgtgatgaggagcatccacggcgtgggggagctgatgacccaggtggtgctgcggggcggcggcttcctgcccatgacccccatggccgccgcccctgagggcaatgtgaagcaggccgagcctgagaaggaggacatcatggtgatggacaccaagctgaagatcatcgagatcctgcagttcatcctgaatgtgcggctggactaccgcatcagctgcctgctgtgcatcttcaagcgggagtttgatgagagcaacagccagaccagcgagaccagcagcggcaacagcagccaggagggccccagcaatgtgcctggggccctggactttgagcacatcgaggagcaggccgagggcatctttggaggcaggaaagaaaacacccccctggacctggatgaccacggcggccgcaccttcctgcgggtgctgctgcacctgaccatgcatgactacccacccctggtgtctggggccctgcagctgctcttccgccacttcagccagaggcaggaggtgctgcaggccttcaagcaggtgcagctgctggtgaccagccaggatgtggacaactacaagcagatcaagcaggacctggaccagctgcggagcatcgtggagaagtctgagctgtgggtgtacaagggccagggcccagatgagaccatggatggagccagcggggagaatgagcacaagaagacagaggagggcaacaacaagccccagaagcatgagagcaccagcagctacaactacagagtggtgaaggagatcctgatccggctgagcaagctgtgtgtgcaggagagcgcctctgtgaggaagagcaggaagcagcagcagaggctgctgaggaacatgggcgcccatgctgtggtgctggagctgctgcagatcccctatgagaaggccgaggacaccaagatgcaggagatcatgaggctggcccacgagttcctgcagaacttctgtgccggcaaccagcagaaccaggccctgctgcacaagcacatcaacctcttcctgaaccctggcatcctggaggccgtgaccatgcagcacatcttcatgaacaacttccagctgtgcagcgagatcaatgaaagagtggtgcagcactttgtgcactgcatcgagacccatggaagaaatgtgcagtacatcaagttcctgcagaccatcgtgaaggccgagggcaagttcatcaagaagtgccaggacatggtgatggccgagctggtgaacagcggggaggatgtgctggtgttctacaatgaccgggccagcttccagaccctcatccagatgatgaggtctgagcgggacaggatggatgagaacagccccctgatgtaccacatccacctggtggagctgctggccgtgtgcacagagggcaagaatgtgtacacagagatcaagtgcaacagcctgctgcccctggatgacatcgtgcgggtggtgacccatgaggactgcatccctgaggtgaagatcgcctacatcaacttcctgaaccactgctacgtggacacagaggtggagatgaaggagatctacaccagcaaccacatgtggaagctgtttgagaacttcctggtggacatctgccgggcctgcaacaacaccagtgacaggaagcatgctgacagcatcctggagaagtatgtgacagagatcgtgatgagcatcgtgaccaccttcttcagcagccccttcagtgaccagagcaccaccctgcagacccggcagcctgtgtttgtgcagctgctgcagggcgtcttccgggtgtaccactgcaactggctgatgcccagccagaaggcctctgtggagagctgcatccgggtgctgagtgatgtggccaagagccgggccatcgccatccctgtggacctggacagccaggtgaacaacctcttcctgaagagccacagcatcgtgcagaagacagccatgaactggaggctgagcgccagaaatgctgcccggcgggacagcgtgctggccgccagccgggactacagaaacatcatcgagcggctgcaggacatcgtgtctgccctggaggaccggctgcggcccctggtgcaggccgagctgtctgtgctggtggatgtgctgcacaggcctgagctgctcttcccagaaaatacagatgcccggaggaaatgtgagagcggcggcttcatctgcaagctgatcaagcacaccaagcagctgctggaggagaatgaggagaagctgtgcatcaaggtgctgcagaccctgcgggagatgatgaccaaggaccggggctatggagagaagggggaggccctgcggcaggtgctggtgaaccgctactatggaaatgtgcggcccagcggcagaagagagagcctgaccagctttggaaatggccccctgtctgctgggggccctgggaagccaggcggcggcggcggcggcagcggcagcagctccatgagcagaggagagatgagcctggccgaggtgcagtgccacctggacaaggagggcgccagcaacctggtgattgacctgatcatgaatgccagcagtgacagagtcttccacgagagcatcctgctggccatcgccctgctggagggcggcaacaccaccatccagcacagcttcttctgccgcctgacagaggacaagaagtctgagaagttcttcaaggtgttctatgacaggatgaaggtggcccagcaggagatcaaggccaccgtgacagtgaacaccagtgacctgggcaacaagaagaaggatgatgaggtggacagagatgcccccagcaggaagaaggccaaggagcccaccacccagatcacagaggaggtgcgggaccagctgctggaggccagcgctgccaccaggaaggccttcaccaccttcagaagagaggccgaccctgatgaccactaccagcccggggagggcacccaggccacagctgacaaggccaaggatgacctggagatgtctgctgtgatcaccatcatgcagcccatcctgcgcttcctgcagctgctgtgtgagaaccacaacagagacctgcagaacttcctgcgctgccagaacaacaagaccaactacaacctggtgtgtgagaccctgcagttcctggactgcatctgtggcagcaccactggaggcctgggcctgctgggcctgtacatcaatgagaagaatgtggccctgatcaaccagaccctggagagcctgacagagtactgccagggcccctgccacgagaaccagaactgcatcgccacccatgagagcaatggaattgacatcatcacagccctgatcctgaatgacatcaaccccctgggcaagaagaggatggacctggtgctggagctgaagaacaatgccagcaagctgctgctggccatcatggagagcagacatgacagtgaaaatgctgagcgcatcctgtacaacatgaggcccaaggagctggtggaggtgatcaagaaggcctacatgcagggcgaggtggagtttgaagatggagaaaatggagaagatggagctgccagccccagaaatgtgggccacaacatctacatcctggcccaccagctggcccggcacaacaaggagctgcagagcatgctgaagccaggcggccaggtggatggagatgaggccctggagttctacgccaagcacacagcccagatcgagatcgtgcggctggacaggaccatggagcagatcgtgtttcctgtgcccagcatctgtgagttcctgaccaaggagagcaagctgcgcatctactacaccacagaaagagatgagcagggcagcaagatcaatgacttcttcctgcggtctgaggacctcttcaatgagatgaactggcagaagaagctgcgggcccagcctgtgctgtactggtgtgccaggaacatgtccttctggagcagcatctccttcaacctggccgtgctgatgaacctgctggtggccttcttctaccccttcaagggcgtgcggggcggcaccctggagccccactggagcggcctgctgtggacagccatgctgatcagcctggccatcgtgattgccctgcccaagccccacggcatccgggccctgattgccagcaccatcctgcggctcatcttctctgtgggcctgcagcccaccctcttcctgctgggcgccttcaacgtgtgcaacaagatcatcttcctgatgagctttgtgggcaactgtggcaccttcacccggggctaccgggccatggtgctggatgtggagttcctgtaccacctgctgtacctggtgatctgtgccatgggcctgtttgtgcatgagttcttctacagcctgctgctgtttgacctggtgtaccgggaggagaccctgctgaatgtcatcaagtctgtgaccagaaatggccgcagcatcatcctgacagctgtgctggccctgatcctggtgtacctgttcagcatcgtgggctacctgttcttcaaggatgacttcatcctggaggtggaccggctgcccaatgaaacagctgtgcctgagactggagagagcctggccagcgagttcctgttcagtgatgtgtgccgggtggagagcggggagaactgcagcagccctgccccccgggaggagctggtgcctgctgaggagacagagcaggacaaggagcacacctgtgagaccctgctgatgtgcatcgtgacagtgctgagccacggcctgcggagcggcggcggcgtgggagatgtgctgaggaagcccagcaaggaggagcccctgtttgctgcccgggtcatctatgacctgctcttcttcttcatggtgatcatcatcgtgctgaacctgatctttggagtcatcatcgacacctttgctgacctgcggtctgagaagcagaagaaggaggagatcctgaagaccacctgcttcatctgtggcctggagcgggacaagtttgacaacaagacagtgacctttgaggagcacatcaaggaggagcacaacatgtggcactacctgtgcttcatcgtgctggtgaaggtgaaggacagcacagagtacacaggccctgagagctatgtggccgagatgatcaaggagaggaacctggactggttccccaggatgagggccatgagcctggtgtccagtgacagcgagggggagcagaatgagctgaggaacctgcaggagaagctggagagcaccatgaagctggtgaccaacctgagcggccagctgtctgagctgaaggaccagatgacagagcagaggaagcagaagcagagaattggcctgctgggccaccccccccacatgaatgtgaacccccagcagcctgcctag

SEQ ID NO: 40273 - DNA, 8133 bp, Artificial Sequence
  derived and/or modified sequence
atgagcgacaagatgagcagcttcctgcacatcggcgacatctgcagcctgtacgccgaggggtctaccaatggttttatctcaacccttggattggtggatgaccgatgtgttgtgcaaccagagacgggcgacctcaataatccccctaaaaagttccgcgattgcctgttcaaactttgtcctatgaatcgctactctgcacagaaacagttctggaaggcagcaaagcctggcgcgaattcaacaaccgacgcagtccttttgaataaactacaccacgccgcagacttagaaaaaaaacagaacgagacagaaaaccgaaagctgcttggcactgtcatccagtacggtaatgttattcagctgttgcatctaaagagcaataagtatttgactgttaacaaaagactgcccgctcttttggagaagaacgcaatgagggttacactcgacgaggcaggtaacgagggctcttggttctacattcagcctttttataagctacggagcattggagattccgttgttattggggacaaggttgtgttaaatccagtgaacgccggccagcccctccacgcctcatcacaccagctggtggacaatccaggttgtaacgaggttaactccgtgaactgcaacactagttggaagatagttctgtttatgaagtggtctgataacaaggatgatattctaaagggcggcgatgtggtgcgactgttccacgctgaacaagaaaagttcctgacttgcgatgagcaccggaagaaacaacacgtgtttctgcgaactaccggccgacagtctgctacatcagctacgtccagcaaggccttatgggaagtggaggtggtacagcatgatccttgtagaggtggggctggttactggaactctctgtttcggtttaaacatttggccaccggccattaccttgcagccgaagtggaccccgatttcgaagaagagtgcctggagtttcaaccatctgtcgatccagaccaggacgccagccggtccagattacgtaatgcccaggaaaagatggtctattcactcgtgtctgtccccgaaggtaatgacatctcttcaattttcgaactcgatccaactactttgagagggggagatagtctcgtccctagaaattcctatgtgagactgcggcacctatgcaccaatacatgggtgcactcgacaaacataccaattgataaagaagaggaaaagcccgtgatgttgaaaatcggcacgagccctgtgaaagaggataaggaagcattcgctatagtcccggtctctcctgccgaggtaagagacctcgattttgccaatgacgctagtaaagtgctgggaagtatcgctgggaagctggagaagggaacaattactcagaatgagagacggtctgttacaaaacttctagaggaccttgtttacttcgtcaccggggggaccaacagcggtcaggacgtcctcgaagtagtcttctccaagcctaatagggaaagacaaaaactcatgagagagcagaacatcttgaagcagatattcaagctgttgcaggcgccttttaccgactgtggagacggcccgatgctccgcctggaggaactgggagatcagaggcatgcaccctttaggcatatttgcaggctgtgctaccgggtcctccgacattcacagcaagattatcgtaagaatcaagagtacattgcaaaacagttcggattcatgcagaaacagatcggctacgacgtgctggcagaagataccatcaccgcccttctccataataaccggaagctgctggagaagcatattaccgcggccgagattgatacatttgtaagtctcgttcggaaaaatcgagaacccagattcctagactatctctctgatctgtgcgtgagcatgaataagtcaattcctgtgacccaggagttaatttgtaaggcggtgctgaaccctactaacgccgatattcttatcgaaactaagctagtactctcccgattcgagtttgagggagtgtcatctacgggcgaaaatgcactggaggcaggggaggatgaggaagaggtctggctgttttggcgggactccaacaaggaaatccggtcaaaatcagtgcgggaactcgcccaagatgcaaaagagggacaaaaagaggaccgtgatgttctgagctattaccgctaccagctaaatttgttcgcccggatgtgcctggacagacaatacttagcgataaacgagattagtggccagctcgacgtcgatctcattctgagatgcatgagcgatgagaacctcccctacgatctccgggcaagcttttgcagactgatgctgcacatgcatgtggaccgtgacccacaggagcaagtgacacccgtgaagtacgcacggttgtggagtgagattccttccgaaattgccatcgacgattacgacagctcaggagcatccaaagatgaaataaaagaacgatttgcacagaccatggagtttgtagaagagtacctgagggatgtcgtctgtcagagattccccttttctgacaaggaaaagaataagctcacttttgaggtggtgaatttggcccgaaatctgatctattttggattctataacttctctgacctgctgcgccttactaagatacttctggctattctcgactgtgtacacgtaaccacaattttccctatctctaaaatggccaagggggaagaaaataagggcagcaacgtaatgcgttctatccacggagttggcgaattaatgacccaagttgtactccgcgggggagggtttctccctatgacccctatggcagcagcgcctgaagggaatgtaaagcaggccgagcccgaaaaagaagatatcatggtcatggacaccaagctaaagatcattgagatcctgcagttcattctcaacgtccgcttggactataggattagctgtctgctttgtattttcaaacgcgaatttgacgaaagtaattctcaaacctctgaaacatccagcgggaactcgagtcaggagggaccttcaaatgtcccgggcgccctggattttgagcatattgaggaacaagctgaagggatatttggcggatcagaggagaacacacccttagatctcgatgatcatggtggcaggaccttcttacgggtgttactgcacttgaccatgcatgattacccacctctggttagtggggctttgcagctcctcttccgtcatttcagtcaaagacaggaagtattgcaggccttcaagcaggttcagcttctcgttacttctcaggacgttgacaactacaaacaaataaagcaagatctggatcagctgagatcaatcgtggagaagagcgagttgtgggtgtataagggccaagggcccgatgagactatggacggcgcctccggagagaatgaacataagaagacagaagagggtaacaacaagccacaaaagcatgagtccaccagtagttataattaccgtgtggtcaaggaaatcttgattaggctgtcaaagctctgcgtgcaggagagcgcaagtgttagaaagagcaggaagcagcagcagagactcctgcgcaatatgggcgcacatgcggttgttctggagctgctgcagataccctatgagaaagctgaagatacaaagatgcaggagattatgaggttggcacacgaatttctccaaaatttctgtgcagggaaccaacagaaccaggcgcttctgcacaaacatatcaacttatttctcaaccccggcatcctggaagcggtcaccatgcagcatatttttatgaacaactttcaactttgctcagaaatcaatgaaagggtcgttcagcacttcgtgcattgcattgaaacccatggccgaaatgtgcaatacatcaaatttctccagacaatcgttaaagccgaggggaagttcatcaagaagtgccaagatatggtcatggcagagctggtcaactcaggagaggacgttctcgttttttataacgatcgggcttcatttcagaccctgattcagatgatgcgcagcgaacgcgatagaatggatgaaaattccccgctcatgtaccatatccatctggtggagctgctggccgtctgcacggagggcaagaacgtgtacactgaaatcaagtgtaactctctcttaccgctggatgacatcgtgagggtggtgacccacgaggattgcattccagaggtgaagattgcatatatcaattttctgaatcactgttacgtggacactgaggttgaaatgaaggaaatctataccagcaatcacatgtggaaattgttcgaaaactttttagtggatatatgtcgcgcctgcaacaacacatctgatcgcaagcacgcggattccatactggagaagtatgtcacggagatagttatgtcaatagtgaccacgttcttctcatcgccattttctgatcagtcgacaactctgcaaactcgccaaccagtgtttgtccaactgctccaaggggtgttcagagtctatcactgtaattggctaatgccctctcagaaggcctcggtggagtcctgcatcagagtgctaagcgacgtggctaagtccagggcaattgctattccagttgacctcgactcacaggttaataatttgtttctgaagtcccattctatcgttcagaaaacggctatgaattggcggctctctgcgcggaacgctgccagaagagacagtgttctggctgcaagtcgcgattatagaaacattattgagaggctacaggacatcgtttcagccttagaggatcggctgcgcccgctggtgcaggccgaactgtccgtgcttgttgacgtgctgcaccggccagaactcttattcccagagaacacggatgcgcggagaaaatgcgagagcggcggtttcatttgtaagctgattaaacatacaaagcagctcctggaggagaatgaggagaaactgtgtatcaaggtgcttcagacactcagagaaatgatgactaaggaccgcggatacggcgaaaagggcgaggcattaagacaggtcctggttaacaggtactacggaaatgtccggccttccggccgccgggagtccctaacttcctttggaaatgggcccctgtctgccggcggaccaggaaagccaggtggagggggtggtggatcgggatcatccagtatgagccgcggtgaaatgtcactggcggaggtgcagtgtcacttggacaaggagggcgctagcaatctggtcatcgatctgattatgaacgcctctagtgacagggtattccacgagtctatcctgctcgccatcgcgcttttggaaggcggcaatacaactatccagcactctttcttctgccgactgaccgaagacaagaagtccgaaaagtttttcaaagttttctatgaccgaatgaaggtggctcagcaggagatcaaggcaacggtgactgtaaataccagtgacttgggaaataaaaaaaaagacgacgaggtggatcgggacgctccaagccggaagaaggccaaggagccgactactcagataacagaagaagtcagggaccagctgctggaggcctccgctgccacccgcaaggctttcactaccttccggagagaggccgatcccgatgatcattaccagccaggcgagggaacacaggctaccgcagacaaggcaaaggatgacctagaaatgtctgccgtgatcaccattatgcaaccgatcttaaggttcctgcagctactttgtgagaatcacaacagagatctccagaatttcttgcggtgtcagaataataagaccaactacaaccttgtctgtgaaacactccagtttctagattgtatttgtggctccacgacaggggggctgggccttctcgggctgtacatcaatgagaagaatgttgctctcataaaccaaactcttgaaagtctgaccgaatattgccaggggccctgtcatgagaaccaaaattgcatcgctactcatgagtccaacggtattgacattataactgccttaattcttaatgacattaacccattagggaaaaagcgtatggatttagtccttgaactgaagaataacgccagtaaactactactggcaatcatggaatcacggcacgattctgagaacgccgaacgtatcttgtacaatatgcgccccaaagagcttgtcgaggtcatcaaaaaggcatacatgcagggggaggtggagttcgaagacggcgaaaacggcgaagatggggctgcttctcccaggaacgtgggtcacaatatttacatcctagcccaccagttagcccgtcacaacaaagaactgcagagcatgctcaagccgggaggacaagtggatggagatgaggcgctcgaattttatgccaagcataccgcccagatagaaattgtccggttggatcgaacaatggagcagatcgtctttccagtcccctccatctgtgaatttttaaccaaggagagcaagcttcgaatatactatactactgagagagatgagcaaggctctaagatcaacgactttttcctgcgaagcgaagatttatttaatgagatgaattggcaaaaaaaattacgggctcagccagtcctgtactggtgcgctcgcaacatgtccttttggagcagtatttctttcaacttggcagtgcttatgaacttgctggtggcgttcttttatcctttcaagggcgttcgaggaggaacactcgagccccattggtctggtttattgtggactgctatgctcataagtctggccatcgttattgccctgcccaagcctcacggaatccgcgcgctgattgcctcaacaatccttcgactcattttttccgttggactgcaaccgacattattcctgcttggagccttcaacgtgtgcaacaagatcattttcctgatgtctttcgtggggaattgcggcacattcacaagaggataccgtgcaatggtgttggacgtcgagtttctgtatcacctactctatttggtgatctgtgccatgggattgttcgtccacgagttcttctattctcttctgctcttcgatctggtgtatagggaagaaactcttctgaatgtgattaagtccgtcaccagaaatggccgtagcatcatactcaccgctgtgctggctctgattctggtgtacttattctcgatcgtggggtacctgttttttaaggacgatttcattctggaagtcgatagactgcccaacgaaaccgcagtgccagagaccggggaatctctagccagcgagtttctgttttcagacgtgtgtagagtggagagcggtgagaactgtagctctccggcaccacgcgaggagttagtgccggcagaagagaccgaacaggataaggagcatacatgtgaaacattgttaatgtgcatagtcactgtgctgagccacgggctgaggagcggcgggggagtgggtgacgttttacgaaagcctagcaaggaagaacctctgttcgcagcccgcgtgatttatgaccttctgttcttcttcatggttataatcatcgtgctgaatctcatctttggcgtcatcatagacacctttgcagatctccgctcagaaaagcagaagaaggaggaaattcttaaaaccacttgttttatatgtggactcgagcgcgacaagttcgataacaagacagtgaccttcgaagagcacattaaggaagagcacaatatgtggcattatttatgctttatcgtgctggtgaaggtgaaagacagtaccgagtataccggcccggaatcctacgttgctgagatgattaaagagcggaatctcgattggtttccaaggatgagagcaatgagtcttgtctcatccgattctgagggagaacagaacgaattgcgaaatctccaagagaagctggagtcaacgatgaaactcgtgactaacttgtcagggcagctgagcgagttgaaagaccagatgactgagcaacggaaacagaaacagcgcattggtctgcttggtcaccctccccacatgaatgtgaacccacagcaaccagcctag

SEQ ID NO: 40274 - DNA, 8133 bp, Artificial Sequence
  derived and/or modified sequence
atgagcgacaagatgagcagcttcctgcacatcggcgacatctgcagcctgtatgcagagggatctaccaacgggtttatcagcacgctgggtcttgtggacgaccgctgcgtggtgcagcccgagacaggcgatctgaataacccgccgaagaagtttcgggattgcctgtttaaattatgtcctatgaacagatatagcgcccagaagcagttctggaaagcagccaagccaggcgcgaatagcaccaccgacgcagtccttctgaacaagctacatcatgccgccgatcttgaaaagaagcagaatgaaaccgagaatcggaagcttctcggaaccgtgatccagtacgggaatgtcatccagctgctgcatctgaaaagtaataagtatctgactgtcaacaagaggctgcctgcccttctcgagaagaacgctatgagggtgacccttgacgaagccggcaacgaagggagctggttctacatccagccgttttacaaattgcggagtattggtgattctgtggtgattggggataaggtggtgctgaatcccgtaaacgccggccagcccctgcacgcgtcctcacaccagctcgtggacaacccgggctgcaacgaagttaactccgtaaattgcaatacatcttggaaaatagtcctgtttatgaaatggagcgataataaggatgacatcttgaagggcggtgacgttgtgagacttttccatgctgaacaggagaagttcctgacgtgcgacgagcatagaaagaagcagcacgtgtttctgaggactacaggtaggcagtccgctactagcgccacgtccagtaaagctctttgggaagtggaagtggtccagcatgacccttgccggggtggtgccggttactggaactccctgtttcgtttcaaacacctcgctacagggcactatctagcagccgaggtcgaccccgacttcgaggaagagtgcctggagtttcagccatccgtggatccagaccaggacgcctctagaagccggctgagaaatgcccaagaaaagatggtctatagccttgtctctgtccccgaggggaacgatatttcctctatattcgagctggacccgacgactctccgtggcggagactccctggtgcctcgaaattcatacgtgagactgcgtcacctgtgtactaatacctgggtccactctacgaatatcccgatagacaaagaggaggagaagcccgtgatgctgaaaataggcaccagcccagtcaaggaggacaaggaggcattcgccattgtgcctgtcagcccagctgaggttcgtgacctggactttgcaaacgacgctagtaaagtcctgggatccatcgctgggaagcttgagaaggggaccatcacccagaacgagcgccggagcgtgactaaactgctggaggatctagtctactttgtcacagggggcaccaactctggacaggatgtcctcgaagtggtgttcagtaaacctaatagagagcggcagaagcttatgcgggagcagaacattcttaagcagatatttaagctgctgcaggcaccatttactgactgcggcgatggacccatgttgaggttagaagagctcggggaccagcgccacgccccgttcagacacatttgcagattgtgctatcgagtactgagacacagtcagcaggattaccgtaagaatcaagagtacatcgccaaacagtttggttttatgcaaaaacagattggatatgatgtcctggccgaagacaccataacagctttgttacacaataatcggaagctgttggaaaagcacatcaccgccgctgagattgataccttcgttagtttggtccgtaagaatcgggagcctaggttcttagactatctttcagacctatgtgtgagtatgaataaaagcatcccagttacccaggagcttatctgcaaggccgtgctaaatcctacaaacgctgacatcctgattgaaacaaagctggtcttgagcaggtttgaatttgaaggggtgtcgtctactggggaaaatgccttggaggccggagaagacgaggaggaagtgtggctcttttggcgggattcaaacaaagagattcgctcaaagagcgtccgggagctggcacaagacgcaaaagaaggccagaaagaagaccgcgacgtgctcagctattatagataccagctcaacctgttcgcgcggatgtgtctggacaggcaatatctggccatcaacgagatttcaggacagctcgatgtcgatctcatcctgaggtgtatgtccgatgaaaatctcccatacgatctgcgcgcatctttctgccggctgatgctacatatgcacgttgaccgggatccccaagagcaagtcactcccgtgaaatacgctcggctatggtccgagattcctagtgagatcgcaattgacgattatgactcaagcggggcctcaaaggacgaaatcaaggagcggttcgctcagactatggagtttgtggaggaatacctaagggacgtcgtgtgccagaggttccctttttctgataaagagaagaacaagttgacatttgaggtggtgaatctagcaaggaacctcatatatttcgggttttacaatttttccgacttactgagactcacaaaaatacttttagcaattctcgactgcgtgcatgtgactactatcttccccatcagcaaaatggcaaaaggagaagagaacaaggggtccaatgtcatgcgtagcattcacggcgtcggcgagttaatgactcaggttgtcttgaggggcggcggtttccttcctatgacccctatggctgctgctcctgaagggaatgtgaagcaagcggagcccgagaaggaggatattatggtgatggatactaaactcaaaatcatagagatcctgcagttcattttgaatgtgcgcctcgactatcgtatcagctgtcttctgtgcatcttcaaacgagagtttgacgagagtaattctcagacttcagagacttcatccggcaatagcagccaggagggcccgtcaaatgtgcctggggctcttgactttgagcacatagaggagcaagcagaggggatcttcggaggtcggaaagaaaatacaccgcttgatctggacgaccatgggggcagaacctttctaagggttctgctgcatctgacaatgcacgattacccacctttagtgagcggagcactgcagctgttatttaggcatttctcccaaaggcaggaagtgctccaggctttcaagcaggtgcaattgctggttacatcgcaagacgttgataattacaagcagattaaacaggacctggaccagctgcggtccatcgtggaaaagtcggaactctgggtgtacaagggccaaggccctgatgagactatggacggggcgagcggagaaaatgagcacaagaaaacggaagagggcaataataaaccacagaaacatgagtcgacatcgtcctacaattatagggtcgtcaaagagatccttatccgtctgtctaagctctgcgtccaggagtctgcaagcgttagaaaaagccgtaagcaacagcagcgcttactgcggaatatgggagctcacgccgtggttctggaactgctgcagattccctacgagaaagcagaggacactaagatgcaagaaatcatgcggctcgcccacgagttcctgcaaaacttttgcgctggaaaccagcagaaccaggcactcctgcataagcacattaacctgttcttaaatccagggattctggaagccgtgactatgcagcatatatttatgaataactttcaactgtgtagcgagattaatgagcgtgttgtccaacacttcgtccactgcatcgagactcacgggaggaacgttcagtacattaagttcctccagaccatcgtgaaggccgagggaaagttcattaagaagtgccaggatatggttatggccgaattagtaaattccggtgaggatgtgttggtgttttacaatgacagggcatcatttcaaaccctgattcagatgatgcgctctgaacgtgatcggatggatgaaaacagccccctgatgtaccatatccatctggtggaattgctggccgtatgcacggaggggaaaaacgtgtatactgagataaagtgcaatagcctgttgcctctggatgatattgtgcgcgtggtcactcatgaggactgtattccagaggtgaagatcgcctatattaatttcctaaatcattgctacgtagataccgaagtagagatgaaagagatctatacttcaaaccacatgtggaaacttttcgagaactttctggtagacatctgtagggcctgtaataacactagtgatcggaaacacgccgactccattctcgaaaaatacgtcacagagattgtgatgagcatcgtgactacgtttttctctagcccattttccgatcagtcaaccactctgcagacacggcagcctgtatttgtgcagctgcttcagggagtgtttagggtgtatcattgcaactggctcatgccaagccaaaaagcctctgttgagagttgtatacgggtgctgtctgacgtggctaagtcccgtgctatcgctattccagtggacttggattcacaggtcaacaatctctttctcaagtcccactctatcgtacaaaagacggcgatgaattggaggctctcggccagaaacgccgcaaggcgggacagcgtgctggccgcttccagagactaccgtaacattatcgagagactgcaggacatcgttagtgcactcgaagacagactccgcccccttgtgcaggctgagctctctgtgcttgtggacgtactgcacaggcccgaactgctgtttcccgagaacactgatgcacgccggaagtgtgaaagcggaggctttatctgtaagctgattaaacacacgaaacagctccttgaggagaatgaggaaaaactttgtatcaaggttctgcagaccctgcgtgagatgatgaccaaggatcgcggctatggtgaaaagggagaggcgttgagacaggtgttggtgaacagatactacggaaatgtgagaccttcgggtcggcgggagtccctgacgagctttggaaatggaccactttctgctggcggtccgggtaaaccaggtggcggtggcggtggaagtggatcctcaagtatgagtagaggggagatgtcattggccgaagtgcaatgccatcttgacaaggagggggcctcaaacctcgtcatcgacctgattatgaatgcttcatctgacagagtgtttcacgaatcgatcctcctggccatcgcactcctggagggtggaaataccacaatccaacatagcttcttctgtcggttaaccgaggacaagaagagcgagaaattctttaaggtgttttacgacagaatgaaggtggcccagcaggaaattaaggctacggttaccgtgaacacaagcgatctgggcaataagaagaaagacgacgaggttgacagagatgcaccatcaaggaagaaggccaaggagcccacaacacaaataacggaagaagttagagatcaattattggaggctagcgctgctactagaaaagctttcaccacttttcggcgggaagcagacccagacgaccattaccagcctggggagggcactcaggctaccgcagataaagcaaaagacgacttggagatgtctgccgttataactatcatgcagcccatattaagattcctccagcttctctgtgagaaccacaacagagatctgcaaaactttctccgctgccagaacaataaaactaattataaccttgtgtgcgagaccctgcaattcttagattgcatctgcggatccaccacgggtgggctcggactgcttggcttatacataaatgagaaaaatgtggcccttatcaaccagaccctggaatctctgacggagtactgccaaggcccgtgtcacgaaaaccagaattgcattgccactcacgagagcaacggcatcgacatcattacagcacttattcttaacgacattaatcccctgggaaaaaaacgcatggatctggttcttgaacttaaaaataacgcatcaaagctgttacttgccattatggagtcccgtcacgactcggagaacgccgaacggattttatacaatatgcgcccaaaagaattagtcgaagtcatcaaaaaagcttatatgcagggagaagtggaatttgaggacggtgagaatggcgaggatggggctgcgagccctcggaatgttgggcacaatatatatattctggcccaccagctggccaggcacaacaaggaactgcagagtatgctcaagccaggcggccaggttgacggcgatgaagcactggaattctacgcaaagcacaccgctcagattgagatcgtgcggctcgaccgaacaatggaacagattgtgttcccagtgccctcaatatgcgaattcttgaccaaagagtcaaagcttagaatctactacaccaccgaacgcgatgagcaaggcagtaagataaacgacttctttctacgaagtgaggacctgttcaatgaaatgaattggcaaaagaagttgagagcccagcccgtcctgtattggtgcgccaggaatatgagcttctggtctagcataagctttaatcttgcagtgctgatgaacttattggtcgcctttttctatcctttcaagggggtaagagggggcacgctggagccacactggtctggtctactgtggacagccatgctcatttctctggcaattgtgatcgctctgccgaaaccacacggtatacgggcactcatcgcaagcaccatacttcgtctgatctttagcgtcggacttcagccaacactgtttcttctgggggcattcaatgtttgcaataagataatattcctcatgagcttcgtgggaaattgtgggacctttacgcgggggtatagagccatggtcttagacgtagagttcctgtaccaccttctgtacctggtgatttgtgccatgggactcttcgtccatgagtttttttactcgctgttgttattcgacttggtgtaccgagaagaaaccctgctgaatgtgatcaagtctgtgacacggaatgggaggtccattattttgaccgccgtgttagcccttatccttgtatatttattttccatagttggatatctcttctttaaagacgacttcattctggaggtggacaggctgcccaatgaaaccgctgttcccgagacaggagagtccctggcttcagagttcctctttagcgacgtgtgcagagtggaaagcggcgagaactgctccagtccagcaccgagagaagagctagtgcccgcagaagagactgagcaggacaaggagcacacgtgcgaaactctgttaatgtgcattgtcacagtcctgtcacacggccttcgcagcggcggaggcgtgggcgacgtgctgcggaaaccctctaaagaagaacccctttttgcagccagagtcatctatgacctacttttcttttttatggtgataatcattgtccttaacctgatctttggtgttattatcgacacatttgccgatcttaggagtgagaagcaaaaaaaagaagagattctgaaaaccacctgcttcatatgcggacttgaacgtgataagttcgacaataagactgtaacctttgaagaacacattaaagaagagcacaacatgtggcactacctttgttttattgtgttggtaaaagtgaaggactcgactgagtacactggccctgagtcttatgtggccgagatgattaaagaaaggaacttggactggtttcccagaatgagggcaatgtcccttgtaagtagtgattctgaaggggagcagaacgagctgcgcaacctgcaggaaaagctcgagtccacaatgaagctggtgactaacctatcaggacagttaagcgaactgaaggatcagatgacagagcagaggaagcagaaacagagaattggacttttggggcatccccctcacatgaatgtgaaccctcaacaacccgcctag

SEQ ID NO: 40275 - DNA, 8132 bp, Artificial Sequence
  derived and/or modified sequence
atgtcagataagatgtccagcttcctgcacataggcgacatatgttctctgtatgccgagggatcaacaaacggttttattagcacccttggtctggtagatgatcgatgcgtagtccaacctgaaaccggcgacttgaataaccctccaaagaagtttagggattgcttgttcaagctgtgccctatgaaccgatactcagctcagaaacaattctggaaagcagccaagcctggtgccaactccacgactgacgctgtcttactaaacaagctgcaccacgctgctgatctcgaaaagaagcaaaatgagacagaaaaccggaagctgctggggaccgtgattcaatatggtaatgtgattcaattactgcacctgaaatccaacaagtacctgacagtcaacaaaagacttcctgcacttcttgagaaaaacgcaatgcgtgtaaccctcgatgaagctggcaacgaagggagctggttctatatccaacctttctacaagctaagaagcatcggcgattcagtcgtcatcggagacaaagtcgttttgaaccctgttaacgcaggccagccattgcacgcttctagtcaccaactggttgataaccctgggtgcaacgaggtcaattcagttaactgtaacacctcgtggaaaatcgtactttttatgaaatggagcgacaataaggacgatatattaaaaggaggagacgtggtacgtctctttcatgccgagcaggaaaagttcctcacctgcgatgaacacagaaagaagcagcacgtgtttctgcgcacgacaggtcgccagtccgcaacttccgccacttcttcgaaagctttgtgggaggttgaggtcgtgcaacacgatccatgccgtgggggagcgggttattggaacagcctctttaggttcaagcatttagcgactggtcattatttggccgcagaggtggatccagacttcgaggaggagtgcctggagttccagccttcagtggatccagaccaagatgctagtcggtcccgactccgaaacgcacaagaaaaaatggtctactctctggtgtcagtgcccgagggcaacgatattagcagcattttcgagctcgatcccacaaccctgagaggcggagactcacttgtgcctcgaaattcctatgtgcggctaaggcatctctgtacaaacacgtgggttcacagcacaaatatcccaatcgacaaggaggaggagaaacccgtgatgctgaagattggtacgagcccagtaaaggaggataaagaggcctttgctatcgtacccgtgtcgcctgccgaagtgcgcgatctagacttcgcaaacgatgccagtaaggtgctgggatctatcgcaggaaaactagaaaagggcactattacccagaacgagcgcagatcagtcaccaaactgctcgaagacctggtgtattttgtgactggcggaacaaatagcgggcaagatgtactcgaggttgtcttttccaagccgaaccgggaacggcagaaactgatgagagaacagaatatcttaaagcagatatttaagctcttgcaggccccttttactgactgcggcgacgggccaatgctgcgtctggaagagctgggcgaccagaggcatgcaccctttagacatatttgccgtttgtgttacagggtcctgcgccattcccaacaggactatcgcaagaaccaggagtatattgccaagcaattcgggttcatgcagaaacagatcgggtacgatgtccttgctgaagatactattacggccctgcttcacaacaatagaaaactcctggaaaaacacatcaccgccgcagaaatcgacactttcgtttctcttgtgaggaaaaatagagaacctcgtttcctagactatcttagtgacctttgtgtaagcatgaacaaatccattccagtgacgcaagaacttatctgcaaggctgtacttaacccaaccaacgctgacattttgatcgagactaagctggtgcttagtcgtttcgaatttgagggcgtatcctctactggagagaatgcgctggaggccggtgaggatgaggaggaagtctggctgttctggcgtgactctaataaagaaatacggagcaaatctgttagagagcttgcacaggacgctaaggaagggcagaaggaggatagggatgtcctttcttactaccgataccagttaaatctgttcgcacgcatgtgtttggaccgccagtatctggcgattaacgagattagcgggcaattggatgtggatcttattcttcgctgcatgtccgatgagaacctgccttacgatttacgcgcatccttctgccggttaatgctgcacatgcatgttgacagggaccctcaggaacaggtgactcccgttaaatatgcaaggctgtggtccgagatcccatccgaaatcgccatagacgactacgactcgtccggagcttctaaggacgagattaaggagaggtttgcccagacaatggaatttgtggaggagtacctgagggatgtggtctgtcagcggtttccattcagcgataaagagaaaaataagctgaccttcgaggtagttaatctcgccaggaatttaatttactttggtttctacaatttttccgacttactccgcctcaccaaaattctactggccattctggactgtgtacacgtcaccactatattccccatcagcaaaatggccaaaggggaagaaaacaagggcagtaatgtgatgcgctccatccacggggtgggagagctgatgacccaagtcgtgttacgcggagggggtttcctccccatgacgcccatggcggctgcaccggagggtaatgtaaagcaggccgaacctgaaaaagaggatataatggtgatggataccaagctcaaaatcatcgagattctccaatttattttaaacgtgcggcttgactatcgcatcagctgcttgctgtgcattttcaagagagaattcgatgaatccaactcacagaccagcgagacgagttccggtaatagcagccaggagggtccctcaaacgtcccaggcgctctcgacttcgagcacatagaggaacaggccgagggaattttcggcggaagcgaggaaaacactcctttggacttagatgatcatggaggcagaacattcctgcgcgtgctattacatttgacaatgcatgactatcccccactagtcagcggggctctgcagctgctcttcagacacttcagtcagagacaggaagtactccaggcttttaagcaggtgcagcttctggttaccagtcaagatgttgacaactacaagcagatcaagcaggacctcgaccagcttcggtccattgtggagaagagcgagctttgggtatacaaaggacagggtcccgatgagacaatggatggtgcctccggcgaaaatgaacacaagaagaccgaagaagggaacaataagcctcagaagcacgaatccacctctagttataattacagagtggtcaaagaaattctcatcagactgtccaaactatgtgttcaggagtcggcaagtgttaggaagtctagaaagcagcagcaaagactcctgcgcaatatgggcgctcacgctgtagttctggagctcctgcagatcccttacgagaaagccgaagacaccaaaatgcaggagattatgcggctggctcacgagttcctgcagaacttctgcgccggaaaccagcagaatcaggctcttctccataaacatatcaatctgtttctgaatcccggtattctggaggctgtgactatgcagcatatattcatgaataactttcagttgtgtagcgagataaacgagcgagtggtacagcatttcgttcactgcatagagacgcacggccgaaatgtccagtatattaagttcctccagaccattgtgaaagcagaggggaaatttatcaagaaatgccaggatatggtcatggctgagttagtgaatagtggcgaagacgtcctggtgttctataatgacagagcctcattccagacgttaatccaaatgatgaggagcgaaagggatcgcatggatgagaactccccactcatgtaccatattcacctggttgagctcctggcggtgtgtacagaggggaagaacgtttacactgaaatcaaatgcaactccttgcttccactcgatgacattgtgagggtggtgacacacgaagactgtattcctgaagtgaaaattgcatacatcaactttttgaatcactgctacgtagataccgaggtggagatgaaggagatctacacttcgaatcacatgtggaagctgtttgaaaatttccttgtagacatctgtagggcctgcaacaacactagcgatcgcaaacacgcagattctattttggagaaatatgtgacagaaatcgtgatgtctattgttaccaccttcttcagctccccgtttagcgatcagtccacgacattacagacacgccagccagtctttgtgcagcttcttcagggcgtcttcagggtgtaccattgcaactggctcatgccctcccagaaagcttccgtcgagagctgcatacgcgttttatcagacgtggccaagtctcgggcaatagcaattcccgtggatttggactcccaagtgaacaacctgttcctcaaatcccacagcattgtccagaaaaccgccatgaattggcgcctttccgcaaggaatgcggcaagacgtgacagtgtcttggctgctagtagagattatcgcaacatcatcgagagactacaggacatagtttctgcactggaagatagacttcggccacttgtgcaggccgaactgagcgtgcttgtggatgtccttcaccgcccagaattgctgttccctgagaacaccgatgccaggaggaagtgtgaatccggcggattcatatgcaagctgattaagcacactaaacagctcctcgaagagaacgaggagaagctgtgcattaaggttctccagacgctccgagagatgatgacaaaagaccgtggctatggagaaaaaggggaagctctcagacaagttttggtgaatcggtactatgggaatgttaggccttcaggcagaagagagtcactgactagctttggaaatggccctctatcagccggtggaccaggcaaacccggagggggagggggtggctcaggctcctcaagcatgagtcgcggagagatgagcctcgctgaagtgcagtgtcaccttgacaaggaaggagccagcaatctcgtcatagacttaattatgaacgccagcagcgatagagtgtttcacgagagcatccttttagcaatagctctcctcgaaggagggaacaccaccatacagcacagcttcttctgcaggctcacagaggataaaaaaagcgagaaattttttaaagtgttctatgatcggatgaaggtagcccagcaagaaataaaagcaaccgttaccgtgaacacatctgatttgggcaataagaagaaggatgacgaggtcgaccgcgacgcccctagcagaaaaaaggctaaagaacccactacacaaatcaccgaagaggtaagggatcagctccttgaagctagtgcagccacgagaaaagctttcactacctttagacgagaggctgacccagacgaccattaccagcctggcgaaggcacccaggcgacggctgataaggctaaggatgatctcgagatgtccgccgttatcacaattatgcaaccaattttaaggttcctgcagctcctgtgtgagaaccataacagggatctgcagaacttcctcaggtgtcagaacaataaaacaaactacaatctcgtgtgcgagactcttcagttcctggattgcatctgcggctcaacaaccgggggactcgggctcctgggtctgtatatcaatgaaaaaaatgtcgcactgattaaccagactcttgagtctctcacagagtactgtcagggtccctgccacgaaaatcaaaattgtatcgctactcacgagagcaatggcatcgacatcattacagccctcattctgaacgacattaatcccctgggaaagaaacgtatggatcttgtgctagaattgaagaacaacgcctccaagctattactggccatcatggaaagtcgacacgacagtgagaacgccgagcggattctatataacatgcggccaaaggagctggtggaagttattaagaaagcctatatgcagggggaggtggagtttgaggatggagagaacggcgaggacggagccgcaagtccacggaacgtcggacacaatatttatatcttggcccaccagctcgcccgacacaacaaagagctgcaaagcatgctgaagccagggggacaggtagacggagacgaagccctcgaattctatgcaaagcacaccgcccagatcgagatagtccgcctggacaggacaatggaacagatcgtctttccggtgccgtctatctgtgaatttctgacaaaagagtccaagctgagaatatactacactacagaaagagatgagcagggcagtaagatcaatgatttttttctccgcagcgaggacttgttcaacgagatgaattggcagaagaaactgcgcgctcagccagtcctctactggtgcgctcgaaacatgagtttttggtcctcaatttctttcaacctcgcagtgctgatgaatttactggtcgccttcttttaccccttcaagggagtgagaggaggcaccctcgaaccccattggtccggtctcctgtggacggcaatgttgatttctctggccatagtgatcgcattgccaaagccccacggaattcgcgctctcatcgcctcaaccatcctacggctgatattctccgtggggctgcagcctactctgttcttgctaggggcatttaatgtgtgcaataaaatcatattcctaatgtcttttgtgggtaactgcgggaccttcactaggggctaccgggcaatggtgctggacgttgaatttctctaccatcttctctacctggttatttgcgccatgggactctttgttcacgagttcttctacagcctacttctatttgaccttgtgtacagagaggaaacgctcctgaacgtaattaaaagcgtaactcgtaatggacgcagcatcattcttacggctgtactggccctgattctggtgtaccttttttcaattgtgggctacctgttctttaaggacgatttcatcttagaagttgataggctgcctaacgaaaccgccgttccagaaaccggcgagagccttgcatcggagttcctgttcagcgacgtgtgtagagtggagtctggtgaaaattgcagttccccggcacctcgagaggagttggtgcccgctgaagaaacagaacaggacaaggagcatacttgcgagacactgctgatgtgcatcgtcaccgtcctatctcatggcctcagaagcggcggaggtgtcggggacgtgttacgtaagccatccaaggaagagcctctgtttgcagcaagagttatctacgacctgttgttctttttcatggtgatcattatagttcttaatttgatttttggagtcatcatagatacattcgcagacctccgctccgaaaaacagaagaaggaagaaattttgaaaacaacttgctttatttgtggcttagagagggataaattcgataacaaaactgtcacgtttgaagaacacattaaggaagagcataatatgtggcactatctgtgcttcattgtgctggttaaagtgaaggacagcacggaatacaccggcccagagtcgtacgtcgcagagatgatcaaggaaaggaacctggactggtttcctcgcatgcgtgcaatgagcctcgtgagctctgactctgagggggagcagaacgaattgagaaaccttcaggaaaaactggaatcaacaatgaagctggttacgaatttgtccggtcaattgagcgaactgaaagaccagatgacagagcagcgaaagcaaaagcagcggatcggactgttgggccatccaccccacatgaacgtgaatccacagcagccagccta

SEQ ID NO: 40276 - DNA, 8132 bp, Artificial Sequence
  derived and/or modified sequence
atgtctgataagatgagttcttttttgcacatcggggacatttgctccctctatgccgaaggctccactaatggatttatatccacgttggggctggtggacgacaggtgcgtcgttcagccagaaacaggggacctgaataatccacccaagaaattcagagactgtttgtttaaattgtgtccaatgaatcgctactcggcacagaagcaattctggaaagcagccaaacccggtgccaactctacaaccgacgccgtcctgttaaataaattacatcacgcagccgatctggaaaaaaagcagaatgaaactgaaaacagaaagttattggggactgtgatccaatacggcaatgtgatccaacttctgcacctgaagtcaaataagtacttgacagtcaacaagcgcttaccagcacttttggagaaaaacgcaatgcgcgtgaccttagatgaagctgggaatgaaggcagctggttctatattcagcccttctataagttgcggtcaatcggggactcagtcgtgatcggggacaaggtggtgctgaaccccgtcaacgcaggtcagcctctgcacgcttcctcacaccagctggttgataatccgggatgtaatgaagtcaatagcgttaattgtaatacgtcttggaaaattgtcctgtttatgaaatggagcgacaacaaggacgatatcttgaagggcggagacgtggtcagactctttcatgccgaacaggaaaaattcttgacctgcgatgaacacagaaagaagcaacacgtctttctgagaacaactggccgacagtccgccacctctgccacctctagtaaagcgctatgggaagtggaggtggttcagcatgatccctgtagaggaggtgcgggatactggaacagcctgtttcggtttaaacacttagccacgggccattatcttgccgctgaagtggacccagacttcgaggaggaatgcttggagtttcaaccaagtgtggaccccgatcaggatgcttctcggagtcgactgaggaacgcacaggagaagatggtctacagtcttgttagcgttccagaaggaaacgacatcagttccatttttgaattagaccccaccacacttcgaggcggagacagcctggtgcccaggaattcctatgtgcgcctccgacatttgtgtactaatacttgggtccactccaccaacatccccattgacaaggaggaggagaagccggttatgctgaagattggcacttcgcctgtgaaagaggataaggaggcctttgctatcgtccctgtgtcccctgctgaagtcagagacttagatttcgcaaatgatgccagcaaggtcctcggatcaattgctggtaagttggagaagggaacgattacacagaatgagcgcagaagcgtaaccaagctgttggaggatttagtatacttcgtaactggcggaactaattccggacaggatgtgcttgaggtggtgttcagcaaacccaatagggagcgccagaagcttatgcgggagcaaaacatcctaaaacagatcttcaaattactgcaagcgccttttactgattgcggagatggtcctatgctccggctggaagagttaggtgatcagcggcacgcccctttcagacatatctgccggctttgttacagggtgttgagacatagtcagcaggactatcgtaaaaaccaggagtatatagccaagcagttcggcttcatgcagaagcagatcggatatgatgtgctcgctgaggataccatcacagccctccttcataataatcggaagttactggagaagcacattacagcagccgagatcgacacgttcgtttctctggtgcggaagaatagggaaccgcgatttttggactacttgtccgatctgtgtgtgagtatgaacaagagcattcctgtgacccaggagctgatttgtaaagctgtgctcaatccgacaaacgcggacattttgatagagactaagctcgtcctcagcaggtttgagttcgagggggtcagttccacaggggagaacgcccttgaagccggtgaggatgaggaggaagtctggctgttttggagagattccaacaaggaaattcggagtaagagtgtaagagaactggcccaagacgccaaagaaggccaaaaggaggatcgcgacgtcttgtcttattacagataccaattaaatctgtttgctcgtatgtgtctggacagacagtacctggccatcaatgaaatctccggacagctcgacgtcgacctgatccttcgatgtatgtctgacgagaatctgccttacgatctgcgcgctagcttctgtcgactaatgctccacatgcacgttgatcgtgacccacaggagcaggtgacacctgtaaagtacgcacggctgtggtctgaaattccctctgagatcgccattgacgattatgattccagtggggcttcaaaggacgagatcaaggagcgcttcgcccagaccatggaattcgtggaggaatatttacgcgacgtcgtgtgtcagcgcttcccattcagcgataaggagaagaataagctaacctttgaggtggtcaacctcgctcggaatctgatctacttcggattttacaatttttccgacctgttaagactgactaagatactgctagccattctggattgcgtgcatgtcactacaatctttccaattagcaaaatggccaagggggaagaaaataagggtagcaatgttatgagatcaatccacggtgttggcgagctgatgacgcaagtggtactgagagggggaggattcctccccatgactcccatggcagcagccccagaggggaacgtgaaacaggccgagcctgagaaggaagatatcatggtgatggataccaaactcaaaatcattgagattttacagtttatccttaatgtgagactggactacaggatatcctgtctgctctgcattttcaaaagggagtttgacgagtccaactctcagacttcagagactagttctggcaattcaagccaagagggacctagcaacgttcccggtgccttggatttcgagcacatcgaagagcaggctgaaggcattttcggagggagaaaggaaaacacgcctctggatctcgatgatcatggcggaagaacttttctgagagtcctgctccacctcacaatgcacgattaccctcctttggtgtcaggagccttgcaactcctatttaggcacttctcacagaggcaggaagtgctccaggctttcaaacaggtgcaactgctggttacttcgcaggacgtggataactataaacagataaagcaggacttggatcagctccgctcaattgtcgaaaaatccgaactttgggtctataaagggcagggacccgatgaaacaatggatggtgcttctggagagaatgaacacaaaaaaaccgaggaggggaacaacaaaccacaaaagcatgagagcactagttcctacaattatcgggtagtgaaagagattctgatacggctatccaagttatgcgtgcaggagagcgcgagcgtgagaaaaagccggaagcagcaacagcgcctgctaagaaacatgggcgcacatgctgtagttttagaactcctgcaaatcccgtatgagaaggccgaagatacgaaaatgcaggaaatcatgaggcttgcgcacgagttcctccaaaatttttgcgccggtaaccagcagaatcaggccctgctccacaaacatataaatctttttctgaacccaggcatccttgaggctgttacaatgcaacacatcttcatgaacaacttccagctgtgctctgaaattaatgaaagggttgtccagcatttcgtccactgcatcgagacgcatggtcgcaatgtgcagtacattaaattcttgcagaccatagtaaaggcagagggaaaattcatcaagaagtgccaagatatggtgatggcagaactcgtgaacagtggggaggacgtgttggtcttctataacgatagagcctctttccagacccttatacaaatgatgcgatctgaacgcgacaggatggatgagaactccccattgatgtaccacatccacctggtggagttgctggcagtctgcacagaggggaagaacgtgtacactgagattaagtgcaatagtctgttgccacttgacgacatagttcgcgtcgtcactcacgaggattgcatcccggaggtgaagattgcttatatcaactttctgaatcactgttacgtcgacactgaggtcgagatgaaagagatctatacatccaaccacatgtggaagctgttcgaaaacttcctggtggacatttgcagagcgtgtaacaatacttccgacaggaagcacgccgactctattttagaaaaatatgtaactgagatcgtgatgagcatagtgactaccttcttcagttctccttttagcgatcaatcaaccacactgcagacacggcagccagtattcgttcagttgttgcagggagttttcagggtttaccattgcaattggctgatgcctagtcaaaaggcatccgtggagtcgtgtattagagtcctgagcgacgtggccaaaagtagggccattgccattcctgtcgatctggactcccaagtcaataacctgttcttaaaatcccacagcatcgtgcagaagacagccatgaattggcgacttagtgcgagaaatgccgcacgtcgcgactccgtcctggcggcatctcgggactaccgtaatatcattgaacgcctgcaggacattgtctcagcactcgaggaccggctcagacccctggtccaggccgaactgtctgtcctggtggacgttcttcaccgcccagaactgctgtttcctgaaaatactgacgcacggagaaagtgtgagtcaggtggcttcatttgcaagctgattaagcacaccaaacagctcctagaagagaacgaagagaagctatgcattaaggtgttgcagactctcagggagatgatgacaaaagaccggggatacggagagaagggagaggcccttagacaagtgcttgtgaacaggtattatggcaacgtccgtccttcaggtcgccgtgagtcacttacatcgttcggaaacgggccactttcagctggtgggccaggcaagcctggaggaggtggtgggggttctggctcctcttcaatgtcacgcggagagatgtcgctggccgaggtacagtgccatctggacaaggagggggcaagcaacctcgttatagacctgattatgaatgcctctagcgaccgagtctttcacgagtccattttacttgctattgctctgctcgagggcggtaacaccacaatccagcatagcttcttttgtcgcctcaccgaggataaaaagtccgagaagttcttcaaggtattttatgataggatgaaagttgcacagcaggagataaaggcaacagtgacagtcaataccagtgacctaggcaacaagaagaaagatgatgaggtggacagagatgctccctcccgcaaaaaagctaaagaacccaccacgcaaatcactgaggaggtgagagaccaactgctggaagcctctgcggctacgcgaaaggcctttactactttccgacgtgaggccgatccagacgaccactatcagccaggagaagggacccaggccacagctgacaaagctaaagatgatctcgaaatgagcgccgtcattaccatcatgcaaccgattttgcgctttctgcaactactctgtgagaatcataatcgggacctccaaaactttctgcgttgtcagaacaataagactaattacaacttagtgtgcgagaccctgcagttcctcgactgtatctgcggctcaaccactggtggtcttggtctgctgggcctgtacatcaatgaaaagaacgttgctctgatcaaccagactctggagtctctgacggagtactgtcagggaccctgtcacgagaaccagaactgcattgcaactcatgaaagtaacggaatcgacatcatcaccgcattgatcctgaatgacattaacccacttgggaaaaagcgcatggatctcgttctcgaactaaaaaacaacgcgagtaagctcttgctggccataatggaaagccgtcacgatagcgaaaacgctgaacgtatattgtacaatatgaggccgaaagaactggtcgaggtgatcaagaaggcttacatgcagggagaggtggaattcgaagatggtgagaatggtgaggacggcgctgccagccccaggaacgttggacacaatatttatatcttagcccaccagctcgcccgtcacaataaggagctgcaatcgatgctcaaaccaggcggacaagtggacggagacgaagcactcgagttttatgccaagcataccgcccagattgagatcgttaggctggaccgcaccatggagcagatagtctttcccgtaccctctatctgcgaatttcttaccaaagaatctaagctgcggatttactacacaaccgaaagggatgaacaaggatctaagattaacgacttctttctccgctctgaggatttattcaacgagatgaattggcaaaagaagctcagggcgcagccggtattgtattggtgtgccaggaacatgagcttctggtctagtatctctttcaatctggctgtgctgatgaacctcctggttgccttcttttaccccttcaagggcgtgcggggtgggacattggagccccactggagtggcctcctgtggaccgccatgctgattagccttgccatagtcattgcgttgcctaaaccccacgggatcagggcgttgattgcgtcaacaattctgagattaatcttttccgtcgggctccagccaactctgtttctgttaggtgcatttaacgtgtgcaataaaatcatttttctgatgtccttcgtaggaaactgtggaacatttaccagaggctaccgggcaatggttttggacgtcgagtttctgtatcacctgttatacttggtaatctgcgctatgggcctttttgttcacgaatttttctactccctgctgctgtttgacctggtgtatcgcgaagaaaccctgttgaatgtgattaaatccgtgacgcgtaatggacgttcaataattttgaccgcagtgctcgccctgatcctcgtttatctgttttctattgtaggctacctattcttcaaggatgacttcatcctcgaggtggatcgcctgcccaacgagactgccgtgcccgagaccggcgaaagcttggcaagcgagttcctgttcagcgatgtgtgtagggtcgagtcaggcgaaaattgctcctcacccgctcctagggaggaactcgttcctgccgaggagacggagcaggacaaggaacatacgtgcgagacgttgctaatgtgtatcgtgaccgtcttgtcccatggcctgaggtccggaggtggggtgggggacgtcctgagaaaaccatccaaggaagagccattgttcgccgctcgcgtgatttatgacctgttattcttctttatggttatcattattgtcctgaatctgattttcggggtcatcatagatacatttgctgatcttcgcagcgaaaaacagaaaaaggaagaaatcctgaaaactacctgcttcatctgtggcctggagcgggataagtttgataataaaaccgtgacattcgaagaacatatcaaggaggaacacaacatgtggcattatctttgttttatagtgctggtcaaagtaaaagactccacagaatacacggggcctgaaagctacgtggcggagatgattaaagagcgcaatttagattggtttcccaggatgcgggctatgagcttggtatccagcgattcagaaggggagcaaaacgagcttcggaacctacaggagaagctcgaaagcactatgaaactggtcaccaacttgtccggccaactgagcgagttaaaggatcagatgaccgagcagcggaaacagaaacagcggattgggctgctggggcaccccccacacatgaacgttaacccccagcaaccagcata

SEQ ID NO: 40277 - DNA, 8133 bp, Artificial Sequence
  derived and/or modified sequence
atgagcgacaagatgagcagcttcctgcacatcggcgacatctgcagcctgtacgccgagggcagcaccaacggcttcatcagcaccctgggcctggtggacgacagatgcgtggtgcagcccgagaccggcgacctgaacaacccccccaagaagttcagagactgcctgttcaagctgtgccccatgaacagatacagcgcccagaagcagttctggaaggccgccaagcccggcgccaacagcaccaccgacgccgtgctgctgaacaagctgcaccacgccgccgacctggagaagaagcagaacgagaccgagaacagaaagctgctgggcaccgtgatccagtacggcaacgtgatccagctgctgcacctgaagagcaacaagtacctgaccgtgaacaagagactgcccgccctgctggagaagaacgccatgagagtgaccctggacgaggccggcaacgagggcagctggttctacatccagcccttctacaagctgagaagcatcggcgacagcgtggtgatcggcgacaaggtggtgctgaaccccgtgaacgccggccagcccctgcacgccagcagccaccagctggtggacaaccccggctgcaacgaggtgaacagcgtgaactgcaacaccagctggaagatcgtgctgttcatgaagtggagcgacaacaaggacgacatcctgaagggcggcgacgtggtgagactgttccacgccgagcaggagaagttcctgacctgcgacgagcacagaaagaagcagcacgtgttcctgagaaccaccggcagacagagcgccaccagcgccaccagcagcaaggccctgtgggaggtggaggtggtgcagcacgacccctgcagaggcggcgccggctactggaacagcctgttcagattcaagcacctggccaccggccactacctggccgccgaggtggaccccgacttcgaggaggagtgcctggagttccagcccagcgtggaccccgaccaggacgccagcagaagcagactgagaaacgcccaggagaagatggtgtacagcctggtgagcgtgcccgagggcaacgacatcagcagcatcttcgagctggaccccaccaccctgagaggcggcgacagcctggtgcccagaaacagctacgtgagactgagacacctgtgcaccaacacctgggtgcacagcaccaacatccccatcgacaaggaggaggagaagcccgtgatgctgaagatcggcaccagccccgtgaaggaggacaaggaggccttcgccatcgtgcccgtgagccccgccgaggtgagagacctggacttcgccaacgacgccagcaaggtgctgggcagcatcgccggcaagctggagaagggcaccatcacccagaacgagagaagaagcgtgaccaagctgctggaggacctggtgtacttcgtgaccggcggcaccaacagcggccaggacgtgctggaggtggtgttcagcaagcccaacagagagagacagaagctgatgagagagcagaacatcctgaagcagatcttcaagctgctgcaggcccccttcaccgactgcggcgacggccccatgctgagactggaggagctgggcgaccagagacacgcccccttcagacacatctgcagactgtgctacagagtgctgagacacagccagcaggactacagaaagaaccaggagtacatcgccaagcagttcggcttcatgcagaagcagatcggctacgacgtgctggccgaggacaccatcaccgccctgctgcacaacaacagaaagctgctggagaagcacatcaccgccgccgagatcgacaccttcgtgagcctggtgagaaagaacagagagcccagattcctggactacctgagcgacctgtgcgtgagcatgaacaagagcatccccgtgacccaggagctgatctgcaaggccgtgctgaaccccaccaacgccgacatcctgatcgagaccaagctggtgctgagcagattcgagttcgagggcgtgagcagcaccggcgagaacgccctggaggccggcgaggacgaggaggaggtgtggctgttctggagagacagcaacaaggagatcagaagcaagagcgtgagagagctggcccaggacgccaaggagggccagaaggaggacagagacgtgctgagctactacagataccagctgaacctgttcgccagaatgtgcctggacagacagtacctggccatcaacgagatcagcggccagctggacgtggacctgatcctgagatgcatgagcgacgagaacctgccctacgacctgagagccagcttctgcagactgatgctgcacatgcacgtggacagagacccccaggagcaggtgacccccgtgaagtacgccagactgtggagcgagatccccagcgagatcgccatcgacgactacgacagcagcggcgccagcaaggacgagatcaaggagagattcgcccagaccatggagttcgtggaggagtacctgagagacgtggtgtgccagagattccccttcagcgacaaggagaagaacaagctgaccttcgaggtggtgaacctggccagaaacctgatctacttcggcttctacaacttcagcgacctgctgagactgaccaagatcctgctggccatcctggactgcgtgcacgtgaccaccatcttccccatcagcaagatggccaagggcgaggagaacaagggcagcaacgtgatgagaagcatccacggcgtgggcgagctgatgacccaggtggtgctgagaggcggcggcttcctgcccatgacccccatggccgccgcccccgagggcaacgtgaagcaggccgagcccgagaaggaggacatcatggtgatggacaccaagctgaagatcatcgagatcctgcagttcatcctgaacgtgagactggactacagaatcagctgcctgctgtgcatcttcaagagagagttcgacgagagcaacagccagaccagcgagaccagcagcggcaacagcagccaggagggccccagcaacgtgcccggcgccctggacttcgagcacatcgaggagcaggccgagggcatcttcggcggcagcgaggagaacacccccctggacctggacgaccacggcggcagaaccttcctgagagtgctgctgcacctgaccatgcacgactacccccccctggtgagcggcgccctgcagctgctgttcagacacttcagccagagacaggaggtgctgcaggccttcaagcaggtgcagctgctggtgaccagccaggacgtggacaactacaagcagatcaagcaggacctggaccagctgagaagcatcgtggagaagagcgagctgtgggtgtacaagggccagggccccgacgagaccatggacggcgccagcggcgagaacgagcacaagaagaccgaggagggcaacaacaagccccagaagcacgagagcaccagcagctacaactacagagtggtgaaggagatcctgatcagactgagcaagctgtgcgtgcaggagagcgccagcgtgagaaagagcagaaagcagcagcagagactgctgagaaacatgggcgcccacgccgtggtgctggagctgctgcagatcccctacgagaaggccgaggacaccaagatgcaggagatcatgagactggcccacgagttcctgcagaacttctgcgccggcaaccagcagaaccaggccctgctgcacaagcacatcaacctgttcctgaaccccggcatcctggaggccgtgaccatgcagcacatcttcatgaacaacttccagctgtgcagcgagatcaacgagagagtggtgcagcacttcgtgcactgcatcgagacccacggcagaaacgtgcagtacatcaagttcctgcagaccatcgtgaaggccgagggcaagttcatcaagaagtgccaggacatggtgatggccgagctggtgaacagcggcgaggacgtgctggtgttctacaacgacagagccagcttccagaccctgatccagatgatgagaagcgagagagacagaatggacgagaacagccccctgatgtaccacatccacctggtggagctgctggccgtgtgcaccgagggcaagaacgtgtacaccgagatcaagtgcaacagcctgctgcccctggacgacatcgtgagagtggtgacccacgaggactgcatccccgaggtgaagatcgcctacatcaacttcctgaaccactgctacgtggacaccgaggtggagatgaaggagatctacaccagcaaccacatgtggaagctgttcgagaacttcctggtggacatctgcagagcctgcaacaacaccagcgacagaaagcacgccgacagcatcctggagaagtacgtgaccgagatcgtgatgagcatcgtgaccaccttcttcagcagccccttcagcgaccagagcaccaccctgcagaccagacagcccgtgttcgtgcagctgctgcagggcgtgttcagagtgtaccactgcaactggctgatgcccagccagaaggccagcgtggagagctgcatcagagtgctgagcgacgtggccaagagcagagccatcgccatccccgtggacctggacagccaggtgaacaacctgttcctgaagagccacagcatcgtgcagaagaccgccatgaactggagactgagcgccagaaacgccgccagaagagacagcgtgctggccgccagcagagactacagaaacatcatcgagagactgcaggacatcgtgagcgccctggaggacagactgagacccctggtgcaggccgagctgagcgtgctggtggacgtgctgcacagacccgagctgctgttccccgagaacaccgacgccagaagaaagtgcgagagcggcggcttcatctgcaagctgatcaagcacaccaagcagctgctggaggagaacgaggagaagctgtgcatcaaggtgctgcagaccctgagagagatgatgaccaaggacagaggctacggcgagaagggcgaggccctgagacaggtgctggtgaacagatactacggcaacgtgagacccagcggcagaagagagagcctgaccagcttcggcaacggccccctgagcgccggcggccccggcaagcccggcggcggcggcggcggcagcggcagcagcagcatgagcagaggcgagatgagcctggccgaggtgcagtgccacctggacaaggagggcgccagcaacctggtgatcgacctgatcatgaacgccagcagcgacagagtgttccacgagagcatcctgctggccatcgccctgctggagggcggcaacaccaccatccagcacagcttcttctgcagactgaccgaggacaagaagagcgagaagttcttcaaggtgttctacgacagaatgaaggtggcccagcaggagatcaaggccaccgtgaccgtgaacaccagcgacctgggcaacaagaagaaggacgacgaggtggacagagacgcccccagcagaaagaaggccaaggagcccaccacccagatcaccgaggaggtgagagaccagctgctggaggccagcgccgccaccagaaaggccttcaccaccttcagaagagaggccgaccccgacgaccactaccagcccggcgagggcacccaggccaccgccgacaaggccaaggacgacctggagatgagcgccgtgatcaccatcatgcagcccatcctgagattcctgcagctgctgtgcgagaaccacaacagagacctgcagaacttcctgagatgccagaacaacaagaccaactacaacctggtgtgcgagaccctgcagttcctggactgcatctgcggcagcaccaccggcggcctgggcctgctgggcctgtacatcaacgagaagaacgtggccctgatcaaccagaccctggagagcctgaccgagtactgccagggcccctgccacgagaaccagaactgcatcgccacccacgagagcaacggcatcgacatcatcaccgccctgatcctgaacgacatcaaccccctgggcaagaagagaatggacctggtgctggagctgaagaacaacgccagcaagctgctgctggccatcatggagagcagacacgacagcgagaacgccgagagaatcctgtacaacatgagacccaaggagctggtggaggtgatcaagaaggcctacatgcagggcgaggtggagttcgaggacggcgagaacggcgaggacggcgccgccagccccagaaacgtgggccacaacatctacatcctggcccaccagctggccagacacaacaaggagctgcagagcatgctgaagcccggcggccaggtggacggcgacgaggccctggagttctacgccaagcacaccgcccagatcgagatcgtgagactggacagaaccatggagcagatcgtgttccccgtgcccagcatctgcgagttcctgaccaaggagagcaagctgagaatctactacaccaccgagagagacgagcagggcagcaagatcaacgacttcttcctgagaagcgaggacctgttcaacgagatgaactggcagaagaagctgagagcccagcccgtgctgtactggtgcgccagaaacatgagcttctggagcagcatcagcttcaacctggccgtgctgatgaacctgctggtggccttcttctaccccttcaagggcgtgagaggcggcaccctggagccccactggagcggcctgctgtggaccgccatgctgatcagcctggccatcgtgatcgccctgcccaagccccacggcatcagagccctgatcgccagcaccatcctgagactgatcttcagcgtgggcctgcagcccaccctgttcctgctgggcgccttcaacgtgtgcaacaagatcatcttcctgatgagcttcgtgggcaactgcggcaccttcaccagaggctacagagccatggtgctggacgtggagttcctgtaccacctgctgtacctggtgatctgcgccatgggcctgttcgtgcacgagttcttctacagcctgctgctgttcgacctggtgtacagagaggagaccctgctgaacgtgatcaagagcgtgaccagaaacggcagaagcatcatcctgaccgccgtgctggccctgatcctggtgtacctgttcagcatcgtgggctacctgttcttcaaggacgacttcatcctggaggtggacagactgcccaacgagaccgccgtgcccgagaccggcgagagcctggccagcgagttcctgttcagcgacgtgtgcagagtggagagcggcgagaactgcagcagccccgcccccagagaggagctggtgcccgccgaggagaccgagcaggacaaggagcacacctgcgagaccctgctgatgtgcatcgtgaccgtgctgagccacggcctgagaagcggcggcggcgtgggcgacgtgctgagaaagcccagcaaggaggagcccctgttcgccgccagagtgatctacgacctgctgttcttcttcatggtgatcatcatcgtgctgaacctgatcttcggcgtgatcatcgacaccttcgccgacctgagaagcgagaagcagaagaaggaggagatcctgaagaccacctgcttcatctgcggcctggagagagacaagttcgacaacaagaccgtgaccttcgaggagcacatcaaggaggagcacaacatgtggcactacctgtgcttcatcgtgctggtgaaggtgaaggacagcaccgagtacaccggccccgagagctacgtggccgagatgatcaaggagagaaacctggactggttccccagaatgagagccatgagcctggtgagcagcgacagcgagggcgagcagaacgagctgagaaacctgcaggagaagctggagagcaccatgaagctggtgaccaacctgagcggccagctgagcgagctgaaggaccagatgaccgagcagagaaagcagaagcagagaatcggcctgctgggccaccccccccacatgaacgtgaacccccagcagcccgcctag

SEQ ID NO: 40278 - DNA, 8133 bp, Artificial Sequence
  derived and/or modified sequence
atgagcgacaagatgagcagcttcctgcacatcggcgacatctgcagcctgtacgccgagggcagcaccaacggcttcatcagcaccctgggcctggtggacgacagatgcgtggtgcagcccgagaccggcgacctgaacaacccccccaagaagttcagagactgcctgttcaagctgtgccccatgaacagatacagcgcccagaagcagttctggaaggccgccaagcccggcgccaacagcaccaccgacgccgtgctgctgaacaagctgcaccacgccgccgacctggagaagaagcagaacgagaccgagaacagaaagctgctgggcaccgtgatccagtacggcaacgtgatccagctgctgcacctgaagagcaacaagtacctgaccgtgaacaagagactgcccgccctgctggagaagaacgccatgagagtgaccctggacgaggccggcaacgagggcagctggttctacatccagcccttctacaagctgagaagcatcggcgacagcgtggtgatcggcgacaaggtggtgctgaaccccgtgaacgccggccagcccctgcacgccagcagccaccagctggtggacaaccccggctgcaacgaggtgaacagcgtgaactgcaacaccagctggaagatcgtgctgttcatgaagtggagcgacaacaaggacgacatcctgaagggcggcgacgtggtgagactgttccacgccgagcaggagaagttcctgacctgcgacgagcacagaaagaagcagcacgtgttcctgagaaccaccggcagacagagcgccaccagcgccaccagcagcaaggccctgtgggaggtggaggtggtgcagcacgacccctgcagaggcggcgccggctactggaacagcctgttcagattcaagcacctggccaccggccactacctggccgccgaggtggaccccgacttcgaggaggagtgcctggagttccagcccagcgtggaccccgaccaggacgccagcagaagcagactgagaaacgcccaggagaagatggtgtacagcctggtgagcgtgcccgagggcaacgacatcagcagcatcttcgagctggaccccaccaccctgagaggcggcgacagcctggtgcccagaaacagctacgtgagactgagacacctgtgcaccaacacctgggtgcacagcaccaacatccccatcgacaaggaggaggagaagcccgtgatgctgaagatcggcaccagccccgtgaaggaggacaaggaggccttcgccatcgtgcccgtgagccccgccgaggtgagagacctggacttcgccaacgacgccagcaaggtgctgggcagcatcgccggcaagctggagaagggcaccatcacccagaacgagagaagaagcgtgaccaagctgctggaggacctggtgtacttcgtgaccggcggcaccaacagcggccaggacgtgctggaggtggtgttcagcaagcccaacagagagagacagaagctgatgagagagcagaacatcctgaagcagatcttcaagctgctgcaggcccccttcaccgactgcggcgacggccccatgctgagactggaggagctgggcgaccagagacacgcccccttcagacacatctgcagactgtgctacagagtgctgagacacagccagcaggactacagaaagaaccaggagtacatcgccaagcagttcggcttcatgcagaagcagatcggctacgacgtgctggccgaggacaccatcaccgccctgctgcacaacaacagaaagctgctggagaagcacatcaccgccgccgagatcgacaccttcgtgagcctggtgagaaagaacagagagcccagattcctggactacctgagcgacctgtgcgtgagcatgaacaagagcatccccgtgacccaggagctgatctgcaaggccgtgctgaaccccaccaacgccgacatcctgatcgagaccaagctggtgctgagcagattcgagttcgagggcgtgagcagcaccggcgagaacgccctggaggccggcgaggacgaggaggaggtgtggctgttctggagagacagcaacaaggagatcagaagcaagagcgtgagagagctggcccaggacgccaaggagggccagaaggaggacagagacgtgctgagctactacagataccagctgaacctgttcgccagaatgtgcctggacagacagtacctggccatcaacgagatcagcggccagctggacgtggacctgatcctgagatgcatgagcgacgagaacctgccctacgacctgagagccagcttctgcagactgatgctgcacatgcacgtggacagagacccccaggagcaggtgacccccgtgaagtacgccagactgtggagcgagatccccagcgagatcgccatcgacgactacgacagcagcggcgccagcaaggacgagatcaaggagagattcgcccagaccatggagttcgtggaggagtacctgagagacgtggtgtgccagagattccccttcagcgacaaggagaagaacaagctgaccttcgaggtggtgaacctggccagaaacctgatctacttcggcttctacaacttcagcgacctgctgagactgaccaagatcctgctggccatcctggactgcgtgcacgtgaccaccatcttccccatcagcaagatggccaagggcgaggagaacaagggcagcaacgtgatgagaagcatccacggcgtgggcgagctgatgacccaggtggtgctgagaggcggcggcttcctgcccatgacccccatggccgccgcccccgagggcaacgtgaagcaggccgagcccgagaaggaggacatcatggtgatggacaccaagctgaagatcatcgagatcctgcagttcatcctgaacgtgagactggactacagaatcagctgcctgctgtgcatcttcaagagagagttcgacgagagcaacagccagaccagcgagaccagcagcggcaacagcagccaggagggccccagcaacgtgcccggcgccctggacttcgagcacatcgaggagcaggccgagggcatcttcggcggcagaaaggagaacacccccctggacctggacgaccacggcggcagaaccttcctgagagtgctgctgcacctgaccatgcacgactacccccccctggtgagcggcgccctgcagctgctgttcagacacttcagccagagacaggaggtgctgcaggccttcaagcaggtgcagctgctggtgaccagccaggacgtggacaactacaagcagatcaagcaggacctggaccagctgagaagcatcgtggagaagagcgagctgtgggtgtacaagggccagggccccgacgagaccatggacggcgccagcggcgagaacgagcacaagaagaccgaggagggcaacaacaagccccagaagcacgagagcaccagcagctacaactacagagtggtgaaggagatcctgatcagactgagcaagctgtgcgtgcaggagagcgccagcgtgagaaagagcagaaagcagcagcagagactgctgagaaacatgggcgcccacgccgtggtgctggagctgctgcagatcccctacgagaaggccgaggacaccaagatgcaggagatcatgagactggcccacgagttcctgcagaacttctgcgccggcaaccagcagaaccaggccctgctgcacaagcacatcaacctgttcctgaaccccggcatcctggaggccgtgaccatgcagcacatcttcatgaacaacttccagctgtgcagcgagatcaacgagagagtggtgcagcacttcgtgcactgcatcgagacccacggcagaaacgtgcagtacatcaagttcctgcagaccatcgtgaaggccgagggcaagttcatcaagaagtgccaggacatggtgatggccgagctggtgaacagcggcgaggacgtgctggtgttctacaacgacagagccagcttccagaccctgatccagatgatgagaagcgagagagacagaatggacgagaacagccccctgatgtaccacatccacctggtggagctgctggccgtgtgcaccgagggcaagaacgtgtacaccgagatcaagtgcaacagcctgctgcccctggacgacatcgtgagagtggtgacccacgaggactgcatccccgaggtgaagatcgcctacatcaacttcctgaaccactgctacgtggacaccgaggtggagatgaaggagatctacaccagcaaccacatgtggaagctgttcgagaacttcctggtggacatctgcagagcctgcaacaacaccagcgacagaaagcacgccgacagcatcctggagaagtacgtgaccgagatcgtgatgagcatcgtgaccaccttcttcagcagccccttcagcgaccagagcaccaccctgcagaccagacagcccgtgttcgtgcagctgctgcagggcgtgttcagagtgtaccactgcaactggctgatgcccagccagaaggccagcgtggagagctgcatcagagtgctgagcgacgtggccaagagcagagccatcgccatccccgtggacctggacagccaggtgaacaacctgttcctgaagagccacagcatcgtgcagaagaccgccatgaactggagactgagcgccagaaacgccgccagaagagacagcgtgctggccgccagcagagactacagaaacatcatcgagagactgcaggacatcgtgagcgccctggaggacagactgagacccctggtgcaggccgagctgagcgtgctggtggacgtgctgcacagacccgagctgctgttccccgagaacaccgacgccagaagaaagtgcgagagcggcggcttcatctgcaagctgatcaagcacaccaagcagctgctggaggagaacgaggagaagctgtgcatcaaggtgctgcagaccctgagagagatgatgaccaaggacagaggctacggcgagaagggcgaggccctgagacaggtgctggtgaacagatactacggcaacgtgagacccagcggcagaagagagagcctgaccagcttcggcaacggccccctgagcgccggcggccccggcaagcccggcggcggcggcggcggcagcggcagcagcagcatgagcagaggcgagatgagcctggccgaggtgcagtgccacctggacaaggagggcgccagcaacctggtgatcgacctgatcatgaacgccagcagcgacagagtgttccacgagagcatcctgctggccatcgccctgctggagggcggcaacaccaccatccagcacagcttcttctgcagactgaccgaggacaagaagagcgagaagttcttcaaggtgttctacgacagaatgaaggtggcccagcaggagatcaaggccaccgtgaccgtgaacaccagcgacctgggcaacaagaagaaggacgacgaggtggacagagacgcccccagcagaaagaaggccaaggagcccaccacccagatcaccgaggaggtgagagaccagctgctggaggccagcgccgccaccagaaaggccttcaccaccttcagaagagaggccgaccccgacgaccactaccagcccggcgagggcacccaggccaccgccgacaaggccaaggacgacctggagatgagcgccgtgatcaccatcatgcagcccatcctgagattcctgcagctgctgtgcgagaaccacaacagagacctgcagaacttcctgagatgccagaacaacaagaccaactacaacctggtgtgcgagaccctgcagttcctggactgcatctgcggcagcaccaccggcggcctgggcctgctgggcctgtacatcaacgagaagaacgtggccctgatcaaccagaccctggagagcctgaccgagtactgccagggcccctgccacgagaaccagaactgcatcgccacccacgagagcaacggcatcgacatcatcaccgccctgatcctgaacgacatcaaccccctgggcaagaagagaatggacctggtgctggagctgaagaacaacgccagcaagctgctgctggccatcatggagagcagacacgacagcgagaacgccgagagaatcctgtacaacatgagacccaaggagctggtggaggtgatcaagaaggcctacatgcagggcgaggtggagttcgaggacggcgagaacggcgaggacggcgccgccagccccagaaacgtgggccacaacatctacatcctggcccaccagctggccagacacaacaaggagctgcagagcatgctgaagcccggcggccaggtggacggcgacgaggccctggagttctacgccaagcacaccgcccagatcgagatcgtgagactggacagaaccatggagcagatcgtgttccccgtgcccagcatctgcgagttcctgaccaaggagagcaagctgagaatctactacaccaccgagagagacgagcagggcagcaagatcaacgacttcttcctgagaagcgaggacctgttcaacgagatgaactggcagaagaagctgagagcccagcccgtgctgtactggtgcgccagaaacatgagcttctggagcagcatcagcttcaacctggccgtgctgatgaacctgctggtggccttcttctaccccttcaagggcgtgagaggcggcaccctggagccccactggagcggcctgctgtggaccgccatgctgatcagcctggccatcgtgatcgccctgcccaagccccacggcatcagagccctgatcgccagcaccatcctgagactgatcttcagcgtgggcctgcagcccaccctgttcctgctgggcgccttcaacgtgtgcaacaagatcatcttcctgatgagcttcgtgggcaactgcggcaccttcaccagaggctacagagccatggtgctggacgtggagttcctgtaccacctgctgtacctggtgatctgcgccatgggcctgttcgtgcacgagttcttctacagcctgctgctgttcgacctggtgtacagagaggagaccctgctgaacgtgatcaagagcgtgaccagaaacggcagaagcatcatcctgaccgccgtgctggccctgatcctggtgtacctgttcagcatcgtgggctacctgttcttcaaggacgacttcatcctggaggtggacagactgcccaacgagaccgccgtgcccgagaccggcgagagcctggccagcgagttcctgttcagcgacgtgtgcagagtggagagcggcgagaactgcagcagccccgcccccagagaggagctggtgcccgccgaggagaccgagcaggacaaggagcacacctgcgagaccctgctgatgtgcatcgtgaccgtgctgagccacggcctgagaagcggcggcggcgtgggcgacgtgctgagaaagcccagcaaggaggagcccctgttcgccgccagagtgatctacgacctgctgttcttcttcatggtgatcatcatcgtgctgaacctgatcttcggcgtgatcatcgacaccttcgccgacctgagaagcgagaagcagaagaaggaggagatcctgaagaccacctgcttcatctgcggcctggagagagacaagttcgacaacaagaccgtgaccttcgaggagcacatcaaggaggagcacaacatgtggcactacctgtgcttcatcgtgctggtgaaggtgaaggacagcaccgagtacaccggccccgagagctacgtggccgagatgatcaaggagagaaacctggactggttccccagaatgagagccatgagcctggtgagcagcgacagcgagggcgagcagaacgagctgagaaacctgcaggagaagctggagagcaccatgaagctggtgaccaacctgagcggccagctgagcgagctgaaggaccagatgaccgagcagagaaagcagaagcagagaatcggcctgctgggccaccccccccacatgaacgtgaacccccagcagcccgcctag

SEQ ID NO: 40279 - protein, 1941 aa, Artificial Sequence
  derived and/or modified sequence
MSSDSELAVFGEAAPFLRKSERERIEAQNRPFDAKTSVFVAEPKESFVKGTIQSREGGKVTVKTEGGATLTVKDDQVFPMNPPKYDKIEDMAMMTHLHEPAVLYNLKERYAAWMIYTYSGLFCVTVNPYKWLPVYKPEVVTAYRGKKRQEAPPHIFSISDNAYQFMLTDRENQSILITGESGAGKTVNTKRVIQYFATIAVTGEKKKEEITSGKIQGTLEDQIISANPLLEAFGNAKTVRNDNSSRFGKFIRIHFGTTGKLASADIETYLLEKSRVVFQLKAERSYHIFYQITSNKKPELIEMLLITTNPYDYPFVSQGEISVASIDDQEELMATDSAIDILGFTNEEKVSIYKLTGAVMHYGNLKFKQKQREEQAEPDGTEVADKAAYLQSLNSADLLKALCYPRVKVGNEYVTKGQTVEQVSNAVGALAKAVYEKMFLWMVARINQQLDTKQPRQYFIGVLDIAGFEIFDFNSLEQLCINFTNEKLQQFFNHHMFVLEQEEYKKEGIEWTFIDFGMDLAACIELIEKPMGIFSILEEECMFPKATDTSFKNKLYDQHLGKSANFQKPKVVKGKAEAHFALIHYAGVVDYNITGWLEKNKDPLNETVVGLYQKSAMKTLAQLFSGAQTAEGEGAGGGAKKGGKKKGSSFQTVSALFRENLNKLMTNLRSTHPHFVRCIIPNETKTPGAMEHELVLHQLRCNGVLEGIRICRKGFPSRILYADFKQRYKVLNASAIPEGQFIDSKKASEKLLASIDIDHTQYKFGHTKVFFKAGLLGLLEEMRDDKLAQLITRTQARCRGFLARVEYQRMVERREAIFCIQYNIRSFMNVKHWPWMKLFFKIKPLLKSAETEKEMATMKEEFQKIKDELAKSEAKRKELEEKMVTLLKEKNDLQLQVQAEAEGLADAEERCDQLIKTKIQLEAKIKEVTERAEDEEEINAELTAKKRKLEDECSELKKDIDDLELTLAKVEKEKHATENKVKNLTEEMAGLDETIAKLTKEKKALQEAHQQTLDDLQAEEDKVNTLTKAKIKLEQQVDDLEGSLEQEKKLRMDLERAKRKLEGDLKLAQESIMDIENEKQQLDEKLKKKEFEISNLQSKIEDEQALGIQLQKKIKELQARIEELEEEIEAERASRAKAEKQRSDLSRELEEISERLEEAGGATSAQIEMNKKREAEFQKMRRDLEEATLQHEATAATLRKKHADSVAELGEQIDNLQRVKQKLEKEKSEMKMEIDDLASNVETVSKAKGNLEKMCRTLEDQLSELKSKEEEQQRLINDLTAQRGRLQTESGEFSRQLDEKEALVSQLSRGKQAFTQQIEELKRQLEEEIKAKNALAHALQSSRHDCDLLREQYEEEQESKAELQRALSKANTEVAQWRTKYETDAIQRTEELEEAKKKLAQRLQAAEEHVEAVNAKCASLEKTKQRLQNEVEDLMLDVERTNAACAALDKKQRNFDKILAEWKQKCEETHAELEASQKEARSLGTELFKIKNAYEESLDQLETLKRENKNLQQEISDLTEQIAEGGKRIHELEKIKKQVEQEKCELQAALEEAEASLEHEEGKILRIQLELNQVKSEVDRKIAEKDEEIDQLKRNHIRIVESMQSTLDAEIRSRNDAIRLKKKMEGDLNEMEIQLNHANRMAAEALRNYRNTQGILKDTQIHLDDALRSQEDLKEQLAMVERRANLLQAEIEELRATLEQTERSRKIAEQELLDASERVQLLHTQNTSLINTKKKLETDISQMQGEMEDILQEARNAEEKAKKAITDAAMMAEELKKEQDTSAHLERMKKNMEQTVKDLQLRLDEAEQLALKGGKKQIQKLEARVRELEGEVESEQKRNAEAVKGLRKHERRVKELTYQTEEDRKNILRLQDLVDKLQAKVKSYKRQAEEAEEQSNTNLAKFRKLQHELEEAEERADIAESQVNKLRVKSREVHTKVISEE

SEQ ID NO: 40280 - protein, 182 aa, Artificial Sequence
  derived and/or modified sequence
MSSDSELAVFGEAAPFLRKSERERIEAQNRPFDAKTSVFVAEPKESFVKGTIQSREGGKVTVKTEGGATLTVKDDQVFPMNPPKYDKIEDMAMMTHLHEPAVLYNLKERYAAWMIYTYSGLFCVTVNPYKWLPVYKPEVVTAYRGKKRQEAPPHIFSISDNAYQFMLTDRENQSILITGESG

SEQ ID NO: 40281 - protein, 134 aa, Artificial Sequence
  derived and/or modified sequence
MSSDSELAVFGEAAPFLRKSERERIEAQNRPFDAKTSVFVAEPKESFVKGTIQSREGGKVTVKTEGGATLTVKDDQVFPMNPPKYDKIEDMAMMTHLHEPAVLYNLKERYAAWMIYTYSGLFCVTVNPYKWLPV

SEQ ID NO: 40282 - protein, 708 aa, Artificial Sequence
  derived and/or modified sequence
MSSDSELAVFGEAAPFLRKSERERIEAQNRPFDAKTSVFVAEPKESFVKGTIQSREGGKVTVKTEGGATLTVKDDQVFPMNPPKYDKIEDMAMMTHLHEPAVLYNLKERYAAWMIYTYSGLFCVTVNPYKWLPVYKPEVVTAYRGKKRQEAPPHIFSISDNAYQFMLTDRENQSILITGESGAGKTVNTKRVIQYFATIAVTGEKKKEEITSGKIQGTLEDQIISANPLLEAFGNAKTVRNDNSSRFGKFIRIHFGTTGKLASADIETYLLEKSRVVFQLKAERSYHIFYQITSNKKPELIEMLLITTNPYDYPFVSQGEISVASIDDQEELMATDSAIDILGFTNEEKVSIYKLTGAVMHYGNLKFKQKQREEQAEPDGTEVADKAAYLQSLNSADLLKALCYPRVKVGNEYVTKGQTVEQVSNAVGALAKAVYEKMFLWMVARINQQLDTKQPRQYFIGVLDIAGFEIFDFNSLEQLCINFTNEKLQQFFNHHMFVLEQEEYKKEGIEWTFIDFGMDLAACIELIEKPMGIFSILEEECMFPKATDTSFKNKLYDQHLGKSANFQKPKVVKGKAEAHFALIHYAGVVDYNITGWLEKNKDPLNETVVGLYQKSAMKTLAQLFSGAQTAEGEGAGGGAKKGGKKKGSSFQTVSALFREEQSNTNLAKFRKLQHELEEAEERADIAESQVNKLRVKSREVHTKVISEE

SEQ ID NO: 40283 - DNA, 5826 bp, Artificial Sequence
  derived and/or modified sequence
atgagctccgacagtgagttggctgtcttcggtgaagctgcgcctttcctacgtaaatcagagagggagagaatcgaagcccaaaacagaccatttgatgccaaaacatctgtttttgtggccgaaccaaaggagagctttgtgaaaggtacaatccaaagccgagaaggggggaaagttactgtcaaaaccgagggaggcgcgactctgactgtgaaagatgatcaggtgtttcctatgaaccctcctaagtatgataagattgaagacatggccatgatgacccaccttcacgagccagcggtgctgtacaatcttaaagagcgttatgctgcctggatgatctacacttattccgggctcttctgtgtcaccgtgaatccttacaaatggttgcctgtgtacaagccggaggtcgtgactgcctatcgaggcaagaagaggcaggaggcacccccgcacattttcagcatatccgacaatgcgtatcaatttatgctcaccgaccgcgaaaatcagagcattttgattactggggaatccggtgctggcaagacagtcaataccaaacgtgtgatacagtactttgccacaatcgcagtcacaggcgagaagaaaaaagaggagatcacaagcggcaagatacaggggactctcgaagaccagattatctccgcaaaccccctccttgaggcctttggtaacgccaagactgtccgaaatgacaacagttcaagattcggaaagttcatccggattcactttggaacaacaggaaagcttgccagcgctgatatcgagacctacctgctggaaaagagtagggtagtctttcaacttaaggccgaacgcagctaccacattttttaccagattacgtcgaacaagaaaccagaattgattgaaatgctgctgataaccaccaacccctacgactaccccttcgtctcccagggagaaatttccgttgcctctattgacgaccaagaagagctgatggccacggatagcgccattgacatcctcggtttcacaaacgaagaaaaggtgtccatctacaagctgacgggggcggtgatgcattacggaaatctcaaattcaagcagaagcagcgggaagaacaggcagaacctgatggaactgaggtggctgacaaggctgcttatctgcagtcgctgaattcagccgatctgctaaaagccttatgctaccccagggtcaaagtgggaaatgagtacgtgacaaaaggccagacggtggagcaggtatctaacgctgtgggcgcgttggctaaagctgtatatgaaaagatgtttctgtggatggttgcgcgaattaaccaacagctcgataccaagcaaccccgccagtacttcattggagtgctggatattgccgggttcgaaatcttcgatttcaactccctggagcaactgtgtatcaatttcaccaatgagaaactgcagcagttctttaaccaccacatgttcgtccttgagcaggaagagtacaagaaggagggtattgagtggacctttatcgatttcggaatggacctggccgcatgcatcgagctgattgaaaagccaatgggcatattctcaatcctggaagaagagtgcatgttccccaaggccactgatacttccttcaagaataaactgtacgaccagcaccttgggaaaagcgcgaacttccaaaagcccaaggtggtcaaagggaaagctgaggcgcactttgcactcatccactatgccggcgtggttgactacaatataactggttggcttgagaagaacaaggatccgctaaacgaaactgtcgtagggctctatcaaaagagcgcaatgaaaacactagcccaactgttctccggcgcacagaccgccgagggcgaaggtgccggcggcggtgctaagaagggaggcaagaagaagggtagctccttccaaacagtatccgctctgttcagagagaatcttaataaactgatgacgaaccttagaagcacccacccccacttcgtaaggtgcatcattccaaacgaaacgaagaccccaggggctatggagcacgaattagttcttcatcagcttcgctgcaacggtgtgctagaaggtattcgcatctgtaggaaaggtttcccatctagaatactgtatgccgacttcaagcagcgctacaaggtgctcaacgctagcgccatccctgagggtcagtttatcgacagcaagaaagccagtgagaaactgctcgcatccattgatatagatcacactcagtataagttcggacacacgaaagtatttttcaaggcaggactgcttgggctcctagaggagatgcgggacgataagttggcgcagctgatcacaaggacgcaggccaggtgtcgagggttcctcgcccgcgtggagtaccaaagaatggtcgaaagacgcgaagcaatcttctgcatccagtacaacatccggtcttttatgaatgtgaagcattggccatggatgaaattgtttttcaagataaaacccttacttaagtcggctgaaacagaaaaggagatggctacaatgaaggaagagttccaaaaaattaaggacgagctcgcgaaaagcgaggcaaagcgtaaggagttagaggaaaagatggtaacccttttaaaagaaaaaaatgatctccagctgcaggttcaagccgaggctgaagggctagcagatgccgaagaaagatgcgaccaacttatcaagaccaaaatccagttagaggcaaaaattaaggaagttaccgagcgagccgaggacgaagaggaaatcaatgccgaactgacggcaaaaaaacgcaagctagaagacgaatgtagcgagctgaagaaagacatcgatgacctggaactcactctcgctaaagtcgagaaggagaagcacgcaacggagaataaagttaagaacctgaccgaggagatggccggacttgatgaaacgatcgctaaattaacaaaagagaagaaggccctccaggaagcccatcagcaaactctcgatgatctccaggccgaggaggataaggtgaatactcttaccaaggcaaaaattaagttggaacagcaggtagacgatctcgagggctcactggagcaagagaagaaactgcggatggatctcgagagagcaaaacgcaaactagaaggagacctcaagctggcacaggagtccatcatggacatagaaaatgaaaagcaacagctcgatgagaagctgaagaagaaagagtttgaaatctcaaacctgcagagcaagatcgaagacgaacaagcgctggggatacagctgcagaaaaagatcaaagagttacaggctcgcattgaagaactggaggaggaaatcgaggccgagagggcctctcgcgcaaaggcagaaaaacagcgcagcgacttaagccgcgaactcgaggagatctctgagagactggaagaggcgggcggtgcaacaagtgcgcagattgaaatgaacaagaagagagaagccgagtttcaaaagatgcgcagggatctggaggaggctaccttgcagcatgaagcaaccgctgcgacgctgaggaagaagcatgcagattctgtggcagaactgggagaacaaatagacaacctgcagcgggtaaaacaaaaactggagaaggaaaagtccgagatgaaaatggaaatcgacgacctggcttctaatgtggagacagtgagtaaagccaaaggcaacctggaaaagatgtgcagaactttggaagaccagctcagtgagttaaagtcgaaggaagaggaacagcagcgccttatcaatgacctgacagcccagcgggggcggcttcagaccgaaagcggcgagttttctcggcagctggacgagaaagaagcactggtgtcgcagctgtctcggggaaaacaggcattcactcagcaaattgaggaactgaaacggcagctggaagaggagatcaaggcaaagaacgccctggctcatgcactgcagtcatcgcggcacgactgcgacttactccgcgagcagtatgaagaggaacaggaatcaaaagccgagctgcagagggccctcagtaaggccaacaccgaagttgctcagtggcgtactaaatacgaaaccgacgccatccaacgcacagaggagcttgaggaagcgaaaaagaagctggcacaacgactccaagcagccgaggagcatgttgaggccgttaacgcgaaatgtgcctccctagagaaaaccaaacagcggttgcagaatgaggtggaagacttaatgctcgatgtggagcggactaatgcggcctgcgcagccctggacaagaagcagagaaattttgacaagatccttgccgagtggaagcaaaaatgcgaggagacccacgctgagttagaggcttctcaaaaagaagcccgctccctggggacggaactctttaagatcaaaaatgcctatgaagagtccctggatcagctcgagactctcaagcgcgagaacaagaatttgcagcaggaaatctccgatctcaccgagcaaatagcagaaggtgggaaacgcatccatgagctcgaaaagataaagaaacaggtggagcaggagaagtgtgagctacaggcagcactggaagaagccgaggcctccttggaacacgaggaagggaaaatcctccggatacagttggaactcaatcaggtcaagtctgaggtggatcgaaaaatcgcggagaaagatgaggagatcgatcagctgaagaggaaccacatccggatagtcgaaagtatgcaatccacgctcgacgctgagatccgctccaggaatgacgcgatcagactcaaaaaaaaaatggaaggcgacctgaatgagatggagatccagctgaaccacgcgaatcgcatggcggcagaggcactccggaactaccggaatacccaaggcatccttaaggatacccagatccatttggacgacgccctgcggtcccaggaggatctgaaggagcagctcgccatggtggagcgcagagctaaccttttgcaagctgagatcgaagagcttcgcgctacccttgaacaaaccgaacgatccagaaaaatagccgagcaagagctgcttgacgcgtcagagagagtccagctcctccatacacagaataccagcctcataaatacaaaaaagaagctggaaactgacatttctcagatgcaaggagaaatggaggacattctgcaggaagctcggaacgccgaggaaaaggctaagaaagctatcacagatgccgcaatgatggctgaggaactgaagaaggagcaggacacctcagctcacttggaacgtatgaaaaaaaatatggagcagaccgtaaaggacctccagttgcgattggacgaagctgaacagctggctcttaagggtggcaagaagcaaattcaaaaattagaggctcgcgtgcgtgagctagagggggaagtggagtcggagcaaaagcgaaacgcggaagctgtcaagggattaagaaagcatgaacgtcgagtaaaagagctcacatatcagactgaggaagataggaagaatatactccgcctgcaggatctggtggacaagctacaggcaaaagtgaagtcgtacaaacgacaggctgaggaagcagaggaacagagcaacactaatttagcaaaattccggaagctgcagcatgaactggaagaggccgaagagagggctgacattgccgaatctcaggtcaataagttgcgagtgaaatctagggaggtgcacacaaaagttatttccgaggagtag

SEQ ID NO: 40284 - DNA, 5826 bp, Artificial Sequence
  derived and/or modified sequence
atgtcatccgactctgagttggctgttttcggcgaggccgctccttttctaagaaagtctgagcgcgaacgcattgaagcacagaaccggccatttgacgcaaagacctctgtcttcgtcgcagaacccaaggaatctttcgtcaagggtactattcagtcacgggagggcggcaaggtgacagtcaagacagaaggaggagctacactgacggttaaagatgaccaggtgttccccatgaacccccccaaatatgataaaattgaagacatggctatgatgacccatttgcatgagccggctgtactatacaatctcaaggaacgttacgcggcctggatgatctatacctacagcggattattttgtgtgacagtgaacccatataagtggttgccggtgtacaaacctgaggtggtgacggcttaccgcggaaagaaacgtcaagaggcaccccctcatatcttctctattagcgacaatgcctaccaattcatgcttacagatcgggaaaaccagagcatactcattacaggtgaatccggcgccggtaagaccgtgaataccaaaagagtaatacagtattttgctacaattgctgtcactggcgagaaaaaaaaagaagaaattacctccggcaagatccagggaaccctggaagatcagataatttccgcaaatcccctgctcgaggcatttggcaacgccaaaactgtgcgcaacgacaattcttcacggttcggcaaattcatccgcatccattttggaaccactggaaagttggcctcagccgatatcgaaacttaccttctggaaaaaagcagagttgtgtttcaactcaaagccgaacggtcataccatatcttttaccagattacaagcaataaaaagcccgagttaatcgagatgctactgataactactaacccttacgactacccttttgtgtctcaaggcgaaatctctgtggccagtattgacgaccaggaagagctgatggcaaccgactcagccatcgacattttgggattcaccaacgaagagaaagtcagtatttacaaactgacaggcgccgtgatgcattacggcaacttgaagttcaagcagaaacagcgggaggagcaggcggaaccagatggcaccgaggtggccgataaagctgcctacctgcaatccttgaactcggcagacttactaaaagccctctgctatcctagggtcaaggtgggaaacgaatacgtgaccaaggggcagaccgtggaacaagtcagcaacgcagtgggcgccttggctaaggccgtctacgagaaaatgttcctgtggatggtggctagaatcaaccagcagctcgacaccaaacagcccaggcaatacttcatcggagtgctggatattgccggatttgagatattcgacttcaactctttggagcagctgtgcatcaacttcactaacgagaagctccagcaatttttcaatcatcatatgtttgtcctagaacaggaggagtacaagaaggagggaatcgaatggacattcattgattttggcatggatctggcggcatgcatcgagctcattgaaaaacctatgggcattttttccatcctagaggaagagtgtatgttccccaaggctaccgatactagtttcaagaacaaactctatgaccagcaccttggcaaaagcgccaactttcagaaaccaaaagtagtaaaaggaaaggcggaggcccattttgctttgatccactatgcgggcgtcgtggactacaatatcacaggttggcttgagaaaaacaaggaccctctgaacgagaccgtcgtgggcctgtatcagaaatcagcaatgaagacactcgcccagcttttctctggggcgcagaccgcagaaggtgagggcgccgggggtggagccaagaaggggggcaagaaaaaggggtcatcattccagactgttagcgctctcttcagggagaacctgaacaagcttatgactaatctccgatccacccacccccatttcgtgaggtgcatcattcccaatgagactaaaaccccaggtgcaatggaacacgagctggtgctgcaccagctgcgttgtaatggtgttctggaagggattcgaatctgtcgaaagggttttccgtctcggatcttatatgctgatttcaagcagcgttataaggtcctgaatgcttcagccatcccagaaggacagtttatcgattcaaagaaggccagtgaaaaattgttagcatctattgacatagatcacacccagtacaagttcggacacacaaaagtattctttaaagccggtctgctcggcctgttggaagaaatgcgtgatgataagctcgcacaactgattacgagaacgcaggcacggtgtcgaggattcctcgcccgtgtggagtaccagcgcatggtggagagaagagaggctattttttgcatccagtacaacataagatcattcatgaatgtgaaacactggccatggatgaaattattcttcaagattaaacctttgcttaaatccgccgagacggagaaagaaatggccacaatgaaggaagagtttcaaaaaatcaaagatgagctggctaagagcgaagccaagaggaaggagctcgaagagaagatggtgacgctgttgaaggaaaagaatgacctgcagcttcaagtgcaagctgaggccgaaggcttggccgacgcagaggaacgctgtgatcagctaataaagaccaagatccagcttgaagctaagatcaaagaagtgactgagcgggctgaggatgaggaggagattaatgcagagctgacagcgaaaaaaagaaagctcgaggatgagtgttcagaactgaagaaggacatcgacgacctcgaactcacgttagcaaaagtagagaaggagaagcacgccacggaaaataaggtcaagaatctcacagaggagatggcaggcctggacgagaccatcgccaaactgactaaagagaaaaaggcactccaggaggcccatcagcagaccctggacgatctccaggccgaggaggacaaagttaacacactgaccaaggccaaaatcaagctggagcagcaggtggatgatttggagggctccttggagcaggagaagaagctgcgaatggatttggagcgggctaaaagaaaactcgaaggtgatctaaaactggcccaggaaagtataatggacattgagaatgaaaaacagcaactagacgaaaagcttaaaaagaaagagtttgagatctctaatctacagagtaaaatcgaagacgaacaggccctgggtatccagctgcagaaaaagattaaagagctgcaggcacgaatcgaggagctggaggaagaaatcgaagcagaacgagctagtagagctaaggccgagaagcagaggagtgatctgtcaagagagctggaggaaatttctgaaagattggaagaagcagggggggcaacctcggctcagattgagatgaataagaagcgggaggctgaattccaaaagatgaggagagacttggaagaagccacgttgcagcacgaggccaccgcggccaccctgcgtaagaagcacgccgacagcgtggccgagctgggtgagcaaattgacaatttacagagagtgaagcaaaagctggagaaggaaaagtccgaaatgaaaatggagatcgacgatctggcaagtaatgtagagaccgtgtccaaagcaaagggaaaccttgaaaagatgtgccgcaccctcgaggaccagctgagcgagctcaaatctaaggaggaagagcagcagcgtcttatcaatgatcttacggcccagcgcggacggctccaaaccgagagcggggagttcagccggcagctggatgaaaaagaggcactggttagccagctcagcagagggaaacaagcttttactcagcagattgaggagcttaagcgtcagctggaggaggagatcaaggctaaaaatgcactggcccacgctttgcagtcatcgcgccatgactgtgatctcctgcgggagcagtacgaggaagagcaggaatctaaggcggagctccagagggcactgtctaaagccaataccgaggtggctcagtggcgaaccaaatatgaaactgacgcaattcagcgaaccgaagagttagaggaggccaagaaaaagcttgcccagagactgcaagccgcagaggaacacgttgaagccgttaatgcaaaatgcgcaagtctcgaaaaaactaaacaaagactgcaaaacgaagtcgaagatctgatgctagatgtggaaaggacaaacgccgcctgcgccgctctggacaagaaacaacgcaacttcgataagatccttgccgaatggaagcagaagtgcgaagaaacccacgctgagttagaagcctctcaaaaagaggcccgatcccttggtactgagctcttcaagataaagaacgcctatgaggagtcgttggaccaactagagacgctgaaaagagagaataaaaacctccaacaggaaatctcagatctgaccgaacagattgcggaggggggcaagcgcatccacgagttggaaaaaatcaagaaacaggtcgaacaggagaagtgtgaactccaggctgctttggaagaggcagaggcaagtttggaacacgaagaggggaagatcctgcggatccagcttgaactgaatcaggttaagagcgaagttgaccgcaaaatcgctgaaaaagatgaagagatcgaccagctgaagagaaatcacatacgcattgtggaatccatgcagtctaccttggatgcggagattagatcaaggaatgatgcaatcaggctgaaaaaaaagatggaaggtgatctcaatgagatggagatacagttgaatcacgccaatcgaatggccgccgaggctttaaggaactatcgaaacactcaggggatcttaaaggatacgcaaatccacctggatgacgccttgcgatcccaggaagacttaaaggaacagctcgccatggtggagcggcgagcaaacctgctgcaggccgagatcgaagaactcagagccacattagagcagaccgagagatctcgaaaaatcgcagaacaagagctcctggatgcctctgaaagagttcagctcctgcatacgcaaaatacttctctgattaataccaagaagaaactcgagaccgatatctcacagatgcaaggtgagatggaagatattttgcaggaagcgcggaatgccgaagaaaaggccaaaaaagccatcaccgacgctgccatgatggccgaagaactcaagaaggagcaggacactagtgcgcacttggaacggatgaaaaaaaacatggagcagaccgtgaaggacctgcagctcagactggatgaggccgagcagctcgccctcaaaggggggaaaaagcagatccagaaactcgaagcccgcgtgcgcgagttagaaggcgaggttgaaagtgaacagaagcgtaatgctgaagctgtgaagggccttagaaaacacgagcgaagagtgaaagagcttacttaccagactgaggaggataggaaaaatatcctgcgcctgcaggacctcgtggacaagctgcaggccaaagtaaaatcctataaacgccaggctgaagaggccgaggagcagagtaacactaatctggcaaagttcagaaaactgcagcacgaactagaagaagccgaagaaagagctgatatcgccgaatcgcaggtgaataagctgagagtgaaaagtcgggaggtccacactaaagtaatttcggaggagtag

SEQ ID NO: 40285 - DNA, 549 bp, Artificial Sequence
  derived and/or modified sequence
atgagttcagactcggaattggcagtgtttggggaggcagctccgtttctacgcaagagtgagcgagaacggattgaggcccagaaccggccctttgacgccaaaacctctgtcttcgtggccgaaccgaaagagtcctttgttaagggcactatacagtctagagagggtgggaaagtgaccgtcaaaacagagggaggagctaccctcactgtgaaggatgatcaagtttttcctatgaacccaccgaaatacgacaagatcgaggatatggccatgatgactcacttgcacgaaccagccgtcctatataacctgaaggagcgctatgccgcctggatgatttatacgtatagcggactgttctgcgtcacagtgaacccatacaagtggttacctgtgtacaagcctgaggtcgttacagcctaccggggaaagaaacgccaagaagccccaccccacatctttagtattagtgacaacgcttatcagtttatgctgacagacagagagaaccaatcaattctgatcacaggtgaaagcgggtag

SEQ ID NO: 40286 - DNA, 405 bp, Artificial Sequence
  derived and/or modified sequence
atgagctctgattccgagcttgctgtgtttggagaagccgcccccttcctcagaaagtcagagagagaacgaatcgaggctcagaatcggccgttcgacgccaaaacctccgtgtttgtagcagaaccgaaggagagctttgttaagggcactattcaaagtagggagggaggaaaggtgactgtcaaaactgaaggtggcgcgaccctcaccgtcaaggatgaccaggtcttccccatgaatccccccaaatacgataaaatagaggatatggctatgatgacccacctgcatgaacctgccgttctgtataatcttaaggaaagatacgcggcttggatgatttacacctatagcggactcttctgcgtcaccgttaacccctataaatggctccccgtttag

SEQ ID NO: 40287 - DNA, 2127 bp, Artificial Sequence
  derived and/or modified sequence
atgtccagcgattcagaactagcagtgtttggggaagccgcaccctttctgcgaaaatccgagcgagaacggatcgaagcccagaatcgcccattcgatgctaaaaccagcgtctttgtggcggagcctaaggaaagtttcgttaaaggaacaattcagtcaagggaggggggaaaggtcactgtgaaaaccgaaggcggggccacccttactgtcaaagacgaccaagtgtttcccatgaaccctcccaaatacgacaagatagaagatatggcaatgatgacacatcttcatgaaccagcagtcctgtataacctgaaggaacgttacgcagcctggatgatatacacttactcaggcctgttttgcgttaccgtcaatccttataagtggctgccggtgtacaagcctgaggtcgttacagcatatcggggcaagaagcgccaagaagccccaccacatatctttagcatcagcgacaatgcctatcagtttatgctgacagaccgcgagaaccagtctatccttatcacaggggagagcggtgcaggcaagactgtcaacaccaagagagtaattcagtactttgccaccatcgccgtaacgggcgagaaaaaaaaagaggaaatcactagcgggaagatccaaggcaccctcgaggaccagatcatctccgcgaatcctctgctggaagccttcggtaatgctaaaactgtccgcaatgacaattccagtaggtttgggaagttcatcagaatccatttcggcactacgggcaagttggcatcagctgacattgaaacgtacctgctcgaaaaatctcgggtagtgttccagctgaaggccgagagaagttatcacattttttatcagattacctctaataaaaagcccgagctaattgagatgctgctgatcacaactaatccatacgactaccctttcgtgtctcagggcgagatttcagtcgcatccatcgatgatcaggaggagctgatggcaaccgactctgccattgatatcctgggatttacaaatgaagagaaggtgtcgatctataaacttacaggcgcagtgatgcattatggcaacctgaaattcaagcagaaacagcgagaggagcaggctgaacccgatggcacagaggtggcagataaagcagcttatcttcagagtcttaactctgccgatctactcaaagccctgtgttacccgagggtaaaggttggcaatgagtatgtgaccaagggccagacagtcgaacaggtgagcaacgccgtgggtgccttagctaaggctgtttatgaaaaaatgtttctatggatggtggccagaataaaccagcagctggataccaaacagccaaggcagtacttcatcggagtgctagatatagcagggttcgagatcttcgactttaactcgcttgaacagctttgtatcaatttcacaaacgagaagctgcagcagttcttcaaccatcacatgtttgtgctcgaacaggaagagtataagaaggaggggattgagtggaccttcattgacttcgggatggaccttgctgcttgtatcgagttgatcgaaaagcccatgggaatatttagcatccttgaggaggagtgcatgttccccaaggcgacagacacaagttttaagaacaagctgtacgatcagcatctcgggaagtccgctaacttccaaaagccaaaagttgtgaaagggaaggccgaagcgcacttcgctttaatccattacgcaggggtggtagactacaacatcaccggttggttagagaaaaataaggatcctctgaacgagaccgtggtggggctttaccagaaaagcgcaatgaagacgttggcgcagctcttttctggagcccagaccgctgagggcgagggtgccggcggcggagcaaaaaaaggcggcaagaagaagggctctagtttccaaaccgtctctgccctgttcagagaggaacagagtaacaccaatctggcaaaattcagaaagctgcagcatgaactggaagaggccgaggaaagggcagatattgcagaatcgcaggtaaacaaactgagggttaaaagtcgggaggtacacaccaaggtgatttcagaggaatag

SEQ ID NO: 40288 - DNA, 5826 bp, Artificial Sequence
  derived and/or modified sequence
atgagcagtgacagcgagctggccgtgtttggagaggccgcccccttcctgaggaagtctgagcgggagagaattgaggcccagaaccggccctttgatgccaagacctctgtgtttgtggccgagcccaaggagagctttgtgaagggcaccatccagagccgggagggcggcaaggtgacagtgaagacagagggcggggccaccctgactgtgaaggatgaccaggtgttccccatgaacccccccaagtatgacaagattgaggacatggccatgatgacccacctgcacgagcctgctgtgctgtacaacctgaaggagagatatgctgcctggatgatctacacctacagcggcctcttctgtgtgacagtgaacccctacaagtggctgcctgtgtacaagccagaggtggtgacagcctaccggggcaagaagaggcaggaggccccaccccacatcttcagcatcagtgacaatgcctaccagttcatgctgacagaccgggagaaccagagcatcctgatcaccggggagagcggggccggcaagacagtgaacaccaagagggtcatccagtactttgccaccatcgctgtgactggagagaagaagaaggaggagatcaccagcggcaagatccagggcaccctggaggaccagatcatcagcgccaaccccctgctggaggcctttggaaatgccaagacagtgagaaatgacaacagcagcagatttgggaagttcatccgcatccacttcggcaccaccgggaagctggccagcgctgacatcgagacctacctgctggagaagagccgggtggtgttccagctgaaggccgagaggagctaccacatcttctaccagatcaccagcaacaagaagccagagctgattgagatgctgctgatcaccaccaacccctatgactacccctttgtgtcccagggcgagatctctgtggccagcattgatgaccaggaggagctgatggccacagattctgccatcgacatcctgggcttcaccaatgaggagaaggtgtccatctacaagctgaccggggctgtgatgcactacggcaacctgaagttcaagcagaagcagcgggaggagcaggccgagccagatggaacagaggtggccgacaaggccgcctacctgcagagcctgaacagcgctgacctgctgaaggccctgtgctacccccgggtgaaggtgggcaatgaatatgtgaccaagggccagacagtggagcaggtgtccaatgctgtgggcgccctggccaaggctgtgtatgagaagatgttcctgtggatggtggcccgcatcaaccagcagctggacaccaagcagccccggcagtacttcatcggcgtgctggacattgctggctttgagatctttgacttcaacagcctggagcagctgtgcatcaacttcaccaatgagaagctgcagcagttcttcaaccaccacatgtttgtgctggagcaggaggagtacaagaaggagggcatcgagtggaccttcatcgactttggcatggacctggccgcctgcatcgagctgattgagaagcccatgggcatcttcagcatcctggaggaggagtgcatgttccccaaggccacagacaccagcttcaagaacaagctgtatgaccagcacctgggcaagagcgccaacttccagaagcccaaggtggtgaagggcaaggccgaggcccactttgccctgatccactacgccggcgtggtggactacaacatcaccggctggctggagaagaacaaggaccccctgaatgaaacagtggtgggcctgtaccagaagagcgccatgaagaccctggcccagctgttcagcggggcccagacagctgagggggagggcgccggcggcggggccaagaagggcggcaagaagaagggcagcagcttccagacagtgtctgccctcttccgggagaacctgaacaagctgatgaccaacctgcggagcacccacccccactttgtgcgctgcatcatccccaatgagaccaagacccctggggccatggagcacgagctggtgctgcaccagctgcgctgcaatggagtgctggagggcatccgcatctgcaggaagggcttccccagccgcatcctgtatgctgacttcaagcagcgctacaaggtgctgaatgccagcgccatccctgagggccagttcatcgacagcaagaaggccagcgagaagctgctggccagcattgatattgaccacacccagtacaagtttggccacaccaaggtgttcttcaaggccggcctgctgggcctgctggaggagatgagagatgacaagctggcccagctgatcaccaggacccaggcccgctgccggggcttcctggcccgggtggagtaccagaggatggtggagcggcgggaggccatcttctgcatccagtacaacatccgctccttcatgaatgtgaagcactggccctggatgaagctgttcttcaagatcaagcccctgctgaagtctgctgagacagagaaggagatggccaccatgaaggaggagttccagaagatcaaggatgagctggccaagtctgaggccaagaggaaggagctggaggagaagatggtgaccctgctgaaggagaagaatgacctgcagctgcaggtgcaggccgaggccgagggcctggctgatgctgaggagcgctgtgaccagctgatcaagaccaagatccagctggaggccaagatcaaggaggtgacagagcgggcagaagatgaggaggagatcaatgctgagctgacagccaagaagaggaagctggaggatgagtgcagcgagctgaagaaggacattgatgacctggagctgaccctggccaaggtggagaaggagaagcacgccacagagaacaaggtgaagaacctgacagaggagatggccggcctggatgagaccatcgccaagctgaccaaggagaagaaggccctgcaggaggcccaccagcagaccctggatgacctgcaggccgaggaggacaaggtgaacaccctgaccaaggccaagatcaagctggagcagcaggtggatgacctggagggcagcctggagcaggagaagaagctgaggatggacctggagcgggccaagaggaagctggagggggacctgaagctggcccaggagagcatcatggacattgaaaatgagaagcagcagctggatgagaagctgaagaagaaggagtttgagatcagcaacctgcagagcaagattgaagatgagcaggccctgggcatccagctgcagaagaagatcaaggagctgcaggccagaattgaggagctggaggaggagattgaggccgagcgggccagccgggccaaggccgagaagcagaggagtgacctgagccgggagctggaggagatcagcgagcggctggaggaggccggcggggccaccagcgcccagatcgagatgaacaagaagcgggaggccgagttccagaagatgagaagagacctggaggaggccaccctgcagcacgaggccacagctgccaccctgaggaagaagcatgctgacagcgtggccgagctgggggagcagattgacaacctgcagagggtgaagcagaagctggagaaggagaagtctgagatgaagatggagattgatgacctggccagcaatgtggagaccgtgtccaaggccaagggcaacctggagaagatgtgcaggaccctggaggaccagctgtctgagctgaagagcaaggaggaggagcagcagaggctcatcaatgacctgacagcccagaggggccgcctgcagacagagagcggggagttcagccggcagctggatgagaaggaggccctggtgtcccagctgagccggggcaagcaggccttcacccagcagatcgaggagctgaagaggcagctggaggaggagatcaaggccaagaatgccctggcccacgccctgcagagcagcagacatgactgtgacctgctgcgggagcagtatgaggaggagcaggagagcaaggccgagctgcagagggccctgagcaaggccaacacagaggtggcccagtggaggaccaagtatgaaacagatgccatccagaggacagaggagctggaggaggccaagaagaagctggcccagaggctgcaggccgctgaggagcacgtggaggccgtgaatgccaagtgtgccagcctggagaagaccaagcagaggctgcagaatgaggtggaggacctgatgctggatgtggagaggaccaatgctgcctgtgccgccctggacaagaagcagaggaactttgacaagatcctggccgagtggaagcagaagtgtgaggagacccatgctgagctggaggccagccagaaggaggcccggagcctgggcacagagctgttcaagatcaagaatgcctatgaggagagcctggaccagctggagaccctgaagcgggagaacaagaacctgcagcaggagatcagtgacctgacagagcagattgctgagggcggcaagaggatccacgagctggagaagatcaagaagcaggtggagcaggagaagtgtgagctgcaggccgccctggaggaggccgaggccagcctggagcacgaggagggcaagatcctgcgcatccagctggagctgaaccaggtgaagtctgaggtggacaggaagattgctgagaaggatgaggagattgaccagctgaagaggaaccacatcagaattgtggagagcatgcagagcaccctggatgctgagatccgcagcagaaatgatgccatccggctgaagaagaagatggagggggacctgaatgagatggagatccagctgaaccacgccaacaggatggctgctgaggccctgaggaactacagaaacacccagggcatcctgaaggacacccagatccacctggatgatgccctgcggagccaggaggacctgaaggagcagctggccatggtggagcggcgggccaacctgctgcaggccgagattgaggagctgcgggccaccctggagcagacagagaggagcaggaagattgctgagcaggagctgctggatgccagcgagcgggtgcagctgctgcacacccagaacaccagcctcatcaacaccaagaagaagctggagacagacatcagccagatgcagggcgagatggaggacatcctgcaggaggccagaaatgctgaggagaaggccaagaaggccatcacagatgctgccatgatggccgaggagctgaagaaggagcaggacaccagcgcccacctggagaggatgaagaagaacatggagcagacagtgaaggacctgcagctgcggctggatgaggccgagcagctggccctgaagggcggcaagaagcagatccagaagctggaggcccgggtgcgggagctggagggggaggtggagagcgagcagaagagaaatgctgaggccgtgaagggcctgaggaagcatgaaagaagagtgaaggagctgacctaccagacagaggaggacaggaagaacatcctgcggctgcaggacctggtggacaagctgcaggccaaggtgaagagctacaagaggcaggccgaggaggccgaggagcagagcaacaccaacctggccaagttcaggaagctgcagcacgagctggaggaggccgaggagagagctgacattgctgagagccaggtgaacaagctgcgggtgaagagccgggaggtgcacaccaaggtgatcagcgaggagtag

SEQ ID NO: 40289 - DNA, 549 bp, Artificial Sequence
  derived and/or modified sequence
atgagcagtgacagcgagctggccgtgtttggagaggccgcccccttcctgaggaagtctgagcgggagagaattgaggcccagaaccggccctttgatgccaagacctctgtgtttgtggccgagcccaaggagagctttgtgaagggcaccatccagagccgggagggcggcaaggtgacagtgaagacagagggcggggccaccctgactgtgaaggatgaccaggtgttccccatgaacccccccaagtatgacaagattgaggacatggccatgatgacccacctgcacgagcctgctgtgctgtacaacctgaaggagagatatgctgcctggatgatctacacctacagcggcctcttctgtgtgacagtgaacccctacaagtggctgcctgtgtacaagccagaggtggtgacagcctaccggggcaagaagaggcaggaggccccaccccacatcttcagcatcagtgacaatgcctaccagttcatgctgacagaccgggagaaccagagcatcctgatcaccggggagagcggctag

SEQ ID NO: 40290 - DNA, 405 bp, Artificial Sequence
  derived and/or modified sequence
atgagcagtgacagcgagctggccgtgtttggagaggccgcccccttcctgaggaagtctgagcgggagagaattgaggcccagaaccggccctttgatgccaagacctctgtgtttgtggccgagcccaaggagagctttgtgaagggcaccatccagagccgggagggcggcaaggtgacagtgaagacagagggcggggccaccctgactgtgaaggatgaccaggtgttccccatgaacccccccaagtatgacaagattgaggacatggccatgatgacccacctgcacgagcctgctgtgctgtacaacctgaaggagagatatgctgcctggatgatctacacctacagcggcctcttctgtgtgacagtgaacccctacaagtggctgcctgtgtag

SEQ ID NO: 40291 - DNA, 2127 bp, Artificial Sequence
  derived and/or modified sequence
atgagcagtgacagcgagctggccgtgtttggagaggccgcccccttcctgaggaagtctgagcgggagagaattgaggcccagaaccggccctttgatgccaagacctctgtgtttgtggccgagcccaaggagagctttgtgaagggcaccatccagagccgggagggcggcaaggtgacagtgaagacagagggcggggccaccctgactgtgaaggatgaccaggtgttccccatgaacccccccaagtatgacaagattgaggacatggccatgatgacccacctgcacgagcctgctgtgctgtacaacctgaaggagagatatgctgcctggatgatctacacctacagcggcctcttctgtgtgacagtgaacccctacaagtggctgcctgtgtacaagccagaggtggtgacagcctaccggggcaagaagaggcaggaggccccaccccacatcttcagcatcagtgacaatgcctaccagttcatgctgacagaccgggagaaccagagcatcctgatcaccggggagagcggggccggcaagacagtgaacaccaagagggtcatccagtactttgccaccatcgctgtgactggagagaagaagaaggaggagatcaccagcggcaagatccagggcaccctggaggaccagatcatcagcgccaaccccctgctggaggcctttggaaatgccaagacagtgagaaatgacaacagcagcagatttgggaagttcatccgcatccacttcggcaccaccgggaagctggccagcgctgacatcgagacctacctgctggagaagagccgggtggtgttccagctgaaggccgagaggagctaccacatcttctaccagatcaccagcaacaagaagccagagctgattgagatgctgctgatcaccaccaacccctatgactacccctttgtgtcccagggcgagatctctgtggccagcattgatgaccaggaggagctgatggccacagattctgccatcgacatcctgggcttcaccaatgaggagaaggtgtccatctacaagctgaccggggctgtgatgcactacggcaacctgaagttcaagcagaagcagcgggaggagcaggccgagccagatggaacagaggtggccgacaaggccgcctacctgcagagcctgaacagcgctgacctgctgaaggccctgtgctacccccgggtgaaggtgggcaatgaatatgtgaccaagggccagacagtggagcaggtgtccaatgctgtgggcgccctggccaaggctgtgtatgagaagatgttcctgtggatggtggcccgcatcaaccagcagctggacaccaagcagccccggcagtacttcatcggcgtgctggacattgctggctttgagatctttgacttcaacagcctggagcagctgtgcatcaacttcaccaatgagaagctgcagcagttcttcaaccaccacatgtttgtgctggagcaggaggagtacaagaaggagggcatcgagtggaccttcatcgactttggcatggacctggccgcctgcatcgagctgattgagaagcccatgggcatcttcagcatcctggaggaggagtgcatgttccccaaggccacagacaccagcttcaagaacaagctgtatgaccagcacctgggcaagagcgccaacttccagaagcccaaggtggtgaagggcaaggccgaggcccactttgccctgatccactacgccggcgtggtggactacaacatcaccggctggctggagaagaacaaggaccccctgaatgaaacagtggtgggcctgtaccagaagagcgccatgaagaccctggcccagctgttcagcggggcccagacagctgagggggagggcgccggcggcggggccaagaagggcggcaagaagaagggcagcagcttccagacagtgtctgccctcttccgggaggagcagagcaacaccaacctggccaagttcaggaagctgcagcacgagctggaggaggccgaggagagagctgacattgctgagagccaggtgaacaagctgcgggtgaagagccgggaggtgcacaccaaggtgatcagcgaggagtag

SEQ ID NO: 40292 - DNA, 6339 bp, Artificial Sequence
  derived and/or modified sequence
aaaaagaagttccgagggaagccaggtatcctggctgcccagccactgcctttatccaccagcttgactctttcagatcatcttctcaaattatccataggagatttatccacatactcaataagaaaaatatttctaattatatccaaccattcttaatatgaatgagaattatgcggggacgctagattgccaagaggtattttgccaaacaattccttttgacttaagaaagaagaggcagctgcattgtttccatagctatccatataaaagagcccttggaatgaggctgactcgtcctgctttaaaaagctccaagaactgtctcactcccaggctacatcttctcacttgctaacaaggacctctgagttcagcagccatgagttcagactcagaattggctgtttttggggaggctgctcctttcctccgaaagtctgaaagggagcgcattgaggcccagaataggccctttgatgccaaaacatctgtctttgtggcggagcccaaagaatcctttgtcaaagggaccatccagagcagagaaggaggaaaagtgacggtgaagactgagggaggagcgactctgacagtgaaggatgatcaggtcttccccatgaaccctcccaaatatgacaagatcgaggatatggccatgatgactcatctgcatgagcctgctgtgctgtacaacctcaaagaacgttatgcagcctggatgatctacacctattcaggtctcttctgtgtcactgtcaacccctacaagtggctgcctgtgtataagcccgaggtggtgacagcctaccgaggcaaaaagcgccaggaggccccgccccacatcttctccatctctgacaacgcctatcagttcatgctgactgaccgagagaatcagtcaatcctgatcactggagaatctggtgcagggaagactgtgaacaccaagcgtgtcatccagtactttgcaacaattgcagttactggtgagaagaagaaggaagaaattacttctggcaaaatacaggggactctggaagatcaaatcatcagtgccaaccccctactggaggcctttggcaacgccaagaccgtgaggaatgacaactcctctcgctttggtaaattcatcagaatccactttggcactactggaaaactggcatctgctgatattgaaacatatctgctagagaagtctagagttgttttccagcttaaggctgagagaagttatcatattttttaccagattacatcgaataagaaaccagaacttattgaaatgcttctgattaccacgaacccatatgattacccatttgtcagtcaaggggagatcagtgtggccagcatcgatgatcaggaagaactgatggccacagatagtgctattgatattttgggctttactaatgaagaaaaggtctccatttacaagctcacgggggctgtgatgcattatgggaacctaaaatttaagcaaaagcagcgtgaggagcaagcagagccagatggcacagaagttgctgacaaggcggcctacctccagagtctgaactctgcagatctgctcaaagctctctgctaccccagggtcaaggtcggcaatgagtatgtcaccaaaggccagactgtagaacaggtgtccaacgcagtaggtgctctggccaaagccgtctacgagaagatgttcctgtggatggttgcccgcatcaaccagcagctggacaccaagcagcccaggcagtacttcatcggggtcttggacattgctggttttgagatttttgatttcaacagcctggagcagctgtgcatcaacttcaccaatgagaaactgcaacagtttttcaaccaccacatgttcgtgctggagcaggaggagtacaagaaggaaggcatcgagtggacgttcatcgacttcgggatggacctggctgcctgcatcgagctcatcgagaagcctatgggcatcttctccatcctggaagaggagtgcatgttccctaaggcaacagacacctccttcaagaacaagctgtatgaccagcacctgggcaagtctgccaacttccagaagcccaaggtggtcaaaggcaaggccgaggcccacttcgctctgattcactatgctggtgttgtggactacaacattactggctggctggagaagaacaaggaccccctgaatgagaccgtggttggactgtaccagaagtctgcaatgaaaactctagctcagctcttctctggggctcaaactgctgaaggagagggagctggtggaggggccaagaaaggtggtaagaagaagggctcttctttccagacagtgtctgcccttttcagagagaatttgaacaagctgatgaccaacctcaggagtacccatcctcactttgtgaggtgtatcatccccaatgagacaaaaactcctggtgccatggagcatgagcttgtcctccaccagctgaggtgtaacggtgtgctggaaggcatccgcatctgtaggaaaggatttccaagcagaatcctttatgcagacttcaaacagagatacaaggtattaaatgcaagtgcaatccctgaagggcaattcattgatagcaagaaggcctctgagaagctccttgcatccatcgacattgaccacacccagtataaatttgggcacaccaaggtctttttcaaagctggtcttctggggctcctagaggagatgcgagatgacaagctggcccagctgattacccgaacccaggccaggtgcagagggttcttggcaagagtggagtaccagaggatggtggagagaagggaggccatcttctgtatccagtacaatatcagatccttcatgaatgtcaagcactggccctggatgaaactcttcttcaagatcaagcctctgttgaagagtgcagaaactgagaaggagatggccaccatgaaggaagaatttcagaaaattaaagacgaacttgccaagtcagaggcaaaaaggaaggaactggaagaaaagatggtgacgctgttgaaagaaaaaaatgacttgcagctccaagttcaggctgaagccgaaggcttggctgatgcagaggaaaggtgtgaccagctaatcaaaaccaaaatccagctagaagccaaaatcaaagaggtgactgagagagctgaggatgaggaagagatcaatgctgagctgacagccaagaagaggaaactggaggatgaatgttcagaactcaagaaagacattgatgaccttgagctgacactggccaaggttgagaaggagaaacatgccacagaaaacaaggtgaaaaacctcacagaagagatggcaggtctggatgaaaccattgctaagctgaccaaggagaagaaggctctccaggaggcccaccagcagaccctggatgacctgcaggcagaggaggacaaagtcaacaccctgaccaaagctaaaatcaaacttgaacaacaagtggatgatcttgaagggtccttggagcaagaaaagaaacttcgcatggacctagaaagggctaagaggaaacttgagggtgacttgaagttggcccaagaatccataatggacattgaaaatgagaaacagcaacttgatgaaaagctcaaaaagaaagagtttgaaatcagcaatctgcaaagcaagattgaagatgaacaggcacttggcattcaattgcagaagaaaattaaagaattgcaagcccgcattgaggagctggaggaggaaatcgaggcagagcgggcctcccgggccaaagcagagaagcagcgctctgacctctcccgggagctggaggagatcagcgagaggctggaagaagccggtggggccacttcagcccagattgagatgaacaagaagcgggaggctgagttccagaaaatgcgcagggacctggaggaggccaccctacagcatgaagccacagcggccaccctgaggaagaagcatgcagatagtgtggccgagcttggggagcagattgacaacctgcagcgagtgaagcagaagctggagaaggagaagagtgagatgaagatggagattgatgaccttgctagtaatgtagaaacggtctccaaagccaagggaaacctagagaaaatgtgccggactctagaggaccaactgagtgaactgaaatcaaaggaagaggagcagcagcggctgatcaatgacctgactgcgcagagggggcgcctgcagactgaatctggtgagttttcacgccagcttgatgaaaaggaagctctggtgtctcagttatcaagaggcaaacaagcctttactcaacagattgaagaattaaagaggcaacttgaagaggagataaaagccaagaacgccctggcgcatgccctgcagtcttcccgccacgactgtgacctgctgcgggaacagtatgaggaggagcaggaatccaaggccgagctgcagagagcactgtccaaggccaacaccgaggttgcccaatggaggaccaaatacgagacggacgccatccagcgcacagaggagctggaggaggccaagaagaagctggcccagcggctgcaggcagctgaggaacatgtagaagctgtgaacgccaaatgtgcttccctcgaaaagacgaagcagcggctgcagaatgaggtcgaggacctcatgcttgatgtggagaggacaaatgccgcctgtgccgcccttgacaaaaagcaaaggaacttcgataagatcctggcagaatggaaacagaaatgtgaggaaacgcatgctgagcttgaggcctcccagaaggaggcccgttcccttggcactgagctgttcaagataaagaatgcctatgaggaatctttggatcagctagaaaccctgaagcgagagaacaaaaacttacagcaggagatttctgacctcacggaacagattgcagaaggagggaaacgtatccatgaactggagaaaataaagaaacaagtggaacaagaaaagtgtgaacttcaggctgctttagaagaagcagaggcatctcttgaacatgaagagggaaagatcctgcgcatccagcttgagttgaaccaagtcaagtctgaggttgataggaaaattgctgaaaaagatgaggaaattgaccagctgaagagaaaccacattagaatcgtggagtccatgcagagcacgctggatgctgagatcaggagtaggaatgatgccattaggctcaagaagaagatggagggagacctcaatgaaatggaaatccagctgaaccatgccaaccgcatggctgctgaggccctgaggaactacaggaacacccaaggcatcctcaaggatacccagatccacctggatgatgctctccggagccaggaggacctgaaggaacagctggccatggtggagcgcagagccaacctgctgcaggctgagatcgaggagctgcgggccactctggaacagacagagaggagcagaaaaatcgcagaacaggagctcctggatgccagtgagcgtgttcagctactgcacacccagaacaccagcctgatcaacaccaagaagaagctggagacagatatttcccaaatgcaaggagagatggaggacattctccaggaagcccgcaatgcagaagaaaaggccaagaaggccatcactgatgccgccatgatggctgaggagctgaagaaggagcaggacaccagcgcccacctggagcggatgaagaagaacatggagcagaccgtgaaggatctgcagctccgtctggatgaggctgagcagctggccctgaagggtgggaagaagcagatccagaaactggaggccagggtacgggagctggaaggagaggttgagagtgagcaaaagcgtaatgctgaggctgtcaaaggtctgcgcaaacatgagaggcgagtgaaggaactcacttaccagacggaagaagatagaaagaatattctcaggcttcaagatttggtagataaacttcaggcaaaagtgaaatcttataagagacaagctgaggaggctgaggaacaatccaacaccaatctagctaaattccgcaagctccagcatgagctggaggaggccgaggaacgggctgacattgctgagtcccaggtgaacaaactgcgggtgaagagccgggaggttcacacaaaagtcataagtgaagagtgatcatgtcctgatgccatggaatgactgaagacaggcacaaaatgtgacatctttggtcatttccctctgtaattattgtgtattctaccctgttgcaaaggaaataaagcatagggtagtttgcaaac

SEQ ID NO: 40293 - DNA, 6078 bp, Artificial Sequence
  derived and/or modified sequence
aggacgggcctttcaagagggacactggtcacaccgcccagtgtcagcagcagctgctagttctgaactgtctcactcccaggctacatcttctcacttgctaacaaggacctctgagttcagcagccatgagttcagactcagaattggctgtttttggggaggctgctcctttcctccgaaagtctgaaagggagcgcattgaggcccagaataggccctttgatgccaaaacatctgtctttgtggcggagcccaaagaatcctttgtcaaagggaccatccagagcagagaaggaggaaaagtgacggtgaagactgagggaggagcgactctgacagtgaaggatgatcaggtcttccccatgaaccctcccaaatatgacaagatcgaggatatggccatgatgactcatctgcatgagcctgctgtgctgtacaacctcaaagaacgttatgcagcctggatgatctacacctattcaggtctcttctgtgtcactgtcaacccctacaagtggctgcctgtgtataagcccgaggtggtgacagcctaccgaggcaaaaagcgccaggaggccccgccccacatcttctccatctctgacaacgcctatcagttcatgctgactgaccgagagaatcagtcaatcctgatcactggagaatctggtgcagggaagactgtgaacaccaagcgtgtcatccagtactttgcaacaattgcagttactggtgagaagaagaaggaagaaattacttctggcaaaatacaggggactctggaagatcaaatcatcagtgccaaccccctactggaggcctttggcaacgccaagaccgtgaggaatgacaactcctctcgctttggtaaattcatcagaatccactttggcactactggaaaactggcatctgctgatattgaaacatatctgctagagaagtctagagttgttttccagcttaaggctgagagaagttatcatattttttaccagattacatcgaataagaaaccagaacttattgaaatgcttctgattaccacgaacccatatgattacccatttgtcagtcaaggggagatcagtgtggccagcatcgatgatcaggaagaactgatggccacagatagtgctattgatattttgggctttactaatgaagaaaaggtctccatttacaagctcacgggggctgtgatgcattatgggaacctaaaatttaagcaaaagcagcgtgaggagcaagcagagccagatggcacagaagttgctgacaaggcggcctacctccagagtctgaactctgcagatctgctcaaagctctctgctaccccagggtcaaggtcggcaatgagtatgtcaccaaaggccagactgtagaacaggtgtccaacgcagtaggtgctctggccaaagccgtctacgagaagatgttcctgtggatggttgcccgcatcaaccagcagctggacaccaagcagcccaggcagtacttcatcggggtcttggacattgctggttttgagatttttgatttcaacagcctggagcagctgtgcatcaacttcaccaatgagaaactgcaacagtttttcaaccaccacatgttcgtgctggagcaggaggagtacaagaaggaaggcatcgagtggacgttcatcgacttcgggatggacctggctgcctgcatcgagctcatcgagaagcctatgggcatcttctccatcctggaagaggagtgcatgttccctaaggcaacagacacctccttcaagaacaagctgtatgaccagcacctgggcaagtctgccaacttccagaagcccaaggtggtcaaaggcaaggccgaggcccacttcgctctgattcactatgctggtgttgtggactacaacattactggctggctggagaagaacaaggaccccctgaatgagaccgtggttggactgtaccagaagtctgcaatgaaaactctagctcagctcttctctggggctcaaactgctgaaggagagggagctggtggaggggccaagaaaggtggtaagaagaagggctcttctttccagacagtgtctgcccttttcagagagaatttgaacaagctgatgaccaacctcaggagtacccatcctcactttgtgaggtgtatcatccccaatgagacaaaaactcctggtgccatggagcatgagcttgtcctccaccagctgaggtgtaacggtgtgctggaaggcatccgcatctgtaggaaaggatttccaagcagaatcctttatgcagacttcaaacagagatacaaggtattaaatgcaagtgcaatccctgaagggcaattcattgatagcaagaaggcctctgagaagctccttgcatccatcgacattgaccacacccagtataaatttgggcacaccaaggtctttttcaaagctggtcttctggggctcctagaggagatgcgagatgacaagctggcccagctgattacccgaacccaggccaggtgcagagggttcttggcaagagtggagtaccagaggatggtggagagaagggaggccatcttctgtatccagtacaatatcagatccttcatgaatgtcaagcactggccctggatgaaactcttcttcaagatcaagcctctgttgaagagtgcagaaactgagaaggagatggccaccatgaaggaagaatttcagaaaattaaagacgaacttgccaagtcagaggcaaaaaggaaggaactggaagaaaagatggtgacgctgttgaaagaaaaaaatgacttgcagctccaagttcaggctgaagccgaaggcttggctgatgcagaggaaaggtgtgaccagctaatcaaaaccaaaatccagctagaagccaaaatcaaagaggtgactgagagagctgaggatgaggaagagatcaatgctgagctgacagccaagaagaggaaactggaggatgaatgttcagaactcaagaaagacattgatgaccttgagctgacactggccaaggttgagaaggagaaacatgccacagaaaacaaggtgaaaaacctcacagaagagatggcaggtctggatgaaaccattgctaagctgaccaaggagaagaaggctctccaggaggcccaccagcagaccctggatgacctgcaggcagaggaggacaaagtcaacaccctgaccaaagctaaaatcaaacttgaacaacaagtggatgatcttgaagggtccttggagcaagaaaagaaacttcgcatggacctagaaagggctaagaggaaacttgagggtgacttgaagttggcccaagaatccataatggacattgaaaatgagaaacagcaacttgatgaaaagctcaaaaagaaagagtttgaaatcagcaatctgcaaagcaagattgaagatgaacaggcacttggcattcaattgcagaagaaaattaaagaattgcaagcccgcattgaggagctggaggaggaaatcgaggcagagcgggcctcccgggccaaagcagagaagcagcgctctgacctctcccgggagctggaggagatcagcgagaggctggaagaagccggtggggccacttcagcccagattgagatgaacaagaagcgggaggctgagttccagaaaatgcgcagggacctggaggaggccaccctacagcatgaagccacagcggccaccctgaggaagaagcatgcagatagtgtggccgagcttggggagcagattgacaacctgcagcgagtgaagcagaagctggagaaggagaagagtgagatgaagatggagattgatgaccttgctagtaatgtagaaacggtctccaaagccaagggaaacctagagaaaatgtgccggactctagaggaccaactgagtgaactgaaatcaaaggaagaggagcagcagcggctgatcaatgacctgactgcgcagagggggcgcctgcagactgaatctggtgagttttcacgccagcttgatgaaaaggaagctctggtgtctcagttatcaagaggcaaacaagcctttactcaacagattgaagaattaaagaggcaacttgaagaggagataaaagccaagaacgccctggcgcatgccctgcagtcttcccgccacgactgtgacctgctgcgggaacagtatgaggaggagcaggaatccaaggccgagctgcagagagcactgtccaaggccaacaccgaggttgcccaatggaggaccaaatacgagacggacgccatccagcgcacagaggagctggaggaggccaagaagaagctggcccagcggctgcaggcagctgaggaacatgtagaagctgtgaacgccaaatgtgcttccctcgaaaagacgaagcagcggctgcagaatgaggtcgaggacctcatgcttgatgtggagaggacaaatgccgcctgtgccgcccttgacaaaaagcaaaggaacttcgataagatcctggcagaatggaaacagaaatgtgaggaaacgcatgctgagcttgaggcctcccagaaggaggcccgttcccttggcactgagctgttcaagataaagaatgcctatgaggaatctttggatcagctagaaaccctgaagcgagagaacaaaaacttacagcaggagatttctgacctcacggaacagattgcagaaggagggaaacgtatccatgaactggagaaaataaagaaacaagtggaacaagaaaagtgtgaacttcaggctgctttagaagaagcagaggcatctcttgaacatgaagagggaaagatcctgcgcatccagcttgagttgaaccaagtcaagtctgaggttgataggaaaattgctgaaaaagatgaggaaattgaccagctgaagagaaaccacattagaatcgtggagtccatgcagagcacgctggatgctgagatcaggagtaggaatgatgccattaggctcaagaagaagatggagggagacctcaatgaaatggaaatccagctgaaccatgccaaccgcatggctgctgaggccctgaggaactacaggaacacccaaggcatcctcaaggatacccagatccacctggatgatgctctccggagccaggaggacctgaaggaacagctggccatggtggagcgcagagccaacctgctgcaggctgagatcgaggagctgcgggccactctggaacagacagagaggagcagaaaaatcgcagaacaggagctcctggatgccagtgagcgtgttcagctactgcacacccagaacaccagcctgatcaacaccaagaagaagctggagacagatatttcccaaatgcaaggagagatggaggacattctccaggaagcccgcaatgcagaagaaaaggccaagaaggccatcactgatgccgccatgatggctgaggagctgaagaaggagcaggacaccagcgcccacctggagcggatgaagaagaacatggagcagaccgtgaaggatctgcagctccgtctggatgaggctgagcagctggccctgaagggtgggaagaagcagatccagaaactggaggccagggtacgggagctggaaggagaggttgagagtgagcaaaagcgtaatgctgaggctgtcaaaggtctgcgcaaacatgagaggcgagtgaaggaactcacttaccagacggaagaagatagaaagaatattctcaggcttcaagatttggtagataaacttcaggcaaaagtgaaatcttataagagacaagctgaggaggctgaggaacaatccaacaccaatctagctaaattccgcaagctccagcatgagctggaggaggccgaggaacgggctgacattgctgagtcccaggtgaacaaactgcgggtgaagagccgggaggttcacacaaaagtcataagtgaagagtgatcatgtcctgatgccatggaatgactgaagacaggcacaaaatgtgacatctttggtcatttccctctgtaattattgtgtattctaccctgttgcaaaggaaataaagcatagggtagtttgc

SEQ ID NO: 40294 - DNA, 675 bp, Artificial Sequence
  derived and/or modified sequence
aggacgggcctttcaagagggacactggtcacaccgcccagtgtcagcagcagctgctagttctgaactgtctcactcccaggctacatcttctcacttgctaacaaggacctctgagttcagcagccatgagttcagactcagaattggctgtttttggggaggctgctcctttcctccgaaagtctgaaagggagcgcattgaggcccagaataggccctttgatgccaaaacatctgtctttgtggcggagcccaaagaatcctttgtcaaagggaccatccagagcagagaaggaggaaaagtgacggtgaagactgagggaggagcgactctgacagtgaaggatgatcaggtcttccccatgaaccctcccaaatatgacaagatcgaggatatggccatgatgactcatctgcatgagcctgctgtgctgtacaacctcaaagaacgttatgcagcctggatgatctacacctattcaggtctcttctgtgtcactgtcaacccctacaagtggctgcctgtgtataagcccgaggtggtgacagcctaccgaggcaaaaagcgccaggaggccccgccccacatcttctccatctctgacaacgcctatcagttcatgctgactgaccgagagaatcagtcaatcctgatcactggagaatctggtg

SEQ ID NO: 40295 - DNA, 671 bp, Artificial Sequence
  derived and/or modified sequence
aggacgggcctttcaagagggacactggtcacaccgcccagtgtcagcagcagctgctagttctggtactgctccttctggaactgcacgttttacctctatgaattttgttacttctgtttacaatagcaagccatgccataaatgggattttttccccctctttttggtcaactaatcaagtgcttttcccttttcttttatagaactgtctcactcccaggctacatcttctcacttgctaacaaggacctctgagttcagcagccatgagttcagactcagaattggctgtttttggggaggctgctcctttcctccgaaagtctgaaagggagcgcattgaggcccagaataggccctttgatgccaaaacatctgtctttgtggcggagcccaaagaatcctttgtcaaagggaccatccagagcagagaaggaggaaaagtgacggtgaagactgagggaggagcgactctgacagtgaaggatgatcaggtcttccccatgaaccctcccaaatatgacaagatcgaggatatggccatgatgactcatctgcatgagcctgctgtgctgtacaacctcaaagaacgttatgcagcctggatgatctacacctattcaggtctcttctgtgtcactgtcaacccctacaagtggctgcctgtg

SEQ ID NO: 40296 - DNA, 2322 bp, Artificial Sequence
  derived and/or modified sequence
aactgtctcactcccaggctacatcttctcacttgctaacaaggacctctgagttcagcagccatgagttcagactcagaattggctgtttttggggaggctgctcctttcctccgaaagtctgaaagggagcgcattgaggcccagaataggccctttgatgccaaaacatctgtctttgtggcggagcccaaagaatcctttgtcaaagggaccatccagagcagagaaggaggaaaagtgacggtgaagactgagggaggagcgactctgacagtgaaggatgatcaggtcttccccatgaaccctcccaaatatgacaagatcgaggatatggccatgatgactcatctgcatgagcctgctgtgctgtacaacctcaaagaacgttatgcagcctggatgatctacacctattcaggtctcttctgtgtcactgtcaacccctacaagtggctgcctgtgtataagcccgaggtggtgacagcctaccgaggcaaaaagcgccaggaggccccgccccacatcttctccatctctgacaacgcctatcagttcatgctgactgaccgagagaatcagtcaatcctgatcactggagaatctggtgcagggaagactgtgaacaccaagcgtgtcatccagtactttgcaacaattgcagttactggtgagaagaagaaggaagaaattacttctggcaaaatacaggggactctggaagatcaaatcatcagtgccaaccccctactggaggcctttggcaacgccaagaccgtgaggaatgacaactcctctcgctttggtaaattcatcagaatccactttggcactactggaaaactggcatctgctgatattgaaacatatctgctagagaagtctagagttgttttccagcttaaggctgagagaagttatcatattttttaccagattacatcgaataagaaaccagaacttattgaaatgcttctgattaccacgaacccatatgattacccatttgtcagtcaaggggagatcagtgtggccagcatcgatgatcaggaagaactgatggccacagatagtgctattgatattttgggctttactaatgaagaaaaggtctccatttacaagctcacgggggctgtgatgcattatgggaacctaaaatttaagcaaaagcagcgtgaggagcaagcagagccagatggcacagaagttgctgacaaggcggcctacctccagagtctgaactctgcagatctgctcaaagctctctgctaccccagggtcaaggtcggcaatgagtatgtcaccaaaggccagactgtagaacaggtgtccaacgcagtaggtgctctggccaaagccgtctacgagaagatgttcctgtggatggttgcccgcatcaaccagcagctggacaccaagcagcccaggcagtacttcatcggggtcttggacattgctggttttgagatttttgatttcaacagcctggagcagctgtgcatcaacttcaccaatgagaaactgcaacagtttttcaaccaccacatgttcgtgctggagcaggaggagtacaagaaggaaggcatcgagtggacgttcatcgacttcgggatggacctggctgcctgcatcgagctcatcgagaagcctatgggcatcttctccatcctggaagaggagtgcatgttccctaaggcaacagacacctccttcaagaacaagctgtatgaccagcacctgggcaagtctgccaacttccagaagcccaaggtggtcaaaggcaaggccgaggcccacttcgctctgattcactatgctggtgttgtggactacaacattactggctggctggagaagaacaaggaccccctgaatgagaccgtggttggactgtaccagaagtctgcaatgaaaactctagctcagctcttctctggggctcaaactgctgaaggagagggagctggtggaggggccaagaaaggtggtaagaagaagggctcttctttccagacagtgtctgcccttttcagagaggaacaatccaacaccaatctagctaaattccgcaagctccagcatgagctggaggaggccgaggaacgggctgacattgctgagtcccaggtgaacaaactgcgggtgaagagccgggaggttcacacaaaagtcataagtgaagagtgatcatgtcctgatgccatggaatgactgaagacaggcacaaaatgtgacatctttggtcatttccctctgtaattattgtgtattctaccctgttgcaaaggaaataaagcatagggtagtttgcaaacaata

SEQ ID NO: 40297 - DNA, 5826 bp, Artificial Sequence
  derived and/or modified sequence
atgagcagcgacagcgagctggccgtgttcggcgaggccgccccctttctgaggaagtccgaacgggaacgcattgaggcgcagaataggccatttgacgccaaaacctctgtgttcgtggccgagccgaaagaatccttcgtgaaaggtacaatccagtcccgggaaggcggcaaggttaccgttaagacagaaggcggggccaccttaactgttaaggacgaccaggtgttccctatgaacccccctaaatacgacaaaattgaggacatggccatgatgactcatttgcatgaaccagctgttctttataacctgaaagagcgatacgctgcctggatgatttacacatattcagggttattttgcgtgacggtgaatccatataaatggctgccggtctacaagcccgaagttgttaccgcctaccgcggtaagaaaaggcaggaagcaccaccacacatcttctccataagcgacaacgcttaccagtttatgctaacagatcgcgagaaccagagtatcctgatcactggcgagagcggagctggcaagaccgtgaacacaaaacgcgtgatccagtattttgccactatcgctgtaaccggcgagaagaaaaaagaagaaattactagtggtaagattcagggtacgttggaggatcaaataatctcggcaaaccccctgctggaagcgttcggaaatgccaagaccgttcggaacgacaatagcagcaggtttgggaagttcattcgaatccattttggtacaacaggaaagctcgcttccgcagatattgagacgtacctgttggaaaagagtcgggtggtgtttcaactgaaagccgagcgtagttaccatattttttaccaaatcacatccaataagaaacccgagctgatcgagatgctgctgataacaaccaacccctatgactatccctttgtctctcagggagagatctcagtggccagcattgacgaccaggaggaacttatggctaccgacagtgcgattgacatattgggttttaccaatgaggagaaagtctcgatctataaacttaccggagctgtgatgcattacggcaatctcaagttcaagcaaaagcagcgggaagagcaggctgaacctgacggaacagaagtcgcggataaagccgcgtatctacagagtctaaattcagctgacctcctgaaggcactctgttaccccagagtaaaggtgggcaatgagtatgtgacaaagggacagactgtggagcaagtgagcaacgctgttggtgcactcgctaaggccgtctacgaaaagatgttcctttggatggtagctcgcattaaccagcaactcgataccaaacagcctaggcagtatttcatcggggtgctggatattgccggctttgagatcttcgattttaattcgctggaacagctctgcattaactttaccaatgagaaactgcaacagtttttcaaccaccacatgttcgtgctggagcaggaagagtacaaaaaagagggtatcgagtggacattcatagactttggcatggacctcgcagcctgcatcgagcttattgaaaagcccatgggaatattttcaatactggaagaagagtgcatgtttccaaaggcaacagatacaagctttaaaaacaaactttacgatcaacatctgggaaaatccgctaactttcaaaaaccaaaggtggtgaagggaaaagctgaggcccacttcgcactgatacactacgcaggcgtggtggactacaatattactggctggctcgagaagaacaaagatcccctgaatgaaactgttgtgggactgtatcaaaagagcgctatgaaaacgcttgctcagctcttctcgggcgcgcagaccgcggagggggagggcgctgggggcggtgccaaaaaaggggggaagaagaaagggtctagcttccaaaccgtgtccgccctcttccgcgaaaatctgaacaagctgatgacaaatctgcgatccacacacccccactttgtccgatgcattatccctaacgagacaaaaacccccggcgcaatggagcacgagttagtcctgcaccagctcagatgcaatggtgtcctcgaaggaataaggatctgccggaagggtttcccctctcgcatcctatatgctgatttcaagcagcgatataaagtcctgaacgcttccgctatccctgagggccagtttatagacagcaaaaaggcatccgagaaactcttggcgtcaatcgacatcgatcatacccagtacaaatttggccataccaaagttttcttcaaagccggcttgcttgggctgctggaggagatgagagacgataaattggctcagctgattactagaacacaagctagatgtcgcggattcctcgcaagggttgagtatcagcgcatggtggagcggcgagaggccatcttttgtatccagtacaacatcagatcattcatgaacgttaagcactggccatggatgaaactgttttttaaaattaagccactgcttaagtccgccgaaactgagaaggagatggcaacaatgaaggaagaattccaaaagatcaaagatgagctcgccaaaagtgaagcaaagaggaaagaactcgaggaaaaaatggttaccctgctgaaggaaaagaatgacttgcaacttcaggtacaggccgaagcagagggcctcgccgacgccgaggagcggtgtgaccagctcattaagacaaagatccagttggaggccaaaatcaaagaagtgaccgaacgggcagaagatgaggaagagatcaacgcagagctcaccgccaagaaacgaaagcttgaggatgagtgctccgagcttaagaaggatattgacgacctggaattaactctggctaaggtggagaaggaaaagcatgccaccgagaataaggttaagaatctgaccgaggaaatggctggcctggacgagaccatcgcgaaactaactaaagagaaaaaagccctgcaagaggcacatcaacagacactcgacgacctgcaagcggaggaggacaaagtaaacaccctcaccaaggcgaaaattaagctggaacagcaggtggacgatcttgagggctctcttgaacaggagaaaaagctcaggatggatcttgaacgggctaagcgcaaactggagggggatctgaagctggctcaagaatcaatcatggacattgagaacgaaaaacagcaactggacgagaagctgaagaagaaagaatttgaaatctctaaccttcagagcaaaatcgaggatgaacaggccttaggcatccagttacagaaaaaaatcaaggagctgcaggctcggatcgaggaactagaggaggaaatagaggccgagagggcatcccgagccaaggcagagaaacaaagatccgatttgtcacgggagctggaggagatttctgaacggctggaagaggcgggcggtgccacatctgctcagatagagatgaataaaaaacgggaagcagaatttcagaagatgcggcgggacctggaggaggccactttacagcacgaggcaacggctgcgaccctcagaaagaagcacgccgattcggtggccgagctgggtgagcagattgataacctacaaagggttaagcagaagctcgagaaggaaaagagcgagatgaagatggagatcgatgacctggcctccaatgttgagactgttagcaaggcgaaaggcaatctggagaaaatgtgtagaaccctggaggaccagctcagcgaactgaagtcaaaagaggaggagcagcaaaggttaatcaatgatcttaccgcccagagggggagactccagaccgagtccggcgagttctctcgccaactcgacgagaaggaggcactcgtatcccagctctctcgaggtaaacaggccttcacccagcagattgaggagctaaaaaggcagttagaagaagagattaaagccaagaacgcgctggctcatgccctccaatcctcaagacacgattgtgatctcctgagagaacagtatgaagaagaacaggaatccaaggccgagctccagagggccctctcaaaggccaacacggaagtagcccagtggcgcaccaagtacgagactgacgcaatccagaggacagaagaattggaggaagcgaagaaaaagttggctcagagacttcaggctgccgaagagcatgtcgaggccgtgaacgcgaagtgtgcgtctctggagaagaccaagcagcggctccagaacgaagttgaggatctaatgctggatgtggagcgcacaaatgccgcttgtgccgcactcgataagaagcaacgaaacttcgataagatcctggcagaatggaagcagaagtgcgaggaaacccatgctgaacttgaggcttcacaaaaagaagccagaagtttaggcactgaactcttcaaaatcaagaacgcttacgaagaatctctggaccaactggagacactgaagagggagaacaaaaatctacagcaagaaataagtgacctcactgaacagatcgcggaagggggtaagagaatccacgagcttgaaaagattaagaagcaggtggaacaggagaaatgcgaattgcaggccgcattagaagaagctgaagcctcattggagcatgaagagggaaagatcttaagaatccaacttgaacttaatcaagtgaaatccgaagtggaccgaaagattgcggaaaaagatgaagagatcgatcagttgaaaaggaaccatatccggatcgtggaaagcatgcagtctacactggatgccgaaattcgaagccgaaatgatgccattcggttaaagaagaaaatggaaggggatctgaatgagatggagatccagttgaaccatgcaaatcgcatggctgctgaagctcttaggaattaccggaatacgcagggaatcctgaaagacacgcagatacacttggatgacgccctaagatcccaagaagacttgaaggaacaactggcaatggttgagcggcgcgccaacctgctccaggcggagattgaggaacttcgagccaccctagaacagaccgaacggagcagaaaaatcgcagagcaagagctcttagatgcgagcgagagggtgcagttgctccacacccaaaatacaagtctgattaatactaagaaaaagctggagacggatattagtcagatgcagggagagatggaggatattctccaggaagctagaaacgcagaggagaaagccaaaaaagcgatcaccgatgccgcaatgatggcagaggagctcaagaaagagcaggatacttctgcacacctggaacggatgaagaagaacatggagcaaaccgtgaaggacctgcagttgcgcttggacgaggctgaacagctggcactgaaggggggaaagaaacagatccagaagctcgaagcgagagtccgtgagctagagggggaggttgaaagcgagcagaagagaaatgctgaggcggtcaagggactcagaaaacatgaaaggcgagtgaaggagctgacctaccagacagaggaagatcggaagaacatccttagactgcaggacctggtcgataaactgcaggcaaaagtcaagagctataaaaggcaggcagaagaggcagaggaacagagcaacaccaatcttgccaagttcagaaagctacagcatgagttggaggaggcagaagaacgcgcagatattgctgaatcccaggttaataagctgagggtgaagagcagagaggttcacacaaaagtgatctccgaggagtag

SEQ ID NO: 40298 - DNA, 5826 bp, Artificial Sequence
  derived and/or modified sequence
atgagcagcgacagcgagctggccgtgttcggcgaggccgccccctttctacggaaatcagagcgggagaggatcgaggctcagaacaggcccttcgacgcaaagacatccgtgtttgttgccgagccaaaggagtccttcgtcaagggcaccatacagagtagagagggtggaaaggtgaccgtaaaaacagagggcggagcgaccctgacagtgaaagacgaccaagtgttccccatgaatcctcccaagtatgataagattgaggacatggccatgatgacccatctgcacgaaccagctgtcctgtacaacctaaaggagcggtacgccgcctggatgatatacacctacagtggactgttctgtgtgacggtgaatccctataaatggttaccagtttacaagcctgaggtggttaccgcctatcgcggcaagaaacggcaggaggctcctccgcacatcttctctataagcgacaatgcttatcagttcatgctgactgatcgagaaaaccagagcattttgatcacaggggaaagtggggctggaaaaacagtgaacacaaaacgcgttatccaatattttgctaccatcgcagttacaggtgagaagaagaaagaggaaataacatcggggaagatccaaggtactttggaggatcagattattagcgcaaacccccttctggaagcctttggtaacgcgaaaacagtgcgaaacgataattctagcagatttggcaagtttatcaggattcactttgggacaaccggaaagctggcgtcggccgacattgagacctatctgctcgagaagtcccgagtcgtattccaactgaaagcagagcgcagttatcacattttctatcagattaccagtaataagaagcccgaactgattgaaatgctgttgatcacaactaacccatatgactaccccttcgtttctcagggcgaaatctctgtagcttccattgacgaccaagaagaattgatggccacagatagtgcaattgatatcctggggtttaccaatgaggagaaggtctcaatttataaactcaccggtgcggttatgcactatggaaacctgaaatttaagcagaaacagagagaggaacaggccgagcctgacggaaccgaggtggcagataaggccgcttacctccagtctttgaactccgctgatctcttgaaggctttatgttaccctcgtgtcaaggtggggaatgagtatgttaccaaggggcagactgttgagcaggtgagtaacgccgtcggtgcgcttgctaaagccgtgtatgaaaagatgttcctctggatggtggctaggataaatcagcagcttgataccaaacaaccgcggcagtactttataggtgtcctggatatcgctgggttcgaaatattcgattttaacagcctggagcaattatgtatcaacttcaccaacgagaaattgcagcagtttttcaatcaccacatgtttgtgctagagcaggaagagtacaagaaggagggcatcgagtggacgtttattgatttcggcatggatctggctgcatgtatcgagctaatagagaagcccatggggatcttttcaattctcgaggaggaatgcatgtttcccaaggcgacagatacttcatttaagaacaaactatatgatcagcacctcggaaaaagcgctaactttcagaaaccaaaagtggttaagggaaaggccgaggcacattttgccctcattcactacgctggcgtcgtcgattacaatatcaccggatggctggaaaagaacaaggaccctcttaacgagaccgtggtaggactctaccagaaatctgccatgaaaactctcgctcagctctttagcggtgctcagacagcagagggggagggtgccggaggcggagcaaagaagggcggcaagaaaaagggtagcagtttccagactgtcagtgctcttttccgcgagaatctgaacaaactcatgaccaatttgcggtccacgcacccacatttcgtccggtgcatcatcccaaacgagacaaaaactccaggcgccatggagcatgagctagtgcttcatcagctgcgctgcaacggtgttctggaggggattcgcatttgtcgcaaggggtttccatcaagaatcttgtatgcagacttcaagcaaagatataaagtgctcaacgcctccgcgattcccgagggtcaatttatcgacagcaaaaaggcctccgaaaagctcctggcatcgatcgacatcgatcacactcaatataagtttggccacacaaaagtcttctttaaagctggtctcctcgggctactcgaggaaatgcgggatgataagctggcccaactgatcacacgcacccaagcgcggtgtagaggcttccttgcccgcgttgaatatcagcggatggtggaacgaagagaagccattttttgtatacagtacaacatcaggtctttcatgaacgtgaagcactggccctggatgaagctcttctttaagattaaaccccttctgaaaagtgccgagacagagaaggaaatggctactatgaaggaggagtttcagaaaataaaagacgagttggctaagtccgaggcaaagcgaaaggaactggaggagaaaatggtgaccctcctcaaggaaaaaaatgatctgcagttgcaggtccaggccgaggcggaagggcttgcagacgcggaagagaggtgcgatcaactcataaaaactaaaatacaactggaggccaaaatcaaggaggtgacagaaagggctgaagatgaggaggagatcaacgccgagctgactgcaaaaaaacgaaagttagaagatgagtgcagtgagctgaagaaagacattgatgatctggagcttactcttgcgaaagtagaaaaagaaaagcatgccactgaaaacaaagtgaagaatctgactgaggagatggccggtctcgatgagaccatagcgaagctcacaaaagagaagaaagccctccaagaggctcaccagcagacattagatgaccttcaagctgaggaggacaaagtaaatacgctcaccaaagcgaagataaagcttgaacaacaagtcgatgatctagagggatccctggagcaggagaaaaaattaaggatggatcttgaaagagctaaaaggaagttggagggggacttaaaactggcccaagagagcatcatggacatcgagaatgagaaacaacagctagatgagaagctgaaaaagaaagaattcgagatcagcaaccttcaatcaaagatcgaggatgaacaggcgctggggattcagctgcagaaaaagataaaggagttacaggcacgaatagaagagcttgaggaagagatagaagccgagcgcgcatctcgggctaaggccgaaaagcagcgctccgacctgagtagagagttagaagaaatctcagaaaggcttgaggaagcaggtggggcaactagcgctcagatcgaaatgaacaaaaaacgggaagccgagttccagaaaatgcgccgcgatctagaggaggctaccttacagcatgaagctacggcggccactctcagaaaaaagcacgccgactccgtcgctgaacttggtgaacaaatagacaacttgcaaagagttaagcagaagttggagaaggagaaatcagagatgaagatggagatcgacgacctcgcctccaatgtcgaaaccgtttcaaaagccaaaggcaacctggagaagatgtgccggaccctcgaggatcaactttcagaattgaagtccaaagaagaggaacaacagagattaattaatgaccttactgcccaaaggggcagactgcagaccgagagcggcgagttcagccggcagctggatgaaaaagaggcactggtcagtcagctttcgagaggaaaacaggcgtttactcagcagattgaagagctgaagagacagctggaggaggagattaaggccaagaatgccctggcccatgcacttcaatcttctaggcatgattgcgatctgctgagagagcagtacgaagaggagcaagagagcaaagccgagttgcagcgggctctgtcaaaggccaatacagaagtcgcccagtggagaactaaatacgagaccgatgcaatccagcgcacagaggagctcgaggaagctaaaaaaaagttagcacagaggctccaagcggctgaagagcacgtggaagccgtcaacgccaagtgtgcttctctcgaaaagaccaagcagcgcttgcagaacgaggtggaagatctgatgttagatgtagaacgtactaatgccgcatgcgcagctctggacaagaagcagaggaactttgacaagatcttagcggaatggaagcagaagtgcgaggagactcacgctgagttggaggcttcccagaaagaagcaagatcgctgggcactgagctgttcaagattaaaaacgcatacgaagagtctcttgatcaactggaaaccctgaaaagagagaacaaaaatctgcagcaggagatcagcgacctgaccgaacagatagcagaggggggaaagcgcatccatgaacttgaaaaaatcaaaaagcaggttgaacaggagaagtgtgaactgcaggcagcactagaggaggccgaggcgtctctggagcacgaggagggcaagattttaaggattcagctggagcttaaccaagtgaagtccgaagtggatcgcaagatagctgagaaagacgaggaaatcgatcagctcaagcgcaatcacattaggatcgttgaatccatgcagtctacactcgacgccgagatccgatccagaaacgatgcgatacgcctgaagaaaaaaatggagggcgatttgaacgagatggagatccagctcaatcacgctaataggatggctgctgaagcactgcgaaactaccgaaatacccaaggcattctgaaggacacccagattcatcttgatgatgctctgcgcagccaagaggatcttaaagaacagctggctatggtagagcgccgcgccaatctgctgcaggccgagattgaagaactccgggccaccttagagcagactgagcgcagtaggaaaatcgccgagcaggagctcctggatgcttctgagcgcgtccagttactgcacacccaaaacacctctttaatcaacacgaaaaagaagctggaaaccgatatatcccaaatgcagggagagatggaggacattctccaagaagccaggaatgccgaggagaaggcaaaaaaagctatcacagacgcggccatgatggccgaggagttaaaaaaggaacaggacacgtccgcccacctcgaacgcatgaaaaaaaacatggagcagacagtgaaggatctgcagctccggctggacgaggcagagcaattggctctaaagggggggaagaaacagatccaaaagttggaggcacgggtccgtgaactcgaaggcgaggtagaatccgaacagaaacgcaacgctgaggccgttaagggccttcggaagcacgagagaagagtcaaggaactcacctatcaaacagaagaagacagaaagaacattttgagattacaagacttggtggacaaactgcaagccaaagtaaagagttacaagaggcaagccgaggaggccgaggagcaatccaacacaaacctggctaagtttcgcaagctacagcacgaactcgaagaggccgaggagagggctgatattgctgagtcgcaggttaacaaactgcgggtcaagtcacgagaggtccacaccaaggttatcagtgaggaatag

SEQ ID NO: 40299 - DNA, 549 bp, Artificial Sequence
  derived and/or modified sequence
atgagcagcgacagcgagctggccgtgttcggcgaggccgcccccttcctccgaaagtcagagcgggagcgaattgaggcccaaaacagaccatttgacgcaaagacatcggttttcgtcgctgaacccaaagaaagttttgtgaaaggaaccatacaatctcgtgagggcggaaaggttacagttaaaactgaggggggcgcaacccttaccgtgaaagatgatcaggtgttcccaatgaaccctccaaagtatgacaagatcgaagatatggcaatgatgacccacctgcacgaaccagcggtgctctacaatctcaaagagcgatatgctgcttggatgatttacacttactctggacttttttgtgtcaccgtaaatccttacaagtggcttcccgtttacaagcctgaggtggtcaccgcttatagggggaagaaacgacaggaagccccacctcacattttcagtatcagtgacaatgcctatcaattcatgttgaccgatagagagaaccaaagtattttgatcaccggggagtctggctag

SEQ ID NO: 40300 - DNA, 405 bp, Artificial Sequence
  derived and/or modified sequence
atgagcagcgacagcgagctggccgtgttcggcgaggccgccccctttttgcgcaaatctgagcgggaaaggattgaagcccagaatcgacctttcgatgcgaagacatcagtgtttgtcgccgaacccaaagaaagcttcgttaagggcaccattcaaagcagggaaggaggaaaggtcacagttaagaccgaaggcggggccacacttactgtgaaggacgaccaagttttccccatgaaccctccaaaatacgataaaatagaagatatggccatgatgacgcatcttcacgaacccgcagtgttatacaatctgaaagaaagatacgccgcatggatgatctatacctatagcggcctgttttgcgtgaccgtgaacccatataagtggctgccagtctag

SEQ ID NO: 40301 - DNA, 2127 bp, Artificial Sequence
  derived and/or modified sequence
atgagcagcgacagcgagctggccgtgttcggcgaggccgccccctttttgcgcaaaagcgaaagggaacgtatcgaagcgcaaaaccgccccttcgatgcaaagacttccgtgttcgtggccgagcccaaggaatcattcgtgaaggggacaatccagagccgcgagggagggaaagtgactgtgaagaccgagggcggcgccacccttacagtgaaggacgatcaggtcttcccaatgaaccctcccaagtatgataagattgaggacatggctatgatgacccacctgcatgaacccgctgtgctgtacaatcttaaggaacgatacgccgcctggatgatttatacatactcggggctattttgcgtgactgtgaacccctataaatggctgccagtttataagcctgaggttgtgaccgcgtataggggcaaaaaaagacaagaggcccccccccacatctttagcatctctgataacgcctaccagttcatgctcaccgacagagagaatcaaagcattctgattacaggggagtcaggggccggcaaaactgtaaacaccaagcgggttatccagtacttcgccacaatagcggttacaggggagaagaaaaaggaggaaattacaagtggcaaaatccaagggacccttgaagatcagataataagcgccaacccacttttagaggcctttggtaacgccaagacggtccgaaatgataactcctctcggtttggcaagtttataaggatacactttggtaccactgggaagttggcaagcgcagacatcgaaacctacctgttggagaagtcccgagtggtgttccagctcaaggccgaacgatcttaccacattttctaccaaatcacatccaataaaaagcccgagctgatcgaaatgctgctgataacaacaaatccgtacgattatccttttgtatcccagggagagatttctgtggcgtcaatcgacgatcaggaggagctcatggcgacagattcggccattgatatcctgggattcaccaacgaggaaaaagtatctatatacaagctgacgggagccgtcatgcattatggcaatctgaaattcaaacagaagcagagggaagaacaggcagaaccagacggaactgaggtagcagacaaagccgcctacttacaaagcctcaacagcgcagatctactgaaagcactctgctacccccgggttaaggtggggaatgaatatgtgactaaaggccagaccgtcgagcaggtgtctaacgctgtgggagccctggctaaggcagtgtacgagaaaatgttcctttggatggtggcgcgcataaatcagcagctagacactaagcagccacgtcagtactttattggcgttttggatatcgcaggtttcgaaatttttgattttaattcactcgagcagctatgtattaactttacaaacgaaaaattacaacagttctttaaccaccacatgttcgttctggaacaggaagaatacaaaaaggagggcattgaatggactttcatcgattttggaatggacctggcagcctgtatcgaattgatcgagaagccaatggggattttttctattctggaggaagagtgcatgttcccaaaggccaccgatacatcctttaagaataagctatatgaccagcatctaggtaagtctgccaacttccagaagcccaaggttgtgaagggaaaagccgaggcacattttgccctgatccattatgccggggtggtggattataatataaccggttggttagagaagaacaaggatcctttaaacgagactgttgtgggtctgtaccaaaagtcggcaatgaagacccttgcacaacttttcagtggtgcacagacggctgagggcgagggggccgggggaggagcaaagaaaggcggcaaaaaaaaaggctcttcctttcagactgtgtctgcacttttccgagaggagcagtccaacacaaacttggccaagtttagaaaactccaacatgagctagaagaggccgaagaacgtgctgacattgcagaatctcaggtgaacaaattgcgtgtgaaaagccgtgaggtccacacaaaagttatctctgaagaatag

SEQ ID NO: 40302 - DNA, 5826 bp, Artificial Sequence
  derived and/or modified sequence
atgtcttcagatagcgaactggcagtcttcggcgaggcggctccttttctacggaagtccgagcgggaacggattgaggctcagaacagaccttttgacgccaagacctcggtgttcgtcgcggaacccaaggaatccttcgtaaagggaacaatacaaagtcgagagggaggcaaggtcacagtcaaaacagaagggggtgctacacttaccgtgaaggatgaccaggtgttcccaatgaatcccccaaagtatgacaaaatcgaggacatggctatgatgacacacttacatgaaccggcagtattatataatctgaaagagaggtatgcagcgtggatgatctatacatatagtggtttattttgtgtgaccgtgaacccatataaatggctgccggtatacaaacccgaggtcgtaacagcctaccgagggaaaaagagacaggaagctcctccccacatttttagcatctcagataacgcctatcaattcatgcttacggatcgagagaatcagagcatcctgatcacaggcgaaagtggggctggaaaaactgtcaacaccaaacgagtcattcaatattttgctaccattgctgtgaccggagaaaagaaaaaggaggagatcacctccggaaaaatccagggtacactggaggatcagatcatctccgccaaccctctgttagaggcattcggaaacgctaaaaccgtgcggaacgataattcctcccgctttggcaagtttataaggatccactttggaaccacgggaaagctggccagcgctgatattgagacttacttactggagaagtcacgagtagtctttcagctcaaagcggagcgctcgtaccacatcttctatcagatcacttccaacaagaaacctgaactcatcgagatgctcctgattaccactaatccctatgactatccatttgtgtcacaaggagaaatctccgtggcttccatagacgaccaggaagaactcatggccaccgattctgcaattgacatcctgggcttcaccaatgaagaaaaggtctcgatatataaacttaccggcgcagttatgcactacggaaacctcaagttcaaacagaagcagcgcgaagaacaggctgagccagatggtaccgaagtggcggataaggccgcttaccttcagtccctcaacagcgccgacctcctcaaggcgctctgctatcctagggtgaaagtaggcaatgaatacgtaactaaaggtcagacggtcgagcaggtcagcaacgccgtgggcgctcttgccaaggccgtgtacgagaagatgttcctctggatggtggccaggattaaccagcagctggataccaaacagccgagacagtacttcattggcgtcctggatattgccggattcgaaatatttgattttaacagccttgagcagctatgcattaactttactaatgagaaacttcaacagttttttaaccaccacatgtttgtgctggaacaggaagagtacaaaaaggagggcattgaatggacatttatcgacttcggcatggatctggctgcttgtattgaactgatcgagaaaccaatgggtatcttcagcatcctcgaggaagagtgcatgttccccaaggctacagacactagcttcaagaataagctctacgatcaacacttgggaaagtctgccaatttccagaaacctaaggtcgtgaaggggaaagcggaggcccactttgcgttgatacactacgctggtgttgtcgactacaatattactgggtggctggagaaaaataaagaccctttaaatgaaaccgtagtcggtttgtaccagaagtccgcaatgaagactcttgcccagctctttagtggagcacaaacagccgagggtgagggagccggaggcggagcaaagaaggggggaaaaaagaaaggcagctctttccagaccgtgtccgctttattccgagaaaatctcaacaaactcatgacaaatcttcgctctacccatccccacttcgtgcggtgcatcattcccaatgagactaagacccccggagctatggaacatgagctggtgcttcatcaactgaggtgcaacggcgtgctcgaaggaattcgaatttgccggaaaggtttcccatcccgtatcctgtatgccgactttaagcagcgttacaaagtcctgaacgctagcgccatccctgagggtcaattcattgattctaagaaagctagcgagaagcttcttgcatccatcgatatcgatcacacccagtataaattcggccatactaaagtcttttttaaggcaggactgcttggcctcttggaggagatgagagacgacaagcttgctcagctcattacaagaactcaggctaggtgcaggggcttcctggcaagagtggaataccaaaggatggtcgaacgcagggaggcaattttctgcatacagtataacattaggtcatttatgaacgttaaacactggccctggatgaagctgttttttaaaataaaacctctcctcaaatcggccgagaccgaaaaagaaatggcgacaatgaaggaagagttccagaaaatcaaagacgagctcgcaaagtctgaagcgaagcgcaaggagttggaggaaaaaatggttaccttgcttaaagaaaagaacgacctgcaactccaggttcaggcggaagcggaggggctcgcagatgctgaggaacgctgtgaccagctaatcaaaacaaagattcagttagaagcaaaaattaaggaagtgactgaacgcgcagaagacgaagaggaaataaacgcagagctcacagctaaaaaacgcaagttggaagatgagtgcagtgagctgaaaaaggatatagacgatctggaactgacattagcaaaagtggagaaagaaaaacatgctactgagaataaggtgaagaacctaacagaggaaatggctggtttggacgagacaattgccaagttgaccaaagagaagaaggcgcttcaggaggcccaccaacagacactggacgatttgcaggccgaggaggacaaggtgaacaccctcactaaagctaagatcaagttggagcagcaagtagatgatttggaaggaagcctggagcaggaaaagaaactgaggatggacctagaaagggctaagagaaaactggagggtgatcttaaacttgctcaggagagcatcatggacatcgaaaacgaaaagcaacaactggacgagaagcttaaaaagaaagaatttgagatctcaaacctgcagagcaagattgaggacgagcaggccctgggaatacagctgcagaagaaaattaaggagctacaggcgaggattgaagaacttgaggaggagatcgaagcagagagggcttcgcgcgctaaagcagaaaagcaaagatcggacctttctcgcgagctggaagagatctctgagcggctggaagaagccggtggcgctaccagtgctcagatcgagatgaataagaagcgagaagcggagtttcaaaagatgcgacgcgatcttgaggaagccaccctgcagcatgaagccacggccgctactctgcgcaaaaagcatgcagactctgtggctgaactcggggagcagatcgataatctgcaacgcgtgaagcagaagctcgaaaaagagaagtccgagatgaaaatggaaattgacgatctggctagtaatgtagagacagtgagtaaggccaaggggaatctggagaagatgtgccgaacactcgaagatcagctgagtgagttgaagtcaaaggaggaagaacaacaaaggctgatcaatgatctgaccgcccagaggggcagactccagactgaaagcggcgagtttagtaggcagctggatgagaaagaggcccttgttagccagctcagtcgaggaaagcaagccttcacacagcagattgaggagctgaagaggcagctggaagaagaaataaaggccaagaatgctttagcccatgcattacagagctcccggcacgattgtgacctgttgagagagcagtacgaggaggagcaagaaagcaaggcagagctgcagagagctctgagcaaagccaatacggaagtagcccagtggcggaccaaatatgaaactgacgcaattcagaggactgaagagctcgaggaagccaaaaagaaactcgcgcagcgcttgcaggccgctgaagagcatgtggaggctgtgaatgcaaaatgtgcctcactggagaaaaccaaacagaggctccaaaacgaagtagaagatctgatgctggatgttgagaggaccaacgccgcatgtgcagcactggataagaagcagcgcaactttgacaaaatcctggccgagtggaaacagaaatgcgaggaaactcacgcggaactggaagcctctcagaaggaggctcggagccttggaaccgagctgtttaagatcaagaatgcctacgaagagtcgctggaccagctggagacgttgaagagagagaataagaacctgcagcaagaaatctcagatctgacagagcagattgccgaaggagggaagcgaattcatgagctggaaaagataaaaaagcaggtggagcaagaaaagtgtgagcttcaggctgcactcgaggaggcagaggcctctctcgagcacgaagagggcaagatcttgaggatccagcttgagctaaaccaagtgaagagcgaagtggacaggaagatcgctgaaaaggatgaggaaattgatcaactgaagcggaaccatattagaattgtcgaatcaatgcagagcaccctggatgctgaaattcgcagtcgtaacgatgctatccgactgaagaagaagatggagggggatcttaatgaaatggagattcagcttaaccatgccaacaggatggcagcggaggcgctgaggaactatcgaaatacgcagggcatcctaaaggacacccagatccacctggacgatgccctgagaagccaagaggacctgaaagaacagcttgctatggtcgagaggcgagcgaatctgcttcaggctgaaatcgaggaactccgagctacactggaacaaacggaaaggagccggaagatcgccgaacaagaattgctcgatgcaagtgagcgcgtgcagctcctgcacacacaaaatacctccttgatcaataccaagaaaaagttggaaaccgacatctcacaaatgcaaggcgaaatggaagatattctgcaggaagcaaggaatgccgaggaaaaagcaaaaaaggcgattaccgatgctgccatgatggccgaggagctgaagaaagagcaggatacaagtgcccatctggagcgtatgaagaagaacatggaacagactgtgaaggacctacagctgaggttagatgaggctgagcagctcgccttgaagggcggtaagaagcaaattcagaaacttgaggccagagtccgggaacttgagggtgaagttgaaagcgagcaaaaaaggaacgccgaagcggttaaagggttacgcaaacacgagaggagggttaaagaactcacgtaccagaccgaggaggaccgaaagaacatcttgagactccaggatctggtagataagttgcaggcaaaagtgaagtcttacaagcgccaagccgaagaggccgaggaacagtctaatactaacctggccaaattccggaagctgcagcacgaattggaggaggccgaggagcgcgcagacatagctgaatcacaggtaaataagctgagggtcaaaagtcgagaagtacataccaaggtgattagcgaggagtag

SEQ ID NO: 40303 - DNA, 5825 bp, Artificial Sequence
  derived and/or modified sequence
atgtcctctgattcggagctggctgtgtttggggaggccgcaccattcctccggaagtccgaaagggaacgaattgaagcacagaatagaccttttgatgcaaagacatccgtcttcgttgctgaaccaaaggagagttttgtgaagggcacaattcagtctcgggagggtgggaaggtcacagtgaagaccgaaggaggtgccaccctcacagtgaaagatgaccaggttttcccaatgaaccccccaaagtatgacaagatcgaggacatggccatgatgacacaccttcacgaaccagccgtgctatataacctgaaagaacggtacgccgcttggatgatttacacatacagtggcttgttttgtgtgacagtgaacccctacaagtggctgcctgtgtacaaaccagaggtagtgaccgcctatcggggaaaaaagcgccaggaggcacccccacacattttctctatttccgacaacgcataccagttcatgctgacggatagagaaaatcaatccattctgatcactggagagtccggggctggtaagacagtgaatacaaagcgggtgatccagtacttcgcaaccatcgcggtcacgggagaaaaaaagaaagaggaaatcacaagcggcaagattcagggtaccctggaggaccagattatttccgccaaccccctcctggaagcattcggaaacgctaaaacagttcgtaatgacaacagcagccgcttcgggaagttcatccgtattcatttcggcaccactggcaagctcgcaagtgccgatattgaaacctacttgctagagaagtcaagagtggtctttcaactgaaagctgagcgctcctatcacatcttctaccagatcacttcaaacaagaagcctgaactgatagagatgctactcatcaccaccaacccatacgactacccttttgtttcgcagggagaaattagtgtggctagcatcgatgaccaggaagagctgatggccacagatagcgccatagatatattggggttcacaaacgaggagaaagtgtcaatctacaagctcaccggcgctgtcatgcactacggaaatttgaagtttaaacaaaagcagagagaggagcaggcggagccagacggaacggaagtggctgataaggcagcctacctacagtcattaaattctgcagatcttctgaaggcgctgtgctaccctagagttaaggtaggaaacgagtacgtcacaaaggggcagactgtggagcaggttagtaatgcggtcggcgctttggctaaggctgtgtatgaaaagatgttcctatggatggtcgcccgaattaaccagcagctagataccaaacagcccagacaatactttatcggagtgctggatatcgccggattcgagatattcgacttcaacagcctggagcaattatgcattaatttcactaacgaaaagctccagcagttttttaatcaccatatgtttgtgcttgaacaggaagaatacaagaaggaagggatcgaatggacatttatcgacttcggcatggacctggcagcttgtatcgagcttatagagaaacccatgggcatcttcagtattcttgaggaggagtgcatgtttccaaaagctaccgacacgagtttcaaaaacaaactgtacgatcagcatctgggtaagtccgccaatttccagaagccaaaggttgtgaagggaaaggcggaggcccactttgcactcatacactacgctggcgtggttgactataacatcaccgggtggttggaaaaaaataaggaccccttaaacgaaactgtagttggcctgtatcagaaatctgctatgaagacactggcccagctgttttcaggggcacagaccgctgagggcgagggcgcaggtggcggagcgaagaaagggggaaagaagaagggctcatcttttcagacggtcagtgcgctgttcagagagaaccttaataagttaatgacaaacctgcgctcaacccacccccacttcgtgcggtgcatcattcctaacgagaccaagacaccaggggcaatggagcacgagctggtgctccaccaactgcgttgtaatggcgtgctggagggtattaggatctgcagaaagggattcccatcgaggatcctctacgctgattttaagcaacgatataaggtcctgaatgcttcagccatccctgaggggcagtttatcgacagcaagaaggccagcgaaaaactcttagcaagtatcgatatcgatcacacccagtacaaattcggtcataccaaagtattcttcaaagccggactgctcggtcttttagaagagatgagggatgacaaattagctcagctgataactcggacccaagcgaggtgtaggggctttcttgcacgggtggagtaccaaagaatggtcgaacgcagagaagcaatcttctgcatacagtacaacattcggtctttcatgaacgtgaagcattggccctggatgaagttgttttttaagatcaagcccctcctcaaaagcgcagaaaccgagaaggaaatggctactatgaaggaagagtttcagaagatcaaagatgaattggccaaaagcgaagcgaagagaaaggagctggaggaaaagatggtgaccctgctaaaagaaaagaacgatctgcagctgcaggtgcaggccgaagctgaaggtcttgcagacgcggaagagcggtgcgaccagcttatcaaaacgaagatccaactggaggccaagatcaaagaggtcacagagagagccgaagatgaagaagagatcaacgcagagctgacagcaaaaaagcgtaaattggaggacgagtgcagtgagttaaagaaggatatcgatgatttagaactgaccttagccaaagtggagaaggagaagcatgcgaccgagaacaaagttaagaacctgactgaggagatggctgggctggatgaaacaattgctaagctaaccaaagagaaaaaagccctgcaggaggctcatcagcaaacactggatgatctccaggcagaggaagacaaagtgaacacgctcactaaagctaaaatcaagctggagcagcaggttgacgacctggaagggtccctggaacaggaaaagaagctgcggatggatctggagcgtgccaagcggaaactggaaggtgacctaaaattggctcaggagtcaattatggacatcgagaacgaaaaacagcagttagatgagaagttgaaaaagaaggagttcgaaatcagtaacctgcaaagcaagattgaggatgagcaggcccttggcatacagcttcaaaagaagataaaggaattacaagctcgaattgaggaactggaagaggaaattgaggcagagcgcgctagccgcgctaaggcagaaaaacagcgcagcgatttgtcacgggagctggaggagatctccgagagactggaagaggcaggcggagcaacgagtgctcaaattgagatgaacaaaaagagggaggccgaatttcagaaaatgagaagggatctggaagaggctacactccaacatgaagccactgcagcgactcttcgcaaaaaacatgctgatagcgtcgccgagctcggcgaacagatagataatctccagcgcgtaaagcaaaagctggagaaggaaaagtctgaaatgaagatggagatagacgatctcgcaagtaacgtggaaaccgttagtaaggctaaaggtaacctcgaaaaaatgtgtcggacccttgaggatcagctgtctgagctgaagtccaaagaagaggagcagcaaaggttgatcaacgatctgacagctcagaggggcagactccagaccgagtcaggggagttcagtcgtcagttagacgaaaaggaggccttggtgagtcagctgtctagagggaagcaggctttcacgcagcagattgaagaattaaagagacagctcgaggaggagatcaaggccaaaaacgcattagcgcacgccctacagagcagcagacatgactgtgatctgcttagagaacagtacgaagaggaacaagagagcaaagcagagttgcaacgggcactgagtaaggcaaatacggaagtggcacagtggcgaacaaagtacgaaacagacgcaattcaacgtaccgaggagctggaggaagcaaaaaagaagctagcccaacggcttcaggccgcagaagaacatgtggaggcagtgaatgctaagtgcgctagcctggaaaagacgaagcagaggctgcagaatgaagtggaagacctgatgctcgacgtcgagaggaccaacgcagcttgtgctgctctggataaaaagcagcggaatttcgacaagatactcgcggagtggaagcaaaaatgcgaagagacccacgccgagctggaggcctctcagaaagaggcacgcagtttggggaccgagctgtttaagataaagaacgcctacgaagagagcctcgatcagcttgagactctgaaacgggaaaataagaacctccagcaggagatttccgatttaacagagcagattgcggagggcggtaagcgcatccacgaactcgagaaaatcaagaaacaggttgaacaggagaagtgcgagctgcaggccgctctcgaggaagccgaagccagcttagagcatgaagagggcaaaattctgcgtattcagctggagctcaaccaagtaaagagtgaggtggaccgaaagatcgctgaaaaggatgaagagatcgatcaattaaagagaaaccatattagaatagtggagtcaatgcagtccaccctggatgccgaaattagatctaggaatgacgcgatccgtctgaagaaaaagatggagggagatctcaatgagatggagattcaattgaaccacgccaaccgtatggctgcagaggcgctccgaaattaccgaaacacccaagggattctcaaggacactcagattcatctagatgatgccttgaggtcgcaggaggacctgaaggagcagttggccatggtggaaagacgtgccaacctgctgcaggctgaaatcgaagaattgcgggctacgctggaacagactgagcgcagccgcaaaatcgccgaacaggaacttctggatgcatcagagcgggtgcagcttctgcacacgcagaatacttcgctgattaacacaaagaagaagttggagacggatatttcacagatgcagggcgaaatggaggacatactccaggaggccaggaacgcagaggaaaaggccaaaaaagcaataaccgacgcggcaatgatggctgaggaacttaagaaggaacaggacacttccgcccacttagaacgtatgaaaaaaaacatggaacagacagtcaaggaccttcagcttaggttagatgaggcagaacagttggcgctgaaaggagggaagaaacagattcagaagttagaggcgagagtgagagagctggagggagaagtggaatccgaacagaagcgcaacgctgaggctgtcaaaggactacggaagcatgagcgacgggtgaaagagttgacttaccaaaccgaggaagacagaaagaacatcctgaggctgcaggatttggtggataaattgcaggccaaggttaagtcatataaacgtcaggccgaagaagcggaggaacaaagcaataccaacctggccaaatttcgcaaactgcagcatgaactggaggaagctgaagaacgcgcagacatcgcagagagccaggtgaacaagcttcgcgtgaagagccgggaggttcacactaaagtgatctccgaagaata

SEQ ID NO: 40304 - DNA, 549 bp, Artificial Sequence
  derived and/or modified sequence
atgtctagtgattctgagctggccgtgtttggcgaggccgcacccttcctgaggaaatccgaaagggagcgcatcgaggctcaaaaccgtcccttcgatgccaaaacaagtgtgttcgtggcggagccgaaagagagcttcgtcaaagggacaattcagagtagggagggcggaaaggtcacagtaaaaacagagggcggagctacattgacagtgaaagatgatcaggtgtttccgatgaaccctcctaagtacgacaaaatagaagatatggctatgatgacccatctgcatgagcccgctgtgctgtataacctgaaggagaggtatgcagcctggatgatatacacatattctggtctgttttgtgtgaccgttaatccttacaagtggctcccagtgtacaagcccgaagtcgtcaccgcttacagaggcaaaaagaggcaagaagccccaccccacatcttcagtataagtgacaacgcctatcaatttatgttaaccgatagggagaaccagagtatcttaataactggcgagtccggttag

SEQ ID NO: 40305 - DNA, 405 bp, Artificial Sequence
  derived and/or modified sequence
atgtccagcgacagtgagttagccgtattcggcgaggcagccccattcctgcggaaaagcgaaagagaaagaatagaggcccagaataggccattcgacgccaagacctctgtattcgtggccgagcctaaggagtcctttgtgaagggaaccatccagtcccgggagggagggaaggttactgtaaagaccgaaggtggagccaccctgacagtaaaagacgaccaggtattccccatgaacccaccaaagtatgacaaaatagaggatatggccatgatgacacacctgcatgaacccgcagtgctctacaatctgaaggagagatatgcagcctggatgatttacacctactccggcttgttttgtgtaacggttaatccgtataagtggttgcctgtctag

SEQ ID NO: 40306 - DNA, 2127 bp, Artificial Sequence
  derived and/or modified sequence
atgagcagtgattctgaattagctgtctttggggaggctgcaccattcctcagaaagagcgaaagggagcgaattgaggcccagaataggcctttcgacgctaagactagtgtgttcgtggccgagcctaaggagagcttcgtgaagggtactatccagagcagggaaggaggtaaggttacagtgaagacagaggggggagcgaccctcactgttaaggatgatcaggtattcccgatgaaccctcctaaatacgataaaatagaagatatggcgatgatgacccacctccatgagccggcagtcctttataacctgaaagaacgatacgccgcatggatgatctatacctacagcggactattctgcgtgaccgtaaatccttacaagtggctccccgtctacaaaccagaagtggtcaccgcctatcgcggaaaaaagcggcaggaggcacctccacatattttctccattagcgacaacgcttaccaattcatgctcacagacagagagaatcagtctatcctcatcactggagaatccggggctggtaaaactgtgaacaccaaaagagtgattcagtatttcgcaactattgcggtaaccggcgaaaagaaaaaggaggagattacatcgggaaagattcagggcaccttagaggatcagatcatttctgcaaaccctttgctggaggcattcgggaacgccaagaccgtcagaaatgacaacagttcccggtttggtaaatttattagaatccactttggtacaaccgggaagttagcaagcgctgacattgaaacctatctccttgaaaagtccagggttgtgttccagctgaaggccgagaggtcataccatatattctatcagatcactagtaataaaaagccagagttgattgaaatgctcctgattactaccaatccctatgattacccttttgtgtctcagggtgagatcagtgtggcttccatcgacgatcaggaggaactgatggctacggactccgctatagatattctggggttcaccaatgaagagaaagttagcatttataaactgacaggagccgtgatgcattatggaaacctgaagttcaaacagaagcagagagaggaacaagccgagccagatggaactgaggtcgctgacaaggcagcctatctccagagtctgaattctgcggatctgttgaaagccttatgctaccccagggttaaagtgggcaatgagtatgttactaaggggcaaacagttgaacaggtgtctaacgccgtgggtgcacttgccaaggccgtgtacgaaaaaatgtttctctggatggtcgccagaattaatcagcaactggacacaaaacagcccagacaatactttattggtgtattagacatcgccggattcgaaatttttgacttcaactcgctagagcaattgtgcataaatttcaccaatgaaaaactgcaacagttctttaaccaccatatgtttgtgctggaacaagaggaatacaaaaaagagggaattgaatggacctttatcgattttggcatggatctggccgcttgtatcgaactgatcgagaagccaatgggaattttttctatactggaagaggagtgtatgtttccgaaagcaacagacaccagttttaagaacaaactgtacgaccagcatctgggcaaatcagccaacttccaaaaacctaaggttgtgaagggtaaggctgaagcccactttgcccttatccactacgccggtgtcgtggattacaacattactggctggctggagaagaacaaggaccctctgaatgagaccgtcgtaggcctctaccagaaaagcgctatgaaaacactggctcaactcttctccggtgcccagacagctgagggtgagggagccggaggcggagccaagaaggggggtaaaaaaaaggggagttcattccaaacggtgagcgccctcttcagagaagaacagagtaacaccaatctggccaaatttcgcaaactccagcacgaactggaggaggctgaagagcgggcagatatcgccgagagtcaggtaaataagctgagggttaagagccgggaggtgcatacaaaggtgatcagtgaggaatag

SEQ ID NO: 40307 - DNA, 5826 bp, Artificial Sequence
  derived and/or modified sequence
atgagcagcgacagcgagctggccgtgttcggcgaggccgcccccttcctgagaaagagcgagagagagagaatcgaggcccagaacagacccttcgacgccaagaccagcgtgttcgtggccgagcccaaggagagcttcgtgaagggcaccatccagagcagagagggcggcaaggtgaccgtgaagaccgagggcggcgccaccctgaccgtgaaggacgaccaggtgttccccatgaacccccccaagtacgacaagatcgaggacatggccatgatgacccacctgcacgagcccgccgtgctgtacaacctgaaggagagatacgccgcctggatgatctacacctacagcggcctgttctgcgtgaccgtgaacccctacaagtggctgcccgtgtacaagcccgaggtggtgaccgcctacagaggcaagaagagacaggaggcccccccccacatcttcagcatcagcgacaacgcctaccagttcatgctgaccgacagagagaaccagagcatcctgatcaccggcgagagcggcgccggcaagaccgtgaacaccaagagagtgatccagtacttcgccaccatcgccgtgaccggcgagaagaagaaggaggagatcaccagcggcaagatccagggcaccctggaggaccagatcatcagcgccaaccccctgctggaggccttcggcaacgccaagaccgtgagaaacgacaacagcagcagattcggcaagttcatcagaatccacttcggcaccaccggcaagctggccagcgccgacatcgagacctacctgctggagaagagcagagtggtgttccagctgaaggccgagagaagctaccacatcttctaccagatcaccagcaacaagaagcccgagctgatcgagatgctgctgatcaccaccaacccctacgactaccccttcgtgagccagggcgagatcagcgtggccagcatcgacgaccaggaggagctgatggccaccgacagcgccatcgacatcctgggcttcaccaacgaggagaaggtgagcatctacaagctgaccggcgccgtgatgcactacggcaacctgaagttcaagcagaagcagagagaggagcaggccgagcccgacggcaccgaggtggccgacaaggccgcctacctgcagagcctgaacagcgccgacctgctgaaggccctgtgctaccccagagtgaaggtgggcaacgagtacgtgaccaagggccagaccgtggagcaggtgagcaacgccgtgggcgccctggccaaggccgtgtacgagaagatgttcctgtggatggtggccagaatcaaccagcagctggacaccaagcagcccagacagtacttcatcggcgtgctggacatcgccggcttcgagatcttcgacttcaacagcctggagcagctgtgcatcaacttcaccaacgagaagctgcagcagttcttcaaccaccacatgttcgtgctggagcaggaggagtacaagaaggagggcatcgagtggaccttcatcgacttcggcatggacctggccgcctgcatcgagctgatcgagaagcccatgggcatcttcagcatcctggaggaggagtgcatgttccccaaggccaccgacaccagcttcaagaacaagctgtacgaccagcacctgggcaagagcgccaacttccagaagcccaaggtggtgaagggcaaggccgaggcccacttcgccctgatccactacgccggcgtggtggactacaacatcaccggctggctggagaagaacaaggaccccctgaacgagaccgtggtgggcctgtaccagaagagcgccatgaagaccctggcccagctgttcagcggcgcccagaccgccgagggcgagggcgccggcggcggcgccaagaagggcggcaagaagaagggcagcagcttccagaccgtgagcgccctgttcagagagaacctgaacaagctgatgaccaacctgagaagcacccacccccacttcgtgagatgcatcatccccaacgagaccaagacccccggcgccatggagcacgagctggtgctgcaccagctgagatgcaacggcgtgctggagggcatcagaatctgcagaaagggcttccccagcagaatcctgtacgccgacttcaagcagagatacaaggtgctgaacgccagcgccatccccgagggccagttcatcgacagcaagaaggccagcgagaagctgctggccagcatcgacatcgaccacacccagtacaagttcggccacaccaaggtgttcttcaaggccggcctgctgggcctgctggaggagatgagagacgacaagctggcccagctgatcaccagaacccaggccagatgcagaggcttcctggccagagtggagtaccagagaatggtggagagaagagaggccatcttctgcatccagtacaacatcagaagcttcatgaacgtgaagcactggccctggatgaagctgttcttcaagatcaagcccctgctgaagagcgccgagaccgagaaggagatggccaccatgaaggaggagttccagaagatcaaggacgagctggccaagagcgaggccaagagaaaggagctggaggagaagatggtgaccctgctgaaggagaagaacgacctgcagctgcaggtgcaggccgaggccgagggcctggccgacgccgaggagagatgcgaccagctgatcaagaccaagatccagctggaggccaagatcaaggaggtgaccgagagagccgaggacgaggaggagatcaacgccgagctgaccgccaagaagagaaagctggaggacgagtgcagcgagctgaagaaggacatcgacgacctggagctgaccctggccaaggtggagaaggagaagcacgccaccgagaacaaggtgaagaacctgaccgaggagatggccggcctggacgagaccatcgccaagctgaccaaggagaagaaggccctgcaggaggcccaccagcagaccctggacgacctgcaggccgaggaggacaaggtgaacaccctgaccaaggccaagatcaagctggagcagcaggtggacgacctggagggcagcctggagcaggagaagaagctgagaatggacctggagagagccaagagaaagctggagggcgacctgaagctggcccaggagagcatcatggacatcgagaacgagaagcagcagctggacgagaagctgaagaagaaggagttcgagatcagcaacctgcagagcaagatcgaggacgagcaggccctgggcatccagctgcagaagaagatcaaggagctgcaggccagaatcgaggagctggaggaggagatcgaggccgagagagccagcagagccaaggccgagaagcagagaagcgacctgagcagagagctggaggagatcagcgagagactggaggaggccggcggcgccaccagcgcccagatcgagatgaacaagaagagagaggccgagttccagaagatgagaagagacctggaggaggccaccctgcagcacgaggccaccgccgccaccctgagaaagaagcacgccgacagcgtggccgagctgggcgagcagatcgacaacctgcagagagtgaagcagaagctggagaaggagaagagcgagatgaagatggagatcgacgacctggccagcaacgtggagaccgtgagcaaggccaagggcaacctggagaagatgtgcagaaccctggaggaccagctgagcgagctgaagagcaaggaggaggagcagcagagactgatcaacgacctgaccgcccagagaggcagactgcagaccgagagcggcgagttcagcagacagctggacgagaaggaggccctggtgagccagctgagcagaggcaagcaggccttcacccagcagatcgaggagctgaagagacagctggaggaggagatcaaggccaagaacgccctggcccacgccctgcagagcagcagacacgactgcgacctgctgagagagcagtacgaggaggagcaggagagcaaggccgagctgcagagagccctgagcaaggccaacaccgaggtggcccagtggagaaccaagtacgagaccgacgccatccagagaaccgaggagctggaggaggccaagaagaagctggcccagagactgcaggccgccgaggagcacgtggaggccgtgaacgccaagtgcgccagcctggagaagaccaagcagagactgcagaacgaggtggaggacctgatgctggacgtggagagaaccaacgccgcctgcgccgccctggacaagaagcagagaaacttcgacaagatcctggccgagtggaagcagaagtgcgaggagacccacgccgagctggaggccagccagaaggaggccagaagcctgggcaccgagctgttcaagatcaagaacgcctacgaggagagcctggaccagctggagaccctgaagagagagaacaagaacctgcagcaggagatcagcgacctgaccgagcagatcgccgagggcggcaagagaatccacgagctggagaagatcaagaagcaggtggagcaggagaagtgcgagctgcaggccgccctggaggaggccgaggccagcctggagcacgaggagggcaagatcctgagaatccagctggagctgaaccaggtgaagagcgaggtggacagaaagatcgccgagaaggacgaggagatcgaccagctgaagagaaaccacatcagaatcgtggagagcatgcagagcaccctggacgccgagatcagaagcagaaacgacgccatcagactgaagaagaagatggagggcgacctgaacgagatggagatccagctgaaccacgccaacagaatggccgccgaggccctgagaaactacagaaacacccagggcatcctgaaggacacccagatccacctggacgacgccctgagaagccaggaggacctgaaggagcagctggccatggtggagagaagagccaacctgctgcaggccgagatcgaggagctgagagccaccctggagcagaccgagagaagcagaaagatcgccgagcaggagctgctggacgccagcgagagagtgcagctgctgcacacccagaacaccagcctgatcaacaccaagaagaagctggagaccgacatcagccagatgcagggcgagatggaggacatcctgcaggaggccagaaacgccgaggagaaggccaagaaggccatcaccgacgccgccatgatggccgaggagctgaagaaggagcaggacaccagcgcccacctggagagaatgaagaagaacatggagcagaccgtgaaggacctgcagctgagactggacgaggccgagcagctggccctgaagggcggcaagaagcagatccagaagctggaggccagagtgagagagctggagggcgaggtggagagcgagcagaagagaaacgccgaggccgtgaagggcctgagaaagcacgagagaagagtgaaggagctgacctaccagaccgaggaggacagaaagaacatcctgagactgcaggacctggtggacaagctgcaggccaaggtgaagagctacaagagacaggccgaggaggccgaggagcagagcaacaccaacctggccaagttcagaaagctgcagcacgagctggaggaggccgaggagagagccgacatcgccgagagccaggtgaacaagctgagagtgaagagcagagaggtgcacaccaaggtgatcagcgaggagtag

SEQ ID NO: 40308 - DNA, 549 bp, Artificial Sequence
  derived and/or modified sequence
atgagcagcgacagcgagctggccgtgttcggcgaggccgcccccttcctgagaaagagcgagagagagagaatcgaggcccagaacagacccttcgacgccaagaccagcgtgttcgtggccgagcccaaggagagcttcgtgaagggcaccatccagagcagagagggcggcaaggtgaccgtgaagaccgagggcggcgccaccctgaccgtgaaggacgaccaggtgttccccatgaacccccccaagtacgacaagatcgaggacatggccatgatgacccacctgcacgagcccgccgtgctgtacaacctgaaggagagatacgccgcctggatgatctacacctacagcggcctgttctgcgtgaccgtgaacccctacaagtggctgcccgtgtacaagcccgaggtggtgaccgcctacagaggcaagaagagacaggaggcccccccccacatcttcagcatcagcgacaacgcctaccagttcatgctgaccgacagagagaaccagagcatcctgatcaccggcgagagcggctag

SEQ ID NO: 40309 - DNA, 405 bp, Artificial Sequence
  derived and/or modified sequence
atgagcagcgacagcgagctggccgtgttcggcgaggccgcccccttcctgagaaagagcgagagagagagaatcgaggcccagaacagacccttcgacgccaagaccagcgtgttcgtggccgagcccaaggagagcttcgtgaagggcaccatccagagcagagagggcggcaaggtgaccgtgaagaccgagggcggcgccaccctgaccgtgaaggacgaccaggtgttccccatgaacccccccaagtacgacaagatcgaggacatggccatgatgacccacctgcacgagcccgccgtgctgtacaacctgaaggagagatacgccgcctggatgatctacacctacagcggcctgttctgcgtgaccgtgaacccctacaagtggctgcccgtgtag

SEQ ID NO: 40310 - DNA, 2127 bp, Artificial Sequence
  derived and/or modified sequence
atgagcagcgacagcgagctggccgtgttcggcgaggccgcccccttcctgagaaagagcgagagagagagaatcgaggcccagaacagacccttcgacgccaagaccagcgtgttcgtggccgagcccaaggagagcttcgtgaagggcaccatccagagcagagagggcggcaaggtgaccgtgaagaccgagggcggcgccaccctgaccgtgaaggacgaccaggtgttccccatgaacccccccaagtacgacaagatcgaggacatggccatgatgacccacctgcacgagcccgccgtgctgtacaacctgaaggagagatacgccgcctggatgatctacacctacagcggcctgttctgcgtgaccgtgaacccctacaagtggctgcccgtgtacaagcccgaggtggtgaccgcctacagaggcaagaagagacaggaggcccccccccacatcttcagcatcagcgacaacgcctaccagttcatgctgaccgacagagagaaccagagcatcctgatcaccggcgagagcggcgccggcaagaccgtgaacaccaagagagtgatccagtacttcgccaccatcgccgtgaccggcgagaagaagaaggaggagatcaccagcggcaagatccagggcaccctggaggaccagatcatcagcgccaaccccctgctggaggccttcggcaacgccaagaccgtgagaaacgacaacagcagcagattcggcaagttcatcagaatccacttcggcaccaccggcaagctggccagcgccgacatcgagacctacctgctggagaagagcagagtggtgttccagctgaaggccgagagaagctaccacatcttctaccagatcaccagcaacaagaagcccgagctgatcgagatgctgctgatcaccaccaacccctacgactaccccttcgtgagccagggcgagatcagcgtggccagcatcgacgaccaggaggagctgatggccaccgacagcgccatcgacatcctgggcttcaccaacgaggagaaggtgagcatctacaagctgaccggcgccgtgatgcactacggcaacctgaagttcaagcagaagcagagagaggagcaggccgagcccgacggcaccgaggtggccgacaaggccgcctacctgcagagcctgaacagcgccgacctgctgaaggccctgtgctaccccagagtgaaggtgggcaacgagtacgtgaccaagggccagaccgtggagcaggtgagcaacgccgtgggcgccctggccaaggccgtgtacgagaagatgttcctgtggatggtggccagaatcaaccagcagctggacaccaagcagcccagacagtacttcatcggcgtgctggacatcgccggcttcgagatcttcgacttcaacagcctggagcagctgtgcatcaacttcaccaacgagaagctgcagcagttcttcaaccaccacatgttcgtgctggagcaggaggagtacaagaaggagggcatcgagtggaccttcatcgacttcggcatggacctggccgcctgcatcgagctgatcgagaagcccatgggcatcttcagcatcctggaggaggagtgcatgttccccaaggccaccgacaccagcttcaagaacaagctgtacgaccagcacctgggcaagagcgccaacttccagaagcccaaggtggtgaagggcaaggccgaggcccacttcgccctgatccactacgccggcgtggtggactacaacatcaccggctggctggagaagaacaaggaccccctgaacgagaccgtggtgggcctgtaccagaagagcgccatgaagaccctggcccagctgttcagcggcgcccagaccgccgagggcgagggcgccggcggcggcgccaagaagggcggcaagaagaagggcagcagcttccagaccgtgagcgccctgttcagagaggagcagagcaacaccaacctggccaagttcagaaagctgcagcacgagctggaggaggccgaggagagagccgacatcgccgagagccaggtgaacaagctgagagtgaagagcagagaggtgcacaccaaggtgatcagcgaggagtag

SEQ ID NO: 40311 - protein, 1349 aa, Artificial Sequence
  derived and/or modified sequence
MSAPVGPRGRLAPIPAASQPPLQPEMPDLSHLTEEERKIILAVMDRQKKEEEKEQSVLKKLHQQFEMYKEQVKKMGEESQQQQEQKGDAPTCGICHKTKFADGCGHNCSYCQTKFCARCGGRVSLRSNKVMWVCNLCRKQQEILTKSGAWFYNSGSNTPQQPDQKVLRGLRNEEAPQEKKPKLHEQTQFQGPSGDLSVPAVEKSRSHGLTRQHSIKNGSGVKHHIASDIASDRKRSPSVSRDQNRRYDQREEREEYSQYATSDTAMPRSPSDYADRRSQHEPQFYEDSDHLSYRDSNRRSHRHSKEYIVDDEDVESRDEYERQRREEEYQSRYRSDPNLARYPVKPQPYEEQMRIHAEVSRARHERRHSDVSLANADLEDSRISMLRMDRPSRQRSISERRAAMENQRSYSMERTREAQGPSSYAQRTTNHSPPTPRRSPLPIDRPDLRRTDSLRKQHHLDPSSAVRKTKREKMETMLRNDSLSSDQSESVRPPPPKPHKSKKGGKMRQISLSSSEEELASTPEYTSCDDVEIESESVSEKGDMDYNWLDHTSWHSSEASPMSLHPVTWQPSKDGDRLIGRILLNKRLKDGSVPRDSGAMLGLKVVGGKMTESGRLCAFITKVKKGSLADTVGHLRPGDEVLEWNGRLLQGATFEEVYNIILESKPEPQVELVVSRPIGDIPRIPDSTHAQLESSSSSFESQKMDRPSISVTSPMSPGMLRDVPQFLSGQLSSQSLSRRTTPFVPRVQIKLWFDKVGHQLIVTILGAKDLPSREDGRPRNPYVKIYFLPDRSDKNKRRTKTVKKTLEPKWNQTFIYSPVHRREFRERMLEITLWDQARVREEESEFLGEILIELETALLDDEPHWYKLQTHDVSSLPLPHPSPYMPRRQLHGESPTRRLQRSKRISDSEVSDYDCDDGIGVVSDYRHDGRDLQSSTLSVPEQVMSSNHCSPSGSPHRVDVIGRTRSWSPSVPPPQSRNVEQGLRGTRTMTGHYNTISRMDRHRVMDDHYSPDRDRDCEAADRQPYHRSRSTEQRPLLERTTTRSRSTERPDTNLMRSMPSLMTGRSAPPSPALSRSHPRTGSVQTSPSSTPVAGRRGRQLPQLPPKGTLDRKAGGKKLRSTVQRSTETGLAVEMRNWMTRQASRESTDGSMNSYSSEGNLIFPGVRLASDSQFSDFLDGLGPAQLVGRQTLATPAMGDIQVGMMDKKGQLEVEIIRARGLVVKPGSKTLPAPYVKVYLLDNGVCIAKKKTKVARKTLEPLYQQLLSFEESPQGKVLQIIVWGDYGRMDHKSFMGVAQILLDELELSNMVIGWFKLFPPSSLVDPTLAPLTRRASQSSLESSTGPSYSRS

SEQ ID NO: 40312 - DNA, 4050 bp, Artificial Sequence
  derived and/or modified sequence
atgtctgcacccgtcggccccaggggacgtttggcaccaattccggctgctagccagccccctctacagccagaaatgcccgacctgtcccatctcaccgaggaagagcggaagatcatactagcagttatggaccgtcaaaagaaggaagaagaaaaggagcaatctgtcctgaagaagctgcatcagcagtttgagatgtacaaggagcaggtgaaaaaaatgggtgaagagagccaacagcaacaagaacagaagggtgacgccccgacctgtggaatttgtcacaagacgaagttcgctgatgggtgcggtcacaactgtagctattgtcagactaaattttgcgcgcggtgcggcggccgagtaagcctaaggtcgaataaggtgatgtgggtctgtaatctgtgtcgcaagcagcaggagattctgacgaaaagcggggcttggttttataattccggatcaaacacccctcagcaacctgaccagaaggtcctcaggggcttaaggaacgaagaggccccgcaggagaaaaaaccgaagctccacgagcagactcagtttcaaggcccctccggcgatctgtccgttcccgctgtagagaaaagcagatctcacggcctcaccaggcagcattccatcaaaaatggctcaggtgtgaaacatcatattgcttcagacatcgcctcagaccgcaaaagatccccttccgtgtctagggaccaaaaccgacggtatgatcagcgcgaggaacgcgaagagtattcccagtacgccacgtcagataccgctatgccaaggtcacccagtgattatgcagatcggaggagtcaacatgagcctcagttctacgaagactcagaccacctctcctatagagactctaaccgcagaagccaccggcatagcaaggaatacatcgtggatgacgaggatgtggagagtagggacgagtacgaaagacagagacgcgaggaggagtatcagtcacggtatcggtctgatcctaatctcgctcggtaccccgtcaagccccagccatacgaagagcagatgcgaattcatgctgaggtcagtcgcgccagacacgaacggcggcactcagacgtgagcttagccaatgctgacttggaggattctcggatctccatgttgagaatggatcgtccgtccagacaaaggagtattagcgagcgccgggctgccatggagaaccagcgcagttattcgatggagcggacccgcgaggcgcagggtccatcatcttacgctcaacggaccacaaatcacagtccaccaacacccaggcggagtccgttgcctattgatcgtccggacttaagacggacagacagcctgcgcaagcagcatcacctcgatcccagctcggctgtgaggaaaacaaagcgcgagaagatggaaaccatgcttagaaatgacagccttagtagcgaccagagtgaatcggtgaggcctccgccaccgaagcctcataagagcaagaagggcggcaagatgaggcagattagcctctcctctagcgaggaggaactggccagcacccccgagtacaccagttgcgatgacgtggagatagagagcgagagtgtgtccgagaaaggcgatatggattacaattggctggaccacacctcttggcactcctctgaggcatctcccatgtcccttcacccagttacttggcagccatccaaggacggcgaccggttgattggacgaattctgctaaataaaagactcaaagacggcagcgtgcctagagattctggcgccatgcttggactcaaggtggtgggaggcaaaatgacagagtccggccgactgtgcgccttcataactaaagtgaagaagggaagcctggccgacaccgtagggcaccttagaccaggggatgaggtcctggaatggaatggcagactgctacagggggccacattcgaagaagtatataacattatactggagtcgaaacccgagccacaggtggagctcgtggtctctcgcccaattggagacattccccggatccccgacagcacacacgcccagcttgaatcaagctctagtagctttgagtctcaaaaaatggataggccgagcataagcgtgacaagcccaatgtccccaggcatgctccgggatgtccctcagtttttgtctggacagttaagctcacagtcgctgtcccggcgaacgactccattcgtgccaagggtgcagatcaaactttggttcgacaaggtggggcaccagttgatcgtgactattcttggggccaaagacctgccttcacgggaagacggacggccccgaaatccatacgtcaagatttacttcctgccagaccgaagcgacaagaacaaaaggcgaaccaagacagtgaagaagacattggaacccaagtggaaccaaacgtttatctacagcccagttcatagacgcgagtttcgagagaggatgctggagattacgctctgggatcaggcgcgagttagggaagaggagagcgaatttctcggtgaaattctgatagagttggaaaccgccctgctggacgacgaacctcactggtacaagctgcaaacccacgacgtctcctctctgcccttgccccaccctagtccctacatgccacgccgtcagctgcacggtgaaagccccacaaggagactgcagcggagtaaacggattagcgattccgaggtgagcgactacgactgtgacgacgggatcggagtagtcagcgactaccgacatgacggcagggatctacagtcaagcactctgtctgtacctgaacaggtaatgtcgagcaaccattgtagcccaagcggatccccacatagagtagacgttattggccggactagaagttggtctccatcggttccacccccacaatcacggaacgttgagcaggggttgaggggaactcggactatgactggccactataatacgatttcacgcatggaccgccatcgggtgatggacgatcactattcccccgaccgggaccgagactgcgaggcagccgacaggcagccataccaccggtcacgcagtaccgagcaacggccactgctggagcggaccacgacgaggtcccgatccaccgaacgccccgataccaacctgatgaggtccatgcctagcctgatgactggacgttccgcgccccccagccctgcgctgtcccggagtcatccgcgcacaggctcagtgcagacgtcacccagctcgacccccgtggccggcaggagagggaggcagttgcctcagctgcccccaaaagggacactagacagaaaggccggtggtaaaaagctcaggtctacagtgcaacgttctacggaaactgggctcgctgtggaaatgcggaactggatgaccaggcaggcatccagagagtctactgatggctccatgaattcctattcatctgaaggaaacctaattttccctggcgtgcgcttggcctcagacagtcagttctctgattttctagacggcctcgggcccgcccaactggtgggccgtcagactttagcaactcctgccatgggagacatccaggttgggatgatggataaaaagggccagctcgaggtggaaatcattagggcaaggggactcgtcgtcaagcccggttccaagacactgcccgctccatacgtcaaggtctatctgctggacaacggggtctgcatcgccaagaaaaaaacaaaggtggcccggaagactctggagccattgtatcaacaacttctaagtttcgaggaaagccctcaaggcaaagtgctgcagattatagtatggggagactatgggagaatggatcataaaagttttatgggcgtggcccagatacttctggatgaattagagttgagtaatatggtaatcggttggtttaagctcttccctcctagctcacttgttgatcctactcttgccccccttactcgtcgcgcgtcccagtcatccctcgagtcctctactgggcctagctacagcagatcctag

SEQ ID NO: 40313 - DNA, 4050 bp, Artificial Sequence
  derived and/or modified sequence
atgtctgcccctgtgggcccccggggccgcctggcccccatcccagctgccagccagccccccctgcagcctgagatgccagacctgagccacctgacagaggaggagaggaagatcatcctggccgtgatggaccggcagaagaaggaggaggagaaggagcagagcgtgctgaagaagctgcaccagcagtttgagatgtacaaggagcaggtgaagaagatgggagaggagagccagcagcagcaggagcagaagggagatgcccccacctgtggcatctgccacaagaccaagtttgctgatggctgcggccacaactgcagctactgccagaccaagttctgtgcccgctgtggcggccgggtgtccctgcggagcaacaaggtgatgtgggtgtgcaacctgtgcaggaagcagcaggagatcctgaccaagagcggggcctggttctacaacagcggcagcaacaccccccagcagcctgaccagaaggtgctgcggggcctgagaaatgaggaggccccccaggagaagaagcccaagctgcacgagcagacccagttccagggccccagcggggacctgtctgtgcctgctgtggagaagagccgcagccacggcctgacccggcagcacagcatcaagaatggaagtggagtgaagcaccacatcgccagtgacatcgccagtgacaggaagaggagccccagcgtgtcccgggaccagaacagaagatatgaccagcgggaggagcgggaggagtacagccagtatgccaccagtgacacagccatgcccaggagccccagcgactatgctgaccggcgcagccagcacgagccccagttctatgaggacagcgaccacctgagctacagagacagcaacagaagaagccaccgccacagcaaggagtacatcgtggatgatgaagatgtggagagcagagatgaatatgaaaggcagaggcgggaggaggagtaccagagccgctacagaagtgaccccaacctggcccgctaccctgtgaagccccagccctatgaggagcagatgagaattcatgctgaggtgtcccgggcccggcatgagcggcggcacagtgatgtgtccctggccaatgctgacctggaggacagccgcatctccatgctgaggatggaccggcccagccggcagaggagcatcagcgagcggcgggccgccatggagaaccagaggagctacagcatggagaggacccgggaggcccagggccccagcagctatgcccagaggaccaccaaccacagcccccccaccccaagaagaagccccctgcccatcgacagaccagacctgcggaggacagacagcctgaggaagcagcaccacctggaccccagcagcgctgtgaggaagaccaagcgggagaagatggagaccatgctgagaaatgacagcctgagcagtgaccagagcgagagcgtgcggcccccaccacccaagccccacaagagcaagaagggcggcaagatgaggcagatcagcctgagcagcagcgaggaggagctggccagcaccccagagtacaccagctgtgatgatgtggagattgaaagtgaatctgtgtctgagaagggggacatggactacaactggctggaccacacctcctggcacagcagcgaggccagccccatgagcctgcaccctgtgacctggcagcccagcaaggatggagaccggctgattggccgcatcctgctgaacaagaggctgaaggatggctctgtgccccgggacagcggggccatgctgggcctgaaggtggtgggcggcaagatgacagaaagtggccgcctgtgtgccttcatcaccaaggtgaagaagggcagcctggccgacacagtgggccacctgcggcctggagatgaggtgctggagtggaatggccgcctgctgcagggcgccacctttgaggaggtgtacaacatcatcctggagagcaagccagagccccaggtggagctggtggtgtcccggcccatcggggacatcccccgcatcccagacagcacccacgcccagctggagagcagcagcagcagctttgagagccagaagatggaccggcccagcatctctgtgaccagccccatgagccctggcatgctgagagatgtgccccagttcctgagcggccagctgagcagccagagcctgagcaggaggaccaccccatttgtgccccgggtgcagatcaagctgtggtttgacaaggtgggccaccagctgattgtgaccatcctgggcgccaaggacctgcccagccgggaggatggccggcccaggaacccctacgtgaagatctacttcctgcctgacagaagtgacaagaacaagaggaggaccaagacagtgaagaagaccctggagcccaagtggaaccagaccttcatctacagccctgtgcacagaagagagttccgggagaggatgctggagatcaccctgtgggaccaggcccgggtgcgggaggaggagagcgagttcctgggggagatcctgattgagctggagacagccctgctggatgatgagccccactggtacaagctgcagacccatgatgtgagcagcctgcccctgccccaccccagcccctacatgccccggcggcagctgcatggagagagccccacccggcggctgcagaggagcaagaggatcagtgacagcgaggtgtctgactatgactgtgatgatggcattggagtggtgtctgactacagacatgatggccgggacctgcagagcagcaccctgtctgtgcctgagcaggtgatgagcagcaaccactgcagccccagcggcagcccccaccgggtggatgtgattggaagaaccaggtcctggagccccagcgtgcccccaccccagagcagaaatgtggagcagggcctgcggggcaccaggaccatgacaggccactacaacaccatcagcaggatggacagacaccgggtgatggatgaccactacagcccagaccgggaccgggactgtgaggccgctgaccggcagccctaccacaggagccgcagcacagagcagaggcccctgctggagaggaccaccaccaggagccgcagcacagagaggccagacaccaacctgatgaggtccatgcccagcctgatgacaggccgcagcgccccacccagccctgccctgagccgcagccaccccaggacaggctctgtgcagaccagccccagcagcacccctgtggccggcagaagaggccggcagctgccccagctgccccccaagggcaccctggacaggaaggccggcggcaagaagctgcggagcacagtgcagaggagcacagagaccggcctggccgtggagatgaggaactggatgacccggcaggccagccgggagagcacagatggctccatgaacagctacagcagcgagggcaacctgatcttccctggggtgcggctggccagtgacagccagttcagtgacttcctggatggcctgggccctgcccagctggtgggccggcagaccctggccaccccagccatgggagacatccaggtgggcatgatggacaagaagggccagctggaggtggagatcatccgggcccggggcctggtggtgaagccaggcagcaagaccctgcctgccccctacgtgaaggtgtacctgctggacaatggagtgtgcatcgccaagaagaagaccaaggtggccaggaagaccctggagcccctgtaccagcagctgctgagctttgaggagagcccccagggcaaggtgctgcagatcatcgtgtggggagactatggccgcatggaccacaagagcttcatgggcgtggcccagatcctgctggatgagctggagctgagcaacatggtgattggctggttcaagctgtttcctcccagcagcctggtggaccccaccctggcccccctgacccggcgggccagccagagcagcctggagagcagcacaggccccagctacagccgctcctag

SEQ ID NO: 40314 - DNA, 4050 bp, Artificial Sequence
  derived and/or modified sequence
atgagcgcccccgtgggcccccggggccggctggcccccatccccgcagcctctcaacccccactccagcctgagatgcctgatctttcccacttgacagaggaggagcgtaaaatcattcttgccgtgatggaccggcagaaaaaagaggaagaaaaagagcagtcagtgctgaaaaagctgcaccaacagttcgaaatgtacaaggaacaggtgaaaaagatgggcgaggagagccaacaacaacaagagcagaaaggagacgccccaacatgcggtatctgccacaaaaccaagttcgcagatgggtgtggccataactgttcttactgccagaccaagttctgcgcaagatgcggagggcgcgtgtccctcaggagcaacaaagtcatgtgggtgtgcaacctatgtcggaaacagcaggagattctgaccaaatcaggtgcatggttctacaactccgggagtaatactccccagcagcccgatcagaaggttctgcgaggactgagaaatgaggaggccccccaggagaagaaaccgaagctccatgaacagacccagtttcaggggccgagcggcgatctcagcgttcctgcagtggaaaagtcccgctcccacgggctaaccagacagcacagtataaagaacggctccggcgtgaagcaccatattgcctctgacatagcaagcgatagaaagagatctccgtccgttagtagggaccagaatcgccgctacgaccagcgagaagaacgggaagagtactctcagtacgccactagcgacaccgcaatgccccgctcccctagtgactacgctgatagacgaagccagcatgaaccccaattttacgaggacagtgatcacctcagttaccgggactctaatcgtagaagtcatagacactcaaaggagtatatcgtcgatgatgaggatgtggagtcaagagacgaatacgagagacagcgccgcgaagaggaatatcagtctaggtaccgcagcgatcccaacctagcacgatatccggtaaaacctcagccttacgaggaacagatgagaatccatgcagaggtgtctcgggctaggcacgagcggcgtcattcggacgtctccctggctaatgcggatcttgaggatagcagaattagtatgctgagaatggaccggccgtccagacagcggtctatcagcgaaagacgggctgctatggaaaatcagcggtcctatagcatggagaggacacgggaagcccagggaccctctagctatgcccaaaggaccaccaatcactcaccaccgactcccagaagatcccctctacccatagaccggcctgatctgaggagaaccgactcccttcggaagcagcaccatctggatccgagcagcgcagtgaggaagacaaaaagagaaaagatggagactatgctgcgaaatgactctttgagctcagatcaaagcgagagtgtgcggcccccgccccctaaaccccacaaatctaagaaaggaggaaagatgagacaaatctctctctccagtagcgaggaggaactggcgagtacaccggaatatacgtcttgcgacgatgtggaaatagagtccgaatccgtgtccgagaaaggcgatatggactacaactggttggatcacacaagctggcactctagcgaagcttcgcccatgagtctacatcccgtcacttggcagccctcaaaggacggggaccggctcattgggcgaattttgctcaataaacgtctgaaagacgggagcgtaccacgggacagcggagcgatgttgggcttgaaggttgtgggagggaagatgactgaatccggcagactatgcgcatttatcacaaaggtgaagaaggggagccttgctgatacagtaggccaccttaggcccggagatgaagtacttgaatggaacgggagattgctgcagggtgccacgttcgaagaggtgtacaatattattcttgagtcgaagcctgaaccccaggtagaattggtcgtatcccggccaataggggatatccctcggataccggattccacacatgcgcaactggagtcctcgtcatcctctttcgagagccagaagatggacagaccctctatatctgtgacttcacctatgtccccaggaatgctccgggacgtaccccaattcctgagcggacagctgagttcacagtcgctgtctagaagaaccacgcctttcgtgccacgggtgcaaatcaaactgtggttcgataaggtgggacatcagcttattgttacaattttgggtgcaaaggaccttccttcacgggaggacggacgaccccgcaacccctatgtcaagatatacttcctccctgatcgctcagataagaataagaggcgcacgaaaactgtgaagaaaacgctggagcccaagtggaaccaaacattcatatatagtcccgttcatcgtcgagagtttcgggaaagaatgctcgagattacgttgtgggatcaggcacgtgtgcgtgaggaggagagtgaattcctgggagaaatactgattgagcttgaaactgcactgctggacgacgagccacactggtacaagcttcaaacccatgacgtgagttctcttcctttgccccatcccagtccgtacatgccgaggagacagctgcacggggagagccccacccgaaggttgcagagatccaaacggatatctgattcggaggtttctgactacgattgcgacgatggtatcggtgtggtgtcagattaccggcacgacggacgtgacctgcagtccagtaccctgtcagtgcctgagcaggttatgtctagcaatcactgcagcccatcggggagcccccatcgggtagatgtgatcggccgtaccaggtcttggtcaccaagtgttcctcctccacagtctcgaaacgtggagcagggtctgaggggcacaaggacgatgacaggtcactacaataccatttctcggatggatcgacacagagtgatggacgatcactacagtcccgacagggaccgggattgtgaggccgctgaccgtcagccctaccaccggagtagaagtacagagcagaggccgctgctggagcggacaacgacccgaagtagatcaacagagcgacccgacaccaatctcatgcgctccatgccatccctgatgacagggcgatccgctcctccttcccctgccctctccagaagccacccccgtaccggcagtgtccaaacctctccatcttccacccctgtggcgggccgaagaggcagacagctcccccagctgccccccaaaggaaccctagatcggaaggcaggcgggaaaaagctgcgctctacagtgcagcgtagtactgagacaggcctcgctgtggagatgcgtaattggatgactcgccaggcctcccgggaatcaacagatggcagtatgaactcctattcttctgagggtaacctcatctttcctggcgtgcgtctcgctagtgacagccaattttccgactttcttgacggactgggacccgcccagctcgtagggcgccagacactggcaacgcctgctatgggagatatacaggtgggaatgatggataagaaggggcaattagaagtcgagatcatacgcgctcgcggattagtagttaagccaggctccaagactctacctgctccatatgtgaaagtgtatctcctcgataatggcgtgtgtatagctaaaaagaaaacgaaggtcgcaaggaaaaccctcgagcccttgtatcagcagcttcttagtttcgaggagagtccgcaggggaaggtgctgcagatcattgtgtggggcgattatggccgcatggatcataaatcattcatgggtgtcgcacaaatccttctggacgagctagaactctcaaacatggtcatcggatggtttaagctgtttcccccatcttcattagtcgaccccaccctggcaccactgacaagacgcgcctcacaaagcagccttgagtctagcaccggcccttcatatagccggagttag

SEQ ID NO: 40315 - DNA, 4050 bp, Artificial Sequence
  derived and/or modified sequence
atgtctgcaccggttggacccaggggacgcctggcacctattcctgcagcttctcagcctccactccaaccagaaatgcctgacctcagccatcttactgaggaggaacggaaaattattctggctgttatggaccgtcaaaagaaggaagaggaaaaggagcagagcgtcctcaagaagctacatcaacagtttgaaatgtataaggaacaggttaagaaaatgggcgaggagtcccagcagcagcaggaacagaagggtgacgcaccgacatgtggaatatgtcataaaaccaagtttgccgacggttgcggacacaattgcagctactgccagaccaaattctgcgcccgatgcggaggacgagtttctctgcgcagcaataaggttatgtgggtctgtaacctgtgcaggaaacaacaagagatcttgacgaagtcaggtgcgtggttctataattccggttctaacaccccacagcaacccgatcagaaggtgttaagggggctgagaaacgaagaggccccacaagagaagaagccaaagcttcatgagcagactcagttccaggggcctagcggagacctctccgtgcctgccgtcgagaaatccagaagccacggactgacacgccagcactccatcaaaaatggttcaggcgtaaagcatcatattgcctctgacatagcatctgaccgaaagaggtccccatcggttagtcgcgatcagaatagaagatatgaccagagggaagaacgggaagagtatagtcagtacgctacatccgacactgcaatgcctcgtagtccttcagattacgcagataggagatctcagcatgagccacaattttacgaagactctgaccatttatcataccgggatagcaatcgcaggtcccacaggcattccaaggagtacattgtcgatgatgaggatgtggagagtcgggacgagtacgagcgacagcgcagagaagaggagtaccagagcaggtacagaagcgatcccaatctggctcgctacccagttaagccacagccgtacgaagagcaaatgcgcatccacgcagaggtgagcagagcccgtcacgaacgaagacattctgacgtgtctctggcaaatgcagatttagaggatagtcgtatctcaatgctgaggatggaccgacccagtcgccaacgttctatttccgagcgccgtgctgcaatggagaatcaacggtcctactccatggaacggacacgggaggcacaaggacctagctcatacgcccagaggaccaccaatcattcgcctccgacacctcggcgaagccccctccctattgataggccagatctgcggaggaccgactcattacgaaaacagcatcatcttgatccctcaagcgccgtcaggaagacaaagcgggaaaagatggagactatgctacgcaacgactctctgagcagcgaccagagcgagtctgtgcggccacccccaccaaaacctcataagagcaaaaagggcggaaaaatgcgccaaatctctctgtcttcatcagaggaggaactggcatctactcctgaatacacaagctgtgacgatgttgaaatcgaaagcgaaagcgtcagcgagaagggcgacatggactacaactggctggatcacacatcctggcacagttctgaggcttctccgatgagtctccatccggtgacctggcagcctagcaaggatggggatcggcttattggaaggatactgcttaataagcgcctgaaggacggatcggtccccagagatagcggggcaatgctcggtctcaaagttgtgggtgggaaaatgaccgagtcgggacgtttgtgcgccttcattacaaaggtgaaaaaaggtagcctggctgatactgtgggccatctgagacctggagatgaggtgcttgaatggaacggcagactgctccagggggcaacctttgaagaggtgtacaatatcatcctcgagtctaaacccgaacctcaagtcgaactcgtcgtgtcccgacctataggtgacattcctaggattcccgattcgacgcatgcacagcttgagtctagctcgtcctcattcgagtcacaaaaaatggatcgtccatctatctcagttacatctccaatgagccctggcatgctccgagacgttcctcaattcctgtccgggcagctttctagtcaatccttgtctagacggactaccccattcgtgccacgagttcaaatcaagctctggtttgataaggtgggacaccagttgatagtgacaattctgggcgctaaggacctacccagtagagaagacggcagaccacggaatccctacgttaagatttacttcctacccgacaggtcagataagaacaagagaaggaccaagactgttaagaagaccctggaacccaaatggaatcagacgtttatatacagccctgtacacaggagggaatttagggagcggatgctggaaattactctgtgggatcaggctcgcgttcgggaggaagagtccgaatttctgggcgagatccttattgaattggaaaccgcactgctcgatgatgaaccccactggtacaagctgcaaactcacgatgtatcaagcctgccactcccccatccgtctccatacatgcctcgcaggcagttacacggcgagtcccccaccaggcggctgcagcgaagcaaaaggatctcagacagtgaagtcagtgattatgattgcgacgatgggattggggtcgtttctgattaccggcatgacggacgcgatttacagtcttccaccctctccgtgccagaacaagtgatgtcttcaaatcactgctcaccgtcaggttcaccccatcgcgtggacgttattgggagaactaggtcatggtccccaagcgtgcctccaccgcagtcgcgaaacgtcgagcaggggttgcgaggcaccagaacaatgacaggccactacaacactatcagccgcatggacagacacagggtcatggatgaccattactcccccgatcgggacagagattgtgaagcagcagacagacaaccttaccacaggtcaaggagcactgaacagaggcctctgctcgagagaaccacaaccaggtcaaggtcaactgaacgacctgacacaaatctgatgaggagtatgccttctctgatgaccgggagaagtgcacccccttcccccgctctgagccgctctcacccacgaaccggttccgtccagaccagtccttcaagcacccctgtggctggaagacgcggacggcagctcccccaacttccccctaagggcaccctggaccgcaaggccggaggcaaaaagttgagatccacagtgcagcggtccacggagaccggactagctgtagagatgcgtaactggatgacaaggcaggcttctagagaatctactgacggctctatgaacagctattcctccgaggggaacttaatttttcctggtgtccgtctggcttcagatagccaattctctgatttccttgacggcctcggtccagcgcagctcgtgggtaggcagaccctagccacaccggctatgggggacattcaagtcggaatgatggacaaaaagggccagctggaagtagagattatccgcgcacgtggactcgtggttaaacccggatctaagaccctcccagccccatacgtcaaagtctacctgctcgacaatggagtctgcatagcaaaaaaaaaaaccaaagttgccagaaagaccctggagcccctgtaccaacagctcctctctttcgaagaatctcctcagggtaaagtgctgcagattatcgtgtggggcgattacggcaggatggatcataagtcatttatgggagtcgctcagattctacttgacgagctggagctatccaacatggtgataggatggttcaagttattccctccgagcagtctggtcgaccctacactcgcgcctctcaccaggagagcttcccaaagttctttagagagctctacggggccttcctattcacgcagttag

SEQ ID NO: 40316 - DNA, 4050 bp, Artificial Sequence
  derived and/or modified sequence
atgtcggctcctgtcgggccccggggccgcctggctcccatcccggcggcctctcagccgcctctgcagcccgagatgcctgacctcagccacctcacggaggaggagaggaaaatcatcctggccgtcatggataggcagaagaaagaagaggagaaggagcagtccgtgctcaaaaaactgcatcagcagtttgaaatgtataaagagcaggtaaagaagatgggagaagaatcacagcaacagcaagaacagaagggtgatgcgccaacctgtggtatctgccacaaaacaaagtttgctgatggatgtggccataactgttcatattgccaaacaaagttctgtgctcgttgtggaggtcgagtgtcattacgctcaaacaaggttatgtgggtatgtaatttgtgccgaaaacaacaagaaatcctcactaaatcaggagcatggttttataatagtggatctaatacaccacagcaacctgatcaaaaggttcttcgagggctaagaaatgaggaggcacctcaggagaagaaaccaaaactacatgagcagacccagttccaaggaccctcaggtgacttatctgtacctgcagtggagaaaagtcgatctcatgggctcacaagacagcattctattaaaaatgggtcaggcgtgaagcatcacattgccagtgacatagcttcagacaggaaaagaagcccatctgtgtccagagatcagaatagaagatacgaccaaagggaagaaagagaggaatattcacagtatgctacttcggataccgcaatgcctagatctccatcagattatgctgataggcgatctcaacatgaacctcagttttatgaagactctgatcatttaagttatagggactccaacaggagaagtcataggcattccaaagaatatattgtagatgatgaggatgtggaaagcagagatgaatacgaaaggcaaaggagagaggaagagtaccagtcacgctaccgaagtgatccgaatttggcccgttatccagtaaagccacaaccctatgaagaacaaatgcggatccatgctgaagtgtcccgagcacggcatgagagaaggcatagtgatgtttctttggcaaatgctgatctggaagattccaggatttctatgctaaggatggatcgaccatcaaggcaaagatctatatcagaacgtagagctgccatggaaaatcagcgatcttattcaatggaaagaactcgagaggctcagggaccaagttcttatgcacaaaggaccacaaaccatagtcctcctacccccaggaggagtccactacccatagatagaccagacttgaggcgtactgactcactacggaaacagcaccacttagatcctagctctgctgtaagaaaaacaaaacgggaaaaaatggaaacaatgttaaggaatgattctctcagttcagaccagtcagagtcagtgagacctccaccaccaaagcctcataaatcaaagaaaggcggtaaaatgcgccagatttcgttgagcagttcagaggaggaattggcttccacgcctgaatatacaagttgtgatgatgttgagattgaaagtgagagtgtaagtgaaaaaggagacatggattacaactggttggatcatacgtcttggcatagcagtgaggcatccccaatgtctttgcaccctgtaacctggcaaccatctaaagatggagatcgtttaattggtcgcattttattaaataagcgtctaaaagatggaagtgtacctcgagattcaggagcaatgcttggcttgaaggttgtaggaggaaagatgactgaatcaggtcggctttgtgcatttattactaaagtaaaaaaaggaagtttagctgatactgtaggacatcttagaccaggtgatgaagtattagaatggaatggaagactactgcaaggagccacatttgaggaagtgtacaacatcattctagaatccaaacctgaaccacaagtagaacttgtagtttcaaggcctattggagatataccgcgaatacctgatagcacacatgcacaactggagtccagttctagctcctttgaatctcaaaaaatggatcgtccttctatttctgttacctctcccatgagtcctggaatgttgagggatgtcccacagttcttatcaggacaactttcaagccaaagccttagtagaagaacaacgccttttgttcctagggttcagataaaactatggtttgacaaggttggtcaccaattaatagttacaattttgggagcaaaagatctcccttccagggaagatgggaggccaaggaatccttatgttaaaatttactttcttccagacagaagtgataaaaacaagagaagaactaaaacagtaaagaaaacattggaacccaaatggaaccaaacattcatttattctccagtccaccgaagagaatttcgggaacgaatgctagagattaccctttgggatcaagctcgtgttcgagaggaagaaagtgaattcttaggcgagattttaattgaattagaaacagcattattagatgatgagccacattggtacaaacttcagacgcatgatgtctcttcattgccacttccccacccttctccatatatgccacgaagacagctccatggagagagcccaacacggaggttgcaaaggtcaaagagaataagtgatagtgaagtctctgactatgactgtgatgatggaattggtgtagtatcagattatcgacatgatggtcgagatcttcaaagctcaacattatcagtgccagaacaagtaatgtcatcaaaccactgttcaccatcagggtctcctcatcgagtagatgttataggaaggactagatcatggtcacccagtgtccctcctccacaaagtcggaatgtggaacaggggcttcgagggacccgcactatgaccggacattataatacaattagccgaatggacagacatcgtgtcatggatgaccattattctccagatagagacagggattgtgaagcagcagatagacagccatatcacagatccagatcaacagaacaacggcctctccttgagcggaccaccacccgctccagatccactgaacgtcctgatacaaacctcatgaggtcgatgccttcattaatgactggaagatctgcccctccttcacctgccttatcgaggtctcatcctcgtactgggtctgtccagacaagcccatcaagtactccagtcgcaggacgaaggggccgacagcttccacagcttccaccaaagggaacgttggatagaaaagcaggaggtaaaaaactaaggagcactgtccaaagaagtacagaaacaggcctggccgtggaaatgaggaactggatgactcgacaggcaagccgagagtctacagatggtagcatgaacagctacagctcagaaggaaatctgattttccctggtgttcgcttggcctctgatagccagttcagtgatttcctggatggccttggccctgctcagctagtgggacgccagactctggcaacacctgcaatgggtgacattcaggtaggaatgatggacaaaaagggacagctggaggtagaaatcatccgggcccgtggccttgttgtaaaaccaggttccaagacactgccagcaccgtatgtaaaagtgtatctattagataacggagtctgcatagccaaaaagaaaacaaaagtggcaagaaaaacgctggaacccctttaccagcagctattatctttcgaagagagtccacaaggaaaagttttacagatcatcgtctggggagattatggccgcatggatcacaaatcttttatgggagtggcccagatacttttagatgaactagagctatccaatatggtgatcggatggttcaaacttttcccaccttcctccctagtagatccaaccttggcccctctgacaagaagagcttcccaatcatctctggaaagttcaactggaccttcttactctcgttcatag

SEQ ID NO: 40317 - DNA, 4050 bp, Artificial Sequence
  derived and/or modified sequence
atgagcgcccccgtgggccccagaggcagactggcccccatccccgccgccagccagccccccctgcagcccgagatgcccgacctgagccacctgaccgaggaggagagaaagatcatcctggccgtgatggacagacagaagaaggaggaggagaaggagcagagcgtgctgaagaagctgcaccagcagttcgagatgtacaaggagcaggtgaagaagatgggcgaggagagccagcagcagcaggagcagaagggcgacgcccccacctgcggcatctgccacaagaccaagttcgccgacggctgcggccacaactgcagctactgccagaccaagttctgcgccagatgcggcggcagagtgagcctgagaagcaacaaggtgatgtgggtgtgcaacctgtgcagaaagcagcaggagatcctgaccaagagcggcgcctggttctacaacagcggcagcaacaccccccagcagcccgaccagaaggtgctgagaggcctgagaaacgaggaggccccccaggagaagaagcccaagctgcacgagcagacccagttccagggccccagcggcgacctgagcgtgcccgccgtggagaagagcagaagccacggcctgaccagacagcacagcatcaagaacggcagcggcgtgaagcaccacatcgccagcgacatcgccagcgacagaaagagaagccccagcgtgagcagagaccagaacagaagatacgaccagagagaggagagagaggagtacagccagtacgccaccagcgacaccgccatgcccagaagccccagcgactacgccgacagaagaagccagcacgagccccagttctacgaggacagcgaccacctgagctacagagacagcaacagaagaagccacagacacagcaaggagtacatcgtggacgacgaggacgtggagagcagagacgagtacgagagacagagaagagaggaggagtaccagagcagatacagaagcgaccccaacctggccagataccccgtgaagccccagccctacgaggagcagatgagaatccacgccgaggtgagcagagccagacacgagagaagacacagcgacgtgagcctggccaacgccgacctggaggacagcagaatcagcatgctgagaatggacagacccagcagacagagaagcatcagcgagagaagagccgccatggagaaccagagaagctacagcatggagagaaccagagaggcccagggccccagcagctacgcccagagaaccaccaaccacagcccccccacccccagaagaagccccctgcccatcgacagacccgacctgagaagaaccgacagcctgagaaagcagcaccacctggaccccagcagcgccgtgagaaagaccaagagagagaagatggagaccatgctgagaaacgacagcctgagcagcgaccagagcgagagcgtgagaccccccccccccaagccccacaagagcaagaagggcggcaagatgagacagatcagcctgagcagcagcgaggaggagctggccagcacccccgagtacaccagctgcgacgacgtggagatcgagagcgagagcgtgagcgagaagggcgacatggactacaactggctggaccacaccagctggcacagcagcgaggccagccccatgagcctgcaccccgtgacctggcagcccagcaaggacggcgacagactgatcggcagaatcctgctgaacaagagactgaaggacggcagcgtgcccagagacagcggcgccatgctgggcctgaaggtggtgggcggcaagatgaccgagagcggcagactgtgcgccttcatcaccaaggtgaagaagggcagcctggccgacaccgtgggccacctgagacccggcgacgaggtgctggagtggaacggcagactgctgcagggcgccaccttcgaggaggtgtacaacatcatcctggagagcaagcccgagccccaggtggagctggtggtgagcagacccatcggcgacatccccagaatccccgacagcacccacgcccagctggagagcagcagcagcagcttcgagagccagaagatggacagacccagcatcagcgtgaccagccccatgagccccggcatgctgagagacgtgccccagttcctgagcggccagctgagcagccagagcctgagcagaagaaccacccccttcgtgcccagagtgcagatcaagctgtggttcgacaaggtgggccaccagctgatcgtgaccatcctgggcgccaaggacctgcccagcagagaggacggcagacccagaaacccctacgtgaagatctacttcctgcccgacagaagcgacaagaacaagagaagaaccaagaccgtgaagaagaccctggagcccaagtggaaccagaccttcatctacagccccgtgcacagaagagagttcagagagagaatgctggagatcaccctgtgggaccaggccagagtgagagaggaggagagcgagttcctgggcgagatcctgatcgagctggagaccgccctgctggacgacgagccccactggtacaagctgcagacccacgacgtgagcagcctgcccctgccccaccccagcccctacatgcccagaagacagctgcacggcgagagccccaccagaagactgcagagaagcaagagaatcagcgacagcgaggtgagcgactacgactgcgacgacggcatcggcgtggtgagcgactacagacacgacggcagagacctgcagagcagcaccctgagcgtgcccgagcaggtgatgagcagcaaccactgcagccccagcggcagcccccacagagtggacgtgatcggcagaaccagaagctggagccccagcgtgccccccccccagagcagaaacgtggagcagggcctgagaggcaccagaaccatgaccggccactacaacaccatcagcagaatggacagacacagagtgatggacgaccactacagccccgacagagacagagactgcgaggccgccgacagacagccctaccacagaagcagaagcaccgagcagagacccctgctggagagaaccaccaccagaagcagaagcaccgagagacccgacaccaacctgatgagaagcatgcccagcctgatgaccggcagaagcgccccccccagccccgccctgagcagaagccaccccagaaccggcagcgtgcagaccagccccagcagcacccccgtggccggcagaagaggcagacagctgccccagctgccccccaagggcaccctggacagaaaggccggcggcaagaagctgagaagcaccgtgcagagaagcaccgagaccggcctggccgtggagatgagaaactggatgaccagacaggccagcagagagagcaccgacggcagcatgaacagctacagcagcgagggcaacctgatcttccccggcgtgagactggccagcgacagccagttcagcgacttcctggacggcctgggccccgcccagctggtgggcagacagaccctggccacccccgccatgggcgacatccaggtgggcatgatggacaagaagggccagctggaggtggagatcatcagagccagaggcctggtggtgaagcccggcagcaagaccctgcccgccccctacgtgaaggtgtacctgctggacaacggcgtgtgcatcgccaagaagaagaccaaggtggccagaaagaccctggagcccctgtaccagcagctgctgagcttcgaggagagcccccagggcaaggtgctgcagatcatcgtgtggggcgactacggcagaatggaccacaagagcttcatgggcgtggcccagatcctgctggacgagctggagctgagcaacatggtgatcggctggttcaagctgttcccccccagcagcctggtggaccccaccctggcccccctgaccagaagagccagccagagcagcctggagagcagcaccggccccagctacagcagaagctag

SEQ ID NO: 40318 - protein, 811 aa, Artificial Sequence
  derived and/or modified sequence
MNVALQELGAGSNMVEYKRATLRDEDAPETPVEGGASPDAMEVGKGASPFSPGPSPGMTPGTPRSSGLFWRVTCPHLRSISGLCSRTMVGFQKGTRQLLGSRTQLELVLAGASLLLAALLLGCLVALGVQYHRDPSHSTCLTEACIRVAGKILESLDRGVSPCEDFYQFSCGGWIRRNPLPDGRSRWNTFNSLWDQNQAILKHLLENTTFNSSSEAEQKTQRFYLSCLQVERIEELGAQPLRDLIEKIGGWNITGPWDQDNFMEVLKAVAGTYRATPFFTVYISADSKSSNSNVIQVDQSGLFLPSRDYYLNRTANEKVLTAYLDYMEELGMLLGGRPTSTREQMQQVLELEIQLANITVPQDQRRDEEKIYHKMSISELQALAPSMDWLEFLSFLLSPLELSDSEPVVVYGMDYLQQVSELINRTEPSILNNYLIWNLVQKTTSSLDRRFESAQEKLLETLYGTKKSCVPRWQTCISNTDDALGFALGSLFVKATFDRQSKEIAEGMISEIRTAFEEALGQLVWMDEKTRQAAKEKADAIYDMIGFPDFILEPKELDDVYDGYEISEDSFFQNMLNLYNFSAKVMADQLRKPPSRDQWSMTPQTVNAYYLPTKNEIVFPAGILQAPFYARNHPKALNFGGIGVVMGHELTHAFDDQGREYDKEGNLRPWWQNESLAAFRNHTACMEEQYNQYQVNGERLNGRQTLGENIADNGGLKAAYNAYKAWLRKHGEEQQLPAVGLTNHQLFFVGFAQVWCSVRTPESSHEGLVTDPHSPARFRVLGTLSNSRDFLRHFGCPVGSPMNPGQLCEVW

SEQ ID NO: 40319 - DNA, 2436 bp, Artificial Sequence
  derived and/or modified sequence
atgaacgtggccctgcaggagctgggcgccggcagcaacatggtggagtacaagagagccaccctgagagacgaggacgcccccgagacccccgtggagggcggcgccagccccgacgccatggaggtgggcaagggcgccagccccttcagccccggccccagccccggcatgacccccggcacccccagaagcagcggcctgttctggagagtgacctgcccccacctgagaagcatcagcggcctgtgcagcagaaccatggtgggcttccagaagggcaccagacagctgctgggcagcagaacccagctggagctggtgctggccggcgccagcctgctgctggccgccctgctgctgggctgcctggtggccctgggcgtgcagtaccacagagaccccagccacagcacctgcctgaccgaggcctgcatcagagtggccggcaagatcctggagagcctggacagaggcgtgagcccctgcgaggacttctaccagttcagctgcggcggctggatcagaagaaaccccctgcccgacggcagaagcagatggaacaccttcaacagcctgtgggaccagaaccaggccatcctgaagcacctgctggagaacaccaccttcaacagcagcagcgaggccgagcagaagacccagagattctacctgagctgcctgcaggtggagagaatcgaggagctgggcgcccagcccctgagagacctgatcgagaagatcggcggctggaacatcaccggcccctgggaccaggacaacttcatggaggtgctgaaggccgtggccggcacctacagagccacccccttcttcaccgtgtacatcagcgccgacagcaagagcagcaacagcaacgtgatccaggtggaccagagcggcctgttcctgcccagcagagactactacctgaacagaaccgccaacgagaaggtgctgaccgcctacctggactacatggaggagctgggcatgctgctgggcggcagacccaccagcaccagagagcagatgcagcaggtgctggagctggagatccagctggccaacatcaccgtgccccaggaccagagaagagacgaggagaagatctaccacaagatgagcatcagcgagctgcaggccctggcccccagcatggactggctggagttcctgagcttcctgctgagccccctggagctgagcgacagcgagcccgtggtggtgtacggcatggactacctgcagcaggtgagcgagctgatcaacagaaccgagcccagcatcctgaacaactacctgatctggaacctggtgcagaagaccaccagcagcctggacagaagattcgagagcgcccaggagaagctgctggagaccctgtacggcaccaagaagagctgcgtgcccagatggcagacctgcatcagcaacaccgacgacgccctgggcttcgccctgggcagcctgttcgtgaaggccaccttcgacagacagagcaaggagatcgccgagggcatgatcagcgagatcagaaccgccttcgaggaggccctgggccagctggtgtggatggacgagaagaccagacaggccgccaaggagaaggccgacgccatctacgacatgatcggcttccccgacttcatcctggagcccaaggagctggacgacgtgtacgacggctacgagatcagcgaggacagcttcttccagaacatgctgaacctgtacaacttcagcgccaaggtgatggccgaccagctgagaaagccccccagcagagaccagtggagcatgaccccccagaccgtgaacgcctactacctgcccaccaagaacgagatcgtgttccccgccggcatcctgcaggcccccttctacgccagaaaccaccccaaggccctgaacttcggcggcatcggcgtggtgatgggccacgagctgacccacgccttcgacgaccagggcagagagtacgacaaggagggcaacctgagaccctggtggcagaacgagagcctggccgccttcagaaaccacaccgcctgcatggaggagcagtacaaccagtaccaggtgaacggcgagagactgaacggcagacagaccctgggcgagaacatcgccgacaacggcggcctgaaggccgcctacaacgcctacaaggcctggctgagaaagcacggcgaggagcagcagctgcccgccgtgggcctgaccaaccaccagctgttcttcgtgggcttcgcccaggtgtggtgcagcgtgagaacccccgagagcagccacgagggcctggtgaccgacccccacagccccgccagattcagagtgctgggcaccctgagcaacagcagagacttcctgagacacttcggctgccccgtgggcagccccatgaaccccggccagctgtgcgaggtgtggtag

SEQ ID NO: 40320 - DNA, 2667 bp, Artificial Sequence
  derived and/or modified sequence
ggtgctgcgcggcggccgtgatggctggtgacggcggggccgggcaggggaccggggccgcggcccgggagcgggccagctgccgggagccctgaatcaccgcctggcccgactccaccatgaacgtcgcgctgcaggagctgggagctggcagcaacatggtggagtacaaacgggccacgcttcgggatgaagacgcacccgagacccccgtagagggcggggcctccccggacgccatggaggtgggcaagggggcttcccctttctcaccaggccccagccctggcatgacgcctggcacacccaggagctctgggctgttctggagggtcacctgcccccacctccgctccatctctggcctctgctctaggactatggtgggattccagaaggggacaagacagctgttaggctcacgcacgcagctggagctggtcttagcaggtgcctctctactgctggctgcactgcttctgggctgccttgtggccctaggggtccagtaccacagagacccatcccacagcacctgccttacagaggcctgcattcgagtggctggaaaaatcctggagtccctggaccgaggggtgagcccctgtgaggacttttaccagttctcctgtgggggctggattcggaggaaccccctgcccgatgggcgttctcgctggaacaccttcaacagcctctgggaccaaaaccaggccatactgaagcacctgcttgaaaacaccaccttcaactccagcagtgaagctgagcagaagacacagcgcttctacctatcttgcctacaggtggagcgcattgaggagctgggagcccagccactgagagacctcattgagaagattggtggttggaacattacggggccctgggaccaggacaactttatggaggtgttgaaggcagtagcagggacctacagggccaccccattcttcaccgtctacatcagtgccgactctaagagttccaacagcaatgttatccaggtggaccagtctgggctctttctgccctctcgggattactacttaaacagaactgccaatgagaaagtgctcactgcctatctggattacatggaggaactggggatgctgctgggtgggcggcccacctccacgagggagcagatgcagcaggtgctggagttggagatacagctggccaacatcacagtgccccaggaccagcggcgcgacgaggagaagatctaccacaagatgagcatttcggagctgcaggctctggcgccctccatggactggcttgagttcctgtctttcttgctgtcaccattggagttgagtgactctgagcctgtggtggtgtatgggatggattatttgcagcaggtgtcagagctcatcaaccgcacggaaccaagcatcctgaacaattacctgatctggaacctggtgcaaaagacaacctcaagcctggaccgacgctttgagtctgcacaagagaagctgctggagaccctctatggcactaagaagtcctgtgtgccgaggtggcagacctgcatctccaacacggatgacgcccttggctttgctttggggtccctcttcgtgaaggccacgtttgaccggcaaagcaaagaaattgcagaggggatgatcagcgaaatccggaccgcatttgaggaggccctgggacagctggtttggatggatgagaagacccgccaggcagccaaggagaaagcagatgccatctatgatatgattggtttcccagactttatcctggagcccaaagagctggatgatgtttatgacgggtacgaaatttctgaagattctttcttccaaaacatgttgaatttgtacaacttctctgccaaggttatggctgaccagctccgcaagcctcccagccgagaccagtggagcatgaccccccagacagtgaatgcctactaccttccaactaagaatgagatcgtcttccccgctggcatcctgcaggcccccttctatgcccgcaaccaccccaaggccctgaacttcggtggcatcggtgtggtcatgggccatgagttgacgcatgcctttgatgaccaagggcgcgagtatgacaaagaagggaacctgcggccctggtggcagaatgagtccctggcagccttccggaaccacacggcctgcatggaggaacagtacaatcaataccaggtcaatggggagaggctcaacggccgccagacgctgggggagaacattgctgacaacggggggctgaaggctgcctacaatgcttacaaagcatggctgagaaagcatggggaggagcagcaactgccagccgtggggctcaccaaccaccagctcttcttcgtgggatttgcccaggtgtggtgctcggtccgcacaccagagagctctcacgaggggctggtgaccgacccccacagccctgcccgcttccgcgtgctgggcactctctccaactcccgtgacttcctgcggcacttcggctgccctgtcggctcccccatgaacccagggcagctgtgtgaggtgtggtagacctggatcaggggagaaatggccagctgtcaccagacctggggcagctctcctgacaaagctgtttgctcttgggttgggaggaagcaaatgcaagctgggctgggtctag

SEQ ID NO: 40321 - DNA, 2436 bp, Artificial Sequence
  derived and/or modified sequence
atgaatgtggccctgcaggaactcggagccgggtcaaatatggtagaatataaacgcgcaactttaagagatgaggacgcacctgagactcctgtggaggggggagcaagtccggacgccatggaggttgggaagggagccagtcctttctctccaggcccgtctcccgggatgactcctggtacaccccgttctagcggcctgttttggcgtgtgacatgcccacatcttagaagtatctccggactgtgctctagaacaatggtcggctttcaaaaaggaacccggcaattgctcgggtctcgcacacagctggagctcgtgctggcaggcgcttctctcctgctggctgcactgttactgggctgtttagtcgcactcggtgttcagtatcatcgcgacccaagtcacagcacttgtttgacggaagcttgcattagagtagccggcaagatcttggagtcactagacagaggtgtctcaccttgcgaggatttttaccaattctcttgtggcgggtggatccgcagaaatccgctccccgatggccgaagtcgttggaacacattcaactcactgtgggaccagaaccaggccattcttaagcatctcttagagaatactacttttaattcatcctccgaggccgaacaaaagacacagagattctaccttagctgccttcaggtggagcgcattgaggaacttggagcccagccattaagagacctcatagaaaaaatcggtggctggaacattacaggcccgtgggaccaggacaatttcatggaggtccttaaagcagttgccggcacttacagggccacccctttctttacggtctacatctctgctgacagcaagtctagtaattctaatgttattcaagtcgatcaatccggcctgttcttgccgagtcgcgactactacctgaatcgcacggcaaatgaaaaggtactgaccgcttatctcgactacatggaagagctgggcatgttactgggagggcgacctacctcaaccagggaacaaatgcagcaggtgctggaactggaaatccagctggccaacattactgtgccccaggaccagaggcgggacgaggaaaaaatttatcataagatgagcatctccgagcttcaagctctagccccctcaatggattggctggaattcttgtccttcttgctgagccctctcgaactctctgacagcgagccggtggtggtgtatggcatggattatcttcagcaggtgtccgagttgattaaccggacagaaccatctatcctaaacaactaccttatctggaatctcgtgcagaaaacaacatcgtctctggatagaagattcgaatctgctcaggaaaaactgctagagacactctacggtaccaaaaagagctgcgtgccgaggtggcagacctgtattagcaacactgacgacgccttagggttcgcgttgggatctcttttcgtaaaagcgactttcgaccgacagagcaaggagatcgcagaaggaatgatctcagaaatcaggaccgctttcgaggaggccttgggccaacttgtgtggatggatgaaaaaactcggcaggctgccaaagaaaaagcagacgccatctacgacatgattggtttcccagacttcatactggaaccaaaagagcttgacgacgtgtacgacggatacgagatcagcgaggactccttcttccagaacatgctgaatctgtacaacttcagcgcaaaggtaatggccgatcaattaagaaaacccccaagtcgggaccagtggtcgatgacccctcagaccgtcaacgcctattacttgccaaccaaaaatgagatagtcttcccagccggtattttgcaggctccattctatgctcggaaccaccccaaggctttaaattttggtgggatcggagtggtgatgggccacgagctcacccacgcctttgacgaccagggtagagagtatgataaggagggaaacttacgaccctggtggcaaaacgagtcattggccgccttccgtaaccacactgcttgtatggaggagcagtataaccagtatcaggtgaatggtgaacgtttgaatggaaggcagaccctaggcgagaacatcgccgacaatggggggctaaaggctgcctataacgcttacaaagcctggctgcggaagcacggagaagagcagcagctgcctgctgtaggcctcaccaatcaccagctatttttcgtggggtttgcacaagtgtggtgctctgtccgtacccctgagagtagtcacgagggtttggtcactgacccccactcccccgctcgattcagagtccttgggacgcttagcaactcccgcgacttcctcagacatttcggctgccccgttggatcaccaatgaatcccggccagctttgtgaggtgtggtag

SEQ ID NO: 40322 - DNA, 2436 bp, Artificial Sequence
  derived and/or modified sequence
atgaatgtggccctgcaggagctgggcgccggcagcaacatggtggagtacaagagggccaccctgagagatgaagatgcccctgagacccctgtggagggcggggccagcccagatgccatggaggtgggcaaaggagccagccccttcagccctggccccagccctggcatgaccccaggcacccccaggagcagcggcctcttctggagggtgacctgcccccacctgcggagcatcagcggcctgtgcagcaggaccatggtgggcttccagaagggcacccggcagctgctgggcagcaggacccagctggagctggtgctggccggggccagcctgctgctggccgccctgctgctgggctgcctggtggccctgggcgtgcagtaccaccgggaccccagccacagcacctgcctgacagaggcctgcatccgggtggccggcaagatcctggagagcctggacagaggagtgagcccctgtgaggacttctaccagttcagctgtggcggctggatcagaagaaaccccctgcctgatggccgcagccgctggaacaccttcaacagcctgtgggaccagaaccaggccatcctgaagcacctgctggagaacaccaccttcaacagcagcagcgaggccgagcagaagacccagcgcttctacctgagctgcctgcaggtggagagaattgaggagctgggcgcccagcccctgcgggacctgattgagaagattggaggctggaacatcaccggcccctgggaccaggacaacttcatggaggtgctgaaggctgtggccggcacctaccgggccacccccttcttcaccgtgtacatctctgctgacagcaagagcagcaacagcaatgtcatccaggtggaccagagcggcctcttcctgcccagccgggactactacctgaacagaacagccaatgagaaggtgctgacagcctacctggactacatggaggagctgggcatgctgctgggcggccggcccaccagcacccgggagcagatgcagcaggtgctggagctggagatccagctggccaacatcaccgtgccccaggaccagaggagagatgaggagaagatctaccacaagatgagcatcagcgagctgcaggccctggcccccagcatggactggctggagttcctgtccttcctgctgagccccctggagctgagtgacagcgagcctgtggtggtgtatggcatggactacctgcagcaggtgtctgagctgatcaacagaacagagcccagcatcctgaacaactacctgatctggaacctggtgcagaagaccaccagcagcctggacagaagatttgaaagtgcccaggagaagctgctggagaccctgtatggcaccaagaagagctgtgtgccccgctggcagacctgcatcagcaacacagatgatgccctgggctttgccctgggcagcctgtttgtgaaggccacctttgaccggcagagcaaggagattgctgagggcatgatcagcgagatcagaacagcctttgaggaggccctgggccagctggtgtggatggatgagaagacccggcaggccgccaaggagaaggcagatgccatctatgacatgattggcttcccagacttcatcctggagcccaaggagctggatgatgtgtatgatggctatgagatcagcgaggacagcttcttccagaacatgctgaacctgtacaacttcagcgccaaggtgatggctgaccagctgaggaagccacccagccgggaccagtggagcatgaccccccagacagtgaatgcctactacctgcccaccaagaatgaaattgtgtttcctgctggcatcctgcaggcccccttctacgccaggaaccaccccaaggccctgaactttggaggcatcggcgtggtgatgggccacgagctgacccacgcctttgatgaccagggccgggagtatgacaaggagggcaacctgcggccctggtggcagaatgaaagcctggccgccttcaggaaccacacagcctgcatggaggagcagtacaaccagtaccaggtgaatggagagcggctgaatggccggcagaccctgggggagaacattgctgacaatggaggcctgaaggccgcctacaatgcctacaaggcctggctgaggaagcacggggaggagcagcagctgcctgctgtgggcctgaccaaccaccagctgttctttgtgggctttgcccaggtgtggtgcagcgtgaggaccccagagagcagccatgagggcctggtgacagacccccacagccctgcccgcttccgggtgctgggcaccctgagcaacagccgggacttcctgcggcacttcggctgccctgtgggcagccccatgaaccctggccagctgtgtgaggtgtggtag

SEQ ID NO: 40323 - DNA, 2436 bp, Artificial Sequence
  derived and/or modified sequence
atgaacgtggccctgcaggagctgggcgccggcagcaacatggtggagtacaaacgagctactcttagagacgaagacgcccccgagacacccgtggaaggcggggcgtctcctgatgcgatggaggtggggaagggcgcaagcccctttagtccgggaccctctccaggtatgactcctgggacacccaggagctccggactgttttggagagttacctgtcctcacctgagatccatttccgggttgtgttcccgcaccatggtaggcttccaaaagggcaccaggcagctgctcggctcacggacacaactcgagcttgtcctggctggcgcatcactgctgctcgccgccctcctgttgggatgtctggtcgccctgggcgtgcagtaccaccgagacccaagccactccacctgtctgaccgaagcttgcatccgagtcgctgggaaaattttagaaagtctcgatcgcggagtgtcaccatgcgaggacttctatcagttcagctgcgggggctggatcagaagaaaccccttgcccgacggcagatctagatggaatacattcaactctctgtgggaccagaaccaagccattttaaaacaccttctggagaataccacatttaactccagcagcgaggctgagcaaaaaacccagagattctacctcagctgcctccaggtggagcggatcgaggaactgggggcccagcctctcagagacctgattgagaagatagggggatggaacatcaccggaccgtgggaccaggacaatttcatggaggtactgaaagctgtggcaggaacatatcgggctactcccttcttcaccgtttacatctcagctgactcaaaatcgagcaattctaatgtaattcaggtggaccaatcagggctgtttctcccttcaagggactattacctgaataggaccgccaacgagaaggtcctcactgcttacctcgactatatggaggaactcgggatgctcctgggaggcagacccactagcacccgcgaacagatgcagcaagtcctggaacttgagatccagctggcaaatattaccgtccctcaagatcagaggagagacgaggaaaaaatttaccacaaaatgtccatcagcgagttgcaggctttagccccatctatggactggctggaatttctgagctttctactcagtcctcttgagctgtccgactctgagcctgtcgtggtgtatgggatggactatcttcagcaggtgagcgagcttatcaacaggaccgaaccgtcaatcctgaacaattaccttatttggaatttggtacagaagacaacttcttctcttgacaggagatttgaaagcgcccaggagaagctccttgagacattatatgggaccaagaagtcttgtgtgcctcgctggcaaacgtgcatcagtaacaccgacgacgcactcggcttcgcgttaggatcactgttcgttaaggcaacgtttgatcggcaatccaaagaaatcgctgaggggatgatcagcgaaatccgcacagcgttcgaggaagccctgggacaattagtctggatggacgagaagacgaggcaggccgccaaagagaaagcggacgctatatacgatatgattggctttcccgatttcattctggagcctaaggagctggatgacgtgtatgatgggtatgagatctctgaagactcgtttttccaaaatatgctcaacctgtataacttctctgccaaggtcatggctgatcagctccggaagccaccttctcgggaccaatggagcatgacaccacagacagtgaatgcttactacctgccaactaagaacgagattgtgtttccggcgggaattttacaggccccattttacgcccggaaccatcctaaagcgctcaatttcggcggcatcggggtcgtaatggggcacgaactgacacatgccttcgacgatcagggccgggagtacgacaaagagggaaacctgcggccatggtggcagaatgagtctttggctgcattccgaaatcacactgcgtgcatggaagagcagtataaccagtatcaggttaacggcgagaggcttaacggtaggcagactttgggcgaaaatatcgcagacaatggcggcttgaaagccgcctacaacgcatataaagcctggcttcgcaagcacggggaagagcagcagctgccggctgtggggctgactaatcatcagttgtttttcgtggggttcgcacaagtgtggtgttctgtcaggacacccgaaagtagccacgagggattggtcacagacccgcacagtccggctcgctttcgcgttctgggcacccttagcaactcaagggactttctgcggcactttggctgtccagttggatcccctatgaatccagggcaattgtgtgaggtgtggtag

SEQ ID NO: 40324 - DNA, 2436 bp, Artificial Sequence
  derived and/or modified sequence
atgaacgtggcactacaggagctgggagctggtagtaatatggtagaatataaacgggcaacccttagagatgaggatgccccagagacaccagtggagggtggtgccagtcctgacgccatggaggttggtaagggggcatccccattcagtcctgggccttccccaggcatgacccctggcaccccccgatccagcggcctgttctggagggtcacctgcccacacctgcgttcaattagcggtttatgtagtcgaactatggtcggctttcagaaggggacaagacaactcctcggatcccgtacccaactggagctggtcctggctggtgcctcactgcttctggctgccctgctgctgggttgcctcgttgccctaggcgttcagtaccatcgggacccaagtcatagtacttgcttgactgaagcttgtatacgtgttgctgggaagattcttgaatctcttgacaggggtgtttcgccctgtgaagacttctaccaattttcctgcggtggatggatccggcgaaaccccctcccagacgggagaagccggtggaacacttttaacagcctatgggatcagaatcaggcgatcctcaagcacctcttggaaaacaccactttcaactctagcagcgaagccgagcagaaaacccaaaggttctatctgtcatgcctccaggttgagcggatcgaggagttgggggcacagcctctgcgagatttgatagagaaaatcggcggatggaatattactgggccttgggaccaggataacttcatggaagtcttgaaggcagtcgctggtacctatagggccactcccttttttacggtctacatctctgccgactccaagtccagcaattcaaatgtgatccaggtggatcagtcgggactttttctcccatcccgcgactattatctgaacagaactgctaacgagaaagttttaactgcctatctggattacatggaggagctaggtatgctgcttgggggacggcctaccagtacacgcgaacaaatgcaacaagttttggagctcgaaatccagctggctaatatcaccgtgccccaggaccaacgcagggacgaagagaaaatctatcacaaaatgtcgatcagcgaattgcaggcgctcgctccgtccatggactggctggagttccttagctttctgttgtcccccctagagttgagtgattctgaacctgttgtcgtgtacgggatggattacctgcagcaggtttcagagctgattaaccgaacagaaccttctattctgaataactacctcatttggaacctcgtgcaaaagacaacttcaagtttagacaggaggtttgagtcagcgcaggaaaagctcctcgagaccctctacgggaccaagaagtcatgcgtgccgagatggcagacgtgcatttcaaacacagatgatgccttgggttttgcacttgggagcttattcgtaaaggccacttttgaccggcagagcaaggaaattgcggaggggatgatcagcgagattcgcacggcctttgaggaagccctcggacagttggtgtggatggacgaaaaaacgcgccaggctgccaaagaaaaagcggatgccatctacgatatgattgggtttccagatttcatcttggaacctaaagagctcgacgacgtctacgatggatatgagatctcagaggacagcttctttcagaatatgctcaacctttacaatttttcagccaaagtgatggcagaccaattgagaaagccaccatctagggaccagtggtctatgactccccaaaccgtaaatgcatactatctccctaccaaaaacgaaatcgtctttcccgcaggcatcctgcaggcgcctttctacgcaagaaaccatcctaaagctctgaacttcggtggaattggagtggtaatgggccacgaacttacacatgcctttgacgaccaagggcgagagtacgataaggaaggaaacttgcgaccttggtggcagaacgagagcttggctgccttccgcaatcacactgcttgtatggaagaacaatataaccaataccaagttaacggagagcgcctcaatggaaggcaaaccttaggcgagaatattgcggataacggcggactcaaggcggcatacaacgcttacaaggcttggttgcgtaagcatggtgaggaacagcagttacccgctgtgggcctcacaaaccatcagctattcttcgttggcttcgcccaagtgtggtgctctgtccgcacccccgaatcctcacacgaagggctagttacagatccccattcacctgcaagattccgggtgctcggcacactgagtaattctagggattttttgaggcacttcggctgcccagtgggctccccaatgaatccgggtcaactgtgcgaagtgtggtag

SEQ ID NO: 40325 - protein, 765 aa, Artificial Sequence
  derived and/or modified sequence
MNVALQELGAGSNMVEYKRATLRDEDAPETPVEGGASPDAMEVGFQKGTRQLLGSRTQLELVLAGASLLLAALLLGCLVALGVQYHRDPSHSTCLTEACIRVAGKILESLDRGVSPCEDFYQFSCGGWIRRNPLPDGRSRWNTFNSLWDQNQAILKHLLENTTFNSSSEAEQKTQRFYLSCLQVERIEELGAQPLRDLIEKIGGWNITGPWDQDNFMEVLKAVAGTYRATPFFTVYISADSKSSNSNVIQVDQSGLFLPSRDYYLNRTANEKVLTAYLDYMEELGMLLGGRPTSTREQMQQVLELEIQLANITVPQDQRRDEEKIYHKMSISELQALAPSMDWLEFLSFLLSPLELSDSEPVVVYGMDYLQQVSELINRTEPSILNNYLIWNLVQKTTSSLDRRFESAQEKLLETLYGTKKSCVPRWQTCISNTDDALGFALGSLFVKATFDRQSKEIAEGMISEIRTAFEEALGQLVWMDEKTRQAAKEKADAIYDMIGFPDFILEPKELDDVYDGYEISEDSFFQNMLNLYNFSAKVMADQLRKPPSRDQWSMTPQTVNAYYLPTKNEIVFPAGILQAPFYARNHPKALNFGGIGVVMGHELTHAFDDQGREYDKEGNLRPWWQNESLAAFRNHTACMEEQYNQYQVNGERLNGRQTLGENIADNGGLKAAYNAYKAWLRKHGEEQQLPAVGLTNHQLFFVGFAQVWCSVRTPESSHEGLVTDPHSPARFRVLGTLSNSRDFLRHFGCPVGSPMNPGQLCEVW

SEQ ID NO: 40326 - DNA, 2298 bp, Artificial Sequence
  derived and/or modified sequence
atgaacgtggccctgcaggagctgggcgccggcagcaacatggtggagtacaagagagccaccctgagagacgaggacgcccccgagacccccgtggagggcggcgccagccccgacgccatggaggtgggcttccagaagggcaccagacagctgctgggcagcagaacccagctggagctggtgctggccggcgccagcctgctgctggccgccctgctgctgggctgcctggtggccctgggcgtgcagtaccacagagaccccagccacagcacctgcctgaccgaggcctgcatcagagtggccggcaagatcctggagagcctggacagaggcgtgagcccctgcgaggacttctaccagttcagctgcggcggctggatcagaagaaaccccctgcccgacggcagaagcagatggaacaccttcaacagcctgtgggaccagaaccaggccatcctgaagcacctgctggagaacaccaccttcaacagcagcagcgaggccgagcagaagacccagagattctacctgagctgcctgcaggtggagagaatcgaggagctgggcgcccagcccctgagagacctgatcgagaagatcggcggctggaacatcaccggcccctgggaccaggacaacttcatggaggtgctgaaggccgtggccggcacctacagagccacccccttcttcaccgtgtacatcagcgccgacagcaagagcagcaacagcaacgtgatccaggtggaccagagcggcctgttcctgcccagcagagactactacctgaacagaaccgccaacgagaaggtgctgaccgcctacctggactacatggaggagctgggcatgctgctgggcggcagacccaccagcaccagagagcagatgcagcaggtgctggagctggagatccagctggccaacatcaccgtgccccaggaccagagaagagacgaggagaagatctaccacaagatgagcatcagcgagctgcaggccctggcccccagcatggactggctggagttcctgagcttcctgctgagccccctggagctgagcgacagcgagcccgtggtggtgtacggcatggactacctgcagcaggtgagcgagctgatcaacagaaccgagcccagcatcctgaacaactacctgatctggaacctggtgcagaagaccaccagcagcctggacagaagattcgagagcgcccaggagaagctgctggagaccctgtacggcaccaagaagagctgcgtgcccagatggcagacctgcatcagcaacaccgacgacgccctgggcttcgccctgggcagcctgttcgtgaaggccaccttcgacagacagagcaaggagatcgccgagggcatgatcagcgagatcagaaccgccttcgaggaggccctgggccagctggtgtggatggacgagaagaccagacaggccgccaaggagaaggccgacgccatctacgacatgatcggcttccccgacttcatcctggagcccaaggagctggacgacgtgtacgacggctacgagatcagcgaggacagcttcttccagaacatgctgaacctgtacaacttcagcgccaaggtgatggccgaccagctgagaaagccccccagcagagaccagtggagcatgaccccccagaccgtgaacgcctactacctgcccaccaagaacgagatcgtgttccccgccggcatcctgcaggcccccttctacgccagaaaccaccccaaggccctgaacttcggcggcatcggcgtggtgatgggccacgagctgacccacgccttcgacgaccagggcagagagtacgacaaggagggcaacctgagaccctggtggcagaacgagagcctggccgccttcagaaaccacaccgcctgcatggaggagcagtacaaccagtaccaggtgaacggcgagagactgaacggcagacagaccctgggcgagaacatcgccgacaacggcggcctgaaggccgcctacaacgcctacaaggcctggctgagaaagcacggcgaggagcagcagctgcccgccgtgggcctgaccaaccaccagctgttcttcgtgggcttcgcccaggtgtggtgcagcgtgagaacccccgagagcagccacgagggcctggtgaccgacccccacagccccgccagattcagagtgctgggcaccctgagcaacagcagagacttcctgagacacttcggctgccccgtgggcagccccatgaaccccggccagctgtgcgaggtgtggtag

SEQ ID NO: 40327 - DNA, 3229 bp, Artificial Sequence
  derived and/or modified sequence
gcggccgcggccgagcgggggtgctgcgcggcggccgtgatggctggtgacggcggggccgggcaggggaccggggccgcggcccgggagcgggccagctgccgggagccctgaatcaccgcctggcccgactccaccatgaacgtcgcgctgcaggagctgggagctggcagcaacatggtggagtacaaacgggccacgcttcgggatgaagacgcacccgagacccccgtagagggcggggcctccccggacgccatggaggtgggattccagaaggggacaagacagctgttaggctcacgcacgcagctggagctggtcttagcaggtgcctctctactgctggctgcactgcttctgggctgccttgtggccctaggggtccagtaccacagagacccatcccacagcacctgccttacagaggcctgcattcgagtggctggaaaaatcctggagtccctggaccgaggggtgagcccctgtgaggacttttaccagttctcctgtgggggctggattcggaggaaccccctgcccgatgggcgttctcgctggaacaccttcaacagcctctgggaccaaaaccaggccatactgaagcacctgcttgaaaacaccaccttcaactccagcagtgaagctgagcagaagacacagcgcttctacctatcttgcctacaggtggagcgcattgaggagctgggagcccagccactgagagacctcattgagaagattggtggttggaacattacggggccctgggaccaggacaactttatggaggtgttgaaggcagtagcagggacctacagggccaccccattcttcaccgtctacatcagtgccgactctaagagttccaacagcaatgttatccaggtggaccagtctgggctctttctgccctctcgggattactacttaaacagaactgccaatgagaaagtgctcactgcctatctggattacatggaggaactggggatgctgctgggtgggcggcccacctccacgagggagcagatgcagcaggtgctggagttggagatacagctggccaacatcacagtgccccaggaccagcggcgcgacgaggagaagatctaccacaagatgagcatttcggagctgcaggctctggcgccctccatggactggcttgagttcctgtctttcttgctgtcaccattggagttgagtgactctgagcctgtggtggtgtatgggatggattatttgcagcaggtgtcagagctcatcaaccgcacggaaccaagcatcctgaacaattacctgatctggaacctggtgcaaaagacaacctcaagcctggaccgacgctttgagtctgcacaagagaagctgctggagaccctctatggcactaagaagtcctgtgtgccgaggtggcagacctgcatctccaacacggatgacgcccttggctttgctttggggtccctcttcgtgaaggccacgtttgaccggcaaagcaaagaaattgcagaggggatgatcagcgaaatccggaccgcatttgaggaggccctgggacagctggtttggatggatgagaagacccgccaggcagccaaggagaaagcagatgccatctatgatatgattggtttcccagactttatcctggagcccaaagagctggatgatgtttatgacgggtacgaaatttctgaagattctttcttccaaaacatgttgaatttgtacaacttctctgccaaggttatggctgaccagctccgcaagcctcccagccgagaccagtggagcatgaccccccagacagtgaatgcctactaccttccaactaagaatgagatcgtcttccccgctggcatcctgcaggcccccttctatgcccgcaaccaccccaaggccctgaacttcggtggcatcggtgtggtcatgggccatgagttgacgcatgcctttgatgaccaagggcgcgagtatgacaaagaagggaacctgcggccctggtggcagaatgagtccctggcagccttccggaaccacacggcctgcatggaggaacagtacaatcaataccaggtcaatggggagaggctcaacggccgccagacgctgggggagaacattgctgacaacggggggctgaaggctgcctacaatgcttacaaagcatggctgagaaagcatggggaggagcagcaactgccagccgtggggctcaccaaccaccagctcttcttcgtgggatttgcccaggtgtggtgctcggtccgcacaccagagagctctcacgaggggctggtgaccgacccccacagccctgcccgcttccgcgtgctgggcactctctccaactcccgtgacttcctgcggcacttcggctgccctgtcggctcccccatgaacccagggcagctgtgtgaggtgtggtagacctggatcaggggagaaatggccagctgtcaccagacctggggcagctctcctgacaaagctgtttgctcttgggttgggaggaagcaaatgcaagctgggctgggtctagtccctcccccccacaggtgacatgagtacagaccctcctcaatcaccacattgtgcctctgctttgggggtgcccctgcctccagcagagcccccaccattcactgtgacatctttccgtgtcaccctgcctggaagaggtctgggtggggaggccagttcccataggaaggagtctgcctcttctgtccccaggctcactcagcctggcggccatggggcctgccgtgcctgccccactgtgacccacaggcctgggtggtgtacctcctggacttctccccaggctcactcagtgcgcacttaggggtggactcagctctgtctggctcaccctcacgggctacccccacctcaccctgtgctccttgtgccactgctcccagtgctgctgctgaccttcactgacagctcctagtggaagcccaagggcctctgaaagcctcctgctgcccactgtttccctgggctgagaggggaagtgcatatgtgtagcgggtactggttcctgtgtcttagggcacaagccttagcaaatgattgattctccctggacaaagcaggaaagcagatagagcagggaaaaggaagaacagagtttatttttacagaaaagagggtgggagggtgtggtcttggcccttataggaccctgtgccaataaacagacatgcatccgtca

SEQ ID NO: 40328 - DNA, 2298 bp, Artificial Sequence
  derived and/or modified sequence
atgaacgtggcattacaggaactgggagccggatccaacatggttgagtacaaacgggctaccctcagggacgaggacgcgcctgaaacacccgtagagggcggcgcctcgccagatgcgatggaggtgggcttccagaagggcacgaggcagttgctaggcagcagaacacaactggaactggtacttgcaggggcttcccttctccttgcggctctactgctcggctgcctcgtggcactgggagtccagtaccatagggaccctagccactccacctgccttaccgaagcctgcatccgcgtcgcaggaaaaattctggaaagtctcgacagaggggtgagcccttgcgaagacttttaccagttctcctgcggaggctggatccgacggaacccgctgcctgacggtcggtccagatggaacacttttaactcactttgggatcagaatcaggccatcttgaagcatctcctcgagaacaccaccttcaattcctcatccgaggcggaacagaaaacacagcggttctatctgagttgcctccaggtggaacggattgaggaactgggggcccagcctttgcgcgatctgattgaaaaaattggcggctggaacattaccggtccctgggatcaagataatttcatggaggtgctcaaggccgtcgcaggcacctatcgcgccacacctttctttaccgtgtatatcagcgctgatagcaagtccagcaattccaatgtgatacaagtggaccaaagtggcctctttcttcctagccgcgactactatctcaaccggacagccaacgaaaaggttctgactgcatatctggattacatggaggaacttggaatgctgctgggcggtagacctacttctacccgggaacaaatgcagcaggtattagaattggagatccaactcgcaaacatcaccgtgcctcaagaccagcggcgcgatgaggagaaaatataccacaagatgtcaatcagcgaactccaggccctggctcctagcatggattggcttgaattcctttcttttttgctatcacccttggagctatcagactcagaacctgtcgtcgtttatgggatggattatttgcaacaggtttctgagttgataaaccgcactgagccctcaattctgaacaactatttgatctggaatctcgtacaaaaaactacgagttccctggatcgccgttttgagtccgcccaggaaaagctgttagagacactatacgggacaaaaaagtcttgtgtgccgcgctggcagacctgtattagtaacactgacgacgcgctgggtttcgcactggggagtttgtttgtgaaagccaccttcgaccgacaatcaaaggagatcgccgagggaatgatttccgagatccgaactgcatttgaggaagcattgggccagttggtgtggatggacgaaaagacgaggcaggcggccaaagagaaagccgacgcaatttacgacatgattggttttcctgatttcatcctcgagccgaaggaacttgacgacgtgtatgacggatacgaaatctccgaagacagctttttccagaacatgttgaatctttacaacttcagcgccaaagtaatggcagaccagctgcggaagccaccctctagggaccaatggtcgatgacgccacagacagtaaatgcttactacctgcccaccaaaaacgaaattgtcttccctgccggaattttacaggcccccttttacgccaggaatcaccccaaggcacttaatttcggcgggataggcgtggtcatgggccatgaacttacacacgcatttgatgaccaaggaagagaatatgataaggaagggaatctgagaccatggtggcaaaacgagtccctggccgcattccgtaatcacaccgcttgcatggaagaacagtacaaccagtaccaagtcaatggtgagcgcctcaacggccgccagacattgggagaaaatatcgccgataatggtggtctgaaggctgcctacaacgcatataaggcttggcttagaaaacacggggaagaacagcaattacctgctgtaggtctgaccaatcaccaattattcttcgtagggttcgcacaggtttggtgcagcgtgagaaccccagaatcctcccacgaaggcctggtgactgatccacactcccctgcgcggtttcgagtcttaggtactctgagcaacagtagggactttctgagacacttcggctgtcccgtgggcagcccgatgaatcccgggcagctctgcgaagtgtggtag

SEQ ID NO: 40329 - DNA, 2298 bp, Artificial Sequence
  derived and/or modified sequence
atgaatgtggccctgcaggagctgggcgccggcagcaacatggtggagtacaagagggccaccctgagagatgaagatgcccctgagacccctgtggagggcggggccagcccagatgccatggaggtgggcttccagaagggcacccggcagctgctgggcagcaggacccagctggagctggtgctggccggggccagcctgctgctggccgccctgctgctgggctgcctggtggccctgggcgtgcagtaccaccgggaccccagccacagcacctgcctgacagaggcctgcatccgggtggccggcaagatcctggagagcctggacagaggagtgagcccctgtgaggacttctaccagttcagctgtggcggctggatcagaagaaaccccctgcctgatggccgcagccgctggaacaccttcaacagcctgtgggaccagaaccaggccatcctgaagcacctgctggagaacaccaccttcaacagcagcagcgaggccgagcagaagacccagcgcttctacctgagctgcctgcaggtggagagaattgaggagctgggcgcccagcccctgcgggacctgattgagaagattggaggctggaacatcaccggcccctgggaccaggacaacttcatggaggtgctgaaggctgtggccggcacctaccgggccacccccttcttcaccgtgtacatctctgctgacagcaagagcagcaacagcaatgtcatccaggtggaccagagcggcctcttcctgcccagccgggactactacctgaacagaacagccaatgagaaggtgctgacagcctacctggactacatggaggagctgggcatgctgctgggcggccggcccaccagcacccgggagcagatgcagcaggtgctggagctggagatccagctggccaacatcaccgtgccccaggaccagaggagagatgaggagaagatctaccacaagatgagcatcagcgagctgcaggccctggcccccagcatggactggctggagttcctgtccttcctgctgagccccctggagctgagtgacagcgagcctgtggtggtgtatggcatggactacctgcagcaggtgtctgagctgatcaacagaacagagcccagcatcctgaacaactacctgatctggaacctggtgcagaagaccaccagcagcctggacagaagatttgaaagtgcccaggagaagctgctggagaccctgtatggcaccaagaagagctgtgtgccccgctggcagacctgcatcagcaacacagatgatgccctgggctttgccctgggcagcctgtttgtgaaggccacctttgaccggcagagcaaggagattgctgagggcatgatcagcgagatcagaacagcctttgaggaggccctgggccagctggtgtggatggatgagaagacccggcaggccgccaaggagaaggcagatgccatctatgacatgattggcttcccagacttcatcctggagcccaaggagctggatgatgtgtatgatggctatgagatcagcgaggacagcttcttccagaacatgctgaacctgtacaacttcagcgccaaggtgatggctgaccagctgaggaagccacccagccgggaccagtggagcatgaccccccagacagtgaatgcctactacctgcccaccaagaatgaaattgtgtttcctgctggcatcctgcaggcccccttctacgccaggaaccaccccaaggccctgaactttggaggcatcggcgtggtgatgggccacgagctgacccacgcctttgatgaccagggccgggagtatgacaaggagggcaacctgcggccctggtggcagaatgaaagcctggccgccttcaggaaccacacagcctgcatggaggagcagtacaaccagtaccaggtgaatggagagcggctgaatggccggcagaccctgggggagaacattgctgacaatggaggcctgaaggccgcctacaatgcctacaaggcctggctgaggaagcacggggaggagcagcagctgcctgctgtgggcctgaccaaccaccagctgttctttgtgggctttgcccaggtgtggtgcagcgtgaggaccccagagagcagccatgagggcctggtgacagacccccacagccctgcccgcttccgggtgctgggcaccctgagcaacagccgggacttcctgcggcacttcggctgccctgtgggcagccccatgaaccctggccagctgtgtgaggtgtggtag

SEQ ID NO: 40330 - DNA, 2298 bp, Artificial Sequence
  derived and/or modified sequence
atgaacgtggccctgcaggagctgggcgccggcagcaacatggtggagtataaaagggctactctacgagacgaggatgcccccgagactcccgtcgaggggggggcgtcccctgatgcaatggaagtagggttccagaaagggaccaggcaactgcttgggtctcgaacgcagttggaactggtgttggctggtgcatcactgctccttgccgcattgctcctgggttgtttggttgctttgggcgtgcaataccaccgcgatcccagccacagcacctgcctgaccgaagcatgtattcgggtagccgggaagattttggaatctttggatcgtggcgtgtctccctgcgaagatttttatcagttttcttgtggaggttggatcagacgaaaccctctcccagatggacggagtcggtggaatacctttaactctttatgggaccagaatcaggctattttgaagcatttgctggagaatacaacctttaattcatcctccgaggctgaacagaagactcaacggttttacctcagttgtctgcaggtcgagagaattgaggagcttggcgcccagccactgagggacctgatcgagaaaataggggggtggaatattaccgggccctgggatcaggataatttcatggaggtccttaaggccgtggcagggacctatcgggccacacctttctttactgtgtacatttccgcagacagtaaatccagcaactccaacgtaatacaggtggaccagtccggcctattcctgccgtctcgagactactatcttaaccgtacagcgaacgagaaagtcctaaccgcctacctggactacatggaagaattggggatgctgctgggcggcagacctacctctactagggagcagatgcagcaggtattggaattagaaatacagctggctaacatcaccgtcccccaggatcagcggagggacgaagagaagatttaccacaaaatgtccatttccgagctccaggccttggcaccatcaatggactggttggaatttttgtcattcctgctgtcacctttggagctgagcgattcagagccagttgtggtttacgggatggactacttacagcaggttagcgagctaattaacaggactgaaccttcaatcttgaacaactacttaatttggaatctggtacagaaaaccacctcatctttggaccggaggttcgaatctgcccaggagaaactgctggaaaccttgtatggaactaagaaatcatgcgtgcctagatggcagacctgcatctctaacaccgatgacgccctcggcttcgcactgggcagtctgtttgtgaaggctaccttcgaccggcagtccaaagaaatcgcggaagggatgataagtgaaattaggacagcttttgaagaagcattaggacagctggtgtggatggatgaaaagacgcgtcaggctgccaaagagaaagctgacgctatctacgacatgattggttttcctgatttcattcttgagccaaaagagctggatgacgtatatgatgggtacgaaatcagcgaagatagcttttttcagaacatgctgaacctttacaatttttccgccaaggtgatggcagaccagttgcggaaaccacctagcagggaccaatggagcatgaccccgcagaccgtcaacgcatattatctgcccacgaaaaatgagatcgtgttcccagctggaatattgcaggcgcctttctatgctcgcaatcatccaaaggcccttaactttggaggtattggggttgtcatgggtcacgagttgactcacgccttcgatgaccagggccgagagtacgacaaagagggaaatctaagaccttggtggcagaacgagtcgttggcagcctttcggaaccacacagcctgcatggaagaacaatacaatcagtaccaagtcaacggagagcggctgaatggaagacagactctgggggagaatattgcagataacggtggacttaaggcagcttataacgcttacaaagcttggctgcggaaacatggagaagagcaacagttaccagccgtaggcctaacaaatcaccagctattctttgtggggtttgctcaggtatggtgcagcgtaaggactccggaaagctcacacgaaggcttggtaactgatcctcactctccagctcgttttcgcgtcttaggaaccctgtctaattcgcgggactttctccgacacttcggctgtcccgtggggagccccatgaatcctgggcaattgtgcgaagtatggtag

SEQ ID NO: 40331 - DNA, 2298 bp, Artificial Sequence
  derived and/or modified sequence
atgaatgtcgctctccaagaactcggggctggatccaatatggtagaatataaacgggcaacactgagagacgaagacgcaccggagacccccgtggaggggggtgccagccccgacgctatggaagtgggttttcagaagggaacccggcagcttctgggctcccgaactcagctggagttggtgctagccggagcatctctcctgttggccgcattactgcttggatgcttggtggccttaggggtgcagtaccaccgggacccatcccattctacttgtctgaccgaggcatgcatccgagttgcagggaaaatcctagagtccctggatcgcggagtgagtccctgcgaggatttttaccagttctcctgcggtggatggataagaaggaaccctctcccagacggaaggtccaggtggaatacattcaactccctctgggaccagaaccaggccatacttaagcaccttttagaaaataccacattcaactctagcagcgaggctgagcagaaaactcagagattctacctgagttgcctgcaagttgagcgtattgaggagctcggagcacagccactcagggacctgattgagaagatcggtggatggaacattactggcccttgggatcaggataacttcatggaagtgctgaaagcagttgctgggacctaccgggcaaccccctttttcaccgtgtacatctcagcagactcaaaatcctccaactctaatgtgattcaagtcgaccagagtggcctctttctcccctcacgggattactacctgaaccgcaccgcaaacgagaaagtcctcaccgcctacctggactatatggaggaactgggaatgttgttaggcggacgtcccaccagtacccgagaacagatgcagcaggtgctggaactagagatccagttggccaacattacagtgccgcaagaccagaggcgcgacgaagaaaagatctaccacaagatgagcatctcagaattacaggcacttgcgccatctatggattggcttgaattcttgtcattcctattatctccgctcgagcttagtgattccgagcccgtggtggtgtatggcatggattacttacagcaggtgagcgagcttattaatagaactgaacctagtatcctgaacaattacctgatctggaatttagtgcagaagaccacgtcctcactggaccgtagattcgagagcgcccaggagaagttgctcgaaaccttgtacggaacaaagaagagctgcgtgccacggtggcaaacctgtatcagcaacactgacgacgcactcggatttgccttgggctcgctatttgttaaggccacatttgatcgacagagcaaagaaatcgctgaaggcatgatcagcgagattcggacggccttcgaagaggctttgggacagctggtgtggatggacgaaaagacccgacaggcggcaaaagagaaggctgatgcaatctatgacatgatcggcttcccagattttatcctggaaccgaaagagctggatgacgtttatgacgggtacgaaatcagcgaggatagcttctttcagaacatgctcaacctgtacaacttctccgctaaggtaatggcggaccaattaaggaaaccgccaagtcgagatcaatggtccatgactccccagacggtgaacgcttactacctcccaacaaaaaacgagattgtcttcccagcgggaatcctgcaagctcctttttatgcgcgtaaccatcccaaggcccttaattttggcggtattggagttgttatgggccacgaactaacccatgctttcgacgatcagggaagagagtatgacaaagaagggaacctgagaccgtggtggcagaacgagtccctggctgcgttcagaaatcataccgcatgcatggaagaacagtacaaccagtatcaggtgaacggggagaggctcaatggacgacaaaccctgggagagaacatagcagataatggcggactcaaagccgcttataatgcctataaagcctggctaagaaagcatggggaagaacagcaattgccagcagttggactcacaaatcaccagcttttttttgtgggctttgctcaagtgtggtgttccgtgcgtacccccgagtcgtcccatgaagggctggttacggacccccatagccccgcaagatttcgcgtcctgggcacgctctctaatagccgggatttcctgcgccacttcgggtgtccggtggggagccccatgaatcctggacagctctgcgaggtgtggtag

SEQ ID NO: 40332 - protein, 1384 aa, Artificial Sequence [sequence omitted]

SEQ ID NO: 40333 - protein, 1309 aa, Artificial Sequence
  derived and/or modified sequence
MREPLPGSASWGTPGPPSAGTMSQLQLWLQFEALNKDSSYFEDFSNISIFSSSVDSLSDIVDTPDFLPADSLNQVSTIWDDNPAPSTHDKLFQLSRPFAGFEDFLPSHSTPLLVSYQEQSVQSQPEEEDEAEEEEAEELGHTETYADYVPSKSKIGKQHPDRVVETSTLSSVPPPDITYTLALPSDSGALSALQLEAITYACQQHEVLLPSGQRAGFLIGDGAGVGKGRTVAGVILENHLRGRKKALWFSVSNDLKYDAERDLRDIEATGIAVHALSKIKYGDTTTSEGVLFATYSALIGESQAGGQHRTRLRQILDWCGEAFEGVIVFDECHKAKNAGSTKMGKAVLDLQNKLPLARVVYASATGASEPRNMIYMSRLGIWGEGTPFRNFEEFLHAIEKRGVGAMEIVAMDMKVSGMYIARQLSFSGVTFRIEEIPLAPAFECVYNRAALLWAEALNVFQQAADWIGLESRKSLWGQFWSAHQRFFKYLCIAAKVRRLVELAREELARDKCVVIGLQSTGEARTREVLGENDGHLNCFVSAAEGVFLSLIQKHFPSTKRKRDRGAGSKRKRRPRGRGAKAPRLACETAGVIRISDDSSTESDPGLDSDFNSSPESLVDDDVVIVDAVGLPSDDRGPLCLLQRDPHGPGVLERVERLKQDLLDKVRRLGRELPVNTLDELIDQLGGPQRVAEMTGRKGRVVSRPDGTVAFESRAEQGLSIDHVNLREKQRFMSGEKLVAIISEASSSGVSLQADRRVQNQRRRVHMTLELPWSADRAIQQFGRTHRSNQVSAPEYVFLISELAGERRFASIVAKRLESLGALTHGDRRATESRDLSKYNFENKYGTRALHCVLTTILSQTENKVPVPQGYPGGVPTFFRDMKQGLLSVGIGGRESRNGCLDVEKDCSITKFLNRILGLEVHKQNALFQYFSDTFDHLIEMDKREGKYDMGILDLAPGIEEIYEESQQVFLAPGHPQDGQVVFYKISVDRGLKWEDAFAKSLALTGPYDGFYLSYKVRGNKPSCLLAEQNRGQFFTVYKPNIGRQSQLEALDSLRRKFHRVTAEEAKEPWESGYALSLTHCSHSAWNRHCRLAQEGKDCLQGLRLRHHYMLCGALLRVWGRIAAVMADVSSSSYLQIVRLKTKDRKKQVGIKIPEGCVRRVLQELRLMDADVKRRQAPALGCPAPPAPRPLALPCGPGEVLDLTYSPPAEAFPPPPHFSFPAPLSLDAGPGVVPLGTPDAQADPAALAHQGCDINFKEVLEDMLRSLHAGPPSEGALGEGAGAGGAAGGGPERQSVIQFSPPFPGAQAPL

SEQ ID NO: 40334 - DNA, 4155 bp, Artificial Sequence
  derived and/or modified sequence
atgagccagctgcagctgtggctgcagttcgaggccctgaacaagggcatggcccccggcagcccccagaccagagccgcccagagcagctgcagcatcgccgccctgcaggtgctgcagaagagcgacgccgtgctgagaggccccgaggacagcagctacttcgaggacttcagcaacatcagcatcttcagcagcagcgtggacagcctgagcgacatcgtggacacccccgacttcctgcccgccgacagcctgaaccaggtgagcaccatctgggacgacaaccccgcccccagcacccacgacaaggtgagcgcccccggcgcccccagccagcccagacccaccagcgtggccagccccgccagagacccccacggccccgtgagactgagaggccccaccagctgcgacctgagcagactggccagagccgacatcctgctgcccttccagctgttccagctgagcagacccttcgccggcttcgaggacttcctgcccagccacagcacccccctgctggtgagctaccaggagcagagcgtgcagagccagcccgaggaggaggacgaggccgaggaggaggaggccgaggagctgggccacaccgagacctacgccgactacgtgcccagcaagagcaagatcggcaagcagcaccccgacagagtggtggagaccagcaccctgagcagcgtgcccccccccgacatcacctacaccctggccctgcccagcgacagcggcgccctgagcgccctgcagctggaggccatcacctacgcctgccagcagcacgaggtgctgctgcccagcggccagagagccggcttcctgatcggcgacggcgccggcgtgggcaagggcagaaccgtggccggcgtgatcctggagaaccacctgagaggcagaaagaaggccctgtggttcagcgtgagcaacgacctgaagtacgacgccgagagagacctgagagacatcgaggccaccggcatcgccgtgcacgccctgagcaaggtgggcgccgtgctgggcaaggtgggcggcaaggtgggcaccgtgccctgcaagatcaagtacggcgacaccaccaccagcgagggcgtgctgttcgccacctacagcgccctgatcggcgagagccaggccggcggccagcacagaaccagactgagacagatcctggactggtgcggcgaggccttcgagggcgtgatcgtgttcgacgagtgccacaaggccaagaacgccggcagcaccaagatgggcaaggccgtgctggacctgcagaacaagctgcccctggccagagtggtgtacgccagcgccaccggcgccagcgagcccagaaacatgatctacatgagcagactgggcatctggggcgagggcacccccttcagaaacttcgaggagttcctgcacgccatcgagaagagaggcgtgggcgccatggagatcgtggccatggacatgaaggtgagcggcatgtacatcgccagacagctgagcttcagcggcgtgaccttcagaatcgaggagatccccctggcccccgccttcgagtgcgtgtacaacagagccgccctgctgtgggccgaggccctgaacgtgttccagcaggccgccgactggatcggcctggagagcagaaagagcctgtggggccagttctggagcgcccaccagagattcttcaagtacctgtgcatcgccgccaaggtgagaagactggtggagctggccagagaggagctggccagagacaagtgcgtggtgatcggcctgcagagcaccggcgaggccagaaccagagaggtgctgggcgagaacgacggccacctgaactgcttcgtgagcgccgccgagggcgtgttcctgagcctgatccagaagcacttccccagcaccaagagaaagagagacagaggcgccggcagcaagagaaagcccggcgtgatcagaatcagcgacgacagcagcaccgagagcgaccccggcctggacagcgacttcaacagcagccccgagagcctggtggacgacgacgtggtgatcgtggacgccgtgggcctgcccagcgacgacagaggccccctgtgcctgctgcagagagacccccacggccccggcgtgctggagagagtggagagactgaagcaggacctgctggacaaggtgagaagactgggcagagagctgcccgtgaacaccctggacgagctgatcgaccagctgggcggcccccagagagtggccgagatgaccggcagaaagggcagagtggtgagcagacccgacggcaccgtggccttcgagagcagagccgagcagggcctgagcatcgaccacgtgaacctgagagagaagcagagattcatgagcggcgagaagctggtggccatcatcagcgaggccagcagcagcggcgtgagcctgcaggccgacagaagagtgcagaaccagagaagaagagtgcacatgaccctggagctgccctggagcgccgacagagccatccagcagttcggcagaacccacagaagcaaccaggtgagcgcccccgagtacgtgttcctgatcagcgagctggccggcgagagaagattcgccagcatcgtggccaagagactggagagcctgggcgccctgacccacggcgacagaagagccaccgagagcagagacctgagcaagtacaacttcgagaacaagtacggcaccagagccctgcactgcgtgctgaccaccatcctgagccagaccgagaacaaggtgcccgtgccccagggctaccccggcggcgtgcccaccttcttcagagacatgaagcagggcctgctgagcgtgggcatcggcggcagagagagcagaaacggctgcctggacgtggagaaggactgcagcatcaccaagttcctgaacagaatcctgggcctggaggtgcacaagcagaacgccctgttccagtacttcagcgacaccttcgaccacctgatcgagatggacaagagagagggcaagtacgacatgggcatcctgggcgagcacagatgcagaggcgtggtgtgggtggacctggcccccggcatcgaggagatctacgaggagagccagcaggtgttcctggcccccggccacccccaggacggccaggtggtgttctacaagatcagcgtggacagaggcctgaagtgggaggacgccttcgccaagagcctggccctgaccggcccctacgacggcttctacctgagctacaaggtgagaggcaacaagcccagctgcctgctggccgagcagaacagaggccagttcttcaccgtgtacaagcccaacatcggcagacagagccagctggaggccctggacagcctgagaagaaagttccacagagtgaccgccgaggaggccaaggagccctgggagagcggctacgccctgagcctgacccactgcagccacagcgcctggaacagacactgcagactggcccaggagggcaaggactgcctgcagggcctgagactgagacaccactacatgctgtgcggcgccctgctgagagtgtggggcagaatcgccgccgtgatggccgacgtgagcagcagcagctacctgcagatcgtgagactgaagaccaaggacagaaagaagcaggtgggcatcaagatccccgagggctgcgtgagaagagtgctgcaggagctgagactgatggacgccgacgtgaagagaagacaggcccccgccctgggctgccccgccccccccgcccccagacccctggccctgccctgcggccccggcgaggtgctggacctgacctacagcccccccgccgaggccttccccccccccccccacttcagcttccccgcccccctgagcctggacgccggccccggcgtggtgcccctgggcacccccgacgcccaggccgaccccgccgccctggcccaccagggctgcgacatcaacttcaaggaggtgctggaggacatgctgagaagcctgcacgccggcccccccagcgagggcgccctgggcgagggcgccggcgccggcggcgccgccggcggcggccccgagagacagagcgtgatccagttcagcccccccttccccggcgcccaggcccccctgtag

SEQ ID NO: 40335 - DNA, 3930 bp, Artificial Sequence
  derived and/or modified sequence
atgagagagcccctgcccggcagcgccagctggggcacccccggcccccccagcgccggcaccatgagccagctgcagctgtggctgcagttcgaggccctgaacaaggacagcagctacttcgaggacttcagcaacatcagcatcttcagcagcagcgtggacagcctgagcgacatcgtggacacccccgacttcctgcccgccgacagcctgaaccaggtgagcaccatctgggacgacaaccccgcccccagcacccacgacaagctgttccagctgagcagacccttcgccggcttcgaggacttcctgcccagccacagcacccccctgctggtgagctaccaggagcagagcgtgcagagccagcccgaggaggaggacgaggccgaggaggaggaggccgaggagctgggccacaccgagacctacgccgactacgtgcccagcaagagcaagatcggcaagcagcaccccgacagagtggtggagaccagcaccctgagcagcgtgcccccccccgacatcacctacaccctggccctgcccagcgacagcggcgccctgagcgccctgcagctggaggccatcacctacgcctgccagcagcacgaggtgctgctgcccagcggccagagagccggcttcctgatcggcgacggcgccggcgtgggcaagggcagaaccgtggccggcgtgatcctggagaaccacctgagaggcagaaagaaggccctgtggttcagcgtgagcaacgacctgaagtacgacgccgagagagacctgagagacatcgaggccaccggcatcgccgtgcacgccctgagcaagatcaagtacggcgacaccaccaccagcgagggcgtgctgttcgccacctacagcgccctgatcggcgagagccaggccggcggccagcacagaaccagactgagacagatcctggactggtgcggcgaggccttcgagggcgtgatcgtgttcgacgagtgccacaaggccaagaacgccggcagcaccaagatgggcaaggccgtgctggacctgcagaacaagctgcccctggccagagtggtgtacgccagcgccaccggcgccagcgagcccagaaacatgatctacatgagcagactgggcatctggggcgagggcacccccttcagaaacttcgaggagttcctgcacgccatcgagaagagaggcgtgggcgccatggagatcgtggccatggacatgaaggtgagcggcatgtacatcgccagacagctgagcttcagcggcgtgaccttcagaatcgaggagatccccctggcccccgccttcgagtgcgtgtacaacagagccgccctgctgtgggccgaggccctgaacgtgttccagcaggccgccgactggatcggcctggagagcagaaagagcctgtggggccagttctggagcgcccaccagagattcttcaagtacctgtgcatcgccgccaaggtgagaagactggtggagctggccagagaggagctggccagagacaagtgcgtggtgatcggcctgcagagcaccggcgaggccagaaccagagaggtgctgggcgagaacgacggccacctgaactgcttcgtgagcgccgccgagggcgtgttcctgagcctgatccagaagcacttccccagcaccaagagaaagagagacagaggcgccggcagcaagagaaagagaagacccagaggcagaggcgccaaggcccccagactggcctgcgagaccgccggcgtgatcagaatcagcgacgacagcagcaccgagagcgaccccggcctggacagcgacttcaacagcagccccgagagcctggtggacgacgacgtggtgatcgtggacgccgtgggcctgcccagcgacgacagaggccccctgtgcctgctgcagagagacccccacggccccggcgtgctggagagagtggagagactgaagcaggacctgctggacaaggtgagaagactgggcagagagctgcccgtgaacaccctggacgagctgatcgaccagctgggcggcccccagagagtggccgagatgaccggcagaaagggcagagtggtgagcagacccgacggcaccgtggccttcgagagcagagccgagcagggcctgagcatcgaccacgtgaacctgagagagaagcagagattcatgagcggcgagaagctggtggccatcatcagcgaggccagcagcagcggcgtgagcctgcaggccgacagaagagtgcagaaccagagaagaagagtgcacatgaccctggagctgccctggagcgccgacagagccatccagcagttcggcagaacccacagaagcaaccaggtgagcgcccccgagtacgtgttcctgatcagcgagctggccggcgagagaagattcgccagcatcgtggccaagagactggagagcctgggcgccctgacccacggcgacagaagagccaccgagagcagagacctgagcaagtacaacttcgagaacaagtacggcaccagagccctgcactgcgtgctgaccaccatcctgagccagaccgagaacaaggtgcccgtgccccagggctaccccggcggcgtgcccaccttcttcagagacatgaagcagggcctgctgagcgtgggcatcggcggcagagagagcagaaacggctgcctggacgtggagaaggactgcagcatcaccaagttcctgaacagaatcctgggcctggaggtgcacaagcagaacgccctgttccagtacttcagcgacaccttcgaccacctgatcgagatggacaagagagagggcaagtacgacatgggcatcctggacctggcccccggcatcgaggagatctacgaggagagccagcaggtgttcctggcccccggccacccccaggacggccaggtggtgttctacaagatcagcgtggacagaggcctgaagtgggaggacgccttcgccaagagcctggccctgaccggcccctacgacggcttctacctgagctacaaggtgagaggcaacaagcccagctgcctgctggccgagcagaacagaggccagttcttcaccgtgtacaagcccaacatcggcagacagagccagctggaggccctggacagcctgagaagaaagttccacagagtgaccgccgaggaggccaaggagccctgggagagcggctacgccctgagcctgacccactgcagccacagcgcctggaacagacactgcagactggcccaggagggcaaggactgcctgcagggcctgagactgagacaccactacatgctgtgcggcgccctgctgagagtgtggggcagaatcgccgccgtgatggccgacgtgagcagcagcagctacctgcagatcgtgagactgaagaccaaggacagaaagaagcaggtgggcatcaagatccccgagggctgcgtgagaagagtgctgcaggagctgagactgatggacgccgacgtgaagagaagacaggcccccgccctgggctgccccgccccccccgcccccagacccctggccctgccctgcggccccggcgaggtgctggacctgacctacagcccccccgccgaggccttccccccccccccccacttcagcttccccgcccccctgagcctggacgccggccccggcgtggtgcccctgggcacccccgacgcccaggccgaccccgccgccctggcccaccagggctgcgacatcaacttcaaggaggtgctggaggacatgctgagaagcctgcacgccggcccccccagcgagggcgccctgggcgagggcgccggcgccggcggcgccgccggcggcggccccgagagacagagcgtgatccagttcagcccccccttccccggcgcccaggcccccctgtag

SEQ ID NO: 40336 - DNA, 4155 bp, Artificial Sequence
  derived and/or modified sequence
atgtcacaactccagctctggctgcagttcgaagcattaaacaagggcatggcccctggatccccccagacacgcgccgctcagagttcatgtagtatcgctgctctccaggtcttgcaaaagagcgacgctgtcctgcgtggtcctgaggactcatcttactttgaggatttttcaaacataagcatcttttcaagttcagtggatagcctgtcagacattgtagacacccccgatttcttgcctgcagactctctcaaccaggtttccacaatttgggacgataatcctgctccatctacccatgacaaagtgtccgctccaggagctccaagccagcctaggcccactagcgtggctagccctgcaagagatcctcatggccccgttagactccggggccccacatcctgtgacctgagcagacttgcacgcgctgacatcctccttcctttccagctctttcagctatctcgcccatttgccggttttgaggacttcttgccctctcacagcacccctctgctggtcagctaccaagagcaaagcgtgcagagccaaccggaggaggaggacgaggctgaagaggaagaggctgaggaactgggacacaccgaaacgtacgctgattacgtgccatccaagtcgaagatcgggaaacagcaccccgacagggtggttgagacatccacgctgtcttctgtccccccaccagatatcacctatactctcgcgttgccctcagattcaggcgcactatccgccttgcagctcgaagcaattacatatgcatgtcagcagcatgaagtcttgctgccctccgggcagagagcagggtttcttatcggcgacggcgccggcgtggggaaaggtcggaccgtggccggtgtgatcctggaaaatcacctgcgaggcaggaagaaggcactgtggtttagcgtttcgaacgacctcaagtacgacgcagagcgcgatctgagggacatcgaagctaccggaattgcagtccatgccttgagtaaggtcggcgctgtcctgggtaaagtgggtggcaaagtgggtactgtgccatgtaagataaagtacggcgatacaacaacgagtgagggggtgctgtttgctacatacagtgccctgatcggcgagagtcaagcaggagggcagcacaggacacgactgcgtcagattttggactggtgtggggaggccttcgagggagtgattgtctttgatgagtgccacaaggcaaagaacgccgggtccaccaagatgggtaaggcagtcctggatctacaaaacaagctgcccctggccagggtggtctatgcctctgcaaccggggcctctgaaccccgaaacatgatctatatgtctagactgggtatatggggagaggggacccccttcagaaatttcgaggaattcttgcacgcaatagagaagaggggcgttggcgcgatggagattgttgccatggacatgaaggtcagcgggatgtacatcgctcgccaactgagtttcagtggcgtcacgtttcgcatcgaagaaataccattggccccagccttcgaatgtgtttataatagagcagcgttgctttgggcagaagccttgaatgtgtttcaacaggccgccgactggattggcctggagagtcggaaaagcctatggggccagttttggtccgcacatcagcggtttttcaaatatctctgcatcgccgcgaaagtgagaaggctggtcgaactcgctcgtgaggagctggcacgggacaaatgtgttgttatcgggctgcagtccaccggtgaggcacgcacgcgggaggtgctgggcgagaatgacggacacctcaactgtttcgtctcagctgcggagggagtgtttttatctctgatacagaaacacttcccgagcaccaaacggaagcgtgacagaggagcgggatctaagcggaagcctggcgtgattcgaatttctgacgactcaagtacggaatctgatcccggactagattccgactttaactcaagccctgaatcgctcgtagatgacgacgtggtgatcgtggatgccgttggactacctagcgacgaccggggccccctctgtctgcttcagagggaccctcacgggcccggagttctcgaacgggttgagagactcaagcaagatctgctggataaggtccgaaggctggggagggaactgcccgttaataccctggacgagctgattgatcagttgggaggaccccagagggtcgctgagatgacaggccggaagggccgagtggtcagcaggccggatggaacggttgcattcgaaagcagagccgagcaagggctcagcatcgatcacgtgaacctgcgggagaaacagcggttcatgagcggagaaaaattggtcgctatcatctccgaagcaagctccagtggggtctctctgcaggccgatcgccgagtccaaaaccagcgcaggagggttcatatgacattggagctgccatggagcgctgacagggctatacagcagtttggcaggacccataggtccaatcaggtctccgcccctgagtacgtatttctgatctcggagttagccggagagcgcaggttcgcctccattgtggccaagcggctcgagagcctgggagccctcactcacggcgaccgcagggcgacagagagccgggatctgagtaaatataacttcgagaataaatacggcacccgtgccctgcactgtgtgctgacaactatcctctcacaaactgagaacaaggtgcccgtgccacagggatatcccgggggagtgcccaccttctttcgcgacatgaagcagggcttgctgtccgtcggtattggcggaagggaatcccgcaatgggtgtctcgatgttgagaaggattgcagcattactaagttcctgaaccggattttggggctcgaagtccacaagcagaacgcgctgttccagtatttctccgataccttcgatcacctgattgagatggacaagagagagggcaaatacgacatgggaattctcggggaacatcgttgccggggcgtggtctgggttgacctcgcccctggaatcgaggaaatttacgaggagtcgcaacaggtgttcctagcacccggacatccccaggacggtcaggtggtcttttataagatcagtgtggatagaggcctgaaatgggaggacgcatttgcaaaatcactggcgctcactggcccatacgacgggttttacctctcttacaaagtgcggggaaataaacccagttgtctacttgccgaacagaaccgcgggcagtttttcaccgtctacaagccgaacatcggtcggcagtcccagttggaggccctagactccctgaggaggaaatttcaccgtgtcactgccgaggaagccaaagagccctgggagagtggatatgcactgtcactgacccactgctctcacagcgcctggaacagacactgccgtttggcacaggaaggaaaggattgcctgcagggcttaaggttgcgccaccactacatgctctgcggtgcactcctgcgtgtgtggggcagaatcgcagctgtaatggccgacgtaagttccagctcctacctccagatcgtgaggctgaaaaccaaagacagaaagaagcaggtcggaattaagatacctgagggttgcgtacgccgcgtgctccaggaattacggttgatggacgcagacgtaaagcggaggcaggcccccgccctcgggtgtcccgctccaccagccccccgtcctttggcactgccgtgtggcccaggggaggtgttagacctgacttactcccccccggcagaggccttcccaccgcctccccatttctcctttcccgcccccttgtcgctggatgccgggccaggcgttgtccctctgggtacccctgatgcacaagcagatcccgccgcgctggcgcaccagggatgcgacatcaatttcaaggaggtgctcgaggatatgctccgctccctgcacgcaggcccaccgagcgagggtgcactgggggagggggctggggctggcggcgcagcaggggggggcccagaacgacagagcgtaattcagttcagtccacccttccccggtgctcaagctcctctgtag

SEQ ID NO: 40337 - DNA, 3930 bp, Artificial Sequence
  derived and/or modified sequence
atgagagagccactccccgggtcagcgagttgggggactccaggcccaccaagtgccggcaccatgagccagcttcagttgtggctacagttcgaagctctgaataaagacagtagttacttcgaggacttcagtaatatatccattttttcatcctccgtggactccctgagcgatattgtcgacacgcctgatttcttacctgccgattctttgaatcaagtgtcgacgatttgggacgacaatccagccccctcaactcatgataaattgtttcagctgagccggccatttgcaggcttcgaagatttcctcccgtcacactcaacaccgctgctcgtgtcttaccaggagcagtcagtgcagtcccagcccgaggaggaagatgaagcagaggaggaggaggccgaggagctgggtcacacagagacttacgctgactatgtgccttctaaatccaagattggcaaacagcaccctgaccgagtcgtcgaaacttctactctctcctcagtacccccccctgacatcacgtataccctcgccctgccctctgattctggagccttaagcgctttgcagctggaagccatcacctacgcctgtcagcagcacgaggttctgctaccctctggacagagagctggcttcttgatcggcgatggcgctggcgtcggaaaaggcaggactgtcgctggcgtgatcttagaaaaccaccttcggggccgtaagaaagccctgtggttcagtgttagcaacgaccttaaatacgatgcggagcgggatctccgtgacattgaggccactggtattgctgtgcatgctcttagtaaaataaagtatggtgatacaactacatccgagggcgtgctgtttgcaacctatagtgccctgattggggaaagtcaggccggaggacaacaccgcacgcgactgagacagatcctggattggtgtggtgaggctttcgagggagtgattgtgtttgacgagtgtcataaggccaagaatgcagggtctactaaaatgggcaaggctgtgctggatctgcagaataaactacccttagcacgtgttgtgtacgcctcagccacaggggcctccgagccccgcaatatgatctatatgtcaaggctgggcatctggggggagggcactcccttccgaaattttgaggaattcctgcatgccatcgaaaagcggggggtgggtgccatggagatcgttgccatggacatgaaagtatcgggcatgtatatagcacgacagctgagcttttccggggtaacgtttcgaattgaagagatacctcttgcccccgcattcgagtgcgtgtacaacagagccgcgctgttgtgggccgaggccctcaatgtgtttcagcaagccgcggattggattgggctcgaatctcggaagtctttatgggggcagttctggagcgctcaccaacgattcttcaaatacctttgcatcgccgccaaggtgcggcgtttagttgagctggcgagggaagagctggctagggacaagtgcgttgtgattggactgcagtccaccggggaagcacggacccgggaagtgttgggtgagaacgatggccatttgaactgctttgtctcagcggcagagggagtttttctaagcctaatccagaaacattttccctctacaaaaagaaaaagagataggggggcaggctccaagagaaagcggcgcccgcgcggacggggcgccaaggctccccgcctggcatgcgagaccgctggcgtgatacggatctctgatgattcaagtacagagagcgaccccggcctcgatagcgatttcaactccagccccgagtcactggttgacgatgacgttgtgattgtcgatgccgtgggcctacccagcgacgaccggggtcctctgtgtcttcttcagcgggatccgcacggaccaggtgttctggagagggtggagaggcttaagcaagatctcctggacaaagttcgaaggttaggtcgggaacttccagtgaacacgcttgacgagcttatcgatcagctgggcggtccccagagagtggctgaaatgacgggccggaagggtcgcgtcgtctcccgacctgatgggacagtcgcttttgagagccgcgctgaacagggtctatctatcgatcacgtcaatctcagagaaaaacagagattcatgagcggtgagaagctggtggccatcatctctgaagcatcctcctctggtgtgagtctgcaagccgatcggcgggtgcagaaccagaggcgccgcgtgcacatgactctcgagttaccctggtccgctgatagggctatccagcagtttgggcgcacccacaggtccaaccaagtttcagcacccgagtacgtcttcctgatctcagagcttgcgggggagagacgtttcgcctcaatcgtggccaagcgtcttgaatctctcggggctctcacacacggtgaccgccgggctacagagagtcgagatctcagcaagtacaattttgagaataaatatggaacacgtgcactgcactgtgttctcacgaccatcctctcacaaaccgagaacaaggtgccagttccccaaggttatccagggggggtccctacttttttccgcgatatgaaacagggactgctgagcgtgggcatcggcggtcgtgagtcccggaacgggtgtctggatgtcgaaaaagattgttctataacaaagtttctaaatcggattctcggccttgaagtacacaaacagaatgctctgttccaatacttcagtgatacattcgaccatctaatagagatggacaaaagggagggcaagtacgacatgggaatcctggacttggccccaggaatcgaggaaatctatgaagagagtcaacaagtgtttttggcgcccggacatccccaggacggccaggtggtcttttacaaaatctctgtagatagagggctcaagtgggaagatgctttcgctaagagcctggcgttaacgggcccctacgacggcttttatctttcgtataaggtccgcggaaacaaaccatcttgtctattagcagaacaaaacaggggccagtttttcactgtctataagcccaacatagggcgccaaagccagctggaagcactggacagcctgagaagaaagtttcatcgcgtgaccgctgaggaggccaaggaaccctgggagagcggctatgctctgtcgctgacgcactgttcgcattctgcctggaatcggcactgccgacttgcccaggaggggaaagactgtttgcaggggttacgattgcggcatcactacatgctgtgtggggccctgttgcgagtgtggggccggatcgctgccgtaatggccgatgtcagtagctcttcctatctgcagattgtgagattaaaaacaaaggaccgcaaaaagcaggttggaataaagattccagagggatgcgtaaggagggtgctccaggaactaagattaatggacgccgacgtcaaaaggcgtcaggcacctgctctcggctgtcccgcccctccggcccccagacctctggcactaccctgcgggcccggcgaagtcctcgatttgacttactcacctccagcagaggccttccccccgccaccgcatttcagttttccagctccgctctctctggatgccgggccaggtgtggtgcctcttgggactcctgatgctcaggctgatcccgcagcgttagctcaccaggggtgtgacattaattttaaggaggtgctagaggatatgctacggtctctgcacgctggtccaccctccgaaggcgccctaggcgaaggagctggtgccggcggagccgcagggggcgggcccgaaaggcagtcagtgattcaattctccccacccttccccggggcacaggctccactgtag

SEQ ID NO: 40338 - DNA, 4155 bp, Artificial Sequence
  derived and/or modified sequence
atgagccagctgcagctgtggctgcagtttgaggccctgaacaagggcatggcccctggcagcccccagacccgggccgcccagagcagctgcagcattgctgccctgcaggtgctgcagaagagtgatgctgtgctgcggggccctgaggacagcagctactttgaggacttcagcaacatcagcatcttcagcagctctgtggacagcctgagtgacatcgtggacaccccagacttcctgcctgctgacagcctgaaccaggtgtccaccatctgggatgacaacccagcccccagcacccatgacaaggtgtctgcccctggggcccccagccagccccggcccacctctgtggccagccctgcccgggacccccacggccctgtgcggctgcggggccccaccagctgtgacctgagccggctggcccgggctgacatcctgctgcccttccagctgttccagctgagccggccctttgctggctttgaggacttcctgcccagccacagcacccccctgctggtgtcctaccaggagcagagcgtgcagagccagcctgaggaggaggatgaggccgaggaggaggaggccgaggagctgggccacacagagacctatgctgactatgtgcccagcaagagcaagattggcaagcagcacccagacagagtggtggagaccagcaccctgagctctgtgcccccaccagacatcacctacaccctggccctgcccagcgacagcggggccctgagcgccctgcagctggaggccatcacctacgcctgccagcagcacgaggtgctgctgcccagcggccagagagctggcttcctgattggagatggagctggggtgggcaagggccgcacagtggccggggtcatcctggagaaccacctgcggggcaggaagaaggccctgtggttctctgtgtccaatgacctgaagtatgatgctgagcgggacctgcgggacatcgaggccaccggcattgctgtgcacgccctgagcaaggtgggcgctgtgctgggcaaggtgggcggcaaggtgggcaccgtgccctgcaagatcaagtacggggacaccaccaccagcgagggcgtgctgtttgccacctacagcgccctgattggagagagccaggccggcggccagcacaggacccggctgcggcagatcctggactggtgtggggaggcctttgagggcgtcatcgtgtttgatgagtgccacaaggccaagaatgccggcagcaccaagatgggcaaggctgtgctggacctgcagaacaagctgcccctggcccgggtggtgtatgccagcgccaccggggccagcgagcccaggaacatgatctacatgagccggctgggcatctggggcgagggcacccccttcaggaactttgaggagttcctgcacgccatcgagaagaggggcgtgggcgccatggagatcgtggccatggacatgaaggtgtctggcatgtacatcgcccggcagctgtccttcagcggcgtgaccttccgcatcgaggagatccccctggccccagcctttgaatgtgtgtacaacagagctgccctgctgtgggccgaggccctgaatgtgttccagcaggccgctgactggattggcctggagagcaggaagagcctgtggggccagttctggagcgcccaccagcgcttcttcaagtacctgtgcatcgccgccaaggtgcggcggctggtggagctggcccgggaggagctggcccgggacaagtgtgtggtgattggcctgcagagcactggagaggcccggacccgggaggtgctgggggagaatgatggccacctgaactgctttgtgtctgctgctgagggcgtcttcctgagcctcatccagaagcacttccccagcaccaagaggaagagggacagaggagctggcagcaagaggaagccaggagtcatccgcatcagtgatgacagcagcacagaaagtgaccccggcctggacagcgacttcaacagcagccctgagagcctggtggatgatgatgtggtgattgtggatgctgtgggcctgcccagtgatgaccggggccccctgtgcctgctgcagagggacccccacggccctggggtgctggagcgggtggagcggctgaagcaggacctgctggacaaggtgcggcggctgggccgggagctgcctgtgaacaccctggatgagctgattgaccagctgggcggcccccagagggtggccgagatgacaggcaggaagggccgggtggtgtccaggccagatggcaccgtggcctttgagagcagagctgagcagggcctgagcattgaccacgtgaacctgcgggagaagcagcgcttcatgtctggagagaagctggtggccatcatcagcgaggccagcagcagtggagtgtccctgcaggccgacagaagagtgcagaaccagaggcggcgggtgcacatgaccctggagctgccctggagcgctgaccgggccatccagcagtttggaagaacccacaggagcaaccaggtgtctgccccagaatatgtgttcctgatcagcgagctggccggggagaggagatttgccagcatcgtggccaagaggctggagagcctgggcgccctgacccacggggacagaagagccacagagagccgggacctgagcaagtacaactttgagaacaagtatggcacccgggccctgcactgtgtgctgaccaccatcctgagccagacagagaacaaggtgcctgtgccccagggctacccaggaggagtgcccaccttcttccgggacatgaagcagggcctgctgtctgtgggcatcggcggccgggagagcagaaatggctgcctggatgtggagaaggactgcagcatcaccaagttcctgaaccgcatcctgggcctggaggtgcacaagcagaatgccctcttccagtacttcagtgacacctttgaccacctgattgagatggacaagcgggagggcaagtatgacatgggcatcctgggggagcaccgctgccggggcgtggtgtgggtggacctggcccctggcatcgaggagatctatgaggagagccagcaggtgttcctggcccctggccacccccaggacggccaggtggtgttctacaagatctctgtggaccggggcctgaagtgggaggatgcctttgccaagagcctggccctgaccggcccctatgatggcttctacctgagctacaaggtgcggggcaacaagcccagctgcctgctggccgagcagaacagaggccagttcttcaccgtgtacaagcccaacatcggccggcagagccagctggaggccctggacagcctgcggaggaagttccaccgggtgacagctgaggaggccaaggagccctgggagagcggctacgccctgagcctgacccactgcagccacagcgcctggaacagacactgccgcctggcccaggagggcaaggactgcctgcagggcctgcggctgcggcaccactacatgctgtgtggggccctgctgcgggtgtggggcagaattgctgctgtgatggctgatgtgagcagcagcagctacctgcagatcgtgcggctgaagaccaaggacaggaagaagcaggtgggcatcaagatccctgagggctgtgtgagaagagtgctgcaggagctgcggctgatggatgctgatgtgaagaggcggcaggccccagccctgggctgcccagcccccccagccccccggcccctggccctgccctgtggccctggagaggtgctggacctgacctacagccccccagctgaggccttccccccaccaccccacttctccttccctgcccccctgagcctggatgctggccctggggtggtgcccctgggcaccccagatgcccaggccgaccctgctgccctggcccaccagggctgtgacatcaacttcaaggaggtgctggaggacatgctgcggagcctgcatgctggccccccatctgagggcgccctgggggagggcgctggggccggcggcgctgctgggggcggccctgagcggcagagcgtcatccagttcagcccccccttccctggggcccaggcccccctgtag

SEQ ID NO: 40339 - DNA, 3930 bp, Artificial Sequence
  derived and/or modified sequence
atgagggagcccctgcccggcagcgcctcctggggcaccccaggcccccccagcgctggcaccatgagccagctgcagctgtggctgcagtttgaggccctgaacaaggacagcagctactttgaggacttcagcaacatcagcatcttcagcagctctgtggacagcctgagtgacatcgtggacaccccagacttcctgcctgctgacagcctgaaccaggtgtccaccatctgggatgacaacccagcccccagcacccatgacaagctgttccagctgagccggccctttgctggctttgaggacttcctgcccagccacagcacccccctgctggtgtcctaccaggagcagagcgtgcagagccagcctgaggaggaggatgaagctgaggaggaggaggccgaggagctgggccacacagagacctacgccgactatgtgcccagcaagagcaagattggcaagcagcacccagacagagtggtggagaccagcaccctgagctctgtgcccccaccagacatcacctacaccctggccctgcccagcgacagcggggccctgagcgccctgcagctggaggccatcacctacgcctgccagcagcacgaggtgctgctgcccagcggccagagagctggcttcctgattggagatggagctggggtgggcaaaggaagaacagtggccggggtcatcctggagaaccacctgcggggcaggaagaaggccctgtggttctctgtgtccaatgacctgaagtatgatgctgagcgggacctgcgggacatcgaggccactggaattgctgtgcacgccctgagcaagatcaagtatggagacaccaccaccagcgagggcgtgctgtttgccacctacagcgccctgattggagagagccaggccggcggccagcacaggacccggctgcggcagatcctggactggtgtggggaggcctttgaaggagtgattgtgtttgatgagtgccacaaggccaagaatgccggcagcaccaagatgggcaaggctgtgctggacctgcagaacaagctgcccctggcccgggtggtgtatgccagcgccactggagccagcgagcccaggaacatgatctacatgagccggctgggcatctggggcgagggcacccccttcaggaactttgaggagttcctgcacgccatcgagaagaggggcgtgggcgccatggagatcgtggccatggacatgaaggtgtctggcatgtacatcgcccggcagctgtccttctctggagtgaccttcagaattgaggagatccccctggccccagcctttgaatgtgtgtacaacagagctgccctgctgtgggccgaggccctgaatgtgttccagcaggccgctgactggattggcctggagagcaggaagagcctgtggggccagttctggagcgcccaccagcgcttcttcaagtacctgtgcatcgccgccaaggtgcggcggctggtggagctggcccgggaggagctggcccgggacaagtgtgtggtgattggcctgcagagcactggagaggcccggacccgggaggtgctgggagaaaatgatggccacctgaactgctttgtgtctgctgctgagggcgtcttcctgagcctcatccagaagcacttccccagcaccaagaggaagagggacagaggagctggcagcaagaggaagaggcggccccggggccgcggggccaaggccccccggctggcctgtgaaacagctggggtcatccgcatcagtgatgacagcagcacagaaagtgaccccggcctggacagcgacttcaacagcagccctgagagcctggtggatgatgatgtggtgattgtggatgctgtgggcctgcccagtgatgaccggggccccctgtgcctgctgcagagggacccccacggccctggggtgctggagcgggtggagcggctgaagcaggacctgctggacaaggtgcggcggctgggccgggagctgcctgtgaacaccctggatgagctgattgaccagctgggcggcccccagagggtggccgagatgacaggcaggaagggccgggtggtgtccaggccagatggcaccgtggcctttgagagcagagctgagcagggcctgagcattgaccacgtgaacctgcgggagaagcagcgcttcatgtctggagagaagctggtggccatcatcagcgaggccagcagcagtggagtgtccctgcaggccgacagaagagtgcagaaccagaggcggcgggtgcacatgaccctggagctgccctggagcgctgaccgggccatccagcagtttggaagaacccacaggagcaaccaggtgtctgccccagaatatgtgttcctgatcagcgagctggccggggagaggagatttgccagcatcgtggccaagaggctggagagcctgggcgccctgacccacggggacagaagagccacagagagccgggacctgagcaagtacaactttgagaacaagtatggcacccgggccctgcactgtgtgctgaccaccatcctgagccagacagagaacaaggtgcctgtgccccagggctacccaggaggagtgcccaccttcttccgggacatgaagcagggcctgctgtctgtgggcatcggcggccgggagagcagaaatggctgcctggatgtggagaaggactgcagcatcaccaagttcctgaaccgcatcctgggcctggaggtgcacaagcagaatgccctcttccagtacttcagtgacacctttgaccacctgattgagatggacaagcgggagggcaagtatgacatgggcatcctggacctggcccctggcatcgaggagatctatgaggagagccagcaggtgttcctggcccctggccacccccaggacggccaggtggtgttctacaagatctctgtggaccggggcctgaagtgggaggatgcctttgccaagagcctggccctgaccggcccctatgatggcttctacctgagctacaaggtgcggggcaacaagcccagctgcctgctggccgagcagaacagaggccagttcttcaccgtgtacaagcccaacatcggccggcagagccagctggaggccctggacagcctgcggaggaagttccaccgggtgacagctgaggaggccaaggagccctgggagagcggctacgccctgagcctgacccactgcagccacagcgcctggaacagacactgccgcctggcccaggagggcaaggactgcctgcagggcctgcggctgcggcaccactacatgctgtgtggggccctgctgcgggtgtggggcagaattgctgctgtgatggctgatgtgagcagcagcagctacctgcagatcgtgcggctgaagaccaaggacaggaagaagcaggtgggcatcaagatccctgagggctgtgtgcggcgggtgctgcaggagctgcggctgatggatgctgatgtgaagaggcggcaggccccagccctgggctgcccagcccccccagccccccggcccctggccctgccctgtggccctggagaggtgctggacctgacctacagccccccagctgaggccttccccccaccaccccacttctccttccctgcccccctgagcctggatgctggccctggggtggtgcccctgggcaccccagatgcccaggccgaccctgctgccctggcccaccagggctgtgacatcaacttcaaggaggtgctggaggacatgctgcggagcctgcacgccggcccccccagcgagggcgccctgggggagggcgctggggccggcggggccgccggcggcggccctgagcggcagagcgtcatccagttcagcccccccttccctggggcccaggcccccctgtag

SEQ ID NO: 40340 - DNA, 4155 bp, Artificial Sequence
  derived and/or modified sequence
atgagccagctgcagctgtggctgcagttcgaggccctgaacaaggggatggcccccggcagcccgcagactcgtgccgcccaatcatcttgctccatcgccgccctgcaagtcctgcaaaagagcgatgctgttttgagaggtcctgaggatagcagctactttgaggatttttctaacatttctatattttccagtagcgtggatagcctctctgatatcgtggatactcctgattttctccctgctgacagcctcaatcaggtgtctacaatctgggacgacaacccagctccatctactcatgacaaagtgtcggccccaggagcaccgtctcagccccgccctacctccgttgcgagccccgcccgcgacccgcacggacctgtaaggcttcgaggaccaacatcctgtgacctcagccggctggcccgggccgatatcctgctgccatttcaattgttccaactcagccgacctttcgcgggcttcgaagacttcctcccatcccattctacacctcttttggtgtcttaccaagagcaatctgtgcagtctcagcccgaagaggaggacgaagcggaagaagaggaggcggaagaattggggcacaccgagacgtatgctgactatgtgccttcaaaatcaaaaattggtaaacagcatcccgatcgagtcgtagaaacatctactctctcatccgtcccacccccggatattacctacactcttgcacttcctagcgatagtggagccctgtccgccttgcagttggaagctattacctatgcctgccaacagcatgaagtgctgttgcccagcggtcaaagggccgggttcttaatcggagacggggccggcgtgggcaaagggcgaactgtggccggtgtgattctagagaaccacctgcggggacggaagaaagccctgtggtttagcgtctccaatgatctgaagtacgacgctgagcgtgatctgcgggatattgaagcgaccggaatcgcagtgcacgcattatcaaaggtgggagcagtgctcggcaaagtcgggggaaaagtgggcacagtgccatgcaaaattaaatatggggataccacaacatccgagggagtgttgttcgccacgtactccgccctgattggagagtctcaggccgggggacagcacaggacgcgactccggcaaatcctcgattggtgtggagaggcctttgagggagtgatcgtcttcgatgagtgtcataaagcaaagaacgcaggctctaccaaaatgggcaaagcggtgctggatctacagaacaaactccctcttgcacgcgtcgtttatgcctctgcgactggcgcctctgagccgaggaacatgatatacatgagccgtctgggtatttggggtgagggcaccccctttcgaaatttcgaggaatttcttcatgccatcgagaagcgcggggtgggagctatggagattgtcgccatggatatgaaggtgtcagggatgtacatcgccagacagcttagcttttcaggagtcacctttcgcatcgaagagattccacttgcccctgcttttgagtgcgtgtacaacagagctgcgctgctgtgggccgaagcattgaacgttttccagcaggcagctgattggattggcctagaaagccggaagagtttatggggccagttttggtcggcacaccagcgattctttaaatatctctgcatcgctgcaaaagttagaaggctcgtagagttggcccgggaagaactggcgagggacaagtgtgttgtgatcggactccagtcaacaggtgaagctcgaacgcgtgaggtgctgggcgaaaacgacggtcatcttaactgttttgtctcagctgcagaaggcgtctttctcagcctgattcagaaacactttccaagcactaaaaggaagagagaccgcggggcaggttccaagcgtaagccaggagtgattaggatttccgacgattcgtcaactgagagcgatccaggtcttgacagcgactttaactcctcgcctgaatccctcgtcgacgatgatgtggtaatcgttgatgccgtgggtctgccctctgacgaccgcggaccactgtgcctcctgcagagggatcctcatggaccaggagtcctcgagagagtcgagagactgaaacaggatctgctggacaaggtgcggaggttgggccgtgaactgcctgtgaataccctcgacgagttgatcgatcagctgggcggcccgcaacgcgtggccgagatgactggcagaaaaggtagagtcgtctccagacccgatggaactgtcgccttcgagtcaagagcagaacaaggcctctccatcgatcatgtgaatcttcgagaaaagcagcgcttcatgtccggtgagaaattggtggctattatttcagaggcatcaagttcaggggtctcactgcaggctgatcggcgggtgcaaaaccagcgcagaagggttcacatgacactggaattgccttggtccgctgatcgagccattcagcagtttggacgtacacatcgctcaaaccaagtatctgcacctgagtacgtgtttcttatctcggagctggcaggagaacggaggtttgcgtcaatcgttgccaagcgcctggaaagtctgggggctctgacacatggggaccggagagctactgagtcgagggacctttctaaatacaactttgagaataaatacggtacacgtgccttgcattgtgtcctgaccactattttgtcacagacggaaaataaggtgcccgtgcctcagggctacccaggcggcgtgcctaccttttttcgtgatatgaagcagggcctcctgtctgttggaattgggggacgggagtctagaaacgggtgtctcgacgtagaaaaggactgtagcatcactaaatttttgaatcgaattcttggcctggaggtccacaaacagaacgcactcttccagtacttttccgacacatttgaccatctaatagaaatggataagcgggagggcaaatacgatatggggatcctgggagagcataggtgcagaggcgttgtctgggtcgacctagcaccgggtatcgaagagatctatgaggagagtcagcaagtgttcctggcgccgggtcatcctcaggacggccaggttgtcttctataagatttcagttgatcgcggcttgaagtgggaagatgcctttgccaagtctcttgccctgactggaccctacgacgggttctacctaagctataaggtccgaggaaataagccgtcttgtttgctcgcagagcagaatagaggacaattcttcacagtttataagcctaacatcggacgacaaagccaactggaggctctggattcgcttcgcagaaagtttcatagagttacagccgaagaggccaaagaaccttgggagtcaggctatgccctttcccttactcattgcagccattccgcatggaataggcattgtagacttgcccaggagggcaaggactgtttacagggcctacgtcttaggcaccactatatgctctgcggcgctctcctgagagtgtgggggcggatcgctgcagtgatggctgacgtcagtagcagctcttacctccagatcgtgagactgaagacaaaagatcgcaagaaacaggtgggaatcaagatcccagagggctgtgtgcgtcgcgtattgcaagagctcagactgatggacgctgacgtcaagcgccgacaggcgccggcactgggatgccccgctcccccagcaccgcggcccctggctctgccttgtggacctggggaagtgctggatttaacctatagtccgcctgcagaggcattccctcccccccctcatttcagtttccccgcacctctgtcgctggacgccgggccaggcgtcgttccgttagggacaccagatgcccaggcagatcctgccgcactggcccaccagggctgcgacatcaactttaaagaggttttggaagatatgcttcgaagcctccacgctgggccacccagcgagggagctctgggtgagggtgccggagctgggggggccgccggcggtgggcccgagcgccagtctgttatccagttctcaccacccttccccggggctcaggcgcctctgtag

SEQ ID NO: 40341 - DNA, 3930 bp, Artificial Sequence
  derived and/or modified sequence
atgcgggagcccctgcccggcagcgccagctggggcacccccggcccgccatcagcaggcacaatgagtcagcttcagctgtggctgcagttcgaagcacttaacaaggattccagttatttcgaggacttctcgaacatttccatcttttcttcctccgttgactccctgagtgatatcgtcgacactccagatttcctaccggccgactctctcaaccaagtgtcaactatttgggatgataaccccgcccctagtacccatgataaactgtttcagttatcccgcccctttgctggatttgaagactttttgccaagccacagcacccccctcctggtcagttaccaggaacagtcggtgcaaagccagccagaggaagaggatgaggcggaggaagaagaggccgaggagctcggccacactgaaacatacgcagattacgtgccatcaaagtccaaaattggaaaacaacacccagatagggtggtcgagacctcgaccttgtcctctgtgcccccacctgacatcacttatacattggccctcccatctgattcgggcgctcttagcgcactacagctagaagccatcacatatgcctgtcagcagcatgaagtgctgcttccttccggtcagagagctggcttccttattggagacggggccggggtcggcaaaggcagaactgttgccggagtgatcctcgagaatcaccttcgcggacgcaagaaagctctttggttctcggtgtccaatgatttgaagtacgacgccgagcgtgacttgcgtgacattgaagcaacgggaatcgcagtgcacgctctgtctaaaattaagtacggcgacactacaacctccgagggcgtgctgttcgctacttactcagccctcatcggggagtcgcaggctggcgggcaacacagaaccaggttaaggcagattcttgattggtgtggggaagccttcgaaggcgtaatcgtgtttgatgaatgtcacaaggccaaaaacgctggttctaccaagatgggcaaagcagtgctggacctgcagaacaagctgccgcttgcaagggtagtgtacgcctcagctaccggggcatctgagcctagaaatatgatttatatgtctcgcctagggatttggggggaaggaactccgtttagaaacttcgaggaattcctgcacgccattgaaaaacggggcgtcggtgcaatggaaatcgttgcaatggacatgaaggtttccgggatgtatattgctaggcagttgagcttttctggtgtcactttcaggattgaggaaattcctctggccccagcctttgagtgtgtctataaccgcgctgctttgctgtgggctgaggcactgaatgttttccaacaggccgctgactggatcggcctcgagagtcgaaagtcgctttggggacaattctggtccgcccatcagaggttttttaaatacttgtgcatcgcagcaaaggttcgacgccttgtcgaactcgctcgggaggaattagcgcgcgataagtgcgtcgtaatcgggcttcagagcactggtgaggcccgaactcgcgaggttctgggcgaaaatgacgggcacctcaactgcttcgtgtctgcggctgaaggggtgtttctgtctttgattcagaagcacttcccatcaactaagcgcaaacgggatcgtggcgcagggtcgaagcggaagaggagacccagaggaagaggggcgaaggccccccgcctggcctgcgagacagccggggtaattcgaatatcggatgactctagtactgagtccgatcccggtcttgattccgattttaacagcagccccgagtccctcgtggatgatgacgtggtaattgttgatgcagtgggcctcccatcggatgatcgcggacctctgtgtttgctccagcgcgatccacatgggcccggagtgctggaaagggtggaacggttgaaacaagatctcctggacaaagtcagaagactaggtagagaactgccagtgaatactttggacgagctaatagatcagctcggaggccctcagcgcgtggcagaaatgacaggcagaaagggacgtgtggtgtcgcggcccgacggcaccgtagcttttgagagccgggcggagcaggggcttagcatcgatcatgtgaacctcagagagaaacagcggtttatgtccggcgaaaaactggtggcaattatttccgaggcatctagttcgggtgtatcactacaggccgatcgcagagtgcagaaccagaggaggcgagtgcacatgacactagagctgccttggagcgccgacagggccatccagcagtttgggagaactcacaggtctaatcaggtatccgcccccgaatatgtctttctcatatcagagttggcaggagaacggagatttgcatccatcgtcgccaaacgcctggaatcactcggcgcccttacgcatggtgaccggagagctaccgaatcccgggacttgagtaaatataactttgagaataaatatggtacgcgggcgctccattgcgtcttgaccacaattttgtcacagactgagaacaaggtccctgtgcctcaagggtatcccggcggggttcctacctttttcagagacatgaagcagggccttctgagtgttggaatcggaggcagagagtccagaaacgggtgcctcgatgttgaaaaagattgctcgataaccaagtttctgaaccggattctaggccttgaggtccataaacagaacgcactttttcagtatttttctgatactttcgatcacctcattgaaatggataaacgagagggcaaatacgacatggggatactggatctggcgcccggcattgaggaaatctatgaggaaagccagcaggtatttctggcacccgggcacccccaggatggccaggttgtgttctacaaaatatcagttgaccggggattgaagtgggaggatgctttcgctaaaagcctggccctgaccggtccatacgatggattctacctttcttacaaggttcgcggaaacaaaccctcgtgcctattggccgagcagaaccgggggcagttttttactgtgtacaagcccaatataggtcgacagtcccagcttgaggcacttgattcgctgcgtcgcaaattccacagggtcaccgctgaggaggctaaggaaccgtgggagtcaggatatgccctctcacttacccactgttcacactctgcctggaatagacattgcagattagcccaggaaggtaaggattgcctgcagggactcaggctccggcaccactacatgctctgcggagccctgctgcgggtgtgggggcggatcgccgcggtgatggctgacgtctccagttccagttatctccaaatagtaagactgaaaactaaagaccgcaagaagcaggtgggcatcaagatccctgagggctgcgtccgacgtgttttacaggagctacgactgatggatgctgatgtgaagagacgacaggccccagccctggggtgccccgcacctcccgctccccggcctttggcactcccgtgcgggccaggggaggtgctcgacctgacctacagtcctcccgcagaggcttttccacctcctcctcacttctcctttcctgccccattgtctctggatgcgggacctggagtggtgcctcttggtacccccgacgcacaggcagatccagctgctctcgcacaccagggttgcgacatcaactttaaagaggtcctggaggacatgcttcgaagccttcacgcaggacccccaagcgaaggggctttgggcgaaggagctggagcaggcggagccgctggcggtggacccgaacgccagtctgtgattcagttttcgcctccgttccccggtgcccaggcaccactatag

SEQ ID NO: 40342 - DNA, 4155 bp, Artificial Sequence
  derived and/or modified sequence
atgagccagcttcagttgtggctgcagtttgaagctttgaacaagggtatggctccaggaagcccgcagacccgagctgcacagtcctcttgcagtattgctgcactccaagtcctccagaagtcagacgccgtactacggggaccggaggatagtagttacttcgaggacttttccaacattagcattttctcttcttcagtggattcgctttccgatatcgttgacacgcctgactttctgccagctgactccctaaaccaggtgtcaacaatctgggacgacaaccccgcaccaagtacacatgacaaggtgtcagcaccgggagccccttctcaacctcgccctacctcagtggcttctcctgcaagagacccgcacggccctgtgaggctgcgaggcccaaccagctgcgacctgtcccggctcgccagagctgacatcctcctaccttttcagcttttccagttgtcccggcctttcgcaggatttgaggatttcctcccttcccattctaccccactcttagttagctatcaggaacagtctgtgcaaagccagcctgaagaggaggatgaagccgaggaagaggaggccgaggagctgggtcatacagagacctacgcggactacgtgccgagcaaaagtaaaataggcaaacagcatccggatagagtggtggaaacgagcacattgagctccgttcccccaccagacatcacctacaccttggcgctcccttccgactcgggtgcactgtccgcactgcaattggaagccatcacatacgcatgccaacagcatgaagtattgcttcccagcggtcaacgtgcagggttcttaatcggggacggtgcaggcgttggcaagggcagaactgtcgcaggagtgattctggaaaaccacctgaggggcagaaagaaggccttatggttctccgtttccaatgacctcaaatacgacgctgaaagggatcttagggatatcgaggcaacgggtattgctgtccatgcgttgtccaaagtcggagccgtgctgggaaaggttggagggaaagtggggacggtgccgtgcaaaattaaatatggcgatacaactaccagcgagggtgttctcttcgcgacatacagtgccctgatcggggagtcccaggctgggggacagcaccggacacgacttcggcagattctcgattggtgtggtgaggcatttgaaggcgtcatcgtgttcgatgaatgccacaaagctaaaaatgctggttccacaaagatgggcaaagccgtgctggatttgcaaaacaagttacctttagctagggtagtgtatgccagtgcaaccggggcttccgaacccaggaacatgatctacatgtcccggctcggcatctggggagagggaactccttttaggaattttgaggagttcctgcacgccattgagaagcgtggagtcggagctatggagattgtagccatggacatgaaggtgagtggtatgtacatcgcccgtcagctgagtttttctggagtgacctttcggatcgaagaaattcctctggcccctgctttcgaatgcgtttacaatagggccgctctgctctgggctgaagcattgaatgtattccaacaggctgccgactggatagggttggaatctcgtaagtcgctgtgggggcaattctggtctgcccatcagaggttcttcaagtacctgtgtattgccgctaaggtcaggcgcttggttgagctggcaagagaagaacttgcacgggataagtgtgtggtgattgggttgcagagcactggagaagctagaacaagagaggttctgggcgaaaacgacggtcacctcaattgttttgtttccgccgctgaaggagtcttcctgagcttgatccaaaaacacttcccaagcacaaaacggaaaagggataggggggctggctctaaacgcaaacccggagtaatccgcatttcggacgattctagtactgagtccgatcctggactggacagcgactttaattcctccccagagtcattagtggacgatgacgtggttatcgtggacgccgtcgggctcccatctgacgatcgaggtccattatgtctgctgcagagagaccctcatggccctggcgtgctggagcgggtagagaggctcaaacaggacctgctggataaagtgcggagactgggcagagaactgcccgtgaataccctggacgagctgatcgatcagctagggggaccacaacgggttgcagagatgaccgggagaaaagggagggtcgtgtctcgtcccgacgggaccgttgcatttgagagcagagccgagcaaggcttgtcgatcgatcacgtgaatctacgtgagaagcagcgtttcatgtccggagagaagttggttgcgatcatttccgaagcatccagcagtggcgtaagcctgcaggcggaccggcgtgtccagaaccagcggaggcgcgttcatatgaccctggagctcccatggtctgctgaccgggcaatacaacagtttggccgaacgcataggtccaatcaggtttcggccccagaatacgtgtttttaatctcggagctggccggtgagagaaggttcgcatcgattgtggccaagcggctcgaaagcctcggagcactcacccacggggatcgtagggcaactgaatcacgcgatctgagtaagtataacttcgagaataaatatggcacacgggcactccattgtgtgctaacgacgattctgtcccagaccgaaaacaaggtgccggttccccagggctaccccggaggtgttcctactttttttcgcgatatgaaacagggcctcctctctgtcgggattggcggacgggaaagccggaatggctgtttagacgttgagaaagactgttccattactaagttccttaatcgcattctggggctagaggtacataagcaaaatgcattattccagtacttcagcgataccttcgatcaccttattgagatggataagagagaaggtaagtatgacatgggtatcttaggagagcaccggtgccgcggagtcgtatgggtggacctcgccccaggaatcgaggagatctatgaggaatcccagcaagtgttcctggccccaggtcatcctcaggacggacaagtggtcttctacaaaatttctgtggaccgcggtctcaaatgggaagacgcctttgcgaagagcttggctctaacgggtccttacgacggcttctatttatcatacaaagtccgcggaaacaagccctcttgtctcctagccgagcagaaccgcggtcagttctttaccgtctacaagcccaacatcggtcgtcaatcacaactggaagccctagatagtctcagaaggaagtttcacagggttaccgccgaggaagcaaaggagccatgggaatcaggatatgctctatccctgacccattgtagtcacagcgcttggaacaggcactgcaggctcgcacaagaaggcaaggattgccttcagggtcttaggttacggcatcactatatgctctgcggtgccctgttgcgagtgtggggtaggatcgccgctgtcatggctgacgtttccagttcctcctacctgcagattgtgagactgaagacgaaggaccggaagaagcaggtaggtataaagattcccgagggatgcgtacgcagagtcctccaggagctgcggctgatggacgctgatgttaaaagacgacaggccccagcgctcggctgtccggctccaccggcaccacgccctctcgcactaccatgcggcccaggcgaggtgctggatctcacttactctccaccagccgaggcatttccacctccccctcacttttccttccccgcacctctgagtcttgacgccggacccggtgtggtccctctcggaacgccagatgcccaggcggatcccgcagcgctggcccaccaagggtgcgatattaatttcaaggaagtcctcgaggatatgctaaggtccctgcacgcaggacctccaagcgagggcgcactaggcgagggggcaggtgctggcggagcggctggaggaggaccagagcgccagtctgttatccaatttagtccgccttttcctggcgcacaggcgccactgtag

SEQ ID NO: 40343 - DNA, 3930 bp, Artificial Sequence
  derived and/or modified sequence
atgagagagcccctgcctgggtccgccagttgggggacccccggaccaccgtccgctggcactatgtctcaactccagttgtggctgcagtttgaggctctgaacaaggatagtagctatttcgaggatttttctaacatcagcatattttcctcatcagttgacagtctgagtgacatcgtagacacgcccgacttcctgcctgcggattctttaaatcaggtgagcacaatatgggacgacaatccggcaccctctacgcatgacaaattgtttcagctgtcccgcccattcgccggtttcgaggattttctaccctcccactccacccctctgctagtcagctatcaggagcagtccgtccagagccagcccgaggaggaagacgaggctgaggaggaagaggctgaggaactaggccatactgagacatatgctgactacgtgcctagtaagtcaaagatcgggaagcagcatccagatcgagtagtcgagacgtccactctcagttccgttcctccacccgatatcacgtataccttagccctgccttccgactctggtgcgctcagtgctttgcaactcgaagctattacctatgcttgccagcagcatgaagtactgctcccatctggccagagggccggttttctgataggcgacggtgccggtgtgggaaagggacgcactgtggcaggggtgatcctggagaatcaccttagaggacgtaaaaaggctttatggtttagtgtgagcaacgacctgaagtacgatgccgagagggatctgagagatattgaggctaccggcatagccgtgcatgcgctgagcaagatcaaatacggagacaccacaacctccgagggagtgctttttgctacatatagcgctttaataggggagagtcaggcaggaggtcaacatcgcacaagactcaggcagatactcgactggtgcggagaagcctttgagggtgtgatcgtgttcgatgaatgtcacaaagcaaagaatgctggctctacgaagatgggtaaagcggtgctggacctgcagaacaagttgccactggctagagtggtgtacgccagcgcaacgggcgcatcagaaccaagaaacatgatatacatgagcaggctagggatttggggcgagggaaccccatttcgcaactttgaagaattccttcacgcaatcgagaaacgtggcgtaggggcaatggagattgtcgccatggacatgaaagtgtccgggatgtacatcgctaggcagctgagcttctctggcgtgaccttcaggatcgaagaaatacccctggcacccgcatttgaatgcgtgtataacagagcagctctcctctgggcggaagcgctgaatgtattccagcaggccgcagattggatcggcctggagagtcgcaagagcctgtggggccagttttggtccgcgcaccaacggttctttaaatacctgtgcatagctgccaaggttcgtcggctggtcgaactcgctcgggaggagcttgcaagggacaaatgtgtggtgatcggcctccaatctacaggggaggcgcgaacgagagaagtgctcggtgagaacgatggtcacctgaactgcttcgtgagtgccgcagaaggcgtttttctgtctttgatccagaagcatttccccagcaccaaacgaaagcgtgaccgaggcgcaggttccaagagaaagcgtagacctcgaggacggggtgctaaagcccctaggctcgcatgcgaaacggctggtgttattcgaatatccgacgactcaagcactgaaagtgatcctgggctggatagtgactttaactccagccccgagtctcttgtcgacgacgacgttgttatcgttgacgcagtgggactgccctctgacgaccggggacccctctgtttactgcagcgcgacccacacggcccaggcgtgctcgagagggtcgagcgcctgaaacaggacctcctggacaaagtgcggcgtctggggcgagagcttccagtgaacaccctggatgaactcatcgaccagcttggcggtccccagagagtagcagaaatgacaggacgtaagggccgagtagtgtccaggccagacgggactgtggcctttgagtcgagggcagaacagggactgagcattgatcacgtgaatctacgggagaagcagcgttttatgtcgggagagaagttagttgccatcatcagcgaagcctcgtccagcggagtgagcctgcaggctgatcgtcgcgttcagaaccaacggagacgagttcacatgactctggaattaccatggagcgcagatagggccatccagcagttcggtcgcacgcaccggagtaaccaggtgagtgccccagaatatgtgtttctgatcagcgagttagccggtgagcgccgttttgcttctattgtcgctaagagactggagtctctgggggctttgacccatggcgacaggagggccacagaatcaagagacctgtctaaatataatttcgagaataaatacggcactcgagcactccactgcgtcttgaccacaatcttgtctcaaacggagaacaaggtgcccgttccacagggctaccccggtggggtcccgacattcttccgagacatgaaacaaggactgctcagcgtgggcatcgggggacgggagtctcggaatgggtgtctggacgttgaaaaagactgcagtattacgaagtttctgaatcgcattctggggttagaggtgcacaaacaaaacgccctgtttcagtactttagcgacaccttcgatcacttaatagagatggataagcgggaaggcaagtatgatatggggattctggatttggccccagggattgaagaaatctacgaagaaagccagcaggtcttcctggctcccggacaccctcaggatggacaggtcgtgttttataagattagtgttgataggggattaaagtgggaggatgccttcgcgaagtcactcgcactaaccggtccctacgacgggttttacttgagttataaggtgaggggcaataagcccagttgcctcctggccgagcagaatcgcggacagttctttacagtgtataaacccaatattggcaggcaatcgcaattggaagccctagattcccttaggcgcaagttccatagagtgacggcagaagaggctaaagagccatgggaaagcgggtatgccctgtccctgactcactgctcccatagtgcatggaataggcactgtagactagcacaggagggcaaggactgcctgcaaggcctccgattacgacatcattatatgctatgcggcgctcttctgcgcgtgtggggcaggatcgctgccgttatggcagatgtgagcagttcgtcctatttgcagatcgtaaggttaaagaccaaagaccgaaaaaaacaggtgggaataaagatcccagaagggtgtgtcagaagggtgttacaggaactccgtttgatggacgctgatgtgaagcggcgtcaggctcccgcattgggctgtccagccccacccgctcctcgacccctagctctcccttgcggcccaggggaggtcctagacctgacctatagcccacccgctgaggcatttcctcctccccctcatttctcttttcccgcacccctctccttagatgccggtcccggagtcgtcccgctaggtactccggacgcgcaagcggaccctgcggctctggcccaccaaggctgtgacatcaacttcaaagaagttctcgaagacatgctgagatcgctgcatgctggaccccctagcgaaggcgcactgggggaaggcgcaggcgctggcggtgccgcaggtggcggaccggaaagacagtctgtgatccaattttcaccgccatttcccggagctcaagcccctctctag

SEQ ID NO: 40344 - DNA, 4716 bp, Artificial Sequence
  derived and/or modified sequence
atgtcccagctgcagctgtggctgcagtttgaggctctgaacaagggcatggcaccaggctcaccccagacccgagctgctcagagttcctgcagcattgctgcccttcaggtgctgcagaagtcagacgccgtcctgcgtggccctgaggactcctcctattttgaggacttctccaacatctccatcttctcctcgtccgtggactccctgtcggacatcgtggacacgcccgacttcctgccggctgacagcctcaaccaggtgtccaccatctgggacgataaccctgccccctccacccacgataaggtcagtgcgcccggtgcccccagccagccccgacccaccagcgtggcctccccagcccgggacccacacggtccagtgaggctgcgagggcccaccagctgtgacctgtcccgtctggcccgggctgacatcctgctccccttccagctgttccagctcagcaggccgtttgcaggcttcgaggactttctgccctcccacagcaccccgcttctcgtcagctaccaggagcagagtgtgcagagccagccagaggaggaggacgaggctgaggaggaggaggcggaggagctggggcacacagagacctacgccgactacgtgccgtccaagtccaagatcgggaagcagcacccagaccgcgtggtggagaccagcacactgtccagcgtcccacccccagacatcacctacaccctggccctgccctcggacagcggggccctgtctgccctgcagctagaggccatcacctacgcctgccagcaacacgaggtcctgctccccagcgggcagcgcgcgggctttctcatcggcgatggggccggcgtgggcaaaggccggacggtggccggagtcatcctggagaaccacctgcgcggccggaagaaagcattgtggttcagcgtctccaacgacctcaagtacgatgcggagcgcgacctgcgggacatcgaagccacgggcatcgcggtgcacgcgctcagcaaggtaggggctgtgctcggcaaagtagggggcaaggtggggaccgtgccctgcaaaatcaagtacggtgacaccactacctcagagggcgtcctcttcgccacctactccgccctgattggggagagccaggccggcggccagcaccgcactcgcctccggcagatcctggactggtgtggggaggccttcgagggcgtcatcgtgttcgacgagtgtcacaaagccaagaatgccggctccaccaagatgggcaaggctgtgctagacctgcagaacaagctgcccctggcccgcgtggtctacgccagcgccacaggtgcctctgagcctcggaacatgatctacatgagccgcttgggtatctggggcgagggcacacccttccggaactttgaggagttcctgcacgccatcgagaagaggggcgttggcgccatggagatcgtggccatggacatgaaggtcagcggcatgtacatcgcacgccagctcagcttctccggcgtcaccttccgcatcgaggagatcccgctggccccagccttcgagtgcgtctacaaccgcgcggccctgctgtgggccgaggccctgaacgtgttccagcaggcggccgactggatcggcctggagtcgcgcaagtccctgtggggccagttctggtcggcacaccagcgcttcttcaagtatctgtgcatcgcagccaaggtgcgccggctggtggagctggcccgagaggagctggcgcgagacaagtgcgtggtcatcgggctgcagtccacgggcgaggcgcgcacgcgggaggtgctgggggagaacgatgggcacctcaactgcttcgtctcggccgctgaaggcgtgttcctgtcgctaattcagaagcactttccgtccaccaagagaaagcgggacagaggagcgggcagcaagcggaaaccgggcgtcatccgcatcagtgacgacagcagcacggagtcggaccctggcctggacagcgacttcaactcctcccccgagtccctggtggatgacgacgttgtcatcgttgatgcagtcgggctccccagtgacgaccggggacccctgtgcctcctgcagagagacccgcatggccccggggtcctggagcgggtggagcggctgaagcaggatctgctggacaaagtgcggcggctgggccgggaactgccagtcaacaccctggacgagctcatcgaccagctgggcggcccccagcgggtggcggagatgaccggcaggaaaggccgcgtggtgtccaggcccgacgggacggtggccttcgagtcgcgggcagagcagggtctgtccatcgaccacgtgaacctcagggagaagcagcgcttcatgagcggcgagaagctcgtggccatcatctcggaggcctccagctcgggtgtctccctccaagccgaccgccgtgtccagaaccagcggcgccgcgtgcacatgaccttggagctgccgtggagcgccgaccgcgccatccagcagttcggccgcacccaccggtccaaccaggtctccgcgccagagtatgtcttcctcatctcggagctggccggggagcgccggttcgcctccatcgtggccaagcgcctggagagtctgggggccctgacccacggagaccgccgcgccacggagtcccgtgacctcagcaagtacaactttgagaacaagtatggcacccgggccctgcactgtgtcctcaccaccatcctgagccagactgagaacaaagtgcctgtgccccagggataccctggaggggtccccaccttcttccgggacatgaagcagggcctgctgtctgtgggcattggtggccgggagtcccggaatggctgcctggacgtggagaaggactgttccatcaccaagttcctgaaccgcatcctggggctggaggtgcacaagcagaacgccctgttccagtacttctcagacaccttcgaccacctcatcgagatggacaagcgggagggcaaatacgacatgggcatcctgggtgagcacaggtgccggggtgtggtgtgggtggaccttgctcccggtatcgaggagatctacgaggagagccagcaggtgttcctggctcccgggcacccgcaggacgggcaggtggtcttctacaagatcagcgtggaccgcggcctgaagtgggaggacgcctttgccaagtcgctggcgctgacgggcccctatgacggcttctacctctcctacaaggtccgcggtaacaagcccagctgcctgctggcggagcagaaccgcggccagttcttcacggtgtacaagcccaacatcggccggcagagccagctggaggccctggacagcctccgccgcaagttccaccgggtcaccgcggaggaggccaaggagccctgggagagtggctacgctttgtcgctgacgcactgcagccacagcgcctggaaccggcactgccggctggcgcaggagggtaaggactgcctgcaggggctgcggctgcggcaccactacatgctgtgcggcgcgctgctgcgcgtgtggggccgcatcgccgccgtcatggccgacgtcagcagcagcagctacctgcagatcgtgcggctgaagaccaaggacaggaagaagcaagtgggcatcaagatccccgagggctgcgtgcgccgggtgctgcaggagctgcggctgatggatgcggacgtgaagcgcaggcaggcgcccgccctgggctgccccgccccgcccgccccgcgcccgctggcgctgccttgcggccccggagaggtgctggacctcacctacagccccccggccgaggccttcccgccgcccccgcacttctctttcccggcgccgctgtccctggacgccggccccggcgtcgtgccgctgggcacccccgacgcccaggccgaccctgcggccctcgcgcaccagggctgcgacatcaacttcaaggaggtgctggaggacatgctgcgctcgctgcacgcggggccgccctccgagggcgcgctgggggagggcgcgggggcggggggcgcggcgggcggtggtcccgagcggcagagcgtgatccagttcagcccacccttccccggcgcccaggctcctctctgacacgcctttaggcgaaacatgccccaagacacagggaccgtttctcccctaggagcagcggtggggagcagggccaaggtcccctgaccactgctcagaggagccctaggccctggccgcagtgccttcagcgcccgacccgggcccccacctggtcagccctggcggggcccactcaggacagctgggggccggggcgtggcagggccctctctgtgcctctcctcccaagtaggaaggggctccgggtggctgctctgggactgggcacccacaagggctcagtgggcccaaacccttgaaatccgtgaaaccgggtggtcccaagagctagaaactcaggaaaccccaggtgctcagggccccgcgtctcgggggctccgtggggcagacccctgctaatatatgcaattctccctcccccagcccttccctgacccctaagttattgcccgctcacctctcccaggccccaggccgcggagctggcagggtggcgcctgcggtttctatgtatttatagcaagttctgatgtacatatgtaaaggacttttttaaat

SEQ ID NO: 40345 - DNA, 4592 bp, Artificial Sequence
  derived and/or modified sequence
gacatgcaaatgcagccgggcggagagccgcccccgtccgccccggccgacccaatgctggggctgctgccgcggtcatgagggagccgctcccgggcagcgcttcctgggggacccctggccccccgagcgccgggaccatgtcccagctgcagctgtggctgcagtttgaggctctgaacaaggactcctcctattttgaggacttctccaacatctccatcttctcctcgtccgtggactccctgtcggacatcgtggacacgcccgacttcctgccggctgacagcctcaaccaggtgtccaccatctgggacgataaccctgccccctccacccacgataagctgttccagctcagcaggccgtttgcaggcttcgaggactttctgccctcccacagcaccccgcttctcgtcagctaccaggagcagagtgtgcagagccagccagaggaggaggacgaggctgaggaggaggaggcggaggagctggggcacacagagacctacgccgactacgtgccgtccaagtccaagatcgggaagcagcacccagaccgcgtggtggagaccagcacactgtccagcgtcccacccccagacatcacctacaccctggccctgccctcggacagcggggccctgtctgccctgcagctagaggccatcacctacgcctgccagcaacacgaggtcctgctccccagcgggcagcgcgcgggctttctcatcggcgatggggccggcgtgggcaaaggccggacggtggccggagtcatcctggagaaccacctgcgcggccggaagaaagcattgtggttcagcgtctccaacgacctcaagtacgatgcggagcgcgacctgcgggacatcgaagccacgggcatcgcggtgcacgcgctcagcaagatcaagtacggtgacaccactacctcagagggcgtcctcttcgccacctactccgccctgattggggagagccaggccggcggccagcaccgcactcgcctccggcagatcctggactggtgtggggaggccttcgagggcgtcatcgtgttcgacgagtgtcacaaagccaagaatgccggctccaccaagatgggcaaggctgtgctagacctgcagaacaagctgcccctggcccgcgtggtctacgccagcgccacaggtgcctctgagcctcggaacatgatctacatgagccgcttgggtatctggggcgagggcacacccttccggaactttgaggagttcctgcacgccatcgagaagaggggcgttggcgccatggagatcgtggccatggacatgaaggtcagcggcatgtacatcgcacgccagctcagcttctccggcgtcaccttccgcatcgaggagatcccgctggccccagccttcgagtgcgtctacaaccgcgcggccctgctgtgggccgaggccctgaacgtgttccagcaggcggccgactggatcggcctggagtcgcgcaagtccctgtggggccagttctggtcggcacaccagcgcttcttcaagtatctgtgcatcgcagccaaggtgcgccggctggtggagctggcccgagaggagctggcgcgagacaagtgcgtggtcatcgggctgcagtccacgggcgaggcgcgcacgcgggaggtgctgggggagaacgatgggcacctcaactgcttcgtctcggccgctgaaggcgtgttcctgtcgctaattcagaagcactttccgtccaccaagagaaagcgggacagaggagcgggcagcaagcggaaacggcgacctcggggacgcggggccaaagccccccggctggcgtgcgagacagcgggcgtcatccgcatcagtgacgacagcagcacggagtcggaccctggcctggacagcgacttcaactcctcccccgagtccctggtggatgacgacgttgtcatcgttgatgcagtcgggctccccagtgacgaccggggacccctgtgcctcctgcagagagacccgcatggccccggggtcctggagcgggtggagcggctgaagcaggatctgctggacaaagtgcggcggctgggccgggaactgccagtcaacaccctggacgagctcatcgaccagctgggcggcccccagcgggtggcggagatgaccggcaggaaaggccgcgtggtgtccaggcccgacgggacggtggccttcgagtcgcgggcagagcagggtctgtccatcgaccacgtgaacctcagggagaagcagcgcttcatgagcggcgagaagctcgtggccatcatctcggaggcctccagctcgggtgtctccctccaagccgaccgccgtgtccagaaccagcggcgccgcgtgcacatgaccttggagctgccgtggagcgccgaccgcgccatccagcagttcggccgcacccaccggtccaaccaggtctccgcgccagagtatgtcttcctcatctcggagctggccggggagcgccggttcgcctccatcgtggccaagcgcctggagagtctgggggccctgacccacggagaccgccgcgccacggagtcccgtgacctcagcaagtacaactttgagaacaagtatggcacccgggccctgcactgtgtcctcaccaccatcctgagccagactgagaacaaagtgcctgtgccccagggataccctggaggggtccccaccttcttccgggacatgaagcagggcctgctgtctgtgggcattggtggccgggagtcccggaatggctgcctggacgtggagaaggactgttccatcaccaagttcctgaaccgcatcctggggctggaggtgcacaagcagaacgccctgttccagtacttctcagacaccttcgaccacctcatcgagatggacaagcgggagggcaaatacgacatgggcatcctggaccttgctcccggtatcgaggagatctacgaggagagccagcaggtgttcctggctcccgggcacccgcaggacgggcaggtggtcttctacaagatcagcgtggaccgcggcctgaagtgggaggacgcctttgccaagtcgctggcgctgacgggcccctatgacggcttctacctctcctacaaggtccgcggtaacaagcccagctgcctgctggcggagcagaaccgcggccagttcttcacggtgtacaagcccaacatcggccggcagagccagctggaggccctggacagcctccgccgcaagttccaccgggtcaccgcggaggaggccaaggagccctgggagagtggctacgctttgtcgctgacgcactgcagccacagcgcctggaaccggcactgccggctggcgcaggagggtaaggactgcctgcaggggctgcggctgcggcaccactacatgctgtgcggcgcgctgctgcgcgtgtggggccgcatcgccgccgtcatggccgacgtcagcagcagcagctacctgcagatcgtgcggctgaagaccaaggacaggaagaagcaagtgggcatcaagatccccgagggctgcgtgcgccgggtgctgcaggagctgcggctgatggatgcggacgtgaagcgcaggcaggcgcccgccctgggctgccccgccccgcccgccccgcgcccgctggcgctgccttgcggccccggagaggtgctggacctcacctacagccccccggccgaggccttcccgccgcccccgcacttctctttcccggcgccgctgtccctggacgccggccccggcgtcgtgccgctgggcacccccgacgcccaggccgaccctgcggccctcgcgcaccagggctgcgacatcaacttcaaggaggtgctggaggacatgctgcgctcgctgcacgcggggccgccctccgagggcgcgctgggggagggcgcgggggcggggggcgcggcgggcggtggtcccgagcggcagagcgtgatccagttcagcccacccttccccggcgcccaggctcctctctgacacgcctttaggcgaaacatgccccaagacacagggaccgtttctcccctaggagcagcggtggggagcagggccaaggtcccctgaccactgctcagaggagccctaggccctggccgcagtgccttcagcgcccgacccgggcccccacctggtcagccctggcggggcccactcaggacagctgggggccggggcgtggcagggccctctctgtgcctctcctcccaagtaggaaggggctccgggtggctgctctgggactgggcacccacaagggctcagtgggcccaaacccttgaaatccgtgaaaccgggtggtcccaagagctagaaactcaggaaaccccaggtgctcagggccccgcgtctcgggggctccgtggggcagacccctgctaatatatgcaattctccctcccccagcccttccctgacccctaagttattgcccgctcacctctcccaggccccaggccgcggagctggcagggtggcgcctgcggtttctatgtatttatagcaagttctgatgtacatatgtaaaggacttttttaaatatatgtgccttttgcctacttccc

SEQ ID NO: 40346 - protein, 597 aa, Artificial Sequence
  derived and/or modified sequence
MALNSPQPGPVESELGKQLLKTGWEGSPLPRSPTQDAAGVGPPASQGRGPAGEPMGPEAGSKAELPPTVSRPPLLRGLSWDSGPEEPGPRLQKVLAKLPLAEEEKRFAGKAGGKLAKAPGLKDFQIQVQPVRMQKLTKLREEHILMRNQNLVGLKLPDLSEAAEQEKGLPSELSPAIEEEESKSGLDVMPNISDVLLRKLRVHRSLPGSAPPLTEKEVENVFVQLSLAFRNDSYTLESRINQAERERNLTEENTEKELENFKASITSSASLWHHCEHRETYQKLLEDIAVLHRLAARLSSRAEVVGAVRQEKRMSKATEVMMQYVENLKRTYEKDHAELMEFKKLANQNSSRSCGPSEDGVPRTARSMSLTLGKNMPRRRVSVAVVPKFNALNLPGQTPSSSSIPSLPALSESPNGKGSLPVTSALPALLENGKTNGDPDCEASAPALTLSCLEELSQETKARMEEEAYSKGFQEGLKKTKELQDLKEEEEEQKSESPEEPEEVEETEEEEKGPRSSKLEELVHFLQVMYPKLCQHWQVIWMMAAVMLVLTVVLGLYNSYNSCAEQADGPLGRSTCSAAQRDSWWSSGLQHEQPTEQ

SEQ ID NO: 40347 - protein, 821 aa, Artificial Sequence
  derived and/or modified sequence
MTGDATSPEGETDKNLANRVHSPHKRLSHRHLKVSTASLTSVDPAGHIIDLVNDQLPDISISEEDKKKNLALLEEAKLVSERFLTRRGRKSRSSPGDSPSAVSPNLSPSASPTSSRSNSLTVPTPPGLDVCSGPPSPLPGAPPQKGDEADVSSPHPGEPNVPKGLADRKQNDQRKVSQGRLAPRPPPVEKSKEIAIEQKENFDPLQYPETTPKGLAPVTNSSGKMALNSPQPGPVESELGKQLLKTGWEGSPLPRSPTQDAAGVGPPASQGRGPAGEPMGPEAGSKAELPPTVSRPPLLRGLSWDSGPEEPGPRLQKVLAKLPLAEEEKRFAGKAGGKLAKAPGLKDFQIQVQPVRMQKLTKLREEHILMRNQNLVGLKLPDLSEAAEQEKGLPSELSPAIEEEESKSGLDVMPNISDVLLRKLRVHRSLPGSAPPLTEKEVENVFVQLSLAFRNDSYTLESRINQAERERNLTEENTEKELENFKASITSSASLWHHCEHRETYQKLLEDIAVLHRLAARLSSRAEVVGAVRQEKRMSKATEVMMQYVENLKRTYEKDHAELMEFKKLANQNSSRSCGPSEDGVPRTARSMSLTLGKNMPRRRVSVAVVPKFNALNLPGQTPSSSSIPSLPALSESPNGKGSLPVTSALPALLENGKTNGDPDCEASAPALTLSCLEELSQETKARMEEEAYSKGFQEGLKKTKELQDLKEEEEEQKSESPEEPEEVEETEEEEKGPRSSKLEELVHFLQVMYPKLCQHWQVIWMMAAVMLVLTVVLGLYNSYNSCAEQADGPLGRSTCSAAQRDSWWSSGLQHEQPTEQ

SEQ ID NO: 40348 - DNA, 1794 bp, Artificial Sequence
  derived and/or modified sequence
atggccctgaacagcccccagcccggccccgtggagagcgagctgggcaagcagctgctgaagaccggctgggagggcagccccctgcccagaagccccacccaggacgccgccggcgtgggcccccccgccagccagggcagaggccccgccggcgagcccatgggccccgaggccggcagcaaggccgagctgccccccaccgtgagcagaccccccctgctgagaggcctgagctgggacagcggccccgaggagcccggccccagactgcagaaggtgctggccaagctgcccctggccgaggaggagaagagattcgccggcaaggccggcggcaagctggccaaggcccccggcctgaaggacttccagatccaggtgcagcccgtgagaatgcagaagctgaccaagctgagagaggagcacatcctgatgagaaaccagaacctggtgggcctgaagctgcccgacctgagcgaggccgccgagcaggagaagggcctgcccagcgagctgagccccgccatcgaggaggaggagagcaagagcggcctggacgtgatgcccaacatcagcgacgtgctgctgagaaagctgagagtgcacagaagcctgcccggcagcgccccccccctgaccgagaaggaggtggagaacgtgttcgtgcagctgagcctggccttcagaaacgacagctacaccctggagagcagaatcaaccaggccgagagagagagaaacctgaccgaggagaacaccgagaaggagctggagaacttcaaggccagcatcaccagcagcgccagcctgtggcaccactgcgagcacagagagacctaccagaagctgctggaggacatcgccgtgctgcacagactggccgccagactgagcagcagagccgaggtggtgggcgccgtgagacaggagaagagaatgagcaaggccaccgaggtgatgatgcagtacgtggagaacctgaagagaacctacgagaaggaccacgccgagctgatggagttcaagaagctggccaaccagaacagcagcagaagctgcggccccagcgaggacggcgtgcccagaaccgccagaagcatgagcctgaccctgggcaagaacatgcccagaagaagagtgagcgtggccgtggtgcccaagttcaacgccctgaacctgcccggccagacccccagcagcagcagcatccccagcctgcccgccctgagcgagagccccaacggcaagggcagcctgcccgtgaccagcgccctgcccgccctgctggagaacggcaagaccaacggcgaccccgactgcgaggccagcgcccccgccctgaccctgagctgcctggaggagctgagccaggagaccaaggccagaatggaggaggaggcctacagcaagggcttccaggagggcctgaagaagaccaaggagctgcaggacctgaaggaggaggaggaggagcagaagagcgagagccccgaggagcccgaggaggtggaggagaccgaggaggaggagaagggccccagaagcagcaagctggaggagctggtgcacttcctgcaggtgatgtaccccaagctgtgccagcactggcaggtgatctggatgatggccgccgtgatgctggtgctgaccgtggtgctgggcctgtacaacagctacaacagctgcgccgagcaggccgacggccccctgggcagaagcacctgcagcgccgcccagagagacagctggtggagcagcggcctgcagcacgagcagcccaccgagcagtag

SEQ ID NO: 40349 - DNA, 2466 bp, Artificial Sequence
  derived and/or modified sequence
atgaccggcgacgccaccagccccgagggcgagaccgacaagaacctggccaacagagtgcacagcccccacaagagactgagccacagacacctgaaggtgagcaccgccagcctgaccagcgtggaccccgccggccacatcatcgacctggtgaacgaccagctgcccgacatcagcatcagcgaggaggacaagaagaagaacctggccctgctggaggaggccaagctggtgagcgagagattcctgaccagaagaggcagaaagagcagaagcagccccggcgacagccccagcgccgtgagccccaacctgagccccagcgccagccccaccagcagcagaagcaacagcctgaccgtgcccaccccccccggcctggacgtgtgcagcggcccccccagccccctgcccggcgcccccccccagaagggcgacgaggccgacgtgagcagcccccaccccggcgagcccaacgtgcccaagggcctggccgacagaaagcagaacgaccagagaaaggtgagccagggcagactggcccccagacccccccccgtggagaagagcaaggagatcgccatcgagcagaaggagaacttcgaccccctgcagtaccccgagaccacccccaagggcctggcccccgtgaccaacagcagcggcaagatggccctgaacagcccccagcccggccccgtggagagcgagctgggcaagcagctgctgaagaccggctgggagggcagccccctgcccagaagccccacccaggacgccgccggcgtgggcccccccgccagccagggcagaggccccgccggcgagcccatgggccccgaggccggcagcaaggccgagctgccccccaccgtgagcagaccccccctgctgagaggcctgagctgggacagcggccccgaggagcccggccccagactgcagaaggtgctggccaagctgcccctggccgaggaggagaagagattcgccggcaaggccggcggcaagctggccaaggcccccggcctgaaggacttccagatccaggtgcagcccgtgagaatgcagaagctgaccaagctgagagaggagcacatcctgatgagaaaccagaacctggtgggcctgaagctgcccgacctgagcgaggccgccgagcaggagaagggcctgcccagcgagctgagccccgccatcgaggaggaggagagcaagagcggcctggacgtgatgcccaacatcagcgacgtgctgctgagaaagctgagagtgcacagaagcctgcccggcagcgccccccccctgaccgagaaggaggtggagaacgtgttcgtgcagctgagcctggccttcagaaacgacagctacaccctggagagcagaatcaaccaggccgagagagagagaaacctgaccgaggagaacaccgagaaggagctggagaacttcaaggccagcatcaccagcagcgccagcctgtggcaccactgcgagcacagagagacctaccagaagctgctggaggacatcgccgtgctgcacagactggccgccagactgagcagcagagccgaggtggtgggcgccgtgagacaggagaagagaatgagcaaggccaccgaggtgatgatgcagtacgtggagaacctgaagagaacctacgagaaggaccacgccgagctgatggagttcaagaagctggccaaccagaacagcagcagaagctgcggccccagcgaggacggcgtgcccagaaccgccagaagcatgagcctgaccctgggcaagaacatgcccagaagaagagtgagcgtggccgtggtgcccaagttcaacgccctgaacctgcccggccagacccccagcagcagcagcatccccagcctgcccgccctgagcgagagccccaacggcaagggcagcctgcccgtgaccagcgccctgcccgccctgctggagaacggcaagaccaacggcgaccccgactgcgaggccagcgcccccgccctgaccctgagctgcctggaggagctgagccaggagaccaaggccagaatggaggaggaggcctacagcaagggcttccaggagggcctgaagaagaccaaggagctgcaggacctgaaggaggaggaggaggagcagaagagcgagagccccgaggagcccgaggaggtggaggagaccgaggaggaggagaagggccccagaagcagcaagctggaggagctggtgcacttcctgcaggtgatgtaccccaagctgtgccagcactggcaggtgatctggatgatggccgccgtgatgctggtgctgaccgtggtgctgggcctgtacaacagctacaacagctgcgccgagcaggccgacggccccctgggcagaagcacctgcagcgccgcccagagagacagctggtggagcagcggcctgcagcacgagcagcccaccgagcagtag

SEQ ID NO: 40350 - DNA, 1794 bp, Artificial Sequence
  derived and/or modified sequence
atggctctcaactcacctcagccgggcccagttgaatccgagttaggtaagcaacttctgaaaaccgggtgggagggttctcccctgccacgaagtcctacccaggatgctgccggcgtgggacccccggcgtctcaagggcgtggccccgcaggcgaaccaatgggtcctgaagctggctcgaaggctgaactccctcccacggtgtctcggccaccccttttgcggggtctaagttgggactccggacccgaggaaccaggaccaaggctgcaaaaagtactcgccaagctcccactggcggaggaggagaaacgctttgcaggaaaggcaggagggaaattagcaaaggctccggggttaaaagattttcagattcaagtgcagcctgtacgcatgcaaaagctgacgaagctgcgggaggaacacatccttatgcgcaaccagaaccttgttggccttaagctcccagacctgagtgaggcagccgagcaagagaagggactacccagcgagttgtcccctgctatcgaagaagaggaaagcaaatcagggctcgacgttatgcccaacatcagtgatgtgctactgaggaagcttagggtgcaccgatcgctgcccggtagtgcccctcccctgacggagaaggaggtggagaacgtcttcgtgcagctcagtttggcgtttcggaatgattcttatacactggagtctcgcatcaaccaggctgagcgggaacggaacctgactgaagaaaatacagagaaagagcttgaaaatttcaaagcgtctattactagttcagcctccctgtggcatcactgcgaacatagggagacataccagaagctactggaggatatcgctgttctgcatcggctagcagcacggctgtcctctcgcgcagaggttgtgggcgctgtcagacaggaaaagcgaatgtctaaggctacagaggttatgatgcagtacgttgagaacctgaaaaggacttatgagaaagaccatgctgaattaatggaattcaagaaattagccaatcagaactcctcgaggtcatgcgggccctctgaggacggagtgcccaggacagcgcggagtatgtccttgaccctggggaagaacatgccacgcaggcgtgtctccgtcgctgtggtgccaaaattcaatgcactaaacttacccggtcaaactccaagtagttcctccatcccttccctgccagccctgagtgagtcacctaatgggaaagggtctcttccagtcaccagtgccctgcctgcccttctggagaatggcaagactaacggtgacccggattgtgaggcttcagctccagccctcaccctttcttgcctcgaggaactgagccaggagacaaaggctcggatggaagaagaagcatactctaagggcttccaagagggactcaagaaaactaaggagctgcaagatctcaaagaagaagaggaagaacagaaaagtgaatcccccgaggagccagaggaagttgaggaaaccgaggaagaagagaaggggcctcggtcgtctaagctagaggaattggtccacttcctgcaggtgatgtaccctaagctttgtcaacactggcaggtgatttggatgatggcagctgtgatgttagtgttaactgttgtgctggggctatataactcttacaactcctgcgccgagcaagctgatgggcccttgggccgatcgacctgttctgccgcccagagagatagctggtggtcatccgggttacagcatgagcaacccaccgagcagtag

SEQ ID NO: 40351 - DNA, 1794 bp, Artificial Sequence
  derived and/or modified sequence
atggccctgaatagcccacagcctggccctgtggaatctgaactgggaaagcagctcctcaaaactggctgggaagggagtcccctccccagatcacctacacaggatgccgccggagtcggccccccagccagtcaaggaaggggacctgccggtgagcctatgggccctgaagccggatccaaggcggagttaccgccgaccgtctcccgaccacctctcctgcgaggcctgtcctgggattcaggacccgaagagcctggaccaaggcttcagaaggtgttggccaagctccccctcgcagaggaagaaaagaggtttgccgggaaagccggcggtaagctggccaaagcaccaggactgaaggatttccaaattcaggtgcagcccgtgcgcatgcaaaaactgactaagcttagagaagagcacattctgatgcgaaatcagaatttagtcggattaaaactacccgacctttcagaagccgccgaacaagaaaagggcctgccaagcgaactcagtcctgctatcgaagaggaggaaagcaagtccggcctggatgttatgccaaacatttctgatgtgctactgcggaaactgcgagtgcaccggagtctcccagggtctgcaccaccactgaccgaaaaagaggttgagaatgtgttcgtgcaactatccctcgcctttaggaatgatagctacaccctcgagtcccggatcaaccaagccgagagagagcgtaacctgaccgaggaaaacaccgagaaggaactggaaaacttcaaggcatccattacctcatcagcgtccctgtggcaccattgtgagcatagggaaacctaccagaaattattagaagacatagcggtattgcatcggctcgcagcacgcctgagttccagggctgaagtggttggggccgttcgccaggaaaagcgtatgtcaaaagctacagaagtgatgatgcaatacgtcgagaatctgaagcgcacgtatgagaaggatcatgctgagctgatggagtttaagaagcttgccaatcagaacagcagtcggagctgtggtcccagcgaggacggcgtgccgaggaccgcccgatctatgagcctgacactcggcaaaaacatgccccgtcgccgggtgtcagtagccgtcgtgcccaagttcaatgctctcaacctccccgggcagaccccctcatcatcttcaataccctcactccccgctctcagcgagtcaccgaatgggaaaggctcgctgcccgtgacctctgccctgcccgccctgctggaaaacggcaaaacgaatggggacccagactgtgaggcctctgctccagccctaaccctctcctgcctcgaggagttgagccaagagactaaagcgcgcatggaggaggaggcttacagcaaagggtttcaagaaggcctgaagaaaaccaaggaactgcaggatttgaaagaggaagaggaagagcagaagagtgaatccccagaggagcccgaggaggtggaggagactgaagaagaagagaaaggccctagatcttcaaagctcgaggaactggtccatttcttgcaggtgatgtaccctaaactttgtcaacattggcaagtgatttggatgatggccgctgtgatgcttgtgctgaccgtggtgctgggattatacaatagctataactcctgtgctgagcaggcagatgggcccttgggccgatcaacctgctctgctgcccaaagagattcttggtggtcttctgggttacagcatgagcagcccacagagcagtag

SEQ ID NO: 40352 - DNA, 2466 bp, Artificial Sequence
  derived and/or modified sequence
atgaccggcgacgctacgagtcccgagggcgaaacagataaaaacctggcaaacagagttcattcaccacataaacgtctttctcatcgtcatctcaaggtgtcaacagctagcctgacctccgtggatcccgcggggcatattatcgatctggtgaacgatcagctacctgatatctctatcagcgaagaggacaaaaaaaaaaacctcgcactgcttgaggaagcaaagcttgtctcagagcgttttttaactagacggggaagaaaatcacgttcttcacctggcgacagtccttctgctgtctcccctaatctctctccatccgccagccctaccagtagtaggagtaactctctgacggtgcccacccctcccggtctcgacgtctgttccggtccaccatctcccctgcctggagcccccccacagaagggggatgaagccgatgtcagctctcctcatccaggtgaacctaacgtgccaaaaggactggccgacaggaagcagaacgatcagaggaaggtctcccagggacggctggcacccagacctccccctgtggaaaaaagtaaagaaatcgcaatcgagcagaaggaaaacttcgatccactgcagtaccccgaaacaactccaaagggcctggcaccagtgactaattccagtggtaagatggcactcaattctccacagccagggcccgtggaaagtgagcttggaaagcaacttctgaagaccggttgggagggctctcctttgcctcgatcaccgacacaggatgcagctggtgtcggcccccctgcatcacagggaagaggcccggctggcgagcccatgggacctgaagccggatctaaagccgaactcccccctacagtgagccgacccccactcttgaggggcctctcctgggattccggcccagaggagccgggtcctcgtctgcagaaagtacttgcgaagctcccactcgcagaggaagagaagcggttcgctggaaaggccggtggcaaattggctaaagcaccgggattgaaggactttcagatccaggtccagcccgtccgcatgcaaaaactgacaaaactccgggaagagcacattttgatgagaaatcaaaacctggtgggtctcaagctgcccgacctctcagaggcagccgagcaggagaagggactacccagtgagttgagcccggccatcgaagaagaagagagtaagtccggattagatgtgatgcctaacatctctgacgtgctgttacggaaactacgcgtgcaccggtcactgccaggctcagcacctccattaaccgagaaggaagttgagaacgtgttcgtacaactctccctggcatttcgcaacgatagctacacattggagagtagaattaaccaagccgaaagggaaagaaaccttaccgaggagaacactgagaaggaactcgagaatttcaaggcctctatcacttcaagcgcttcactgtggcatcactgtgaacacagggagacttaccagaaactgctcgaggatattgcagtacttcatagattggctgcacgcctgagctctagggccgaagtggtgggtgctgtgcgccaggagaagagaatgtccaaagccacggaggtaatgatgcagtatgtggagaacctgaaaaggacgtatgagaaagaccatgctgaactgatggagttcaagaaactggctaatcaaaattcttccagatcatgtgggccttcagaggatggggtgccgcgtacagctaggtctatgagtttgacgttaggaaagaacatgccgagaaggcgcgtgtcagtcgctgtagtgcccaaattcaatgctctgaacttgcctggacaaacaccaagcagttcttctatcccctctttgccagccctgtcagagagcccaaatggaaagggctctctccccgtgacatcggcgctcccagccctcctcgagaatggtaagaccaatggcgaccccgattgcgaagccagcgctccggcactcactctgagctgtctcgaagaactaagccaggagacaaaagcaaggatggaagaagaagcttactccaaaggcttccaggagggcctgaagaaaaccaaagagttgcaggatttgaaggaggaagaagaagaacagaaatctgaatccccagaggaaccagaagaggtggaggagaccgaggaagaggagaaggggccccgctcttccaaactcgaagagctagtgcacttcctgcaggtcatgtatcctaaactctgtcagcattggcaggtcatttggatgatggcagccgtcatgctagtcctcactgtagtgttgggcctgtacaactcttacaatagctgtgcagagcaggccgatggaccactgggaagatctacatgctctgccgcacagcgcgattcatggtggtcatcaggcttacagcatgaacagcccacagagcaatag

SEQ ID NO: 40353 - DNA, 1794 bp, Artificial Sequence
  derived and/or modified sequence
atggcgttgaactctcctcagcccggcccagtggaatctgaactggggaagcagctgctcaaaaccggttgggaaggctctcctctgccgaggagtcctactcaggacgccgccggcgtcgggccacccgccagccagggacgcggcccagctggcgagccaatgggcccggaagccggaagcaaggctgaattgcctccaaccgtgtccagaccgccacttctccgcgggctgagctgggattccggtccagaggagccagggcctcgcctgcaaaaggtacttgctaagctgccgctagctgaggaagaaaagagattcgcaggaaaagcaggtggcaagctggcgaaggctcccggcttaaaagattttcaaattcaggtacaacctgttagaatgcaaaagctgactaaattgcgcgaggaacacatcttaatgcggaatcagaacctggtcggtctgaaactgcccgatctttctgaggctgctgagcaggagaagggtctgccaagcgagcttagcccagcgatcgaagaagaggagagcaagtccggcctcgacgtaatgcccaacatctctgatgtgcttttgcgcaaactccgcgtgcatcgatctctaccaggttcagcccccccattgactgagaaggaagtagagaacgtgttcgtgcaactttctttagcctttcggaacgattcatataccctggagtcccgcattaatcaggctgagagggagagaaatctcacagaggagaatactgagaaagaacttgagaacttcaaagccagcattacttcctccgcctcactgtggcatcactgcgagcacagagagacctaccaaaaactcctagaggatatcgccgtgctgcatcgtctcgcggctcgcctgtcatcacgcgctgaggtggtcggtgctgtgcgtcaagaaaagaggatgagtaaagcaacagaagtcatgatgcagtacgtggagaatctcaaacgtacctatgaaaaggaccatgcagaactaatggagtttaagaagctggccaaccaaaactcgtccagatcctgcgggccatctgaggacggagtgcctcggacagctcgttccatgagcctgacacttggcaagaatatgcctagacggagggtttctgtggccgtggttcctaagttcaatgccctgaacttgccaggccagacgccctcctcctccagcatacccagcctgcctgccctctctgagtcccctaacggcaagggaagcctgccagttacatcagcgctcccagccttactagagaacgggaagaccaacggggacccagattgcgaggcgtcagcccccgccttgacactcagctgtctggaagagctatcgcaggaaactaaggcccggatggaggaagaagcttattccaaaggcttccaagagggactgaagaagactaaggaattacaagacctgaaagaggaggaagaggaacaaaagtcagagagcccagaggaaccagaggaggtggaggagaccgaagaggaggagaagggaccgaggtcaagcaagttggaggaactggttcattttctgcaggttatgtacccaaaactctgtcagcattggcaggtcatttggatgatggcggctgttatgcttgtcctaactgttgtcctagggctttacaactcgtataactcctgtgccgagcaggccgacggcccgcttggaagatcaacctgtagtgcagcgcagagggattcctggtggagttccggcctgcagcatgaacaacccacggagcagtag

SEQ ID NO: 40354 - DNA, 1794 bp, Artificial Sequence
  derived and/or modified sequence
atggccctgaacagcccccagcccggccctgtggagagcgagctgggcaagcagctgctgaagacaggctgggagggcagccccctgcccaggagccccacccaggatgctgctggggtgggccccccagccagccagggccggggccctgctggggagcccatgggccctgaggccggcagcaaggccgagctgccccccaccgtgtcccggccccccctgctgcggggcctgtcctgggacagcggccctgaggagcccggcccccggctgcagaaggtgctggccaagctgcccctggccgaggaggagaagagatttgctgggaaggccggcggcaagctggccaaggcccctggcctgaaggacttccagatccaggtgcagcctgtgaggatgcagaagctgaccaagctgcgggaggagcacatcctgatgaggaaccagaacctggtgggcctgaagctgcctgacctgtctgaggccgctgagcaggagaagggcctgcccagcgagctgagccctgccatcgaggaggaggagagcaagagcggcctggatgtgatgcccaacatcagtgatgtgctgctgaggaagctgcgggtgcacaggagcctgcccggcagcgccccacccctgacagagaaggaggtggagaatgtgtttgtgcagctgagcctggccttcagaaatgacagctacaccctggagagccgcatcaaccaggccgagcgggagaggaacctgacagaggagaacacagagaaggagctggagaacttcaaggccagcatcaccagcagcgccagcctgtggcaccactgtgagcaccgggagacctaccagaagctgctggaggacattgctgtgctgcaccggctggccgcccggctgagcagcagagctgaggtggtgggcgctgtgcggcaggagaagaggatgagcaaggccacagaggtgatgatgcagtatgtggagaacctgaagaggacctatgagaaggaccatgctgagctgatggagttcaagaagctggccaaccagaacagcagccgcagctgtggccccagtgaagatggagtgcccaggacagcccgctccatgagcctgaccctgggcaagaacatgcccaggagaagagtgtctgtggccgtggtgcccaagttcaatgccctgaacctgcccggccagacccccagcagcagcagcatccccagcctgcctgccctgtctgagagccccaacgggaagggcagcctgcctgtgaccagcgccctgcctgccctgctggagaatggcaagaccaacggggaccctgactgtgaggccagcgccccagccctgaccctgagctgcctggaggagctgagccaggagaccaaggccaggatggaggaggaggcctacagcaagggcttccaggagggcctgaagaagaccaaggagctgcaggacctgaaggaggaggaggaggagcagaagtctgagagccctgaggagcctgaggaggtggaggagacagaggaggaggagaagggccccaggagcagcaagctggaggagctggtgcacttcctgcaggtgatgtaccccaagctgtgccagcactggcaggtgatctggatgatggctgctgtgatgctggtgctgactgtggtgctgggcctgtacaacagctacaacagctgtgccgagcaggctgatggccccctgggccgcagcacctgcagcgctgcccagagggacagctggtggagcagcggcctgcagcacgagcagcccacagagcagtag

SEQ ID NO: 40355 - DNA, 2466 bp, Artificial Sequence
  derived and/or modified sequence
atgactggagatgccaccagccctgagggggagacagacaagaacctggccaacagagtgcacagcccccacaagaggctgagccaccgccacctgaaggtgtccacagccagcctgacctctgtggaccctgctggccacatcatcgacctggtgaatgaccagctgcctgacatcagcatcagcgaggaggacaagaagaagaacctggccctgctggaggaggccaagctggtgtctgagcgcttcctgacccggcggggcaggaagagccgcagcagccctggggacagccccagcgctgtgagccccaacctgagccccagcgccagccccaccagcagccgcagcaacagcctgactgtgcccaccccacctggcctggatgtgtgcagcggcccccccagccccctgcccggggccccaccccagaagggagatgaagcagatgtgagcagcccccaccctggagagcccaacgtgcccaagggcctggccgacaggaagcagaatgaccagaggaaggtgtcccagggccgcctggcccccaggcctcctcctgtggagaagagcaaggagatcgccatcgagcagaaggagaactttgaccccctgcagtacccagagaccacccccaagggcctggcccctgtgaccaacagcagcggcaagatggccctgaacagcccccagcccggccctgtggagagcgagctgggcaagcagctgctgaagacaggctgggagggcagccccctgcccaggagccccacccaggatgctgctggggtgggccccccagccagccagggccggggccctgctggggagcccatgggccctgaggccggcagcaaggccgagctgccccccaccgtgtcccggccccccctgctgcggggcctgtcctgggacagcggccctgaggagcccggcccccggctgcagaaggtgctggccaagctgcccctggccgaggaggagaagagatttgctgggaaggccggcggcaagctggccaaggcccctggcctgaaggacttccagatccaggtgcagcctgtgaggatgcagaagctgaccaagctgcgggaggagcacatcctgatgaggaaccagaacctggtgggcctgaagctgcctgacctgtctgaggccgctgagcaggagaagggcctgcccagcgagctgagccctgccatcgaggaggaggagagcaagagcggcctggatgtgatgcccaacatcagtgatgtgctgctgaggaagctgcgggtgcacaggagcctgcccggcagcgccccacccctgacagagaaggaggtggagaatgtgtttgtgcagctgagcctggccttcagaaatgacagctacaccctggagagccgcatcaaccaggccgagcgggagaggaacctgacagaggagaacacagagaaggagctggagaacttcaaggccagcatcaccagcagcgccagcctgtggcaccactgtgagcaccgggagacctaccagaagctgctggaggacattgctgtgctgcaccggctggccgcccggctgagcagcagagctgaggtggtgggcgctgtgcggcaggagaagaggatgagcaaggccacagaggtgatgatgcagtatgtggagaacctgaagaggacctatgagaaggaccatgctgagctgatggagttcaagaagctggccaaccagaacagcagccgcagctgtggccccagtgaagatggagtgcccaggacagcccgctccatgagcctgaccctgggcaagaacatgcccaggagaagagtgtctgtggccgtggtgcccaagttcaatgccctgaacctgcccggccagacccccagcagcagcagcatccccagcctgcctgccctgtctgagagccccaacgggaagggcagcctgcctgtgaccagcgccctgcctgccctgctggagaatggcaagaccaacggggaccctgactgtgaggccagcgccccagccctgaccctgagctgcctggaggagctgagccaggagaccaaggccaggatggaggaggaggcctacagcaagggcttccaggagggcctgaagaagaccaaggagctgcaggacctgaaggaggaggaggaggagcagaagtctgagagccctgaggagcctgaggaggtggaggagacagaggaggaggagaagggccccaggagcagcaagctggaggagctggtgcacttcctgcaggtgatgtaccccaagctgtgccagcactggcaggtgatctggatgatggctgctgtgatgctggtgctgactgtggtgctgggcctgtacaacagctacaacagctgtgccgagcaggctgatggccccctgggccgcagcacctgcagcgctgcccagagggacagctggtggagcagcggcctgcagcacgagcagcccacagagcagtag

SEQ ID NO: 40356 - DNA, 1794 bp, Artificial Sequence
  derived and/or modified sequence
atggccctgaacagcccccagcccggccccgtggagagcgagctgggcaaacagcttctgaagacagggtgggaaggcagccctctccctaggtcaccaacccaggatgcagcaggcgtcggtcctccagcatctcaaggacggggccccgccggcgaaccaatggggccagaagccggctcgaaagcagaactccctcctactgtaagccgccctccactgttaaggggcctttcttgggactcgggaccagaggagcctggcccccgcctccagaaggtgctggccaagctgccccttgctgaggaggagaagcggtttgccggcaaagccggcgggaagttagcaaaagcccccggcctaaaggacttccagattcaggtacagcctgtgcgtatgcagaagctaaccaaactgcgagaggaacacattctcatgaggaaccaaaacctcgttggtctgaagcttccggacctgagtgaggccgccgagcaggagaaggggcttccctcagaactgagccctgccatcgaagaggaagagtctaaatctggtcttgacgtgatgccgaacatcagtgacgtcctcctccggaagctacgtgtccacagatccctccctggcagtgccccaccgctgacggaaaaggaggtagaaaacgtgttcgtccagcttagtctcgccttcaggaatgactcctataccttggagtcgcggattaatcaggccgaaagggaacgtaatcttactgaagagaacacagaaaaggagcttgagaattttaaagcctccattacatcttcagccagtctatggcatcactgcgagcaccgggagacttatcagaagttgttggaggatatcgcagtgctccataggctggcagctcggctgtccagtcgggcagaggttgtgggtgcggtgcgccaagagaaaaggatgagtaaagccaccgaagttatgatgcagtacgtggagaacctgaagaggacctatgaaaaagatcacgccgaattgatggagttcaagaaactcgctaaccaaaactcctcccgttcatgtggtccctctgaggacggtgtgcctagaacggcccggagcatgtctctaacgctaggcaagaacatgccccgaaggagagtgagcgtggctgtggtgcctaagtttaacgcattgaacctgccgggccagacccccagcagtagcagcattccctccctgcccgccctatcagaatctcctaacggcaagggcagccttcctgtgacctctgcactgcccgcgctcttggagaacggaaagactaacggagatcctgattgtgaagcgtcagcacccgcactcaccctgtcctgtttggaggaattgagccaggagactaaggctcgtatggaagaggaggcttatagcaagggattccaggaaggtcttaaaaagaccaaagaattgcaggatctgaaagaggaggaggaagagcaaaagagcgagagcccagaggaacctgaagaagtagaagagactgaggaagaggaaaaggggcctcgctccagcaaactggaggagctagtacactttctccaggtcatgtatccaaagctgtgccagcactggcaggttatctggatgatggccgcagtaatgctggtactgacagtcgttttgggtctgtataactcctataactcctgcgcagagcaggctgatggccctttagggagaagtacgtgttctgctgctcaaagggactcttggtggagcagtggcctgcagcacgaacagccgaccgagcagtag

SEQ ID NO: 40357 - DNA, 1794 bp, Artificial Sequence
  derived and/or modified sequence
atggccctgaacagcccccagcccggccccgtggagagcgagctgggaaaacagctgttaaagaccggatgggagggttccccactccctcgcagcccaactcaggacgcagctggggtgggccctcctgcatctcagggccggggacctgccggggaaccaatggggcccgaggccggatccaaggctgaattgccgccaaccgtgagccgtccaccgctactccgtggcctgagttgggactccggacccgaagaacctgggccaagactccagaaggtgctcgcgaaactgcccttagccgaggaggagaaaaggtttgctggcaaagcgggcggaaaacttgccaaggcccctgggctcaaagactttcagattcaagtccagccagtacgtatgcagaagttgactaagttgagggaggaacatatcttgatgaggaatcagaacctggtgggcctcaagctgcccgacctgtcggaagcagcagaacaggaaaaaggtctccccagcgaactgtcccctgccattgaagaggaagaatctaagtccggattggacgtgatgcctaacatctctgacgtgctgctgagaaaattacgggtgcacaggtccctaccgggctctgcaccaccgcttactgaaaaggaggtggagaacgtcttcgtccagctgtcactcgcgttcagaaacgacagctacactctagagagtcgcattaaccaggcagagagggagaggaacttgaccgaagaaaacaccgaaaaggagcttgaaaattttaaagccagcattacctcaagcgctagcctgtggcatcactgtgagcaccgcgagacctatcagaagctgttggaggacattgccgtcttacaccgcctcgccgctcggctgtctagtagggccgaggtggtgggtgcggtcagacaagagaagcgcatgtcaaaggcgaccgaagttatgatgcagtatgtggaaaacttaaaacggacttacgagaaggatcacgctgaactgatggaatttaaaaaactggctaatcagaattcctcccgatcttgcggacctagtgaagacggtgtacctaggacagccaggtccatgagcctaacgctaggcaaaaacatgccacgcagacgggtgtccgtggcagtggtccccaaatttaacgccctgaatcttcccggacagaccccatcttcgagttccatcccttccctgcccgccctgagcgaaagccccaacggcaaaggcagcctacccgtgacttcagcccttcctgccctactggaaaacgggaagaccaacggcgaccccgactgcgaggcgagcgcgccagctctgaccctaagctgcctggaagaactctctcaggaaaccaaggcccgtatggaagaggaggcttattcaaaaggctttcaggaggggctgaaaaaaactaaggagctccaagatctcaaagaggaggaggaagaacagaagagcgaatccccggaggaacctgaagaggtggaggagactgaggaggaagaaaagggccctaggtcatccaaactcgaagagctcgttcacttcttacaggtgatgtatccaaagctttgccagcactggcaggtcatttggatgatggccgcggtcatgctggtgctgacagttgtgctgggcctttataacagctataactcctgtgccgaacaggcagacggcccattaggccggtctacatgcagtgccgcacagagagattcctggtggtcgagcggcctgcagcatgagcagccaacagagcaatag

SEQ ID NO: 40358 - DNA, 2466 bp, Artificial Sequence
  derived and/or modified sequence
atgaccggcgacgccaccagccccgagggcgagaccgacaagaacctggctaacagggtgcattccccccataaaagactgtcccaccggcacttaaaggtcagtacagcctcactgaccagcgtggaccctgcagggcatattatcgatttggtaaacgaccagctgcctgacatctccatctctgaagaggacaagaaaaagaatctcgcactgctcgaagaggcgaaactggtgtcggagcgctttctgacacggcggggtagaaagtcacgaagttcaccaggcgactccccctcagcggtgtcgccaaacctctcaccgagtgcaagccccacttccagtaggtctaattccctgactgttcccacacctcctggcttggacgtgtgctcaggccccccaagtcccctgcccggggcgccacctcagaagggcgacgaggccgacgtctccagcccccatcccggtgaacccaatgtgccgaaaggacttgctgaccgaaaacagaatgaccaaaggaaggtgtcacagggccgcctcgcacctaggccaccccccgtggagaagtctaaggagatcgctatcgagcagaaggaaaacttcgaccccttgcagtaccctgaaaccacacccaaaggcttggcccctgtgacgaactcttcaggaaagatggcccttaatagtcctcagcccgggcccgtggaaagcgagctaggaaagcagctgttaaagactggttgggagggctctcccttgcccagatcacctacacaggatgcggccggggtcggccctcccgctagccagggccgcggtcccgccggagaacctatggggcctgaagccggcagtaaggccgagctgccacctaccgtgtcccggcccccactgttaagaggtctgagctgggatagcggacccgaggagcccggaccaagactccagaaggtgctggctaaactgcctcttgccgaggaggagaaacggtttgctggtaaggccggagggaaactagccaaggctccaggcctgaaagatttccagattcaagtacagcctgttcgcatgcagaagttgactaaattgcgggaggaacacattctcatgcgcaaccagaatctagtcgggttaaaactacccgatctgtctgaagccgccgaacaggaaaagggccttccatctgagctttctcctgcaattgaagaggaggaaagcaagtcagggctggatgtgatgcccaacatctccgacgtcctgctgcgcaaactgcgtgtgcatagatcactccctggtagtgcacccccattaacagaaaaggaggtggaaaacgtgtttgtacagttgagcctggccttccgcaatgactcttacaccctggaaagccggataaatcaagctgagcgcgagcgaaatctcacagaggaaaataccgagaaggaattagagaattttaaagctagtataacatcatcagcgtcgctctggcaccactgcgaacaccgagaaacttaccagaagctcttggaggatatcgcagtgctgcatcgactggcggcacggctgagtagccgggctgaggtagtgggcgccgtgcgccaggagaagagaatgagcaaggctacagaggtgatgatgcagtatgtggaaaatctgaaacgcacgtatgagaaggatcacgcagaattgatggagttcaagaagcttgctaaccagaattcttcccggagttgcggacccagtgaggacggagtgccccgaactgcacggagcatgtccctaacacttgggaagaatatgccaagaaggagagtgtcggtggccgtcgtgcccaaattcaacgccttaaacctcccagggcaaacaccaagtagctcgtctatcccttcactacccgcccttagtgaaagcccaaacggaaaaggaagcctccccgtgacctcagccttaccagcacttctggaaaacggtaagaccaatggtgaccccgactgcgaggcaagcgctcccgctctcaccttatcttgtctggaagagctcagccaggagactaaggcacgaatggaagaggaagcttatagcaaggggttccaagaggggcttaagaagacaaaagaattgcaggatctgaaggaagaggaggaggagcaaaagagtgagtcgcccgaagagccggaggaagtcgaggagacagaagaggaggagaagggaccaaggtcttcaaagttggaagaacttgtgcactttctgcaagtcatgtacccgaagttgtgccagcactggcaggttatatggatgatggcggctgtgatgcttgtgctaacggtggtactgggtctctataatagttacaattcctgcgccgagcaggcagacggccctctgggccgaagcacttgctccgccgcacagcgcgacagttggtggagttccggactccagcacgagcagcccactgaacagtag

SEQ ID NO: 40359 - DNA, 1794 bp, Artificial Sequence
  derived and/or modified sequence
atggccctgaacagcccccagcccggccccgtggagagcgagctgggcaagcagctgctaaagaccggttgggaaggcagcccattgccaagaagccccacacaggatgccgctggggtcgggccgcctgcatcccagggtagaggtcccgccggggaacccatgggacccgaggctgggagcaaggcggaactcccccccactgtgagtcgacccccactactccggggactatcttgggatagtggtcctgaagaacccggacctagacttcagaaagtactggccaagctgcccctggccgaggaagaaaagcgcttcgccggcaaggccggtggcaaattggccaaagccccaggactaaaagattttcagattcaggtgcagcccgtgaggatgcaaaagctaactaaactgcgcgaagaacacatccttatgcgcaatcaaaacctggttggcctgaagctccccgacctgagtgaagccgcggagcaggaaaaggggctcccgagcgaactgtcccccgccattgaagaagaagaatccaagtccggattagacgtcatgccaaatatttctgacgttctgctacggaaactgcgcgtccatcgctccctgccgggtagcgcgccaccactgacagagaaggaggtggagaacgtcttcgtacagttgtctttggcattccgtaatgacagctatacgttggagtcacgcatcaaccaggccgagagggaacgtaacttaaccgaagagaatacagaaaaggagttggaaaacttcaaggcttccatcacgagctccgccagtctgtggcatcattgcgagcaccgcgaaacctatcagaagcttctggaagacattgccgttttgcaccgcctcgctgcacgccttagtagcagggccgaagtggtcggcgccgtcagacaggaaaaaagaatgtcaaaagcgacggaagtcatgatgcagtatgtggagaatctgaaacgtacctacgagaaggaccatgcagagctcatggaatttaagaaactagctaaccagaatagtagccgttcctgtgggccctctgaggacggtgtgccacggacggccaggtctatgtcactgactctcgggaagaatatgccccgaaggagggtctccgtcgccgtggttcctaagttcaacgctttgaacttaccaggccagacgccctcctctagtagtattccgtccctcccagctttgagcgagtcccccaatggcaagggtagcctgccagttacctctgcattgcctgcgctcttggagaacggcaaaaccaacggggacccggactgtgaggccagtgcacctgcgctaaccctgtcctgtctcgaggaactgtcccaggagactaaggcccgaatggaagaggaggcatactcaaaaggattccaagagggcctcaagaaaacaaaggagcttcaggatcttaaagaagaggaggaagagcaaaagtccgagagcccagaagagcccgaagaagtagaagaaacagaggaggaagagaaaggacctaggagttctaaactggaggagctcgtgcacttcctgcaggtcatgtacccaaaactttgccagcactggcaggtcatatggatgatggctgccgtgatgctcgttttgaccgtggtgctcggcctttacaacagttataattcgtgcgcagaacaagctgacggaccccttggccggtctacctgttccgccgctcaacgagattcctggtggtcatccggactgcagcacgagcagccaacggaacagtag

SEQ ID NO: 40360 - DNA, 1794 bp, Artificial Sequence
  derived and/or modified sequence
atggcgctgaattctccgcaacccggacctgtggagagcgaactgggaaaacagctgctgaaaacgggttgggaggggtctcccctgccacgtagcccaacacaggatgccgcaggagtcgggcctccagctagtcaaggccgtggcccagcgggagaacccatgggccctgaagcaggtagtaaagccgagctaccaccaacagtgtctaggccgccactactcagagggctgtcttgggactcaggccctgaggagcccggaccaagactgcagaaagtgcttgccaagctccctttagctgaggaagaaaagcggtttgccggtaaggcaggtggtaaactggccaaggcaccaggactaaaggattttcagatccaggtccagcctgtgcgcatgcaaaagctcactaagctgcgggaagaacatattctaatgaggaatcaaaatctggtggggctaaaactgcccgatctgtctgaagcagccgaacaggaaaaaggcctgcctagcgagctctccccggctattgaagaggaggaatccaaatcagggctggacgtgatgcccaacatatctgacgtgctgcttcgaaagctgcgcgttcaccgtagcctgcctggaagtgcgccacccctgactgaaaaggaagttgaaaatgtgtttgtccagctgtccctggcctttcgcaatgacagctacacgttagagtcccgaataaaccaggcagagagggagcgaaacttgaccgaagaaaacaccgaaaaagagctcgaaaactttaaagcttcgattacctcgtccgcctccttgtggcaccattgtgagcaccgggagacataccagaagctgctcgaggatattgccgtgttacaccggttagccgctcgcttaagcagtagagcggaggttgtgggcgcagtaaggcaggaaaaaaggatgtcaaaagccaccgaagtcatgatgcagtacgtggagaacttgaaacggacttacgaaaaggatcacgccgagctgatggagttcaaaaaacttgctaatcagaattcctcaaggtcctgcggcccatccgaggatggcgtgcccaggaccgccagaagcatgtcgcttacactgggtaaaaacatgccgcgtaggcgagtctctgtggccgttgtcccgaaattcaacgccttgaaccttccagggcagacaccttcgagcagcagtatcccatcattgccagccctcagcgaatcgccaaacggaaagggttccctgccagtcaccagtgcactgccggcactgctggaaaacggcaagacaaatggagaccctgattgcgaagcttctgctccagcactgaccctaagttgtctggaggaactgtcccaggagacaaaagcccgaatggaggaggaggcttatagtaagggcttccaggagggcctcaagaagaccaaagagttacaggaccttaaggaggaagaggaagagcaaaagtcagaatcccctgaggaaccagaggaagtggaagagaccgaagaggaggagaaaggccctcgcagttccaagcttgaggagcttgtccattttctccaggtgatgtacccaaagctgtgtcagcattggcaggtgatttggatgatggccgctgtgatgctggtgctcaccgtcgtactcggcctgtataactcctacaactcctgtgccgagcaggcagacgggccactgggacgttccacatgctcggcagcgcaaagagactcctggtggagtagcggcctgcagcatgagcagccgacagagcaatag

SEQ ID NO: 40361 - DNA, 1794 bp, Artificial Sequence
  derived and/or modified sequence
atggccctgaattcccctcagccaggcccagtggagtcagaactgggcaaacaactgttgaagacaggctgggaggggtcacccttaccccgatcacctacccaagacgctgcaggggtgggccctcccgcatcccagggccgagggccagctggagagcctatggggccagaggcaggctcaaaagcagaactccctcccactgtatccaggccccctctcttgagaggactgtcctgggattccggaccagaagagccgggacctcgactacaaaaagtgctggcaaagctgccactagccgaggaggaaaaacggttcgctggaaaggccggaggtaaacttgccaaagcccctggcctcaaggactttcagatccaggttcaaccagttcgaatgcaaaagctcactaagctgagggaagaacacattctaatgaggaaccaaaatctcgtcgggctaaagctgcccgatctgtccgaagctgccgagcaggagaagggcctccctagcgagctgtccccagctatcgaagaggaagagagcaaatcagggttagacgttatgccaaacatttctgatgtcctcctgagaaagctgcgcgttcatcggtcactgccgggttctgcaccacctttgacagagaaggaagtcgagaatgtgttcgtgcagttgagcttagcattcaggaatgactcttacactctagagtctcgcattaatcaggccgagcgagaacgcaaccttacagaggaaaacaccgagaaagaactcgaaaattttaaggcgagcattaccagttcagcttcactgtggcaccattgcgagcaccgggagacgtatcagaagctgttagaggacattgccgttttacacagactggccgctcgtctgtcttcacgggctgaggtcgtgggtgccgtgagacaagagaaacggatgagtaaagccaccgaggtcatgatgcagtacgtggaaaatctcaagaggacctacgagaaagaccatgccgagctgatggaattcaagaagttggccaatcagaactcaagtcggtcctgcggcccaagtgaggacggagttccccgaaccgcgaggagcatgagcctcacgctgggcaaaaacatgccacggcgacgggttagcgtggctgtcgtgccaaagttcaatgccttaaacctgccgggtcagaccccaagctcatcctccataccatccttgccagcccttagcgaaagtccgaatggaaagggtagtctgcccgtgaccagcgcgctgcccgctctccttgagaacggcaagacaaacggagatccagactgcgaggcaagcgcccctgccctgactcttagttgtttggaagagctaagtcaggaaactaaggctaggatggaggaggaggcctacagcaaggggttccaagaagggctgaaaaaaacaaaagagctgcaagacctgaaggaggaagaggaggagcagaagagtgagagccccgaagaaccagaggaagtcgaagagacagaggaggaggaaaagggtccccgttcatccaaattggaagaactggtccattttctccaagtaatgtaccccaagctgtgtcagcactggcaagtgatttggatgatggccgctgtgatgctggtgctcactgtggttttggggctgtataatagttacaatagctgcgccgaacaggctgatggtccactcggcaggagtacgtgcagtgccgctcaaagagactcttggtggtcctccggactccagcatgaacagcccacagaacagtag

SEQ ID NO: 40362 - DNA, 2466 bp, Artificial Sequence
  derived and/or modified sequence
atgactggagacgccacaagccctgagggagagacggacaagaacctggcgaaccgagttcattccccacataagcgcctgtcacacaggcatctcaaggttagcacagcatcattgacgtccgttgaccctgcagggcatattatcgatctagtgaacgatcagttgcccgacatcagcatatctgaggaggataaaaaaaaaaacctggcactgctggaagaggccaaactggtctctgagcgatttctaacaaggaggggccgtaaatcacggagcagtccaggcgacagtccttccgcagtttcccccaatctgtcaccgagcgcaagccctacaagctcacgctctaactcactcacggtgccgacaccacctgggctggatgtgtgctccggccctccgtctcccttaccgggtgcaccccctcagaaaggggatgaggctgacgtgtctagccctcacccaggagaacctaatgtccctaaggggctggctgatagaaaacagaatgatcaacgaaaggttagtcagggccgtctggcgccacgtccacccccagtggaaaagtcaaaggaaatagctatcgagcaaaaagaaaattttgacccactgcagtacccagagacaactcccaaaggactggcaccggtgacaaatagttccggaaagatggccctcaactctcctcagccaggccctgtggagtccgagctgggaaagcagctcttaaagactggctgggaaggatcccccttgcccaggagccccactcaggacgctgctggggtggggcctccggcaagccagggcagggggcctgcaggtgaacccatgggtcccgaggctggctccaaggctgagctgccacctactgtatctaggcctcctttgcttcgcggtctgagttgggacagcggacctgaggagcccggaccaagactgcagaaggttctggctaagctccctctcgctgaggaagagaaacggttcgccggaaaagctggcggaaagttggcaaaagcaccagggcttaaggattttcagattcaagtccagccggtccgtatgcagaaactgactaagctgcgagaggaacatatcctcatgcgcaatcagaacctggttgggctaaagctgcctgatctgtcggaggctgccgaacaggagaaaggattgccttcagagttgagcccggcaattgaggaggaggagtcaaaatccgggctcgatgtgatgccaaacatttcggatgttctgctgagaaaactgagggtccacaggagtctccctggctcagcccctccgctgactgagaaggaggtggaaaacgttttcgttcagctgtctctggcattcagaaatgactcttacactctagaatcccgaattaatcaggcagagcgcgaacggaacctcacagaagagaacaccgaaaaagaactcgaaaactttaaagccagtattacaagttcagcgagtctgtggcatcactgtgagcatagagaaacctaccagaagttgctcgaagatattgctgtactgcacaggcttgctgcccgtctgtcctctcgggcagaagtcgtcggagctgtacgccaggaaaagagaatgagcaaagcgacggaggtcatgatgcaatacgtcgaaaacttaaagcgtacctacgaaaaagatcacgctgagctgatggagtttaagaaactggctaatcaaaattcaagcaggagctgtgggcctagcgaggacggggtgccccgaactgccagatcaatgagcctcacgttaggcaaaaatatgccacgtcgaagagtttcagttgctgtggtacccaagttcaatgccctgaacctgcccggacagactccgtcctcctcctcaatcccaagcttgccagcactttcagagtcgccaaacggtaaaggtagcctgcccgtgaccagcgcgctaccagccctgctcgagaatggcaagaccaacggcgatcctgactgcgaagcttctgccccagctctcacactgagctgcctcgaggaactgtcccaggaaacaaaggcacggatggaagaagaggcctacagtaagggttttcaggaagggctcaagaagactaaagagttgcaggacttgaaggaagaggaagaagagcagaagtctgaatccccggaagagcccgaggaggtcgaagaaaccgaagaagaggagaaggggcctcggtcctccaagctggaggaactcgtccactttctccaggtgatgtatcctaagctgtgtcagcactggcaggtaatctggatgatggcagcggtgatgcttgtactgaccgttgtcttgggactgtataattcttacaactcatgtgctgagcaggccgacggccctttgggcaggtccacatgctccgctgcacagagagattcttggtggagttctggcctgcaacatgaacagccaacagagcagtag

SEQ ID NO: 40363 - DNA, 1794 bp, Artificial Sequence
  derived and/or modified sequence
atggcactgaactcaccccagcctggtccggtcgaaagcgaactcggtaagcaactgctgaagactggctgggagggaagtcctcttcccaggagccctacacaggatgccgcaggagtcggtccacctgcctcacagggcaggggtccagctggggaaccgatggggccagaggctgggtcgaaagccgagctgcccccaacagtgtcacgcccaccactgctccggggactctcttgggacagcggccctgaggaaccgggtccacgcctgcagaaagtccttgccaaactgcccctggccgaggaggaaaaacgcttcgccggtaaagcagggggaaagctggccaaggcccctgggcttaaagatttccagattcaagttcagccagtccgcatgcagaagctgacaaagctgagagaggagcatatcttgatgcggaatcagaatctggtcggccttaagttgcctgacttgagtgaggcagcggaacaggagaagggtctccctagtgaactgagtcctgccatcgaagaggaagagtccaaaagcggccttgacgttatgcccaacatcagcgacgtgctcctgcggaaactgcgtgttcatcgtagcctgcccggatctgcccctcccctgacagaaaaggaagttgaaaatgtttttgtccagctgagcctggcattcaggaatgacagctatacgctagagtctcggattaatcaggctgagcgtgaaagaaatctgaccgaagaaaataccgagaaagaattagaaaactttaaagcttcgatcacaagcagtgcttcattgtggcaccactgcgagcacagggagacataccagaagctgctggaggacatagccgtgttacatcgcttggccgcacggctcagcagtagagccgaagtggtgggcgctgtccgtcaggagaagcgcatgtccaaagccacggaggtcatgatgcagtatgttgagaacctgaaaaggacttacgaaaaagatcacgccgagttaatggagtttaagaagcttgcaaatcagaatagtagcagatcttgcggcccatcagaggacggggtgccccgtaccgcgagatcaatgtcccttactctcggcaaaaatatgcctcggaggcgtgtctctgtggcggtggtgcctaagttcaacgctttaaacttaccgggtcagacgccctctagcagctcaattcctagcttgcctgctctttcggaatcacccaatgggaagggcagtttgcccgttacaagcgctttgcccgcattactcgaaaacgggaagacaaatggcgaccccgactgcgaagccagcgccccagccctaactctatcctgcctggaggagctgagccaagagactaaagcacggatggaggaagaagcctactcaaagggctttcaggaaggattaaaaaaaacaaaagagcttcaagatctgaaggaagaggaagaagaacagaagagcgaaagtcctgaagagcccgaggaggtggaagagacagaggaagaggaaaagggaccgaggagcagcaagcttgaagaactcgttcactttctgcaggtcatgtaccctaaactgtgccagcactggcaagttatttggatgatggccgctgtgatgctagtactgacagtggttctcggtctctacaactcatataatagctgcgcggagcaggctgacggcccattgggacggtcgacttgttccgccgctcagagagacagctggtggtcttctggccttcagcacgagcaacccacagaacagtag

SEQ ID NO: 40364 - protein, 645 aa, Artificial Sequence
  derived and/or modified sequence
MGQTSVSTLSPQPGSVDGLDKASIANSDGPTAGSQTPPFKRKGKLSTIGKIFKPWKWRKKKTSDKFRETSAVLERKISTRQSREELIRRGVLKELPDQDGDVTVNFENSNGHMIPIGEESTREENVVKSEEGNGSVSEKTPPLEEQAEDKKENTENHSETPAAPALPPSAPPKPRPKPKPKKSPVPPKGATAGASHKGDEVPPIKKNTKAPGKQAPVPPPKPASRNTTREAAGSSHSKKTTGSKASASPSTSSTSSRPKASKETVSSKAGTVGTTKGKRKTDKQPITSHLSSDTTTSGTSDLKGEPAETRVESFKLEQTVPGAEEQNTGKFKSMVPPPPVAPAPSPLAPPLPLEDQCITASDTPVVLVSVGADLPVSALDPSQLLWAEEPTNRTTLYSGTGLSVNRENAKCFTTKEELGKTVPQLLTPGLMGESSESFSASEDEGHREYQANDSDSDGPILYTDDEDEDEDEDGSGESALASKIRRRDTLAIKLGNRPSKKELEDKNILQRTSEEERQEIRQQIGTKLVRRLSQRPTTEELEQRNILKQKNEEEEQEAKMELKRRLSRKLSLRPTVAELQARRILRFNEYVEVTDSPDYDRRADKPWARLTPADKAAIRKELNEFKSTEMEVHEESRQFTRFHRP

SEQ ID NO: 40365 - DNA, 1938 bp, Artificial Sequence
  derived and/or modified sequence
atgggccagaccagcgtgagcaccctgagcccccagcccggcagcgtggacggcctggacaaggccagcatcgccaacagcgacggccccaccgccggcagccagaccccccccttcaagagaaagggcaagctgagcaccatcggcaagatcttcaagccctggaagtggagaaagaagaagaccagcgacaagttcagagagaccagcgccgtgctggagagaaagatcagcaccagacagagcagagaggagctgatcagaagaggcgtgctgaaggagctgcccgaccaggacggcgacgtgaccgtgaacttcgagaacagcaacggccacatgatccccatcggcgaggagagcaccagagaggagaacgtggtgaagagcgaggagggcaacggcagcgtgagcgagaagaccccccccctggaggagcaggccgaggacaagaaggagaacaccgagaaccacagcgagacccccgccgcccccgccctgccccccagcgccccccccaagcccagacccaagcccaagcccaagaagagccccgtgccccccaagggcgccaccgccggcgccagccacaagggcgacgaggtgccccccatcaagaagaacaccaaggcccccggcaagcaggcccccgtgcccccccccaagcccgccagcagaaacaccaccagagaggccgccggcagcagccacagcaagaagaccaccggcagcaaggccagcgccagccccagcaccagcagcaccagcagcagacccaaggccagcaaggagaccgtgagcagcaaggccggcaccgtgggcaccaccaagggcaagagaaagaccgacaagcagcccatcaccagccacctgagcagcgacaccaccaccagcggcaccagcgacctgaagggcgagcccgccgagaccagagtggagagcttcaagctggagcagaccgtgcccggcgccgaggagcagaacaccggcaagttcaagagcatggtgccccccccccccgtggcccccgcccccagccccctggccccccccctgcccctggaggaccagtgcatcaccgccagcgacacccccgtggtgctggtgagcgtgggcgccgacctgcccgtgagcgccctggaccccagccagctgctgtgggccgaggagcccaccaacagaaccaccctgtacagcggcaccggcctgagcgtgaacagagagaacgccaagtgcttcaccaccaaggaggagctgggcaagaccgtgccccagctgctgacccccggcctgatgggcgagagcagcgagagcttcagcgccagcgaggacgagggccacagagagtaccaggccaacgacagcgacagcgacggccccatcctgtacaccgacgacgaggacgaggacgaggacgaggacggcagcggcgagagcgccctggccagcaagatcagaagaagagacaccctggccatcaagctgggcaacagacccagcaagaaggagctggaggacaagaacatcctgcagagaaccagcgaggaggagagacaggagatcagacagcagatcggcaccaagctggtgagaagactgagccagagacccaccaccgaggagctggagcagagaaacatcctgaagcagaagaacgaggaggaggagcaggaggccaagatggagctgaagagaagactgagcagaaagctgagcctgagacccaccgtggccgagctgcaggccagaagaatcctgagattcaacgagtacgtggaggtgaccgacagccccgactacgacagaagagccgacaagccctgggccagactgacccccgccgacaaggccgccatcagaaaggagctgaacgagttcaagagcaccgagatggaggtgcacgaggagagcagacagttcaccagattccacagaccctag

SEQ ID NO: 40366 - DNA, 1938 bp, Artificial Sequence
  derived and/or modified sequence
atgggacagacatctgtgagtacattatcgccacagccgggaagtgtggacggtcttgataaggcatctatagccaactccgatggcccaacagctgggtcccagacacccccgttcaagagaaagggtaagctgagtaccattggcaaaatctttaaaccctggaagtggaggaaaaaaaaaacatcggataagtttcgagagacgagcgctgttcttgagaggaagataagcactcgccaaagccgcgaggagctgattcgtagaggcgtcctcaaagaacttcccgaccaggacggcgatgttaccgtgaactttgaaaacagtaacggacacatgatccccattggtgaagagagcactagggaggaaaacgtggtcaagagcgaggagggaaatggcagcgtatccgagaagaccccccccctggaggaacaggccgaggacaagaaagagaatactgaaaatcattccgagacgccagcagcaccagctctgcctcctagcgcccctccaaaacccaggcctaaacctaagcccaaaaagtcccccgtaccaccaaagggggccaccgccggtgcgtcccataagggcgacgaggtcccccccatcaagaaaaacaccaaggctcctgggaagcaggctccggttccccccccgaaacctgcttctcggaacactacacgggaagcagccgggagttctcatagtaaaaagactaccgggagtaaagcctccgcaagccctagtacatcctctacatcatctagaccgaaggcgagcaaggagaccgtgtcctccaaggcgggcactgtgggcacgacgaagggcaagcggaagaccgacaagcagcctattacaagtcatctcagctccgataccaccaccagtggtacatccgacctgaaaggcgagcccgcagagacgagggttgagagctttaagttggaacagactgtgcccggagcagaagaacagaataccggtaaattcaagtctatggttccaccgccgcccgttgctccggctccctccccgttagcacctcccttacccctggaagaccaatgtatcacagccagtgacacacctgtcgtgctggtgtccgtgggggccgacctccctgtgagcgcattagatccctcacagttactctgggccgaagagccaacaaatcgcaccacactgtacagcggcaccggcctgtctgttaatcgcgaaaacgcaaagtgctttaccacaaaggaggagctggggaagacggtgccccagttactgacccctgggctgatgggggagtccagcgaatcattcagtgcgtcagaggatgagggacatagagaatatcaggcgaacgactccgactctgacggaccaattctctataccgacgatgaggacgaggatgaagatgaagacgggtcgggcgagagcgctctggcctctaaaattagaagaagagacactcttgccatcaaacttggtaatcggccgtcaaaaaaagagctggaagacaagaacattcttcagcgaacttctgaagaagagagacaggagatacggcagcagattggaacgaagctggtacgacgtctctctcagagacctacaaccgaggagctggagcagcgcaatattctcaagcagaaaaacgaggaggaggagcaggaggccaaaatggagttgaagcgacgcctgtctcggaagctgtctctccgcccaacagttgcagagctccaggcccgacgcatcctccggtttaacgagtatgtggaagtaacagatagccctgactacgataggagagcagacaagccctgggcccgcctcacccccgcggacaaggcagcaatccggaaagaactgaacgagtttaagagtactgaaatggaagtccatgaggaatcacgccaattcacacggttccacagaccctag

SEQ ID NO: 40367 - DNA, 1938 bp, Artificial Sequence
  derived and/or modified sequence
atgggccagacctctgtgtccaccctgagcccccagcccggctctgtggatggcctggacaaggccagcatcgccaacagtgatggccccacagctggcagccagaccccacccttcaagaggaagggcaagctgagcaccatcggcaagatcttcaagccctggaagtggaggaagaagaagaccagtgacaagttccgggagaccagcgctgtgctggagaggaagatcagcacccggcagagccgggaggagctgatccggcggggcgtgctgaaggagctgcctgaccaggatggagatgtgacagtgaactttgagaacagcaatggccacatgatccccatcggggaggagagcacccgggaggagaatgtggtgaagtctgaggagggcaatggatctgtgtctgagaagaccccacccctggaggagcaggccgaggacaagaaggagaacacagagaaccacagcgagaccccagctgccccagccctgcccccatctgccccacccaagccccggcccaagcccaagcccaagaagagccctgtgccccccaagggggccacagctggggccagccacaagggagatgaggtgccccccatcaagaagaacaccaaggcccctgggaagcaggcccctgtgcccccacccaagccagccagcaggaacaccacccgggaggccgccggcagcagccacagcaagaagaccaccggcagcaaggccagcgccagccccagcaccagcagcaccagcagccggcccaaggccagcaaggagaccgtgagcagcaaggccggcaccgtgggcaccaccaagggcaagaggaagacagacaagcagcccatcaccagccacctgagcagtgacaccaccaccagcggcaccagtgacctgaagggggagcctgctgagaccagggtggagagcttcaagctggagcagacagtgcctggagctgaggagcagaacacaggcaagttcaagtccatggtgcccccacctcctgtggccccagcccccagccccctggccccacccctgcccctggaggaccagtgcatcacagccagtgacacccctgtggtgctggtgtctgtgggcgctgacctgcctgtgtctgccctggaccccagccagctgctgtgggccgaggagcccaccaacagaaccaccctgtacagcggcaccggcctgtctgtgaacagagaaaatgccaagtgcttcaccaccaaggaggagctgggcaagacagtgccccagctgctgaccccaggcctgatgggagagagcagcgagagcttcagcgcctctgaagatgagggccaccgggagtaccaggccaatgacagcgacagtgatggccccatcctgtacacagatgatgaagatgaagatgaagatgaagatggcagcggggagagcgccctggccagcaagatcagaagaagagacaccctggccatcaagctgggcaaccggcccagcaagaaggagctggaggacaagaacatcctgcagaggaccagcgaggaggagcggcaggagatccggcagcagatcggcaccaagctggtgcggcggctgagccagaggcccaccacagaggagctggagcagaggaacatcctgaagcagaagaatgaggaggaggagcaggaggccaagatggagctgaagaggcggctgagcaggaagctgagcctgcggcccaccgtggccgagctgcaggcccggcgcatcctgcgcttcaatgaatatgtggaggtgacagacagcccagactatgacagaagagctgacaagccctgggcccggctgaccccagctgacaaggccgccatcaggaaggagctgaatgagttcaagagcacagagatggaggtgcatgaggagagccggcagttcacccgcttccaccggccctag

SEQ ID NO: 40368 - DNA, 1938 bp, Artificial Sequence
  derived and/or modified sequence
atgggccagaccagcgtgagcaccctgagcccccagcccggcagcgtcgacggcctcgataaggcgtcaatcgccaacagcgacggcccaacggcaggaagccaaacccccccattcaagcgcaaagggaagctgtctaccattggaaaaattttcaagccatggaaatggcgcaagaagaaaacaagcgacaaattcagggagacgtctgccgtcttggagaggaagatttcgacgcgccaatcaagagaagaacttattcgaaggggtgtgctaaaggaactacccgatcaggatggagacgttactgtgaatttcgagaattcaaatggacacatgattcctatcggcgaggagagtaccagggaagagaatgtcgtgaaatccgaggagggtaacggaagtgtatcagaaaagacgcccccgttagaagagcaggccgaagataagaaggaaaacacggagaaccacagtgaaacccccgcagcccctgcactacccccttctgcaccgccaaagccccgacccaaacccaaaccaaagaagtcccctgtaccccctaagggcgccactgccggggccagccacaagggggacgaggtgccacccatcaaaaagaacactaaagcgccgggcaagcaggctcctgtccctcctcccaagcctgcttcacgaaacaccacccgggaagccgccggttcctcccacagcaaaaagactactgggtcgaaggcctccgcctctccttcaaccagtagcacgtcctctagaccaaaggcgtccaaagaaaccgtgtcgagcaaagccggcacagtcggaactaccaaagggaagaggaagactgacaagcagcctattactagccacctgtccagtgatactacaacttcaggcacgtcagacctgaagggggagccagcagaaactagggttgagtcttttaaacttgaacaaacagtgcctggtgcagaagagcaaaacacaggaaaattcaagagcatggtaccaccccctcctgtggcgccagcaccctcacctttggccccccctctcccccttgaggatcagtgtattactgcaagcgacaccccagtcgtcctcgtgagcgtgggcgctgatctgcctgtgtctgctcttgatccatcccaactgctgtgggcagaggagcctaccaatcgcacaacactatatagtggcacgggtctcagtgtgaatagggaaaacgctaagtgctttacaacgaaagaagaactcggcaagacggtaccccagcttctaacccccggactgatgggtgaatcaagcgaatcattctccgccagcgaggacgaagggcatcgggaatatcaggccaatgacagtgatagcgacggacccatcctatataccgatgacgaggatgaagacgaagatgaggacggttcgggtgaaagcgctctcgcctctaaaatacgccgaagggacaccttggctatcaagctgggcaaccgcccatctaagaaggagttagaggacaaaaatattcttcaacggacatcggaggaagaacgccaggaaatcagacagcagatcggaactaagctagtgcgtcgcctgtcacaacggccaacaacggaggagctagagcagcgtaacatcctgaaacagaaaaatgaggaggaagaacaggaagccaaaatggaactgaaacggcgcctaagtaggaaactgagccttagacctacggtcgcagaactgcaggcacgcagaatcctgcggtttaatgagtacgtggaggttacagactctccagactacgatcgccgggccgacaagccttgggcacgactgacacccgcggacaaagccgcgatacgtaaggaactgaacgagtttaagtccaccgaaatggaagtccacgaggagtcgagacagttcactaggtttcacaggccttag

SEQ ID NO: 40369 - DNA, 2569 bp, Artificial Sequence
  derived and/or modified sequence
atccgctgggcaggatccgccgcgccggctgcggccggccgggctgggagacccgcgcggggtagaaggtgaggggacccggcgggccgctcggcacaggccgggacatgaacgcctggaagtctggctgggagcggacccatgatcgaaggaccaaaggagccgcttgatcgctggacctggccctgcgaccccagtcatgggccagacctcggtgtccacgctgtccccgcagcccggcagcgttgacggactggacaaagcttctatagcaaactcagatggccccacagcaggttcccaaacacctcccttcaaaagaaaggggaaactatccaccattggtaaaatctttaagccttggaaatggaggaaaaagaagaccagcgacaaatttagagaaacctcggcagtattagaaaggaagatatccacacgacaaagtagagaggagctgataagaaggggagtgcttaaggaattgcctgatcaagatggagatgtaacagttaactttgaaaattcaaacgggcacatgatacccatcggagaggaatctacccgagaggaaaatgtagtaaagtctgaagaaggtaatggctctgtatctgaaaaaacaccacctctggaggaacaggcagaagataagaaagagaacactgaaaaccactctgaaacaccggcagctcctgctctacctccttctgctcctcctaagcctagacccaaacctaaacccaaaaaatcacctgtgcctccgaaaggggccactgctggggccagccacaaaggtgatgaagtgcctcccattaaaaaaaataccaaggctcctggtaagcaggcccccgtccctccacccaagccagcaagccgaaacacgacccgagaggctgctggctcctctcattcaaaaaaaacaactggctctaaagcatcagcttcgccatccacttcatccacctcatctcgtcccaaagcttcaaaggagacagtttctagcaaagcagggacagtggggaccaccaagggcaagagaaaaactgacaagcagccaataacttctcacctgtcctcagacacaacaacttctggcacatccgacctgaaaggagagcctgcagagaccagagtggagagtttcaaactcgaacagactgtccctggagctgaggagcagaacacaggcaaattcaagtccatggtccctccaccccctgtggctccagcaccttctcctctggccccccctctccctcttgaggatcagtgcattactgcctcagacactccagttgtcctcgtcagcgttggagctgacctgcccgtctctgccttagacccaagtcagcttctttgggctgaagagccgacgaacagaaccactctctactcaggcactggcttaagtgttaacagagaaaatgcaaaatgtttcacaaccaaagaggagctggggaagacagtgcctcagctactgactcctgggctgatgggcgaatcttcagaatcctttagtgcctcagaagatgaaggccacagggaataccaagccaatgactctgactcggacgggcctatcttgtacaccgatgatgaggacgaagacgaagatgaggatggcagtggagaaagtgctttggcaagtaaaatacgccggagggatactcttgctatcaaacttggcaacagaccatctaagaaagaactagaggacaaaaacatcttgcagcgtacatctgaagaagagaggcaggaaatccgacaacaaattggaaccaagttagtcaggaggctgagccagaggcccacaactgaagaattagagcaaagaaacatcctaaaacaaaagaatgaagaagaggaacaagaagcaaaaatggaacttaaacgcagactcagcagaaagctcagcctgagacccacagtggcagagctacaagctcgaaggatcctgcgatttaacgagtatgtagaagtcacggattctcctgactatgaccgccgagcagacaagccctgggccaggttaacacctgcagacaaggcagcaataaggaaagaactaaatgaatttaaaagcacagaaatggaagttcatgaagagagtcgacagtttacaaggtttcatcgtccataacgaagagtgagactatttggaaacagagactgatcatctttgggggaagccctgcttcctgaaaacctgatattgcactgggatttgaatgtgtgtgtttccgtttaacttgtggtgaaggaagtgtgtgactcagcttggctgggaagtgctcctcacctgtgtggcccagatggctccaacaagcaaaaggaaggatgcagtgactcttgctgcccagaatgcacagcgatggtaagagacaccgtggatattcttcatcagaagctttaatcaaagaagatgagcagaagacaatcactggctccctgttaccagaaagccaaattttataatgcgggtgaaagaaaaatatagattaaaattgctgggcactgaaaaggggtgggagttggaaatcagaaagaaagagaaatatttcattatgttaat

SEQ ID NO: 40370 - DNA, 1938 bp, Artificial Sequence
  derived and/or modified sequence
atgggacagacttctgtctctacactgagtccccaacccggttcagtcgacggactggataaagcttcgatagcgaactctgacggaccgaccgcgggtagccagacgcctcctttcaagcgtaaaggcaagttatccactattggcaagattttcaaaccctggaagtggcggaaaaaaaaaacgagcgataaattccgggaaaccagcgcggttctggagagaaagatctctacaagacaatcgcgggaagagctaataaggaggggcgtactgaaagagttgcctgatcaggacggtgacgtgacagttaatttcgagaatagtaatgggcacatgatccctattggcgaagaatcaacccgtgaagaaaacgtagttaaaagcgaggagggcaatggctctgtgtccgagaaaaccccccctttggaggaacaagccgaagataagaaggaaaacactgaaaaccactcagagacccctgctgctcccgctttgcctccatctgcccctcccaagcctaggcctaagcctaagcccaagaagtctcccgtcccaccaaaaggtgctactgccggtgcatcccataaaggcgatgaggttccacccatcaagaaaaacacaaaagcacctggtaagcaggcgccagtaccaccacccaaaccagcatcgagaaacacaactagggaggctgcaggaagttcccattctaagaaaacaacaggctctaaagcgagtgcaagccctagcacatcttccacctcatcacggcctaaggcatctaaagagacagtgtcctccaaagccggaacagtggggactactaaagggaaacgaaagaccgacaaacaaccaatcacatctcacctgtccagcgacacaaccacttcagggacatccgaccttaagggggagccagccgagactcgggtggagtcttttaaattggagcaaacagtcccaggggcagaggagcagaacacaggtaagttcaagtcgatggtgccaccccctcccgtggccccagctcctagccctctggcccctcctctaccacttgaagatcaatgcattacagcctctgatactccagtggtgctggtcagtgtcggcgctgaccttccagtttccgcactagacccatcccagctattatgggctgaagagccaacaaacagaacaacgctatactcgggcactggtctgtctgtgaaccgggagaacgcaaaatgcttcaccactaaggaggagctgggaaagacggtcccccagttgctaaccccaggactgatgggcgagtcatccgagtccttcagcgccagtgaggatgaaggacatagggagtaccaggctaatgattctgacagcgatggcccaattctctacaccgatgacgaggacgaagatgaagacgaggacggatccggcgagtctgcccttgcctctaaaatccgcagacgcgacacgttggctataaaactggggaatcggccatctaagaaggagttggaggacaagaacatcctgcagcgtacatcagaagaggaaagacaggaaatccggcaacaaatcggcaccaagctggtacggagactgagccagcgccctactacagaggagctggagcagcgaaacatactaaagcaaaaaaatgaagaggaagagcaggaggccaagatggaacttaagagaaggctgtctcgaaagcttagcctgagacctaccgtggccgagttgcaggccaggcgaattctccgtttcaacgagtatgtggaggtcaccgatagtcctgactacgataggagagccgataagccgtgggctcggcttacaccagctgacaaggctgcaatccgcaaggaactgaacgagtttaagtccactgagatggaagttcacgaagagagcaggcagtttactcggtttcaccgaccttag

SEQ ID NO: 40371 - protein, 565 aa, Artificial Sequence
  derived and/or modified sequence
MGQTSVSTLSPQPGSVDGLDKASIANSDGPTAGSQTPPFKRKGKLSTIGKIFKPWKWRKKKTSDKFRETSAVLERKISTRQSREELIRRGVLKELPDQDGDVTVNFENSNGHMIPIGEESTREENVVKSEEGNGSVSEKTPPLEEQAEDKKAGSSHSKKTTGSKASASPSTSSTSSRPKASKETVSSKAGTVGTTKGKRKTDKQPITSHLSSDTTTSGTSDLKGEPAETRVESFKLEQTVPGAEEQNTGKFKSMVPPPPVAPAPSPLAPPLPLEDQCITASDTPVVLVSVGADLPVSALDPSQLLWAEEPTNRTTLYSGTGLSVNRENAKCFTTKEELGKTVPQLLTPGLMGESSESFSASEDEGHREYQANDSDSDGPILYTDDEDEDEDEDGSGESALASKIRRRDTLAIKLGNRPSKKELEDKNILQRTSEEERQEIRQQIGTKLVRRLSQRPTTEELEQRNILKQKNEEEEQEAKMELKRRLSRKLSLRPTVAELQARRILRFNEYVEVTDSPDYDRRADKPWARLTPADKAAIRKELNEFKSTEMEVHEESRQFTRFHRP

SEQ ID NO: 40372 - protein, 178 aa, Artificial Sequence
  derived and/or modified sequence
MGQTSVSTLSPQPGSVDGLDKASIANSDGPTAGSQTPPFKRKGKLSTIGKIFKPWKWRKKKTSDKFRETSAVLERKISTRQSREELIRRGVLKELPDQAGSSHSKKTTGSKASASPSTSSTSSRPKASKETVSSKAGTVGTTKGKRKTDKQPITSHLSSDTTTSGTSDLKGEPAETRV

SEQ ID NO: 40373 - DNA, 1698 bp, Artificial Sequence
  derived and/or modified sequence
atgggccagaccagcgtgagcaccctgagcccccagcccggcagcgtggacggcctggacaaggccagcatcgccaacagcgacggccccaccgccggcagccagaccccccccttcaagagaaagggcaagctgagcaccatcggcaagatcttcaagccctggaagtggagaaagaagaagaccagcgacaagttcagagagaccagcgccgtgctggagagaaagatcagcaccagacagagcagagaggagctgatcagaagaggcgtgctgaaggagctgcccgaccaggacggcgacgtgaccgtgaacttcgagaacagcaacggccacatgatccccatcggcgaggagagcaccagagaggagaacgtggtgaagagcgaggagggcaacggcagcgtgagcgagaagaccccccccctggaggagcaggccgaggacaagaaggccggcagcagccacagcaagaagaccaccggcagcaaggccagcgccagccccagcaccagcagcaccagcagcagacccaaggccagcaaggagaccgtgagcagcaaggccggcaccgtgggcaccaccaagggcaagagaaagaccgacaagcagcccatcaccagccacctgagcagcgacaccaccaccagcggcaccagcgacctgaagggcgagcccgccgagaccagagtggagagcttcaagctggagcagaccgtgcccggcgccgaggagcagaacaccggcaagttcaagagcatggtgccccccccccccgtggcccccgcccccagccccctggccccccccctgcccctggaggaccagtgcatcaccgccagcgacacccccgtggtgctggtgagcgtgggcgccgacctgcccgtgagcgccctggaccccagccagctgctgtgggccgaggagcccaccaacagaaccaccctgtacagcggcaccggcctgagcgtgaacagagagaacgccaagtgcttcaccaccaaggaggagctgggcaagaccgtgccccagctgctgacccccggcctgatgggcgagagcagcgagagcttcagcgccagcgaggacgagggccacagagagtaccaggccaacgacagcgacagcgacggccccatcctgtacaccgacgacgaggacgaggacgaggacgaggacggcagcggcgagagcgccctggccagcaagatcagaagaagagacaccctggccatcaagctgggcaacagacccagcaagaaggagctggaggacaagaacatcctgcagagaaccagcgaggaggagagacaggagatcagacagcagatcggcaccaagctggtgagaagactgagccagagacccaccaccgaggagctggagcagagaaacatcctgaagcagaagaacgaggaggaggagcaggaggccaagatggagctgaagagaagactgagcagaaagctgagcctgagacccaccgtggccgagctgcaggccagaagaatcctgagattcaacgagtacgtggaggtgaccgacagccccgactacgacagaagagccgacaagccctgggccagactgacccccgccgacaaggccgccatcagaaaggagctgaacgagttcaagagcaccgagatggaggtgcacgaggagagcagacagttcaccagattccacagaccctag

SEQ ID NO: 40374 - DNA, 537 bp, Artificial Sequence
  derived and/or modified sequence
atgggccagaccagcgtgagcaccctgagcccccagcccggcagcgtggacggcctggacaaggccagcatcgccaacagcgacggccccaccgccggcagccagaccccccccttcaagagaaagggcaagctgagcaccatcggcaagatcttcaagccctggaagtggagaaagaagaagaccagcgacaagttcagagagaccagcgccgtgctggagagaaagatcagcaccagacagagcagagaggagctgatcagaagaggcgtgctgaaggagctgcccgaccaggccggcagcagccacagcaagaagaccaccggcagcaaggccagcgccagccccagcaccagcagcaccagcagcagacccaaggccagcaaggagaccgtgagcagcaaggccggcaccgtgggcaccaccaagggcaagagaaagaccgacaagcagcccatcaccagccacctgagcagcgacaccaccaccagcggcaccagcgacctgaagggcgagcccgccgagaccagagtgtag

SEQ ID NO: 40375 - DNA, 1698 bp, Artificial Sequence
  derived and/or modified sequence
atgggccagacttcggtatcaacactgtcccctcagcccggaagcgttgacgggctggacaaagcgtctatcgcgaatagtgatggtcccacagccggctcacagacccctccatttaaacggaaaggcaaactgtccactatcggcaaaatcttcaagccctggaaatggcgcaagaaaaaaacttcggacaagttccgggaaacaagcgccgttctggaacgaaagatttcaaccagacagagcagagaagaattgatccgcaggggtgtgctcaaagagttaccagaccaagacggggatgtgactgtgaatttcgagaacagcaacggacacatgattcctattggtgaggagagcacacgggaagagaacgtcgtgaagtctgaggaagggaacggctctgtgtctgaaaagactcctcccctcgaagaacaggctgaggacaaaaaggcagggagttctcacagcaaaaaaaccactggaagtaaagcaagtgcttctccttcaacctcaagcacatcgtcaaggcccaaggctagtaaggagacagtctcatcaaaggccgggacggtgggaacaaccaagggaaagagaaaaacagataaacagcccatcacctcccacctgagcagcgacacaactacttctggaacctccgacctgaaaggcgagcctgctgaaactcgcgttgaaagcttcaaattagaacagactgtgcctggcgccgaggagcaaaacaccggaaaattcaagtctatggtgccgccccctcccgtggcccccgccccgtccccactcgccccgccactgcctctcgaggatcagtgtattactgcttccgatacccctgtggtgctcgtgagtgtgggcgccgatctgcccgtttccgccctggatccctcgcagttgttatgggctgaagagcccaccaacaggaccactctgtactccggcactggcttatctgtgaatagggagaacgccaaatgctttactaccaaggaagagcttggtaaaaccgtgcctcaactgctgacgccgggattaatgggcgagtctagtgagtcattcagtgcaagcgaagacgaaggccatcgagaatatcaggccaacgattcggatagtgatggccctattttgtataccgatgacgaggatgaagatgaggacgaagatggaagcggggagtcagccctggcaagcaaaatcaggcggagagatacactggccattaaactcggcaacagaccttccaaaaaagaactggaagataagaatatcctccagagaacttcggaggaggaacgccaggaaatccgccagcagattgggaccaagttggtgcgccggctgtcccaaagacccactactgaagagctagaacaacgcaacattcttaagcagaaaaatgaagaagaagaacaggaggccaagatggagctgaagaggcgcctttcgcgtaaactgtctttgaggcctactgtggccgagctccaggcaaggcgcatattacgcttcaacgagtatgtggaagtcaccgattcccctgattacgatcggagggctgataaaccatgggcccgcctgacgcctgcagacaaagcagccatccgaaaggaactcaatgaatttaagtcaacggagatggaggttcacgaggagagccgccagtttacgcggttccatcgcccgtag

SEQ ID NO: 40376 - DNA, 537 bp, Artificial Sequence
  derived and/or modified sequence
atgggtcagacatccgttagcacactgtctcctcagcccggtagcgttgacggcttggacaaggcgtcaatcgcaaacagtgacggtcccaccgccggttctcaaacgcccccatttaagcgcaaaggtaagcttagcaccatcgggaagatattcaagccatggaagtggcgaaaaaaaaaaacatctgataagttcagagagacttctgccgtgctggagagaaagatttccactcggcaatctcgagaagagttgatccggagaggtgtgttgaaagagctccccgaccaggctggcagcagtcatagcaagaagactacagggagtaaagcatcggccagtcccagcacatcctcgacatcctcaagacccaaggccagcaaggagactgtctccagtaaagctggtaccgtcgggactacgaagggtaagaggaagacagacaagcagcccatcacatctcatctttcctctgatacgactacaagcggtaccagcgatttaaaaggagagcccgccgagacacgggtgtag

SEQ ID NO: 40377 - DNA, 1698 bp, Artificial Sequence
  derived and/or modified sequence
atgggccagacctctgtgtccaccctgagcccccagcccggctctgtggatggcctggacaaggccagcatcgccaacagtgatggccccacagctggcagccagaccccacccttcaagaggaagggcaagctgagcaccatcggcaagatcttcaagccctggaagtggaggaagaagaagaccagtgacaagttccgggagaccagcgctgtgctggagaggaagatcagcacccggcagagccgggaggagctgatccggcggggcgtgctgaaggagctgcctgaccaggatggagatgtgacagtgaactttgagaacagcaatggccacatgatccccatcggggaggagagcacccgggaggagaatgtggtgaagtctgaggagggcaatggatctgtgtctgagaagaccccacccctggaggagcaggccgaggacaagaaggccggcagcagccacagcaagaagaccaccggcagcaaggccagcgccagccccagcaccagcagcaccagcagccggcccaaggccagcaaggagaccgtgagcagcaaggccggcaccgtgggcaccaccaagggcaagaggaagacagacaagcagcccatcaccagccacctgagcagtgacaccaccaccagcggcaccagtgacctgaagggggagcctgctgagaccagggtggagagcttcaagctggagcagacagtgcctggagctgaggagcagaacacaggcaagttcaagtccatggtgcccccacctcctgtggccccagcccccagccccctggccccacccctgcccctggaggaccagtgcatcacagccagtgacacccctgtggtgctggtgtctgtgggcgctgacctgcctgtgtctgccctggaccccagccagctgctgtgggccgaggagcccaccaacagaaccaccctgtacagcggcaccggcctgtctgtgaacagagaaaatgccaagtgcttcaccaccaaggaggagctgggcaagacagtgccccagctgctgaccccaggcctgatgggagagagcagcgagagcttcagcgcctctgaagatgagggccaccgggagtaccaggccaatgacagcgacagtgatggccccatcctgtacacagatgatgaagatgaagatgaagatgaagatggcagcggggagagcgccctggccagcaagatcagaagaagagacaccctggccatcaagctgggcaaccggcccagcaagaaggagctggaggacaagaacatcctgcagaggaccagcgaggaggagcggcaggagatccggcagcagatcggcaccaagctggtgcggcggctgagccagaggcccaccacagaggagctggagcagaggaacatcctgaagcagaagaatgaggaggaggagcaggaggccaagatggagctgaagaggcggctgagcaggaagctgagcctgcggcccaccgtggccgagctgcaggcccggcgcatcctgcgcttcaatgaatatgtggaggtgacagacagcccagactatgacagaagagctgacaagccctgggcccggctgaccccagctgacaaggccgccatcaggaaggagctgaatgagttcaagagcacagagatggaggtgcatgaggagagccggcagttcacccgcttccaccggccctag

SEQ ID NO: 40378 - DNA, 537 bp, Artificial Sequence
  derived and/or modified sequence
atgggccagacctctgtgtccaccctgagcccccagcccggctctgtggatggcctggacaaggccagcatcgccaacagtgatggccccacagctggcagccagaccccacccttcaagaggaagggcaagctgagcaccatcggcaagatcttcaagccctggaagtggaggaagaagaagaccagtgacaagttccgggagaccagcgctgtgctggagaggaagatcagcacccggcagagccgggaggagctgatccggcggggcgtgctgaaggagctgcctgaccaggccggcagcagccacagcaagaagaccaccggcagcaaggccagcgccagccccagcaccagcagcaccagcagccggcccaaggccagcaaggagaccgtgagcagcaaggccggcaccgtgggcaccaccaagggcaagaggaagacagacaagcagcccatcaccagccacctgagcagtgacaccaccaccagcggcaccagtgacctgaagggggagcctgctgagaccagggtgtag

SEQ ID NO: 40379 - DNA, 1698 bp, Artificial Sequence
  derived and/or modified sequence
atgggccagaccagcgtgagcaccctgagcccccagcccggcagcgtagatggcctggataaagccagcatcgctaactcagacggtcctaccgccggctcccagactcctcctttcaagagaaagggtaagctatctactatcggcaagatattcaagccgtggaaatggcgcaagaagaagactagcgacaaattcagagagacaagtgccgtgttagagcggaagatctctacacgccagagtagggaggaactgatccggcgtggagttctgaaggagctgcccgatcaggacggagatgtcacggtgaatttcgagaattccaatggccacatgatccccatcggagaggagagcaccagagaagagaacgttgttaagtcggaggagggtaacggctctgtctctgagaagacacctcccttagaagagcaagccgaggacaaaaaggccgggtcctcacactctaaaaaaactaccggatctaaggcaagtgcttctccatctacgtcctccacttcctccaggccaaaagccagtaaagagacagtcagcagcaaggcagggacggtcggtaccaccaagggcaaaaggaagactgataagcaacccattacgagccacctttcatctgacacaacgacatccggtacctccgacctgaagggggaacctgctgagacacgtgtcgagtcatttaagctcgagcaaaccgttcccggtgctgaagagcaaaacactggtaagtttaaaagtatggtgccccccccacccgtggcccctgcgccaagccccctcgcccctcccctgccactcgaagaccaatgcatcaccgcctccgatacccccgtagtcttagtatccgtgggtgccgatctgccagtgtcagccctggacccaagccagcttctctgggccgaagaaccaactaatagaactaccctttacagtggtactggactgtctgtgaatagagagaacgcaaagtgcttcactaccaaggaggagcttggcaagactgtgccccaattacttactcccggactgatgggtgaatcttccgaatccttctccgccagtgaagatgaaggtcatcgtgagtatcaggcgaacgactcagactctgacggaccaatactctacactgacgacgaagatgaggatgaggatgaggatggctctggcgaatcagcgttggcctccaaaatcagaaggagagacacactggctattaagctcgggaaccgccccagtaagaaggagctggaagacaagaacatactacagcggacctcagaagaagagcgccaagagattcgacagcaaattggaaccaagctcgtgagacgcctgtctcaacgccctactacagaagagctggagcagcgtaacatccttaaacagaagaacgaggaggaagagcaggaggccaagatggagctgaaacggcggctcagccgcaagctatccctgcgcccaacagtggcagaactgcaagcgaggagaattcttaggtttaacgagtatgttgaggtaactgatagtcccgattacgaccggcgagccgataagccttgggcccgcctcaccccagctgataaggctgccatccgcaaagaactgaatgaatttaaaagcacagagatggaggtgcacgaggaaagtaggcaattcaccagatttcataggccctag

SEQ ID NO: 40380 - DNA, 537 bp, Artificial Sequence
  derived and/or modified sequence
atgggccagaccagcgtgagcaccctgagcccccagcccggcagcgttgacgggcttgacaaggcctctattgccaattcagacgggcctactgctggatcccaaacaccacctttcaagagaaaaggtaagctgtccactattggcaagatctttaagccttggaaatggagaaaaaagaaaacatccgacaaatttagagagacaagcgccgttttggaacggaagatttccactcgacaatcaagggaggagctcatcaggaggggagtgttgaaggagttgcccgaccaggccggatcatcgcacagcaagaagacaaccggatccaaagcctctgcttcccctagtacaagctcaacctccagtagacctaaagcttctaaggagaccgttagctccaaggccgggactgtcggcaccactaaagggaagaggaagacagacaagcagccaataacctcccatctcagctctgatacgacaactagtggcacctctgacttgaaaggagagccagccgaaacaagagtgtag

SEQ ID NO: 40381 - DNA, 4367 bp, Artificial Sequence
  derived and/or modified sequence
gccgcgccggctgcggccggccgggctgggagacccgcgcggggtagaaggtgaggggacccggcgggccgctcggcacaggccgggacatgaacgcctggaagtctggctgggagcggacccatgatcgaaggaccaaaggagccgcttgatcgctggacctggccctgcgaccccagtcatgggccagacctcggtgtccacgctgtccccgcagcccggcagcgttgacggactggacaaagcttctatagcaaactcagatggccccacagcaggttcccaaacacctcccttcaaaagaaaggggaaactatccaccattggtaaaatctttaagccttggaaatggaggaaaaagaagaccagcgacaaatttagagaaacctcggcagtattagaaaggaagatatccacacgacaaagtagagaggagctgataagaaggggagtgcttaaggaattgcctgatcaagatggagatgtaacagttaactttgaaaattcaaacgggcacatgatacccatcggagaggaatctacccgagaggaaaatgtagtaaagtctgaagaaggtaatggctctgtatctgaaaaaacaccacctctggaggaacaggcagaagataagaaagctggctcctctcattcaaaaaaaacaactggctctaaagcatcagcttcgccatccacttcatccacctcatctcgtcccaaagcttcaaaggagacagtttctagcaaagcagggacagtggggaccaccaagggcaagagaaaaactgacaagcagccaataacttctcacctgtcctcagacacaacaacttctggcacatccgacctgaaaggagagcctgcagagaccagagtggagagtttcaaactcgaacagactgtccctggagctgaggagcagaacacaggcaaattcaagtccatggtccctccaccccctgtggctccagcaccttctcctctggccccccctctccctcttgaggatcagtgcattactgcctcagacactccagttgtcctcgtcagcgttggagctgacctgcccgtctctgccttagacccaagtcagcttctttgggctgaagagccgacgaacagaaccactctctactcaggcactggcttaagtgttaacagagaaaatgcaaaatgtttcacaaccaaagaggagctggggaagacagtgcctcagctactgactcctgggctgatgggcgaatcttcagaatcctttagtgcctcagaagatgaaggccacagggaataccaagccaatgactctgactcggacgggcctatcttgtacaccgatgatgaggacgaagacgaagatgaggatggcagtggagaaagtgctttggcaagtaaaatacgccggagggatactcttgctatcaaacttggcaacagaccatctaagaaagaactagaggacaaaaacatcttgcagcgtacatctgaagaagagaggcaggaaatccgacaacaaattggaaccaagttagtcaggaggctgagccagaggcccacaactgaagaattagagcaaagaaacatcctaaaacaaaagaatgaagaagaggaacaagaagcaaaaatggaacttaaacgcagactcagcagaaagctcagcctgagacccacagtggcagagctacaagctcgaaggatcctgcgatttaacgagtatgtagaagtcacggattctcctgactatgaccgccgagcagacaagccctgggccaggttaacacctgcagacaaggcagcaataaggaaagaactaaatgaatttaaaagcacagaaatggaagttcatgaagagagtcgacagtttacaaggtttcatcgtccataacgaagagtgagactatttggaaacagagactgatcatctttgggggaagccctgcttcctgaaaacctgatattgcactgggatttgaatgtgtgtgtttccgtttaacttgtggtgaaggaagtgtgtgactcagcttggctgggaagtgctcctcacctgtgtggcccagatggctccaacaagcaaaaggaaggatgcagtgactcttgctgcccagaatgcacagcgatggtaagagacaccgtggatattcttcatcagaagctttaatcaaagaagatgagcagaagacaatcactggctccctgttaccagaaagccaaattttataatgcgggtgaaagaaaaatatagattaaaattgctgggcactgaaaaggggtgggagttggaaatcagaaagaaagagaaatatttcattatgttaatgaagaaaagagaaaattgaagcataaatgtatttttgaagtagttattcggtagctgagaacttattaagggatttaggaatttaacctcctgatgtggattcctcaaagacttgatcggagaatactcttgtttcaccattatgttggtacagtatagtaccattattttatgttgtgccagtgaatccagttgccagaaataagtctgaatgttttcatgcatctttttcttaaatgcaagagcttctactgactcttaacaagcatgcttacccaaattttgttgcatgcttttaagtagcattagctatgcacacttgacatttttaaatatccctttcctagtgtaccagccttcacaggataagaggactgggaataaagtcagatgtaatgtgaccctagaaaactgtagcaagcttcagaaataaatcttttgatctttccctatcttgattagatccaaagtcaaagcaaccatacttcacctagagaagacagtattggcaatcatgacacctgtaataaaaacttgaatccaaagtcaaaacttaagcaagatacaaatgtgctgcctgcagttagtcctgcatgggaataaggactagttatttttttagtgctgcatttttttaaagttggattgctgctatttaaaaaaaaaaaaaggacacagatcaaaaaaacacccaaaggcttaacagaacatggaaagttcccactaagttgtgtgtgaggaaatcctcatcttgtattttaagaatctgcagatggcatccatagatacagtacagtatttactgtcaatgcaaaagaatcagtgaggttaaagtagtggaagttttccctatgagcctacagtctgtattgtttacattaagaaactctctattattgtgttgctattttccatggagtcacaggcacactatgacttctgctcccaaatacatatgaccatatgtaaataccaccttgcatttcattgttcttcacaagtgctttgtgcccctttaattaaaaacacatgaaatgaataacaaaacaagacccaaatagagtttattttattctcagagtttggactacaattttctaagatgtttctggttcaagactgtcattttctatttcaaccgaaaagtaagcatttaacccggtgaataaatgtagatcctgccattcattggtattttaaagaaccacttgaaatcggatcattttatttaaaaataaaaaatgttaatgccagttggcctactataaaaagccaggaccatgttagaattaggaaaagtaaccagcattactgcacctcttgttagactctgtgcattaataaaacacacctagagtctgttgtcatttcactaataggataagacaaattttttgctttgaaaaaatttttctgcatgcccaggtgtctgtctctggctgaggttttgtctattttacagtgtttcaatccagccataaaaattaacttgtgattttttttttcccaaagtcatgcttttccttaattatatttttattttattattttagtgtcttgagaaaaataccaagagatataatgtttcttttaattgtctatgcttaatcatctttaaacactttttaaatttctaaccacaagacctctctataatggtaaatgtaagacatcaccattttatcactcaaagtatgttattgaaagtttctatttggttgataaaaggaacaattttttcccacttttgatgcctgtgatgcaattttttattgcctacaatgagatacacttagtacaaaaaatgaaaatctggtatttcaaaattgcatttcttgtataataggtcagatttattaactactcatactttttctttacactaatcgatacatttagaaaaaattttctaagttagagacaagtttaaaagtaaaaaaaaaaaaaaattagccactgctagtctactgtttaggtaatcggaatcaccaattattttattagaatgatggcttgagtaaaaagctgtggaaagaattaaaggattatgagctaa

SEQ ID NO: 40382 - DNA, 1698 bp, Artificial Sequence
  derived and/or modified sequence
atggggcagacatcagtctctaccctgtccccacaaccgggaagcgtagatggtctggataaagctagcatagcgaacagcgatggccctacggctggaagccagaccccgccattcaaaagaaaagggaagctgtcaactatcggaaagatcttcaaaccatggaaatggcgaaagaagaaaacaagcgacaagttccgtgaaaccagcgccgtgctcgagcgaaagattagcacgcgccagtcacgggaggagctgatcagacgcggagtgctgaaagagctcccagaccaagacggagacgtcacagtgaacttcgagaatagtaatgggcacatgatccccattggtgaggagagtacaagggaggagaacgtggtcaagtctgaagagggcaatggatccgtgagcgaaaaaacccctcccttggaggaacaagcagaggacaagaaagcagggtctagtcattccaagaagaccaccggatctaaggcctctgcctccccctcgacaagtagtacttcttcccgcccaaaggcctctaaggagaccgtcagttctaaagcagggacagttggtacaacaaagggtaagaggaagaccgataaacagccaattacctcgcaccttagctcagatacgactactagtgggacctcagacctgaagggagaacctgcggaaacacgtgtcgagagcttcaaactcgagcagacagtgccaggagctgaagaacagaacaccggcaagttcaagagcatggttccacccccacccgtggccccagcaccgagccccctggcccctcccctccctctagaagatcagtgtatcaccgcaagtgacacaccagtggtcctggtgagtgtgggcgcagatctgcctgtttcagccctggatccctcacaactgttgtgggccgaggagcccaccaatcggacaacactgtactctggcaccggccttagcgtaaatagagaaaatgctaaatgctttaccaccaaggaggaacttggcaagactgtgcctcagctattgacccctgggctgatgggcgagagctcggagtccttcagcgccagcgaggatgagggccaccgggagtaccaagccaacgacagcgactcggacggaccaatcttgtacacggacgatgaggatgaggatgaggacgaggacgggtcaggcgagtcagcacttgcttccaagattaggaggagagacacactcgccattaaactcggtaatcgcccaagtaagaaggagctggaagataagaatatactccagaggacaagtgaggaggaacgtcaagaaatcagacaacagattggtacaaaactggttcgccgactgagtcaacgccctacaacagaagaactggagcagaggaacatcttgaaacaaaaaaatgaagaagaagaacaagaggccaagatggaactcaaaagaagactcagtagaaaacttagcctaagacccaccgttgccgagctccaggcaaggagaatactcagatttaatgaatatgtggaggtgaccgatagtcccgactatgataggagggccgacaaaccctgggctcggctgactcccgctgataaagctgctatccgcaaggaactgaacgaatttaagtcaacggagatggaggtccacgaggagtctagacagtttaccagattccacagaccgtag

SEQ ID NO: 40383 - DNA, 537 bp, Artificial Sequence
  derived and/or modified sequence
atgggccagacgagcgtgagtaccctgagcccacaacctggttctgtggatggattggataaggcctctattgcaaactcagatgggccaacggccggatcacagaccccaccattcaaacggaagggaaagctgagtactatcggaaagatattcaaaccttggaaatggcgtaaaaaaaaaacgtcagacaaattccgagaaaccagtgccgtgcttgagagaaaaatctccacacggcagagtcgggaagaactgatacgcaggggggtcctgaaggagttacctgatcaggcgggatcttcgcactcaaagaaaaccaccgggtccaaagcctcggcatccccgagcacaagttcgacgtccagtcgtcctaaggctagcaaagaaacagtttcttccaaagcagggacagtgggcactacaaaaggcaaacggaaaactgacaagcagccgattacctctcatttaagtagcgacacaaccacctcgggcacctctgatttgaagggcgagccagctgaaactagggtatag

SEQ ID NO: 40384 - protein, 554 aa, Artificial Sequence
  derived and/or modified sequence
MDNAVDGLDKASIANSDGPTAGSQTPPFKRKGKLSTIGKIFKPWKWRKKKTSDKFRETSAVLERKISTRQSREELIRRGVLKELPDQDGDVTVNFENSNGHMIPIGEESTREENVVKSEEGNGSVSEKTPPLEEQAEDKKAGSSHSKKTTGSKASASPSTSSTSSRPKASKETVSSKAGTVGTTKGKRKTDKQPITSHLSSDTTTSGTSDLKGEPAETRVESFKLEQTVPGAEEQNTGKFKSMVPPPPVAPAPSPLAPPLPLEDQCITASDTPVVLVSVGADLPVSALDPSQLLWAEEPTNRTTLYSGTGLSVNRENAKCFTTKEELGKTVPQLLTPGLMGESSESFSASEDEGHREYQANDSDSDGPILYTDDEDEDEDEDGSGESALASKIRRRDTLAIKLGNRPSKKELEDKNILQRTSEEERQEIRQQIGTKLVRRLSQRPTTEELEQRNILKQKNEEEEQEAKMELKRRLSRKLSLRPTVAELQARRILRFNEYVEVTDSPDYDRRADKPWARLTPADKAAIRKELNEFKSTEMEVHEESRQFTRFHRP

SEQ ID NO: 40385 - DNA, 1665 bp, Artificial Sequence
  derived and/or modified sequence
atggacaacgccgtggacggcctggacaaggccagcatcgccaacagcgacggccccaccgccggcagccagaccccccccttcaagagaaagggcaagctgagcaccatcggcaagatcttcaagccctggaagtggagaaagaagaagaccagcgacaagttcagagagaccagcgccgtgctggagagaaagatcagcaccagacagagcagagaggagctgatcagaagaggcgtgctgaaggagctgcccgaccaggacggcgacgtgaccgtgaacttcgagaacagcaacggccacatgatccccatcggcgaggagagcaccagagaggagaacgtggtgaagagcgaggagggcaacggcagcgtgagcgagaagaccccccccctggaggagcaggccgaggacaagaaggccggcagcagccacagcaagaagaccaccggcagcaaggccagcgccagccccagcaccagcagcaccagcagcagacccaaggccagcaaggagaccgtgagcagcaaggccggcaccgtgggcaccaccaagggcaagagaaagaccgacaagcagcccatcaccagccacctgagcagcgacaccaccaccagcggcaccagcgacctgaagggcgagcccgccgagaccagagtggagagcttcaagctggagcagaccgtgcccggcgccgaggagcagaacaccggcaagttcaagagcatggtgccccccccccccgtggcccccgcccccagccccctggccccccccctgcccctggaggaccagtgcatcaccgccagcgacacccccgtggtgctggtgagcgtgggcgccgacctgcccgtgagcgccctggaccccagccagctgctgtgggccgaggagcccaccaacagaaccaccctgtacagcggcaccggcctgagcgtgaacagagagaacgccaagtgcttcaccaccaaggaggagctgggcaagaccgtgccccagctgctgacccccggcctgatgggcgagagcagcgagagcttcagcgccagcgaggacgagggccacagagagtaccaggccaacgacagcgacagcgacggccccatcctgtacaccgacgacgaggacgaggacgaggacgaggacggcagcggcgagagcgccctggccagcaagatcagaagaagagacaccctggccatcaagctgggcaacagacccagcaagaaggagctggaggacaagaacatcctgcagagaaccagcgaggaggagagacaggagatcagacagcagatcggcaccaagctggtgagaagactgagccagagacccaccaccgaggagctggagcagagaaacatcctgaagcagaagaacgaggaggaggagcaggaggccaagatggagctgaagagaagactgagcagaaagctgagcctgagacccaccgtggccgagctgcaggccagaagaatcctgagattcaacgagtacgtggaggtgaccgacagccccgactacgacagaagagccgacaagccctgggccagactgacccccgccgacaaggccgccatcagaaaggagctgaacgagttcaagagcaccgagatggaggtgcacgaggagagcagacagttcaccagattccacagaccctag

SEQ ID NO: 40386 - DNA, 1665 bp, Artificial Sequence
  derived and/or modified sequence
atggataatgccgttgacggtctagataaagctagcattgccaacagtgacggacctaccgctgggtctcaaacccctcctttcaagcggaaggggaagttgtccacaataggcaagatctttaaaccgtggaagtggcgcaaaaagaaaacatccgataaattcagggagacaagtgctgtcctggaacgtaagatatcaacacggcagtcgcgggaggaactcatcagacgaggcgttctgaaggaattacctgaccaggacggcgatgtaactgtcaattttgagaactcgaacggccacatgattcctattggcgaagagtctacccgtgaagaaaatgttgtaaagagtgaggaaggcaacgggagcgtgtcggaaaaaactcccccactggaggagcaggctgaggacaaaaaggctggtagctcacattcaaaaaaaactacgggatccaaagcttccgcctctccctccacaagcagcacatcctcccggcccaaggcctcaaaggaaaccgtttcgagcaaggcaggtactgtcggaaccaccaaaggcaagagaaagacagacaagcagcccataacctcccatctgagctcagacactaccaccagtgggacttccgacctcaagggcgagccagcagagacccgcgttgagtcttttaaactagagcagacagtgccaggagcggaagagcagaatacaggtaagttcaaaagcatggtgccccccccgcccgtggcacccgccccctctccactcgctccgcctctacctctggaggatcaatgtattacagcatccgatacacctgtcgttctggtaagtgtgggcgctgacctgccagtgagcgcactcgatcccagccagttgctgtgggcagaagaacccacaaaccggacaactctgtacagtggtacaggcctgtccgtgaacagggagaacgcaaagtgtttcacaacaaaggaagagctgggaaagacagtgccccagcttctgacaccagggctgatgggggagagcagtgaaagcttttctgcctcagaggatgagggacatcgtgagtaccaggccaacgattctgacagtgatggccccattctctatacagatgacgaggatgaagatgaggatgaagacggttcgggagagagcgccctggcttccaagattaggaggagagacaccctggccatcaaactgggcaacagaccctcaaagaaggaactggaagataaaaacattttacagagaacctctgaggaggagcggcaagagattaggcagcagatcgggactaaactggtgcgccggttgtcgcagaggcctacaacagaggaacttgagcagcggaacattctgaagcaaaagaatgaggaggaggaacaggaggcaaagatggaattgaagcgaaggttgtcccggaagctgagcctgagaccaactgtggccgagctccaggcaagaaggattttaaggtttaacgagtacgtggaggtgactgactcgccagactacgataggcgggcagacaagccctgggccagactgaccccagcagataaggctgcgatacggaaggaactaaatgagtttaagagtactgagatggaagtccacgaggaatcacgtcagttcactaggttccaccgtccgtag

SEQ ID NO: 40387 - DNA, 1665 bp, Artificial Sequence
  derived and/or modified sequence
atggacaatgctgtggatggcctggacaaggccagcatcgccaacagtgatggccccacagctggcagccagaccccacccttcaagaggaagggcaagctgagcaccatcggcaagatcttcaagccctggaagtggaggaagaagaagaccagtgacaagttccgggagaccagcgctgtgctggagaggaagatcagcacccggcagagccgggaggagctgatcagaagaggagtgctgaaggagctgcctgaccaggatggagatgtgacagtgaactttgagaacagcaatggccacatgatccccatcggggaggagagcacccgggaggagaatgtggtgaagtctgaggagggcaatggatctgtgtctgagaagaccccacccctggaggagcaggccgaggacaagaaggccggcagcagccacagcaagaagaccaccggcagcaaggccagcgccagccccagcaccagcagcaccagcagccggcccaaggccagcaaggagaccgtgagcagcaaggccggcaccgtgggcaccaccaagggcaagaggaagacagacaagcagcccatcaccagccacctgagcagtgacaccaccaccagcggcaccagtgacctgaagggggagcctgctgagaccagggtggagagcttcaagctggagcagacagtgcctggagctgaggagcagaacacaggcaagttcaagtccatggtgcccccacctcctgtggccccagcccccagccccctggccccacccctgcccctggaggaccagtgcatcacagccagtgacacccctgtggtgctggtgtctgtgggcgctgacctgcctgtgtctgccctggaccccagccagctgctgtgggccgaggagcccaccaacagaaccaccctgtacagcggcaccggcctgtctgtgaaccgggagaatgccaagtgcttcaccaccaaggaggagctgggcaagacagtgccccagctgctgaccccaggcctgatgggagagagcagcgagagcttcagcgcctctgaagatgagggccaccgggagtaccaggccaatgacagcgacagtgatggccccatcctgtacacagatgatgaagatgaagatgaagatgaagatggcagcggggagagcgccctggccagcaagatcagaagaagagacaccctggccatcaagctgggcaaccggcccagcaagaaggagctggaggacaagaacatcctgcagaggaccagcgaggaggagcggcaggagatccggcagcagatcggcaccaagctggtgcggcggctgagccagaggcccaccacagaggagctggagcagaggaacatcctgaagcagaagaatgaggaggaggagcaggaggccaagatggagctgaagaggcggctgagcaggaagctgagcctgcggcccaccgtggccgagctgcaggcccggcgcatcctgcgcttcaatgaatatgtggaggtgacagacagcccagactatgaccggcgggctgacaagccctgggcccggctgaccccagctgacaaggccgccatcaggaaggagctgaatgagttcaagagcacagagatggaggtgcatgaggagagccggcagttcacccgcttccaccggccctag

SEQ ID NO: 40388 - DNA, 1665 bp, Artificial Sequence
  derived and/or modified sequence
atggacaacgccgtggacggcctggacaaggccagcatcgccaacagcgatggtcctacagcagggtctcagacacctccattcaaacgaaaaggaaagctgtctaccataggcaagatattcaagccctggaagtggcgcaagaagaaaacctctgacaaatttcgggaaacgagtgccgtgctggagcgcaaaatttcgacacgccaatccagggaggaactcatccgtagaggggtgttgaaggagctcccggaccaggacggcgacgtcaccgtcaattttgaaaattcaaatggacatatgatacccatcggggaggaatctactcgtgaggaaaacgtagtgaagagtgaggaggggaatgggtcagtgtccgagaaaacccccccattagaggagcaggcagaggataaaaaggccggctcgtctcattctaagaaaactactggctcgaaagcctcggcctcgccttccactagtagcacgagtagtcgcccaaaagcaagcaaggagacagtgtcatctaaagcggggactgtagggacaactaagggaaaaagaaagacagacaagcagcccattacaagccacttgtcttccgatacaactactagtggaacatcagatctcaagggggagcctgcggagaccagggtggagagttttaagctcgaacaaaccgtcccgggagccgaggaacagaacacaggtaaattcaagagcatggtccctcctcctcctgtggcccccgcccccagtccattagcaccgccattgccacttgaggatcagtgtataaccgcatctgatacccctgtggtgctcgtgagcgtaggtgccgatctgccagtcagtgcccttgaccccagccaattactgtgggctgaagagcccaccaacagaacaaccctgtacagcgggaccggcctcagtgtgaatagagaaaacgctaagtgttttacaaccaaggaagagctcggcaagactgtccctcagctgcttacccctggactgatgggagaatccagtgagtcattctcagcctctgaggacgagggtcaccgcgagtaccaggcaaatgattccgattctgacggtcctatactgtacacagatgatgaggatgaagatgaagatgaagacgggagcggtgaaagcgcgctagcgtctaagattcgtcggcgcgacactctggcaattaaactgggaaatcggccaagcaagaaggaactggaggacaaaaatatcctccaacggacttcagaggaggagcgacaggaaatccgacaacagattggcaccaagttggtgcgtcggctgagccagcgcccaactactgaagaacttgaacagcggaacatcttgaagcagaagaacgaggaggaggaacaggaggccaaaatggagctcaagagaagactgtcacgcaaactgagcctgagacctactgtcgccgagctccaggctcgccgcatcctgaggtttaacgaatatgtggaggtgacagattcccccgactacgatcgtcgggcggataagccgtgggctcgcctgacacctgcggataaggcagcgatacgtaaggagctgaacgagtttaagagtaccgagatggaggtccatgaagaaagcaggcagttcaccagatttcacaggccctag

SEQ ID NO: 40389 - DNA, 1851 bp, Artificial Sequence
  derived and/or modified sequence
atgaagtatgctcagtgtgccagcaagggctgataatcagcagaaggacagggtgcttcgttagtcagaagagccagggcttcccggctgccaggctacagaactcgcctcgccactcctgagacatggacaacgccgttgacggactggacaaagcttctatagcaaactcagatggccccacagcaggttcccaaacacctcccttcaaaagaaaggggaaactatccaccattggtaaaatctttaagccttggaaatggaggaaaaagaagaccagcgacaaatttagagaaacctcggcagtattagaaaggaagatatccacacgacaaagtagagaggagctgataagaaggggagtgcttaaggaattgcctgatcaagatggagatgtaacagttaactttgaaaattcaaacgggcacatgatacccatcggagaggaatctacccgagaggaaaatgtagtaaagtctgaagaaggtaatggctctgtatctgaaaaaacaccacctctggaggaacaggcagaagataagaaagctggctcctctcattcaaaaaaaacaactggctctaaagcatcagcttcgccatccacttcatccacctcatctcgtcccaaagcttcaaaggagacagtttctagcaaagcagggacagtggggaccaccaagggcaagagaaaaactgacaagcagccaataacttctcacctgtcctcagacacaacaacttctggcacatccgacctgaaaggagagcctgcagagaccagagtggagagtttcaaactcgaacagactgtccctggagctgaggagcagaacacaggcaaattcaagtccatggtccctccaccccctgtggctccagcaccttctcctctggccccccctctccctcttgaggatcagtgcattactgcctcagacactccagttgtcctcgtcagcgttggagctgacctgcccgtctctgccttagacccaagtcagcttctttgggctgaagagccgacgaacagaaccactctctactcaggcactggcttaagtgttaacagagaaaatgcaaaatgtttcacaaccaaagaggagctggggaagacagtgcctcagctactgactcctgggctgatgggcgaatcttcagaatcctttagtgcctcagaagatgaaggccacagggaataccaagccaatgactctgactcggacgggcctatcttgtacaccgatgatgaggacgaagacgaagatgaggatggcagtggagaaagtgctttggcaagtaaaatacgccggagggatactcttgctatcaaacttggcaacagaccatctaagaaagaactagaggacaaaaacatcttgcagcgtacatctgaagaagagaggcaggaaatccgacaacaaattggaaccaagttagtcaggaggctgagccagaggcccacaactgaagaattagagcaaagaaacatcctaaaacaaaagaatgaagaagaggaacaagaagcaaaaatggaacttaaacgcagactcagcagaaagctcagcctgagacccacagtggcagagctacaagctcgaaggatcctgcgatttaacgagtatgtagaagtcacggattctcctgactatgaccgccgagcagacaagccctgggccaggttaacacctgcagacaaggcagcaataaggaaagaactaaatgaatttaaaagcacagaaatggaagttcatgaagagagtcgacagtttacaaggtttcatcgtccataacgaagagtgagactatttggaaacagagactgatcatctttgggggaagccctgcttcctg

SEQ ID NO: 40390 - DNA, 3905 bp, Artificial Sequence
  derived and/or modified sequence
atgggccagacctcggtgtccacgctgtccccgcagcccggcagcgttgacggactggacaaagcttctatagcaaactcagatggccccacagcaggttcccaaacacctcccttcaaaagaaaggggaaactatccaccattggtaaaatctttaagccttggaaatggaggaaaaagaagaccagcgacaaatttagagaaacctcggcagtattagaaaggaagatatccacacgacaaagtagagaggagctgataagaaggggagtgcttaaggaattgcctgatcaagctggctcctctcattcaaaaaaaacaactggctctaaagcatcagcttcgccatccacttcatccacctcatctcgtcccaaagcttcaaaggagacagtttctagcaaagcagggacagtggggaccaccaagggcaagagaaaaactgacaagcagccaataacttctcacctgtcctcagacacaacaacttctggcacatccgacctgaaaggagagcctgcagagaccagagtggagagtttcaaactcgaacagactgtccctggagctgaggagcagaacacaggcaaattcaagtccatggtccctccaccccctgtggctccagcaccttctcctctggccccccctctccctcttgaggatcagtgcattactgcctcagacactccagttgtcctcgtcagcgttggagctgacctgcccgtctctgccttagacccaagtcagcttctttgggctgaagagccgacgaacagaaccactctctactcaggcactggcttaagtgttaacagagaaaatgcaaaatgtttcacaaccaaagaggagctggggaagacagtgcctcagctactgactcctgggctgatgggcgaatcttcagaatcctttagtgcctcagaagatgaaggccacagggaataccaagccaatgactctgactcggacgggcctatcttgtacaccgatgatgaggacgaagacgaagatgaggatggcagtggagaaagtgctttggcaagtaaaatacgccggagggatactcttgctatcaaacttggcaacagaccatctaagaaagaactagaggacaaaaacatcttgcagcgtacatctgaagaagagaggcaggaaatccgacaacaaattggaaccaagttagtcaggaggctgagccagaggcccacaactgaagaattagagcaaagaaacatcctaaaacaaaagaatgaagaagaggaacaagaagcaaaaatggaacttaaacgcagactcagcagaaagctcagcctgagacccacagtggcagagctacaagctcgaaggatcctgcgatttaacgagtatgtagaagtcacggattctcctgactatgaccgccgagcagacaagccctgggccaggttaacacctgcagacaaggcagcaataaggaaagaactaaatgaatttaaaagcacagaaatggaagttcatgaagagagtcgacagtttacaaggtttcatcgtccataacgaagagtgagactatttggaaacagagactgatcatctttgggggaagccctgcttcctgaaaacctgatattgcactgggatttgaatgtgtgtgtttccgtttaacttgtggtgaaggaagtgtgtgactcagcttggctgggaagtgctcctcacctgtgtggcccagatggctccaacaagcaaaaggaaggatgcagtgactcttgctgcccagaatgcacagcgatggtaagagacaccgtggatattcttcatcagaagctttaatcaaagaagatgagcagaagacaatcactggctccctgttaccagaaagccaaattttataatgcgggtgaaagaaaaatatagattaaaattgctgggcactgaaaaggggtgggagttggaaatcagaaagaaagagaaatatttcattatgttaatgaagaaaagagaaaattgaagcataaatgtatttttgaagtagttattcggtagctgagaacttattaagggatttaggaatttaacctcctgatgtggattcctcaaagacttgatcggagaatactcttgtttcaccattatgttggtacagtatagtaccattattttatgttgtgccagtgaatccagttgccagaaataagtctgaatgttttcatgcatctttttcttaaatgcaagagcttctactgactcttaacaagcatgcttacccaaattttgttgcatgcttttaagtagcattagctatgcacacttgacatttttaaatatccctttcctagtgtaccagccttcacaggataagaggactgggaataaagtcagatgtaatgtgaccctagaaaactgtagcaagcttcagaaataaatcttttgatctttccctatcttgattagatccaaagtcaaagcaaccatacttcacctagagaagacagtattggcaatcatgacacctgtaataaaaacttgaatccaaagtcaaaacttaagcaagatacaaatgtgctgcctgcagttagtcctgcatgggaataaggactagttatttttttagtgctgcatttttttaaagttggattgctgctatttaaaaaaaaaaaaaggacacagatcaaaaaaacacccaaaggcttaacagaacatggaaagttcccactaagttgtgtgtgaggaaatcctcatcttgtattttaagaatctgcagatggcatccatagatacagtacagtatttactgtcaatgcaaaagaatcagtgaggttaaagtagtggaagttttccctatgagcctacagtctgtattgtttacattaagaaactctctattattgtgttgctattttccatggagtcacaggcacactatgacttctgctcccaaatacatatgaccatatgtaaataccaccttgcatttcattgttcttcacaagtgctttgtgcccctttaattaaaaacacatgaaatgaataacaaaacaagacccaaatagagtttattttattctcagagtttggactacaattttctaagatgtttctggttcaagactgtcattttctatttcaaccgaaaagtaagcatttaacccggtgaataaatgtagatcctgccattcattggtattttaaagaaccacttgaaatcggatcattttatttaaaaataaaaaatgttaatgccagttggcctactataaaaagccaggaccatgttagaattaggaaaagtaaccagcattactgcacctcttgttagactctgtgcattaataaaacacacctagagtctgttgtcatttcactaataggataagacaaattttttgctttgaaaaaatttttctgcatgcccaggtgtctgtctctggctgaggttttgtctattttacagtgtttcaatccagccataaaaattaacttgtgattttttttttcccaaagtcatgcttttccttaattatatttttattttattattttagtgtcttgagaaaaataccaagagatataatgtttcttttaattgtctatgcttaatcatctttaaacactttttaaatttctaaccacaagacctctctataatggtaaatgtaagacatcaccattttatcactcaaagtatgttattgaaagtttctatttggttgataaaaggaacaattttttcccacttttgatgcctgtgatgcaattttttattgcctacaatgagatacacttagtacaaaaaatgaaaatctggtatttcaaaattgcatttcttgtataataggtcagatttattaactactcatactttttctttacactaatcgatacatttagaaaaaattttctaagttagagacaagtttaaaagt

SEQ ID NO: 40391 - DNA, 1665 bp, Artificial Sequence
  derived and/or modified sequence
atggacaatgccgtggacggtcttgacaaggccagcattgccaatagcgatgggccaacagctgggagccagactcctccctttaaaagaaaaggcaagctgagtaccattgggaagatcttcaagccttggaagtggcggaaaaaaaagacaagcgataagttcagagagacaagcgccgtgttggaaaggaaaatatctacccggcaatctagagaggagcttatcaggaggggagtgcttaaagaacttccagaccaggatggcgacgtgactgtgaacttcgaaaactcgaacgggcatatgattcctattggcgaggagtcaacccgcgaagaaaatgtggtaaaaagtgaagaaggcaatggaagcgtgtccgagaagacccccccattggaggagcaggccgaggacaagaaggcaggttcttcgcacagcaagaaaactaccgggtccaaagccagcgcctctccgtcaactagctcaacaagcagtcggccaaaggcatcaaaagaaacggtgagttcaaaggcaggcacagtgggcactacaaagggcaagcggaagacggacaaacagcctataacatcacatctctcatccgacactaccacctctggcacaagcgacctaaagggggagcccgctgagacccgggttgaaagtttcaagctggagcagacagtgcctggcgctgaagaacagaacaccgggaaatttaagtcgatggttcctcctccaccagtcgcacccgctccgtcccccttggccccaccgcttcctcttgaggatcagtgtattactgcctccgacaccccagttgtgcttgtgtccgtgggtgcggacctcccggtgtccgctctggacccgtctcaactgctctgggccgaagaaccaacaaacagaacaaccttgtactccggaaccggcctgagcgtcaatcgtgagaacgccaagtgtttcaccacaaaagaggagcttggtaaaaccgtccctcagttgctaactccaggcttgatgggcgaatcatctgagagtttttctgccagcgaggatgagggccatcgcgagtaccaggcgaacgacagcgactcagacggcccaattctgtatactgatgacgaagatgaggacgaggatgaggacggaagtggggagtccgcactcgccagtaagatcaggaggagagacaccctcgctatcaagctgggaaaccgcccttctaagaaggaactggaggacaaaaatatccttcaaaggacatccgaggaggaacggcaggaaatccgacagcagattggaacaaagctagtacggcgtctctcacagcggccaaccacagaggagctggagcagcgcaacattttaaaacagaaaaacgaggaggaagaacaggaagctaagatggagctgaaacggagacttagtaggaagctgagcttgcgtcctacagtcgcagaactacaggccaggcggatcctgagatttaacgaatatgtagaagtgacggattcacctgattatgataggcgtgccgataaaccctgggccaggttaacccccgctgacaaggccgctatccggaaagagctgaacgagtttaaaagtacagaaatggaggtacatgaagagtccaggcagtttaccaggtttcatcgcccttag

SEQ ID NO: 40392 - protein, 757 aa, Artificial Sequence
  derived and/or modified sequence
MLRACQLSGVTAAAQSCLCGKFVLRPLRPCRRYSTSGSSGLTTGKIAGAGLLFVGGGIGGTILYAKWDSHFRESVEKTIPYSDKLFEMVLGPAAYNVPLPKKSIQSGPLKISSVSEVMKESKQPASQLQKQKGDTPASATAPTEAAQIISAAGDTLSVPAPAVQPEESLKTDHPEIGEGKPTPALSEASSSSIRERPPEEVAARLAQQEKQEQVKIESLAKSLEDALRQTASVTLQAIAAQNAAVQAVNAHSNILKAAMDNSEIAGEKKSAQWRTVEGALKERRKAVDEAADALLKAKEELEKMKSVIENAKKKEVAGAKPHITAAEGKLHNMIVDLDNVVKKVQAAQSEAKVVSQYHELVVQARDDFKRELDSITPEVLPGWKGMSVSDLADKLSTDDLNSLIAHAHRRIDQLNRELAEQKATEKQHITLALEKQKLEEKRAFDSAVAKALEHHRSEIQAEQDRKIEEVRDAMENEMRTQLRRQAAAHTDHLRDVLRVQEQELKSEFEQNLSEKLSEQELQFRRLSQEQVDNFTLDINTAYARLRGIEQAVQSHAVAEEEARKAHQLWLSVEALKYSMKTSSAETPTIPLGSAVEAIKANCSDNEFTQALTAAIPPESLTRGVYSEETLRARFYAVQKLARRVAMIDETRNSLYQYFLSYLQSLLLFPPQQLKPPPELCPEDINTFKLLSYASYCIEHGDLELAAKFVNQLKGESRRVAQDWLKEARMTLETKQIVEILTAYASAVGIGTTQVQPE

SEQ ID NO: 40393 - DNA, 2274 bp, Artificial Sequence
  derived and/or modified sequence
atgttgcgcgcctgtcagttgtcaggggtgaccgcagcggcccagtcctgcctgtgcggtaaatttgtcttaaggccactgcgaccgtgtcggcggtattctacttccggctcctctggcctgaccacaggcaagattgcaggagccgggctcctctttgttggcggggggataggcgggaccattttatatgccaagtgggactcacacttccgggaatctgttgaaaaaacaatcccgtactctgataaactcttcgaaatggtattaggacctgccgcatataacgttcctctcccaaaaaaatccatccaaagtgggccgctaaaaattagttcagtgtccgaagtgatgaaagagagcaaacagcctgcatcacaattgcaaaagcaaaagggggacactccagccagcgccaccgcacccacggaggcagcccagatcatatccgcggccggcgatacgttatccgtccccgcccctgccgttcagccagaggagtcgcttaaaacggaccacccggagattggcgaggggaagcctacaccagctctcagcgaggccagtagttcctccatcagagagcggccacccgaagaggtggcagcccggctggcacagcaagaaaagcaagagcaagtgaaaatcgagtccctggcgaagagtctggaagacgcactcagacaaactgcttccgtgacactgcaggcgatcgctgcccagaatgctgctgttcaggccgttaacgcccactccaatatcctcaaggcagccatggacaatagcgagatcgccggcgagaagaaaagtgctcaatggcgcacagtcgagggggcactgaaagaacgtcggaaagccgttgacgaggctgccgacgcccttttgaaagctaaggaagaattagaaaaaatgaaatcagtcatcgagaatgccaagaagaaggaggtggctggagccaagcctcacatcaccgcagcagagggcaagttacacaacatgatcgtggatctggataacgttgtgaagaaggtgcaggccgcccaatctgaggcaaaggtcgtctcccagtatcacgagctggtggtgcaggccagagacgatttcaaacgcgaattagattccataacccctgaggttttgccaggctggaagggcatgtctgtttcagaccttgccgataagcttagtactgacgatctgaactcactcattgctcatgcccatcggaggattgaccagctgaatcgcgagctggctgagcagaaagccaccgaaaagcaacatatcactctggctctggaaaaacagaaactggaggaaaagagggcatttgactcagcagttgctaaggcactggagcatcacaggtcagagatacaagctgaacaagatagaaagatcgaggaagtccgggatgccatggagaacgaaatgaggacgcagctgaggcggcaggccgcagcccacaccgaccacctgcgggacgtgctgagagtccaggaacaggaacttaagtcagagttcgagcaaaacctaagtgaaaagctgagcgagcaagagctccaatttcgccggctctcgcaggaacaggtggacaacttcaccctggatattaacacggcctacgctaggctccgaggtatcgagcaggcagttcaaagccatgctgtcgctgaggaagaggctaggaaggcccaccagttgtggctttcggtggaagccttgaagtactccatgaaaacttcgtcagcggaaacgcctacaatcccgctaggaagcgccgtcgaggccatcaaggccaattgtagcgacaatgagttcactcaggcccttacagccgcaatcccccctgagtccctcacacgtggcgtgtattctgaagaaacgcttcgtgcaagattttatgccgttcagaaactggcacgaagagttgccatgatcgatgaaacccgtaattccctttaccagtatttcctttcttatctccaatcacttctgctgtttcccccccaacagctgaagccacctccagagctgtgtccggaggatattaacacgttcaagctgctttcctacgctagctactgcattgaacacggagatctggagttggccgccaaattcgttaaccagctcaagggagagagtagaagagttgcccaggattggctgaaggaggccaggatgacactggaaaccaagcagattgttgagatcctgacagcgtatgctagcgccgtgggtatcgggacgacacaggtgcaacctgagtag

SEQ ID NO: 40394 - DNA, 2627 bp, Artificial Sequence
  derived and/or modified sequence
agcgccgtccgcttgaccgagatgctgcgggcctgtcagttatcgggtgtgaccgccgccgcccagagttgtctctgtgggaagtttgtcctccgtccattgcgaccatgccgcagatactctacttcaggcagctctgggttgactactggcaaaattgctggagctggccttttgtttgttggtggaggtattggtggcactatcctatatgccaaatgggattcccatttccgggaaagtgtagagaaaaccataccttactcagacaaactcttcgagatggttcttggtcctgcagcttataatgttccattgccaaagaaatcgattcagtcgggtccactaaaaatctctagtgtatcagaagtaatgaaagaatctaaacagcctgcctcacaactccaaaaacaaaagggagatactccagcttcagcaacagcacctacagaagcggctcaaattatttctgcagcaggtgataccctgtcggtcccagcccctgcagttcagcctgaggaatctttaaaaactgatcaccctgaaattggtgaaggaaaacccacacctgcactttcagaagcatcctcatcttctataagggagcgaccacctgaagaagttgcagctcgccttgcacaacaggaaaaacaagaacaagttaaaattgagtctctagccaagagcttagaagatgctctgaggcaaactgcaagtgtcactctgcaggctattgcagctcagaatgctgcggtccaggctgtcaatgcacactccaacatattgaaagccgccatggacaattctgagattgcaggcgagaagaaatctgctcagtggcgcacagtggagggtgcattgaaggaacgcagaaaggcagtagatgaagctgccgatgcccttctcaaagccaaagaagagttagagaagatgaaaagtgtgattgaaaatgcaaagaaaaaagaggttgctggggccaagcctcatataactgctgcagagggtaaacttcacaacatgatagttgatctggataatgtggtcaaaaaggtccaagcagctcagtctgaggctaaggttgtatctcagtatcatgagctggtggtccaagctcgggatgactttaaacgagagctggacagtattactccagaagtccttcctgggtggaaaggaatgagtgtttcagacttagctgacaagctctctactgatgatctgaactccctcattgctcatgcacatcgtcgtattgatcagctgaacagagagctggcagaacagaaggccaccgaaaagcagcacatcacgttagccttggagaaacaaaagctggaagaaaagcgggcatttgactctgcagtagcaaaagcattagaacatcacagaagtgaaatacaggctgaacaggacagaaagatagaagaagtcagagatgccatggaaaatgaaatgagaacccagcttcgccgacaggcagctgcccacactgatcacttgcgagatgtccttagggtacaagaacaggaattgaagtctgaatttgagcagaacctgtctgagaaactctctgaacaagaattacaatttcgtcgtctcagtcaagagcaagttgacaactttactctggatataaatactgcctatgccagactcagaggaatcgaacaggctgttcagagccatgcagttgctgaagaggaagccagaaaagcccaccaactctggctttcagtggaggcattaaagtacagcatgaagacctcatctgcagaaacacctactatcccgctgggtagtgcagttgaggccatcaaagccaactgttctgataatgaattcacccaagctttaaccgcagctatccctccagagtccctgacccgtggggtgtacagtgaagagacccttagagcccgtttctatgctgttcaaaaactggcccgaagggtagcaatgattgatgaaaccagaaatagcttgtaccagtacttcctctcctacctacagtccctgctcctattcccacctcagcaactgaagccgcccccagagctctgccctgaggatataaacacatttaaattactgtcatatgcttcctattgcattgagcatggtgatctggagctagcagcaaagtttgtcaatcagctgaagggggaatccagacgagtggcacaggactggctgaaggaagcccgaatgaccctagaaacgaaacagatagtggaaatcctgacagcatatgccagcgccgtaggaataggaaccactcaggtgcagccagagtgaggtttaggaagattttcataaagtcatatttcatgtcaaaggaaatcagcagtgatagatgaagggttcgcagcgagagtcccggacttgtctagaaatgagcaggtttacaagtactgttctaaatgttaacacctgttgcatttatattctttccatttgctatcatgtcagtgaacgccaggagtgctttctttgcaacttgtgtaacattttctgttttttcaggttttactgatgaggcttgtgaggccaatcaaaataatgtttgtgatctctactactgttgattttgccctcggagcaaactgaataaagcaacaagatgaaaa

SEQ ID NO: 40395 - DNA, 2274 bp, Artificial Sequence
  derived and/or modified sequence
atgctgcgggcctgccagctgagcggcgtgacagctgctgcccagagctgcctgtgtgggaagtttgtgctgcggcccctgcggccctgccgccgctacagcaccagcggcagcagcggcctgaccaccgggaagattgctggagctggcctgctgtttgtgggcggcggcatcggcggcaccatcctgtatgccaagtgggacagccacttccgggagagcgtggagaagaccatcccctacagcgacaagctgtttgagatggtgctgggccctgctgcctacaacgtgcccctgcccaagaagagcatccagagcggccccctgaagatcagctctgtgtctgaggtgatgaaggagagcaagcagcctgccagccagctgcagaagcagaagggggacaccccagccagcgccacagcccccacagaagctgcccagatcatctctgctgctggggacaccctgtctgtgcctgccccagctgtgcagcctgaggagagcctgaagacagaccaccctgagatcggggagggcaagcccaccccagccctgtctgaggccagcagcagcagcatccgggagaggcctcctgaggaggtggccgcccggctggcccagcaggagaagcaggagcaggtgaagattgagagcctggccaagagcctggaggatgccctgcggcagacagcctctgtgaccctgcaggccatcgccgcccagaatgctgctgtgcaggccgtgaatgcccacagcaacatcctgaaggccgccatggacaacagcgagattgctggggagaagaagagcgcccagtggaggacagtggagggcgccctgaaggagaggaggaaggctgtggatgaggccgcagatgccctgctgaaggccaaggaggagctggagaagatgaagtctgtgattgaaaatgccaagaagaaggaggtggccggggccaagccccacatcacagctgctgagggcaagctgcacaacatgattgtggacctggacaacgtggtgaagaaggtgcaggccgcccagagcgaggccaaggtggtgtcccagtaccacgagctggtggtgcaggccagagatgacttcaagcgggagctggacagcatcaccccagaggtgctgcccggctggaagggcatgtctgtgtctgacctggccgacaagctgagcacagatgacctgaacagcctcatcgcccacgcccacagaagaattgaccagctgaaccgggagctggccgagcagaaggccacagagaagcagcacatcaccctggccctggagaagcagaagctggaggagaagagggcctttgacagcgctgtggccaaggccctggagcaccacaggtctgagatccaggccgagcaggacaggaagattgaggaggtgagagatgccatggagaatgagatgaggacccagctgcggcggcaggccgccgcccacacagaccacctgagagatgtgctgcgggtgcaggagcaggagctgaagtcagaatttgagcagaacctgtctgagaagctgtctgagcaggagctgcagttccggcggctgagccaggagcaggtggacaacttcaccctggacatcaacacagcctatgcccggctgcggggcatcgagcaggccgtgcagagccatgctgtggccgaggaggaggccaggaaggcccaccagctgtggctgtctgtggaggccctgaagtacagcatgaagaccagcagcgctgagacccccaccatccccctgggcagcgctgtggaggccatcaaggccaactgcagcgacaatgagttcacccaggccctgacagctgccatccccccagagagcctgacccggggcgtgtacagcgaggagaccctgcgggcccgcttctatgctgtgcagaagctggcccggcgggtggccatgattgatgagaccaggaacagcctgtaccagtacttcctgagctacctgcagagcctgctgctcttccccccccagcagctgaagcccccacctgagctgtgcccagaggacatcaacaccttcaagctgctgtcctatgccagctactgcattgaacatggagacctggagctggccgccaagtttgtgaaccagctgaagggggagagcagaagagtggcccaggactggctgaaggaggccaggatgaccctggagaccaagcagatcgtggagatcctgacagcctatgccagcgctgtgggcatcggcaccacccaggtgcagcctgagtag

SEQ ID NO: 40396 - DNA, 2274 bp, Artificial Sequence
  derived and/or modified sequence
atgctgcgggcctgccagctgagcggcgtgaccgccgccgcccagtcttgcctgtgtggtaagtttgtccttcgtcccctccgcccctgtagacggtattccacttccgggtcctccgggctgacaaccggaaagattgcgggagccggactgctcttcgtcggaggagggattgggggaaccatcctctatgcaaaatgggatagtcactttcgggaatccgtggagaaaactattccctatagtgacaagctgttcgaaatggtgttaggtcctgccgcctacaacgtaccactgcccaagaagagtatccaaagtggaccacttaaaataagcagcgtcagcgaagttatgaaagagtctaaacagccagccagtcaattgcagaaacagaagggcgatacacccgcgtctgcgacggctcctacagaagctgcccagatcatttctgccgccggagacaccctcagtgttcccgcccctgcggtacagccagaagagtctctaaagacagatcacccagaaatcggggagggcaagccaacaccagcgctgagcgaggcctcctctagcagcatccgagaacggccacctgaggaggtggcagcaagactggcccagcaagagaaacaggaacaagtgaaaatcgagtccctggccaagtccctggaggacgcactgcggcaaactgcaagcgtaacactgcaggccatcgcggcccaaaacgccgccgtgcaggctgtgaacgcccactccaatatcctaaaggctgccatggataatagtgaaatagccggagagaagaagtccgcccagtggaggacagttgagggggctttaaaggagagacgcaaggcggtggacgaagcggctgacgcacttttgaaggccaaggaagagctggagaagatgaaatcagtgatcgagaatgcaaaaaaaaaagaagtcgccggggccaaaccccacattaccgccgccgaaggtaaactgcacaacatgatcgtcgatctcgacaatgtggtgaaaaaagttcaggccgctcagagcgaagccaaggtggtaagtcagtaccatgagcttgtggtccaagcccgcgatgatttcaagcgtgagctggactctatcactcccgaggtgcttccaggctggaaaggaatgtcagtgtctgacctggcagacaaactgagcacggatgatcttaacagcctgatcgctcatgctcatagacgcatcgatcagctgaaccgcgagctggctgaacagaaggctactgaaaaacagcacatcacactggccctggagaagcaaaagcttgaagagaaaagagcgttcgatagcgccgtagctaaggctctcgagcaccataggagtgaaatacaggcagaacaggatcgcaaaattgaagaggtgagagacgccatggaaaacgaaatgaggacccagctgcgcaggcaggccgcagcccatactgaccacctgcgagatgtactgcgcgtccaagaacaagagctgaaatccgaatttgagcagaacctctcggaaaagcttagtgaacaggagctgcagttccgtcggctgagccaggagcaagtcgataacttcactctggacatcaataccgcgtacgctcgactccgcggtatcgagcaggcagtgcagagccacgcagttgctgaggaagaagccaggaaagctcaccaactatggctgtccgtcgaggcccttaagtacagcatgaagactagtagcgcagaaacaccgaccatcccattggggtctgccgttgaagcgattaaggccaattgcagcgacaatgagttcacccaagccttaactgccgccattcctcccgagagcctgacccggggagtctatagcgaagaaacactcagggcacggttttacgccgttcagaaactggcgaggcgtgtggccatgattgatgagacccgcaacagcttataccagtatttcctgtcatacctgcagtcgctactgctattcccccctcagcagttaaagcccccccccgagttgtgtccagaagatatcaacaccttcaaactactgagctacgcgtcctactgtatcgaacacggtgacctcgaactggctgccaagttcgttaaccagttgaagggagagtccaggcgcgtcgcacaggactggctcaaggaggctaggatgaccctcgagaccaaacagatcgtagaaattctcacggcatacgcctccgcagtcggaatcggcacaactcaagtgcaaccagagtag

SEQ ID NO: 40397 - DNA, 2274 bp, Artificial Sequence
  derived and/or modified sequence
atgctgcgggcttgccagctgtcaggtgttacagcggcagcgcagagctgcctatgtggaaaatttgtcctgaggcctcttaggccatgccgacgctacagcacctcaggctccagtggcctgactacaggcaagatcgccggagcaggcctgttattcgtcggaggcggtataggcggtacaattctttacgcgaagtgggactctcactttcgcgaatctgtggagaagaccataccatactcagataagctgtttgagatggtcctgggcccagccgcttataatgtgccacttcctaagaaatcaatccagtctggccctctcaagattagctctgtgtctgaggtgatgaaggaaagcaagcagccggcttcccagctgcagaagcagaagggagacactcctgccagcgctactgctccaacagaggccgctcagatcatctctgctgctggagataccctgtctgtacccgcacccgcagttcagcccgaggaatcccttaaaacggatcatccagagattggagagggaaagcccacgcccgctctgtccgaagcctccagctcttcgataagagaaagaccccctgaagaggtggccgcacggctggcccagcaagaaaagcaggagcaagtgaagatcgagagccttgcgaagtccctagaagatgcattgagacagaccgcctccgtgactttacaagccattgcggcacagaatgcggctgttcaggccgtcaacgcccatagcaatatcctgaaggcagctatggataactcagagattgccggagaaaagaagagcgcccagtggaggacagtggaaggcgcattaaaagagcgccgtaaagcagttgacgaggcagcagacgctttactgaaggccaaagaggagttagagaagatgaagtccgtcatagagaatgctaaaaaaaaagaggtggcaggtgccaagccgcacatcaccgccgctgagggaaaacttcacaacatgatagtcgaccttgacaacgtggtaaaaaaggtgcaagccgctcagtcagaggctaaagtggtctctcagtaccacgaactggttgtgcaagcgagagacgacttcaaacgtgaattggactccatcactcccgaagttctgcccggttggaagggtatgagcgttagtgacttggcggataaactgtcgactgacgaccttaattcccttattgctcacgcccaccggagaatcgaccagttgaatcgggagctagcagaacaaaaagcgactgagaagcagcacatcactctggcccttgaaaaacaaaaactggaagagaagagggcttttgacagcgccgtggcgaaagcactggagcaccacaggtctgagattcaagcagagcaggataggaaaatcgaggaggtgcgcgatgcaatggaaaatgaaatgcggacacagctccgcaggcaggccgctgctcacaccgatcatttacgagacgtgctgcgtgttcaggagcaggagttgaaatccgagttcgagcagaatctgtccgaaaagctgagcgagcaggagctacagtttaggagactcagccaggaacaggtagataacttcacactggacatcaacacagcttatgctaggctcagaggaatcgaacaggcagtacagtcacacgcggtcgcagaggaggaagcaaggaaagcccaccagctgtggttaagcgtcgaggcactgaagtatagcatgaaaacatcttcagccgaaacccctactattccgcttgggtccgcggtggaggctatcaaagccaattgctcagacaacgaatttactcaggcactcactgctgccatcccacccgagagtctgacccgcggagtctatagtgaggagaccttgagggcacgcttttacgccgtccaaaagcttgcgagaagggtggccatgatagacgaaactcgcaatagtttatatcagtactttctttcctatcttcagtcactgttgttgtttccgccacagcaactgaaaccacctccagagctgtgcccggaagacatcaacacattcaaattacttagctacgccagttattgtattgagcacggtgatctcgagcttgctgcaaagttcgtgaatcagcttaaaggcgagtcccggagggttgcccaggactggctgaaagaggccagaatgacgctggagaccaaacagatagtggagatcctgacagcctatgcctcagccgtggggattgggacaactcaggtacagcctgaatag

SEQ ID NO: 40398 - DNA, 2274 bp, Artificial Sequence
  derived and/or modified sequence
atgctgagagcctgccagctgagcggcgtgaccgccgccgcccagagctgcctgtgcggcaagttcgtgctgagacccctgagaccctgcagaagatacagcaccagcggcagcagcggcctgaccaccggcaagatcgccggcgccggcctgctgttcgtgggcggcggcatcggcggcaccatcctgtacgccaagtgggacagccacttcagagagagcgtggagaagaccatcccctacagcgacaagctgttcgagatggtgctgggccccgccgcctacaacgtgcccctgcccaagaagagcatccagagcggccccctgaagatcagcagcgtgagcgaggtgatgaaggagagcaagcagcccgccagccagctgcagaagcagaagggcgacacccccgccagcgccaccgcccccaccgaggccgcccagatcatcagcgccgccggcgacaccctgagcgtgcccgcccccgccgtgcagcccgaggagagcctgaagaccgaccaccccgagatcggcgagggcaagcccacccccgccctgagcgaggccagcagcagcagcatcagagagagaccccccgaggaggtggccgccagactggcccagcaggagaagcaggagcaggtgaagatcgagagcctggccaagagcctggaggacgccctgagacagaccgccagcgtgaccctgcaggccatcgccgcccagaacgccgccgtgcaggccgtgaacgcccacagcaacatcctgaaggccgccatggacaacagcgagatcgccggcgagaagaagagcgcccagtggagaaccgtggagggcgccctgaaggagagaagaaaggccgtggacgaggccgccgacgccctgctgaaggccaaggaggagctggagaagatgaagagcgtgatcgagaacgccaagaagaaggaggtggccggcgccaagccccacatcaccgccgccgagggcaagctgcacaacatgatcgtggacctggacaacgtggtgaagaaggtgcaggccgcccagagcgaggccaaggtggtgagccagtaccacgagctggtggtgcaggccagagacgacttcaagagagagctggacagcatcacccccgaggtgctgcccggctggaagggcatgagcgtgagcgacctggccgacaagctgagcaccgacgacctgaacagcctgatcgcccacgcccacagaagaatcgaccagctgaacagagagctggccgagcagaaggccaccgagaagcagcacatcaccctggccctggagaagcagaagctggaggagaagagagccttcgacagcgccgtggccaaggccctggagcaccacagaagcgagatccaggccgagcaggacagaaagatcgaggaggtgagagacgccatggagaacgagatgagaacccagctgagaagacaggccgccgcccacaccgaccacctgagagacgtgctgagagtgcaggagcaggagctgaagagcgagttcgagcagaacctgagcgagaagctgagcgagcaggagctgcagttcagaagactgagccaggagcaggtggacaacttcaccctggacatcaacaccgcctacgccagactgagaggcatcgagcaggccgtgcagagccacgccgtggccgaggaggaggccagaaaggcccaccagctgtggctgagcgtggaggccctgaagtacagcatgaagaccagcagcgccgagacccccaccatccccctgggcagcgccgtggaggccatcaaggccaactgcagcgacaacgagttcacccaggccctgaccgccgccatcccccccgagagcctgaccagaggcgtgtacagcgaggagaccctgagagccagattctacgccgtgcagaagctggccagaagagtggccatgatcgacgagaccagaaacagcctgtaccagtacttcctgagctacctgcagagcctgctgctgttccccccccagcagctgaagcccccccccgagctgtgccccgaggacatcaacaccttcaagctgctgagctacgccagctactgcatcgagcacggcgacctggagctggccgccaagttcgtgaaccagctgaagggcgagagcagaagagtggcccaggactggctgaaggaggccagaatgaccctggagaccaagcagatcgtggagatcctgaccgcctacgccagcgccgtgggcatcggcaccacccaggtgcagcccgagtag

SEQ ID NO: 40399 - protein, 747 aa, Artificial Sequence
  derived and/or modified sequence
MLRACQLSGVTAAAQSCLCGKFVLRPLRPCRRYSTSGSSGLTTGKIAGAGLLFVGGGIGGTILYAKWDSHFRESVEKTIPYSDKLFEMVLGPAAYNVPLPKKSIQSGPLKISSVSEVMKESKQPASQLQKQKGDTPASATAGDTLSVPAPAVQPEESLKTDHPEIGEGKPTPALSEEASSSSIRERPPEEVAARLAQQEKQEQVKIESLAKSLEDALRQTASVTLQAIAAQNAAVQAVNAHSNILKAAMDNSEIAGEKKSAQWRTVEGALKERRKAVDEAADALLKAKEELEKMKSVIENAKKKEVAGAKPHITAAEGKLHNMIVDLDNVVKKVQAAQSEAKVVSQYHELVVQARDDFKRELDSITPEVLPGWKGMSVSDLADKLSTDDLNSLIAHAHRRIDQLNRELAEQKATEKQHITLALEKQKLEEKRAFDSAVAKALEHHRSEIQAEQDRKIEEVRDAMENEMRTQLRRQAAAHTDHLRDVLRVQEQELKSEFEQNLSEKLSEQELQFRRLSQEQVDNFTLDINTAYARLRGIEQAVQSHAVAEEEARKAHQLWLSVEALKYSMKTSSAETPTIPLGSAVEAIKANCSDNEFTQALTAAIPPESLTRGVYSEETLRARFYAVQKLARRVAMIDETRNSLYQYFLSYLQSLLLFPPQQLKPPPELCPEDINTFKLLSYASYCIEHGDLELAAKFVNQLKGESRRVAQDWLKEARMTLETKQIVEILTAYASAVGIGTTQVQPE

SEQ ID NO: 40400 - protein, 747 aa, Artificial Sequence
  derived and/or modified sequence
MLRACQLSGVTAAAQSCLCGKFVLRPLRPCRRYSTSGSSGLTTGKIAGAGLLFVGGGIGGTILYAKWDSHFRESVEKTIPYSDKLFEMVLGPAAYNVPLPKKSIQSGPLKISSVSEVMKESKQPASQLQKQKGDTPASATAGDTLSVPAPAVQPEESLKTDHPEIGEGKPTPALSEEASSSSIRERPPEEVAARLAQQEKQEQVKIESLAKSLEDALRQTASVTLQAIAAQNAAVQAVNAHSNILKAAMDNSEIAGEKKSAQWRTVEGALKERRKAVDEAADALLKAKEELEKMKSVIENAKKKEVAGAKPHITAAEGKLHNMIVDLDNVVKKVQAAQSEAKVVSQYHELVVQARDDFKRELDSITPEVLPGWKGMSEYNLADKLSTDDLNSLIAHAHRRIDQLNRELAEQKATEKQHITLALEKQKLEEKRAFDSAVAKALEHHRSEIQAEQDRKIEEVRDAMENEMRTQLRRQAAAHTDHLRDVLRVQEQELKSEFEQNLSEKLSEQELQFRRLSQEQVDNFTLDINTAYARLRGIEQAVQSHAVAEEEARKAHQLWLSVEALKYSMKTSSAETPTIPLGSAVEAIKANCSDNEFTQALTAAIPPESLTRGVYSEETLRARFYAVQKLARRVAMIDETRNSLYQYFLSYLQSLLLFPPQQLKPPPELCPEDINTFKLLSYASYCIEHGDLELAAKFVNQLKGESRRVAQDWLKEARMTLETKQIVEILTAYASAVGIGTTQVQPE

SEQ ID NO: 40401 - DNA, 2244 bp, Artificial Sequence
  derived and/or modified sequence
atgctgagagcctgccagctgagcggggtcacagccgctgcgcaatcatgtttgtgtgggaaatttgtgctgagacctctgagaccctgtcgccgttactcaacaagtgggagcagcggtctgactacgggcaaaatcgccggcgctggcctcctttttgtgggtggaggcatcggaggcaccattttatacgcgaaatgggacagtcactttcgcgaatcagtggagaagacaattccatacagcgataaactgtttgagatggttctggggccggcggcttataatgtcccccttcctaagaagtcaatccagtcaggcccgctcaaaatttctagtgtctccgaggttatgaaagaatccaaacagccagcttcccagctgcagaagcagaaaggtgacactcctgctagtgcaactgctggcgatacacttagcgtgccagcgcccgccgtgcagcccgaggaatcattaaaaaccgatcatccagaaatcggagaagggaaacctacacctgccttatcagaggaggcttctagctcatctatcagggaacgccccccagaagaagtggctgctaggctggcacagcaagagaaacaggagcaggtcaaaattgaatccctggcaaagagtctggaagacgccctgaggcagacggcctcagtgaccctccaagccattgcagcccaaaacgccgccgttcaggctgtgaacgcacattctaacatcctgaaagcagcaatggataactcggaaatagcaggggaaaagaaaagcgcccagtggagaactgttgaaggcgcactcaaggagcggcggaaagcagtagacgaagcagccgacgctttgctcaaggctaaagaagaactggagaaaatgaagtctgtcattgagaacgcaaaaaaaaaagaagttgcaggcgccaagccccacataactgccgccgaggggaaactccacaacatgattgtcgacttggacaacgtggtgaagaaggtgcaggctgcacagtccgaagccaaagtagtgagtcagtaccacgaactggtagtgcaggcgcgcgatgactttaaacgagagcttgacagtattacacctgaagtgctccccggttggaagggtatgagtgtgtctgacttggcagataaactttccacagacgatcttaatagcctgattgctcacgcccataggagaatcgaccaactcaaccgggaactggccgagcaaaaggccacggagaaacagcatataaccttggcgctggaaaagcagaaactcgaggagaaaagagcatttgacagcgccgtggccaaagccttagagcatcaccgcagtgagatccaggccgagcaggaccgtaaaatagaggaggttcgagatgccatggagaacgagatgaggacacagctccgccggcaagctgccgcgcacactgatcacctgcgagacgtgttacgggttcaggaacaggagctgaagtcagaattcgagcaaaatctgagtgagaagctaagcgaacaggagctacagtttagaaggctgtctcaggaacaggtggataatttcactttagatataaacaccgcgtatgctcggctgcgaggcatcgagcaggccgtccagagtcacgcagttgcagaagaggaagcacgaaaggctcatcagttgtggctttctgtggaggccctaaagtattctatgaagacgagttcagccgagacgcccaccataccactgggcagcgccgttgaagccattaaggctaactgtagtgacaacgaattcacacaagccctcaccgcagcaatccccccagagtccttaacaaggggagtgtactccgaagagactcttcgcgcgaggttttatgccgtccagaaattagcaagacgcgtggcaatgatcgacgagacacggaattcgctgtatcaatactttcttagttaccttcaatctctgttactcttccccccccagcaactgaagccccctccggaactctgcccggaggacattaatacattcaagttgctttcgtatgcgtcctattgcatcgaacacggtgacctggagcttgccgccaagttcgtgaatcaattgaagggtgagtctcggcgggtggcccaggactggctgaaagaagctcgcatgacgcttgaaactaagcagattgtggaaatcttgaccgcttacgcctctgctgtgggcattggcacaacccaggtgcagccggagtag

SEQ ID NO: 40402 - DNA, 2244 bp, Artificial Sequence
  derived and/or modified sequence
atgctgagagcatgtcagttgtccggggtgacagcagccgctcagtcttgcctatgtggtaaattcgtacttcggccactgcggccttgtaggcgatattctacaagcggatctagtggactgacgaccggaaaaatagccggtgccgggctgctgtttgtcgggggaggtatcgggggaactattttgtatgcgaagtgggattcccacttcagggagtctgtggaaaaaacaatcccttattcagacaagctctttgagatggtattgggacctgccgcctacaatgtccctctcccaaagaaatcgattcagtcaggaccactgaaaatttcctctgtttcggaggtcatgaaagaatccaagcaaccggctagccagctgcaaaagcagaagggggacacaccggcgagtgccacagccggcgatacccttagcgtcccagcaccagccgtgcagcccgaggagagcctcaagaccgaccatccagaaatcggcgagggtaagcctacacctgctctgtccgaagaggcttctagcagttctattagagaacgccctcccgaggaagtcgcggctcgtctggctcagcaagagaagcaggagcaagtgaagattgagtctctcgcaaaaagtctagaggatgcactgcgccaaacagcatccgtcacactgcaagccattgcagcacagaatgccgccgtgcaggctgtaaacgcccattccaatattctcaaagctgctatggataactctgagatcgccggcgagaagaaatccgcccaatggaggactgtggagggcgccctgaaagaacgtaggaaggccgtcgacgaggctgccgacgcgctactcaaagcaaaagaagagctcgagaaaatgaagtctgtcatcgagaacgcaaagaagaaagaagtcgcgggagcaaaaccacatatcacagcagctgagggtaagcttcataacatgatagtcgatctggataatgtcgtgaagaaggtccaggccgcacaatccgaggccaaggtcgtgtcacagtatcacgagttagtggttcaagctagggatgactttaaacgcgaactggacagtataactcctgaggtgctccccggttggaagggaatgtccgaatacaatctcgccgacaagctctccactgacgacttaaactcactgatcgcgcatgcgcaccgccggattgatcagctgaatagagagctcgctgaacagaaagctaccgagaaacagcatatcaccctagctttggagaagcagaaactcgaggaaaagagagcgttcgactccgccgtggcaaaagcccttgagcaccatagaagtgagatccaagcagagcaggatcggaagatcgaagaggtgcgtgacgcaatggaaaacgagatgcgtacccaactgcgaaggcaggccgccgctcacacagaccacttacgggatgtcttgcgtgttcaggagcaagaattgaaatcagaatttgagcagaatctaagcgagaagctgtccgaacaggaattacagtttagaaggctgtcacaggaacaagtggataacttcacactcgacatcaatactgcctacgcaaggcttagaggcatcgagcaggccgtgcagtcccacgccgtagccgaagaggaagcaaggaaagcccaccaactttggcttagcgtcgaagcactgaagtacagcatgaagacctcatccgccgaaacgcccacaatacccctcggatctgcggtggaagccatcaaagccaattgctcggataatgagttcacccaggcactgaccgcagcgattccgccggagtccctgactcggggtgtgtacagcgaagagaccttacgcgcccgcttctacgccgtgcagaaactcgctcgaagagtagccatgattgatgagactcgcaattcattgtatcagtattttctgagctatttacagagcttactgctgttccctcctcagcaactcaagcctccaccggagttgtgtcccgaggatataaacacctttaagcttctgtcatacgcgtcctattgcatagagcacggcgacctggagctcgctgccaagttcgtaaaccagttgaagggagaatcaaggcgggtggcccaggactggctgaaagaggctcgcatgaccttggagacaaagcagatcgtggaaatactgactgcttatgccagtgcagtcgggatcgggaccacacaggtccagcccgaatag

SEQ ID NO: 40403 - DNA, 2670 bp, Artificial Sequence
  derived and/or modified sequence
gcgggcacgcacacacgcaagcacgcctccacttaactcgcgccgccgcggcagctcgagtccaccagcagcgccgtccgcttgaccgagatgctgcgggcctgtcagttatcgggtgtgaccgccgccgcccagagttgtctctgtgggaagtttgtcctccgtccattgcgaccatgccgcagatactctacttcaggcagctctgggttgactactggcaaaattgctggagctggccttttgtttgttggtggaggtattggtggcactatcctatatgccaaatgggattcccatttccgggaaagtgtagagaaaaccataccttactcagacaaactcttcgagatggttcttggtcctgcagcttataatgttccattgccaaagaaatcgattcagtcgggtccactaaaaatctctagtgtatcagaagtaatgaaagaatctaaacagcctgcctcacaactccaaaaacaaaagggagatactccagcttcagcaacagcaggtgataccctgtcggtcccagcccctgcagttcagcctgaggaatctttaaaaactgatcaccctgaaattggtgaaggaaaacccacacctgcactttcagaagaagcatcctcatcttctataagggagcgaccacctgaagaagttgcagctcgccttgcacaacaggaaaaacaagaacaagttaaaattgagtctctagccaagagcttagaagatgctctgaggcaaactgcaagtgtcactctgcaggctattgcagctcagaatgctgcggtccaggctgtcaatgcacactccaacatattgaaagccgccatggacaattctgagattgcaggcgagaagaaatctgctcagtggcgcacagtggagggtgcattgaaggaacgcagaaaggcagtagatgaagctgccgatgcccttctcaaagccaaagaagagttagagaagatgaaaagtgtgattgaaaatgcaaagaaaaaagaggttgctggggccaagcctcatataactgctgcagagggtaaacttcacaacatgatagttgatctggataatgtggtcaaaaaggtccaagcagctcagtctgaggctaaggttgtatctcagtatcatgagctggtggtccaagctcgggatgactttaaacgagagctggacagtattactccagaagtccttcctgggtggaaaggaatgagtgtttcagacttagctgacaagctctctactgatgatctgaactccctcattgctcatgcacatcgtcgtattgatcagctgaacagagagctggcagaacagaaggccaccgaaaagcagcacatcacgttagccttggagaaacaaaagctggaagaaaagcgggcatttgactctgcagtagcaaaagcattagaacatcacagaagtgaaatacaggctgaacaggacagaaagatagaagaagtcagagatgccatggaaaatgaaatgagaacccagcttcgccgacaggcagctgcccacactgatcacttgcgagatgtccttagggtacaagaacaggaattgaagtctgaatttgagcagaacctgtctgagaaactctctgaacaagaattacaatttcgtcgtctcagtcaagagcaagttgacaactttactctggatataaatactgcctatgccagactcagaggaatcgaacaggctgttcagagccatgcagttgctgaagaggaagccagaaaagcccaccaactctggctttcagtggaggcattaaagtacagcatgaagacctcatctgcagaaacacctactatcccgctgggtagtgcagttgaggccatcaaagccaactgttctgataatgaattcacccaagctttaaccgcagctatccctccagagtccctgacccgtggggtgtacagtgaagagacccttagagcccgtttctatgctgttcaaaaactggcccgaagggtagcaatgattgatgaaaccagaaatagcttgtaccagtacttcctctcctacctacagtccctgctcctattcccacctcagcaactgaagccgcccccagagctctgccctgaggatataaacacatttaaattactgtcatatgcttcctattgcattgagcatggtgatctggagctagcagcaaagtttgtcaatcagctgaagggggaatccagacgagtggcacaggactggctgaaggaagcccgaatgaccctagaaacgaaacagatagtggaaatcctgacagcatatgccagcgccgtaggaataggaaccactcaggtgcagccagagtgaggtttaggaagattttcataaagtcatatttcatgtcaaaggaaatcagcagtgatagatgaagggttcgcagcgagagtcccggacttgtctagaaatgagcaggtttacaagtactgttctaaatgttaacacctgttgcatttatattctttccatttgctatcatgtcagtgaacgccaggagtgctttctttgcaacttgtgtaacattttctgttttttcaggttttactgatgaggcttgtgaggccaatcaaaataatgtttgtgatctctactactgttgattttgccctcggagcaaactgaataaagcaacaagatgaaaactga

SEQ ID NO: 40404 - DNA, 2608 bp, Artificial Sequence
  derived and/or modified sequence
ctcgagtccaccagcagcgccgtccgcttgaccgagatgctgcgggcctgtcagttatcgggtgtgaccgccgccgcccagagttgtctctgtgggaagtttgtcctccgtccattgcgaccatgccgcagatactctacttcaggcagctctgggttgactactggcaaaattgctggagctggccttttgtttgttggtggaggtattggtggcactatcctatatgccaaatgggattcccatttccgggaaagtgtagagaaaaccataccttactcagacaaactcttcgagatggttcttggtcctgcagcttataatgttccattgccaaagaaatcgattcagtcgggtccactaaaaatctctagtgtatcagaagtaatgaaagaatctaaacagcctgcctcacaactccaaaaacaaaagggagatactccagcttcagcaacagcaggtgataccctgtcggtcccagcccctgcagttcagcctgaggaatctttaaaaactgatcaccctgaaattggtgaaggaaaacccacacctgcactttcagaagaagcatcctcatcttctataagggagcgaccacctgaagaagttgcagctcgccttgcacaacaggaaaaacaagaacaagttaaaattgagtctctagccaagagcttagaagatgctctgaggcaaactgcaagtgtcactctgcaggctattgcagctcagaatgctgcggtccaggctgtcaatgcacactccaacatattgaaagccgccatggacaattctgagattgcaggcgagaagaaatctgctcagtggcgcacagtggagggtgcattgaaggaacgcagaaaggcagtagatgaagctgccgatgcccttctcaaagccaaagaagagttagagaagatgaaaagtgtgattgaaaatgcaaagaaaaaagaggttgctggggccaagcctcatataactgctgcagagggtaaacttcacaacatgatagttgatctggataatgtggtcaaaaaggtccaagcagctcagtctgaggctaaggttgtatctcagtatcatgagctggtggtccaagctcgggatgactttaaacgagagctggacagtattactccagaagtccttcctgggtggaaaggaatgagtgagtacaacttagctgacaagctctctactgatgatctgaactccctcattgctcatgcacatcgtcgtattgatcagctgaacagagagctggcagaacagaaggccaccgaaaagcagcacatcacgttagccttggagaaacaaaagctggaagaaaagcgggcatttgactctgcagtagcaaaagcattagaacatcacagaagtgaaatacaggctgaacaggacagaaagatagaagaagtcagagatgccatggaaaatgaaatgagaacccagcttcgccgacaggcagctgcccacactgatcacttgcgagatgtccttagggtacaagaacaggaattgaagtctgaatttgagcagaacctgtctgagaaactctctgaacaagaattacaatttcgtcgtctcagtcaagagcaagttgacaactttactctggatataaatactgcctatgccagactcagaggaatcgaacaggctgttcagagccatgcagttgctgaagaggaagccagaaaagcccaccaactctggctttcagtggaggcattaaagtacagcatgaagacctcatctgcagaaacacctactatcccgctgggtagtgcagttgaggccatcaaagccaactgttctgataatgaattcacccaagctttaaccgcagctatccctccagagtccctgacccgtggggtgtacagtgaagagacccttagagcccgtttctatgctgttcaaaaactggcccgaagggtagcaatgattgatgaaaccagaaatagcttgtaccagtacttcctctcctacctacagtccctgctcctattcccacctcagcaactgaagccgcccccagagctctgccctgaggatataaacacatttaaattactgtcatatgcttcctattgcattgagcatggtgatctggagctagcagcaaagtttgtcaatcagctgaagggggaatccagacgagtggcacaggactggctgaaggaagcccgaatgaccctagaaacgaaacagatagtggaaatcctgacagcatatgccagcgccgtaggaataggaaccactcaggtgcagccagagtgaggtttaggaagattttcataaagtcatatttcatgtcaaaggaaatcagcagtgatagatgaagggttcgcagcgagagtcccggacttgtctagaaatgagcaggtttacaagtactgttctaaatgttaacacctgttgcatttatattctttccatttgctatcatgtcagtgaacgccaggagtgctttctttgcaacttgtgtaacattttctgttttttcaggttttactgatgaggcttgtgaggccaatcaaaataatgtttgtgatctctactactgttgattttgccctcggagcaaactgaataaagcaacaagatg

SEQ ID NO: 40405 - DNA, 2244 bp, Artificial Sequence
  derived and/or modified sequence
atgctgcgggcctgccagctgagcggcgtgacagctgctgcccagagctgcctgtgtgggaagtttgtgctgcggcccctgcggccctgccgccgctacagcaccagcggcagcagcggcctgaccaccgggaagattgctggagctggcctgctgtttgtgggcggcggcatcggcggcaccatcctgtatgccaagtgggacagccacttccgggagagcgtggagaagaccatcccctacagcgacaagctgtttgagatggtgctgggccctgctgcctacaacgtgcccctgcccaagaagagcatccagagcggccccctgaagatcagctctgtgtctgaggtgatgaaggagagcaagcagcctgccagccagctgcagaagcagaagggggacaccccagccagcgccacagctggggacaccctgtctgtgcctgccccagctgtgcagcctgaggagagcctgaagacagaccaccctgagattggagagggcaagcccaccccagccctgtctgaggaggccagcagcagcagcatccgggagaggcctcctgaggaggtggccgcccggctggcccagcaggagaagcaggagcaggtgaagattgagagcctggccaagagcctggaggatgccctgcggcagacagcctctgtgaccctgcaggccatcgccgcccagaatgctgctgtgcaggccgtgaatgcccacagcaacatcctgaaggccgccatggacaacagcgagattgctggggagaagaagagcgcccagtggaggacagtggagggcgccctgaaggagaggaggaaggctgtggatgaggccgcagatgccctgctgaaggccaaggaggagctggagaagatgaagtctgtgattgaaaatgccaagaagaaggaggtggccggggccaagccccacatcacagctgctgagggcaagctgcacaacatgattgtggacctggacaacgtggtgaagaaggtgcaggccgcccagagcgaggccaaggtggtgtcccagtaccacgagctggtggtgcaggccagagatgacttcaagcgggagctggacagcatcaccccagaggtgctgcccggctggaagggcatgtctgtgtctgacctggccgacaagctgagcacagatgacctgaacagcctcatcgcccacgcccacagaagaattgaccagctgaaccgggagctggccgagcagaaggccacagagaagcagcacatcaccctggccctggagaagcagaagctggaggagaagagggcctttgacagcgctgtggccaaggccctggagcaccacaggtctgagatccaggccgagcaggacaggaagattgaggaggtgagagatgccatggagaatgagatgaggacccagctgcggcggcaggccgccgcccacacagaccacctgagagatgtgctgcgggtgcaggagcaggagctgaagtcagaatttgagcagaacctgtctgagaagctgtctgagcaggagctgcagttccggcggctgagccaggagcaggtggacaacttcaccctggacatcaacacagcctatgcccggctgcggggcatcgagcaggccgtgcagagccatgctgtggccgaggaggaggccaggaaggcccaccagctgtggctgtctgtggaggccctgaagtacagcatgaagaccagcagcgctgagacccccaccatccccctgggcagcgctgtggaggccatcaaggccaactgcagcgacaatgagttcacccaggccctgacagctgccatccccccagagagcctgacccggggcgtgtacagcgaggagaccctgcgggcccgcttctatgctgtgcagaagctggcccggcgggtggccatgattgatgagaccaggaacagcctgtaccagtacttcctgagctacctgcagagcctgctgctcttccccccccagcagctgaagcccccacctgagctgtgcccagaggacatcaacaccttcaagctgctgtcctatgccagctactgcattgaacatggagacctggagctggccgccaagtttgtgaaccagctgaagggggagagcagaagagtggcccaggactggctgaaggaggccaggatgaccctggagaccaagcagatcgtggagatcctgacagcctatgccagcgctgtgggcatcggcaccacccaggtgcagcctgagtag

SEQ ID NO: 40406 - DNA, 2244 bp, Artificial Sequence
  derived and/or modified sequence
atgctgcgggcctgccagctgagcggcgtgacagctgctgcccagagctgcctgtgtgggaagtttgtgctgcggcccctgcggccctgccgccgctacagcaccagcggcagcagcggcctgaccaccgggaagattgctggagctggcctgctgtttgtgggcggcggcatcggcggcaccatcctgtatgccaagtgggacagccacttccgggagagcgtggagaagaccatcccctacagcgacaagctgtttgagatggtgctgggccctgctgcctacaacgtgcccctgcccaagaagagcatccagagcggccccctgaagatcagctctgtgtctgaggtgatgaaggagagcaagcagcctgccagccagctgcagaagcagaagggggacaccccagccagcgccacagctggggacaccctgtctgtgcctgccccagctgtgcagcctgaggagagcctgaagacagaccaccctgagattggagagggcaagcccaccccagccctgtctgaggaggccagcagcagcagcatccgggagaggcctcctgaggaggtggccgcccggctggcccagcaggagaagcaggagcaggtgaagattgagagcctggccaagagcctggaggatgccctgcggcagacagcctctgtgaccctgcaggccatcgccgcccagaatgctgctgtgcaggccgtgaatgcccacagcaacatcctgaaggccgccatggacaacagcgagattgctggggagaagaagagcgcccagtggaggacagtggagggcgccctgaaggagaggaggaaggctgtggatgaggccgcagatgccctgctgaaggccaaggaggagctggagaagatgaagtctgtgattgaaaatgccaagaagaaggaggtggccggggccaagccccacatcacagctgctgagggcaagctgcacaacatgattgtggacctggacaacgtggtgaagaaggtgcaggccgcccagagcgaggccaaggtggtgtcccagtaccacgagctggtggtgcaggccagagatgacttcaagcgggagctggacagcatcaccccagaggtgctgcccggctggaagggcatgtctgagtacaacctggccgacaagctgagcacagatgacctgaacagcctcatcgcccacgcccacagaagaattgaccagctgaaccgggagctggccgagcagaaggccacagagaagcagcacatcaccctggccctggagaagcagaagctggaggagaagagggcctttgacagcgctgtggccaaggccctggagcaccacaggtctgagatccaggccgagcaggacaggaagattgaggaggtgagagatgccatggagaatgagatgaggacccagctgcggcggcaggccgccgcccacacagaccacctgagagatgtgctgcgggtgcaggagcaggagctgaagtcagaatttgagcagaacctgtctgagaagctgtctgagcaggagctgcagttccggcggctgagccaggagcaggtggacaacttcaccctggacatcaacacagcctatgcccggctgcggggcatcgagcaggccgtgcagagccatgctgtggccgaggaggaggccaggaaggcccaccagctgtggctgtctgtggaggccctgaagtacagcatgaagaccagcagcgctgagacccccaccatccccctgggcagcgctgtggaggccatcaaggccaactgcagcgacaatgagttcacccaggccctgacagctgccatccccccagagagcctgacccggggcgtgtacagcgaggagaccctgcgggcccgcttctatgctgtgcagaagctggcccggcgggtggccatgattgatgagaccaggaacagcctgtaccagtacttcctgagctacctgcagagcctgctgctcttccccccccagcagctgaagcccccacctgagctgtgcccagaggacatcaacaccttcaagctgctgtcctatgccagctactgcattgaacatggagacctggagctggccgccaagtttgtgaaccagctgaagggggagagcagaagagtggcccaggactggctgaaggaggccaggatgaccctggagaccaagcagatcgtggagatcctgacagcctatgccagcgctgtgggcatcggcaccacccaggtgcagcctgagtag

SEQ ID NO: 40407 - DNA, 2244 bp, Artificial Sequence
  derived and/or modified sequence
atgctgcgggcctgccagctgagcggcgtgaccgccgccgcccagagctgcttatgcggaaaattcgtgctacggccactgcgcccctgcagacgatacagcactagcggttcatctggcctcacaaccggcaagatcgctggcgccggactgcttttcgtggggggcggaatcggaggtaccattttatacgcaaaatgggatagtcatttcagagaaagcgtggaaaagaccatcccctacagcgataaactgttcgaaatggttctgggacctgctgcttacaacgttcccctgccaaaaaaatccatccagagcggacctctgaaaatctcatcagtgtcagaagtgatgaaggaatccaaacagcccgcctcccagctacaaaagcagaagggggatacacctgctagcgccactgcgggcgacaccttaagcgtgccggctccggctgttcaaccagaggagtcacttaaaacagaccaccctgaaatcggggagggcaaacctacgcccgctctttcggaggaagctagttcatcttccattagagagcgaccccctgaagaggtggcggcgcgattggctcaacaggagaagcaggagcaagtgaagattgagtccctggccaagagtctcgaagacgctttgcggcagactgcctccgtgacgcttcaagccatcgctgcacagaacgctgcggtgcaggcggtgaacgcacatagcaatattctgaaggccgctatggataactccgagatcgccggcgaaaagaagagcgcccagtggagaaccgtggaaggcgctctaaaagaaaggcgcaaggccgttgatgaggcggctgacgccctccttaaagccaaggaagagctagaaaagatgaagtctgtaatagaaaatgcaaagaagaaagaggttgctggggctaagccacacattacagctgctgagggtaaattgcacaacatgatcgtggacttggataatgtggtcaagaaggttcaggccgcacagtcggaggccaaggtcgtttcccaataccacgagctggtcgtccaggccagagatgactttaaacgagagctggactctattaccccggaggtgctgccagggtggaaaggaatgtctgtatccgacctcgccgataagctgtctaccgacgatttgaatagcttgattgcacacgcccacagaaggattgatcaacttaacagggaactagcggagcagaaggcaacagagaagcagcacattactctggcactggagaagcagaaactcgaagagaagcgggcgtttgattcagctgttgccaaagctctggagcaccaccgcagtgagatccaggctgagcaggataggaagatcgaggaggtcagggatgcaatggagaacgagatgaggacccaactgcgccgccaggcagctgctcatacagaccacctgcgggacgtcctgcgggtacaagaacaggagctgaagagcgagtttgaacaaaacttgagtgagaagctgagtgagcaggagttacaattccgacgcctgagtcaagagcaggtggataacttcactctggatatcaatacagcctacgccaggctccggggtatcgagcaggcggtacaaagccacgccgttgctgaggaagaagcccgcaaggcacatcagctatggctaagcgtggaagcacttaagtacagcatgaagacatcttctgccgagacacctaccatcccattaggttcggctgttgaagctatcaaagccaactgcagcgataacgaattcacccaggctctgacagcagccatccctcccgagtccctcacaagaggagtgtatagcgaggaaaccctgcgcgcacgcttctacgccgtacaaaagttagctagaagggtagcaatgattgatgagaccagaaattctctgtaccagtactttctcagttacctccagagtttactgctgttcccccctcagcagctgaaaccgccccccgagctgtgtcctgaggacataaataccttcaagctgctgagctacgccagctattgtatcgagcacggggatctggagctggctgccaagtttgtgaaccaactgaagggagagtcaagacgtgttgctcaggattggttgaaagaggcaagaatgacactggaaaccaaacagatcgtggagatactgaccgcctacgcctcagctgtcggtatcggaactacgcaggtgcagccagagtag

SEQ ID NO: 40408 - DNA, 2244 bp, Artificial Sequence
  derived and/or modified sequence
atgctgcgggcctgccagctgagcggcgtgaccgccgccgcccagagctgcttatgtggcaagttcgttcttcgtcccctccgcccctgtagacgatattccactagcggctcctccggcttgacaaccggcaagattgccggtgctgggttgttgttcgtggggggcggcattggtgggacgattctctatgctaagtgggactcacacttcagggaatcggtagaaaagactattccgtatagtgataaactgtttgagatggttctggggcctgctgcgtacaatgtgccactgcccaaaaagtccattcagtccgggcccctcaagataagctccgtatccgaggtgatgaaagagtctaagcaaccggcctctcagttacaaaagcagaaaggtgacacaccagccagcgcgacggcaggggatacactgtccgttcccgcaccagcagttcagcctgaggagagtctgaagactgatcatccagagataggggaaggcaagcccacccctgccctgtccgaagaagcaagtagctcgagcatccgcgagcggccccctgaggaagttgcagccagactggcccagcaagaaaaacaggaacaggtcaagatagagagtcttgccaaatctctagaggatgccttacgacagactgcaagcgtgaccctgcaggctattgcagctcagaacgccgccgtccaagcggttaatgcacactctaacattctcaaagccgccatggacaacagcgagatagctggggaaaagaaatccgcacagtggcggactgtggagggggccctcaaagaacgccgtaaggctgtcgacgaagctgctgacgcgctccttaaagctaaggaggagcttgagaaaatgaaaagcgtgattgaaaacgcgaaaaagaaagaggtggctggcgccaaaccgcatataaccgcggccgaaggaaaactccacaacatgatcgtggatctggataacgtggtgaaaaaggttcaggctgcccagagcgaagcgaaagtagtgtcacagtatcatgagcttgtagtccaggctcgtgacgacttcaagagagaactggacagcatcacacccgaggtcttacctgggtggaagggaatgagcgagtataatttagcagataaactctccaccgatgacttgaattccttgatagcccatgcccaccgccggatcgaccagctgaatagagaactcgcagagcaaaaagcgaccgagaaacagcacattaccctagccctcgagaagcagaagctcgaagaaaaaagagcttttgactctgccgtcgccaaggcattggagcaccaccgcagcgagatacaggccgagcaggatcgaaaaattgaggaggtcagggatgccatggaaaacgaaatgcgtactcagctgcggaggcaggctgcggctcatactgatcatctccgtgatgttctgagagtgcaggagcaggagctgaaaagcgagtttgagcagaatctgtcagaaaagttgtctgagcaggaacttcagttcaggagactgtcccaggagcaggtcgacaacttcaccctggatattaatacagcctatgcccggctgaggggcattgagcaggcggttcaaagccatgcagtggcggaggaagaggctcgcaaggcacatcaactctggctctctgtggaggctcttaaatatagcatgaagacatcctcggctgagacgcctacgatcccgctcggctccgctgtggaggctatcaaagctaattgtagcgacaatgaatttacccaggcactcacagccgctatccctccggaatcgcttacccgcggtgtatactctgaggagaccctgagggccaggttctatgcagtgcagaagctggcccggcgtgtcgcaatgatcgatgagactaggaactcgctataccaatactttttgtcgtacctgcagtcactcctgttgttccctccgcagcagctgaagccacctcccgagctgtgcccagaggatatcaatacattcaagctcctgagttacgcgagttactgtatagagcatggtgatctggagctggcggcgaaatttgtcaatcagctgaagggcgagagcaggcgggtcgcccaggactggcttaaggaagctcgaatgaccctggagactaaacagattgtggagattctgacggcctacgcttcggcggtcggaataggaaccacacaggtacaaccagaatag

SEQ ID NO: 40409 - DNA, 2244 bp, Artificial Sequence
  derived and/or modified sequence
atgcttagggcatgtcagctgtctggagtcaccgcagcggctcagtcttgcttgtgtggaaaatttgtgctgaggcccctacgaccttgtagacgatactccacatccggtagttccgggttgacaaccggcaagatcgctggcgcaggcttgctgttcgtggggggtggaattggaggtaccatactgtacgctaaatgggactcacattttagggaaagtgtcgagaagactatcccctacagcgacaagttgttcgaaatggtgttggggccagcagcgtataatgtgccattgccaaaaaagtctattcagtccggtccgcttaagatctcctcagtctcagaagtgatgaaggaaagcaagcaacccgctagtcagcttcaaaagcagaagggggatacccccgctagtgcaaccgctggagacacgctctccgttccggcaccggcagtgcagcccgaggagtcattaaagacagatcacccagaaataggagaggggaaaccaacgccggctctgagtgaagaagcctcttcttctagcatacgagagcgccctccagaagaggtggcagcaaggctcgctcagcaggagaaacaggagcaggtcaagattgaatctctcgcaaaatcactggaggatgccctacgtcaaacggccagcgtaactctccaggccatcgccgctcagaatgcagccgttcaggccgtaaacgctcacagcaacattttaaaagccgcaatggataacagcgagatcgccggtgagaagaagagtgctcaatggcgtaccgtagaaggcgctctgaaggaacggcgtaaggccgttgatgaagccgctgacgccctactgaaagccaaggaggagctggaaaagatgaagtcagtgattgaaaacgccaaaaagaaagaagtggctggcgcaaaacctcatattaccgccgcagaaggaaagctgcacaatatgatcgttgacctggataacgtggtgaagaaagtgcaggccgctcaaagcgaggcaaaggtcgtcagtcagtaccacgaactcgtcgtgcaggcccgagacgatttcaagcgggagctggattcgatcactcccgaagtgctgccagggtggaagggcatgtccgtctctgacctggctgacaaactgagcacagatgacctgaattctctcattgcgcacgcccacagacgcatcgatcagttgaatagagaactggctgaacaaaaagccactgagaagcagcacatcaccctcgcactcgagaagcagaagctcgaggagaaacgcgcattcgacagcgcagttgccaaagctttggagcaccatcgttcagaaatacaggccgagcaggacaggaagatcgaagaggtacgagatgctatggagaatgagatgcgtacccagctgaggagacaagcggcagcacacacggatcacctgcgggatgtcctaagggtgcaggaacaggagctgaaatcagaatttgagcaaaacctttcagaaaagctgtctgaacaagagctgcagtttaggagattatcccaggagcaggtcgataactttactttagatatcaacacagcatacgccagactcagaggcatcgagcaggcggtgcagagccacgcggtggctgaggaggaggccaggaaggcccatcaattatggctgtcagtcgaggctttgaagtactccatgaagacatcctcagcagaaactcctactattcccctggggagcgcggtcgaagctattaaggcaaattgttctgataacgaatttacccaggctctgactgccgcaataccacccgagtctctgactcgaggtgtatattccgaggagacactccgcgctcgtttctacgctgtgcagaaactggcgagacgagtcgccatgatagatgagactcgtaattctctttaccagtacttcctaagctatttgcagtcactgttgctgtttcctcctcagcaattaaagcctccgcctgagctctgtcccgaggacatcaacacatttaagctactgagttacgcgagctattgtatcgagcacggggatttggagctcgctgcgaaattcgttaaccagctcaagggggagagccgcagagtggcccaggattggctaaaggaagctcgaatgactttagagactaagcagatcgtcgaaattctcacagcatacgcctctgccgtggggattggaacaacccaggtgcaacccgagtag

SEQ ID NO: 40410 - DNA, 2244 bp, Artificial Sequence
  derived and/or modified sequence
atgctgcgagcctgtcagctctctggcgttaccgccgctgcacaaagctgtctgtgtggtaagttcgttctgaggccactgcggccatgtagacgatacagtacctccggcagctccgggttgacaaccggcaagattgccggtgcgggtctgctttttgtgggcggaggtattggtggcacaatcctctacgctaagtgggacagccattttcgcgagtctgttgaaaaaacaataccttactcggacaagctcttcgaaatggtacttgggccagccgcttacaatgtacccttgcccaagaagagtatacagagcggacccctcaagatatcctcggtctcagaggtaatgaaagagagcaaacaacctgcgtctcaattgcaaaaacaaaagggcgataccccggctagtgctactgccggagatactctttccgtacccgctcctgcagtccagccagaagagagtctgaaaactgatcatcctgagattggcgaagggaagcctacaccagccctttctgaggaggcgagttcttccagcattagggagcgccctcccgaggaggtcgccgctagacttgcccagcaggagaaacaggagcaggtgaaaatagaatcgctcgccaagtcccttgaggatgcactgcggcaaaccgcctcggtgactctgcaggcaatcgctgcccaaaacgccgcagtccaggctgttaatgcccactctaacattctgaaagccgctatggataacagtgagatagcaggagaaaaaaagtccgcccagtggcggaccgtagagggcgctcttaaggagcgcaggaaagcagtcgacgaggccgcagatgcccttcttaaagcaaaggaggaactggaaaagatgaagagtgtcatagagaacgccaagaagaaggaagttgctggcgcaaagccccatatcacggccgctgaagggaagctgcataacatgattgtggatctagataacgttgtcaaaaaggtccaagccgcacagagtgaggccaaagtggtctctcaataccacgaacttgtggtacaagcccgagatgactttaaacgggaactggattctattaccccagaggtgttaccgggttggaagggcatgtctgaatataacctcgctgacaagttatctactgatgacttgaacagcctcattgctcatgcacaccgtcgcatcgaccagctcaaccgagagctcgccgagcagaaggccacagaaaagcagcacatcacactcgctctggagaagcagaaactggaggagaagcgagcatttgactccgccgtggctaaggcactcgaacaccacaggtcagaaattcaggcagagcaagaccgaaagatagaagaggttcgtgatgctatggagaacgagatgaggacccagctccgaaggcaagctgcagctcatacagatcacctgagggatgtcctgagagtccaagaacaagagctgaaatcagaatttgaacagaatctgagcgagaaactctccgagcaagaattgcagtttcgtaggttatctcaggaacaggtggacaattttacactggatattaacactgcatatgcgagactaagaggtatcgagcaggcggttcagagccatgccgtcgcagaagaggaggctaggaaggcccaccagctgtggctgtccgtggaagccctgaagtacagcatgaagacctcttccgccgaaacaccgacaatcccgctggggtctgccgttgaggccataaaggccaattgcagcgacaatgaatttactcaggcgcttaccgcagccattccacctgagagcctcaccaggggtgtgtacagcgaagagactttacgggcacgtttctacgcagttcaaaagctcgccagaagggtggcgatgattgatgaaacacgaaattctctgtaccagtatttccttagctaccttcagtccctgctgctgttcccacctcagcagctaaagcccccacctgagttgtgcccagaagacattaataccttcaaattactcagctacgcctcttactgcatcgagcacggcgacttggagctggctgctaaatttgttaaccagctcaaaggagagtcgaggagggtcgcccaagattggctgaaagaggcccgtatgaccctggaaaccaagcagatagtcgagatactcacagcttatgctagcgcggttgggatcggcactactcaagtgcagccggagtag

SEQ ID NO: 40411 - DNA, 2244 bp, Artificial Sequence
  derived and/or modified sequence
atgctgagagcctgccagctgagcggcgtgaccgccgccgcccagagctgcctgtgcggcaagttcgtgctgagacccctgagaccctgcagaagatacagcaccagcggcagcagcggcctgaccaccggcaagatcgccggcgccggcctgctgttcgtgggcggcggcatcggcggcaccatcctgtacgccaagtgggacagccacttcagagagagcgtggagaagaccatcccctacagcgacaagctgttcgagatggtgctgggccccgccgcctacaacgtgcccctgcccaagaagagcatccagagcggccccctgaagatcagcagcgtgagcgaggtgatgaaggagagcaagcagcccgccagccagctgcagaagcagaagggcgacacccccgccagcgccaccgccggcgacaccctgagcgtgcccgcccccgccgtgcagcccgaggagagcctgaagaccgaccaccccgagatcggcgagggcaagcccacccccgccctgagcgaggaggccagcagcagcagcatcagagagagaccccccgaggaggtggccgccagactggcccagcaggagaagcaggagcaggtgaagatcgagagcctggccaagagcctggaggacgccctgagacagaccgccagcgtgaccctgcaggccatcgccgcccagaacgccgccgtgcaggccgtgaacgcccacagcaacatcctgaaggccgccatggacaacagcgagatcgccggcgagaagaagagcgcccagtggagaaccgtggagggcgccctgaaggagagaagaaaggccgtggacgaggccgccgacgccctgctgaaggccaaggaggagctggagaagatgaagagcgtgatcgagaacgccaagaagaaggaggtggccggcgccaagccccacatcaccgccgccgagggcaagctgcacaacatgatcgtggacctggacaacgtggtgaagaaggtgcaggccgcccagagcgaggccaaggtggtgagccagtaccacgagctggtggtgcaggccagagacgacttcaagagagagctggacagcatcacccccgaggtgctgcccggctggaagggcatgagcgtgagcgacctggccgacaagctgagcaccgacgacctgaacagcctgatcgcccacgcccacagaagaatcgaccagctgaacagagagctggccgagcagaaggccaccgagaagcagcacatcaccctggccctggagaagcagaagctggaggagaagagagccttcgacagcgccgtggccaaggccctggagcaccacagaagcgagatccaggccgagcaggacagaaagatcgaggaggtgagagacgccatggagaacgagatgagaacccagctgagaagacaggccgccgcccacaccgaccacctgagagacgtgctgagagtgcaggagcaggagctgaagagcgagttcgagcagaacctgagcgagaagctgagcgagcaggagctgcagttcagaagactgagccaggagcaggtggacaacttcaccctggacatcaacaccgcctacgccagactgagaggcatcgagcaggccgtgcagagccacgccgtggccgaggaggaggccagaaaggcccaccagctgtggctgagcgtggaggccctgaagtacagcatgaagaccagcagcgccgagacccccaccatccccctgggcagcgccgtggaggccatcaaggccaactgcagcgacaacgagttcacccaggccctgaccgccgccatcccccccgagagcctgaccagaggcgtgtacagcgaggagaccctgagagccagattctacgccgtgcagaagctggccagaagagtggccatgatcgacgagaccagaaacagcctgtaccagtacttcctgagctacctgcagagcctgctgctgttccccccccagcagctgaagcccccccccgagctgtgccccgaggacatcaacaccttcaagctgctgagctacgccagctactgcatcgagcacggcgacctggagctggccgccaagttcgtgaaccagctgaagggcgagagcagaagagtggcccaggactggctgaaggaggccagaatgaccctggagaccaagcagatcgtggagatcctgaccgcctacgccagcgccgtgggcatcggcaccacccaggtgcagcccgagtag

SEQ ID NO: 40412 - DNA, 2244 bp, Artificial Sequence
  derived and/or modified sequence
atgctgagagcctgccagctgagcggcgtgaccgccgccgcccagagctgcctgtgcggcaagttcgtgctgagacccctgagaccctgcagaagatacagcaccagcggcagcagcggcctgaccaccggcaagatcgccggcgccggcctgctgttcgtgggcggcggcatcggcggcaccatcctgtacgccaagtgggacagccacttcagagagagcgtggagaagaccatcccctacagcgacaagctgttcgagatggtgctgggccccgccgcctacaacgtgcccctgcccaagaagagcatccagagcggccccctgaagatcagcagcgtgagcgaggtgatgaaggagagcaagcagcccgccagccagctgcagaagcagaagggcgacacccccgccagcgccaccgccggcgacaccctgagcgtgcccgcccccgccgtgcagcccgaggagagcctgaagaccgaccaccccgagatcggcgagggcaagcccacccccgccctgagcgaggaggccagcagcagcagcatcagagagagaccccccgaggaggtggccgccagactggcccagcaggagaagcaggagcaggtgaagatcgagagcctggccaagagcctggaggacgccctgagacagaccgccagcgtgaccctgcaggccatcgccgcccagaacgccgccgtgcaggccgtgaacgcccacagcaacatcctgaaggccgccatggacaacagcgagatcgccggcgagaagaagagcgcccagtggagaaccgtggagggcgccctgaaggagagaagaaaggccgtggacgaggccgccgacgccctgctgaaggccaaggaggagctggagaagatgaagagcgtgatcgagaacgccaagaagaaggaggtggccggcgccaagccccacatcaccgccgccgagggcaagctgcacaacatgatcgtggacctggacaacgtggtgaagaaggtgcaggccgcccagagcgaggccaaggtggtgagccagtaccacgagctggtggtgcaggccagagacgacttcaagagagagctggacagcatcacccccgaggtgctgcccggctggaagggcatgagcgagtacaacctggccgacaagctgagcaccgacgacctgaacagcctgatcgcccacgcccacagaagaatcgaccagctgaacagagagctggccgagcagaaggccaccgagaagcagcacatcaccctggccctggagaagcagaagctggaggagaagagagccttcgacagcgccgtggccaaggccctggagcaccacagaagcgagatccaggccgagcaggacagaaagatcgaggaggtgagagacgccatggagaacgagatgagaacccagctgagaagacaggccgccgcccacaccgaccacctgagagacgtgctgagagtgcaggagcaggagctgaagagcgagttcgagcagaacctgagcgagaagctgagcgagcaggagctgcagttcagaagactgagccaggagcaggtggacaacttcaccctggacatcaacaccgcctacgccagactgagaggcatcgagcaggccgtgcagagccacgccgtggccgaggaggaggccagaaaggcccaccagctgtggctgagcgtggaggccctgaagtacagcatgaagaccagcagcgccgagacccccaccatccccctgggcagcgccgtggaggccatcaaggccaactgcagcgacaacgagttcacccaggccctgaccgccgccatcccccccgagagcctgaccagaggcgtgtacagcgaggagaccctgagagccagattctacgccgtgcagaagctggccagaagagtggccatgatcgacgagaccagaaacagcctgtaccagtacttcctgagctacctgcagagcctgctgctgttccccccccagcagctgaagcccccccccgagctgtgccccgaggacatcaacaccttcaagctgctgagctacgccagctactgcatcgagcacggcgacctggagctggccgccaagttcgtgaaccagctgaagggcgagagcagaagagtggcccaggactggctgaaggaggccagaatgaccctggagaccaagcagatcgtggagatcctgaccgcctacgccagcgccgtgggcatcggcaccacccaggtgcagcccgagtag

SEQ ID NO: 40413 - protein, 717 aa, Artificial Sequence
  derived and/or modified sequence
MSVDKAELCGSLLTWLQTFHVPSPCASPQDLSSGLAVAYVLNQIDPSWFNEAWLQGISEDPGPNWKLKVSNLKMVLRSLVEYSQDVLAHPVSEEHLPDVSLIGEFSDPAELGKLLQLVLGCAISCEKKQDHIQRIMTLEESVQHVVMEAIQELMTKDTPDSLSPETYGNFDSQSRRYYFLSEEAEEGDELQQRCLDLERQLMLLSEEKQSLAQENAGLRERMGRPEGEGTPGLTAKKLLLLQSQLEQLQEENFRLESGREDERLRCAELEREVAELQHRNQALTSLAQEAQALKDEMDELRQSSERAGQLEATLTSCRRRLGELRELRRQVRQLEERNAGHAERTRQLEDELRRAGSLRAQLEAQRRQVQELQGQRQEEAMKAEKWLFECRNLEEKYESVTKEKERLLAERDSLREANEELRCAQLQPRGLTQADPSLDPTSTPVDNLAAEILPAELRETLLRLQLENKRLCRQEAADRERQEELQRHLEDANRARHGLETQHRLNQQQLSELRAQVEDLQKALQEQGGKTEDSILLKRKLEEHLQKLHEADLELQRKREYIEELEPPTDSSTARRIEELQHNLQKKDADLRAMEERYRRYVDKARMVMQTMEPKQRPAAGAPPELHSLRTQLRERDVRIRHLEMDFEKSRSQREQEEKLLISAWYNMGMALQQRAGEERAPAHAQSFLAQQRLATNSRRGPLGRLASLNLRPTDKH

SEQ ID NO: 40414 - DNA, 2154 bp, Artificial Sequence
  derived and/or modified sequence
atgtccgttgataaggccgaactctgcgggagcctcctcacttggctgcagacgtttcatgtcccctcaccgtgcgcaagcccacaggatctaagcagcggtctagcagtggcgtatgtgctgaatcagattgatccaagttggtttaacgaggcttggcttcagggaatttccgaggatcctggccccaactggaagttgaaagttagcaacttaaaaatggtgctccggtccctcgttgagtactcacaggacgttttagcccacccagtgagcgaggagcatttgcccgatgtcagcttgatcggggaatttagcgaccccgctgaactaggtaaattgcttcagttggtcttgggctgtgcaatatcttgtgaaaagaagcaggaccacatccagagaataatgactctcgaggaatccgttcagcacgtggtgatggaggcaatccaggagctaatgacaaaagatacacccgactccctgtcccctgagacctatggcaacttcgactcccagagccgcaggtactacttcctgtccgaggaggccgaggaaggcgacgagctccagcagaggtgcctagaccttgagagacaactcatgttgctgtctgaggaaaaacagtccctagcacaagaaaatgccggattacgtgaacggatggggcggcctgaaggtgagggaacccccgggttaactgccaagaagctgttgcttctccagtcccagctcgagcagttgcaggaggagaattttcggttagagagcggcagagaggatgagaggctgaggtgcgccgagttggaaagagaagtagctgaactccaacaccgtaaccaggctctcaccagcttagctcaagaggcccaggccctcaaggacgagatggacgagctccgccagagtagcgagcgcgcggggcagctggaggccacactaaccagctgccgcagacggcttggcgagctccgcgagctgagaaggcaggtgcgccagctagaggaacgaaatgctggacacgctgaaagaaccaggcaattggaggacgagcttagaagggccggtagtctgcgggctcaactagaagctcaaaggcgccaggtacaggaactgcaaggccagcggcaggaggaagcaatgaaggcggagaagtggctctttgagtgccgcaacctcgaagagaagtatgagagcgttaccaaggagaaggaaagacttcttgctgaaagagactcgctgagagaagctaacgaagagctgaggtgtgcccagctgcagcctcgtggcctgacccaggccgatcctagcctggacccgacctccactcctgtcgataacctggccgccgagatcctaccagcagaattgcgggaaaccctcctacggctccagctggaaaataagcgattgtgtagacaagaagcagccgaccgcgagcgtcaggaggaactgcaaaggcacctggaggatgcaaacagagcaagacacggactcgagacccagcaccgcctgaaccagcagcagctcagtgaactgcgcgcgcaggtcgaggatctccagaaggccctgcaggagcaagggggaaaaaccgaagatagtatactgctgaaacggaaactcgaggagcacctgcagaaactccacgaggccgacctggaattgcagagaaagcgcgaatacatcgaggaattagaacccccaacggattcctctaccgcccggcggattgaggagctccagcataacctgcaaaaaaaagatgccgatcttagagcaatggaggaacgctaccgtagatacgttgacaaagcacgcatggttatgcaaactatggaacctaagcagaggcctgccgccggtgctcctccggaactgcattcactccgcacacaactgagagagcgtgacgtgcggattcgccacctggaaatggacttcgagaaaagcagatcccaacgggagcaagaagaaaagttactgataagcgcgtggtacaatatgggcatggcattgcagcagcgagcaggcgaagagcgcgccccggctcacgcccaaagtttccttgcccagcaacgcctcgctaccaatagcagaaggggccccctagggagactcgccagcctcaacctccgccccactgataagcactag

SEQ ID NO: 40415 - DNA, 2604 bp, Artificial Sequence
  derived and/or modified sequence
gaggcggagcctgggcttgggggcggggcggggcctgcgcctaggggggcggggcggggcggcgctctaggccgagcgggaggtcggggctgcgggcgctcgctggtggcggacccggaggctgctgcggcgccggggctccgtggcctggattgaatccgatcgggagccatgagcgtggacaaagctgagctatgcgggtctctgctcacctggttacagacgttccacgttccgtctccctgtgccagccctcaggacctgagcagcggccttgccgtagcctatgtgctgaaccagatagacccctcctggttcaacgaggcatggctccagggcatctcggaagatccaggtcccaactggaagctgaaggtcagcaatctgaagatggtcttacggagcctagtagagtactcccaggatgtcctggcgcatcctgtgtcagaagagcatctcccagatgtgagcctcattggagagttctcagacccggcagagctcggcaagctgcttcagctggtgctgggctgtgccatcagttgcgagaaaaagcaggaccacatccagagaatcatgacgctggaagaatcggttcagcatgtggtgatggaagccatccaagagctcatgaccaaagacactcctgactccctgtcaccagagacgtatggcaactttgacagccagtcccgcaggtactatttcctaagtgaggaggctgaggagggggacgaattacagcagcgctgtctggatctggagcggcagctgatgctcctgtcagaggagaagcagagcctggcgcaagagaatgcagggctgcgggagcggatgggccggcctgaaggcgagggtaccccaggtctcactgccaagaagctgctgctgctgcaatcccagctggagcagttgcaggaggagaacttcaggctggagagtggcagggaggatgagcgcctgcgctgtgccgagctggagagggaggttgcggagctgcagcaccggaaccaggcgctgactagcctggcccaggaggcacaggccctgaaggatgagatggatgaactacggcagtcttcggagcgtgctgggcagctggaggccacgctgaccagttgccggcgccgcttgggcgagctgagggagctgcggcggcaggtgcggcagctggaggaacgcaacgccggccacgccgagcgcacgcgacaactggaggatgagctacgccgagcgggctccctgcgcgcccagctggaggcgcagcggcggcaggtgcaggaactgcagggccagcggcaggaggaggccatgaaggccgagaaatggctatttgaatgccgcaacctggaggaaaagtatgagtcggtgacaaaggagaaggagcggctgttggcggagcgggactccttgcgggaggccaatgaggagctgcgctgcgcccagctgcagccgcgggggttgacccaggccgatccctcactggatcccacctccacacccgtggataacttagccgcagagatcctgcctgcggagctcagggagacgctcctgcggcttcagctggagaacaagcggctgtgcaggcaggaggcggccgaccgggagcggcaggaggagctgcagcgccacctggaggatgccaaccgcgcgcgccacgggttggagacgcagcaccggctgaaccagcagcagctatccgagctgcgggcccaggtggaggacctgcagaaagccctgcaggagcaggggggcaagactgaagattccattttgctgaaaaggaagctggaggaacatttgcagaagcttcatgaggcagatctggagttgcagaggaagcgggagtacattgaggagctggagccacccactgacagcagcacagcccggcggatcgaggagctgcagcataacttgcagaagaaggacgcggacttgcgggccatggaggagcgataccgccgctacgtggacaaggcccgcatggtcatgcagaccatggaacccaagcagcggccagctgcgggggcacctccagaactccattccctgaggacacagctccgagaacgggatgtccgcatccgacacctggagatggactttgagaaaagccgaagtcagcgggagcaggaagaaaagctgctcatcagtgcctggtataatatgggcatggccttgcagcagcgagctggggaggagcgggcgcctgcccatgcccagtcattcctggcacagcagcggctggcaaccaattctcgccgtggacccttgggacgcctggcatctctgaaccttcgccccactgacaagcactgacagacctcacaatcaagccagcctgggctccacccaccctggcttcctccagctcacatggcgcccagcactgggcttcagccaggtgctcgagagctttgaggccatgatctctgctcttccctctcccagattggtggggagggagggcgggaggtagatataggcctgttctttttagcaatgtgattcttgttgttgattctctctctggagttcatgtgctgcctcaggagactctgattttatatttgagaaaaataaaggcgttcaatctgc

SEQ ID NO: 40416 - DNA, 2154 bp, Artificial Sequence
  derived and/or modified sequence
atgtctgtggacaaggccgagctgtgtggcagcctgctgacctggctgcagaccttccacgtgcccagcccctgtgccagcccccaggacctgagcagcggcctggccgtggcctacgtgctgaaccagattgaccccagctggttcaatgaggcctggctgcagggcatcagtgaagatcctggccccaactggaagctgaaggtgagcaacctgaagatggtgctgcggagcctggtggagtacagccaggatgtgctggcccaccctgtgtctgaggagcacctgcctgatgtgtccctcatcggggagttcagtgaccctgctgagctgggcaagctgctgcagctggtgctgggctgtgccatcagctgtgagaagaagcaggaccacatccagaggatcatgaccctggaggagagcgtgcagcacgtggtgatggaggccatccaggagctgatgaccaaggacaccccagacagcctgagccctgagacctacggcaactttgacagccagagccgccgctactacttcctgtctgaggaggccgaggagggagatgagctgcagcagcgctgcctggacctggagcggcagctgatgctgctgtctgaggagaagcagagcctggcccaggagaatgccggcctgcgggagaggatgggccggcctgagggggagggcaccccaggcctgacagccaagaagctgctgctgctgcagagccagctggagcagctgcaggaggagaacttccggctggagagcggccgggaggatgagcggctgcgctgtgccgagctggagcgggaggtggccgagctgcagcacaggaaccaggccctgaccagcctggcccaggaggcccaggccctgaaggatgagatggatgagctgcggcagagcagcgagagagctggccagctggaggccaccctgaccagctgcagaagaaggctgggggagctgcgggagctgcggcggcaggtgcggcagctggaggagagaaatgccggccacgccgagaggacccggcagctggaggatgagctgcggcgggccggcagcctgcgggcccagctggaggcccagaggcggcaggtgcaggagctgcagggccagaggcaggaggaggccatgaaggccgagaagtggctgtttgaatgtagaaacctggaggagaagtatgaatctgtgaccaaggagaaggagcggctgctggccgagcgggacagcctgcgggaggccaatgaggagctgcgctgtgcccagctgcagccccggggcctgacccaggccgaccccagcctggaccccaccagcacccctgtggacaacctggccgctgagatcctgcctgctgagctgcgggagaccctgctgcggctgcagctggagaacaagaggctgtgccggcaggaggccgctgaccgggagcggcaggaggagctgcagaggcacctggaggatgccaacagagcccggcacggcctggagacccagcaccggctgaaccagcagcagctgtctgagctgcgggcccaggtggaggacctgcagaaggccctgcaggagcagggcggcaagacagaggacagcatcctgctgaagaggaagctggaggagcacctgcagaagctgcatgaagctgacctggagctgcagaggaagcgggagtacatcgaggagctggagcccccaacagacagcagcacagccaggagaattgaggagctgcagcacaacctgcagaagaaggatgctgacctgcgggccatggaggagcgctacagaagatatgtggacaaggccaggatggtgatgcagaccatggagcccaagcagaggcctgctgctggggcccctcctgagctgcacagcctgcggacccagctgcgggagagagatgtgcgcatccgccacctggagatggactttgagaagagccgcagccagcgggagcaggaggagaagctgctgatcagcgcctggtacaacatgggcatggccctgcagcagagagctggggaggagcgggccccagcccacgcccagagcttcctggcccagcagaggctggccaccaacagcagaagaggccccctgggccgcctggccagcctgaacctgcggcccacagacaagcactag

SEQ ID NO: 40417 - DNA, 2154 bp, Artificial Sequence
  derived and/or modified sequence
atgagcgtggacaaggccgagctgtgcggcagcctgctgacctggctccaaacattccatgtcccatccccctgcgccagcccacaggatctaagcagtggacttgcggtagcctacgtcttaaaccagatcgacccctcttggttcaatgaagcctggttgcagggtatttctgaagatcctggcccgaattggaaactcaaagtgtcaaacttgaagatggtgttgaggagcctggtggaatattcccaggacgtccttgcacaccccgtgagcgaagaacatctgccagatgtgagcctgatcggggaattctcggaccccgcagagctcggaaaattgctacagctcgtattaggctgtgcaatctcctgcgagaagaagcaggaccatatccagcgtataatgacgctggaggaatctgttcagcatgttgtgatggaagccattcaggagctcatgaccaaggatacccctgactccttatcaccggaaacctacggtaacttcgatagtcagagcaggagatactatttcctgtcagaggaagccgaggagggtgacgagctgcagcagaggtgccttgacttggagcgtcagctaatgctgttgagcgaagagaaacagtccctggcgcaagaaaacgccgggctgagggagcggatgggacggcccgaaggggagggtacgcctggcctcacagccaagaaacttctactgctgcaaagtcagctggagcagctccaggaggaaaacttccgtctcgagtccggacgggaagacgaaagactgcgttgtgctgaacttgagcgggaggtagccgaactgcaacatcgcaatcaggcactgaccagcctcgcccaagaggcgcaagccttaaaggatgaaatggatgaacttagacagtccagtgaacgtgctggccaattggaagcgacactcaccagttgcaggaggcgacttggggaacttcgcgagctgcgaagacaagttcggcagcttgaggagagaaatgcggggcacgccgaacgcacaagacagctggaggacgaactgcgccgcgccggcagcctgcgagcacagctcgaggcacagcggaggcaagtacaagagctgcagggacagcgtcaggaagaggccatgaaagcagaaaagtggctttttgagtgccgaaatctggaggaaaaatacgagtctgtaaccaaagagaaggagaggctgctggcagaacgagactcattgcgtgaggctaatgaagaacttcgctgtgcacagctccagccccgcggcttgactcaggccgatccctcgcttgaccctacttcaacccccgtcgacaatctcgcggcagaaatcctaccagcagagctgcgcgagactctgctgaggctgcaactagagaataaaaggctttgtagacaggaggctgccgatcgcgaacgacaggaggaactgcagcggcatctggaagacgcgaatagagccaggcatgggcttgagacacaacaccgcctgaatcaacagcaactgtccgagcttcgcgcgcaggtcgaggacttgcaaaaagcgttgcaagagcagggtggcaaaactgaggattccatcttgctcaagcgcaaactggaagagcacctccagaaacttcacgaggctgatctcgagttgcagcggaagagggagtacattgaggagcttgaaccaccaacggattcttccacagccagaaggattgaagagctccagcataaccttcagaagaaggacgccgatctgcgcgccatggaggaacgttaccggcgctatgtggacaaggctaggatggtaatgcagaccatggaaccgaagcagcgcccggctgctggtgctccgcctgagctgcactcacttagaacacagttgagagagagagatgtcagaatcaggcatttggaaatggattttgaaaaatctcggagccagagggagcaggaggagaagctgctgatctctgcctggtacaacatgggaatggctctgcagcagagggcaggcgaggagagggcgcctgcgcatgctcagtcctttctagctcagcagcggttggccacaaattcacgtagggggccattaggcagattggccagtttgaatctgcgccctacggacaagcattag

SEQ ID NO: 40418 - DNA, 2154 bp, Artificial Sequence
  derived and/or modified sequence
atgagcgtcgataaagccgaactctgcggctccctgctaacctggctgcagaccttccacgtgccatccccctgtgcgagcccacaggaccttagcagcggactggccgtcgcctacgttttgaaccagatcgacccttcatggtttaacgaagcctggctgcaagggatctcagaggaccccggtcccaactggaaattaaaagtgtctaatcttaaaatggttctgaggagtctggttgagtatagccaggacgtcctcgcccatccagtgtccgaggagcacctgcccgacgtttccctaatcggagaatttagcgatccagccgaactaggtaaattactccagttggtcttaggatgtgcgatttcttgtgaaaagaaacaggaccacatccaaaggatcatgacccttgaagaatctgtacagcacgttgtgatggaagctatacaagagctcatgactaaagataccccagattccctcagccccgagacatacggcaattttgacagccaatcccggagatactattttctgtccgaagaggctgaggagggggatgaattgcaacagcgctgtttggacctggaaagacagctcatgttgttgtcagaagaaaaacagtccctcgcccaggaaaatgctggactgagggaacggatgggtcgccctgagggtgaaggaaccccgggtctgactgcaaaaaagcttctgctgttgcagtctcagctcgagcagttacaggaggagaatttccgccttgaatctggacgagaggacgagcgcctgcgttgtgcagagctcgagcgcgaagtggcggagctccagcatcgcaatcaggcactcacaagccttgcccaggaagcccaggctctgaaggacgagatggacgagcttcgacagagcagcgagcgtgccggacagctggaggccactctgaccagttgcaggcgcagactgggggaactgagggaactcagaagacaggtgaggcagttagaggagagaaacgccggtcatgcagaacgcactaggcagttagaagacgagcttaggcgggctggctcactccgggcacagctcgaggctcagaggcggcaggtgcaagagttgcagggacagcgccaagaagaggcgatgaaggcagagaaatggcttttcgagtgtcgcaacctggaggaaaagtacgaatccgttaccaaggagaaggaacgcttacttgctgagcgtgactcccttcgggaggctaacgaggagttgcggtgtgctcagctgcagcctcgcggactcacgcaagcagaccctagtctggaccccacgagtaccccggtggacaatttggccgctgaaatcctcccagctgagctgagggagaccttactgcgcctgcagctggaaaacaaacgattatgtcggcaggaagcagctgacagggaaagacaggaggagcttcagcgtcacctcgaggatgctaaccgagccaggcacggcctggagacccagcaccgactcaaccagcagcagctgtccgaattgcgggcacaagtggaggacctgcagaaggcactccaagagcagggcggtaagaccgaagattcaattcttcttaagaggaaactggaggagcatctgcaaaaactgcacgaggcagatctcgagctacagcgaaaacgggaatacatagaggaactggaaccaccgaccgattcatctaccgcccgacgaatcgaagagctgcagcacaacctacagaagaaggacgcggaccttcgggcaatggaagaacggtaccggcgttatgtggacaaggccagaatggtgatgcagacaatggagcctaagcagcgcccagcagcaggggctccaccggaacttcattctctgcgcacacagctccgggagcgggacgtgaggataaggcatttagagatggacttcgagaaatcgaggagccagcgcgagcaagaagagaaactactgatttccgcgtggtacaacatgggaatggcactacagcagcgtgctggggaggagcgcgctcctgctcatgcacaatcgtttctggcacagcagcgcctcgctactaattcacgtcggggacctttgggtcgactggcctccctgaaccttaggccgacggacaagcactag

SEQ ID NO: 40419 - DNA, 2154 bp, Artificial Sequence
  derived and/or modified sequence
atgagcgtggacaaggccgagctgtgcggcagcctgctgacctggctgcagaccttccacgtgcccagcccctgcgccagcccccaggacctgagcagcggcctggccgtggcctacgtgctgaaccagatcgaccccagctggttcaacgaggcctggctgcagggcatcagcgaggaccccggccccaactggaagctgaaggtgagcaacctgaagatggtgctgagaagcctggtggagtacagccaggacgtgctggcccaccccgtgagcgaggagcacctgcccgacgtgagcctgatcggcgagttcagcgaccccgccgagctgggcaagctgctgcagctggtgctgggctgcgccatcagctgcgagaagaagcaggaccacatccagagaatcatgaccctggaggagagcgtgcagcacgtggtgatggaggccatccaggagctgatgaccaaggacacccccgacagcctgagccccgagacctacggcaacttcgacagccagagcagaagatactacttcctgagcgaggaggccgaggagggcgacgagctgcagcagagatgcctggacctggagagacagctgatgctgctgagcgaggagaagcagagcctggcccaggagaacgccggcctgagagagagaatgggcagacccgagggcgagggcacccccggcctgaccgccaagaagctgctgctgctgcagagccagctggagcagctgcaggaggagaacttcagactggagagcggcagagaggacgagagactgagatgcgccgagctggagagagaggtggccgagctgcagcacagaaaccaggccctgaccagcctggcccaggaggcccaggccctgaaggacgagatggacgagctgagacagagcagcgagagagccggccagctggaggccaccctgaccagctgcagaagaagactgggcgagctgagagagctgagaagacaggtgagacagctggaggagagaaacgccggccacgccgagagaaccagacagctggaggacgagctgagaagagccggcagcctgagagcccagctggaggcccagagaagacaggtgcaggagctgcagggccagagacaggaggaggccatgaaggccgagaagtggctgttcgagtgcagaaacctggaggagaagtacgagagcgtgaccaaggagaaggagagactgctggccgagagagacagcctgagagaggccaacgaggagctgagatgcgcccagctgcagcccagaggcctgacccaggccgaccccagcctggaccccaccagcacccccgtggacaacctggccgccgagatcctgcccgccgagctgagagagaccctgctgagactgcagctggagaacaagagactgtgcagacaggaggccgccgacagagagagacaggaggagctgcagagacacctggaggacgccaacagagccagacacggcctggagacccagcacagactgaaccagcagcagctgagcgagctgagagcccaggtggaggacctgcagaaggccctgcaggagcagggcggcaagaccgaggacagcatcctgctgaagagaaagctggaggagcacctgcagaagctgcacgaggccgacctggagctgcagagaaagagagagtacatcgaggagctggagccccccaccgacagcagcaccgccagaagaatcgaggagctgcagcacaacctgcagaagaaggacgccgacctgagagccatggaggagagatacagaagatacgtggacaaggccagaatggtgatgcagaccatggagcccaagcagagacccgccgccggcgccccccccgagctgcacagcctgagaacccagctgagagagagagacgtgagaatcagacacctggagatggacttcgagaagagcagaagccagagagagcaggaggagaagctgctgatcagcgcctggtacaacatgggcatggccctgcagcagagagccggcgaggagagagcccccgcccacgcccagagcttcctggcccagcagagactggccaccaacagcagaagaggccccctgggcagactggccagcctgaacctgagacccaccgacaagcactag

SEQ ID NO: 40420 - protein, 85 aa, Artificial Sequence
  derived and/or modified sequence
MTGKTQTSNVTNKNDPKSINSRVFIGNLNTAIVKKVDIEAIFSKYGKIVGCSVHKGYAFVQYMSERHARAAVAGENARVIAGQPL

SEQ ID NO: 40421 - protein, 304 aa, Artificial Sequence
  derived and/or modified sequence
MSKRRRLKQGEPIMTGKTQTSNVTNKNDPKSINSRVFIGNLNTAIVKKVDIEAIFSKYGKIVGCSVHKGYAFVQYMSERHARAAVAGENARVIAGQPLDINMAGEPKPYRPKPGNKRPLSALYRLESKEPFLSVGGYVFDYDYYRDDFYNRLFDYHGRVPPPPRAVIPLKRPRVAVTTTRRGKGVFSMKGGSRSTASGSTGSKLKSDELQTIKKELTQIKTKIDSLLGRLEKIEKQQKAEAEAQKKQLEESLVLIQEECVSEIADHSTEEPAEGGPDADGEEMTDGIEEDFDEDGGHELFLQIK

SEQ ID NO: 40422 - DNA, 595 bp, Artificial Sequence
  derived and/or modified sequence
agatctagggaggagggaacagcagaggcaaaggcagcttgggagggatgggaaatggaaaatcagggaaacaaacaaacaaacaaacaaaatgaatgagtgaatgtgggcttgaatagtaaaacttccagagagaagacgatgggatctctccccaggtaactacctgtagatgaaaaatagatgaaatacacaaggaagtggcaagcaacaactttgagtggaaggtttttctggaaaaaaaaaaatgaagtgcggtttggtttccttgtcaacggaggatgaagtgaacagctgagcagctcgcagagagcaggattaaagcaaggagagccaatcatgactggcaaaacacagaccagcaacgtcaccaataagaatgaccccaagtccatcaactcccgtgttttcatcggcaatctaaatacggcaattgtcaagaaagttgacattgaagccattttttcaaagtatggaaaaatagttggatgttccgttcacaaaggttatgcatttgtacagtacatgagtgagcgacatgcaagagctgcagtggctggagaaaatgccagagtcatcgccggccaaccacttg

SEQ ID NO: 40423 - DNA, 1924 bp, Artificial Sequence
  derived and/or modified sequence
acagcgaaggcagcctcgccgcgagctgccgctgccgctgctgccgccactggtgttgccgctctcaggcgccaggctccccgtcgccgccgccgccgcctcgccagccagagttgggctccgtgggcttcccccctcgcagcctcggtccttccccgctgcctgcaagtcagcctggctccgagtcacgtgtcagtgcctgaggcagagactgcgagaaaaaaacgcgcttcattccttcttccaccgccatactgtattttatactaaatctcatttttattccaacattttactcccgctcggattaaagcaaggagagccaatcatgactggcaaaacacagaccagcaacgtcaccaataagaatgaccccaagtccatcaactcccgtgttttcatcggcaatctaaatacggcaattgtcaagaaagttgacattgaagccattttttcaaagtatggaaaaatagttggatgttccgttcacaaaggttatgcatttgtacagtacatgagtgagcgacatgcaagagctgcagtggctggagaaaatgccagagtcatcgccggccaaccacttgatatcaacatggcaggagagcccaaaccatacagaccaaaacctggaaacaagaggcccctttctgcactttacagacttgaatcaaaggaacctttcctgtctgttggcggttatgtctttgactatgattactacagagatgatttctacaatcggttatttgattaccacgggcgtgtgcctccacctccccgtgcagtaattccgctgaagcgtcccagagtggcagtcacaacgactcgcagggggaaaggagtcttttccatgaaaggtggatcgagatctactgccagtgggtcaacaggttctaaattgaaatcagatgagttacagaccatcaagaaagaattaacccagatcaaaactaaaattgactccttgctagggcgcctggagaagattgagaaacagcagaaggcggaggcagaagctcagaagaagcaattggaagagagtctagtgctgatccaagaggaatgtgtgtcagagattgcagatcactctacagaggagcctgctgaaggagggccagatgccgatggagaagagatgacagatgggatagaggaggacttcgatgaagatgggggtcatgagctgtttctacagataaagtgatctgaaataacgcatgatgccacaaagcagaaaagagaaactgtgacaacccccagaaatgtgaaaggaggtttcttactggacagcagcatctttggttcaatttatataaaaacccaaataaataaaatggacagtattgctcagttttagaaattccatttcttctatgttttaagctgtacaattgtcaggtttttatggtttaaattgtaaatgtgttttcccctttgctaattatgttttttttttcagtcttaaaatgtgaaaggcatttatgaatggtaagggaaacactatatacaaatgtatatttgtaaaagctatttttatgattagcatgtttcactgttgatcatatataaagtcaggtgatattgcaattctgtatttaaagcttatttccaacaatgtcatgtaagaaaagatgcatcttatgctagtttttataatttatttataatttatagtttaaagtacttcagatcataatgataaaatacttgaaaaagttatatttctgccctgtataagcaccctttttattaataaagaatgcagatatttcagatgtgatataatagttaaagaactgttggtttgatctgtgattaagttgagcatgctccgctctactgaactaaatgatccaattattacttcagtctgggtatgagattccatggacaagtaaggactagattgccaaggaaaagactg

SEQ ID NO: 40424 - DNA, 2701 bp, Artificial Sequence
  derived and/or modified sequence
cgccaggctccccgtcgccgccgccgccgcctcgccagccagagttgggctccgtgggcttcccccctcgcagcctcggtccttccccgctgcctgcaagtcagcctggctccgagtcacgtgtcagtgcctgaggcagagactgcgagaaaaaaacgcgcttcattccttcttccaccgccatactgtattttatactaaatctcatttttattccaacattttactcccgctcggtgagtaccttctcagtggcattcttgtcctattcttttttttgtccttttttttggttttttgttttttttgtttttgttttttttctttttttccacttctttgattattgtttatatttgggaaagctggaggagcatggttttgagccttttcctgaatccaagtttttctagcatgcgatcgttctgtagacaaggcgctgtgtctcggagtccgcggcgaccgtgcccgctgggagcgtctcccaagtccagcaaaatgtgcaactggttttatggaaaaagcgatgtgaagtatggtgcctatttttttcctttgtaaaaataaaaagcatgtttctaactctttttttgcatactctttttctgataacatttttgtataggtgggattttacggcagtgtttacaagtttgtggtcttgcaatactggtgcaaaccactgagcaaagacattaattttatattttttgtgccctttttggaagccggtgaaaacaaattcgttttttttccctcctgtttttgatacccattgataacatgaaacttttcttacagctggtgattgggatcatttttaagcaaaatacttttttcctcctttaaattaactatgacttttgcacatttgacttttttaaaaaaccgagataattttatgatagatatcctgatatctatatctatattgtcccttatttctcccccttccctccccgtaaatcaattttcaaatgatggcagtggaaggtttttctggaaaaaaaaaaatgaagtgcggtttggtttccttgtcaacggaggatgaagtgaacagctgagcagctcgcagagagcaggattaaagcaaggagagccaatcatgactggcaaaacacagaccagcaacgtcaccaataagaatgaccccaagtccatcaactcccgtgttttcatcggcaatctaaatacggcaattgtcaagaaagttgacattgaagccattttttcaaagtatggaaaaatagttggatgttccgttcacaaaggttatgcatttgtacagtacatgagtgagcgacatgcaagagctgcagtggctggagaaaatgccagagtcatcgccggccaaccacttgatatcaacatggcaggagagcccaaaccatacagaccaaaacctggaaacaagaggcccctttctgcactttacagacttgaatcaaaggaacctttcctgtctgttggcggttatgtctttgactatgattactacagagatgatttctacaatcggttatttgattaccacgggcgtgtgcctccacctccccgtgcagtaattccgctgaagcgtcccagagtggcagtcacaacgactcgcagggggaaaggagtcttttccatgaaaggtggatcgagatctactgccagtgggtcaacaggttctaaattgaaatcagatgagttacagaccatcaagaaagaattaacccagatcaaaactaaaattgactccttgctagggcgcctggagaagattgagaaacagcagaaggcggaggcagaagctcagaagaagcaattggaagagagtctagtgctgatccaagaggaatgtgtgtcagagattgcagatcactctacagaggagcctgctgaaggagggccagatgccgatggagaagagatgacagatgggatagaggaggacttcgatgaagatgggggtcatgagctgtttctacagataaagtgatctgaaataacgcatgatgccacaaagcagaaaagagaaactgtgacaacccccagaaatgtgaaaggaggtttcttactggacagcagcatctttggttcaatttatataaaaacccaaataaataaaatggacagtattgctcagttttagaaattccatttcttctatgttttaagctgtacaattgtcaggtttttatggtttaaattgtaaatgtgttttcccctttgctaattatgttttttttttcagtcttaaaatgtgaaaggcatttatgaatggtaagggaaacactatatacaaatgtatatttgtaaaagctatttttatgattagcatgtttcactgttgatcatatataaagtcaggtgatattgcaattctgtatttaaagcttatttccaacaatgtcatgtaagaaaagatgcatcttatgctagtttttataatttatttataatttatagtttaaagtacttcagatcataatgataaaatacttgaaaaagttatatttctgccctgtataagcaccctttttattaataaagaatgcagatatttcagatgtgatataatagttaaagaactgttggtttgatctgtgattaagttgagcatgctccgctctactgaactaaatgatccaattattacttcagtctgggtatgagattccatggacaagtaaggactagattgccaaggaaaagactg

SEQ ID NO: 40425 - DNA, 571 bp, Artificial Sequence
  derived and/or modified sequence
aaaaaaccgagataattttatgatagatatcctgatatctatatctatattgtcccttatttctcccccttccctccccgtaaatcaattttcaaatgatggcagtggaaggtttttctggaaaaaaaaaaatgaagtgcggtttggtttccttgtcaacggaggatgaagtgaacagctgagcagctcgcagagagcagatatagcccttggcgaggtgcctggctccatagattaaagcaaggagagccaatcatgactggcaaaacacagaccagcaacgtcaccaataagaatgaccccaagtccatcaactcccgtgttttcatcggcaatctaaatacggcaattgtcaagaaagttgacattgaagccattttttcaaagtatggaaaaatagttggatgttccgttcacaaaggttatgcatttgtacagtacatgagtgagcgacatgcaagagctgcagtggctggagaaaatgccagagtcatcgccggccaaccacttgatatcaacatggcaggagagcccaaaccatacagaccaaaacctggaaacaagaggcccc

SEQ ID NO: 40426 - DNA, 2168 bp, Artificial Sequence
  derived and/or modified sequence
tgggctcacagcgaaggcagcctcgccgcgagctgccgctgccgctgctgccgccactggtgttgccgctctcaggcgccaggctccccgtcgccgccgccgccgcctcgccagccagagttgggctccgtgggcttcccccctcgcagcctcggtccttccccgctgcctgcaagtcagcctggctccgagtcacgtgtcagtgcctgaggcagagactgcgagaaaaaaacgcgcttcattccttcttccaccgccatactgtattttatactaaatctcatttttattccaacattttactcccgctcgatatagcccttggcgaggtgcctggctccatagattaaagcaaggagagccaatcatgactggcaaaacacagaccagcaacgtcaccaataagaatgaccccaagtccatcaactcccgtgttttcatcggcaatctaaatacggcaattgtcaagaaagttgacattgaagccattttttcaaagtatggaaaaatagttggatgttccgttcacaaaggttatgcatttgtacagtacatgagtgagcgacatgcaagagctgcagtggctggagaaaatgccagagtcatcgccggccaaccacttgatatcaacatggcaggagagcccaaaccatacagaccaaaacctggaaacaagaggcccctttctgcactttacagacttgaatcaaaggaacctttcctgtctgttggcggttatgtctttgactatgattactacagagatgatttctacaatcggttatttgattaccacgggcgtgtgcctccacctccccgtgcagtaattccgctgaagcgtcccagagtggcagtcacaacgactcgcagggggaaaggagtcttttccatgaaaggtggatcgagatctactgccagtgggtcaacaggttctaaattgaaatcagatgagttacagaccatcaagaaagaattaacccagatcaaaactaaaattgactccttgctagggcgcctggagaagattgagaaacagcagaaggcggaggcagaagctcagaagaagcaattggaagagagtctagtgctgatccaagaggaatgtgtgtcagagattgcagatcactctacagaggagcctgctgaaggagggccagatgccgatggagaagagatgacagatgggatagaggaggacttcgatgaagatgggggtcatgagctgtttctacagataaagtgatctgaaataacgcatgatgccacaaagcagaaaagagaaactgtgacaacccccagaaatgtgaaaggaggtttcttactggacagcagcatctttggttcaatttatataaaaacccaaataaataaaatggacagtattgctcagttttagaaattccatttcttctatgttttaagctgtacaattgtcaggtttttatggtttaaattgtaaatgtgttttcccctttgctaattatgttttttttttcagtcttaaaatgtgaaaggcatttatgaatggtaagggaaacactatatacaaatgtatatttgtaaaagctatttttatgattagcatgtttcactgttgatcatatataaagtcaggtgatattgcaattctgtatttaaagcttatttccaacaatgtcatgtaagaaaagatgcatcttatgctagtttttataatttatttataatttatagtttaaagtacttcagatcataatgataaaatacttgaaaaagttatatttctgccctgtataagcaccctttttattaataaagaatgcagatatttcagatgtgatataatagttaaagaactgttggtttgatctgtgattaagttgagcatgctccgctctactgaactaaatgatccaattattacttcagtctgggtatgagattccatggacaagtaaggactagattgccaaggaaaagactgtcttgcccttggatccaaaagtttaaattagtgcatacatcatgtcatttcacctcctgttcctaggaactctccattcccaagcattgccagtgttttccagataatcttagctgttgtcttgtgctgtggaaatggaagaaaccatcttcacagaccgtaggagaattcaacatataatttcttaataaatactgtttctttt

SEQ ID NO: 40427 - DNA, 915 bp, Artificial Sequence
  derived and/or modified sequence
atgagcaagagaagaagactgaagcagggcgagcccatcatgaccggcaagacccagaccagcaacgtgaccaacaagaacgaccccaagagcatcaacagcagagtgttcatcggcaacctgaacaccgccatcgtgaagaaggtggacatcgaggccatcttcagcaagtacggcaagatcgtgggctgcagcgtgcacaagggctacgccttcgtgcagtacatgagcgagagacacgccagagccgccgtggccggcgagaacgccagagtgatcgccggccagcccctggacatcaacatggccggcgagcccaagccctacagacccaagcccggcaacaagagacccctgagcgccctgtacagactggagagcaaggagcccttcctgagcgtgggcggctacgtgttcgactacgactactacagagacgacttctacaacagactgttcgactaccacggcagagtgccccccccccccagagccgtgatccccctgaagagacccagagtggccgtgaccaccaccagaagaggcaagggcgtgttcagcatgaagggcggcagcagaagcaccgccagcggcagcaccggcagcaagctgaagagcgacgagctgcagaccatcaagaaggagctgacccagatcaagaccaagatcgacagcctgctgggcagactggagaagatcgagaagcagcagaaggccgaggccgaggcccagaagaagcagctggaggagagcctggtgctgatccaggaggagtgcgtgagcgagatcgccgaccacagcaccgaggagcccgccgagggcggccccgacgccgacggcgaggagatgaccgacggcatcgaggaggacttcgacgaggacggcggccacgagctgttcctgcagatcaagtag

SEQ ID NO: 40428 - DNA, 915 bp, Artificial Sequence
  derived and/or modified sequence
atgtccaagagaaggaggctgaaacaaggagaaccaattatgacgggcaagactcagacaagcaacgttaccaacaagaatgatcccaaatccattaattccagagtgttcatcggcaatctgaacaccgcaatagtgaagaaagtggacatcgaggcgatcttcagcaagtatgggaagatcgtaggttgctcagtccataaaggctatgccttcgtccagtacatgagtgagcgccacgctcgggctgcagttgccggggagaacgctagggtcatagccggccagcccctggacatcaatatggctggagaacccaaaccctatcggcccaaacccggcaacaagaggcctctatctgcattgtataggctggaatctaaggagccctttttgtcagtgggaggctacgtgttcgattatgattattatcgggatgatttctataataggttgttcgactatcatggccgagtgccacctcccccaagggccgtaatccctctgaaacgccctcgtgtcgcagtgactacaactcgccggggaaaaggggtcttcagtatgaaaggtggttctcggtcaacggcatctgggtcaaccggcagtaagctgaagagtgacgagctgcagaccatcaagaaagaactgacccagattaaaaccaaaatagactccttgctcggcagactggagaagatcgagaaacaacaaaaagcggaagctgaggctcaaaagaagcaattagaggagagtttggtgctgatacaggaagagtgcgtgagtgaaattgctgatcactccacggaagagccagctgaaggaggacctgatgccgacggagaagagatgaccgatggaattgaggaagacttcgacgaggatggcgggcatgagcttttcttacaaataaagtag

SEQ ID NO: 40429 - DNA, 915 bp, Artificial Sequence
  derived and/or modified sequence
atgagcaagagaagaaggctgaagcagggcgagcccatcatgaccgggaagacccagaccagcaatgtgaccaacaagaatgaccccaagagcatcaacagcagggtcttcatcggcaacctgaacacagccatcgtgaagaaggtggacatcgaggccatcttcagcaaatatggcaagatcgtgggctgcagcgtgcacaagggctacgcctttgtgcagtacatgtctgaaagacatgcccgggctgctgtggccggggagaatgcccgggtgattgctggccagcccctggacatcaacatggccggggagcccaagccctaccggcccaagccaggcaacaagaggcccctgagcgccctgtaccgcctggagagcaaggagcccttcctgtctgtgggcggctacgtgtttgattatgactactacagagatgacttctacaaccggctgtttgactaccacggccgggtgcccccaccacccagggctgtgatccccctgaagaggccccgggtggccgtgaccaccacccggcggggcaaaggagtcttctccatgaagggcggcagccgcagcacagccagcggcagcacaggcagcaagctgaagagtgatgagctgcagaccatcaagaaggagctgacccagatcaagaccaagattgacagcctgctgggccgcctggagaagattgagaagcagcagaaggccgaggccgaggcccagaagaagcagctggaggagagcctggtgctgatccaggaggagtgtgtgtctgaaattgctgaccacagcacagaggagcctgctgagggcggcccagatgctgatggagaggagatgacagatggcattgaagaagattttgatgaagatggcggccacgagctgttcctgcagatcaagtag

SEQ ID NO: 40430 - DNA, 915 bp, Artificial Sequence
  derived and/or modified sequence
atgagcaagcggcggcggctgaagcagggcgagcccatcatgaccggcaaaacacagacgagcaatgtaactaataaaaatgatccaaagagcatcaacagtagagtgtttattgggaacctgaatacagccatagtgaagaaagtagacatagaggcgatctttagcaaatacggcaagattgtgggctgctccgttcacaaaggatacgcctttgtgcaatatatgtctgagagacacgcgcgggctgctgtagccggcgaaaacgcgcgcgtcatcgcaggccaaccactggatatcaacatggccggtgagccaaagccctacaggcctaagccaggtaataagcggcccttgtctgctctgtacaggcttgaaagtaaagagcctttcttgtcggttggaggatatgtgttcgattatgactactatagagacgatttctacaatagactgttcgattaccacggcagagtgcctcctcccccacgcgccgtgatcccactaaagaggccccgggtggcggtcacgacaacaagacgcgggaagggagtgttttcaatgaaaggagggtccagaagcacagctagtggcagcactggctctaagctaaagtcagatgagttacagaccattaagaaggagctgacccaaattaagaccaaaattgactcactcctgggtcggttagagaagattgagaaacagcagaaggcggaggccgaggcccaaaagaaacaactggaagaatctctggttctgatccaggaagagtgcgtatcagaaatcgcagaccattctaccgaggaacctgccgagggagggccagacgccgatggggaggaaatgacagacggcatcgaagaggattttgatgaagacggcggacacgaactcttcttgcagataaagtag

SEQ ID NO: 40431 - DNA, 915 bp, Artificial Sequence
  derived and/or modified sequence
atgagcaaaagacgcaggctgaaacagggagagcccattatgacaggaaagactcagacgtctaatgttacaaacaagaatgacccgaaatctatcaatagtagggtgtttatcggaaatctgaatacagccatcgttaaaaaagttgacatagaggcgatcttctctaaatatggaaagatcgtgggatgtagcgtccacaaaggctatgcctttgttcaatacatgtcggaacgccacgcgagagccgctgtcgccggtgagaatgctagagtgattgcagggcagccgttagatatcaatatggcaggcgagcccaagccatataggcctaaaccagggaataaaagacctttgagtgccctctaccgtctggagtccaaagagccgtttctaagcgtggggggatatgtctttgactatgactattatcgcgacgacttctataataggttatttgattaccatggtcgtgtcccacccccaccaagagcggtaatcccactgaagcggcctcgggtggcagttacaaccacgcgtcgcggaaaaggggttttctctatgaagggtggatcacgcagtactgcatctggatctacaggaagcaagctgaagagcgacgagctacaaactattaaaaaagagttgacgcagataaagaccaagatcgatagtctcttgggtcgcttggagaagatagagaagcagcagaaggcggaggccgaagcccaaaaaaaacagctagaggagagcttggtactgatacaggaggagtgcgtgtctgaaatagcagaccattctactgaggagcccgcagagggtggacctgacgcagatggagaggagatgactgacggaatcgaagaggattttgacgaagatggaggacatgaactgtttctgcaaatcaagtag

SEQ ID NO: 40432 - DNA, 1972 bp, Artificial Sequence
  derived and/or modified sequence
ggcagagaccgcatattccggaggggctggctccaggccacgcgagccggagctggagacatttccagagccttgaggatggcaccggccctcgcacgctcaactcctgctcctcctcttcgcaatgagtaaacgacgcagattaaagcaaggagagccaatcatgactggcaaaacacagaccagcaacgtcaccaataagaatgaccccaagtccatcaactcccgtgttttcatcggcaatctaaatacggcaattgtcaagaaagttgacattgaagccattttttcaaagtatggaaaaatagttggatgttccgttcacaaaggttatgcatttgtacagtacatgagtgagcgacatgcaagagctgcagtggctggagaaaatgccagagtcatcgccggccaaccacttgatatcaacatggcaggagagcccaaaccatacagaccaaaacctggaaacaagaggcccctttctgcactttacagacttgaatcaaaggaacctttcctgtctgttggcggttatgtctttgactatgattactacagagatgatttctacaatcggttatttgattaccacgggcgtgtgcctccacctccccgtgcagtaattccgctgaagcgtcccagagtggcagtcacaacgactcgcagggggaaaggagtcttttccatgaaaggtggatcgagatctactgccagtgggtcaacaggttctaaattgaaatcagatgagttacagaccatcaagaaagaattaacccagatcaaaactaaaattgactccttgctagggcgcctggagaagattgagaaacagcagaaggcggaggcagaagctcagaagaagcaattggaagagagtctagtgctgatccaagaggaatgtgtgtcagagattgcagatcactctacagaggagcctgctgaaggagggccagatgccgatggagaagagatgacagatgggatagaggaggacttcgatgaagatgggggtcatgagctgtttctacagataaagtgatctgaaataacgcatgatgccacaaagcagaaaagagaaactgtgacaacccccagaaatgtgaaaggaggtttcttactggacagcagcatctttggttcaatttatataaaaacccaaataaataaaatggacagtattgctcagttttagaaattccatttcttctatgttttaagctgtacaattgtcaggtttttatggtttaaattgtaaatgtgttttcccctttgctaattatgttttttttttcagtcttaaaatgtgaaaggcatttatgaatggtaagggaaacactatatacaaatgtatatttgtaaaagctatttttatgattagcatgtttcactgttgatcatatataaagtcaggtgatattgcaattctgtatttaaagcttatttccaacaatgtcatgtaagaaaagatgcatcttatgctagtttttataatttatttataatttatagtttaaagtacttcagatcataatgataaaatacttgaaaaagttatatttctgccctgtataagcaccctttttattaataaagaatgcagatatttcagatgtgatataatagttaaagaactgttggtttgatctgtgattaagttgagcatgctccgctctactgaactaaatgatccaattattacttcagtctgggtatgagattccatggacaagtaaggactagattgccaaggaaaagactgtcttgcccttggatccaaaagtttaaattagtgcatacatcatgtcatttcacctcctgttcctaggaactctccattcccaagcattgccagtgttttccagataatcttagctgttgtcttgtgctgtggaaatggaagaaaccatcttcacagaccgtaggagaattcaacatataatttcttaataaatactgtttcttttaaaacaaa

SEQ ID NO: 40433 - protein, 291 aa, Artificial Sequence
  derived and/or modified sequence
MTGKTQTSNVTNKNDPKSINSRVFIGNLNTAIVKKVDIEAIFSKYGKIVGCSVHKGYAFVQYMSERHARAAVAGENARVIAGQPLDINMAGEPKPYRPKPGNKRPLSALYRLESKEPFLSVGGYVFDYDYYRDDFYNRLFDYHGRVPPPPRAVIPLKRPRVAVTTTRRGKGVFSMKGGSRSTASGSTGSKLKSDELQTIKKELTQIKTKIDSLLGRLEKIEKQQKAEAEAQKKQLEESLVLIQEECVSEIADHSTEEPAEGGPDADGEEMTDGIEEDFDEDGGHELFLQIK

SEQ ID NO: 40434 - DNA, 876 bp, Artificial Sequence
  derived and/or modified sequence
atgaccggcaagacccagaccagcaacgtgaccaacaagaacgaccccaagagcatcaacagcagagtgttcatcggcaacctgaacaccgccatcgtgaagaaggtggacatcgaggccatcttcagcaagtacggcaagatcgtgggctgcagcgtgcacaagggctacgccttcgtgcagtacatgagcgagagacacgccagagccgccgtggccggcgagaacgccagagtgatcgccggccagcccctggacatcaacatggccggcgagcccaagccctacagacccaagcccggcaacaagagacccctgagcgccctgtacagactggagagcaaggagcccttcctgagcgtgggcggctacgtgttcgactacgactactacagagacgacttctacaacagactgttcgactaccacggcagagtgccccccccccccagagccgtgatccccctgaagagacccagagtggccgtgaccaccaccagaagaggcaagggcgtgttcagcatgaagggcggcagcagaagcaccgccagcggcagcaccggcagcaagctgaagagcgacgagctgcagaccatcaagaaggagctgacccagatcaagaccaagatcgacagcctgctgggcagactggagaagatcgagaagcagcagaaggccgaggccgaggcccagaagaagcagctggaggagagcctggtgctgatccaggaggagtgcgtgagcgagatcgccgaccacagcaccgaggagcccgccgagggcggccccgacgccgacggcgaggagatgaccgacggcatcgaggaggacttcgacgaggacggcggccacgagctgttcctgcagatcaagtag

SEQ ID NO: 40435 - DNA, 876 bp, Artificial Sequence
  derived and/or modified sequence
atgacgggcaaaacgcagacatccaacgttacaaacaagaacgatcctaaaagtattaatagtagagttttcatcggaaatctcaacacggccattgtaaaaaaagtggatatagaagcaatcttctcaaaatacggcaagatcgtcggatgctccgtccataagggttacgcattcgtgcaatatatgagcgagcggcacgctagggccgcagtggcaggggagaacgctagggtcattgcaggacagccattggatatcaacatggctggagagcccaagccctataggcccaagcctgggaacaagcgaccgctgtctgccctgtaccgcttggaaagcaaagagcccttcctgtccgtgggcggctatgtgttcgattatgactactatcgtgacgacttctataatcgtctgtttgactatcacggaagggtgccacccccccctagggccgtaattccactgaagcggccccgagttgccgtgactactaccagacggggaaaaggagtgttttctatgaaaggcgggtctcgaagtaccgcttctgggagcactggctccaaattgaagagtgatgaactccagaccattaaaaaggagctcacacagattaagaccaagattgattctcttcttgggcgcctggagaagattgagaagcaacagaaagccgaggccgaggcgcaaaagaaacaactggaggagtccttggtgctaatccaggaggaatgtgtcagtgagatcgctgaccactcgactgaagagcctgctgaaggagggcccgacgctgacggggaggaaatgacagatggaatagaggaagactttgatgaggatggaggccacgaactgttcctgcagataaaatag

SEQ ID NO: 40436 - DNA, 876 bp, Artificial Sequence
  derived and/or modified sequence
atgactggaaagactcagacatccaacgttaccaacaaaaatgatcccaaatcaataaacagccgcgtcttcattggtaaccttaatactgccattgtgaagaaggttgacatcgaggcaattttttccaaatacggtaaaattgtgggatgcagtgtgcataaaggctatgcgttcgtgcaatacatgtctgagaggcacgcccgggctgccgttgcaggcgagaacgctcgagtgattgcagggcagccactggacataaatatggctggtgaacccaagccttacagacctaaacccggtaataaaagacccctctccgcgctgtacagactggagagtaaagaaccgttccttagcgttggaggctatgtctttgactatgactattaccgagatgatttctacaatcgactgttcgattaccacggcagggtcccacctccgcctagagcagtgattccgttgaaacgccccagagtggccgtcaccacgacccggagaggcaagggcgtcttctctatgaagggcggctcccgtagcaccgcgagcggcagcacgggcagtaaattgaagagcgatgaacttcagacaattaagaaagaactgacacaaatcaagaccaagattgactccctgctagggagattggaaaagatcgagaagcagcagaaagcagaggcggaagcccaaaagaagcaactcgaagagagtctagtcctcattcaagaggagtgtgtctctgaaatcgcggaccactccactgaagaacccgctgaaggtgggcctgacgccgacggcgaggagatgaccgatggtattgaggaggattttgatgaagacggtggacatgaactgttcctgcagatcaagtag

SEQ ID NO: 40437 - DNA, 876 bp, Artificial Sequence
  derived and/or modified sequence
atgacaggcaagactcagacctccaacgtgacaaataagaatgacccaaaatcaatcaacagccgtgtcttcattggcaacctgaacacagcaatcgttaagaaggtggacatcgaggctattttttccaaatatggaaaaatagtggggtgttctgttcacaaggggtacgccttcgtacagtatatgtcagagcgacacgctcgcgcagccgtggctggcgaaaatgctagagtgattgctggtcaacctctcgacatcaacatggctggtgagccaaagccatacaggccaaagccaggaaacaaaaggcctctgtccgcattatacaggttggagtctaaagaaccctttctatcggtcggcggctacgtatttgattacgattactatagagatgacttttataatcggctgttcgactaccacggaagggtacccccccccccgcgagccgtgatccctctgaagcgaccgcgcgttgcagtgacaaccaccagaaggggcaagggcgtgttctccatgaaggggggttcgaggagtacagcatccggatctaccggtagcaagcttaaatccgatgaactgcaaacaattaaaaaggagctcacacagattaaaacaaaaatagattcactcctcggcaggctggagaaaatcgagaagcagcaaaaagccgaagcagaggctcagaagaagcagctggaagagagcttagtgctcattcaggaggagtgcgtcagcgagatagccgaccattccactgaggagcccgctgagggcggaccagatgccgacggcgaggagatgacagatgggattgaggaggactttgatgaggacggaggtcatgaacttttcctgcaaattaaatag

SEQ ID NO: 40438 - DNA, 876 bp, Artificial Sequence
  derived and/or modified sequence
atgaccgggaagacccagaccagcaatgtgaccaacaagaatgaccccaagagcatcaacagcagggtcttcatcggcaacctgaacacagccatcgtgaagaaggtggacatcgaggccatcttcagcaaatatggcaagatcgtgggctgcagcgtgcacaagggctacgcctttgtgcagtacatgtctgaaagacatgcccgggctgctgtggccggagaaaatgcccgggtgattgctggccagcccctggacatcaacatggccggggagcccaagccctaccggcccaagccaggcaacaagaggcccctgagcgccctgtaccgcctggagagcaaggagcccttcctgtctgtgggcggctacgtgtttgattatgactactacagagatgacttctacaacagactctttgactaccacggccgggtgcccccaccaccccgggccgtcatccccctgaagaggccccgggtggccgtgaccaccacccggcggggcaagggcgtcttctccatgaagggcggcagccgcagcacagccagcggcagcacaggcagcaagctgaagagtgatgagctgcagaccatcaagaaggagctgacccagatcaagaccaagattgacagcctgctgggccgcctggagaagattgagaagcagcagaaggccgaggccgaggcccagaagaagcagctggaggagagcctggtgctgatccaggaggagtgtgtgtctgaaattgctgaccacagcacagaggagcctgctgagggcggcccagatgctgatggagaggagatgacagatggcatcgaggaggactttgatgaagatggcggccacgagctgttcctgcagatcaagtag

SEQ ID NO: 40439 - DNA, 876 bp, Artificial Sequence
  derived and/or modified sequence
atgaccggcaagacccagaccagcaacgtgaccaacaagaacgaccccaaaagcatcaactcacgagtgttcatcggcaatcttaacaccgccattgtcaagaaggttgacatcgaagccattttcagcaagtatggaaaaattgtcggttgttccgttcataaaggttacgcctttgtccagtacatgagcgagcggcacgcaagagcagccgtggcgggagagaatgcaagagtgatagcggggcagccactagacattaacatggccggcgaaccgaaaccctatcgcccaaaaccagggaataaacgtcctctcagcgcactctaccgactcgagtctaaagagcccttcttgtctgtagggggttacgtcttcgactacgactactaccgggatgacttctataatcgtcttttcgactatcacgggcgcgttcctccaccaccgagagcagtcatcccactgaaaaggccacgagttgccgtgaccacaacccgtcggggaaaaggagtcttttctatgaaaggcggctccagatctactgccagcggaagcactggcagcaaactcaaaagcgatgaactccagaccatcaaaaaagagctgacgcagattaagaccaagatagatagcctgctgggacgactggaaaagattgagaagcagcaaaaggcggaagcagaggctcaaaagaagcagttggaggagtctttggtgcttattcaggaggaatgcgtgtctgaaatcgcggaccacagtaccgaggagcccgcagaaggcggccctgacgctgacggggaggagatgacagacggtatcgaagaggacttcgacgaggatgggggccacgagctctttctgcagatcaagtag

SEQ ID NO: 40440 - DNA, 876 bp, Artificial Sequence
  derived and/or modified sequence
atgaccggcaagacccagaccagcaacgtgaccaacaagaacgaccctaagagcataaactctagagtgttcatcggaaatctgaacacggccatagtcaaaaaggtggacattgaggctatcttctctaagtacggcaaaatcgtggggtgttcggtccacaagggctacgctttcgtgcagtatatgtctgagcgtcatgcccgggccgcggtagccggcgagaatgctcgcgtgattgcaggtcagccattggacatcaatatggccggggagccaaaaccctaccgccctaagcctggaaataaacgcccgctgagcgcgctgtatagactagagtctaaagaaccctttctttcagtcggcggctatgtgtttgactatgattattaccgcgacgatttctacaacagattgttcgactaccacggcagagtgcctccccctcctcgggccgtgatccccctgaagcggcctcgggttgctgttacaacaacccgcagagggaaaggtgtcttctctatgaagggcggaagccgtagcacggccagcggctccactggcagcaaactgaaaagcgatgagctccaaaccatcaaaaaggaacttacccagattaaaaccaaaatcgactcactgctgggacgactggaaaagatcgagaaacagcagaaagcggaagcggaggcacaaaagaagcagttagaagagtccctagtcctcatccaggaagagtgcgtctcagagattgccgatcactcgactgaggaaccggccgagggtggaccagatgccgatggtgaagaaatgaccgatggaatagaggaagactttgacgaggacggagggcacgaactctttctgcagattaaatag

SEQ ID NO: 40441 - DNA, 876 bp, Artificial Sequence
  derived and/or modified sequence
atgaccggcaagacccagaccagcaacgtgaccaacaagaacgacccaaaatccatcaactcccgggttttcatcggaaatctcaatactgccattgtaaaaaaggttgacattgaagcgatcttcagcaaatacggaaaaatagtaggctgcagtgtacataaaggatatgcttttgtccagtacatgagcgagcgccacgctagagccgccgtcgctggcgaaaacgcaagagtgatagccggccagccactagatatcaatatggccggcgaacccaagccatatcgtccgaaacctgggaataaacgccccctatcggctctttacaggctcgagtcaaaggagccatttctgtccgtcggaggttatgtcttcgattatgactattaccgggacgacttctataacagactgttcgattaccacggcagggtgccacctcccccaagagcggtaattccactcaagagacccagagttgccgtgacgacaacacgaaggggaaaaggagtgtttagcatgaaaggcgggtcaaggtccactgcctccggcagtaccggctccaagctgaagtccgacgagctgcagaccataaaaaaggagttgacccaaattaaaacaaagattgattcgctgctgggacgtctagagaagatagagaagcagcagaaggctgaggccgaggcccagaaaaagcagctggaagaaagcctggtcctgattcaggaggaatgtgtgtccgagattgcagaccacagcacggaggaaccagccgaaggcgggcccgacgcagatggtgaggagatgactgatgggattgaagaagactttgatgaggacgggggacatgagttgtttttacaaatcaagtag

SEQ ID NO: 40442 - DNA, 876 bp, Artificial Sequence
  derived and/or modified sequence
atgaccggaaagacacaaactagtaacgtaacaaataaaaatgatccaaaaagcatcaactccagggtctttattggtaatctgaacacagccattgttaagaaagtggatatcgaggctatattttccaaatatggaaaaatagttgggtgctccgtacataagggttatgcgttcgtgcaatacatgtcagaacgtcatgcacgtgccgcagttgccggagagaacgcacgcgtgattgcgggtcagccactggacataaacatggcaggcgaacctaagccatacaggccaaaacctggtaataagaggcctctctccgccctgtatcgcttggagagcaaggagcccttcctctctgtggggggttatgtattcgattacgattactatagagacgatttctataaccgcctctttgattaccacggcagggtgccaccccctcctagagccgtcattcccttaaaaagaccgagagttgctgtaaccactacacggagaggtaaaggggtgttctcgatgaaagggggttcccggtccacagcatctggcagcaccggctcaaaactcaagtctgacgagctgcagactattaagaaagagcttacacagatcaagacaaagatcgacagtctgctgggcaggctcgagaaaattgagaaacagcagaaagcagaagcggaggcccagaagaaacaacttgaagagtcacttgtgctaatccaagaggagtgtgtgagcgaaattgccgaccactccacagaagaaccagccgaagggggaccagatgctgatggcgaggagatgactgacggtatcgaggaggactttgacgaagacggcggacacgagttgttccttcaaataaaatag

SEQ ID NO: 40443 - DNA, 876 bp, Artificial Sequence
  derived and/or modified sequence
atgacaggcaaaactcagacttcgaacgtgactaacaagaatgatcctaaatctatcaatagccgagttttcatcggaaatctgaacacagccattgttaagaaggtcgacatcgaggctatattctccaaatacggcaaaatcgtcggatgtagtgtgcacaaaggctatgcttttgtccaatacatgtccgagcgacacgccagggccgctgtggccggtgagaatgcgagagttattgcgggacagcctttggatatcaatatggcaggtgaacccaagccctaccgcccaaagccagggaacaaacgaccactctcggcactttaccggctcgagtccaaagagccgttcctgtcagtggggggatatgtgtttgactacgactactaccgggacgatttctacaatcgcctatttgactatcatggccgagtgcctcctcctccccgagctgttattccacttaagaggccgagagtggccgtcaccactacgagacgcggaaagggagtcttcagcatgaaaggagggtccaggagtacggcctcaggctccactgggagtaagctgaaatcagatgagctccagacgattaagaaagagctgacccaaattaaaacgaagatcgactccctgctgggtagattggaaaagattgagaaacagcagaaggctgaagctgaagcccagaagaaacaactcgaggagagcctagtgctgatacaggaagaatgcgtctctgagatcgccgatcactctacagaggaacctgctgaagggggtccagacgctgatggggaggaaatgaccgacggcattgaagaggacttcgacgaagacggcggacatgaacttttccttcagataaagtag

SEQ ID NO: 40444 - DNA, 876 bp, Artificial Sequence
  derived and/or modified sequence
atgacaggtaagacacagacatcaaatgtaaccaataaaaacgacccaaagtccatcaactcaagagtgtttatcggcaatctaaacaccgccatcgtgaagaaggtggatatcgaggctattttctcaaaatacgggaagatcgtggggtgttccgtgcataaagggtacgcttttgtgcaatatatgtcagaacggcacgctagggccgcagtggccggagagaacgcgcgtgtaatcgctggccagcctctcgacatcaatatggccggagaacctaagccctaccgacccaagcccggaaacaagcgacccctctcagccctgtataggctggaatcgaaggaaccatttctgagtgttgggggttatgtctttgattacgactactacagggacgacttctacaatcgactttttgattatcatggcagagtcccccctccccctagagccgttatcccgctcaagaggcccagagtagcagtaacaaccaccagacggggaaaaggggtgtttagtatgaagggcggaagccgatcaactgctagtggcagtacaggcagtaagctgaagtccgacgagctgcagaccattaagaaagagctgacccagatcaagaccaagatcgactctctgcttggaagactggaaaagatagaaaagcagcagaaggccgaggctgaggctcagaagaaacaactggaggagagtctggtgctgatccaggaagagtgtgtctccgagatagccgaccacagtactgaggagcccgcagaggggggacccgacgctgatggggaggagatgactgatggcatcgaggaagatttcgacgaggacggcggtcacgagttgtttctgcagatcaagtag

SEQ ID NO: 40445 - protein, 867 aa, Artificial Sequence
  derived and/or modified sequence
MLYKKYRQYMAGLLAPPYGVMETGSNNDRIPDKENTPLIEPHVPLRPANTITKVPSEKILRAGKILRNAILSRAPHMIRDRKYHLKTYRQCCVGTELVDWMMQQTPCVHSRTQAVGMWQVLLEDGVLNHVDQEHHFQDKYLFYRFLDDEHEDAPLPTEEEKKECDEELQDTMLLLSQMGPDAHMRMILRKPPGQRTVDDLEIIYEELLHIKALSHLSTTVKRELAGVLIFESHAKGGTVLFNQGEEGTSWYIILKGSVNVVIYGKGVVCTLHEGDDFGKLALVNDAPRAASIVLREDNCHFLRVDKEDFNRILRDVEANTVRLKEHDQDVLVLEKVPAGNRASNQGNSQPQQKYTVMSGTPEKILEHFLETIRLEATLNEATDSVLNDFIMMHCVFMPNTQLCPALVAHYHAQPSQGTEQEKMDYALNNKRRVIRLVLQWAAMYGDLLQEDDVSMAFLEEFYVSVSDDARMIAALKEQLPELEKIVKQISEDAKAPQKKHKVLLQQFNTGDERAQKRQPIRGSDEVLFKVYCMDHTYTTIRVPVATSVKEVISAVADKLGSGEGLIIVKMSSGGEKVVLKPNDVSVFTTLTINGRLFACPREQFDSLTPLPEQEGPTVGTVGTFELMSSKDLAYQMTIYDWELFNCVHELELIYHTFGRHNFKKTTANLDLFLRRFNEIQFWVVTEICLCSQLSKRVQLLKKFIKIAAHCKEYKNLNSFFAIVMGLSNVAVSRLALTWEKLPSKFKKFYAEFESLMDPSRNHRAYRLTVAKLEPPLIPFMPLLIKDMTFTHEGNKTFIDNLVNFEKMRMIANTARTVRYYRSQPFNPDAAQANKNHQDVRSYVRQLNVIDNQRTLSQMSHRLEPRRP

SEQ ID NO: 40446 - protein, 858 aa, Artificial Sequence
  derived and/or modified sequence
MAGLLAPPYGVMETGSNNDRIPDKENTPLIEPHVPLRPANTITKVPSEKILRAGKILRNAILSRAPHMIRDRKYHLKTYRQCCVGTELVDWMMQQTPCVHSRTQAVGMWQVLLEDGVLNHVDQEHHFQDKYLFYRFLDDEHEDAPLPTEEEKKECDEELQDTMLLLSQMGPDAHMRMILRKPPGQRTVDDLEIIYEELLHIKALSHLSTTVKRELAGVLIFESHAKGGTVLFNQGEEGTSWYIILKGSVNVVIYGKGVVCTLHEGDDFGKLALVNDAPRAASIVLREDNCHFLRVDKEDFNRILRDVEANTVRLKEHDQDVLVLEKVPAGNRASNQGNSQPQQKYTVMSGTPEKILEHFLETIRLEATLNEATDSVLNDFIMMHCVFMPNTQLCPALVAHYHAQPSQGTEQEKMDYALNNKRRVIRLVLQWAAMYGDLLQEDDVSMAFLEEFYVSVSDDARMIAALKEQLPELEKIVKQISEDAKAPQKKHKVLLQQFNTGDERAQKRQPIRGSDEVLFKVYCMDHTYTTIRVPVATSVKEVISAVADKLGSGEGLIIVKMSSGGEKVVLKPNDVSVFTTLTINGRLFACPREQFDSLTPLPEQEGPTVGTVGTFELMSSKDLAYQMTIYDWELFNCVHELELIYHTFGRHNFKKTTANLDLFLRRFNEIQFWVVTEICLCSQLSKRVQLLKKFIKIAAHCKEYKNLNSFFAIVMGLSNVAVSRLALTWEKLPSKFKKFYAEFESLMDPSRNHRAYRLTVAKLEPPLIPFMPLLIKDMTFTHEGNKTFIDNLVNFEKMRMIANTARTVRYYRSQPFNPDAAQANKNHQDVRSYVRQLNVIDNQRTLSQMSHRLEPRRP

SEQ ID NO: 40447 - protein, 399 aa, Artificial Sequence
  derived and/or modified sequence
MFVFVLTPLIEPHVPLRPANTITKVPSEKILRAGKILRNAILSRAPHMIRDRKYHLKTYRQCCVGTELVDWMMQQTPCVHSRTQAVGMWQVLLEDGVLNHVDQEHHFQDKYLFYRFLDDEHEDAPLPTEEEKKECDEELQDTMLLLSQMGPDAHMRMILRKPPGQRTVDDLEIIYEELLHIKALSHLSTTVKRELAGVLIFESHAKGGTVLFNQGEEGTSWYIILKGSVNVVIYGKGVVCTLHEGDDFGKLALVNDAPRAASIVLREDNCHFLRVDKEDFNRILRDVEANTVRLKEHDQDVLVLEKVPAGNRASNQGNSQPQQKYTVMSGTPEKILEHFLETIRLEATLNEATDSVLNDFIMMHCVFMPNTQLCPALVAHYHAQPSRYRTGENGLCPQQ

SEQ ID NO: 40448 - DNA, 2604 bp, Artificial Sequence
  derived and/or modified sequence
atgctgtacaagaagtacagacagtacatggccggcctgctggcccccccctacggcgtgatggagaccggcagcaacaacgacagaatccccgacaaggagaacacccccctgatcgagccccacgtgcccctgagacccgccaacaccatcaccaaggtgcccagcgagaagatcctgagagccggcaagatcctgagaaacgccatcctgagcagagccccccacatgatcagagacagaaagtaccacctgaagacctacagacagtgctgcgtgggcaccgagctggtggactggatgatgcagcagaccccctgcgtgcacagcagaacccaggccgtgggcatgtggcaggtgctgctggaggacggcgtgctgaaccacgtggaccaggagcaccacttccaggacaagtacctgttctacagattcctggacgacgagcacgaggacgcccccctgcccaccgaggaggagaagaaggagtgcgacgaggagctgcaggacaccatgctgctgctgagccagatgggccccgacgcccacatgagaatgatcctgagaaagccccccggccagagaaccgtggacgacctggagatcatctacgaggagctgctgcacatcaaggccctgagccacctgagcaccaccgtgaagagagagctggccggcgtgctgatcttcgagagccacgccaagggcggcaccgtgctgttcaaccagggcgaggagggcaccagctggtacatcatcctgaagggcagcgtgaacgtggtgatctacggcaagggcgtggtgtgcaccctgcacgagggcgacgacttcggcaagctggccctggtgaacgacgcccccagagccgccagcatcgtgctgagagaggacaactgccacttcctgagagtggacaaggaggacttcaacagaatcctgagagacgtggaggccaacaccgtgagactgaaggagcacgaccaggacgtgctggtgctggagaaggtgcccgccggcaacagagccagcaaccagggcaacagccagccccagcagaagtacaccgtgatgagcggcacccccgagaagatcctggagcacttcctggagaccatcagactggaggccaccctgaacgaggccaccgacagcgtgctgaacgacttcatcatgatgcactgcgtgttcatgcccaacacccagctgtgccccgccctggtggcccactaccacgcccagcccagccagggcaccgagcaggagaagatggactacgccctgaacaacaagagaagagtgatcagactggtgctgcagtgggccgccatgtacggcgacctgctgcaggaggacgacgtgagcatggccttcctggaggagttctacgtgagcgtgagcgacgacgccagaatgatcgccgccctgaaggagcagctgcccgagctggagaagatcgtgaagcagatcagcgaggacgccaaggccccccagaagaagcacaaggtgctgctgcagcagttcaacaccggcgacgagagagcccagaagagacagcccatcagaggcagcgacgaggtgctgttcaaggtgtactgcatggaccacacctacaccaccatcagagtgcccgtggccaccagcgtgaaggaggtgatcagcgccgtggccgacaagctgggcagcggcgagggcctgatcatcgtgaagatgagcagcggcggcgagaaggtggtgctgaagcccaacgacgtgagcgtgttcaccaccctgaccatcaacggcagactgttcgcctgccccagagagcagttcgacagcctgacccccctgcccgagcaggagggccccaccgtgggcaccgtgggcaccttcgagctgatgagcagcaaggacctggcctaccagatgaccatctacgactgggagctgttcaactgcgtgcacgagctggagctgatctaccacaccttcggcagacacaacttcaagaagaccaccgccaacctggacctgttcctgagaagattcaacgagatccagttctgggtggtgaccgagatctgcctgtgcagccagctgagcaagagagtgcagctgctgaagaagttcatcaagatcgccgcccactgcaaggagtacaagaacctgaacagcttcttcgccatcgtgatgggcctgagcaacgtggccgtgagcagactggccctgacctgggagaagctgcccagcaagttcaagaagttctacgccgagttcgagagcctgatggaccccagcagaaaccacagagcctacagactgaccgtggccaagctggagccccccctgatccccttcatgcccctgctgatcaaggacatgaccttcacccacgagggcaacaagaccttcatcgacaacctggtgaacttcgagaagatgagaatgatcgccaacaccgccagaaccgtgagatactacagaagccagcccttcaaccccgacgccgcccaggccaacaagaaccaccaggacgtgagaagctacgtgagacagctgaacgtgatcgacaaccagagaaccctgagccagatgagccacagactggagcccagaagaccctag

SEQ ID NO: 40449 - DNA, 2604 bp, Artificial Sequence
  derived and/or modified sequence
atgttgtacaaaaagtaccgtcaatacatggccgggttattggccccgccttatggcgtgatggagaccggatcgaataatgacagaatacccgataaagagaatacaccgttgatcgaaccacacgtccctttgcgacctgccaacacaataacaaaagtacctagcgagaagatactacgggccggcaaaatcctgagaaacgcgattctgtcacgcgcaccccacatgatccgcgacaggaaatatcaccttaaaacatatcggcagtgctgcgtcggcactgaattagtagactggatgatgcagcagaccccctgcgtgcattcccgaactcaggccgtcgggatgtggcaagttctgctggaggacggtgtactgaatcatgtggaccaagagcatcactttcaggataagtaccttttttaccgatttttggacgatgagcacgaagatgctcctctacccacagaagaagaaaaaaaagagtgcgatgaagagttgcaggacaccatgctgcttctctcgcagatggggccggacgcccatatgaggatgatcttgcggaagccgccagggcagagaactgtcgatgacctggagatcatttacgaagagctcctccacataaaagcgctgtcccatctgagcacgactgtgaagcgggagcttgcaggcgtgcttatcttcgaatcccacgcgaagggtggtaccgttctcttcaaccagggcgaagagggaaccagctggtacatcatacttaagggctctgttaacgtagttatctatggcaagggggtcgtgtgcacattacacgagggtgacgactttggaaaactcgccctggtgaatgacgctcctagagctgcaagcattgtgctgagggaggataattgccattttctgagagtggataaagaggactttaatcggattttgagagacgtggaagctaacactgtacgacttaaagaacacgaccaggacgttcttgtgctggaaaaagttcccgctggcaaccgcgcaagcaaccagggtaatagtcagccgcagcagaagtatactgtcatgagtggaacccccgaaaaaatcctggagcacttcctggagactatacggctcgaagccacactcaacgaggcgactgactctgtgctgaatgacttcatcatgatgcactgcgtttttatgccaaacacccagctatgccctgccttggtagcccactatcacgcccagccttcccagggaacagagcaggagaagatggactacgcattgaacaacaaaagacgcgtcatcaggctggttttacagtgggccgcaatgtacggcgacttactgcaggaagacgacgtgtccatggcctttttagaggagttctacgtcagtgtgtccgatgatgcacgtatgattgcagccctaaaagaacagttgccagagctcgagaaaatcgttaagcagatttccgaagacgccaaagcaccgcagaaaaagcacaaggtgcttctgcagcagttcaacaccggcgacgagcgcgcccagaaacgccagccaatcagaggcagcgatgaagttctattcaaagtttattgtatggatcatacatacacgactattcgggtgccagtcgccacatctgtcaaggaagtgatcagcgccgttgcggataagcttggaagcggggagggacttataatcgtgaagatgtcgagcggcggagagaaggtggttctgaaacccaacgacgtgtcagtgtttaccacccttacaatcaacgggcggctctttgcctgtcctagggaacagttcgattctctaaccccccttcccgagcaggaaggtcccactgtaggtacagtgggcacattcgaactcatgtcttctaaggacctggcgtatcaaatgacaatttacgactgggaactatttaattgcgtacatgagttggaactgatttatcatacatttgggagacacaactttaaaaagacgaccgccaatctcgacctgttcctgagaaggttcaatgaaatacagttctgggtggttaccgaaatttgtctgtgttcccagctgtccaaaagagtgcaactcctgaagaaatttattaaaattgcagcacactgcaaagagtacaaaaacttgaactcatttttcgctatcgtcatggggttaagtaacgtggcagtcagcagactcgcgttaacgtgggagaaactgccaagcaagtttaaaaaattttacgcagagttcgagtccctcatggatcctagcaggaaccacagagcatacagacttaccgtcgctaagttagaaccacccctgatcccctttatgcctctgttgatcaaagacatgacttttactcatgaaggtaacaaaacatttattgacaacctagtaaactttgagaagatgcggatgatagcgaacacggcccgcaccgtgcgatattatcggtcacagccctttaatcctgacgctgctcaggcaaataaaaaccaccaggacgtgcgatcctatgtgcgacaattaaatgtcatcgacaatcagcgcaccctgtcacagatgtctcaccgattggaacctcgacgaccttag

SEQ ID NO: 40450 - DNA, 2604 bp, Artificial Sequence
  derived and/or modified sequence
atgctgtacaagaagtaccggcagtacatggccggcctgctggccccaccctacggcgtgatggagaccggcagcaacaatgaccgcatcccagacaaggagaacacccccctgattgagccccacgtgcccctgcggcctgccaacaccatcaccaaggtgcccagcgagaagatcctgcgggccggcaagatcctgagaaatgccatcctgagccgggccccccacatgatccgggacaggaagtaccacctgaagacctaccggcagtgctgcgtgggcacagagctggtggactggatgatgcagcagaccccctgtgtgcacagcaggacccaggccgtgggcatgtggcaggtgctgctggaggatggagtgctgaaccacgtggaccaggagcaccacttccaggacaagtacctgttctaccgcttcctggatgatgaacatgaagatgcccccctgcccacagaggaggagaagaaggaatgtgatgaggagctgcaggacaccatgctgctgctgagccagatgggcccagatgcccacatgaggatgatcctgaggaagcccccaggccagaggacagtggatgacctggagatcatctatgaggagctgctgcacatcaaggccctgagccacctgagcaccaccgtgaagcgggagctggccggcgtgctgatctttgagagccacgccaagggcggcaccgtgctcttcaaccagggcgaggagggcacctcctggtacatcatcctgaagggctctgtgaatgtggtgatctatggaaaaggagtggtgtgcaccctgcacgagggagatgactttgggaagctggccctggtgaatgatgcccccagggctgccagcatcgtgctgcgggaggacaactgccacttcctgcgggtggacaaggaggacttcaaccgcatcctgagagatgtggaggccaacacagtgcggctgaaggagcatgaccaggatgtgctggtgctggagaaggtgcctgctggcaacagagccagcaaccagggcaacagccagccccagcagaagtacacagtgatgagcggcaccccagagaagatcctggagcacttcctggagaccatccggctggaggccaccctgaatgaggccacagacagcgtgctgaatgacttcatcatgatgcactgtgtgttcatgcccaacacccagctgtgcccagccctggtggcccactaccacgcccagcccagccagggcacagagcaggagaagatggactatgccctgaacaacaagagaagagtcatccggctggtgctgcagtgggccgccatgtacggggacctgctgcaggaggatgatgtgtccatggccttcctggaggagttctacgtgtctgtgtctgatgatgccaggatgattgctgccctgaaggagcagctgcctgagctggagaagatcgtgaagcagatcagtgaagatgccaaggccccccagaagaagcacaaggtgctgctgcagcagttcaacacaggagatgagcgggcccagaagaggcagcccatccggggcagtgatgaggtgctcttcaaggtgtactgcatggaccacacctacaccaccatccgggtgcctgtggccacctctgtgaaggaggtgatctctgctgtggccgacaagctgggcagcggggagggcctcatcatcgtgaagatgagcagcggcggggagaaggtggtgctgaagcccaatgatgtgtctgtgttcaccaccctgaccatcaatggccgcctgtttgcctgcccccgggagcagtttgacagcctgacccccctgcctgagcaggagggccccaccgtgggcaccgtgggcacctttgagctgatgagcagcaaggacctggcctaccagatgaccatctatgactgggagctgttcaactgtgtgcatgagctggagctgatctaccacaccttcggccgccacaacttcaagaagaccacagccaacctggacctcttcctgcggcgcttcaatgagatccagttctgggtggtgacagagatctgcctgtgcagccagctgagcaagagggtgcagctgctgaagaagttcatcaagattgctgcccactgcaaggagtacaagaacctgaacagcttctttgccatcgtgatgggcctgagcaatgtggccgtgtcccggctggccctgacctgggagaagctgcccagcaagttcaagaagttctacgccgagtttgagagcctgatggaccccagcaggaaccaccgggcctaccgcctgactgtggccaagctggagcccccactcatccccttcatgcccctgctgatcaaggacatgaccttcacccatgagggcaacaagaccttcatcgacaacctggtgaactttgagaagatgaggatgattgccaacacagccaggacagtgcgctactaccgcagccagcccttcaacccagatgctgcccaggccaacaagaaccaccaggatgtgcgctcctatgtgcggcagctgaatgtgattgacaaccagaggaccctgagccagatgagccaccggctggagccccggcggccctag

SEQ ID NO: 40451 - DNA, 2604 bp, Artificial Sequence
  derived and/or modified sequence
atgctgtacaagaagtaccggcagtacatggccggcctgctggccccaccctacggggtgatggagacagggtcaaataacgaccgtatacccgataaggaaaacacccccctgatcgaaccccacgtgccactgcgccccgccaatactatcaccaaggttcctagtgaaaaaatactgagggcggggaagatccttcggaacgcaattttatcccgcgccccccacatgatccgggacaggaaatatcaccttaaaacctataggcagtgttgtgtggggacagagttagtggattggatgatgcagcagaccccctgtgtgcattctcggacacaagctgttgggatgtggcaggtgttgttagaagatggcgtactgaatcatgtggatcaggagcaccactttcaggacaagtatttgttctacaggttcctggatgatgaacacgaggatgccccactgccaacggaggaggaaaagaaggagtgtgacgaagaactccaagacaccatgctcctgctctcacagatgggcccggatgctcacatgagaatgattcttcggaaaccgcccgggcagagaacagtggatgatctggagattatctatgaagagcttctacacatcaaggctctaagtcacttgtccacaaccgtgaaacgcgagttggccggcgtcctgatctttgaatcacatgccaagggagggactgtactcttcaaccagggagaagaggggacaagctggtatatcatattaaaaggcagtgtcaacgtagtaatctatgggaaaggtgtggtgtgcaccctgcatgaaggcgatgactttggaaagttggctcttgtgaatgacgcaccccgggcggcaagcattgtgctacgagaggacaattgccacttcttaagagtagacaaggaggactttaacaggatcctgagggatgtggaggctaacaccgtgcgactgaaggagcatgatcaggacgtcctggtcctggaaaaagtgcctgccggcaatagggcctcgaatcagggcaactctcaacctcaacagaagtacacagtaatgtctggaacgccagagaagatcctggaacatttcctagagactattagactggaggccactctgaatgaagctaccgacagtgtcttgaacgatttcataatgatgcactgtgtgtttatgcccaatacacagctatgtccagccctcgtggctcactaccacgctcagccgagccagggcacagaacaggaaaagatggactacgcccttaacaacaaacgacgagtgattaggctggtactacaatgggctgccatgtacggggacctgctgcaagaagacgatgtgagtatggcatttcttgaggagttttatgtctcagtgtctgatgacgcccgcatgatcgccgctctcaaagaacaacttcccgagctggagaagatcgtaaagcagatttccgaagatgccaaagcgccacagaagaaacacaaggtactgttacagcagttcaacactggcgacgagagagctcagaaaaggcagcctatacggggttctgatgaggttcttttcaaggtctactgtatggatcatacctacaccacaatacgagtgcctgtggcaacttctgttaaggaggtgatctctgccgtggctgataaactagggagcggtgaaggactgatcatcgtgaaaatgagctccggcggcgaaaaggtcgtactgaagccaaacgatgtctccgttttcactaccctgacaatcaacggcaggctcttcgcatgcccccgagagcagttcgactcgctgacccctttacccgagcaagaaggcccaacggttggcacagtgggcacttttgagctgatgtctagtaaagatctggcttaccagatgaccatctatgactgggagctcttcaactgcgtgcacgagctagaacttatataccataccttcggacgccataactttaaaaaaactaccgccaacctagatctctttctgcggagattcaatgagatccagttctgggtcgtgacagaaatctgtctatgttcccaactttcaaagagggtccagctcctgaagaaattcattaagattgctgcccactgtaaggagtacaagaacctgaattccttcttcgctattgtgatgggactttcaaatgtagcagtgtctcggttggccctcacctgggagaaacttccaagcaaatttaaaaagttctatgctgaattcgagtctctgatggatccatcccggaatcatcgtgcctataggctaactgttgctaagttggagccccccctgatcccatttatgccgttactcattaaggatatgacattcactcacgaaggaaacaaaacttttatagataacttggtaaattttgagaaaatgaggatgatcgctaacactgccagaacagtccggtactaccgatcacagccatttaatccagacgccgctcaggccaataaaaatcatcaggacgtgcgctcttacgtgcgtcaactgaacgtgatagataatcagcgaacgctgtctcagatgtctcacagactggagccacgcaggccgtag

SEQ ID NO: 40452 - DNA, 2604 bp, Artificial Sequence
  derived and/or modified sequence
atgttgtacaagaagtacaggcaatacatggcaggactcctcgcacccccatacggggtaatggaaaccggctcaaacaacgatagaattcctgacaaagagaacacaccactgattgaaccacacgttcctcttcggcctgctaataccattacgaaggtgccctccgaaaaaatcctgcgggcagggaagatcctgcgcaacgccatcctgtccagggctccacatatgattagagatcgaaaataccacctgaagacctatcggcaatgttgtgttggcaccgaactggtggactggatgatgcagcagactccttgcgtgcactcccgcacccaggctgtcgggatgtggcaggttctactcgaagacggggtcctgaaccatgtggatcaggaacaccatttccaggacaaatatctcttttatcgttttctggatgatgaacacgaggatgccccactgcctaccgaggaggaaaagaaagaatgcgacgaggaacttcaggacaccatgctactgctgtctcagatgggccctgatgctcatatgcgaatgattcttaggaaaccaccaggacagcggactgtggacgatttagagatcatttacgaagaactccttcacatcaaggcactgtcacaccttagtaccacagtgaagagggagctggctggcgtcctgatattcgaatcacacgccaaaggaggcacagtcctgttcaatcagggcgaggagggtaccagctggtacatcattctcaagggcagcgtgaacgtggtgatctatgggaaaggagtcgtctgtactctccatgaaggggatgacttcgggaagctggctttggtgaatgatgcgcctagggccgcaagtatagtgcttcgagaggataactgtcattttctccgcgtggacaaggaggacttcaaccggatactgcgtgacgttgaggccaacacggtgcgcctgaaggaacatgaccaggatgtccttgtcttggagaaagtgccagccggtaatcgcgcatccaaccagggcaattctcagcctcagcaaaagtataccgttatgtctggcaccccagaaaagatccttgagcacttcttggagaccattaggctggaggctacgctgaacgaagctactgattctgtgctgaatgactttatcatgatgcactgcgtgttcatgccaaacacccagctctgccccgctttggtggcacactaccacgcccagcctagccagggaactgaacaagagaagatggattacgctttaaataacaaacggcgagtgatacgcctggtgttacaatgggctgcaatgtatggcgacctgctgcaggaggatgatgtttccatggcctttctcgaggaattttacgtgtccgtcagcgacgacgccagaatgatcgcagccttaaaagaacaactccccgaactcgagaagattgtgaaacaaatctcggaagatgcgaaggcccctcagaaaaaacacaaggtgctgcttcagcaattcaatacaggagacgagagggctcagaagagacagccaatcagagggtccgacgaagtgctgtttaaagtatactgtatggaccatacctataccaccatacgcgtccccgtggccacctcagtgaaggaagtaatcagtgctgtcgctgataagctcggatccggagaagggctcattatcgtcaaaatgtcttccggcggtgagaaggttgtgctgaaacccaatgacgtgtctgtctttacaacattaacaattaacggtaggctattcgcatgtcccagggagcagtttgattctttgacccctttacccgagcaagaagggcctaccgtggggactgttggcacgtttgagctgatgtcctcgaaggacctggcctaccagatgacgatctacgattgggaattgttcaattgtgtgcacgagttggagctgatctatcacacttttggacgccacaactttaagaaaacgacagctaacttggacctatttcttcgccgttttaacgaaatccagttttgggtcgtaaccgagatctgcctctgcagtcaactgagtaagcgagtgcagctgctgaagaagttcatcaaaattgcagctcactgtaaggaatacaagaacctgaacagttttttcgccattgtcatggggctgtccaatgtagcggtcagtcgccttgcgctgacttgggaaaagctgccatcaaagttcaagaagttctacgcggagtttgagtctttgatggaccccagcagaaaccatcgcgcttataggctcacagtggccaagctcgagcctcccctcattcccttcatgcccctgttaatcaaagacatgactttcacacacgaggggaacaaaaccttcattgacaacctcgtcaattttgagaagatgcggatgattgccaatacagcaagaactgtgcgatactatcggtcacagcccttcaatcctgatgcagcccaggctaataagaaccaccaggacgtgaggtcgtatgttaggcagctgaacgtgatcgacaaccagcgtaccctttcacagatgtcccatcgactggagccccgtcgcccttag

SEQ ID NO: 40453 - DNA, 4120 bp, Artificial Sequence
  derived and/or modified sequence
acagttctgattcttttaaaccaagcggaagcctgcttcgatgacttggacttatgtctgcaccagggtctcattcctgtgtcttcaagcttttccatggagtggcaaaatgattcaaatccagaaaggaagggagtgaagttattaggagctaactaaagttaaaaaaaaaaaaaaaaaaaaaaaaggaagtgttttcttattgccttagactgcctgagctttcctggagaaccatcagcaccagtttcctttctgtggactgagagccactcagtagtagacacgaacagggaatgaacggcaatgaaggtacattttgctgatcaaataaaggatagatgctcactggatgtctgagaactttgagagaccgaaaaagaaggacgtatgctctacaagaaatatcgacagtatatggcaggacttctggctcctccttatggtgttatggaaacgggctctaacaatgacaggattcctgacaaggagaacacacctctcattgaacctcacgttcctcttcgtcctgctaacaccattaccaaggtcccttcagagaagatcctcagagctggaaaaattttacgaaatgccattctctctcgagcacctcacatgataagagatagaaaataccacctaaagacatacagacaatgctgtgtgggaactgaactggtggactggatgatgcagcagacaccatgtgttcactcccggactcaagctgttggcatgtggcaagtcctgttagaagatggtgttctcaaccacgtggaccaggagcaccatttccaagacaaatatttattctatcgatttctggatgatgagcacgaggatgcccctttgcctactgaggaggagaagaaggagtgtgatgaggagctccaggacaccatgctgctgctgtcacagatgggccccgacgcccacatgaggatgatccttcgcaaaccacctggccagaggactgtggatgacctagagattatctatgaggagcttcttcatattaaagccttatcccatctttctaccacagtgaaacgagagttagcaggtgttctcatttttgagtctcacgccaaaggagggactgtgttgtttaaccagggggaagaaggtacctcctggtacattattctaaaaggatcagtgaatgtagtcatttacggcaagggtgtggtctgcaccctgcatgaaggagatgacttcggcaagttagcactagtgaatgatgccccacgagctgcctctatcgtcttacgagaagataactgccatttcttaagagtagacaaggaggatttcaaccggatcctaagggacgtggaggcgaatacagtcagacttaaagaacatgaccaagatgtcttggtgctggagaaggtcccagcagggaacagagcttctaatcaaggaaactcacagcctcagcaaaagtatactgtgatgtcaggaacacctgaaaaaattttagagcattttctagaaacaatacgccttgaggcaactttaaatgaagcaacagattctgttttaaatgactttattatgatgcactgtgtttttatgccaaatacccagctttgcccggcactggtggcccactaccacgcacagccttcacaaggtacagaacaggagaaaatggattatgccctcaacaataagaggcgagtcatccgcctggttctacagtgggctgccatgtatggagacctcctgcaagaggatgacgtgtctatggccttcctggaggagttttatgtatctgtatcagatgatgcccggatgattgctgccctcaaggagcaactgccagagttggagaagattgtcaagcaaatctcagaagatgcaaaggcaccacaaaagaagcacaaggttcttttgcaacagttcaatacgggcgatgagagagcccagaagcgccagcctatccgcggctctgatgaagttctgtttaaggtctattgcatggaccacacctacacaaccattcgggtgccagtggccacttcggtgaaggaagtcatcagtgcagttgccgacaagctgggctccggggagggcctgatcatagtcaagatgagttccggaggagaaaaggtggtgctcaaacctaatgatgtttcagtatttacgacgctcaccattaatggacgcctgtttgcttgcccgcgagagcaattcgattcactgactcccttaccagaacaggaaggcccaactgttggaacagtgggaacttttgaactgatgagctccaaagatttagcataccagatgacaatttatgattgggaactcttcaactgcgtgcatgagctggagctaatctatcacacatttggaaggcataattttaaaaagaccacagcaaacttggatttgttcctgaggagatttaatgaaattcagttttgggtcgtcactgagatctgcctttgttctcagctcagcaagcgtgttcagctattaaaaaaatttattaagatagcagcccactgtaaggagtataaaaatctgaattccttttttgccatcgtcatgggactaagtaacgttgctgtgagccgcttggcactaacgtgggagaaactgccaagcaagttcaagaagttctatgcggagtttgaaagtttaatggacccttcaaggaaccacagggcctacaggctgacagtagctaagctggaacctcctctcatccccttcatgcctttgctcattaaagatatgacatttactcatgaggggaacaagacgttcattgacaatctagtaaactttgaaaaaatgcgcatgattgcaaatacggccagaacagtgagatactacaggagccaacccttcaatcctgatgcagctcaagctaataagaaccatcaggatgtccggagttatgtacggcaattaaatgtgattgacaaccagagaactttatcacagatgtcacacagattagagcctcgtcgaccatagacatttcaaatgcccaaagcaacagtttgtctccagtccacaatctttcaaaaatgccatttatgctactactgactgtattgccactagagaattctacaaaacaagcaaaaacacatcctgagacacctcagggctgcattcagcttaccagctacctagcaagagaaggaattatttgacatgcctaaagcttacacactctagcttaggaatccccagtttgtggctaccctgtttcatttccacttgtgccatcttctttgctgaagtgttgaataaggcccacgtgaagagtttggtagaaatagccttgtcaagagaactagcaagcccctgacatttttttctaagagtgtttatgggatgagatgtgctacaaatgggatagatttggataaaattttaactcaacatcttgatttggagcctggggtttcgggaaggtgttgaggaatctatagaagtccaaattataggttgtattcttccatcttcattgtcttacctctgaaggaatagaacctgaccacattattatgaaacattatggctgtttatgtaatttagggaggactggtctgtaatttctgaatgtatatagaataatatttatgtttacaatgtaacttttcaaaatttacaaatcaggattatatacataagaattccactaagaaatgccaagattcttaaatttgccagcgttaaagtagaaaataacatttcagaagagcacaatatgcataaaacatttttcaaaattgaaatattttcctgggcattaaaaacctttactattggctacaaatttattgtacctgatgaaaacatattttctggacttaaatgttattacaaatatcttaattttcagtaattgttttgcactttcaaagattgtaaatagttcattcaatcaatggtatggagttatttatttgctacataatagatactgtgccaaataattactttttatttattttatttagtacgtaattttgaagtacattttttcctgttttcacaattagactacatttaatgtgtaggaattgtatgtatgtatatcttctgtaaataacatctagtatcttcactaaatataattgtcgacaagaaa

SEQ ID NO: 40454 - protein, 715 aa, Artificial Sequence
  derived and/or modified sequence
MFGRKRSVSFGGFGWIDKTMLASLKVKKQELANSSDATLPDRPLSPPLTAPPTMKSSEFFEMLEKMQDDYIPYPSIDEVVEKGGPYPQVILPQFGGYWIEDPENVGTPTSLGSSICEEEEEDNLSPNTFGYKLECKGEARAYRRHFLGKDHLNFYCTGSSLGNLILSVKCEEAEGIEYLRVILRSKLKTVHERIPLAGLSKLPSVPQIAKAFCDDAVGLRFNPVLYPKASQMIVSYDEHEVNNTFKFGVIYQKARQTLEEELFGNNEESPAFKEFLDLLGDTITLQDFKGFRGGLDVTHGQTGVESVYTTFRDREIMFHVSTKLPFTDGDAQQLQRKRHIGNDIVAIIFQEENTPFVPDMIASNFLHAYIVVQVETPGTETPSYKVSVTAREDVPTFGPPLPSPPVFQKGPEFREFLLTKLTNAENACCKSDKFAKLEDRTRAALLDNLHDELHAHTQAMLGLGPEEDKFENGGHGGFLESFKRAIRVRSHSMETMVGGQKKSHSGGIPGSLSGGISHNSMEVTKTTFSPPVVAATVKNQSRSPIKRRSGLFPRLHTGSEGQGDSRARCDSTSSTPKTPDGGHSSQEIKSETSSNPSSPEICPNKEKPFMKLKENGRAISRSSSSTSSVSSTAGEGEAMEEGDSGGSQPSTTSPFKQEVFVYSPSPSSESPSLGAAATPIIMSRSPTDAKSRNSPRSNLKFRFDKLSHASSGAGH

SEQ ID NO: 40455 - DNA, 2148 bp, Artificial Sequence
  derived and/or modified sequence
atgttcggcagaaagagaagcgtgagcttcggcggcttcggctggatcgacaagaccatgctggccagcctgaaggtgaagaagcaggagctggccaacagcagcgacgccaccctgcccgacagacccctgagcccccccctgaccgccccccccaccatgaagagcagcgagttcttcgagatgctggagaagatgcaggacgactacatcccctaccccagcatcgacgaggtggtggagaagggcggcccctacccccaggtgatcctgccccagttcggcggctactggatcgaggaccccgagaacgtgggcacccccaccagcctgggcagcagcatctgcgaggaggaggaggaggacaacctgagccccaacaccttcggctacaagctggagtgcaagggcgaggccagagcctacagaagacacttcctgggcaaggaccacctgaacttctactgcaccggcagcagcctgggcaacctgatcctgagcgtgaagtgcgaggaggccgagggcatcgagtacctgagagtgatcctgagaagcaagctgaagaccgtgcacgagagaatccccctggccggcctgagcaagctgcccagcgtgccccagatcgccaaggccttctgcgacgacgccgtgggcctgagattcaaccccgtgctgtaccccaaggccagccagatgatcgtgagctacgacgagcacgaggtgaacaacaccttcaagttcggcgtgatctaccagaaggccagacagaccctggaggaggagctgttcggcaacaacgaggagagccccgccttcaaggagttcctggacctgctgggcgacaccatcaccctgcaggacttcaagggcttcagaggcggcctggacgtgacccacggccagaccggcgtggagagcgtgtacaccaccttcagagacagagagatcatgttccacgtgagcaccaagctgcccttcaccgacggcgacgcccagcagctgcagagaaagagacacatcggcaacgacatcgtggccatcatcttccaggaggagaacacccccttcgtgcccgacatgatcgccagcaacttcctgcacgcctacatcgtggtgcaggtggagacccccggcaccgagacccccagctacaaggtgagcgtgaccgccagagaggacgtgcccaccttcggcccccccctgcccagcccccccgtgttccagaagggccccgagttcagagagttcctgctgaccaagctgaccaacgccgagaacgcctgctgcaagagcgacaagttcgccaagctggaggacagaaccagagccgccctgctggacaacctgcacgacgagctgcacgcccacacccaggccatgctgggcctgggccccgaggaggacaagttcgagaacggcggccacggcggcttcctggagagcttcaagagagccatcagagtgagaagccacagcatggagaccatggtgggcggccagaagaagagccacagcggcggcatccccggcagcctgagcggcggcatcagccacaacagcatggaggtgaccaagaccaccttcagcccccccgtggtggccgccaccgtgaagaaccagagcagaagccccatcaagagaagaagcggcctgttccccagactgcacaccggcagcgagggccagggcgacagcagagccagatgcgacagcaccagcagcacccccaagacccccgacggcggccacagcagccaggagatcaagagcgagaccagcagcaaccccagcagccccgagatctgccccaacaaggagaagcccttcatgaagctgaaggagaacggcagagccatcagcagaagcagcagcagcaccagcagcgtgagcagcaccgccggcgagggcgaggccatggaggagggcgacagcggcggcagccagcccagcaccaccagccccttcaagcaggaggtgttcgtgtacagccccagccccagcagcgagagccccagcctgggcgccgccgccacccccatcatcatgagcagaagccccaccgacgccaagagcagaaacagccccagaagcaacctgaagttcagattcgacaagctgagccacgccagcagcggcgccggccactag

SEQ ID NO: 40456 - DNA, 2148 bp, Artificial Sequence
  derived and/or modified sequence
atgtttgggagaaagaggtccgtgtccttcgggggattcggatggattgacaagacaatgctggcctccctgaaagtgaagaagcaggagttggccaacagctctgatgctacccttcctgatcgccccttaagcccccccctgactgccccacccacgatgaaaagctcggagttcttcgagatgctcgagaagatgcaggatgactacatcccatacccaagtatcgacgaggtcgtagagaaaggtgggccttacccccaggtcattctcccccaattcggcgggtattggattgaggatccggaaaacgtgggaacccctacatcactcgggtcttcaatctgcgaagaggaggaagaggacaacctgagccctaatacatttggctacaaactcgagtgcaaaggcgaggccagggcatataggcggcacttcctgggcaaggatcacttaaacttctactgtacagggtctagtctcgggaacctgattcttagcgtgaaatgcgaggaggccgaaggcatagagtatctgagagtgattttgcggtccaagctgaagactgttcatgaacggattccccttgcggggttgtctaaactgccatctgtcccacagatcgcaaaggccttctgtgatgatgccgttggtctaaggtttaatccagtcctgtatcctaaagcatcacagatgatcgtgtcatacgacgagcatgaggtgaacaacactttcaaatttggcgtgatctaccagaaggcccgccaaaccctggaagaagagctcttcggcaacaatgaggaatccccagctttcaaggagtttttggacctcttgggcgacaccatcacattgcaggattttaaagggtttaggggaggattggacgtgacacacggtcagactggagttgaaagtgtctacactaccttccgagaccgggaaatcatgttccacgtgagtactaagctcccctttaccgacggcgacgcacagcagctgcagaggaagcggcatatcggcaacgatatcgtcgctatcatcttccaggaagagaatacacccttcgttcccgacatgatcgcatccaactttctgcatgcatacatcgtggtgcaggttgagactcccggcacagaaacaccttcatataaagtctcagtcaccgcaagggaagacgtacccacattcggccctccactgccctctcccccagtcttccaaaagggacctgaatttcgggagtttctcctcactaagttgaccaatgcggagaatgcttgctgcaagtcggataagtttgctaagctcgaggacaggaccagggcagctctgctggataacctgcacgatgaactgcacgctcatacccaggccatgctgggattgggccctgaagaggacaagttcgagaatggcggccatggggggttcctggaatctttcaagagggctatcagggtccgatcacacagtatggaaaccatggtgggtggacagaaaaagtcccatagcggtggaatccctggttcactgtcaggaggaatttcccataactctatggaggtaaccaaaactacattcagcccaccagttgtggccgctacagtgaaaaatcagagcagaagccctattaagaggcggtcagggctgttcccacggctccacacaggatccgagggacagggcgattcacgcgctaggtgcgatagcaccagctccacacctaagaccccagatggcggacattccagccaggaaattaaaagcgagacgagctcaaatccaagcagtccagagatctgccctaacaaagagaaaccatttatgaaattaaaggaaaacggacgcgctatttctaggtcatcctcctcaacttcatcagtgtcgagtactgccggcgagggagaagctatggaagagggggatagtgggggctcgcaaccctccaccacaagcccgtttaaacaagaggtgtttgtgtattccccttcaccatcttcagagtcccctagtctgggagctgctgccacacccatcattatgagccggtcccctacagacgctaaatcacgaaatagtccacgttctaatcttaagttccgtttcgataaactctctcatgcatcgagcggcgcgggccattag

SEQ ID NO: 40457 - DNA, 6617 bp, Artificial Sequence
  derived and/or modified sequence
actgaccccgctgtaccacggccctcttgcggacagccccggggacgtcgttgggacatcgctgggaccccgggctctgcagccacaaccatgtttggccggaagcgcagtgtctcctttgggggcttcggatggatcgacaagaccatgctggcaagtctgaaggtcaagaagcaggagctggccaacagctcggatgcgaccctcccagaccggccgctctcccctcctctcacggcacctcccaccatgaagtcgtcggagttctttgagatgctggagaaaatgcaggacgactatatcccataccccagcatcgacgaggttgtggagaagggaggcccgtaccctcaggtcatcctgccacagtttgggggctattggatcgaggacccggagaacgtgggcaccccaacatcgctggggagcagcatctgtgaggaggaggaagaggacaacctcagccccaacacatttggctacaagctcgagtgcaagggtgaagccagggcctaccggaggcacttcctggggaaggatcatctaaacttttactgtaccggcagcagcctggggaacttgatcctgtccgtcaagtgcgaggaagcagaggggatcgagtacctccgggtcatccttaggtccaaactgaagacggtacatgagcggatccccttggctggactgagcaagcttcccagtgtccctcagattgcaaaggctttctgtgatgatgcagtgggactgagattcaatcctgtcctgtaccccaaggcctcccaaatgattgtgtcctatgatgagcatgaagtcaacaacacattcaaattcggagtcatttatcaaaaagccaggcagaccctggaggaggagctatttgggaacaatgaggagagcccagcttttaaggagttcttggacctgctgggggacacgatcacactgcaggatttcaaaggtttccgaggaggcctggacgtgacccacggacagacaggggtggaatcagtgtacacaacattccgggacagggagatcatgtttcacgtttccacaaagctgccatttaccgacggagacgcccagcagctccagagaaagagacacattggaaatgacatcgtggccatcatcttccaagaggaaaacacgccgtttgtcccagacatgatagcctccaatttcttacatgcctacatcgtcgtgcaggtcgagaccccaggcacagagaccccatcctacaaggtctctgtcactgcgcgggaagatgtgcccacctttggtccacctctgcccagtccccccgttttccagaagggcccggaattcagggagtttctgctcaccaagctcaccaatgccgagaacgcctgctgcaagtcggacaagtttgcaaagctggaggaccggaccagggctgccctcctggacaaccttcacgatgagctccacgcccacacacaggccatgctgggactgggcccagaggaggacaagtttgagaatggaggccacggggggttcctggagtcttttaagagggccatccgcgtacgcagccactccatggagaccatggtgggcggccagaagaagtcgcacagtgggggcatccctggcagcctcagcgggggcatctcccacaacagcatggaggtcaccaagaccaccttctcgcctccagtggtggcggcaacggtgaagaaccagtcacggagtcccatcaagcgacgctcggggctcttcccccgcctgcacacgggctcagaaggccagggcgacagccgggcacgatgtgacagcacatccagcacacccaagaccccagatggtggacactcctctcaggagataaagtctgagacctcatccaatcccagctctccggaaatctgccccaacaaggagaagcccttcatgaagttgaaggaaaacggccgtgccatctcccgctcctcctccagcaccagcagcgtcagcagcactgcaggggagggcgaggccatggaggagggcgacagtgggggcagccagccgtccacgacctcacccttcaagcaggaggtgtttgtctacagcccgtccccgagcagcgagagccccagcctgggggcagctgccaccccgatcatcatgagccggagtcccacagatgccaaaagcagaaactccccgagatcgaacctgaaattccgctttgacaagctcagccatgccagctctggtgcgggtcactaatgtgaaagtggagtccttcgcctgtccaagggaatcccctcttctgtcctggaaaaggctcctgtaccagcagtttgggagtgccgtccacgaccctgacagtcccagccctgctgccccatggccacgtgcccacagatgtgctgttggtccaggtgtcccagtctggccacagccctgcctccgccctcacctacatgccctcccagcccctcccatctctggacgaggcctccttcctcaggttcctcctgctcctgacctcccagtgtgatgtccgggtcctttatcatcctattcatcctggagaggaaaagtgtcgggcaaagggggatctggggggagctcagcagtgactggggagctggtctgcctcagagacagagtagggggtgggagcagagcctcggtgagggtcttggccacagggcagtgccttcctgaacgtggcaggctttactaccaggaacgcactcggtggtggaggccccatgttcccaggagccaagattcgtagcatccttgaggccatcctgataaaattcggcgctattgcccccgtagctctggagctctaaaccgtctatctgcttctgtgctgaacgcctttcccatctgctgacgtaggcccagggctgccctgcccctgctgccagtgtaccgtgagcggggctccagccagttcaagctcagagccagagctggacgggccagaactgcgctgcacacttcctggactgaggcggggactttgggtcccacccggtttctcctgattatggctgctgtggggtgaggggagggaggggcagccccgaggcagtctcttccctttgagaagatattttcccacaaaggggtgggaagccaggagtgagaaggaattcagggagagcaaaggagccagtgctgagatgctgctgtgttggttgaggaaaacctcgggcctgagggccaggccggagcccaggtctctgctgacaatgggggttcaaggaagacgtcgttatctcccctccccacttactcgaggagagaggtgagggggggatgacttgcgggttctgatcaggcccctgggtggggaaggggcacagtgtccctcagcagcttacgcccctggagtcttggggggcccagcctggccctggggccttttccagctactgtgcccttgggcagctgcgtctggggctcaaccccccaatcctgttcccctctccagctgcgggtctgtaggcagctgtcacatctgaagggtttctgcaacctggaccccatctgggtgtgggtcagaccctgtgacccacatgccacccccaccctccacagagcccccttgctgggacagccagctcacctccaaggacatcccctcctggcttctcccccttccgagtctgcagcgccgtgggcttctctgccgatgggcccgggttggggttaaggtgggcatcctccaggtacaacgagcctgaagagcccctttcagtgcagacggggctgcagagtgacactggctgggcacctgccccacgaccaatgacaaggatttccagctgaatgctttattcccatagggatctggacctgtgcccaagatataaatactacactttttttttttttttttaactgacattgtgaaattctccctatagcttttgccattcaagcaacattgtgatctttcttccccgccacgtgtgtgggaatgattgagtcctgtttgcaagctggagaggagctctccctttgctagtactttctctaaagtactagtctagtaaaatttattcttgttagaaggtcaacaaaatatctgtttagcttttatgaagagtcaccgtagcagcccccacggctggaaagaggcctgtacgttctggacgcgttttgttggctgggcttctggaggcactggcaaggtcaaactgcatttctttaagaacagttgcaggatctggctcgcctctgtgggaagccggcattacaggtgcttggtggatgggccgtgtcacattgccatctggggtcctttggggtttccaggttgtcaccatgctgtcccatttgggaatcccatacctgcctgtccccactgcgctggctgacccttgctgcctgctgcctcttgggagggctttgtccctgcctctgagctggtgggcaggatggctgggtggcccccagagaagcacagacctgagatggggtctccatgcccggtttgctgttggaatgatctgaacaggaccccaaatgcctcttccctctggtcatgcctcactatctctaggagctccatcctgtggcttccagagtgtgcacttccagcccacccgggcagtgctgagagggaggaggagaacaaggatggcccagcctcccctccctcccctagaccacggggcgggcagctcgggttcctggagggctgtttcccccacgctgtccctacatctgctctgatctaaaatgtctttccttttatgctgcgcccagtcttggggctcaaagatttgcccaaacctcattggccctcgtgactaggctcatctagatggtgctcacgctggtgtttgaggcatttccactgtgatctccacgaggggatgttttccgggacacatctctggctctgggaactgcctgactcactgaagaaactacttttcaggcactgtagggtcacccatatgcctccagctcagttgacgcttaaaaacaggtgcagaaaagctcgcgatggaaggtcttaatgagagtgtctgtctatgccaatcatgtaaaatgacgtttcttgaaaaagattcagtggttcagctttgtcagcatcatctcaacacaagcctgctggctctttttagcatctcatccaaccatgtcatcgtccagatgagaaatcttagcccaggtgaggggagtaacttgcttgaggtcacacagctggctgttggcaaagctgggattagaaccctcaacccagggtcccttcctctgcagcgcctacatggttggttgaataagtggctgcgtttcctggggccctgggttttggggaagccagttagctgctgctttggcactggcatggaggtgagcagtcaaggatgctggtgaggctgcagtttctgctctttttcatcaggggggatagtctctaggatttttcagtgaggacccttgggctttggatgcagcttgaaccaagaaaacgaggagggaaagggattcagtgaactattcctcagtgggatcggttcttcagctcctgatgggggctgtgtaatgggggcagaggccagggaaaaagatgctgttcacccaccctcagcttcccttttcctaaattaagaggaaaagtggtcaaagaaaaactcttcatttctccctgattcttaaacgaaggtggttaatagaaactcaggctcccgtgacaaggcaggacaagagcctgtttcgctttcctccctgaccctgccaggtgccaactcaaacactacctttctcattggtttctaagtcagtagagacagatctgttttaagcagttgggggttcgagtagatctcatgggtacaggaggccagcagggaccaggccagtcagccatgctcaggacccctcggctcctcccccagcctctagctaccctgtatcgaggcaaggggaggccagtaaagtttgccaagcctgatcctgcagcctggtggggctggctggggtattcttttaccaaactctgttttaccgccagccccttgtacaccccaatcccatgtctccctcccttcagctggaccgtgtgcccctttgggaggaagaagacaagccccactagggccaagggcagcagagccctgccgagtgagaggctgtggggcagcggctctgtcctgtgccttaccagccctggggaggggggcatttggctggaagactggaatttaattgccatcgtctttgattttgtgacatttctgcttggaagtgtgaactacccccccccccccgcttcctgctccttagcatgcgtgcagctctctcctgttttgggtgttccccttggacactccagctcggggactgctggcgtgtgaatgtgcagattcccctgtgtggtcgaacctaagaactgtggcttggaagtgatgctccatgtgacgacgactttgctttctttcctcttagtgaggaggtgattcgtagatcccaactgcctatgtaatgtaaataatgtacatttaatttattgctatggtagcacattgtatttgttaatgtacaaaacaaattctaaaaggttgacaaatgtatattttgttgcttaaatgtgtctttgcagaaattgacaataaataacatattttgtgtcc

SEQ ID NO: 40458 - DNA, 2148 bp, Artificial Sequence
  derived and/or modified sequence
atgtttggaaggaagaggtctgtgtcctttggaggcttcggctggattgacaagaccatgctggccagcctgaaggtgaagaagcaggagctggccaacagcagtgatgccaccctgcctgaccggcccctgagcccccccctgacagccccacccaccatgaagagcagcgagttctttgagatgctggagaagatgcaggatgactacatcccctaccccagcattgatgaggtggtggagaagggcggcccctacccccaggtgatcctgccccagtttggaggctactggattgaggaccctgaaaatgtgggcacccccaccagcctgggcagcagcatctgtgaggaggaggaggaggacaacctgagccccaacaccttcggctacaagctggagtgcaagggggaggcccgggcctacagaagacacttcctgggcaaggaccacctgaacttctactgcaccggcagcagcctgggcaacctgatcctgtctgtgaagtgtgaggaggccgagggcatcgagtacctgcgggtcatcctgcggagcaagctgaagacagtgcatgagcgcatccccctggccggcctgagcaagctgcccagcgtgccccagatcgccaaggccttctgtgatgatgctgtgggcctgcgcttcaaccctgtgctgtaccccaaggccagccagatgattgtgtcctatgatgaacatgaggtgaacaacaccttcaagtttggagtcatctaccagaaggcccggcagaccctggaggaggagctgtttggaaataatgaggagagccctgccttcaaggagttcctggacctgctgggggacaccatcaccctgcaggacttcaagggcttccggggcggcctggatgtgacccacggccagacaggagtggagagcgtgtacaccaccttccgggaccgggagatcatgtttcatgtgtccaccaagctgcccttcacagatggagatgcccagcagctgcagaggaagaggcacatcggaaatgacatcgtggccatcatcttccaggaggagaacaccccatttgtgcctgacatgattgccagcaacttcctgcacgcctacatcgtggtgcaggtggagaccccaggcacagagacccccagctacaaggtgtctgtgacagcccgggaggatgtgcccacctttggaccacccctgcccagcccccctgtgttccagaagggccctgagttccgggagttcctgctgaccaagctgaccaatgcagaaaatgcctgctgcaagagtgacaagtttgccaagctggaggacaggaccagggctgccctgctggacaacctgcatgatgagctgcacgcccacacccaggccatgctgggcctgggccctgaggaggacaagtttgaaaatggaggccatggaggcttcctggagagcttcaagagggccatccgggtgcgcagccacagcatggagaccatggtgggcggccagaagaagagccacagcggcggcatccctggcagcctgagcggcggcatcagccacaacagcatggaggtgaccaagaccaccttcagcccccctgtggtggccgccaccgtgaagaaccagagccgcagccccatcaagagaagaagtggcctcttcccccggctgcacactggaagtgagggccagggcgacagccgggcccgctgtgacagcaccagcagcacccccaagaccccagatggcggccacagcagccaggagatcaagtctgagaccagcagcaaccccagcagccctgagatctgccccaacaaggagaagcccttcatgaagctgaaggaaaatggccgggccatcagccgcagcagcagcagcaccagctctgtgagcagcacagctggggagggggaggccatggaggagggggacagcggcggcagccagcccagcaccaccagccccttcaagcaggaggtgtttgtgtacagccccagccccagcagcgagagccccagcctgggcgccgccgccacccccatcatcatgagccgcagccccacagatgccaagagcaggaacagccccaggagcaacctgaagttccgctttgacaagctgagccacgccagcagtggagctggccactag

SEQ ID NO: 40459 - DNA, 2148 bp, Artificial Sequence
  derived and/or modified sequence
atgttcggccggaagcggagcgtgagcttcggcggcttcggctggattgataagactatgctagcatcgctcaaagtaaagaagcaggaactcgcaaacagttcggatgccaccctaccagatcgccctcttagcccaccattgacagcacctccaaccatgaagtcctcggagttcttcgagatgcttgagaaaatgcaagacgactacattccgtacccgtcaatagatgaagtggtcgagaagggtggcccatacccgcaggtgatcctgccccagttcggggggtattggatcgaagaccccgaaaacgtgggcacacctacatcgctgggatctagcatatgtgaggaggaggaggaggataacttgagccctaacaccttcggatacaaattggagtgtaaaggggaagcacgagcgtatagacggcatttcctgggaaaagaccacctcaacttctactgcaccggatcctcgttaggtaatctgatcctttccgtaaaatgcgaggaagccgagggcatcgagtatctgagggtgattctgcggtctaagctaaaaaccgttcatgagagaattccccttgccgggctgagtaagcttccatccgtgccacagattgccaaggctttctgcgacgatgctgtgggcctgcgatttaaccctgtgctgtatcccaaagcctcccaaatgatcgtgagctacgacgaacacgaagtcaacaatacgtttaagtttggtgttatatatcagaaggcccgacagactttggaagaagagctgtttggcaataatgaggaatcacctgctttcaaagaattccttgatctgttgggagatactattactctccaggattttaaggggtttcgcggcggcttagatgtgacacatggacaaaccggagtcgaaagtgtatacacaacatttagagacagggagattatgtttcatgtttccactaagctcccattcacagatggcgatgctcaacagctgcaacggaagcggcatataggtaacgacattgtggctatcatattccaggaagaaaacacaccattcgttcctgatatgatcgcctctaacttcctgcacgcttatattgtggtccaggttgagacccccggcacagagacgccttcctataaagtgtcagtcaccgcacgcgaagacgtgcctacatttggacctccactgccctcaccaccagtattccagaagggccctgaatttcgggaatttctgcttaccaaattaactaacgccgaaaacgcttgctgtaagtccgacaaatttgccaagctagaggatcggacacgagcggcactgctcgacaatctccacgatgaacttcatgcccatacacaagcaatgctggggctcggaccagaggaggacaagttcgaaaatggtggccacggcggattcctggaaagcttcaaacgggccatacgcgtgcggtctcactcgatggagacaatggtgggaggacagaaaaagtctcattccggaggcattccagggagtctcagtggcgggatctcacacaactccatggaggtgacaaagaccaccttttccccacctgtcgtcgccgctaccgtcaagaaccaatcaagatcacccatcaagaggcgatccggacttttccctaggctacacaccgggagtgaaggccagggggactctcgcgcccggtgtgacagcactagcagcactcctaaaactcctgatggtgggcattcgtctcaggagatcaaatccgagacatctagtaacccaagttctccagagatctgtcctaacaaagagaaaccctttatgaaactgaaagagaatggcagggctatctcccgctcttccagcagcactagttctgtatccagcactgctggtgagggtgaagcgatggaagaaggggactcaggaggcagccagccatcgacgacaagtccctttaagcaagaggtgttcgtctattcgcctagtccaagctctgagtccccatccctgggcgccgccgcgactcccattatcatgagccggtccccaacagacgcaaaatccagaaactcaccccgatccaatctcaaatttaggtttgataaactctctcatgcatcctcgggagctgggcattag

SEQ ID NO: 40460 - DNA, 2148 bp, Artificial Sequence
  derived and/or modified sequence
atgttcgggcgaaagagaagtgttagcttcggcggttttggctggatcgacaaaaccatgctagccagtctgaaggtgaagaaacaggagctcgctaacagttccgatgctacacttcctgacaggccattgtcaccaccactcacagctccgcctaccatgaaatcttcggagttttttgaaatgctcgagaagatgcaagatgactacattccgtacccatctattgatgaagtcgtggagaaaggtgggccttatccccaggtgatccttccccagttcggagggtactggattgaggacccagagaacgtaggtactcctacctcccttggatccagtatctgcgaggaagaggaggaggacaacctttcacctaatacatttggctacaagttagagtgcaaaggcgaggccagagcctatcgcagacatttcttgggcaaggatcatctgaacttttactgcacaggatccagtctgggcaacctgatactaagcgtgaaatgtgaggaggccgaaggcatagaatacctccgggtaattttacgaagtaaacttaaaacagtccatgaaagaatcccgttagccggtctcagcaagctgccctccgtgccccagatcgccaaagccttctgcgacgacgccgtcggtctacgcttcaatccagtgctctatcccaaagccagccaaatgatcgtctcctacgacgaacatgaggttaacaacacctttaaattcggggtgatctatcagaaagcacggcaaacattggaagaagaactgttcggaaacaatgaggaatccccggcattcaaggagttcctggacttgctgggcgatacaatcaccctccaggactttaaggggtttagaggcggattggacgtcacccatggccaaacgggtgtggagagcgtctataccacctttcgcgacagggagatcatgtttcatgtcagcacaaaattgcccttcaccgatggtgacgcccagcagctgcagaggaaaagacatattggcaacgacatagtcgctattatctttcaggaggagaacacccccttcgtgccagatatgatagcatcaaactttttacatgcatatatagtcgtgcaggttgaaacccccggtaccgagacaccgtcttataaggtttcggtcactgcccgagaggacgtgccaacattcggtccccctctgccttctcccccagtgtttcagaaagggcctgagtttagagagttcttgctgacaaagctgaccaacgccgagaacgcttgttgtaagtccgacaagtttgccaagcttgaggatagaaccagggccgcactgctggataacctgcacgatgaactccacgctcacactcaagcaatgcttggactggggccagaggaggataaattcgagaatggcggtcatggtggctttctcgagtctttcaagcgcgcaatccgggtacggtcccactcgatggaaaccatggtggggggtcaaaagaagtcccatagcgggggtattcccggtagtctgtcgggcggaatctcccataattctatggaagtgactaagactacgttctctccaccagtggtcgccgctacagttaaaaatcagagccgtagccctattaaaaggaggtcagggctttttcccagactgcataccggtagcgagggacaaggggactcccgcgctagatgcgactccacatcctctacccccaaaacacccgacggcggtcactccagtcaggaaattaaatctgaaaccagctctaacccaagttcaccagagatctgccccaataaggagaaaccttttatgaaactgaaagaaaatggacgcgctatctcccgatcttccagttcaacctcttccgtgtcttctaccgctggggaaggcgaagccatggaagaaggggactctggtggctctcaaccttccaccacatccccgtttaagcaggaagtgtttgtttactccccaagtccaagtagtgagagtccctcactgggggctgccgcaacgcctataataatgagccgctcaccgacagatgcaaagagcagaaattctccacggagtaatctgaagtttagatttgacaagttgtcccatgcgagctccggcgctggtcattag

SEQ ID NO: 40461 - protein, 1337 aa, Artificial Sequence
  derived and/or modified sequence
MDFTAQPKPATALCGVVSADGKIAYPPGVKEITDKITTDEMIKRLKMVVKTFMDMDQDSEDEKQQYLPLALHLASEFFLRNPNKDVRLLVACCLADIFRIYAPEAPYTSHDKLKDIFLFITRQLKGLEDTKSPQFNRYFYLLENLAWVKSYNICFELEDCNEIFIQLFRTLFSVINNSHNKKVQMHMLDLMSSIIMEGDGVTQELLDSILINLIPAHKNLNKQSFDLAKVLLKRTVQTIEACIANFFNQVLVLGRSSVSDLSEHVFDLIQELFAIDPHLLLSVMPQLEFKLKSNDGEERLAVVRLLAKLFGSKDSDLATQNRPLWQCFLGRFNDIHVPVRLESVKFASHCLMNHPDLAKDLTEYLKVRSHDPEEAIRHDVIVTIITAAKRDLALVNDQLLGFVRERTLDKRWRVRKEAMMGLAQLYKKYCLHGEAGKEAAEKVSWIKDKLLHIYYQNSIDDKLLVEKIFAQYLVPHNLETEERMKCLYYLYASLDPNAVKALNEMWKCQNMLRSHVRELLDLHKQPTSEANCSAMFGKLMTIAKNLPDPGKAQDFVKKFNQVLGDDEKLRSQLELLISPTCSCKQADICVREIARKLANPKQPTNPFLEMVKFLLERIAPVHIDSEAISALVKLMNKSIEGTADDEEEGVSPDTAIRSGLELLKVLSFTHPTSFHSAETYESLLQCLRMEDDKVAEAAIQIFRNTGHKIETDLPQIRSTLIPILHQKAKRGTPHQAKQAVHCIHAIFTNKEVQLAQIFEPLSRSLNADVPEQLITPLVSLGHISMLAPDQFASPMKSVVANFIVKDLLMNDRSTGEKNGKLWSPDEEVSPEVLAKVQAIKLLVRWLLGMKNNQSKSANSTLRLLSAMLVSEGDLTEQKRISKSDMSRLRLAAGSAIMKLAQEPCYHEIITPEQFQLCALVINDECYQVRQIFAQKLHKALVKLLLPLEYMAIFALCAKDPVKERRAHARQCLLKNISIRREYIKQNPMATEKLLSLLPEYVVPYMIHLLAHDPDFTRSQDVDQLRDIKECLWFMLEVLMTKNENNSHAFMKKMAENIKLTRDAQSPDESKTNEKLYTVCDVALCVINSKSALCNADSPKDPVLPMKFFTQPEKDFCNDKSYISEETRVLLLTGKPKPAGVLGAVNKPLSATGRKPYVRSTGTETGSNINVNSELNPSTGNRSREQSSEAAETGVSENEENPVRIISVTPVKNIDPVKNKEINSDQATQGNISSDRGKKRTVTAAGAENIQQKTDEKVDESGPPAPSKPRRGRRPKSESQGNATKNDDLNKPINKGRKRAAVGQESPGGLEAGNAKAPKLQDLAKKAAPAERQIDLQR

SEQ ID NO: 40462 - DNA, 4014 bp, Artificial Sequence
  derived and/or modified sequence
atggacttcaccgcccagcctaaaccagctactgctctgtgcggcgtggtctctgccgacgggaaaatcgcctatccacccggcgtcaaagaaattaccgataagataacaacagatgagatgattaagaggctgaaaatggtggtgaagacttttatggatatggatcaagatagcgaagatgagaagcaacaatatctgcccctcgctctgcatcttgcgtcggaattcttcctgagaaatccaaataaggacgtaagacttctcgtcgcatgctgcctggccgacatttttcgcatttacgctcctgaggcgccttacacttctcatgataagttaaaggacatattcctgttcattacccgccagctgaaaggcctcgaggacaccaaaagtccacagtttaatcgatacttttacctgttggagaacctagcatgggtgaagtcttacaacatctgctttgagctggaggattgcaatgaaattttcatccagctctttcgaacattgttcagcgtcattaataactcccataacaagaaggtgcaaatgcatatgctggatttgatgagcagcattattatggagggcgacggggtgacacaagagcttctggactcaattctcattaatctgatccctgcccacaagaacctcaataagcagtcatttgatctcgcgaaggtgctgctgaagcgcactgtacagacaattgaggcctgtatcgcaaatttctttaaccaggtgttggtgctcggacgctcaagcgtgagtgatctctcagaacacgtcttcgatttaattcaggagctctttgcaatcgaccctcatttactgctctcagtgatgccacagttagaattcaaactgaagagtaacgacggagaagagcggctggctgtggttagactgttagccaagttattcggcagcaaggacagcgacctggctacacaaaatcggcctctgtggcaatgtttcttgggacggttcaatgacatccatgtgcccgtccgactcgaatctgtgaagttcgcatcacattgccttatgaaccaccctgacctggcaaaggacctcactgagtatctgaaagtgagatctcacgaccccgaagaggcaatccggcacgatgtcatagtaaccatcatcacagccgccaagcgggatttagcgttggtgaatgatcagctactggggtttgtgcgcgagaggaccctggacaaacgatggagagttagaaaagaggccatgatgggcctcgcccagttatacaagaagtactgtctgcacggagaagcaggaaaggaggctgccgagaaggtatcatggattaaagataagttgttacacatatattaccagaattctatcgatgacaagctcctggtggaaaagatatttgcacaatacctggtcccccacaacctcgaaacggaggagcgtatgaagtgtctctactacctgtacgcatctctcgaccccaacgccgtcaaggccctaaatgagatgtggaaatgccagaacatgcttcgatcacatgtccgggagctgctggatcttcataaacagccgacatcagaggcaaactgctcagcaatgttcggaaaactgatgaccatagcaaagaatctgcccgatcccggaaaggcgcaggatttcgttaagaaattcaaccaggtcttgggcgatgatgagaagctgagaagccagctggagctcctaatctcccccacctgctcctgtaagcaagcggacatctgcgtgagggaaatcgcccgcaagctagcaaacccgaaacaaccaaccaacccattcctcgaaatggtcaaattcctgctcgaaagaatcgcaccagtgcacatcgattctgaggcaatttctgctttagttaagctcatgaacaaaagtatcgaaggcactgctgacgacgaggaagagggcgttagccccgatactgcgatccggtctggcttggagttgctgaaagtactgtcttttacgcatcccacctcctttcactccgctgaaacttatgaatcacttctgcagtgcctgcggatggaggacgacaaagtggccgaagcggcaattcaaatatttcgcaataccggccacaaaattgagaccgacttgcctcagattcgatcaacactgatcccaatcctgcaccagaaggcaaaacggggtacccctcaccaggcaaagcaggcggtgcactgtattcatgccatctttaccaacaaagaagttcagcttgcacaaatctttgaaccgctttcacgctcactgaacgcggacgtacctgaacagcttatcacacccttggtgtctctgggccatatcagtatgttagccccagaccaatttgccagcccaatgaagagcgtggttgcaaattttatcgttaaagatctgctcatgaacgacagaagtaccggtgaaaagaatggcaaactatggagccctgacgaagaggtctctcctgaagtcctggcaaaggtccaggcaataaagcttttggtgaggtggctccttggtatgaagaacaaccaatcaaagagcgccaattccaccctgaggcttctgtccgcgatgttggtatccgaaggcgacttgacagaacagaagaggatctccaaatcagacatgagtaggctgaggctggccgccggatctgctatcatgaaattggcacaggagccctgctatcacgaaataatcaccccagagcaattccagctgtgcgcccttgtcataaacgatgagtgctatcaggtgcggcagatattcgctcagaagctccacaaggctctcgtgaagctcctgcttcccctggaatacatggctatatttgcactgtgcgcaaaggatccagttaaagaaagacgggcccacgcccgacagtgtcttctcaaaaacattagcattagacgagaatatataaagcagaacccaatggccactgagaaactgctgagcctgttaccagagtatgtggttccatacatgattcacctgctggctcatgatcccgacttcaccagatcacaggacgtagaccagctccgggacatcaaagagtgtctctggttcatgttagaggtcctgatgactaagaatgaaaataattctcacgcattcatgaaaaaaatggccgagaatattaagctgaccagagatgctcagagcccagatgaatccaagactaacgagaagctgtatacagtgtgtgacgttgcactctgcgtgattaacagcaaaagcgccctgtgcaacgccgattcaccaaaagatccggtgctccccatgaaattcttcactcagcccgaaaaggacttctgcaatgataagagctatatatctgaggagacccgtgtgctactgctgactggcaaacccaaacccgcaggtgtgttgggcgccgtgaacaaacccctgagtgctaccggaagaaagccatacgttcggtctaccgggacggaaacaggatctaacattaatgtgaactccgagttgaatccttctacgggaaatcggtcgagggaacagtcgtctgaagcggctgaaacaggggtctcggaaaacgaagagaatccagtccgtatcatctcagtgacccctgtcaaaaacattgaccctgtaaagaacaaggaaataaacagcgatcaggccactcagggtaacatatcttcagatcggggaaaaaagcgtacagtgaccgctgccggagccgagaacatccagcagaaaactgacgaaaaggttgatgagagcggtcctccagcaccgtctaagccacggagaggacgacgacccaagtccgagagccaggggaatgctacgaagaacgacgacctcaacaagccaatcaataagggtagaaagcgggccgccgtgggccaggaaagccccggcgggttagaggccggcaatgccaaagcgcccaagctccaagacctggccaagaaagctgcgcccgccgagcgccaaatcgacttacaacggtag

SEQ ID NO: 40463 - DNA, 4014 bp, Artificial Sequence
  derived and/or modified sequence
atggacttcaccgcccagcccaagccagccacagccctgtgtggggtggtgtctgcagatggcaagatcgcctacccacctggggtgaaggagatcacagacaagatcaccacagatgagatgatcaagaggctgaagatggtggtgaagaccttcatggacatggaccaggacagtgaagatgagaagcagcagtacctgcccctggccctgcacctggccagcgagttcttcctgaggaaccccaacaaggatgtgcggctgctggtggcctgctgcctggccgacatcttccgcatctatgcccctgaggccccctacaccagccatgacaagctgaaggacatcttcctgttcatcacccggcagctgaagggcctggaggacaccaagagcccccagttcaaccgctacttctacctgctggagaacctggcctgggtgaagagctacaacatctgctttgagctggaggactgcaatgagatcttcatccagctgttccgcaccctcttcagcgtcatcaacaacagccacaacaagaaggtgcagatgcacatgctggacctgatgagcagcatcatcatggagggagatggagtgacccaggagctgctggacagcatcctgatcaacctgatcccagcccacaagaacctgaacaagcagagctttgacctggccaaggtgctgctgaagaggacagtgcagaccatcgaggcctgcatcgccaacttcttcaaccaggtgctggtgctgggccgcagctctgtgtctgacctgtctgagcacgtgtttgacctgatccaggagctgtttgccatcgacccccacctgctgctgtctgtgatgccccagctggagttcaagctgaagagcaatgatggagaggagcggctggccgtggtgcggctgctggccaagctgtttggcagcaaggacagcgacctggccacccagaaccggcccctgtggcagtgcttcctgggccgcttcaatgacatccacgtgcctgtgcggctggagagcgtgaagtttgccagccactgcctgatgaaccacccagacctggccaaggacctgacagagtacctgaaggtgcgcagccatgaccctgaggaggccatcagacatgatgtgattgtgaccatcatcacagctgccaagagggacctggccctggtgaatgaccagctgctgggctttgtgcgggagaggaccctggacaagcgctggagggtgaggaaggaggccatgatgggcctggcccagctgtacaagaagtactgcctgcacggggaggccggcaaggaggccgctgagaaggtgtcctggatcaaggacaagctgctgcacatctactaccagaacagcattgatgacaagctgctggtggagaagatctttgcccagtacctggtgccccacaacctggagacagaggagaggatgaagtgcctgtactacctgtatgccagcctggaccccaatgctgtgaaggccctgaatgagatgtggaagtgccagaacatgctgcggagccacgtgcgggagctgctggacctgcacaagcagcccaccagcgaggccaactgcagcgccatgtttgggaagctgatgaccatcgccaagaacctgcctgaccccgggaaggcccaggactttgtgaagaagttcaaccaggtgctgggagatgatgagaagctgcggagccagctggagctgctgatcagccccacctgcagctgcaagcaggccgacatctgtgtgcgggagatcgccaggaagctggccaaccccaagcagcccaccaaccccttcctggagatggtgaagttcctgctggagcgcatcgcccctgtgcacattgattctgaggccatcagcgccctggtgaagctgatgaacaagagcattgagggcacagcagatgatgaggaggagggcgtgtccccagacacagccatccgcagcggcctggagctgctgaaggtgctgtccttcacccaccccaccagcttccacagcgctgagacctatgagagcctgctgcagtgcctgaggatggaggatgacaaggtggccgaggccgccatccagatcttcaggaacacaggccacaagattgaaacagacctgccccagatccgcagcaccctcatccccatcctgcaccagaaggccaagaggggcaccccccaccaggccaagcaggccgtgcactgcatccacgccatcttcaccaacaaggaggtgcagctggcccagatctttgagcccctgagccgcagcctgaatgctgatgtgcctgagcagctgatcacccccctggtgtccctgggccacatctccatgctggccccagaccagtttgccagccccatgaagtctgtggtggccaacttcatcgtgaaggacctgctgatgaatgacaggagcactggagagaagaatggcaagctgtggagcccagatgaggaggtgtccccagaggtgctggccaaggtgcaggccatcaagctgctggtgcgctggctgctgggcatgaagaacaaccagagcaagagcgccaacagcaccctgcggctgctgagcgccatgctggtgtctgagggggacctgacagagcagaagaggatcagcaagagtgacatgagccggctgcggctggccgccggcagcgccatcatgaagctggcccaggagccctgctaccacgagatcatcaccccagagcagttccagctgtgtgccctggtgatcaatgatgagtgctaccaggtgcggcagatctttgcccagaagctgcacaaggccctggtgaagctgctgctgcccctggagtacatggccatctttgccctgtgtgccaaggaccctgtgaaggagcggcgggcccacgcccggcagtgcctgctgaagaacatcagcatcagaagagagtacatcaagcagaaccccatggccacagagaagctgctgagcctgctgcctgaatatgtggtgccctacatgatccacctgctggcccatgaccctgacttcaccaggagccaggatgtggaccagctgcgggacatcaaggaatgtctgtggttcatgctggaggtgctgatgaccaagaatgaaaacaacagccacgccttcatgaagaagatggccgagaacatcaagctgaccagagatgcccagagcccagatgagagcaagaccaatgagaagctgtacacagtgtgtgatgtggccctgtgtgtgatcaacagcaagagcgccctgtgcaatgctgacagccccaaggaccctgtgctgcccatgaagttcttcacccagcctgagaaggacttctgcaatgacaagagctacatcagcgaggagaccagggtgctgctgctgaccgggaagcccaagccagctggggtgctgggcgctgtgaacaagcccctgagcgccactggaaggaagccctacgtgcgcagcactggaacagagaccggcagcaacatcaacgtgaacagcgagctgaaccccagcacaggcaacagaagccgggagcagagcagcgaggccgctgagaccggggtgtctgaaaatgaagaaaatcctgtgcgcatcatctctgtgacccctgtgaagaacattgatcctgtgaagaacaaggagatcaacagcgaccaggccacccagggcaacatcagcagtgaccggggcaagaagaggacagtgacagctgctggagctgagaacatccagcagaagacagatgagaaggtggatgagagcggccccccagcccccagcaagccccggcggggccggcggcccaagtctgagagccagggcaatgccaccaagaatgatgacctgaacaagcccatcaacaagggcaggaagagagctgctgtgggccaggagagccctgggggcctggaggccggaaatgccaaggcccccaagctgcaggacctggccaagaaggccgccccagctgagcggcagattgacctgcagaggtag

SEQ ID NO: 40464 - DNA, 4014 bp, Artificial Sequence
  derived and/or modified sequence
atggacttcaccgcccagcccaagcccgccaccgccctgtgcggcgtagtgtcagccgacggaaagatcgcctacccgccaggggtcaaagagatcaccgacaagatcacaaccgacgaaatgattaagagactgaagatggtggtgaaaacctttatggacatggaccaggattccgaggacgaaaagcagcagtatctaccactcgcgttgcacctggcctccgaattctttctacggaaccctaacaaagatgtgcgattgttagtggcgtgttgcttggctgacatattcaggatttatgctcccgaggctccatatacctctcacgataaactgaaggatattttcctctttatcacccgacaactgaagggcctggaggacacgaaatcacctcagttcaatcgttatttctatctgctggagaatctggcctgggtcaagagttataacatttgttttgaactggaggattgtaatgaaatcttcatccaactctttagaactctcttttcggtcatcaataatagccataacaagaaggtccagatgcacatgctggaccttatgtccagtattattatggagggcgacggcgtgactcaggagctccttgatagcatcctgattaacctcatccctgctcataagaatctcaacaagcagagctttgatttagctaaggttctcctaaagaggacagtccagacaatagaggcgtgtatcgctaactttttcaatcaggtgctagtgcttggcaggtcatcagtgtctgatctttcagagcatgtctttgatctgattcaagaactgtttgccattgatccccatctgcttctttctgtgatgccccagctggagttcaagctcaagtctaatgacggagaagagcggttggccgtagtgcgccttttggccaagcttttcggcagcaaggactcggaccttgctacacagaacagacccctctggcagtgttttctaggccggtttaatgatatacacgtacctgtcaggctcgaatcggtcaagttcgccagccattgtctaatgaatcacccggacctcgcgaaggacttaactgagtaccttaaggttagaagtcatgatcctgaggaggctatcaggcatgatgtgatcgtgactataatcacggcagcgaagcgcgatctcgctttagtcaacgatcaactgttagggttcgtgagggaacggactctggacaagcgctggcgcgtacgcaaggaggcgatgatggggctcgctcagctgtacaagaagtactgtttacacggcgaagctggcaaggaggccgccgaaaaggtgtcttggattaaggataagctactgcatatttattaccaaaacagtatagatgacaagctgctggtggagaaaatttttgcccagtatctcgtaccccacaacctggagacggaagaaagaatgaaatgtctgtattacttatacgcatcattggatccgaatgctgtgaaagctctgaacgaaatgtggaagtgccagaatatgctaagatcacacgtacgagagttgttagatttgcataagcagcccacgtcagaagctaactgtagcgcaatgttcgggaaactgatgactatcgcaaagaatctccccgatcccggaaaagcccaggactttgtgaaaaaatttaatcaagtgctgggagacgacgagaaactgcgtagtcagctggaactgctgatctctcctacttgcagttgcaagcaggcagacatttgtgtgagagaaattgccaggaaactggctaatcctaagcaacctacgaacccttttttagagatggttaaattcctcctggagcggattgcccctgtgcatatagatagtgaggcaatatcggccctggtgaaattaatgaataagtccatagaggggaccgctgatgatgaggaggagggagtgagccccgataccgccattaggtctggcctggagctgttgaaagtgttgagcttcacacacccaacaagctttcattcagctgagacttacgaaagtctgctgcagtgcctcagaatggaggacgacaaggtggccgaggccgctatacagatcttccggaatactggccacaagatcgaaacagatctgccacagatacgctcaacactgattcctatcctccaccagaaggcaaagagaggcacaccacaccaagccaaacaggccgtgcactgcatccacgccatctttaccaataaggaggtccagctggcacagattttcgagcctctctccaggagcttgaatgcagatgtcccagagcaactcattacccccctggtgagtctcggacatatctccatgctggcccccgaccagttcgcatctccgatgaagtccgtggtggcaaatttcattgtgaaagaccttctgatgaacgaccgaagcactggtgaaaagaacggcaaactatggtcccctgacgaagaggtgagccctgaagtcctcgccaaggtacaggctattaaactgctagtacggtggcttctgggaatgaaaaataaccagtcaaagtccgctaactcgactttgagacttctatccgcgatgcttgtttctgagggcgatttgaccgaacaaaagcggataagcaagagcgacatgtctcgtctacgcctggccgccggatccgcaatcatgaagctagctcaggagccttgttatcacgagataatcacgcccgagcagtttcagctctgcgcactggtgattaatgacgagtgctaccaggttcgacaaatctttgctcagaagctacacaaggctctcgttaaactcctacttccacttgagtatatggcgatttttgcgctgtgtgccaaggaccccgtaaaggaacgacgggcacacgccagacaatgtttgctgaagaatatttctatacgcagagaatacattaagcagaaccccatggcaacagagaagctcttgtccctgctccccgagtacgttgtgccttacatgatccatttgctggcacacgacccagattttactcggagccaggatgtggaccagctgcgtgacatcaaagagtgtctctggtttatgctggaggtactgatgacaaaaaatgagaataactcccatgctttcatgaaaaaaatggcagagaatatcaagctgacccgagatgcccagtcccccgacgagagcaagacaaacgagaagctgtacaccgtttgtgacgtggccctctgtgttattaattccaaatccgcgctgtgcaatgcagactccccaaaggaccccgtacttccaatgaagttctttacccaacctgaaaaggacttttgcaatgacaaatcctacatatcagaggagacgagggttctgttactgactggtaaacccaaaccggcgggcgttctgggcgcagtaaataagcccctgtccgctacagggagaaagccttatgtccgaagtacaggtaccgagactggatcaaatatcaatgttaacagcgaactaaacccttctactgggaaccggtctcgggagcagtcaagtgaagccgcagaaaccggagttagcgaaaacgaggaaaatccagtgcggatcatctccgtcacacccgtgaagaatatcgatccagtgaagaacaaggagatcaactcagaccaggccacccaggggaatattagcagcgatcgtggaaagaaacgaactgtgacagccgccggtgccgagaacatccagcaaaagaccgatgaaaaagtggatgaaagtggtccgcccgctcccagtaaacctcggagggggaggcggcccaaaagtgagagtcagggaaacgccaccaagaatgatgatctcaacaaacccatcaacaaggggcggaagagggctgccgtaggtcaagaatcccctgggggcctcgaggcggggaatgccaaagcacctaaactacaggacctcgctaagaaggccgctcctgctgagcgccagattgacctacagcgatag

SEQ ID NO: 40465 - DNA, 7176 bp, Artificial Sequence
  derived and/or modified sequence
ggccggcggaggaaggggagggagcgaggagcgcgcgctgctctcgcgtgctctcgcgccgctcgcgtgaccggccggtgtgtgcgcgaggccccggctcccggggcacggacggccgggcgcgcgcctctgcgaggggcgtccgggtccgagtcggcggtccgggccggcgcgaggtgcgtgcgggcgggccgcgggggtcccggacggacacaagcgcacacactcccggaggagccttcgaggctgctcttcctcggccagacggagagcggcactgtctccccgcccagcgctcactcgccccgcgtctccccccgcggcggctgctcctcctcggcaccgccagccccagcgccgctcccgggcgggcgggcggcggcggcggcggcggcgggacccgcggagccgctttgtgtgcagcccgactaggggcggcggcgcaaccacctgacagaggcccgggcgctcgatgcaccttccgcccgcatgaggaggagaggccggtagaggactgtgaaccaaaagttgtcccccaggatggacttcaccgcgcagcccaagcctgccactgccctctgtggcgtcgtgagtgccgacgggaagatcgcttaccctccgggggtaaaagagatcaccgacaagatcaccacggacgagatgatcaaacgcctgaagatggtagtgaaaacctttatggatatggatcaggactcagaagatgaaaaacagcagtatctcccactagccttgcatcttgcatctgaattcttcctcaggaaccccaataaagatgtgcgtctccttgtagcatgttgtttggctgatatctttcgtatctatgccccagaagctccatatacttcccatgataaacttaaggacatatttttgtttattaccagacaattaaaaggtttggaggatacaaagagtccacagtttaatagatacttttatttattagagaatttagcttgggttaaatcatataacatctgctttgaattggaagattgcaatgaaatttttattcagctttttagaactctcttctcagtgatcaacaatagccacaataagaaggtacaaatgcacatgctagatttgatgagttctatcatcatggaaggtgatggagttactcaagaattattggactccattcttattaacctcattcctgcacataagaacttaaataaacagtcctttgaccttgcaaaagtgctattgaaaagaacagtccagactattgaggcatgcattgctaattttttcaatcaagtcctggtgctgggaagatcatcagtaagtgatttgtcagaacatgtatttgatctgattcaggaactttttgctatagatcctcatttattattatccgtcatgccacagcttgaattcaaactaaagagcaatgatggagaagagcgattagctgttgttcgacttctagctaaattgtttggctccaaagattctgatttggcaacacagaatcgtcctctttggcaatgttttcttggacgatttaatgatattcatgttcctgtgagattagaaagtgtgaaatttgccagtcattgtttaatgaatcacccagatttagcgaaggatctcacagaatatttaaaggttagatcacatgatccagaagaagctattcgtcatgatgtcattgttactataataacagctgccaagagggacctggccttagtaaatgatcagctgcttggctttgtaagggaaagaacactggataaacggtggcgagtaagaaaagaagctatgatgggtctggctcagctttataagaaatactgtcttcatggtgaagcaggaaaggaagctgcagagaaagtcagctggataaaggacaaacttctgcatatttattatcagaacagcattgacgacaaactgttggtagagaaaatctttgctcagtatcttgtcccccacaacctggaaacagaagagagaatgaaatgcttatattacttatatgctagtttggatccaaatgctgtaaaagctctcaacgaaatgtggaagtgtcagaacatgcttcggagccatgtacgcgaactattggatttgcacaagcagcctacatcagaggctaactgttctgccatgtttggaaaactgatgaccatagcaaagaatttgcctgaccccgggaaagcacaagattttgtgaagaaatttaaccaggttctcggcgatgatgagaaacttcggtctcagttggagttattaattagcccaacctgttcttgcaaacaagcagatatttgtgtgagagaaatagcccggaaacttgcaaatcctaagcaaccaacaaatccttttctagagatggtcaaatttctgttggaaagaatcgcacctgtgcacattgattcagaagccataagtgcactagtgaaattgatgaataagtcaatagaggggacagcagatgatgaagaggagggtgtaagtccagatacagctatccgttcaggacttgaacttcttaaggttctgtcttttacacatcctacctcgttccactctgcagagacatatgagtccttgttacagtgcctaagaatggaggatgacaaggtagcagaagctgctattcaaatttttagaaatacaggtcacaaaatagaaacagaccttccccagatacgatcgaccttaattcccattttacatcaaaaagcaaagaggggtactccacaccaagcaaaacaggctgtgcactgtatacacgccatattcacaaataaagaagtccagcttgcacagatttttgagccactcagtaggagtctgaatgctgatgtgccagaacaacttataactccattagtttcattgggccacatttctatgttagcaccagatcagtttgcttccccaatgaaatctgtagtagcaaattttattgtgaaagatctgctaatgaatgacaggtcaacaggtgaaaagaatggaaaactgtggtctccagatgaagaggtttcccctgaagtactagcaaaggtacaggcaattaaacttctggtaaggtggctgttgggtatgaaaaacaaccagtctaaatctgccaattcaacccttcggttattatcagcgatgttggttagtgagggtgacctgacagagcaaaagaggatcagtaaatctgatatgtctcgcttgcgattagctgctggtagtgccataatgaagcttgctcaggaaccttgttaccatgaaattattaccccagaacagtttcagctctgtgcacttgttattaatgatgagtgttaccaagtaaggcagatatttgctcagaagctgcataaggcacttgtgaagttactgctcccattggagtatatggcgatctttgccttgtgtgccaaagatcctgtgaaggagagaagagcacacgcacgacaatgtttactgaaaaatatcagtatacgcagggaatacattaagcagaatcctatggctactgagaaattattatcactgttgcctgaatatgtagttccatacatgattcacctgctagcccatgatccagattttacaagatcacaagatgttgatcagcttcgtgatatcaaagagtgcctatggttcatgcttgaagttttaatgacaaagaatgaaaacaatagccatgcctttatgaagaagatggcagagaacatcaagttaaccagagatgcccagtctccagatgaatccaagacaaatgaaaaactgtatacagtatgtgatgtggctctctgtgttataaatagtaaaagtgctttgtgcaatgcagattcaccaaaggacccagtcctcccaatgaaattttttacacaacctgaaaaggacttctgtaacgataagagttatatttcagaagagacaagagtacttctgttaacaggaaagccaaagcctgctggagtactaggtgcagtaaataagcctttatcagcaacgggaaggaaaccctatgttagaagcactggcactgagactggaagcaatattaatgtaaattcagagctgaacccttcaaccggaaatcgatcaagggaacagagttcagaggcagcagaaactggagttagtgaaaatgaagagaaccctgtgaggattatttcagtcacacctgtaaagaatattgacccagtaaagaataaggaaattaattctgatcaggctacccagggcaacatcagcagtgaccgaggaaagaaaagaacagtaacagcagctggtgcagagaatatccaacaaaaaacagatgagaaagtagatgaatcgggacctcccgccccttccaaacccaggagaggacgtcgacccaagtctgaatctcagggcaatgctaccaaaaatgatgatctaaataaacctattaacaagggaaggaagagagctgcagtgggtcaggagagccctgggggtttggaagcaggtaatgccaaagcacccaaactgcaagatttagccaaaaaggcagcaccagcagaaagacaaattgacttacaaaggtaaaaatgcatttgcaaagggagaaaatgaaggccaaacagaagcaggctccagcttctgcaaaaacttggattcacaaatgtccctgaacagaaaatgaagctcacttcagaacacacactctctgccttgaaaactaaagagactattacttccttttcacatgaccacaagtcctctgatggaaatgtacagcagaaactcttgagagagaggctaaaagcaactctgttctcccccttcccctagacttttcttacgaaaagtcaataattaagcaaattgcttaacacttggttccagttcctgcctatctggagtttaaatgcgtaatacaccattaatttccacgctgcagtttttattttaaagaaagtaacaagatgtctttacactgacactgaaaattcatccattttagagccaggaattcccatgttacacaggaaaaaatagaagtctactgaattaattttttaaaagaaaagagatcagattaaatatttctttgtttttccttttggaaacttttatgtataattctttctgcctgcctacttttctgcaaaaatgagatgtacagatttcggttccctgctatgaaaagtgatgtggtagcaattttataaatgttgctttctgatttttatcagagtgagaaaattaaaattattgatttgcaagtagtaaacagttcatattttgatttcccctcattttagtttaatataatttgcaataaatgtacatattgttgtttgtttcataaagcatatcactttaaaatggtttttactcctgtgattatgttggaatatttggaattttaaaggagtaaagactgtccagcatttggttttataatgtttgtcaccagatttttattaatgtaaaaaaaatcaatttttaaaaaatagttggactttggcagcttttaaggaaagttggaggtgttttaggattgctatcaattttcagcattgtgctatttggaaataagtgttttgcttttgtctgatggtctgggctcatttttatgtttattttagaaaactgttgcatcaatatattatgtttcttggcattgttcagcataggtaatgtgtgcactttatgtgtacacataatcatatttaagttttttgcataaaataaatgcttctagatgtcatggcagtctttttaatctttttatcatatgctttcttgtgaattttttcatgttaaagagctaaagtcataacatgattacagtcaactctccattatctatataaaatagtgactaagcctcaggtttttaattttgtgataacaaaataacgaaggcatgtaagacctgattctggaggaacatgaaatttgtcttttctcatgtccagagttctatcctgcccccactgtccactgtagggtcatccgcaaagccctagcagaatgtgctcactccatttccttacacgtttctagcatgggtcagaggaaacaacatttgtgttataacttcgtcttgataggctgtagtgtacatgggatgtaaaacaaacaagtgtatcaaaggtggatgattctgttagagtgaagtttgagagtaaatgtcacttacgtttctcatagataatcaagagttggctgtgtattgactgaaagatgggtaattattttaaatatgcatttacacacatttaggtatcagaagatgcttagggaacaatggataccaatgatagaaaatgatacctttacaggggcagaaaaatccccactcttccttattgcctcttcagaaccctttagaaagtataaaatattgcctccaacatgctgaaaaagagtatctatgcataagtatcagagaagtccctcaagcaatcagtaggtgtgttctatttagagagagtttaaagttctcttagcatcagacaacttgattcctaaggtttccagtgtgtcaccaacaaaaagtgcattgatagggacctttgtctcttcctccctttgattaattgcccggcatcacagtttactagattaccaagtgttacatcatattaaataaaatgtagcagaaccatctgcatcaatatattcctgtttagatttttgcaggagagaagttaaaaggatttgctccttgtatgatgtaagtggcccaccccaattttgtaacatgatgcaagtgtctggcactaagggaagcaagagtagggttgtggaaagaccaagctgatggggagggacttgtttacgggaatttttttagttttccttttcaaaggaaaacattaaaatcccttaggaatttggtattcacatctcagagaactacaacacaaaagtgcagacttatatttgagaattaatgttaaccctttgtgtctagtttgaagcttcttgtatttgtctaaaacaacaagccagaattttgtatctcctttgataaaaagtgtgtataatgtaaagtagttttgcatattcttgtgctgcacatgggctgaatttttaaattttttttaaaaacttgaagcagaaccttgtaatttgtgtaaatgacaagtgtaaaatcctaccataaaatgctaaaaatatgcactgtttcaaataaaaccaagaaatgcagcatta

SEQ ID NO: 40466 - DNA, 4014 bp, Artificial Sequence
  derived and/or modified sequence
atggattttaccgctcagcccaaaccagctacagcattgtgtggggtcgtcagcgccgacgggaagatcgcatatcctcccggagtcaaggagatcacagataagatcaccaccgatgagatgattaagagattaaaaatggtagtcaagacgttcatggacatggatcaagactctgaggacgagaaacagcagtacctgcctcttgcgctgcatctcgcaagcgaattcttcttgagaaacccaaataaggacgtccgattgctggttgcttgctgtctcgcggatatattccgtatctacgcccctgaagccccttacaccagtcacgacaaactcaaagacatattcttgttcatcaccaggcagctgaaagggttggaagatactaaaagcccccaattcaaccgatatttctatctcctagagaacctggcatgggtgaagtcctataacatttgcttcgagttggaggactgcaatgaaatcttcattcagctgttccgcactcttttcagtgtcatcaacaattctcataacaagaaggtgcagatgcacatgttggacctgatgagcagtatcatcatggagggcgatggcgtgacacaggagttgctggactcaatactgattaacctgattcctgcccacaaaaacctcaataaacagtctttcgacttggctaaggtgttgttaaaaagaaccgtacagactatcgaggcttgcattgccaattttttcaatcaggtactcgtcttaggccgatcaagtgtgagcgatctgagcgagcacgttttcgacttgatccaggaactgtttgcaattgacccccacctgctcctttccgttatgccacaattggagttcaaactcaaatcgaatgacggagaagagaggctggctgttgtgaggctcctagcaaaacttttcggtagcaaggactcggacctggcaacccagaatagaccactttggcagtgttttctgggaagattcaacgatattcacgtcccagtgcgactagaatcagtgaaattcgcgtcccattgccttatgaatcaccccgatctggccaaggatctaacagagtacctgaaggtgagatcccatgacccggaggaggctatccgacatgacgttatcgttactatcattacagcggctaagcgggacctcgccctggtgaatgaccaactgttaggattcgtccgtgagagaacactggataaacggtggagggtgcgtaaggaagccatgatgggcctcgctcagttgtacaagaagtactgcctgcatggagaagccggtaaggaggctgccgagaaggtgagctggattaaagacaagctgctgcacatttattatcagaatagcatcgatgacaagttgctggtggagaaaatcttcgctcagtacctggtgccccacaacctagaaacagaggagcgaatgaagtgtctgtactatttgtacgctagccttgacccaaacgcggtcaaagccctgaatgagatgtggaaatgccagaacatgcttagatcccacgtgagggagctcctggacctgcataaacaacccacatctgaggcaaactgctcagccatgtttggtaagctgatgacgatcgcaaagaatttgcccgatccgggtaaagctcaagactttgtgaagaagtttaatcaagtgttaggggatgacgagaagcttagatcccagctagaacttcttatcagccctacatgctcttgtaagcaggcagacatctgcgtgcgcgagatcgcaagaaaactggccaaccctaagcagcctaccaatcctttcctggagatggtcaaatttctgttagagcggatcgcccctgtgcatatcgattcagaggcgatctcagctctagttaagctcatgaacaagtccattgaaggcactgcagacgacgaggaggagggcgtcagtcctgacaccgccatcagaagtggcctcgaactgctcaaggtgcttagcttcactcacccgacaagttttcactcagctgaaacatacgagagcctcttacagtgtttgcgaatggaggacgataaagttgcagaagctgccatccagatatttcggaataccggacataaaatcgagaccgacctgccgcaaatccgatccactctcattccaattctacatcaaaaggcaaagagaggcacgcctcatcaggctaaacaagcagtccactgcatccacgcgatttttaccaacaaagaggttcagctcgcccagattttcgaacctctctcacgaagtcttaacgccgacgtacccgaacaactgattacccctctggtttcgttgggacatatctctatgctggcccctgatcagtttgcttctccaatgaaatccgtggtcgccaacttcatagtcaaggatcttttgatgaacgacagaagcacaggggaaaaaaacggcaaactgtggtcaccagacgaggaggtcagcccagaggtgctggccaaagtacaggctatcaagctgcttgtgcggtggcttcttgggatgaagaacaaccagtcaaaaagcgccaattcaacactgagacttctctcggcaatgctggtgtcagagggagacctcactgagcagaagcgaatctcgaaaagcgatatgtctcggctgcgccttgctgccggaagcgcgatcatgaagctggcacaagagccttgctatcatgaaatcattaccccagagcagttccagctgtgcgcgctggtgatcaacgacgaatgctatcaggtgaggcagatctttgctcagaaactgcacaaggctctcgtgaagctgctcttgccactggaatatatggcaattttcgctttgtgcgcaaaagaccccgtcaaagaaaggagggcccacgcgcgtcagtgcctgttgaaaaatatttctatacgaagggagtatattaagcagaaccctatggcaaccgagaagctattgtcacttctccctgagtacgtagtgccctacatgattcacctgctggcgcatgatccagacttcaccaggtctcaggacgtcgaccagcttcgggacattaaggagtgcctatggttcatgctggaggttttgatgaccaagaacgagaacaatagccatgcttttatgaagaaaatggctgaaaacattaaattgaccagagacgctcagtcccccgacgagagcaagacgaatgagaagctgtacacagtgtgcgacgttgctctgtgcgtgattaacagcaagagtgcactctgcaatgccgactccccaaaggatccggttctcccaatgaaattttttacccagccagagaaagacttctgtaacgacaagagctacatctccgaagagacgagggtgctcctcttgacgggcaagcctaagcccgctggagttctgggagctgttaacaagcccctctccgcgacaggcaggaagccgtacgtccggagcacaggaaccgagactggcagcaacatcaatgtcaattccgagctcaacccctctactggaaacaggtccagagagcagagtagtgaggccgctgaaactggggtgagcgaaaatgaggagaacccagtccggatcataagtgtgaccccagtgaaaaatattgatcccgttaaaaataaggagataaacagtgaccaggcaacacaggggaatatctcctctgaccgtgggaaaaaacgcacagttacagccgctggggcagagaatattcagcagaagactgacgaaaaagtggatgagagcgggccacccgctccctccaaaccacgcaggggaagaagacccaaatcggaaagccagggaaatgcgacaaaaaacgatgatctgaacaagcctataaacaaaggtcgtaagagagcagccgtggggcaagagtcacctgggggattggaagctggtaatgccaaagcccctaaacttcaggatctggccaagaaggccgctccagccgagcggcaaattgacctgcagaggtag

SEQ ID NO: 40467 - DNA, 4014 bp, Artificial Sequence
  derived and/or modified sequence
atggacttcaccgcccagcccaagcccgccaccgccctgtgcggcgtggtgagcgccgacggcaagatcgcctacccccccggcgtgaaggagatcaccgacaagatcaccaccgacgagatgatcaagagactgaagatggtggtgaagaccttcatggacatggaccaggacagcgaggacgagaagcagcagtacctgcccctggccctgcacctggccagcgagttcttcctgagaaaccccaacaaggacgtgagactgctggtggcctgctgcctggccgacatcttcagaatctacgcccccgaggccccctacaccagccacgacaagctgaaggacatcttcctgttcatcaccagacagctgaagggcctggaggacaccaagagcccccagttcaacagatacttctacctgctggagaacctggcctgggtgaagagctacaacatctgcttcgagctggaggactgcaacgagatcttcatccagctgttcagaaccctgttcagcgtgatcaacaacagccacaacaagaaggtgcagatgcacatgctggacctgatgagcagcatcatcatggagggcgacggcgtgacccaggagctgctggacagcatcctgatcaacctgatccccgcccacaagaacctgaacaagcagagcttcgacctggccaaggtgctgctgaagagaaccgtgcagaccatcgaggcctgcatcgccaacttcttcaaccaggtgctggtgctgggcagaagcagcgtgagcgacctgagcgagcacgtgttcgacctgatccaggagctgttcgccatcgacccccacctgctgctgagcgtgatgccccagctggagttcaagctgaagagcaacgacggcgaggagagactggccgtggtgagactgctggccaagctgttcggcagcaaggacagcgacctggccacccagaacagacccctgtggcagtgcttcctgggcagattcaacgacatccacgtgcccgtgagactggagagcgtgaagttcgccagccactgcctgatgaaccaccccgacctggccaaggacctgaccgagtacctgaaggtgagaagccacgaccccgaggaggccatcagacacgacgtgatcgtgaccatcatcaccgccgccaagagagacctggccctggtgaacgaccagctgctgggcttcgtgagagagagaaccctggacaagagatggagagtgagaaaggaggccatgatgggcctggcccagctgtacaagaagtactgcctgcacggcgaggccggcaaggaggccgccgagaaggtgagctggatcaaggacaagctgctgcacatctactaccagaacagcatcgacgacaagctgctggtggagaagatcttcgcccagtacctggtgccccacaacctggagaccgaggagagaatgaagtgcctgtactacctgtacgccagcctggaccccaacgccgtgaaggccctgaacgagatgtggaagtgccagaacatgctgagaagccacgtgagagagctgctggacctgcacaagcagcccaccagcgaggccaactgcagcgccatgttcggcaagctgatgaccatcgccaagaacctgcccgaccccggcaaggcccaggacttcgtgaagaagttcaaccaggtgctgggcgacgacgagaagctgagaagccagctggagctgctgatcagccccacctgcagctgcaagcaggccgacatctgcgtgagagagatcgccagaaagctggccaaccccaagcagcccaccaaccccttcctggagatggtgaagttcctgctggagagaatcgcccccgtgcacatcgacagcgaggccatcagcgccctggtgaagctgatgaacaagagcatcgagggcaccgccgacgacgaggaggagggcgtgagccccgacaccgccatcagaagcggcctggagctgctgaaggtgctgagcttcacccaccccaccagcttccacagcgccgagacctacgagagcctgctgcagtgcctgagaatggaggacgacaaggtggccgaggccgccatccagatcttcagaaacaccggccacaagatcgagaccgacctgccccagatcagaagcaccctgatccccatcctgcaccagaaggccaagagaggcaccccccaccaggccaagcaggccgtgcactgcatccacgccatcttcaccaacaaggaggtgcagctggcccagatcttcgagcccctgagcagaagcctgaacgccgacgtgcccgagcagctgatcacccccctggtgagcctgggccacatcagcatgctggcccccgaccagttcgccagccccatgaagagcgtggtggccaacttcatcgtgaaggacctgctgatgaacgacagaagcaccggcgagaagaacggcaagctgtggagccccgacgaggaggtgagccccgaggtgctggccaaggtgcaggccatcaagctgctggtgagatggctgctgggcatgaagaacaaccagagcaagagcgccaacagcaccctgagactgctgagcgccatgctggtgagcgagggcgacctgaccgagcagaagagaatcagcaagagcgacatgagcagactgagactggccgccggcagcgccatcatgaagctggcccaggagccctgctaccacgagatcatcacccccgagcagttccagctgtgcgccctggtgatcaacgacgagtgctaccaggtgagacagatcttcgcccagaagctgcacaaggccctggtgaagctgctgctgcccctggagtacatggccatcttcgccctgtgcgccaaggaccccgtgaaggagagaagagcccacgccagacagtgcctgctgaagaacatcagcatcagaagagagtacatcaagcagaaccccatggccaccgagaagctgctgagcctgctgcccgagtacgtggtgccctacatgatccacctgctggcccacgaccccgacttcaccagaagccaggacgtggaccagctgagagacatcaaggagtgcctgtggttcatgctggaggtgctgatgaccaagaacgagaacaacagccacgccttcatgaagaagatggccgagaacatcaagctgaccagagacgcccagagccccgacgagagcaagaccaacgagaagctgtacaccgtgtgcgacgtggccctgtgcgtgatcaacagcaagagcgccctgtgcaacgccgacagccccaaggaccccgtgctgcccatgaagttcttcacccagcccgagaaggacttctgcaacgacaagagctacatcagcgaggagaccagagtgctgctgctgaccggcaagcccaagcccgccggcgtgctgggcgccgtgaacaagcccctgagcgccaccggcagaaagccctacgtgagaagcaccggcaccgagaccggcagcaacatcaacgtgaacagcgagctgaaccccagcaccggcaacagaagcagagagcagagcagcgaggccgccgagaccggcgtgagcgagaacgaggagaaccccgtgagaatcatcagcgtgacccccgtgaagaacatcgaccccgtgaagaacaaggagatcaacagcgaccaggccacccagggcaacatcagcagcgacagaggcaagaagagaaccgtgaccgccgccggcgccgagaacatccagcagaagaccgacgagaaggtggacgagagcggcccccccgcccccagcaagcccagaagaggcagaagacccaagagcgagagccagggcaacgccaccaagaacgacgacctgaacaagcccatcaacaagggcagaaagagagccgccgtgggccaggagagccccggcggcctggaggccggcaacgccaaggcccccaagctgcaggacctggccaagaaggccgcccccgccgagagacagatcgacctgcagagatag

SEQ ID NO: 40468 - protein, 600 aa, Artificial Sequence
  derived and/or modified sequence
MDFTAQPKPATALCGVVSADGKIAYPPGVKEITDKITTDEMIKRLKMVVKTFMDMDQDSEDEKQQYLPLALHLASEFFLRNPNKDVRLLVACCLADIFRIYAPEAPYTSHDKLKDIFLFITRQLKGLEDTKSPQFNRYFYLLENLAWVKSYNICFELEDCNEIFIQLFRTLFSVINNSHNKKVQMHMLDLMSSIIMEGDGVTQELLDSILINLIPAHKNLNKQSFDLAKVLLKRTVQTIEACIANFFNQVLVLGRSSVSDLSEHVFDLIQELFAIDPHLLLSVMPQLEFKLKSNDGEERLAVVRLLAKLFGSKDSDLATQNRPLWQCFLGRFNDIHVPVRLESVKFASHCLMNHPDLAKDLTEYLKVRSHDPEEAIRHDVIVTIITAAKRDLALVNDQLLGFVRERTLDKRWRVRKEAMMGLAQLYKKYCLHGEAGKEAAEKVSWIKDKLLHIYYQNSIDDKLLVEKIFAQYLVPHNLETEERMKCLYYLYASLDPNAVKALNEMWKCQNMLRSHVRELLDLHKQPTSEANCSAMFGKLMTIAKNLPDPGKAQDFVKKFNQVLGDDEKLRSQLELLISPTCSCKQADICVVSKSYFTLFL

SEQ ID NO: 40469 - DNA, 1803 bp, Artificial Sequence
  derived and/or modified sequence
atggattttaccgctcagccaaagcccgcaacagcactctgcggcgtggtgtcggcggacggcaaaattgcttaccctcccggagtgaaagaaatcacagataagataaccaccgacgaaatgatcaaaaggctcaagatggtggtgaagacctttatggatatggaccaagacagcgaggacgagaaacaacagtacctgccactggccctgcacctggcaagcgagttctttctgaggaaccctaacaaagacgttagactcctggttgcctgctgcctggctgacatctttaggatatatgcccctgaagctccatatacatcccacgataagctcaaggacattttcctttttatcaccagacagttgaagggactcgaagacactaaaagccctcaattcaataggtacttttacctcctggaaaacctcgcctgggtcaaaagttataacatctgctttgagctggaagattgtaacgagattttcatacaactcttccgcacgttgttctccgtgatcaataacagccataataaaaaagtacagatgcacatgctggacttgatgagcagtattatcatggagggggacggggtgacacaggagcttttagacagcatcctgatcaacctgattcctgcccataagaacttgaacaagcaatccttcgacctggctaaagtacttctaaagcgcaccgttcagaccattgaggcgtgtatcgcgaacttctttaatcaggtcctggtgctcggcagaagcagtgtgagcgacctgagtgagcatgtattcgatttgatacaggaactcttcgctatagacccccacctgctgctttcagtgatgccccagttagagtttaagcttaagagcaacgacggcgaggagcgtctggcggtcgtgcggctgctagccaagctgtttggcagcaaagactctgatctggcgacgcagaacaggccactttggcagtgcttcttgggtcgcttcaatgatatacacgtcccagtgcgtctggagtcagtcaagtttgcctctcactgtttgatgaaccaccccgatctggccaaggacctcacagaatacctgaaggttcgtagccatgaccctgaggaggcaatcagacacgacgtcattgttacgattattaccgccgccaagcgagatctggccctggtgaatgatcaactgttagggtttgtgcgcgagcggacacttgacaagagatggcgggtgcggaaggaggctatgatgggactggcccagttgtataagaaatactgtctgcacggcgaagccggtaaggaggccgcagagaaagtgagctggattaaggacaaacttctgcacatctactaccagaattcaatcgacgacaaactacttgtggagaagatttttgcgcagtacttggtcccccacaaccttgaaactgaagaaaggatgaagtgcctgtactatttgtatgcatctttggatcccaacgcggtgaaggctctcaacgaaatgtggaagtgccagaatatgcttcggagccacgtgcgggaactcctggacctgcataaacagcccacctctgaagcaaactgcagcgccatgttcggcaaactgatgactatagcgaagaacctcccggatccaggtaaggcccaggactttgttaagaagtttaatcaggtcttaggagacgacgaaaaattgagatcccaactcgagctgttgatctctcctacctgctcctgcaagcaagcggatatttgtgtggtctcaaagagctactttacattgttcctgtag

SEQ ID NO: 40470 - DNA, 1803 bp, Artificial Sequence
  derived and/or modified sequence
atggacttcaccgcccagcccaagccagccacagccctgtgtggggtggtgtctgcagatggcaagatcgcctacccacctggggtgaaggagatcacagacaagatcaccacagatgagatgatcaagaggctgaagatggtggtgaagaccttcatggacatggaccaggacagtgaagatgagaagcagcagtacctgcccctggccctgcacctggccagcgagttcttcctgaggaaccccaacaaggatgtgcggctgctggtggcctgctgcctggccgacatcttccgcatctatgcccctgaggccccctacaccagccatgacaagctgaaggacatcttcctgttcatcacccggcagctgaagggcctggaggacaccaagagcccccagttcaaccgctacttctacctgctggagaacctggcctgggtgaagagctacaacatctgctttgagctggaggactgcaatgagatcttcatccagctgttccgcaccctcttcagcgtcatcaacaacagccacaacaagaaggtgcagatgcacatgctggacctgatgagcagcatcatcatggagggagatggagtgacccaggagctgctggacagcatcctgatcaacctgatcccagcccacaagaacctgaacaagcagagctttgacctggccaaggtgctgctgaagaggacagtgcagaccatcgaggcctgcatcgccaacttcttcaaccaggtgctggtgctgggccgcagctctgtgtctgacctgtctgagcacgtgtttgacctgatccaggagctgtttgccatcgacccccacctgctgctgtctgtgatgccccagctggagttcaagctgaagagcaatgatggagaggagcggctggccgtggtgcggctgctggccaagctgtttggcagcaaggacagcgacctggccacccagaaccggcccctgtggcagtgcttcctgggccgcttcaatgacatccacgtgcctgtgcggctggagagcgtgaagtttgccagccactgcctgatgaaccacccagacctggccaaggacctgacagagtacctgaaggtgcgcagccatgaccctgaggaggccatcagacatgatgtgattgtgaccatcatcacagctgccaagagggacctggccctggtgaatgaccagctgctgggctttgtgcgggagaggaccctggacaagcgctggagggtgaggaaggaggccatgatgggcctggcccagctgtacaagaagtactgcctgcacggggaggccggcaaggaggccgctgagaaggtgtcctggatcaaggacaagctgctgcacatctactaccagaacagcattgatgacaagctgctggtggagaagatctttgcccagtacctggtgccccacaacctggagacagaggagaggatgaagtgcctgtactacctgtatgccagcctggaccccaatgctgtgaaggccctgaatgagatgtggaagtgccagaacatgctgcggagccacgtgcgggagctgctggacctgcacaagcagcccaccagcgaggccaactgcagcgccatgtttgggaagctgatgaccatcgccaagaacctgcctgaccccgggaaggcccaggactttgtgaagaagttcaaccaggtgctgggagatgatgagaagctgcggagccagctggagctgctgatcagccccacctgcagctgcaagcaggccgacatctgtgtggtgtccaagagctacttcaccctcttcctgtag

SEQ ID NO: 40471 - DNA, 1803 bp, Artificial Sequence
  derived and/or modified sequence
atggacttcaccgcccagcccaagcccgccaccgccctgtgcggcgtggtgagcgccgatggcaagatagcctatcctccaggcgtgaaagagattacggataaaattaccacggatgagatgattaagaggttaaaaatggttgtgaagacctttatggatatggatcaggatagcgaggatgaaaaacagcagtatctccctttggcccttcacctggcttctgaattttttctgcgaaacccgaacaaagatgtgcgactcctagtggcctgttgcctggccgatatcttccgtatatacgctcctgaggcaccatacacgtcccatgacaaactcaaggacatcttcctcttcattacacgccagctgaaaggcttggaggacaccaaaagtccacaatttaaccgttacttctatctgctggagaaccttgcctgggtgaaatcgtacaatatttgttttgaactagaggattgtaacgaaatttttatccaactgttcagaactctttttagtgtcataaacaactctcacaacaagaaagtgcagatgcatatgctggatcttatgtcaagcatcatcatggagggcgatggtgtgacccaggagctcttagactccatcctgatcaaccttattcctgcccacaagaacctgaacaaacagagctttgatttagccaaagtgctccttaaaagaactgtgcagaccattgaggcctgtatcgctaactttttcaatcaggtcttggtcctgggcaggagctccgtaagcgacctttcagaacacgtgttcgatctgatccaggaactcttcgccatcgacccccacctcctgctgagtgtcatgccccaactcgagttcaaactgaaatccaatgatggcgaggaaagactcgctgttgtacgtttattggccaagttatttggcagcaaggacagcgacctggcaactcagaatcgccccctctggcagtgttttttggggcgattcaatgatatacacgtccccgtcagattagagtctgtgaagtttgcaagccactgcttgatgaatcaccctgatctggctaaggacctgaccgaatacctcaaggtccgcagtcacgatcccgaagaggctataagacacgacgtaattgtaactataataaccgcggcaaagcgcgatctcgccctggtgaacgaccagttactgggatttgtcagagagcgcactttggacaaaagatggagggtccgcaaggaagccatgatgggtcttgcacagttatataagaagtactgtctgcacggagaggcgggaaaagaggccgccgagaaggtctcctggatcaaggacaagttgttgcatatctactatcagaatagcattgacgacaagctgttggttgagaagattttcgctcagtatcttgtcccccacaacctcgagacagaggaaaggatgaagtgtctgtactacctgtacgcgtctctggatcctaacgccgtgaaggccctaaacgagatgtggaaatgtcaaaacatgctcaggtcgcacgtccgcgagctactcgacctgcacaagcagccaaccagcgaggctaactgctctgccatgtttgggaagttgatgactatcgccaagaacctgccggacccaggcaaagcacaggacttcgtgaagaagttcaaccaggtgctgggagatgacgaaaaattgcgcagtcagctggaactcctaatatcgccaacttgtagttgtaagcaggctgacatctgtgtcgttagcaaaagctacttcacattgtttctttag

SEQ ID NO: 40472 - DNA, 2685 bp, Artificial Sequence
  derived and/or modified sequence
ggccggcggaggaaggggagggagcgaggagcgcgcgctgctctcgcgtgctctcgcgccgctcgcgtgaccggccggtgtgtgcgcgaggccccggctcccggggcacggacggccgggcgcgcgcctctgcgaggggcgtccgggtccgagtcggcggtccgggccggcgcgaggtgcgtgcgggcgggccgcgggggtcccggacggacacaagcgcacacactcccggaggagccttcgaggctgctcttcctcggccagacggagagcggcactgtctccccgcccagcgctcactcgccccgcgtctccccccgcggcggctgctcctcctcggcaccgccagccccagcgccgctcccgggcgggcgggcggcggcggcggcggcggcgggacccgcggagccgctttgtgtgcagcccgactaggggcggcggcgcaaccacctgacagaggcccgggcgctcgatgcaccttccgcccgcatgaggaggagaggccggtagaggactgtgaaccaaaagttgtcccccaggatggacttcaccgcgcagcccaagcctgccactgccctctgtggcgtcgtgagtgccgacgggaagatcgcttaccctccgggggtaaaagagatcaccgacaagatcaccacggacgagatgatcaaacgcctgaagatggtagtgaaaacctttatggatatggatcaggactcagaagatgaaaaacagcagtatctcccactagccttgcatcttgcatctgaattcttcctcaggaaccccaataaagatgtgcgtctccttgtagcatgttgtttggctgatatctttcgtatctatgccccagaagctccatatacttcccatgataaacttaaggacatatttttgtttattaccagacaattaaaaggtttggaggatacaaagagtccacagtttaatagatacttttatttattagagaatttagcttgggttaaatcatataacatctgctttgaattggaagattgcaatgaaatttttattcagctttttagaactctcttctcagtgatcaacaatagccacaataagaaggtacaaatgcacatgctagatttgatgagttctatcatcatggaaggtgatggagttactcaagaattattggactccattcttattaacctcattcctgcacataagaacttaaataaacagtcctttgaccttgcaaaagtgctattgaaaagaacagtccagactattgaggcatgcattgctaattttttcaatcaagtcctggtgctgggaagatcatcagtaagtgatttgtcagaacatgtatttgatctgattcaggaactttttgctatagatcctcatttattattatccgtcatgccacagcttgaattcaaactaaagagcaatgatggagaagagcgattagctgttgttcgacttctagctaaattgtttggctccaaagattctgatttggcaacacagaatcgtcctctttggcaatgttttcttggacgatttaatgatattcatgttcctgtgagattagaaagtgtgaaatttgccagtcattgtttaatgaatcacccagatttagcgaaggatctcacagaatatttaaaggttagatcacatgatccagaagaagctattcgtcatgatgtcattgttactataataacagctgccaagagggacctggccttagtaaatgatcagctgcttggctttgtaagggaaagaacactggataaacggtggcgagtaagaaaagaagctatgatgggtctggctcagctttataagaaatactgtcttcatggtgaagcaggaaaggaagctgcagagaaagtcagctggataaaggacaaacttctgcatatttattatcagaacagcattgacgacaaactgttggtagagaaaatctttgctcagtatcttgtcccccacaacctggaaacagaagagagaatgaaatgcttatattacttatatgctagtttggatccaaatgctgtaaaagctctcaacgaaatgtggaagtgtcagaacatgcttcggagccatgtacgcgaactattggatttgcacaagcagcctacatcagaggctaactgttctgccatgtttggaaaactgatgaccatagcaaagaatttgcctgaccccgggaaagcacaagattttgtgaagaaatttaaccaggttctcggcgatgatgagaaacttcggtctcagttggagttattaattagcccaacctgttcttgcaaacaagcagatatttgtgtggttagtaaatcatacttcacactttttctctagctttacttacagaaatatgtattttattaaagcctgttttacatacagtgatttgtgtaaatgtaacaatattgtgagctctgaattactttggagtatatctattgtcaagttaattctctatttaccattcactctcagccacattccaggaaaataactaaagaactaagccagggagattggtcttaggaattttacaagataaagtactttgaacttagtagacattcattgagtaatgataagtattttctgaatgcttgtgtacatgtgcattttcttctttcatgtattagaatggaaataatcgtcaataaattagtagtagtaacattgcca

SEQ ID NO: 40473 - DNA, 1803 bp, Artificial Sequence
  derived and/or modified sequence
atggactttacagctcaacctaaacccgctaccgctttgtgcggagtcgtgagtgctgacggaaagatagcataccctcctggggtcaaggagattaccgacaaaataactacagacgagatgattaaacggcttaagatggtcgttaagacttttatggacatggaccaagactcagaggatgagaagcagcaatatctgcccctggcgcttcatctggcttcagagttttttctgcgcaacccaaacaaggacgtgcggctgttagtggcctgctgtcttgcagacatttttaggatctacgcccctgaggctccctacacttctcatgacaagctgaaggacatcttcctgttcatcacacggcagctgaaaggcctcgaggatactaaatctccccagttcaacagatatttctatttattggaaaacttagcctgggtgaaaagctataacatctgctttgaactggaggattgcaacgaaatattcattcagctattccggaccctctttagcgttatcaataattcacataataagaaggtacagatgcacatgttggacctgatgtccagtatcataatggagggtgacggggtaacccaggaactgctcgactccattttgattaacttgatcccggctcacaaaaacctaaataaacagagcttcgatctggctaaagtcttgctgaagagaaccgtacaaacaattgaagcctgtatagcaaactttttcaaccaagtgcttgtgctgggaaggagtagtgtgagcgacttaagtgaacacgtcttcgacctgatacaggagctgttcgccattgatcctcacctgcttctttccgtcatgccacagctggagtttaaactcaagagtaatgacggcgaggagcgcctagccgtggtcagactgctggctaagctatttggatccaaggactcagatctagccacacaaaatcgccctctgtggcagtgtttccttggcagattcaatgacattcatgtccccgtgagactcgaaagtgtcaaattcgctagtcactgcttgatgaaccatcctgatctcgctaaagatttgaccgagtatttgaaagttagaagccacgacccagaagaagctattcggcacgatgtgattgtgactattattaccgccgcaaagcgagacctggccctggtgaacgatcagctgctgggctttgtgcgagaacgtactctggacaaacggtggcgtgtgaggaaggaggctatgatgggtttggctcagctctataagaaatactgtctgcatggagaggctggaaaggaggctgcggaaaaggtgtcatggatcaaagataagctcctgcacatatattatcagaatagcattgacgataaactgttggtggagaaaattttcgcgcagtatcttgtccctcataatctcgaaacagaggaaagaatgaagtgtctgtattacctctacgcttcccttgacccgaatgcagtgaaagcactgaatgaaatgtggaagtgtcagaacatgctcagatctcatgttagggagctgctcgacttacataaacagcccacatccgaagctaattgttccgccatgtttgggaagctgatgactatcgccaaaaacctgcctgatccaggaaaggcccaggatttcgttaaaaagtttaatcaagtactcggagacgacgaaaaactccggtcacagctcgaactgctgatcagtccaacttgttcttgtaaacaggcagacatctgcgtagtgtcaaagagttactttactctgttcctgtag

SEQ ID NO: 40474 - DNA, 1803 bp, Artificial Sequence
  derived and/or modified sequence
atggacttcaccgcccagcccaagcccgccaccgccctgtgcggcgtggtgagcgccgacggcaagatcgcctacccccccggcgtgaaggagatcaccgacaagatcaccaccgacgagatgatcaagagactgaagatggtggtgaagaccttcatggacatggaccaggacagcgaggacgagaagcagcagtacctgcccctggccctgcacctggccagcgagttcttcctgagaaaccccaacaaggacgtgagactgctggtggcctgctgcctggccgacatcttcagaatctacgcccccgaggccccctacaccagccacgacaagctgaaggacatcttcctgttcatcaccagacagctgaagggcctggaggacaccaagagcccccagttcaacagatacttctacctgctggagaacctggcctgggtgaagagctacaacatctgcttcgagctggaggactgcaacgagatcttcatccagctgttcagaaccctgttcagcgtgatcaacaacagccacaacaagaaggtgcagatgcacatgctggacctgatgagcagcatcatcatggagggcgacggcgtgacccaggagctgctggacagcatcctgatcaacctgatccccgcccacaagaacctgaacaagcagagcttcgacctggccaaggtgctgctgaagagaaccgtgcagaccatcgaggcctgcatcgccaacttcttcaaccaggtgctggtgctgggcagaagcagcgtgagcgacctgagcgagcacgtgttcgacctgatccaggagctgttcgccatcgacccccacctgctgctgagcgtgatgccccagctggagttcaagctgaagagcaacgacggcgaggagagactggccgtggtgagactgctggccaagctgttcggcagcaaggacagcgacctggccacccagaacagacccctgtggcagtgcttcctgggcagattcaacgacatccacgtgcccgtgagactggagagcgtgaagttcgccagccactgcctgatgaaccaccccgacctggccaaggacctgaccgagtacctgaaggtgagaagccacgaccccgaggaggccatcagacacgacgtgatcgtgaccatcatcaccgccgccaagagagacctggccctggtgaacgaccagctgctgggcttcgtgagagagagaaccctggacaagagatggagagtgagaaaggaggccatgatgggcctggcccagctgtacaagaagtactgcctgcacggcgaggccggcaaggaggccgccgagaaggtgagctggatcaaggacaagctgctgcacatctactaccagaacagcatcgacgacaagctgctggtggagaagatcttcgcccagtacctggtgccccacaacctggagaccgaggagagaatgaagtgcctgtactacctgtacgccagcctggaccccaacgccgtgaaggccctgaacgagatgtggaagtgccagaacatgctgagaagccacgtgagagagctgctggacctgcacaagcagcccaccagcgaggccaactgcagcgccatgttcggcaagctgatgaccatcgccaagaacctgcccgaccccggcaaggcccaggacttcgtgaagaagttcaaccaggtgctgggcgacgacgagaagctgagaagccagctggagctgctgatcagccccacctgcagctgcaagcaggccgacatctgcgtggtgagcaagagctacttcaccctgttcctgtag

SEQ ID NO: 40475 - protein, 1105 aa, Artificial Sequence
  derived and/or modified sequence
MAAGKSGGSAGEITFLEALARSESKRDGGFKNNWSFDHEEESEGDTDKDGTNLLSVDEDEDSETSKGKKLNRRSEIVANSSGEFILKTYVRRNKSESFKTLKGNPIGLNMLSNNKKLSENTQNTSLCSGTVVHGRRFHHAHAQIPVVKTAAQRKEYPPHVQKVEINPVRLSRLQGVERIMKKTEESESQVEPEIKRKVQQKRHCSTYQPTPPLSPASKKCLTHLEDLQRNCRQAITLNESTGPLLRTSIHQNSGGQKSQNTGLTTKKFYGNNVEKVPIDIIVNCDDSKHTYLQTNGKVILPGAKIPKITNLKERKTSLSDLNDPIILSSDDDDDNDRTNRRESISPQPADSACSSPAPSTGKVEAALNENTCRAERELRSIPEDSELNTVTLPRKARMKDQFGNSIINTPLKRRKVFSQEPPDALALSCQSSFDSVILNCRSIRVGTLFRLLIEPVIFCLDFIKIQLDEPDHDPVEIILNTSDLTKCEWCNVRKLPVVFLQAIPAVYQKLSIQLQMNKEDKVWNDCKGVNKLTNLEEQYIILIFQNGLDPPANMVFESIINEIGIKNNISNFFAKIPFEEANGRLVACTRTYEESIKGSCGQKENKIKTVSFESKIQLRSKQEFQFFDEEEETGENHTIFIGPVEKLIVYPPPPAKGGISVTNEDLHCLNEGEFLNDVIIDFYLKYLVLEKLKKEDADRIHIFSSFFYKRLNQRERRNHETTNLSIQQKRHGRVKTWTRHVDIFEKDFIFVPLNEAAHWFLAVVCFPGLEKPKYEPNPHYHENAVIQKCSTVEDSCISSSASEMESCSQNSSAKPVIKKMLNKKHCIAVIDSNPGQEESDPRYKRNICSVKYSVKKINHTASENEEFNKGESTSQKVADRTKSENGLQNESLSSTHHTDGLSKIRLNYSDESPEAGKMLEDELVDFSEDQDNQDDSSDDGFLADDNCSSEIGQWHLKPTICKQPCILLMDSLRGPSRSNVVKILREYLEVEWEVKKGSKRSFSKDVMKGSNPKVPQQNNFSDCGVYVLQYVESFFENPILSFELPMNLANWFPPPRMRTKREEIRNIILKLQEDQSKEKRKHKDTYSTEAPLGEGTEQYVNSISD

SEQ ID NO: 40476 - protein, 368 aa, Artificial Sequence
  derived and/or modified sequence
MKDQFGNSIINTPLKRRKVFSQEPPDALALSCQSSFDSVILNCRSIRVGTLFRLLIEPVIFCLDFIKIQLDEPDHDPVEIILNTSDLTKCEWCNVRKLPVVFLQAIPAVYQKLSIQLQMNKEDKVWNDCKGVNKLTNLEEQYIILIFQNGLDPPANMVFESIINEIGIKNNISNFFAKIPFEEANGRLVACTRTYEESIKGSCGQKENKIKTVSFESKIQLRSKQEFQFFDEEEETGENHTIFIGPVEKLIVYPPPPAKGGISVTNEDLHCLNEGEFLNDVIIDFYLKYLVLEKLKKEDADRIHIFSSFFYKRLNQRERRNHETTNLSIQQKRHGRVKTWTRHVDIFEKDFIFVPLNEAWLKQNQTKL

SEQ ID NO: 40477 - DNA, 3318 bp, Artificial Sequence
  derived and/or modified sequence
atggccgccggcaagagcggcggcagcgccggcgagatcaccttcctggaggccctggccagaagcgagagcaagagagacggcggcttcaagaacaactggagcttcgaccacgaggaggagagcgagggcgacaccgacaaggacggcaccaacctgctgagcgtggacgaggacgaggacagcgagaccagcaagggcaagaagctgaacagaagaagcgagatcgtggccaacagcagcggcgagttcatcctgaagacctacgtgagaagaaacaagagcgagagcttcaagaccctgaagggcaaccccatcggcctgaacatgctgagcaacaacaagaagctgagcgagaacacccagaacaccagcctgtgcagcggcaccgtggtgcacggcagaagattccaccacgcccacgcccagatccccgtggtgaagaccgccgcccagagaaaggagtaccccccccacgtgcagaaggtggagatcaaccccgtgagactgagcagactgcagggcgtggagagaatcatgaagaagaccgaggagagcgagagccaggtggagcccgagatcaagagaaaggtgcagcagaagagacactgcagcacctaccagcccaccccccccctgagccccgccagcaagaagtgcctgacccacctggaggacctgcagagaaactgcagacaggccatcaccctgaacgagagcaccggccccctgctgagaaccagcatccaccagaacagcggcggccagaagagccagaacaccggcctgaccaccaagaagttctacggcaacaacgtggagaaggtgcccatcgacatcatcgtgaactgcgacgacagcaagcacacctacctgcagaccaacggcaaggtgatcctgcccggcgccaagatccccaagatcaccaacctgaaggagagaaagaccagcctgagcgacctgaacgaccccatcatcctgagcagcgacgacgacgacgacaacgacagaaccaacagaagagagagcatcagcccccagcccgccgacagcgcctgcagcagccccgcccccagcaccggcaaggtggaggccgccctgaacgagaacacctgcagagccgagagagagctgagaagcatccccgaggacagcgagctgaacaccgtgaccctgcccagaaaggccagaatgaaggaccagttcggcaacagcatcatcaacacccccctgaagagaagaaaggtgttcagccaggagccccccgacgccctggccctgagctgccagagcagcttcgacagcgtgatcctgaactgcagaagcatcagagtgggcaccctgttcagactgctgatcgagcccgtgatcttctgcctggacttcatcaagatccagctggacgagcccgaccacgaccccgtggagatcatcctgaacaccagcgacctgaccaagtgcgagtggtgcaacgtgagaaagctgcccgtggtgttcctgcaggccatccccgccgtgtaccagaagctgagcatccagctgcagatgaacaaggaggacaaggtgtggaacgactgcaagggcgtgaacaagctgaccaacctggaggagcagtacatcatcctgatcttccagaacggcctggacccccccgccaacatggtgttcgagagcatcatcaacgagatcggcatcaagaacaacatcagcaacttcttcgccaagatccccttcgaggaggccaacggcagactggtggcctgcaccagaacctacgaggagagcatcaagggcagctgcggccagaaggagaacaagatcaagaccgtgagcttcgagagcaagatccagctgagaagcaagcaggagttccagttcttcgacgaggaggaggagaccggcgagaaccacaccatcttcatcggccccgtggagaagctgatcgtgtacccccccccccccgccaagggcggcatcagcgtgaccaacgaggacctgcactgcctgaacgagggcgagttcctgaacgacgtgatcatcgacttctacctgaagtacctggtgctggagaagctgaagaaggaggacgccgacagaatccacatcttcagcagcttcttctacaagagactgaaccagagagagagaagaaaccacgagaccaccaacctgagcatccagcagaagagacacggcagagtgaagacctggaccagacacgtggacatcttcgagaaggacttcatcttcgtgcccctgaacgaggccgcccactggttcctggccgtggtgtgcttccccggcctggagaagcccaagtacgagcccaacccccactaccacgagaacgccgtgatccagaagtgcagcaccgtggaggacagctgcatcagcagcagcgccagcgagatggagagctgcagccagaacagcagcgccaagcccgtgatcaagaagatgctgaacaagaagcactgcatcgccgtgatcgacagcaaccccggccaggaggagagcgaccccagatacaagagaaacatctgcagcgtgaagtacagcgtgaagaagatcaaccacaccgccagcgagaacgaggagttcaacaagggcgagagcaccagccagaaggtggccgacagaaccaagagcgagaacggcctgcagaacgagagcctgagcagcacccaccacaccgacggcctgagcaagatcagactgaactacagcgacgagagccccgaggccggcaagatgctggaggacgagctggtggacttcagcgaggaccaggacaaccaggacgacagcagcgacgacggcttcctggccgacgacaactgcagcagcgagatcggccagtggcacctgaagcccaccatctgcaagcagccctgcatcctgctgatggacagcctgagaggccccagcagaagcaacgtggtgaagatcctgagagagtacctggaggtggagtgggaggtgaagaagggcagcaagagaagcttcagcaaggacgtgatgaagggcagcaaccccaaggtgccccagcagaacaacttcagcgactgcggcgtgtacgtgctgcagtacgtggagagcttcttcgagaaccccatcctgagcttcgagctgcccatgaacctggccaactggttccccccccccagaatgagaaccaagagagaggagatcagaaacatcatcctgaagctgcaggaggaccagagcaaggagaagagaaagcacaaggacacctacagcaccgaggcccccctgggcgagggcaccgagcagtacgtgaacagcatcagcgactag

SEQ ID NO: 40478 - DNA, 3318 bp, Artificial Sequence
  derived and/or modified sequence
atggccgccggcaaaagcggtgggagtgcaggcgagattaccttcctcgaagctctggcccgaagcgaaagcaagagagacggcggctttaaaaacaactggtctttcgaccacgaggaagagtctgagggggacaccgacaaggatgggaccaatctgctcagcgtggacgaggacgaggattccgagacgagtaagggcaaaaagctgaatagacgcagcgagatagtggctaattccagtggggaattcatactgaagacctacgtgcgtagaaataaatctgagagttttaagactttgaagggcaacccaataggactaaatatgcttagcaacaataagaagctctctgagaacacccagaacacttcactgtgctccggcaccgtggtgcacgggagacgcttccatcatgcccacgctcaaattccagtggtcaagactgccgctcagcgcaaagagtaccctcctcatgtgcaaaaagtcgaaatcaatcctgttaggctttcccgactgcaaggtgtggagcgtataatgaaaaaaacagaagagagtgagagccaagtggaaccagaaattaagcgtaaggtccagcagaaacgacattgtagcacataccaacccacaccacccctctcccccgcttcaaagaaatgcctgactcatctcgaggacctccagaggaattgccgacaggcaatcacattgaacgaatccactgggcccttgctgcgaacctccatccatcagaatagcggaggccagaagagtcagaataccggcctgaccaccaaaaagttctatggaaacaacgtagagaaggtccccattgatattatcgttaactgcgacgatagcaagcatacttacctgcaaaccaatggtaaggtcattctacccggtgccaaaatccctaagattaccaacctgaaggagagaaagaccagtctctccgatttaaatgatccaattatactttcgtcagatgacgacgatgataacgatcggacaaatcgtcgagaatctatttctccacagccagccgactcagcatgctctagccctgctccgtcaaccggtaaagtcgaagcggcgctcaatgagaacacctgtcgcgcagaacgagaacttcgttcaattccagaagatagtgaactgaatacagtgactctacctcgtaaagcccggatgaaagaccagtttgggaattctattataaacaccccacttaagcgccgcaaggtcttttcacaagagccccccgatgcactggctttgtcttgccagagcagctttgacagtgtgatattgaactgccgctccattcgggtggggaccctgttcaggcttttgatagagccagtcatcttctgtctggactttataaaaatacagctggacgagccggatcacgatccagttgagatcattctgaatactagcgatttgaccaagtgtgagtggtgcaacgtgagaaaattgcctgttgtgtttctgcaagccatccccgcagtatatcaaaagctcagtatccagctgcagatgaacaaagaagacaaggtgtggaacgattgcaagggggtgaataaactgactaacttagaggagcagtatatcatcctgatctttcagaacgggctggatccgcccgccaacatggttttcgaatctattatcaatgaaattggaatcaaaaacaacattagcaacttttttgcaaaaatcccgttcgaagaggcgaacgggcgcctggttgcctgcacccgcacatacgaggaatcaatcaaaggcagctgcgggcaaaaagagaacaaaatcaaaaccgtttcctttgaatccaagatccaattgcgctccaaacaggagttccagttctttgatgaggaggaggaaaccggtgaaaatcacacgatcttcatcggtcccgtcgaaaagctcattgtgtacccacctccaccggccaaaggaggaattagtgtaactaatgaagatttgcactgcttgaacgagggggagtttcttaatgacgttatcatcgacttttatctgaagtatctggtactcgagaaactgaaaaaggaggacgctgatcgcatccacatttttagtagcttcttctataagcggctgaatcaacgcgagcggagaaaccatgaaactactaacctgagcatccaacagaagcgccacggacgcgtcaaaacttggacccggcacgtagacatcttcgaaaaagactttatcttcgttcccttaaatgaagctgcccactggtttctcgcagtggtgtgttttcccggattggagaaacccaagtacgagccgaacccgcattaccatgaaaacgcagtgatccagaagtgctccaccgtcgaggattcctgtattagctcatccgcatcagagatggaaagctgttcacagaatagtagcgctaagcccgttataaagaagatgcttaacaagaagcactgcatagcggtcatagattcaaacccgggacaggaagagtccgacccaaggtacaagaggaacatttgctcagtcaaatacagtgtcaagaagataaaccatacagcaagcgagaacgaagaattcaataaaggggagtccacatcccagaaagttgccgacaggacgaagtcagaaaacgggctacagaatgaatctttgtcatccacccatcacactgatggtttgtccaagatcaggcttaattattcagacgagtccccagaggctggaaaaatgttggaagacgagcttgtagactttagcgaagaccaggataaccaggacgacagcagcgacgacggcttcctggccgacgacaactgttcctcagaaattggtcagtggcacctgaaacccaccatctgtaagcagccctgcatcctactcatggattccctgagagggcctagcagaagtaatgtggtgaaaatattacgggaatatttagaagtggagtgggaagtgaagaagggatcaaagcggtctttcagcaaggacgtcatgaaagggtccaaccctaaggtgccccagcagaataacttctctgattgcggagtatacgtgctgcagtatgtggagagcttctttgagaaccccatactcagctttgagttgcctatgaacctggccaattggttcccacctcctaggatgcgcacaaagagggaggaaattcggaatataattctaaaattgcaggaggatcagtccaaggagaaaaggaaacataaagatacctattcgacggaggcaccactgggagagggcacagagcagtacgtgaatagcatatccgactag

SEQ ID NO: 40479 - DNA, 3318 bp, Artificial Sequence
  derived and/or modified sequence
atggctgctgggaagagcggcggcagcgctggggagatcaccttcctggaggccctggcccggtctgagagcaagagagatggcggcttcaagaacaactggagctttgaccacgaggaggagagcgagggggacacagacaaggatggcaccaacctgctgtctgtggatgaagatgaggacagcgagaccagcaagggcaagaagctgaacagaagaagtgagatcgtggccaacagcagtggagagttcatcctgaagacctacgtgagaagaaacaagtctgagagcttcaagaccctgaagggcaaccccatcggcctgaacatgctgagcaacaacaagaagctgtctgagaacacccagaacaccagcctgtgcagcggcaccgtggtgcatggaagacgcttccaccacgcccacgcccagatccctgtggtgaagacagctgcccagaggaaggagtacccacctcatgtgcagaaggtggagatcaaccctgtgcggctgagccggctgcagggcgtggagcgcatcatgaagaagacagaggagagcgagagccaggtggagcctgagatcaagaggaaggtgcagcagaagaggcactgcagcacctaccagcccaccccacccctgagccctgccagcaagaagtgcctgacccacctggaggacctgcagaggaactgccggcaggccatcaccctgaatgaaagcacaggccccctgctgcggaccagcatccaccagaacagcggcggccagaagagccagaacacaggcctgaccaccaagaagttctacggcaacaacgtggagaaggtgcccatcgacatcatcgtgaactgtgatgacagcaagcacacctacctgcagaccaacgggaaggtgatcctgcccggggccaagatccccaagatcaccaacctgaaggagaggaagaccagcctgagtgacctgaatgaccccatcatcctgagcagtgatgatgatgatgacaatgacaggaccaacagaagagagagcatcagcccccagcctgctgacagcgcctgcagcagccctgcccccagcacaggcaaggtggaggccgccctgaatgaaaacacctgcagagctgagcgggagctgcggagcatcccagaagattctgagctgaacacagtgaccctgcccaggaaggccaggatgaaggaccagtttggaaacagcatcatcaacacccccctgaagaggaggaaggtgttcagccaggagcccccagatgccctggccctgagctgccagagcagctttgattctgtcatcctgaactgccgcagcatccgggtgggcaccctcttccggctgctgattgagcctgtgatcttctgcctggacttcatcaagatccagctggatgagccagaccatgaccctgtggagatcatcctgaacaccagtgacctgaccaagtgtgagtggtgcaatgtgaggaagctgcctgtggtgttcctgcaggccatcccagctgtgtaccagaagctgagcatccagctgcagatgaacaaggaggacaaggtgtggaatgactgcaagggcgtgaacaagctgaccaacctggaggagcagtacatcatcctgatcttccagaatggcctggaccccccagccaacatggtgtttgagagcatcatcaatgaaattggcatcaagaacaacatcagcaacttctttgccaagatcccctttgaggaggccaacggccgcctggtggcctgcaccaggacctatgaggagagcatcaagggcagctgtggccagaaggagaacaagatcaagacagtgtcctttgagagcaagatccagctgcggagcaagcaggagttccagttctttgatgaggaggaggagactggagagaaccacaccatcttcatcggccctgtggagaagctgattgtgtacccacctcctccagccaagggcggcatctctgtgaccaatgaagacctgcactgcctgaatgaaggagagttcctgaatgatgtgatcatcgacttctacctgaagtacctggtgctggagaagctgaagaaggaggatgctgaccgcatccacatcttcagcagcttcttctacaagaggctgaaccagcgggagaggagaaatcatgagaccaccaacctgagcatccagcagaagagacatggccgggtgaagacctggaccaggcatgtggacatctttgagaaggacttcatctttgtgcccctgaatgaggccgcccactggttcctggccgtggtgtgcttccctggcctggagaagcccaagtatgagcccaacccccactaccatgaaaatgctgtgatccagaagtgcagcacagtggaggacagctgcatcagcagcagcgccagcgagatggagagctgcagccagaacagcagcgccaagcctgtgatcaagaagatgctgaacaagaagcactgcatcgccgtcatcgacagcaaccctggccaggaggagagtgacccccgctacaagaggaacatctgcagcgtgaagtacagcgtgaagaagatcaaccacacagcctctgaaaatgaggagttcaacaagggggagagcaccagccagaaggtggccgacaggaccaagtcagaaaatggcctgcagaatgaaagcctgagcagcacccaccacacagatggcctgagcaagatccggctgaactacagtgatgagagccctgaggccggcaagatgctggaggatgagctggtggacttcagcgaggaccaggacaaccaggatgacagcagtgatgatggcttcctggctgatgacaactgcagcagcgagatcggccagtggcacctgaagcccaccatctgcaagcagccctgcatcctgctgatggacagcctgcggggccccagccgcagcaatgtggtgaagatcctgcgggagtacctggaggtggagtgggaggtgaagaagggcagcaagaggagcttcagcaaggatgtgatgaagggcagcaaccccaaggtgccccagcagaacaacttcagtgactgtggggtgtatgtgctgcagtatgtggagagcttctttgagaaccccatcctgagctttgagctgcccatgaacctggccaactggttccccccacccaggatgaggaccaagcgggaggagatccggaacatcatcctgaagctgcaggaggaccagagcaaggagaagaggaagcacaaggacacctacagcacagaggcccccctgggggagggcacagagcagtatgtgaacagcatcagtgactag

SEQ ID NO: 40480 - DNA, 3318 bp, Artificial Sequence
  derived and/or modified sequence
atggccgccggcaagagcggcggcagcgccggcgagatcaccttcctggaggccctggctcggtccgagagcaagcgagacggcggcttcaagaataattggagttttgatcatgaggaagaatcagagggcgacactgacaaggacgggactaacctgttgagcgtggatgaagacgaagattctgaaacctccaaaggtaagaagttgaacaggcgttccgaaatagttgcgaatagcagtggtgagttcatccttaagacctacgtgaggagaaataagtccgaatctttcaagacgttaaagggaaaccctataggccttaatatgctttctaacaataagaaattgagcgagaatacacagaatacatctctgtgctcagggaccgtagtgcatggcaggagatttcaccacgcccatgcccagatcccggtggtgaagacggccgcacaacgcaaggagtatccgccacatgtccagaaggtcgagattaacccagtgcggctgtcacgtctacagggggtggaacgcattatgaagaaaacggaggaatcagagagtcaggtggagccggagatcaaaagaaaagttcagcagaaaagacactgcagcacataccagcccacacctcccctcagcccagcgagtaagaagtgccttacacatctggaggacttgcagagaaactgcaggcaggctattacattgaatgagagtacaggtccgctgctgcgaacaagtattcatcagaactctggagggcagaagtcccaaaacactggactgacgacgaagaaattctatgggaataacgtggaaaaggtccccatcgacattatagtcaactgcgacgatagcaagcatacatacctacagactaacgggaaagtgatcttaccgggagccaagatccccaaaattaccaatttaaaagaacgaaaaaccagcctctccgacctaaacgatccaattatcctttcctccgacgacgatgatgacaacgacaggactaatagacgggaatccataagccctcaacctgccgattctgcgtgcagctcccctgcaccaagcacaggcaaagttgaggctgccctgaacgaaaacacctgcagggccgagcgagaactccgcagcatccccgaagatagtgaacttaacaccgtcaccctccctaggaaggcccgcatgaaagaccagtttggaaattcaatcatcaacacccctttgaagcgcaggaaggtcttctcccaggagccacccgacgccttggctttgtcctgccagagctcttttgattctgttattctcaattgcaggtctattagagttggcaccctctttcggcttttgatcgaacccgtgatcttctgtctcgactttatcaaaattcagctggacgaacccgaccacgatccggtcgaaattatcctcaacacatctgacttgacaaaatgcgagtggtgcaacgtccggaagctgcctgtagttttcctgcaggcaatccccgccgtttaccaaaagctgtccatccaattacagatgaataaagaggataaggtgtggaatgactgcaaaggggtgaataaattaacgaaccttgaagaacaatacataattctgattttccagaacgggcttgatccaccagccaacatggtgttcgagtccatcatcaatgagattgggataaagaacaatataagcaatttctttgccaaaataccatttgaagaggccaatggtcgcttggttgcatgtacccgtacatacgaagaatcaataaaaggctcttgtggccagaaggagaacaaaatcaagaccgtgtcgtttgagagtaagattcagctcaggagcaagcaggagttccagttcttcgacgaagaagaggagactggcgaaaaccatacaatctttattggtccagttgaaaagctgatcgtctacccgccgccacccgcgaagggcggaatctcagtaactaacgaggacctccactgtctgaatgagggtgaatttctgaatgatgtgattatcgacttctacttgaaatacttagtcctcgaaaaactcaagaaggaagatgcggaccgcatccatatcttttcaagcttcttctacaaacggctgaaccaacgggaacgtcggaatcacgaaaccaccaatctttctatccagcagaaaagacatggccgggtgaaaacgtggaccaggcatgttgacatctttgagaaggacttcatattcgtgcccctgaatgaggctgcacactggttcctggccgttgtatgctttccgggtttggaaaaaccgaaatatgagcctaatccacactaccacgagaacgctgtgatacagaagtgcagcactgtcgaagactcctgtattagcagtagcgcaagtgagatggaaagttgtagccagaacagctccgcaaaaccagtgatcaaaaagatgttgaataagaaacactgcattgcggtgattgattctaatccaggacaggaggagtccgatccccggtacaagaggaacatatgctcagtgaagtatagtgtgaagaagattaaccacaccgcaagcgagaacgaggaattcaacaaaggggagagtacctcgcagaaggtcgccgatcgtactaagagtgaaaacgggctgcagaacgaatctctgtcttccacgcaccataccgacgggctgtccaagattcgcctcaactacagcgacgagtcccctgaagcagggaagatgttggaggatgaattggtagactttagcgaagaccaggacaatcaggacgacagtagtgatgacggattcctggcagacgacaactgcagtagcgagattggacagtggcaccttaagccgaccatctgtaagcagccatgtattcttcttatggactcacttcggggacccagtaggtctaatgtggtgaagatcctcagagagtatttggaggtcgagtgggaagtcaagaagggttctaagcgctccttttcaaaggacgtgatgaagggaagcaaccctaaagtacctcagcagaataacttctctgattgcggcgtttacgtgcttcagtatgtcgagagcttttttgagaaccctatcctgtcttttgaactcccaatgaacctggcaaactggttcccccccccgcgcatgagaaccaagcgggaggaaattcggaatatcatccttaagctacaggaggatcagagtaaagaaaagcgcaagcacaaggatacatacagtacagaagcccctctgggcgaggggaccgagcagtatgttaactccatctccgactag

SEQ ID NO: 40481 - DNA, 3318 bp, Artificial Sequence
  derived and/or modified sequence
atggctgccggtaaatctggcggatctgcaggggagattacgtttttagaggccctggctaggagtgaatccaaacgggacggtgggttcaaaaacaactggtcatttgatcatgaggaggaatcggagggagacaccgataaggatggaacaaatctcctgtctgtcgacgaagatgaggacagcgagacttccaaaggaaaaaagcttaatcgaagaagcgaaatagtcgcaaatagctcaggcgagtttattctaaagacatacgtgcggcgtaataaatcagagagcttcaagactctgaaaggcaacccaattgggttgaatatgcttagtaataacaaaaaattgtcggagaatactcaaaatacctctctgtgcagcggaaccgtggttcacggcagacggttccaccacgcccatgcccagattcccgtcgtaaaaaccgccgcacagcgcaaggaatacccgccacacgtacaaaaggtggagataaatccagtgcgtctgagtcgattgcaaggggtggagcggataatgaagaagacagaggagtctgagtcccaggtcgagcccgaaattaagaggaaagtccaacagaaaaggcactgctcaacttaccagccgactccacccctctccccagcatcaaaaaagtgtctcacacacctggaagatctccagcgtaactgtaggcaagccattaccctaaatgagtcaaccggacccctcctcagaacctctattcatcagaatagcggcggtcaaaagtcccagaataccggactgacgaccaaaaaattttacggcaacaatgtggagaaagtacctatcgatattatcgtgaactgcgacgactcaaagcatacttatctccagacgaacggtaaggtaatcttgcctggcgctaagattcccaagatcacaaacctgaaagagcgcaagacctccctctctgatctaaacgaccccatcattctaagctccgatgatgatgatgacaatgatcgcactaatcggagagagtcaatctctcctcaacctgctgattctgcttgcagtagcccggcacctagcactggcaaggtcgaggccgctctgaatgagaacacctgtcgcgctgagcgcgagctgcgctctatcccagaggattccgaactaaacactgtcacccttccaagaaaggcaaggatgaaggaccaatttggcaattctatcattaatacccctctgaaacggaggaaagtgtttagtcaggaacccccagacgctttggcgctttcctgccagtccagcttcgatagcgtcatactgaactgtcgaagtatcagagttggaacattgtttagacttcttattgaacccgtcatcttttgtctggacttcatcaagatacagctggatgagcccgaccatgaccctgtggagattattctgaatacgagtgacctgacaaagtgcgagtggtgtaatgtgaggaagctccccgttgttttcctgcaggctattcccgctgtttatcagaagctttccattcagctgcaaatgaataaagaggataaggtgtggaatgattgtaaaggagttaataagctgacaaatctcgaggagcaatatataatattgattttccagaacggcttagacccccctgcgaatatggtcttcgagagcataattaatgaaataggtatcaagaacaacatttcgaatttctttgccaagattcccttcgaggaggctaatgggaggctggtcgcctgtactaggacctacgaggagagcatcaagggctcttgtgggcagaaggaaaataaaattaaaactgtctcatttgagtccaagattcagctaagaagtaagcaggagtttcaattcttcgacgaagaggaagaaacaggtgagaaccatacaatttttatagggccagtcgagaagttgattgtctacccccctccacccgctaagggcggaatcagcgtgactaacgaggatttacattgcctgaacgagggtgaattcttgaacgatgtcattatagacttctatcttaagtatctagtacttgaaaaactgaaaaaggaagatgctgaccgcatacatattttcagttctttcttctataagagactcaatcagagggaaagacgtaaccacgagactactaaccttagcattcagcagaaaagacacggccgagtgaagacctggacgaggcacgtggatatcttcgagaaagactttatcttcgtccctctgaacgaagccgcacactggttcctggcagttgtgtgcttcccgggattggaaaagccaaagtacgaaccaaacccccactaccatgaaaacgctgtgattcagaaatgcagcacggtcgaggatagttgtatttctagctccgccagcgagatggagtcctgttctcagaatagcagcgccaaacccgtcatcaagaagatgctgaataagaagcattgcatagccgtgatcgattcaaaccccggtcaggaagaatcagatcctcggtacaagagaaatatctgcagtgtgaaatactctgtgaaaaagattaaccatacagcctcggaaaatgaggagtttaataagggtgaatcgacatctcaaaaggtggcagataggaccaagtcagaaaatggccttcagaacgagtctttgagctctacgcatcatacagatggtctgtcaaaaatacgccttaactatagcgatgagtcacctgaggccggaaagatgctggaggatgaacttgttgacttcagtgaggaccaggacaatcaggatgatagttcagacgatggtttcttggctgacgacaattgcagctctgaaattgggcaatggcatctcaagcctaccatctgcaagcagccttgcatactcctgatggattccctcagagggccttcgcggtcaaatgtggtaaagatccttcgcgagtacctggaggtggagtgggaagttaagaagggctcgaagcgctccttttccaaggatgtgatgaaagggtcgaatccaaaggtacctcagcagaacaatttttccgattgcggcgtgtatgtcctgcagtatgtggagtctttctttgaaaaccccattctttcattcgaacttccaatgaatctcgccaactggtttccacccccacgtatgcgaaccaagcgcgaggagattagaaacattatcttgaagctgcaagaggatcagagtaaagagaaacggaagcacaaggacacttacagcaccgaggctccactcggggaggggacagagcagtacgtgaatagcattagtgactag

SEQ ID NO: 40482 - DNA, 4644 bp, Artificial Sequence
  derived and/or modified sequence
actaccttttctcttcggttggctgtagtttaaattctaaggtctcctcaagaaatgacattttcacatttcttaggcatctgtggtgccagaggagcaaacccatcgcacacgccaggtctgccatggggccctgggcggtggggattttggatgtaacgtgtctaggccgagcccgcgccgtgaaaggcctaccctgccgaaagcccgggcggcgggcgcccacaagtcagggctcggtgcggcgccgcagccagctctgcccgcgagccgagtccgggctgctgagggggagccgcgctgggggcggcggcgtcggggcgggggcgggagccgggcggcagctccagcgcccgtgggggaggagcggcagcggcggcggctggagctgctgtggcgaccgacgcgaggcggtggcagaggagacccacccctgtccacatggacagtcgcaaaggcctccgctgatgcattcacgcctgggcggggtgggcggacggccgtagcggcggcggctgcagaacgagctaggggcctgggggcgcctgacggtcgcagagacctcgccgctccggcgcggcgggtgcggccattttacggcctgggacgaagggaggcgtgtttgtgtgctcgctttcattctcctttcttgggaacccacggctgggggaagtttctcaggcagcctgggtgggcggtggatggggagtcgtgggccgagaggaaccgggcccgggaagcgccgtcgtcgtcgtcgccggtcgcgttcccccggagaggcctgagaagctcgggccgcgggcctcgctgcccgccagcccgcggacaggcccgggcgcgcctggcctgcctttgtataggcccgtctgaacgtgggagcgcagcccgcctgacggctgagcccgaggcccgcaaccctgcggcgtctaccctcctccggcgcggcccctcatcccggcgagcacggcggcggtgtgggccatggattaagaaggaggcggcgtgggaggaggaagatggcggccggcaagagcggcggtagcgcaggggagattacttttctggaagctttggctagatcagagtctaagagagatggaggttttaaaaataattggagctttgatcatgaagaagaaagtgaaggagatacagataaagatgggacaaatctgctcagtgtggatgaagatgaggattctgaaacctcaaaaggaaaaaagttaaatcgtcgatctgaaattgttgctaatagctctggtgaattcatcttgaagacatatgtaagacgaaacaagtctgaaagttttaaaactttgaaaggcaacccaattggacttaacatgttgagcaacaataagaaattgagtgaaaatacgcaaaatacgtcattatgttctggaactgtagttcatggtagacgttttcatcatgctcatgcacagataccagtagtaaaaacagcagcccaaaggaaagaatacccacctcatgtccaaaaagttgaaattaatcctgtaaggttaagtcggctccaaggtgttgaacgtataatgaagaaaacagaagagtccgaatcacaagtggagcctgaaattaagaggaaagtacaacagaaacgacactgtagtacctatcagcctactcctcctctatctcctgcttcaaaaaaatgtttaacccatttagaggatttgcaaagaaattgcagacaagctattactttgaatgagtctactggaccattattaagaacgtcaattcatcagaattctggaggacagaagtcacaaaacacaggattaacaaccaagaagttttatggcaacaatgtggaaaaggttccaattgatattattgtgaattgtgatgacagtaaacacacttatttacagactaatggaaaagtcattttacctggggcaaaaatacccaaaatcacaaacttgaaagaaaggaaaacaagtttgtcagacctaaatgatccaatcattttgtccagtgatgatgatgatgacaacgacagaactaacagaagagaaagcatatctcctcagcctgctgattcagcatgttcttcccctgcaccatccactggaaaagtagaagcagcgctaaatgaaaatacttgcagagcagagcgtgaactacgaagcattccagaagactcagagttaaatacagttacattgccaagaaaagcaagaatgaaagaccagtttggcaattctattatcaacacacctctgaaacgtcgtaaagtgttttctcaagaacctccagatgctttagctttaagctgccaaagttcctttgacagtgtcattttaaactgtcgaagtatacgagtaggaacactcttccggctgttaatagagcctgtaattttttgtttagattttatcaagatacagctagacgaaccagaccatgatcctgtagagattatattaaatacctctgatctaactaaatgtgaatggtgtaatgtccgaaaattacctgtagtgtttcttcaagcaattccagcagtttatcaaaagctgagcatccaactgcaaatgaataaggaggataaagtttggaatgattgtaaaggagtaaataaattaacaaatttagaagaacaatatataattttaatttttcaaaatggccttgatcctccggcaaatatggtatttgaaagtatcattaatgaaattggtataaagaataacatctccaatttttttgcgaaaattccctttgaagaagctaatggcagacttgttgcctgtacaagaacctatgaagagagcatcaaaggaagttgtgggcaaaaggaaaacaaaattaaaactgtatcatttgaatctaaaatacaacttagaagcaaacaagaatttcagttttttgatgaagaagaagaaactggagaaaaccacaccatcttcattggcccagtagaaaagttgatagtatatccaccacctccagctaagggaggcatctctgttaccaatgaggacctgcactgtctaaatgaaggagaatttttaaatgatgttattatagacttttatttgaaatacttggtgcttgaaaaactgaagaaggaagacgctgaccgaattcatatattcagttcttttttctataaacgccttaatcagagagagaggagaaatcatgaaacaactaatctgtcaatacagcaaaaacggcatgggagagtaaaaacatggacccggcacgtagatatttttgagaaggattttatttttgtaccccttaatgaagctgcacactggtttttggctgttgtttgtttccccggtttggaaaaaccaaagtatgaacctaatcctcattaccatgaaaatgctgtcatacagaaatgttcaactgtagaggacagttgtatttcttcttcagccagtgaaatggagagttgttcacaaaactcttctgccaagcctgtaattaagaagatgctaaacaaaaaacattgcatagctgtaattgattccaatcctgggcaggaagaaagtgaccctcgttataagagaaacatatgcagtgtaaaatacagtgtgaaaaaaataaatcatactgcgagtgaaaatgaagaattcaataaaggagaatctacatcccagaaagttgctgataggactaaaagtgagaatggcctacagaatgaaagtttaagttccacacatcatacagatggcttaagcaaaatcagactaaactatagcgatgaatcacctgaagctggtaaaatgcttgaagatgaactcgtcgacttctcagaagatcaggataaccaggatgatagcagtgacgatggattcctcgctgatgacaactgcagttcagaaataggacagtggcatttaaagcctactatctgtaaacaaccttgtatcctacttatggactcactccgaggcccttctcggtcaaatgttgtcaaaattttaagagagtatttagaagtggaatgggaagttaaaaaaggaagcaaaagaagtttttccaaagatgttatgaagggctctaatccaaaagtaccacagcaaaacaacttcagtgactgtggtgtatatgtattgcagtatgtagagagcttttttgagaatccaattctcagttttgaactacctatgaatttggcaaactggtttcctccaccaagaatgagaacaaaaagagaagaaatccgaaacataattctgaagctacaggaagatcagagcaaagagaaaagaaagcataaggacacttactcaacagaagcacctttaggcgaaggaacagaacaatatgtcaatagtatctcagattgaccatttctgttacttgtcatttctactttcagaaactaaatgactttcaaatttgggtatagacaataaagaactgaagtgctcactactcagtgatttggaaattttgatgcttgtataaatgtcagataattaatttccaaaggcgtatgtattaagtaaaagtctgtaaatatgttaatgaggccaatttttccagcatttataattatttttttcacttgttaggaagcttttgttatgtattttctgttaatagtacctaaaattgcaacttctaaacacaaataaaaagaaaatatttatagga

SEQ ID NO: 40483 - protein, 971 aa, Artificial Sequence
  derived and/or modified sequence
MKQQALTEFEAYKHRVEDMQLCAEAQHVQRIVTMSREVEEIRRKFEEKLRSFGQLQVQFEKDKRLALEDLQAAHRREIQELLKSQQDHSASVNKGQEKAEELHRMEVESLNKMLEELRLERKKLIEDYEGKLNKAQSFYERELDTLKRSQLFTAESLQASKEKEADLRKEFQGQEAILRKTIGKLKTELQMVQDEAGSLLDKCQKLQTALAIAENNVQVLQKQLDDAKEGEMALLSKHKEVESELAAARERLQQQASDLVLKASHIGMLQATQMTQEVTIKDLESEKSRVNERLSQLEEERAFLRSKTQSLDEEQKQQILELEKKVNEAKRTQQEYYERELKNLQSRLEEEVTQLNEAHSKTLEELAWKHHMAIEAVHSNAIRDKKKLQMDLEEQHNKDKLNLEEDKNQLQQELENLKEVLEDKLNTANQEIGHLQDMVRKSEQGLGSAEGLIASLQDSQERLQNELDLTKDSLKETKDALLNVEGELEQERQQHEETIAAMKEEEKLKVDKMAHDLEIKWTENLRQECSKLREELRLQHEEDKKSAMSQLLQLKDREKNAARDSWQKKVEDLLNQISLLKQNLEIQLSQSQTSLQQLQAQFTQERQRLTQELEELEEQHQQRHKSLKEAHVLAFQTMEEEKEKEQRALENHLQQKHSAELQSLKDAHRESMEGFRIEMEQELQTLRFELEDEGKAMLASLRSELNHQHAAAIDLLRHNHHQELAAAKMELERSIDISRRQSKEHICRITDLQEELRHREHHISELDKEVQHLHENISALTKELEFKGKEILRIRSESNQQIRLEEMEEKYLMRESKPEDIQMITELKAMLTERDQIIKKLIEDNKFYQLELVNRETNFNKVFNSSPTVGVINPLAKQKKKNDKSPTNRFVSVPNLSALESGGVGNGHPNRLDPIPNSPVHDIEFNSSKPLPQPVPPKGPKTFLSPAQSEASPVASPDPQRQEWFARYFTF

SEQ ID NO: 40484 - DNA, 2916 bp, Artificial Sequence
  derived and/or modified sequence
atgaagcagcaggccctgaccgagttcgaggcctacaagcacagagtggaggacatgcagctgtgcgccgaggcccagcacgtgcagagaatcgtgaccatgagcagagaggtggaggagatcagaagaaagttcgaggagaagctgagaagcttcggccagctgcaggtgcagttcgagaaggacaagagactggccctggaggacctgcaggccgcccacagaagagagatccaggagctgctgaagagccagcaggaccacagcgccagcgtgaacaagggccaggagaaggccgaggagctgcacagaatggaggtggagagcctgaacaagatgctggaggagctgagactggagagaaagaagctgatcgaggactacgagggcaagctgaacaaggcccagagcttctacgagagagagctggacaccctgaagagaagccagctgttcaccgccgagagcctgcaggccagcaaggagaaggaggccgacctgagaaaggagttccagggccaggaggccatcctgagaaagaccatcggcaagctgaagaccgagctgcagatggtgcaggacgaggccggcagcctgctggacaagtgccagaagctgcagaccgccctggccatcgccgagaacaacgtgcaggtgctgcagaagcagctggacgacgccaaggagggcgagatggccctgctgagcaagcacaaggaggtggagagcgagctggccgccgccagagagagactgcagcagcaggccagcgacctggtgctgaaggccagccacatcggcatgctgcaggccacccagatgacccaggaggtgaccatcaaggacctggagagcgagaagagcagagtgaacgagagactgagccagctggaggaggagagagccttcctgagaagcaagacccagagcctggacgaggagcagaagcagcagatcctggagctggagaagaaggtgaacgaggccaagagaacccagcaggagtactacgagagagagctgaagaacctgcagagcagactggaggaggaggtgacccagctgaacgaggcccacagcaagaccctggaggagctggcctggaagcaccacatggccatcgaggccgtgcacagcaacgccatcagagacaagaagaagctgcagatggacctggaggagcagcacaacaaggacaagctgaacctggaggaggacaagaaccagctgcagcaggagctggagaacctgaaggaggtgctggaggacaagctgaacaccgccaaccaggagatcggccacctgcaggacatggtgagaaagagcgagcagggcctgggcagcgccgagggcctgatcgccagcctgcaggacagccaggagagactgcagaacgagctggacctgaccaaggacagcctgaaggagaccaaggacgccctgctgaacgtggagggcgagctggagcaggagagacagcagcacgaggagaccatcgccgccatgaaggaggaggagaagctgaaggtggacaagatggcccacgacctggagatcaagtggaccgagaacctgagacaggagtgcagcaagctgagagaggagctgagactgcagcacgaggaggacaagaagagcgccatgagccagctgctgcagctgaaggacagagagaagaacgccgccagagacagctggcagaagaaggtggaggacctgctgaaccagatcagcctgctgaagcagaacctggagatccagctgagccagagccagaccagcctgcagcagctgcaggcccagttcacccaggagagacagagactgacccaggagctggaggagctggaggagcagcaccagcagagacacaagagcctgaaggaggcccacgtgctggccttccagaccatggaggaggagaaggagaaggagcagagagccctggagaaccacctgcagcagaagcacagcgccgagctgcagagcctgaaggacgcccacagagagagcatggagggcttcagaatcgagatggagcaggagctgcagaccctgagattcgagctggaggacgagggcaaggccatgctggccagcctgagaagcgagctgaaccaccagcacgccgccgccatcgacctgctgagacacaaccaccaccaggagctggccgccgccaagatggagctggagagaagcatcgacatcagcagaagacagagcaaggagcacatctgcagaatcaccgacctgcaggaggagctgagacacagagagcaccacatcagcgagctggacaaggaggtgcagcacctgcacgagaacatcagcgccctgaccaaggagctggagttcaagggcaaggagatcctgagaatcagaagcgagagcaaccagcagatcagactggaggagatggaggagaagtacctgatgagagagagcaagcccgaggacatccagatgatcaccgagctgaaggccatgctgaccgagagagaccagatcatcaagaagctgatcgaggacaacaagttctaccagctggagctggtgaacagagagaccaacttcaacaaggtgttcaacagcagccccaccgtgggcgtgatcaaccccctggccaagcagaagaagaagaacgacaagagccccaccaacagattcgtgagcgtgcccaacctgagcgccctggagagcggcggcgtgggcaacggccaccccaacagactggaccccatccccaacagccccgtgcacgacatcgagttcaacagcagcaagcccctgccccagcccgtgccccccaagggccccaagaccttcctgagccccgcccagagcgaggccagccccgtggccagccccgacccccagagacaggagtggttcgccagatacttcaccttctag

SEQ ID NO: 40485 - DNA, 2916 bp, Artificial Sequence
  derived and/or modified sequence
atgaagcagcaggccctgactgagtttgaggcctataagcatcgggtcgaggatatgcagttgtgcgctgaagcccagcatgtgcagcgcattgtgaccatgtcaagagaagtcgaggaaattagaaggaagttcgaggaaaagctcaggtcattcggtcagttacaggtccaattcgagaaagataagagacttgccctagaggatttgcaggcagctcaccgacgcgagatacaggaactgctcaagtcgcagcaagatcattcggcgagcgtaaacaaaggtcaagaaaaagccgaagagctacatcgaatggaggtggagtccctgaataaaatgctcgaagagctcaggctagagcgcaaaaagttaatagaagattacgaaggtaagctgaacaaggcccagagtttttacgaaagggagttggataccctgaaacgctcacagctcttcactgccgaaagcctgcaggcctccaaggaaaaagaagctgacctgagaaaggagtttcagggccaggaggcaattcttcgaaagacaatagggaagctgaagaccgagctgcagatggttcaagacgaggcaggttccctactggataagtgccagaagcttcagaccgcactggccattgccgagaataatgtgcaggtcctgcaaaagcagctcgacgacgcaaaggagggggagatggctttgctgtctaagcataaggaggtggaatcagaactggccgccgctcgtgagaggctccaacaacaggcctccgatctggtcctgaaggcctctcatattggcatgctacaggctacccagatgactcaggaagtgactatcaaagatttagaatcagaaaagtccagagtgaatgaacgtctgagccaacttgaagaggagagggcattcttgcgtagcaagacacagtccctggacgaagagcagaaacaacaaattctcgaactggagaagaaagtgaatgaagccaaacggacccagcaggagtattacgaaagagagcttaaaaacctgcagtctcgtctcgaagaggaagtaacacagttaaatgaggcccacagtaagaccctcgaggaactcgcgtggaagcaccacatggccatcgaggcagtccacagcaacgcaatacgcgacaaaaagaagctgcagatggatttggaagaacaacataataaggataagctgaatctcgaagaagacaagaatcagcttcaacaggagctggagaacctgaaggaggttctggaagacaaactgaataccgccaatcaggaaatcggtcatcttcaggacatggtgagaaagtccgaacaaggcctgggcagcgcggaagggctgattgcttcgctgcaggattctcaggaaagattgcagaatgagctagatctcactaaggattctctgaaagaaacaaaagacgccctgctgaatgtggaaggagaactcgagcaggagcggcagcagcatgaagaaaccatcgctgctatgaaagaagaagagaagcttaaggtcgataagatggcacatgatctcgagattaaatggacggagaatttgcgccaagagtgttccaagctgcgggaggagcttagactgcagcacgaagaggataaaaagtccgcgatgtctcagttgttacagctgaaggacagagaaaaaaatgccgcccgcgatagctggcagaagaaggtggaagacctcctcaatcagatctctcttctgaagcaaaacttggaaatccagcttagccagagccagacgtctttacaacagctgcaggctcaattcacacaggagcgccagcggctcacccaggagttggaggagctcgaagagcagcaccaacagcgccacaaatccctaaaggaggcacacgtgctggcctttcagactatggaggaggaaaaggagaaagagcagcgcgccctcgagaaccatctgcagcagaagcacagcgccgaattgcagagcctcaaggacgcccaccgggaaagtatggaagggttcagaattgaaatggagcaagaactccagacactccgcttcgagttggaggacgaggggaaagctatgcttgccagtctgcgtagtgagctgaatcaccagcacgcagcagccatagatctcctccggcacaaccaccatcaagaactcgccgccgctaagatggagttagagcggtcaatcgatatcagtcgacgccaatccaaagagcatatctgtcggattacagatctgcaggaggaattgaggcacagggagcaccacatctctgaactggataaagaggtgcagcacctccatgagaatataagcgcactaacaaaggagctggagtttaaaggaaaagagattcttcggataaggagtgagtccaatcagcagataagactcgaagagatggaggaaaagtacctgatgcgggaaagcaaacccgaagatattcaaatgattacggagctaaaagccatgttaacagagagggatcagatcattaagaagctgattgaggacaataaattttaccaactcgagctggtcaatagagaaacgaacttcaacaaagtgtttaattcttccccgactgtgggcgtgattaaccctctggccaaacagaagaaaaaaaacgataagtcacccactaacaggtttgtttctgtgccaaatctctcagccctcgagtccggaggggttgggaacggccaccccaaccgcctggatccgatacctaatagccccgtccacgacatcgagtttaactctagcaaacccctgcctcaacccgttcccccaaagggacccaagacatttttgagccccgcccaaagcgaggccagcccggtcgccagcccggatccccagcgccaagagtggttcgctcgctacttcaccttctag

SEQ ID NO: 40486 - DNA, 2916 bp, Artificial Sequence
  derived and/or modified sequence
atgaagcagcaggccctgacagaatttgaggcctacaagcaccgggtggaggacatgcagctgtgtgccgaggcccagcacgtgcagagaattgtgaccatgagccgggaggtggaggagatccggaggaagtttgaggagaagctgcggagctttggccagctgcaggtgcagtttgagaaggacaagaggctggccctggaggacctgcaggccgcccacagaagagagatccaggagctgctgaagagccagcaggaccacagcgcctctgtgaacaagggccaggagaaggccgaggagctgcacaggatggaggtggagagcctgaacaagatgctggaggagctgcggctggagaggaagaagctgattgaggactatgagggcaagctgaacaaggcccagagcttctatgagcgggagctggacaccctgaagaggagccagctgttcaccgctgagagcctgcaggccagcaaggagaaggaggccgacctgaggaaggagttccagggccaggaggccatcctgaggaagaccatcggcaagctgaagacagagctgcagatggtgcaggatgaggccggcagcctgctggacaagtgccagaagctgcagacagccctggccatcgccgagaacaacgtgcaggtgctgcagaagcagctggatgatgccaaggagggggagatggccctgctgagcaagcacaaggaggtggagagcgagctggccgccgcccgggagcggctgcagcagcaggccagtgacctggtgctgaaggccagccacatcggcatgctgcaggccacccagatgacccaggaggtgaccatcaaggacctggagagcgagaagagccgggtgaatgaaaggctgagccagctggaggaggagcgggccttcctgcggagcaagacccagagcctggatgaggagcagaagcagcagatcctggagctggagaagaaggtgaatgaggccaagaggacccagcaggagtactatgagcgggagctgaagaacctgcagagccggctggaggaggaggtgacccagctgaatgaggcccacagcaagaccctggaggagctggcctggaagcaccacatggccatcgaggccgtgcacagcaatgccatccgggacaagaagaagctgcagatggacctggaggagcagcacaacaaggacaagctgaacctggaggaggacaagaaccagctgcagcaggagctggagaacctgaaggaggtgctggaggacaagctgaacacagccaaccaggagatcggccacctgcaggacatggtgaggaagtctgagcagggcctgggcagcgctgagggcctgattgccagcctgcaggacagccaggagcggctgcagaatgagctggacctgaccaaggacagcctgaaggagaccaaggatgccctgctgaatgtggagggggagctggagcaggagcggcagcagcacgaggagaccatcgccgccatgaaggaggaggagaagctgaaggtggacaagatggcccatgacctggagatcaagtggacagagaacctgcggcaggagtgcagcaagctgcgggaggagctgcggctgcagcacgaggaggacaagaagagcgccatgagccagctgctgcagctgaaggaccgggagaagaatgctgcccgggacagctggcagaagaaggtggaggacctgctgaaccagatcagcctgctgaagcagaacctggagatccagctgagccagagccagaccagcctgcagcagctgcaggcccagttcacccaggagcggcagaggctgacccaggagctggaggagctggaggagcagcaccagcagaggcacaagagcctgaaggaggcccacgtgctggccttccagaccatggaggaggagaaggagaaggagcagagggccctggagaaccacctgcagcagaagcacagcgctgagctgcagagcctgaaggatgcccaccgggagagcatggagggcttcagaattgagatggagcaggagctgcagaccctgcgctttgagctggaggatgagggcaaggccatgctggccagcctgcggtctgagctgaaccaccagcacgccgccgccatcgacctgctgcggcacaaccaccaccaggagctggccgccgccaagatggagctggagaggagcattgacatcagccggcggcagagcaaggagcacatctgccgcatcacagacctgcaggaggagctgcggcaccgggagcaccacatcagcgagctggacaaggaggtgcagcacctgcacgagaacatcagcgccctgaccaaggagctggagttcaagggcaaggagatcctgcgcatccgctctgagagcaaccagcagatccggctggaggagatggaggagaagtacctgatgagggagagcaagccagaggacatccagatgatcacagagctgaaggccatgctgacagagcgggaccagatcatcaagaagctgattgaggacaacaagttctaccagctggagctggtgaaccgggagaccaacttcaacaaggtgttcaacagcagccccaccgtgggcgtcatcaaccccctggccaagcagaagaagaagaatgacaagagccccaccaacagatttgtgtctgtgcccaacctgagcgccctggagagcggaggagtgggcaatggccaccccaaccggctggaccccatccccaacagccctgtgcatgacatcgagttcaacagcagcaagcccctgccccagcctgtgccccccaagggccccaagaccttcctgagccctgcccagagcgaggccagccctgtggccagcccagacccccagaggcaggagtggtttgcccgctacttcaccttctag

SEQ ID NO: 40487 - DNA, 2916 bp, Artificial Sequence
  derived and/or modified sequence
atgaagcagcaggccctgaccgagttcgaggcctacaagcaccgggtggaggacatgcagctttgtgccgaagcacagcacgtgcagagaatcgtaacgatgtcaagggaggtggaagaaattcggcgcaaatttgaggaaaagctgcgctcttttggacagctacaggtgcagtttgagaaggacaaacgtctggcactagaagacctgcaagccgctcacagacgcgaaattcaggagcttcttaagtctcagcaggaccatagcgctagtgtgaataaagggcaggaaaaagcggaggagttgcatcggatggaagtagaaagcctgaacaagatgttggaagaactgagactggaacgaaagaagctgatcgaagactatgaaggtaagctgaataaagcgcagagcttctacgaaagggagctggataccctgaagcgatcccagttatttaccgctgagtccctgcaggctagcaaggaaaaagaggccgatctgaggaaggaatttcagggtcaggaagccatcttgaggaagacaatcggcaagctgaaaactgagctgcagatggttcaggatgaagctggctctcttctggacaagtgtcagaaattgcagacagcgctggccatcgctgaaaacaacgttcaggtgttgcagaagcaactggatgacgctaaagagggggagatggcgcttcttagtaagcacaaagaggtagagtccgaactggctgccgcacgcgaacgcctccaacagcaggcaagtgacctggtgctgaaggcgtcccatatcggcatgctgcaggctactcagatgacccaagaagtgactatcaaagacctcgagagcgagaaaagtagagtcaacgagcggctgtcccagctggaggaagaacgcgctttcctgaggagcaaaacccagtccctcgacgaagaacagaagcagcagatcctggagcttgagaaaaaagtcaatgaagcaaaacgaacccaacaggaatattatgaacgggaacttaaaaacctacagtcccgcctagaagaggaggtgacacaactgaatgaagctcactcgaaaacattggaggagctggcgtggaaacatcacatggctattgaagcagtgcactcaaacgccattagagacaagaagaaactccagatggacttagaagaacagcataacaaggacaagcttaatcttgaggaggacaaaaaccaactgcaacaggaacttgaaaatttgaaggaagtccttgaagacaagctgaataccgccaaccaagagattggtcatctgcaggatatggtacgaaagtcagagcaaggcctagggtccgcagagggccttattgcttctcttcaggactcacaggagcgccttcagaacgaacttgatttaacaaaagactctttgaaggagaccaaagacgcccttctgaatgtggagggggaactggagcaggagaggcagcaacatgaagagacgatagcagccatgaaagaggaggagaaactcaaagttgacaaaatggctcacgacctcgaaatcaaatggaccgagaatctgcgtcaggaatgttccaagcttagggaggaactgaggctccagcacgaagaagacaagaaatcggccatgtcccagctcctccagctgaaggacagggagaagaatgcagcaagggacagttggcagaagaaagtggaagacctgctgaaccaaatttcgttgctgaagcagaacctggagatacagcttagtcagtctcaaacaagcctacaacagctgcaggcacaattcacccaggaaagacagcgtctaacacaggagttagaagagttggaagaacaacaccagcaacggcacaagtccttgaaggaagcccatgttttagcttttcagactatggaggaagagaaagagaaagaacagcgcgccctggagaatcacctgcaacagaaacactctgcggaattgcaaagtttgaaagacgcccacagagaatctatggagggtttcaggatagagatggagcaggagctacagacactccgcttcgagttagaagacgaagggaaggctatgttagcctctctgcgaagcgagctcaatcatcagcatgcggccgctattgacctgctgaggcacaatcaccatcaagagcttgcagccgctaaaatggagcttgaaagatcaatcgacatatccaggcggcagtctaaagaacacatttgtagaattactgacctccaggaggagctaagacaccgggagcaccatatctctgagttggacaaggaggtacaacacttacacgaaaatatatcggccttgacaaaagaacttgagtttaagggcaaagagatcctgcgcatccggtctgagtctaatcaacagattcgcctggaggagatggaggagaagtacttaatgagggagagtaaacctgaagacatccaaatgattactgagctcaaggctatgctcacggaacgggaccaaataattaaaaaattgattgaagacaacaagttctaccagcttgaacttgtaaaccgcgaaactaattttaacaaagtgttcaacagctcccctacggtgggtgttataaaccctctggcaaagcaaaaaaaaaaaaacgataagtcccctaccaaccggtttgtgagcgttcccaatctgtccgctctggaaagcggcggagtgggaaacggccacccaaataggttggatcctattccaaatagccccgtccatgacatagaatttaattcctctaaacccctgccccagcctgtaccgccaaagggccctaagactttcctcagccccgcccaatcggaggccagtcccgtcgctagcccggacccacagcgtcaggagtggtttgcacgctactttactttttag

SEQ ID NO: 40488 - DNA, 2916 bp, Artificial Sequence
  derived and/or modified sequence
atgaaacaacaagctctgactgagtttgaagcatacaagcaccgcgtggaggatatgcagttgtgcgccgaggcccagcacgtccagcgcatcgtgacgatgagtcgggaggtggaagaaatacgcagaaaatttgaggagaagctacgctccttcggccaacttcaggtacagttcgaaaaagataaaagactggccctcgaggacctccaggcagctcaccgcagggagatacaggagctgctgaagagccagcaagaccactctgccagcgtgaacaagggacaagagaaagcagaggaacttcacagaatggaggtggagtcattaaacaagatgctggaggagttgaggcttgagagaaagaagctgatcgaggattacgagggcaagttaaacaaggcccagagcttctacgagcgagagttagatacattgaagaggagccagctgtttacagccgagtccttgcaggcttcgaaagagaaagaggctgatctcagaaaggaattccagggacaggaggccatcctgcgaaagacaattggtaaacttaagaccgaactgcaaatggtgcaggacgaagctggcagcctgctggacaaatgccaaaagttgcaaaccgccctggcgattgccgaaaataacgtacaggtgctgcagaagcagttggacgatgccaaagaaggggagatggcactactcagcaaacacaaggaggtggaatcagagctcgccgctgccagagaacggttacaacagcaggctagtgacctagtcctcaaagcaagccacattggaatgctacaggcaacgcagatgacacaggaagtcactattaaagacctggagagcgagaagagtcgagtgaacgagcgtctctcccaactagaagaggagagggcctttcttcggtcgaagactcagtcccttgacgaggagcagaagcaacagatcctggagctggagaagaaagttaatgaagctaaaagaacacaacaggaatattatgaaagggagttgaaaaacttgcaatccagactggaggaagaagtcacacagctcaacgaagctcattcgaaaacactggaagaactggcctggaagcatcacatggcaatcgaggctgtacactctaatgccatcagagacaaaaaaaagttgcagatggaccttgaagagcagcacaataaggataagctgaatctggaggaggacaaaaaccagctgcagcaggagttagaaaacctgaaggaagttctggaggataagctcaatacagccaatcaggaaatcggccatcttcaggatatggttaggaaatctgagcagggcttgggttcggccgaagggttgatcgcgtctctccaggactcacaggagcggctgcagaatgagctggacctcaccaaagacagtctaaaagagaccaaagacgccctcttgaatgtggaaggtgagctggaacaggaacggcagcagcacgaagagactattgcagctatgaaggaagaagaaaagttgaaagtggacaaaatggcccatgacctcgaaattaagtggaccgaaaacctgcggcaggagtgcagtaaactacgggaagagctcagactgcaacatgaagaagacaagaagtctgccatgtcgcagctacttcaactcaaggatcgggagaaaaatgccgctagggattcttggcaaaaaaaggtggaggatctcctcaaccagatctcactcctgaaacagaatctggagatccaactgtcgcagtcccagactagcctgcagcagcttcaggcgcagttcacacaagagaggcaacggctgactcaggaactggaggaactggaagagcagcatcagcagcgtcacaaatcactcaaggaggcccacgtgctggcttttcaaacaatggaggaggagaaggagaaagaacagagagcgttggagaaccatctgcaacagaaacatagcgcagagctgcagtcgctcaaggatgcccacagggagagtatggagggttttcgaattgaaatggaacaagaactccaaacgctccgctttgagcttgaagacgagggtaaagctatgctcgctagcctgagatcagaactgaaccaccagcatgcagcggctattgacctgctgcggcacaatcaccaccaggagttggccgctgctaaaatggaactcgaaagatccatcgatatatcaaggaggcagtctaaagagcacatctgtagaattaccgacctgcaggaagagttaaggcatagggagcaccatatcagcgaactagataaagaagtccagcatttacacgagaatatctccgcgcttacaaaagagttggaatttaaaggcaaggaaatccttaggatccgcagcgagtctaatcagcagatccggttagaagaaatggaggagaagtaccttatgagagagtcaaaacctgaggacatccaaatgatcacagagctgaaggcgatgctgacagagagggatcagattatcaagaagctgatagaagataataagttctaccaacttgaattggttaatcgggagaccaactttaataaggtgttcaattcgtcgcccaccgttggtgttatcaaccccctagctaagcaaaaaaaaaagaatgacaagagcccgactaaccggttcgtaagtgtgccaaatctgtcagcattggagtccgggggtgttggcaatggccatccgaatagactggacccaatacccaacagtccagtccacgacatcgagtttaacagctctaagcctctgccccagccagtgccacccaaaggtcctaagactttcctatcccctgcccagagcgaagccagtcctgtcgcatcacctgaccctcagagacaggagtggttcgccaggtactttactttttag

SEQ ID NO: 40489 - protein, 1185 aa, Artificial Sequence
  derived and/or modified sequence
HRMSFHPGRGCPRGRGGHGARPSAPSFRPQNLRLLHPQQPPVQYQYEPPSAPSTTFSNSPAPNFLPPRPDFVPFPPPMPPSAQGPLPPCPIRPPFPNHQMRHPFPVPPCFPPMPPPMPCPNNPPVPGAPPGQGTFPFMMPPPSMPHPPPPPVMPQQVNYQYPPGYSHHNFPPPSFNSFQNNPSSFLPSANNSSSPHFRHLPPYPLPKAPSERRSPERLKHYDDHRHRDHSHGRGERHRSLDRRERGRSPDRRRQDSRYRSDYDRGRTPSRHRSYERSRERERERHRHRDNRRSPSLERSYKKEYKRSGSRSPSREKKRARWEEEKDRWSDNQSSGKDKNYTSIKEKEPEETMPDKNEEEEEELLKPVWIRCTHSENYYSSDPMDQVGDSTVVGTSRLRDLYDKFEEELGSRQEKAKAARPPWEPPKTKLDEDLESSSESECESDEDSTCSSSSDSEVFDVIAEIKRKKAHPDRLHDELWYNDPGQMNDGPLCKCSAKARRTGIRHSIYPGEEAIKPCRPMTNNAGRLFHYRITVSPPTNFLTDRPTVIEYDDHEYIFEGFSMFAHAPLTNIPLCKVIRFNIDYTIHFIEEMMPENFCVKGLELFSLFLFRDILELYDWNLKGPLFEDSPPCCPRFHFMPRFVRFLPDGGKEVLSMHQILLYLLRCSKALVPEEEIANMLQWEELEWQKYAEECKGMIVTNPGTKPSSVRIDQLDREQFNPDVITFPIIVHFGIRPAQLSYAGDPQYQKLWKSYVKLRHLLANSPKVKQTDKQKLAQREEALQKIRQKNTMRREVTVELSSQGFWKTGIRSDVCQHAMMLPVLTHHIRYHQCLMHLDKLIGYTFQDRCLLQLAMTHPSHHLNFGMNPDHARNSLSNCGIRQPKYGDRKVHHMHMRKKGINTLINIMSRLGQDDPTPSRINHNERLEFLGDAVVEFLTSVHLYYLFPSLEEGGLATYRTAIVQNQHLAMLAKKLELDRFMLYAHGPDLCRESDLRHAMANCFEALIGAVYLEGSLEEAKQLFGRLLFNDPDLREVWLNYPLHPLQLQEPNTDRQLIETSPVLQKLTEFEEAIGVIFTHVRLLARAFTLRTVGFNHLTLGHNQRMEFLGDSIMQLVATEYLFIHFPDHHEGHLTLLRSSLVNNRTQAKVAEELGMQEWSIYLLSNCDCCLLRPSLVFLQTMNEVCSLK

SEQ ID NO: 40490 - protein, 1337 aa, Artificial Sequence
  derived and/or modified sequence
MMQGNTCHRMSFHPGRGCPRGRGGHGARPSAPSFRPQNLRLLHPQQPPVQYQYEPPSAPSTTFSNSPAPNFLPPRPDFVPFPPPMPPSAQGPLPPCPIRPPFPNHQMRHPFPVPPCFPPMPPPMPCPNNPPVPGAPPGQGTFPFMMPPPSMPHPPPPPVMPQQVNYQYPPGYSHHNFPPPSFNSFQNNPSSFLPSANNSSSPHFRHLPPYPLPKAPSERRSPERLKHYDDHRHRDHSHGRGERHRSLDRRERGRSPDRRRQDSRYRSDYDRGRTPSRHRSYERSRERERERHRHRDNRRSPSLERSYKKEYKRSGSRSPSREKKRARWEEEKDRWSDNQSSGKDKNYTSIKEKEPEETMPDKNEEEEEELLKPVWIRCTHSENYYSSDPMDQVGDSTVVGTSRLRDLYDKFEEELGSRQEKAKAARPPWEPPKTKLDEDLESSSESECESDEDSTCSSSSDSEVFDVIAEIKRKKAHPDRLHDELWYNDPGQMNDGPLCKCSAKARRTGIRHSIYPGEEAIKPCRPMTNNAGRLFHYRITVSPPTNFLTDRPTVIEYDDHEYIFEGFSMFAHAPLTNIPLCKVIRFNIDYTIHFIEEMMPENFCVKGLELFSLFLFRDILELYDWNLKGPLFEDSPPCCPRFHFMPRFVRFLPDGGKEVLSMHQILLYLLRCSKALVPEEEIANMLQWEELEWQKYAEECKGMIVTNPGTKPSSVRIDQLDREQFNPDVITFPIIVHFGIRPAQLSYAGDPQYQKLWKSYVKLRHLLANSPKVKQTDKQKLAQREEALQKIRQKNTMRREVTVELSSQGFWKTGIRSDVCQHAMMLPVLTHHIRYHQCLMHLDKLIGYTFQDRCLLQLAMTHPSHHLNFGMNPDHARNSLSNCGIRQPKYGDRKVHHMHMRKKGINTLINIMSRLGQDDPTPSRINHNERLEFLGDAVVEFLTSVHLYYLFPSLEEGGLATYRTAIVQNQHLAMLAKKLELDRFMLYAHGPDLCRESDLRHAMANCFEALIGAVYLEGSLEEAKQLFGRLLFNDPDLREVWLNYPLHPLQLQEPNTDRQLIETSPVLQKLTEFEEAIGVIFTHVRLLARAFTLRTVGFNHLTLGHNQRMEFLGDSIMQLVATEYLFIHFPDHHEGHLTLLRSSLVNNRTQAKVAEELGMQEYAITNDKTKRPVALRTKTLADLLESFIAALYIDKDLEYVHTFMNVCFFPRLKEFILNQDWNDPKSQLQQCCLTLRTEGKEPDIPLYKTLQTVGPSHARTYTVAVYFKGERIGCGKGPSIQQAEMGAAMDALEKYNFPQMAHQKRFIERKYRQELKEMRWEREHQEREPDETEDIKK

SEQ ID NO: 40491 - protein, 201 aa, Artificial Sequence
  derived and/or modified sequence
MMQGNTCHRMSFHPGRGCPRGRGGHGARPSAPSFRPQNLRLLHPQQPPVQYQYEPPSAPSTTFSNSPAPNFLPPRPDFVPFPPPMPPSAQGPLPPCPIRPPFPNHQMRHPFPVPPCFPPMPPPMPCPNNPPVPGAPPGQGTFPFMMPPPSMPHPPPPPVMPQQVNYQYPPGYSHHNFPPPSFNSFQNNPSSFLPSANNSSS

SEQ ID NO: 40492 - DNA, 3558 bp, Artificial Sequence
  derived and/or modified sequence
cataggatgagctttcaccccggtcggggatgtcctaggggaagaggagggcacggagccaggcccagcgcaccgagcttccgacctcaaaatctccgcctgctgcacccccagcaacctcccgtgcagtatcagtatgaaccgccatctgccccaagtacaacttttagcaacagcccagcacctaatttcctcccaccgcggcccgatttcgttccttttccccctcccatgcccccttcggcccaggggcccctgcccccatgtcctatccgcccccccttccccaaccaccagatgaggcatccatttcccgtccccccgtgcttcccgcctatgcccccccctatgccttgtccgaataaccctcctgtgccgggtgcgcccccaggacagggcacctttccctttatgatgccacctcctagtatgccccaccctccgcctccccccgttatgccacagcaggtcaattatcaatacccacctggctattcccatcacaacttcccccccccctcatttaactcctttcagaataacccttcctctttcttaccaagcgccaacaattctagcagtcctcatttcagacacctgcccccatacccactgccaaaggccccatcagaacgacgcagccctgagaggcttaagcattacgatgaccataggcacagggatcatagccacggacgtggtgaacggcatagaagcttggaccgcagagagcggggccgttccccagaccggagacggcaggattcccgatatcgtagcgattacgaccggggcaggacccctagtcggcaccggagttacgagaggagccgcgaacgggaaagggaacgtcatagacaccgtgataatagaagaagtccatccctggagaggagctacaaaaaggagtacaagcgaagtgggagccgctcgccatccagggaaaagaaacgtgctcgctgggaagaagaaaaagacaggtggagcgacaaccagtcctcaggcaaggataagaattataccagtattaaggaaaaggagcccgaagaaactatgccagataaaaacgaagaggaggaagaggagctcttaaagccggtatggattagatgtacacactccgaaaattattacagttcggacccaatggaccaggtaggggactcaactgtggtgggaacctcgagactcagggatctatacgataaatttgaggaagagcttggcagccgccaggagaaagccaaggccgctcggccgccctgggaaccgcccaagactaaattagatgaagatctcgaatcttcgagtgagtcagagtgcgaaagtgacgaggattccacatgcagtagtagctcagactccgaagtctttgacgtgattgccgaaatcaagcgtaaaaaagcccacccagaccggctacacgatgagctgtggtataatgatccgggccagatgaatgacggcccgctctgtaagtgttccgccaaagcacgccggaccggtattcgtcactcgatatacccaggggaagaggccatcaaaccttgccggccaatgaccaacaacgctgggcgccttttccactacaggattacagtgtctcccccgacaaattttctgacagaccgcccaaccgtgatagagtatgatgatcacgagtatatttttgagggtttttccatgttcgctcacgccccacttacaaacatccccctctgcaaggtgatacgtttcaatatcgattatactatacattttatcgaagagatgatgccagagaacttctgtgtgaagggcctcgaactgttctcgctgtttctgtttcgagatatcctggagttgtacgattggaacttgaaaggccccctgtttgaagatagtcctccatgctgcccccggttccacttcatgccacggttcgtaagatttctgcctgatggcggaaaggaggtcttaagcatgcaccagatcttgctctacctcttgcggtgctccaaggccctggtgcccgaagaggaaatcgcaaacatgctccagtgggaggagctggagtggcagaagtacgcggaagagtgtaaagggatgatcgtcaccaatccaggcacaaagcctagttctgtccgaatcgatcagctcgaccgggaacagttcaacccagacgtaatcactttcccgataatagttcactttggcatccggccagctcagctgtcttatgctggggacccacagtaccagaagctgtggaaatcgtacgtgaaactccggcacttgttagcaaactcccctaaggttaagcagacagataagcagaaactcgctcaaagggaggaggcattgcagaaaattcgccagaagaacaccatgagacgagaggtaacagtggagctgagctcccagggattttggaaaacaggcatccgttccgacgtctgccagcacgctatgatgctgcccgtattaacacatcatatcagataccatcagtgtctgatgcatctcgacaaattgataggctacacattccaggataggtgccttttacagctggcgatgacacatcccagtcatcatctgaactttggcatgaacccagatcatgcgaggaatagcctcagcaactgtggaatacgccagcctaaatatggagatcggaaagtgcatcacatgcacatgagaaagaagggcatcaacactctgataaatattatgagccgtctgggtcaggatgacccaacccccagtcgtattaaccataacgaaaggctggaattcctgggggatgctgtagtggaattcctgacatctgtgcatctgtactatctatttccatcccttgaggagggaggtctagcaacttacagaaccgccatcgtccagaaccaacatttagcaatgctcgcgaagaaactagagctcgaccgcttcatgctctatgcgcatggtcccgatttatgccgagaaagtgacctgagacatgccatggccaattgctttgaggctctgattggtgcggtgtatcttgaaggatcgctggaggaagctaagcagctcttcggaaggctgttattcaacgatcccgacctgagagaggtctggctcaattacccgctgcacccactgcagctccaggagcctaacaccgacagacagttaatcgaaacaagtccggttcttcagaaacttaccgagttcgaggaggctatcggcgtaatcttcactcacgtccggctcctggcccgcgctttcactttacgtacagtaggctttaatcacttgactctgggtcataatcaacggatggagttcctaggagactcgataatgcaactggtggctacggagtacctgttcattcattttcccgaccaccatgagggtcacctgactcttctgagaagttctttggtgaataacagaacccaagctaaggtagctgaggaacttggtatgcaggagtggagtatctacctgctaagtaactgtgactgctgcctgctgcgaccctctttggtttttctacagacaatgaacgaagtctgtagtctaaaatag

SEQ ID NO: 40493 - DNA, 4014 bp, Artificial Sequence
  derived and/or modified sequence
atgatgcagggcaatacctgtcacagaatgagttttcaccccggccgcgggtgcccgagaggacggggcggccatggggcccggccaagtgccccatcatttcggccacagaacctgcgcctgctccaccctcagcagccgcccgtgcagtatcaatatgagcctccatctgcgccttcaacgacattctcaaattctcctgccccgaactttctgcctccccggccggattttgtgcccttccccccccctatgccgccatctgcacagggccccctgcccccctgtcctatccgaccaccattccccaatcatcagatgaggcacccttttcctgtgcctccctgctttcccccgatgccaccccccatgccctgccccaacaatcctcccgtccctggcgccccccctggacagggtaccttccctttcatgatgccacctccatcgatgccccacccccctcctccgccagtcatgccacagcaggtgaactaccagtacccccctggatattcacaccacaacttcccaccaccttccttcaactcatttcagaacaatccatccagcttcttaccatccgcaaacaactcctcttcgcctcacttccgacacctcccaccttaccccttacccaaagcaccttcagaaaggcgaagccccgagcgcctgaaacactatgacgatcaccgccaccgggatcactctcacggccgcggggagcggcaccgcagtttggatcgccgtgagcgtgggaggagtcccgatcgacgcaggcaggacagtaggtacaggtctgattacgaccgcgggagaactccgtcgaggcatagatcctacgaacgcagtcgcgagagagaacgggaacgccatagacacagagataataggcgcagcccctcccttgaaagatcttataagaaagagtataagcgctctggtagccggtccccctcccgtgagaaaaaaagggcccgctgggaagaagaaaaagacaggtggtctgataatcaaagctcgggtaaagataagaattatactagtatcaaagagaaggaacccgaggaaacaatgcccgacaaaaacgaggaagaggaggaggaactactcaagcccgtatggattagatgtactcattccgagaactactacagcagtgatcccatggaccaggttggagattcgaccgttgttggcaccagtaggcttagggatttatacgacaaattcgaagaagagctgggctctcggcaggagaaggccaaggcggcgcgacccccttgggagcctcctaagaccaagctcgatgaagatctggagtcctctagcgaatctgaatgtgagagcgatgaagactccacatgcagcagctcctccgactccgaagttttcgacgttattgcagagatcaagcggaagaaagcgcatccggaccgtctgcacgacgagctttggtataatgaccccggccaaatgaacgatggcccactgtgtaaatgtagcgcgaaggcaaggcggactggcatccgacattctatttaccctggagaggaggccatcaagccctgcaggcctatgacaaataatgctgggcgcctattccactataggatcactgtctcccctccgacgaacttcctgacagaccgtcccactgtcatcgagtacgacgaccacgagtatatctttgaaggattctctatgtttgcgcatgctccactgactaatatccctctttgtaaggtgataagatttaatatagactacacaatccacttcatagaagagatgatgcccgagaacttctgtgtcaaagggctggagctgttttctcttttcttgttccgcgacattctcgagctttatgactggaacttgaagggccccttgtttgaagattcccccccttgttgtccccggttccactttatgccaagatttgtgcgctttctgcctgacggaggaaaagaggtgcttagtatgcaccagatcctgctctacctgctgcgatgcagcaaggcattggtcccagaggaggagatcgccaacatgttgcaatgggaggaactggagtggcaaaaatacgcagaagagtgtaagggcatgatcgtgaccaacccaggaactaagcccagtagtgtgcgaattgaccagctggacagagagcagtttaatcctgatgtgataacatttcctatcatcgttcactttggaatccgtccggcccagctctcttacgctggagatccccagtatcagaagctgtggaaaagctacgtgaaactccgtcacctgttagcaaacagcccaaaggtgaaacagactgacaaacagaaactagcccaaagagaagaagcactccagaagatccgtcagaaaaatacaatgagacgtgaggtgacagtggaactgtcaagtcagggcttttggaagaccgggatcaggagcgatgtgtgtcagcacgctatgatgctgcctgtgctcacacaccacatacgttaccatcagtgcctgatgcatctggacaagctcatcggatacacgtttcaggaccggtgcctgcttcagctggccatgacccatccaagtcatcatctgaattttgggatgaaccccgatcacgccagaaattctcttagcaactgcgggattcgacaacctaaatatggagaccggaaagtgcaccacatgcatatgaggaaaaaaggcattaataccctgatcaacattatgtcccgcctgggccaggatgacccgactccttctagaataaatcacaatgagaggttggagtttctgggtgatgccgtagtcgaatttcttacctccgtccatctgtattatctttttccatcactcgaagagggaggcctggccacatatcgaaccgcgattgtgcaaaaccagcatctggccatgctcgcaaaaaagctggagctcgaccgctttatgttgtacgcacacggaccggacttgtgtcgggaaagcgacttacgccacgcaatggccaattgctttgaagctcttataggggcagtttatctggaaggttccctcgaggaagccaagcagctgttcggtaggttgctatttaatgacccagacctccgggaagtgtggctgaattacccattgcaccctctccagctccaagaacccaataccgatcggcagcttattgaaacgtcccctgtcctgcagaagctgaccgagtttgaagaagcaatcggtgtgatctttacacacgttagattgcttgcacgagctttcaccctgcggaccgtgggcttcaaccacctgactctgggccacaaccaacggatggagttcctcggcgactctatcatgcagctagtagctacagaatacctgtttattcacttccccgatcatcacgagggccatcttacactactacgtagctcactggtaaacaaccgcacccaagcgaaagtggcagaggagcttggaatgcaggaatatgcgattacaaatgataagacgaagcgacctgtcgcgctgagaaccaagaccctcgctgacctgctggagtcttttattgccgcgctctacattgacaaggacctggagtatgtgcataccttcatgaacgtttgctttttcccacgtttaaaggagtttattctgaaccaagattggaacgatccaaagagtcagctccaacagtgttgcttaacattgcgcacagaggggaaggaaccggatatacctctgtacaagaccctgcagactgtaggtccctcacacgcaaggacctatacagttgcagtatattttaaaggcgagcgcatagggtgtggaaaaggacctagcattcagcaggccgagatgggcgctgccatggacgctctcgagaagtacaattttccccagatggctcaccagaaacggttcatcgaacgaaagtatcgccaggagttgaaagaaatgcggtgggaacgggaacaccaggagcgggaacccgacgagaccgaagacataaagaaatag

SEQ ID NO: 40494 - DNA, 3558 bp, Artificial Sequence
  derived and/or modified sequence
cacaggatgtccttccaccctggccggggctgcccccggggccggggcggccacggggcccggcccagcgcccccagcttccggccccagaacctgcggctgctgcacccccagcagccccctgtgcagtaccagtatgagccccccagcgcccccagcaccaccttcagcaacagccctgcccccaacttcctgccccccaggccagactttgtgcccttccccccacccatgcctccttctgcccagggccccctgcccccctgccccatccggccccccttccccaaccaccagatgaggcaccccttccctgtgcccccctgcttcccccccatgcccccacccatgccctgccccaacaacccccctgtgcctggggcccctcctggccagggcaccttccccttcatgatgcctcctccttccatgccccaccccccacctcctcctgtgatgccccagcaggtgaactaccagtacccacctggctacagccaccacaacttccccccacccagcttcaacagcttccagaacaaccccagcagcttcctgcccagcgccaacaacagcagcagcccccacttccgccacctgcccccctaccccctgcccaaggcccccagcgagcggcgcagccctgagcggctgaagcactatgatgaccaccgccaccgggaccacagccacggccgcggggagcggcacaggagcctggaccggcgggagcggggccgcagcccagacagaagacggcaggacagccgctacagaagtgactatgaccggggccgcacccccagccgccacaggagctatgaaagaagccgggagcgggagcgggagcggcaccgccaccgggacaacagaagaagccccagcctggagaggagctacaagaaggagtacaagaggagcggcagccgcagccccagccgggagaagaagagggcccgctgggaggaggagaaggaccgctggagcgacaaccagagcagcggcaaggacaagaactacaccagcatcaaggagaaggagcctgaggagaccatgccagacaagaatgaggaggaggaggaggagctgctgaagcctgtgtggatccgctgcacccacagcgagaactactacagcagtgaccccatggaccaggtgggggacagcacagtggtgggcaccagccggctgcgggacctgtatgacaagtttgaggaggagctgggcagccggcaggagaaggccaaggccgcccggcccccctgggagccccccaagaccaagctggatgaggacctggagagcagcagcgagagtgaatgtgagagtgatgaggacagcacctgcagcagcagcagtgacagcgaggtgtttgatgtgattgctgagatcaagaggaagaaggcccacccagaccggctgcatgatgagctgtggtacaatgaccccggccagatgaatgatggccccctgtgcaagtgcagcgccaaggccaggagaacaggcatccgccacagcatctacccaggagaggaggccatcaagccctgccggcccatgaccaacaatgccggccgcctcttccactaccgcatcaccgtgagcccccccaccaacttcctgacagaccggcccaccgtcatcgagtatgatgaccacgagtacatctttgagggcttctccatgtttgcccacgcccccctgaccaacatccccctgtgcaaggtgatccgcttcaacatcgactacaccatccacttcatcgaggagatgatgcctgagaacttctgtgtgaagggcctggagctgttcagcctcttcctgttccgggacatcctggagctgtatgactggaacctgaagggccccctgtttgaggacagccccccctgctgcccccgcttccacttcatgcccaggtttgtgcgcttcctgcctgatggcggcaaggaggtgctgtccatgcaccagatcctgctgtacctgctgcgctgcagcaaggccctggtgcctgaggaggagatcgccaacatgctgcagtgggaggagctggagtggcagaagtatgcagaggagtgcaagggcatgattgtgaccaaccctggcaccaagcccagctctgtgagaattgaccagctggaccgggagcagttcaacccagatgtgatcaccttccccatcatcgtgcacttcggcatccggcctgcccagctgtcctatgctggggacccccagtaccagaagctgtggaagagctatgtgaagctgcggcacctgctggccaacagccccaaggtgaagcagacagacaagcagaagctggcccagcgggaggaggccctgcagaagatccggcagaagaacaccatgagaagagaggtgacagtggagctgagcagccagggcttctggaagacaggcatccgcagtgatgtgtgccagcacgccatgatgctgcctgtgctgacccaccacatccgctaccaccagtgcctgatgcacctggacaagctgattggctacaccttccaggaccgctgcctgctgcagctggccatgacccaccccagccaccacctgaactttggcatgaacccagaccacgccaggaacagcctgagcaactgtggcatccggcagcccaagtatggagacaggaaggtgcaccacatgcacatgaggaagaagggcatcaacaccctcatcaacatcatgagccggctgggccaggatgaccccacccccagccgcatcaaccacaatgaaaggctggagttcctgggagatgctgtggtggagttcctgacctctgtgcacctgtactacctgttccccagcctggaggagggcggcctggccacctacagaacagccatcgtgcagaaccagcacctggccatgctggccaagaagctggagctggaccgcttcatgctgtatgcccacggccctgacctgtgccgggagagtgacctgcggcatgccatggccaactgctttgaggccctgattggagctgtgtacctggagggcagcctggaggaggccaagcagctgtttggccgcctgctcttcaatgaccctgacctgcgggaggtgtggctgaactaccccctgcaccccctgcagctgcaggagcccaacacagaccggcagctgattgagaccagccctgtgctgcagaagctgacagaatttgaggaggccatcggggtcatcttcacccacgtgcggctgctggcccgggccttcaccctgaggacagtgggcttcaaccacctgaccctgggccacaaccagaggatggagttcctgggggacagcatcatgcagctggtggccacagagtacctgttcatccacttcccagaccaccacgagggccacctgaccctgctgcggagcagcctggtgaacaacagaacccaggccaaggtggccgaggagctgggcatgcaggagtggagcatctacctgctgagcaactgtgactgctgcctgctgcggcccagcctggtgttcctgcagaccatgaatgaggtgtgcagcctgaagtag

SEQ ID NO: 40495 - DNA, 4014 bp, Artificial Sequence
  derived and/or modified sequence
atgatgcagggcaacacctgccacaggatgtccttccaccctggccggggctgcccccggggccggggcggccatggagcccggcccagcgcccccagcttccggccccagaacctgcggctgctgcacccccagcagccccctgtgcagtaccagtatgagcccccatctgcccccagcaccaccttcagcaacagccctgcccccaacttcctgccccccaggccagactttgtgcccttccccccacccatgccacccagcgcccagggccccctgcccccctgccccatccggccccccttccccaaccaccagatgaggcaccccttccctgtgcccccctgcttcccccccatgcccccacccatgccctgccccaacaacccccctgtgcctggggcccctcctggccagggcaccttccccttcatgatgcccccacccagcatgccccaccccccacctcctcctgtgatgccccagcaggtgaactaccagtacccacctggctacagccaccacaacttccccccacccagcttcaacagcttccagaacaaccccagcagcttcctgcccagcgccaacaacagcagcagcccccacttccgccacctgcccccctaccccctgcccaaggcccccagcgagaggaggagccctgagcggctgaagcactatgatgaccaccgccaccgggaccacagccacggccgcggggagcggcacaggagcctggacagaagagagcggggccgcagcccagacagaagacggcaggacagccgctacagaagtgactatgaccggggccgcacccccagccgccacaggagctatgaaagaagccgggagcgggagcgggagcggcaccgccaccgggacaacagaagaagccccagcctggagaggagctacaagaaggagtacaagaggagcggcagccgcagccccagccgggagaagaagagggcccgctgggaggaggagaaggaccgctggagcgacaaccagagcagcggcaaggacaagaactacaccagcatcaaggagaaggagcctgaggagaccatgccagacaagaatgaggaggaggaggaggagctgctgaagcctgtgtggatccgctgcacccacagcgagaactactacagcagtgaccccatggaccaggtgggggacagcacagtggtgggcaccagccggctgcgggacctgtatgacaagtttgaggaggagctgggcagccggcaggagaaggccaaggccgcccggcccccctgggagccccccaagaccaagctggatgaggacctggagagcagcagcgagagtgaatgtgagagtgatgaggacagcacctgcagcagcagcagtgacagcgaggtgtttgatgtgattgctgagatcaagaggaagaaggcccacccagaccggctgcatgatgagctgtggtacaatgaccccggccagatgaatgatggccccctgtgcaagtgcagcgccaaggcccggaggacaggcatccgccacagcatctacccaggagaggaggccatcaagccctgccggcccatgaccaacaatgccggccgcctcttccactaccgcatcaccgtgtccccacccaccaacttcctgacagaccggcccaccgtgattgaatatgatgaccacgagtacatctttgagggcttctccatgtttgcccacgcccccctgaccaacatccccctgtgcaaggtgatccgcttcaacatcgactacaccatccacttcatcgaggagatgatgcctgagaacttctgtgtgaagggcctggagctgttcagcctcttcctgttccgggacatcctggagctgtatgactggaacctgaagggccccctgtttgaggacagccccccctgctgcccccgcttccacttcatgcccaggtttgtgcgcttcctgcctgatggcggcaaggaggtgctgtccatgcaccagatcctgctgtacctgctgcgctgcagcaaggccctggtgcctgaggaggagatcgccaacatgctgcagtgggaggagctggagtggcagaagtatgcagaagaatgtaaaggcatgattgtgaccaaccctggcaccaagcccagctctgtgagaattgaccagctggaccgggagcagttcaacccagatgtgatcaccttccccatcatcgtgcacttcggcatccggcctgcccagctgtcctatgctggggacccccagtaccagaagctgtggaagagctatgtgaagctgcggcacctgctggccaacagccccaaggtgaagcagacagacaagcagaagctggcccagcgggaggaggccctgcagaagatccggcagaagaacaccatgaggcgggaggtgacagtggagctgagcagccagggcttctggaagacaggcatccgcagtgatgtgtgccagcacgccatgatgctgcctgtgctgacccaccacatccgctaccaccagtgcctgatgcacctggacaagctgattggctacaccttccaggaccgctgcctgctgcagctggccatgacccaccccagccaccacctgaactttggcatgaacccagaccacgccaggaacagcctgagcaactgtggcatccggcagcccaagtacggggacaggaaggtgcaccacatgcacatgaggaagaagggcatcaacaccctcatcaacatcatgagccggctgggccaggatgaccccacccccagccgcatcaaccacaatgaaaggctggagttcctgggagatgctgtggtggagttcctgacctctgtgcacctgtactacctgttccccagcctggaggagggcggcctggccacctacagaacagccatcgtgcagaaccagcacctggccatgctggccaagaagctggagctggaccgcttcatgctgtatgcccacggccctgacctgtgccgggagagtgacctgcggcatgccatggccaactgctttgaggccctgattggagctgtgtacctggagggcagcctggaggaggccaagcagctgtttggccgcctgctcttcaatgaccctgacctgcgggaggtgtggctgaactaccccctgcaccccctgcagctgcaggagcccaacacagaccggcagctgattgagaccagccctgtgctgcagaagctgacagaatttgaggaggccatcggggtcatcttcacccacgtgcggctgctggcccgggccttcaccctgaggacagtgggcttcaaccacctgaccctgggccacaaccagaggatggagttcctgggggacagcatcatgcagctggtggccacagagtacctgttcatccacttcccagaccaccacgagggccacctgaccctgctgcggagcagcctggtgaacaacagaacccaggccaaggtggccgaggagctgggcatgcaggagtatgccatcaccaatgacaagaccaagaggcctgtggccctgcggaccaagaccctggccgacctgctggagagcttcatcgccgccctgtacatcgacaaggacctggagtatgtgcacaccttcatgaatgtgtgcttcttcccccggctgaaggagttcatcctgaaccaggactggaatgaccccaagagccagctgcagcagtgctgcctgaccctgaggacagagggcaaggagccagacatccccctgtacaagaccctgcagacagtgggccccagccacgcccggacctacacagtggccgtgtacttcaagggggagcgcatcggctgtgggaagggccccagcatccagcaggccgagatgggcgccgccatggatgccctggagaagtacaacttcccccagatggcccaccagaagcgcttcattgaaaggaagtaccggcaggagctgaaggagatgcgctgggagcgggagcaccaggagcgggagccagatgaaacagaggacatcaagaagtag

SEQ ID NO: 40496 - DNA, 3558 bp, Artificial Sequence
  derived and/or modified sequence
caccggatgagcttccaccccggccggggctgcccccggggccggggtgggcacggggctcgaccttcggctccttctttcaggcctcagaacctccgcttattacacccgcagcaacccccggtacagtatcagtatgagcccccctctgctccatctactacattcagtaatagccctgccccaaatttccttccaccgcgacccgactttgttccatttcccccgcctatgccaccaagtgctcaaggcccattgcccccgtgccccattaggcccccatttcctaaccaccagatgcggcacccatttcccgtccctccctgctttccgcctatgcctccaccaatgccttgtccaaacaacccacccgtacccggggccccccccggccaaggcaccttccctttcatgatgcctcctcctagtatgcctcacccacccccacccccagtgatgccccaacaggtcaattatcagtaccctcctggctatagtcatcataacttcccccccccgtcctttaattcttttcagaataacccttccagcttcttgccttccgctaacaacagtagctcaccccacttccgccacctcccgccgtacccactgcctaaagctccatctgaaagaaggtcgccagaacggctgaagcactacgacgaccatcggcatcgggaccactcgcacggaaggggcgagcggcaccgatctctggaccgcagagagaggggccggtcccccgacagacgcaggcaggatagtaggtataggtctgattatgacagaggtcgtaccccttcaaggcaccggtcatatgaaagatctagggaacgagaacgggaaaggcatagacaccgcgacaaccggcgcagcccaagcctggagcgctcttacaagaaggagtacaagcgctctggctccaggtccccttcacgcgaaaaaaagcgggccaggtgggaggaagaaaaagatagatggagcgataaccagtcctccggtaaagacaagaactacacgagcattaaagaaaaagaacccgaagaaaccatgccggataaaaacgaagaagaagaggaggaactgctcaagcccgtctggatcaggtgcacccactcagaaaattactattccagcgacccaatggaccaagtgggcgactcaactgtcgtcggaacaagccgactgcgagacctgtacgacaaatttgaggaagaactgggctcgcgccaagagaaggccaaggcagctcggcccccatgggagccgccaaaaaccaaactggatgaggacctcgaatcctcttctgagtctgagtgtgagagtgatgaggactccacatgctctagcagcagcgactccgaggtcttcgacgtcatcgctgaaattaagagaaagaaggcccaccccgatagactgcacgacgagctctggtataatgatccggggcagatgaacgacggccccttgtgtaagtgctctgctaaggcaaggcgaacagggatacggcacagtatttatcctggcgaagaggcaattaagccctgtaggcccatgacaaataacgcaggccgtctgtttcactataggatcaccgtgagcccgcccactaactttctcaccgataggccaactgtgattgaatatgacgaccacgaatacatcttcgaaggattctcaatgtttgcacacgctcccctcacaaatattcccctgtgtaaagtgatccgttttaatattgattacactatccattttatcgaagagatgatgccagagaacttttgcgtaaagggcctagaactgttttccctgtttctgtttagggatattctggaattatacgactggaacctcaaggggcctctttttgaagacagtcccccttgctgcccacggttccacttcatgcctagatttgttagatttttacccgatggcggcaaggaagtgctgagtatgcatcagatccttctctatcttcttcgctgcagcaaggctctggtaccggaggaagaaatcgccaatatgctgcagtgggaggagcttgaatggcagaaatatgctgaggaatgtaaggggatgattgtcactaaccccgggacaaagccttctagcgttcgaatagaccagctggacagggaacagtttaatcctgacgtgattactttccctatcattgtacactttggcatccggccagctcagctgtcttacgctggagatcctcagtatcaaaagttgtggaaaagctacgtgaaactcagacatcttttggctaactcccccaaggttaagcaaaccgataagcagaaactcgctcagcgcgaagaggcactgcagaagattcgacagaaaaataccatgaggagggaagtaaccgtggagcttagttctcagggcttctggaagaccgggatcagatctgatgtgtgccagcacgccatgatgttgcctgtgctgacacaccacatcaggtatcaccagtgtctgatgcacctcgacaagctgatcggctatactttccaggacaggtgtctgttacagctggccatgacacacccctcccatcaccttaacttcggtatgaatcccgaccacgcccggaattccttgagtaattgtggcattcggcagcccaagtacggagaccgcaaagtccatcacatgcacatgagaaagaagggaatcaacactctgatcaacataatgagtcggctggggcaagatgaccctacaccttccaggatcaaccataatgagagactggagtttctcggtgatgccgtggtcgagtttctgacttcagtgcacctctactatctgttcccaagtttggaggagggaggtttggccacctaccgaaccgcaatcgttcagaatcagcacctggctatgcttgctaagaaactggagctggaccggttcatgctgtatgcccatggtccagacctttgccgcgaatctgacctgcggcacgccatggccaattgttttgaagccctgatcggagccgtgtatctggaaggctcactcgaagaggccaagcaactattcggacgcctgctgttcaatgatcccgaccttagggaagtgtggctgaattacccactgcaccccctgcaattacaggaaccgaacactgacaggcagctaattgaaactagtcccgtccttcagaaactgacagagttcgaagaagcaatcggcgtaatctttacgcatgtcagactgttagccagagcctttacactccggacggtgggcttcaatcatctgaccctcggccacaaccagaggatggagttcctcggagatagtatcatgcagctcgtggccactgagtatttattcatccacttccccgaccatcacgagggccaccttacgttgcttaggtccagcctcgtgaataacaggactcaggccaaagtcgcagaggaacttggcatgcaggagtggtccatctacctgctcagcaactgtgattgctgcctcctcagaccaagcctggtctttttacagaccatgaacgaagtctgctcactgaagtag

SEQ ID NO: 40497 - DNA, 4014 bp, Artificial Sequence
  derived and/or modified sequence
atgatgcagggcaacacctgccaccggatgagcttccaccccggccgcggatgccccagaggtcgaggggggcacggggccagaccgagtgccccaagctttagaccacagaacctgcgactgctgcatcctcagcagcccccggtacaatatcaatatgagcccccgagcgcaccaagtacgacattctcaaacagccccgccccaaatttcctgccacctaggcctgattttgtccccttcccaccccctatgcctccctccgcccagggacctcttcctccctgcccgattagacccccattcccaaatcaccaaatgcgccaccccttcccagtgccaccctgcttccctccgatgcctccgccaatgccgtgtccaaacaatccgccagtaccaggggccccaccgggacagggtacctttccattcatgatgccaccgccatcaatgccgcacccaccccccccgccggttatgccgcagcaggtgaattaccagtaccctcccggttactctcaccataacttccctccccctagcttcaactcttttcagaacaatcctagctcatttttgccctccgctaataattcttcaagtccccacttccgacacttacccccttacccactccccaaggctccttctgagagacgtagtccagagaggctgaagcactacgatgaccacaggcatcgggaccacagccatggacggggagagcgtcaccgcagtttggaccggagagagagaggacgaagcccggatagacgaaggcaagatagccggtatcggtcagactacgatagggggaggactccctccaggcacaggtcttatgagcgttctagggaaagggaacgagagcggcacaggcacagggacaaccggagatcaccatccctcgagaggtcctacaagaaggaatacaagcggagcggttcccgttcaccatctagagagaagaagcgcgctcggtgggaggaggaaaaggatcggtggagtgataatcagtcttcaggcaaagataagaattacacctcgattaaggagaaggagccggaggagacaatgcctgacaagaatgaggaagaagaggaagagctgttgaaacccgtgtggatacgctgcacgcactccgaaaactattactcctctgaccccatggaccaggtgggcgattccacagtggtgggaacttccagacttcgtgatctctatgataagttcgaagaggagcttggctcccgccaggagaaggcaaaagccgccagacccccatgggaaccaccgaagacaaagctggacgaggatctggaatcgtcctctgaaagtgagtgcgaatcagacgaggatagtacatgcagttccagttctgattctgaagtattcgacgtgatcgccgagatcaagagaaagaaggcccacccagaccgtctgcatgacgaactctggtacaatgacccgggacaaatgaacgacggccctctttgtaaatgctcagccaaggcccgacgaacggggatccgacactcaatatacccaggcgaggaggcgattaagccgtgtcgccccatgactaataacgccggtcgcttgttccactaccggatcacagtttcacctccgactaatttcctaaccgataggccaacagtgatcgaatacgacgatcacgagtacatctttgaaggcttcagcatgtttgcacacgctccgcttaccaatatcccactctgtaaggttattcggttcaacattgactacacgatccactttatagaagaaatgatgcctgagaatttttgcgttaagggtcttgagttgtttagtttgtttctctttagggacatcctagaactgtatgactggaacctgaaaggacccctgttcgaggactcccccccgtgctgtcctagattccatttcatgcctaggtttgttcggttccttcctgacggaggtaaggaagtcctctcgatgcatcagatccttctctatctgctgaggtgtagtaaggctctcgtcccagaggaggagatcgctaatatgttacaatgggaggagctggagtggcaaaaatacgccgaggagtgcaagggtatgattgtcaccaatccaggtaccaagccttcatctgtaaggatcgaccagttggatcgggagcagttcaaccctgatgttatcactttcccgatcattgtgcactttggcatccggccagctcagctgtcatatgccggcgatcctcaataccagaaattgtggaagtcctacgtgaagcttcggcacctcctcgctaacagccccaaggtgaagcagaccgacaagcagaagctggcccagagggaagaggcattgcagaaaattagacagaagaacaccatgcgaagagaggtgactgtcgaactgagttcacaggggttctggaaaacagggatacgctcggatgtgtgtcagcacgctatgatgctgcctgtgctcactcaccacatcaggtaccatcaatgccttatgcacctcgacaaattaataggatacacgttccaggacagatgcttactgcagttagctatgactcatccctctcatcaccttaacttcgggatgaacccagaccacgctcggaatagcctgtcaaattgcgggattcgacagccaaaatatggagaccgcaaggtacaccatatgcatatgcgtaagaaagggattaatactctgatcaacattatgtcccgcctgggacaggacgaccccaccccctcacggattaatcataacgagaggctggaatttttaggagatgcggtcgtcgaattcctgacctcagtgcatctgtactatttgttccccagtcttgaggagggaggtcttgcgacgtatagaacggcaattgtccagaatcagcacctggccatgcttgctaaaaaactagagctggaccgtttcatgctgtatgcacacggcccagatctctgtcgggagtccgatcttcggcacgctatggctaactgctttgaggctctgatcggagccgtatacctggaaggcagccttgaagaggcgaaacagctgttcggacggttattgtttaacgaccctgatctgagagaagtgtggctgaattaccctctccacccactgcagttacaggagccaaatacagatagacagctcatcgaaaccagtccagtgctacagaaactcaccgagtttgaggaagctatcggcgttatcttcactcatgtgagacttctagcgagggctttcaccctacgaaccgtgggatttaaccatctgaccctgggccacaatcagcggatggaattcttaggtgattcaattatgcagctcgtggcaaccgagtacctgtttattcacttcccagaccaccacgagggccacttgactcttctgcgttcttccttggtgaataataggacccaagccaaggtggccgaggaactcggtatgcaagagtatgccatcaccaacgacaaaaccaagaggccagtggcccttaggacaaagacattggctgatctcctggaaagctttatcgctgcactttatattgataaagacttggaatatgttcacactttcatgaatgtgtgtttcttcccaagactgaaagagttcatcctgaaccaggactggaacgatcccaagagtcagctccagcagtgctgccttactctgagaacagagggtaaagaacccgatatcccgctgtacaagaccctgcagacagtcgggcccagccacgccagaacctatactgtggcggtctacttcaaaggagagcggatcggctgcggcaagggccccagtattcagcaggctgaaatgggtgctgccatggatgcattggagaagtacaatttcccacagatggcccaccaaaagcgctttattgaaaggaaatataggcaagagttaaaggaaatgcggtgggaaagggagcatcaggagcgggaaccggacgaaacagaggatataaagaaatag

SEQ ID NO: 40498 - DNA, 3558 bp, Artificial Sequence
  derived and/or modified sequence
cacagaatgagcttccacccagggagggggtgcccacggggacgaggcggacatggagctcggccttcggccccttctttcaggccccagaacctccggctcttgcatccccaacaaccgcctgtccagtaccagtacgagcctccgtccgcaccttctaccacattttccaattcacctgccccaaacttcctcccccctagacccgattttgttcccttcccccctcctatgcctccctccgcccaaggaccattgcccccatgtcctattagacctccgtttcctaaccaccaaatgcgccatccattccctgtcccaccttgtttccctcccatgccacccccaatgccttgcccaaacaatccaccagtgcctggggctcctccgggacaaggtaccttcccgttcatgatgccgccacctagcatgccccaccctccacccccaccagtgatgccccagcaggtaaactaccagtatccacccggatattctcatcataacttccccccaccaagtttcaactccttccagaataatccttcgagtttcctgccttccgccaacaattctagttcccctcatttccgacacctccctccatatcctttgcctaaggcaccttccgaacgcaggtcccccgaacgcctgaaacattacgatgaccaccgtcaccgggatcacagtcacggcaggggtgagaggcatagatctttggaccggcgagaaaggggcagaagtcccgaccgacggaggcaggattcccgctaccgctctgactatgacagagggagaaccccgtctaggcaccgatcctacgagcgctcacgtgagcgcgaaagggagcgacaccgccaccgagacaacagacgaagcccaagcctcgagagatcctacaagaaggaatacaagaggtctggtagtcgatctccatcaagggagaaaaaaagagctcgctgggaggaagaaaaggacaggtggagcgataatcagagcagcggaaaagacaagaattacacctctattaaggaaaaagagcccgaagagacaatgccggataagaacgaggaagaggaagaagaactgctgaagcctgtgtggattcggtgcactcacagcgaaaactactatagttcagaccctatggatcaggtcggcgattcaaccgtagttggcacatcccgacttcgagatctgtatgacaagttcgaagaggagctgggatctcgccaagaaaaggccaaggccgcacgcccaccatgggaaccccctaaaaccaagctagacgaggatctggaaagttcctctgaatccgaatgcgagtccgacgaggactcaacctgctcctccagtagtgactcggaggtcttcgacgtcattgcagaaataaagcgcaagaaagcgcatccggaccggttgcatgatgaactctggtataatgaccccggacagatgaatgacgggccactgtgcaaatgcagcgcaaaagcacgcagaaccggcataagacattcaatttatcctggtgaagaggctatcaagccatgtcggcctatgactaataatgcgggacgcctgtttcactatcgcatcacagtttccccacccaccaatttcctcacagataggcctactgttatcgagtacgatgatcacgagtatatattcgagggatttagcatgtttgcgcatgcacccctgactaatattccattgtgtaaggtcattagattcaatattgattacaccatccactttatagaagagatgatgcctgaaaacttctgtgttaagggattagagctgttctccttatttttgtttagggacatcctggagctgtacgattggaacctcaagggccctctgtttgaggactcccccccttgttgcccccgatttcactttatgccacgttttgtgagattcctgcccgacggtgggaaggaggttctgagtatgcaccaaattttgctttacttattacgctgctccaaggccctggtccctgaggaggaaattgcaaatatgcttcagtgggaggaactcgagtggcagaagtacgcggaggagtgcaaaggcatgatagtgacaaacccaggaacaaaaccttccagcgtcaggatagaccagctggatcgggaacaattcaatcccgatgtgatcacttttccaatcatagtgcactttggaatcagacccgcacagctgagctacgctggggatccccagtaccagaagctctggaaaagctatgtcaaactccgccatctgctggccaattctcctaaagtcaagcagaccgataagcagaaactggcgcaacgtgaagaagccctgcagaaaatccgtcagaagaacacaatgcgccgagaagtgactgtggagctctcatcccaaggcttctggaagacaggaattcgtagcgacgtctgtcaacacgccatgatgttacccgtcctcacacaccacatcaggtatcatcaatgcctgatgcatctggacaaactgatcggctacacatttcaggaccggtgtttgctacagttagctatgacacacccctcacaccacctgaacttcggaatgaatccggaccacgcgagaaatagcttgagtaactgtgggatccgacagccaaagtacggcgatagaaaggtgcaccatatgcacatgaggaagaaaggtatcaatacgctgattaatatcatgtcaaggctcggacaggatgaccctactcctagtcgtattaaccataacgagcgactcgaatttttgggagacgcggtggtggagtttttaactagcgtgcatctgtattacctgttcccatctttagaggagggcggactcgccacatataggaccgctattgtccaaaaccaacacctggcgatgcttgccaagaaattggaactcgatcgttttatgttatatgcccacggccctgacctgtgtagagaaagtgacctccggcacgccatggccaactgctttgaggcactcatcggggctgtgtacctggagggctccctggaagaagctaagcaactctttggcagactcttatttaatgacccagatcttagggaggtatggcttaattacccgctgcatccactgcaattgcaggaacctaacactgacaggcagctgatcgagacctcacctgtcctgcagaaactgactgagttcgaggaagctattggtgttatcttcacgcatgtaagactcctcgcgagagccttcaccctgaggactgtgggcttcaaccatttgaccctgggccataaccagaggatggaatttttgggggattcaattatgcagctggtggctaccgagtatctatttatccatttccccgaccatcacgagggacacctgacactcttgagaagcagcctcgtcaacaacaggacacaagccaaggtggccgaagaattgggcatgcaggaatggtcaatctatctcttgtcaaattgtgattgctgccttctgaggccctcacttgtttttctgcaaactatgaatgaggtatgctcgctgaagtag

SEQ ID NO: 40499 - DNA, 4014 bp, Artificial Sequence
  derived and/or modified sequence
atgatgcagggaaatacatgccatagaatgtctttccacccaggccgtgggtgtcccagaggtagaggaggtcacggtgctagaccgtccgcgccaagcttccgcccacaaaacttacggctgctgcatcctcagcagcctcctgtccagtaccaatatgagcctcctagtgctccatcgaccacctttagcaatagtcctgctcctaatttccttcccccaaggcccgatttcgtcccttttcccccacccatgcctccttccgctcagggacccttaccaccctgcccgattaggccaccatttcccaatcaccagatgcgccaccctttccccgtccctccttgttttcccccaatgccaccccctatgccttgccctaacaatcctccggttccgggagccccaccaggtcagggcacattcccttttatgatgccccctccatccatgccgcaccctcccccaccacctgtcatgcctcaacaggtcaattaccagtatcccccaggctattctcatcataatttccccccacccagcttcaattcttttcagaataatcctagttcatttctgcccagtgctaacaattccagctctccacattttagacatctgccgccatatccgcttccaaaggctccctccgagcgcagaagtcccgagagactgaaacattatgatgaccatcgccacagggaccattcccacgggaggggggaacgacatcgttctctggaccgtcgggagagaggtaggtcgcctgatcgaaggaggcaggattcgcgttatagatctgattacgacagaggccgtaccccgagtcgacacaggtcatatgaacgcagtagagagcgcgaaagagaaaggcaccgacacagagacaacaggaggtcccccagtctagagaggagttataaaaaagaatataaacgatcaggttcaagaagtccttcacgcgaaaagaagcgagcaaggtgggaagaggaaaaagaccgttggagtgataaccagtccagcggtaaagacaagaattacacctcaataaaggagaaggagccagaggagactatgccagataaaaatgaagaggaggaggaggagcttttgaagccagtgtggattagatgcacccattccgaaaactattactcttccgaccccatggaccaggtaggcgactccaccgtagtgggaacaagccgcctgcgcgatttgtatgacaagtttgaagaagaactgggcagcagacaagaaaaggcaaaggccgcacgcccaccctgggagcccccaaagacaaagctggatgaggaccttgaatcatcaagcgaatccgaatgtgaatctgacgaagattctacatgctcatcatcatccgactccgaagtgtttgacgtgatcgccgagatcaaacgcaaaaaggctcatcctgatagattacatgatgagctctggtataacgatcctggccaaatgaatgatggcccactgtgcaagtgctccgccaaggcacgcaggacagggattagacacagcatttaccccggtgaggaagcaataaaaccctgccgccctatgactaataacgcgggacggctgtttcactataggattaccgtctccccacccacaaactttctgactgacaggcctaccgtgatcgaatatgacgaccatgagtatatctttgagggctttagcatgttcgcccatgcaccactcaccaacattcctctgtgcaaggtaatccgatttaatatcgactatactattcattttatcgaggaaatgatgcccgaaaacttctgcgtgaagggcctggagctgttctccctgtttctctttcgcgacattctggaactatacgactggaatctgaagggcccactgttcgaggacagtcccccatgttgcccacgctttcactttatgcccaggtttgtgcggtttctcccagatggaggtaaggaggtacttagcatgcatcagattctactgtatctgctcaggtgtagcaaagccctggtccccgaggaggagattgctaacatgctgcaatgggaagaactcgagtggcaaaagtacgctgaggagtgcaagggcatgattgtgaccaaccccggaacaaaaccatccagcgtccggattgaccagctggatcgggaacagtttaaccctgacgtgatcacctttcctataatcgtgcactttggcattagacccgcacagctgagttacgcgggtgatcctcaataccagaagctatggaaaagttacgtgaagctgcgacatcttctggcaaacagccccaaggtgaaacaaacggacaagcaaaaattggcccaaagagaggaggccctgcagaagattcgtcagaaaaacactatgcggagagaggtcaccgttgaactcagctctcagggattctggaaaaccggcattcgaagcgacgtttgccaacacgccatgatgctgcctgtattaactcatcacatcaggtaccatcagtgtctcatgcatctagataagctcatcggctacaccttccaggataggtgtcttcttcagttggcgatgacccacccctctcaccacctgaacttcggcatgaatccagatcatgcacgcaattcattgagcaactgcggtattagacagccaaagtacggagacaggaaggttcaccacatgcatatgcggaagaaaggaattaataccctcatcaacatcatgagccgtctgggtcaggatgaccctacgccatctaggatcaaccacaacgagcgacttgaattcctgggagatgctgtagtggaatttctgacctcagtgcatctgtattacctcttcccgtcgctggaagaggggggtctggccacgtaccgcactgctatagtgcagaatcagcatctcgccatgttagctaaaaagcttgagcttgaccgtttcatgctttatgctcatggtcctgacctgtgcagagaatctgatctgcgccacgccatggccaattgctttgaagcccttatcggagccgtctaccttgaaggttctctggaggaagccaagcagctgtttgggaggctgctttttaatgaccccgacttgagagaggtctggctcaattatccgcttcatccgctgcaacttcaggaacccaacacagaccggcaactgattgagacatccccagttctgcagaaacttaccgagttcgaggaggctattggagtcatttttacacatgtaagactattggcaagggcatttacattacgcaccgtgggttttaatcacctgacattaggtcacaaccagcgtatggagtttctgggcgattccataatgcagctcgtggcgacagagtacctgttcatccacttccctgatcaccatgagggacatctgacattgcttagatcctcactggtgaacaaccggacccaggccaaggtcgccgaggagctcggcatgcaggaatatgccatcacaaacgataagacgaaaagacccgttgcactaagaactaaaacactagccgacctgctggaatctttcatcgcagccctctacatcgacaaggacttggagtacgtccatacctttatgaatgtgtgtttctttccacggctgaaagaatttatactgaaccaggactggaacgaccctaaatcacaattgcaacaatgttgtcttacactcagaacagagggaaaagagccagacatacccttgtacaaaacactacagaccgtgggtccatcacacgctaggacttatacagtggccgtgtattttaagggcgagcgcataggctgtgggaagggcccatctatccagcaggccgagatgggagcagctatggatgctctcgagaagtataacttcccccagatggcacaccagaaaaggttcatagagcgcaaataccggcaagagctgaaagaaatgagatgggagcgagaacatcaagaacgcgagcccgatgagacagaggacattaaaaaatag

SEQ ID NO: 40500 - DNA, 3558 bp, Artificial Sequence
  derived and/or modified sequence
cacagaatgagcttccaccccggcagaggctgccccagaggcagaggcggccacggcgccagacccagcgcccccagcttcagaccccagaacctgagactgctgcacccccagcagccccccgtgcagtaccagtacgagccccccagcgcccccagcaccaccttcagcaacagccccgcccccaacttcctgccccccagacccgacttcgtgcccttccccccccccatgccccccagcgcccagggccccctgcccccctgccccatcagaccccccttccccaaccaccagatgagacaccccttccccgtgcccccctgcttcccccccatgcccccccccatgccctgccccaacaacccccccgtgcccggcgccccccccggccagggcaccttccccttcatgatgcccccccccagcatgccccaccccccccccccccccgtgatgccccagcaggtgaactaccagtacccccccggctacagccaccacaacttccccccccccagcttcaacagcttccagaacaaccccagcagcttcctgcccagcgccaacaacagcagcagcccccacttcagacacctgcccccctaccccctgcccaaggcccccagcgagagaagaagccccgagagactgaagcactacgacgaccacagacacagagaccacagccacggcagaggcgagagacacagaagcctggacagaagagagagaggcagaagccccgacagaagaagacaggacagcagatacagaagcgactacgacagaggcagaacccccagcagacacagaagctacgagagaagcagagagagagagagagagagacacagacacagagacaacagaagaagccccagcctggagagaagctacaagaaggagtacaagagaagcggcagcagaagccccagcagagagaagaagagagccagatgggaggaggagaaggacagatggagcgacaaccagagcagcggcaaggacaagaactacaccagcatcaaggagaaggagcccgaggagaccatgcccgacaagaacgaggaggaggaggaggagctgctgaagcccgtgtggatcagatgcacccacagcgagaactactacagcagcgaccccatggaccaggtgggcgacagcaccgtggtgggcaccagcagactgagagacctgtacgacaagttcgaggaggagctgggcagcagacaggagaaggccaaggccgccagacccccctgggagccccccaagaccaagctggacgaggacctggagagcagcagcgagagcgagtgcgagagcgacgaggacagcacctgcagcagcagcagcgacagcgaggtgttcgacgtgatcgccgagatcaagagaaagaaggcccaccccgacagactgcacgacgagctgtggtacaacgaccccggccagatgaacgacggccccctgtgcaagtgcagcgccaaggccagaagaaccggcatcagacacagcatctaccccggcgaggaggccatcaagccctgcagacccatgaccaacaacgccggcagactgttccactacagaatcaccgtgagcccccccaccaacttcctgaccgacagacccaccgtgatcgagtacgacgaccacgagtacatcttcgagggcttcagcatgttcgcccacgcccccctgaccaacatccccctgtgcaaggtgatcagattcaacatcgactacaccatccacttcatcgaggagatgatgcccgagaacttctgcgtgaagggcctggagctgttcagcctgttcctgttcagagacatcctggagctgtacgactggaacctgaagggccccctgttcgaggacagccccccctgctgccccagattccacttcatgcccagattcgtgagattcctgcccgacggcggcaaggaggtgctgagcatgcaccagatcctgctgtacctgctgagatgcagcaaggccctggtgcccgaggaggagatcgccaacatgctgcagtgggaggagctggagtggcagaagtacgccgaggagtgcaagggcatgatcgtgaccaaccccggcaccaagcccagcagcgtgagaatcgaccagctggacagagagcagttcaaccccgacgtgatcaccttccccatcatcgtgcacttcggcatcagacccgcccagctgagctacgccggcgacccccagtaccagaagctgtggaagagctacgtgaagctgagacacctgctggccaacagccccaaggtgaagcagaccgacaagcagaagctggcccagagagaggaggccctgcagaagatcagacagaagaacaccatgagaagagaggtgaccgtggagctgagcagccagggcttctggaagaccggcatcagaagcgacgtgtgccagcacgccatgatgctgcccgtgctgacccaccacatcagataccaccagtgcctgatgcacctggacaagctgatcggctacaccttccaggacagatgcctgctgcagctggccatgacccaccccagccaccacctgaacttcggcatgaaccccgaccacgccagaaacagcctgagcaactgcggcatcagacagcccaagtacggcgacagaaaggtgcaccacatgcacatgagaaagaagggcatcaacaccctgatcaacatcatgagcagactgggccaggacgaccccacccccagcagaatcaaccacaacgagagactggagttcctgggcgacgccgtggtggagttcctgaccagcgtgcacctgtactacctgttccccagcctggaggagggcggcctggccacctacagaaccgccatcgtgcagaaccagcacctggccatgctggccaagaagctggagctggacagattcatgctgtacgcccacggccccgacctgtgcagagagagcgacctgagacacgccatggccaactgcttcgaggccctgatcggcgccgtgtacctggagggcagcctggaggaggccaagcagctgttcggcagactgctgttcaacgaccccgacctgagagaggtgtggctgaactaccccctgcaccccctgcagctgcaggagcccaacaccgacagacagctgatcgagaccagccccgtgctgcagaagctgaccgagttcgaggaggccatcggcgtgatcttcacccacgtgagactgctggccagagccttcaccctgagaaccgtgggcttcaaccacctgaccctgggccacaaccagagaatggagttcctgggcgacagcatcatgcagctggtggccaccgagtacctgttcatccacttccccgaccaccacgagggccacctgaccctgctgagaagcagcctggtgaacaacagaacccaggccaaggtggccgaggagctgggcatgcaggagtggagcatctacctgctgagcaactgcgactgctgcctgctgagacccagcctggtgttcctgcagaccatgaacgaggtgtgcagcctgaagtag

SEQ ID NO: 40501 - DNA, 4014 bp, Artificial Sequence
  derived and/or modified sequence
atgatgcagggcaacacctgccacagaatgagcttccaccccggcagaggctgccccagaggcagaggcggccacggcgccagacccagcgcccccagcttcagaccccagaacctgagactgctgcacccccagcagccccccgtgcagtaccagtacgagccccccagcgcccccagcaccaccttcagcaacagccccgcccccaacttcctgccccccagacccgacttcgtgcccttccccccccccatgccccccagcgcccagggccccctgcccccctgccccatcagaccccccttccccaaccaccagatgagacaccccttccccgtgcccccctgcttcccccccatgcccccccccatgccctgccccaacaacccccccgtgcccggcgccccccccggccagggcaccttccccttcatgatgcccccccccagcatgccccaccccccccccccccccgtgatgccccagcaggtgaactaccagtacccccccggctacagccaccacaacttccccccccccagcttcaacagcttccagaacaaccccagcagcttcctgcccagcgccaacaacagcagcagcccccacttcagacacctgcccccctaccccctgcccaaggcccccagcgagagaagaagccccgagagactgaagcactacgacgaccacagacacagagaccacagccacggcagaggcgagagacacagaagcctggacagaagagagagaggcagaagccccgacagaagaagacaggacagcagatacagaagcgactacgacagaggcagaacccccagcagacacagaagctacgagagaagcagagagagagagagagagagacacagacacagagacaacagaagaagccccagcctggagagaagctacaagaaggagtacaagagaagcggcagcagaagccccagcagagagaagaagagagccagatgggaggaggagaaggacagatggagcgacaaccagagcagcggcaaggacaagaactacaccagcatcaaggagaaggagcccgaggagaccatgcccgacaagaacgaggaggaggaggaggagctgctgaagcccgtgtggatcagatgcacccacagcgagaactactacagcagcgaccccatggaccaggtgggcgacagcaccgtggtgggcaccagcagactgagagacctgtacgacaagttcgaggaggagctgggcagcagacaggagaaggccaaggccgccagacccccctgggagccccccaagaccaagctggacgaggacctggagagcagcagcgagagcgagtgcgagagcgacgaggacagcacctgcagcagcagcagcgacagcgaggtgttcgacgtgatcgccgagatcaagagaaagaaggcccaccccgacagactgcacgacgagctgtggtacaacgaccccggccagatgaacgacggccccctgtgcaagtgcagcgccaaggccagaagaaccggcatcagacacagcatctaccccggcgaggaggccatcaagccctgcagacccatgaccaacaacgccggcagactgttccactacagaatcaccgtgagcccccccaccaacttcctgaccgacagacccaccgtgatcgagtacgacgaccacgagtacatcttcgagggcttcagcatgttcgcccacgcccccctgaccaacatccccctgtgcaaggtgatcagattcaacatcgactacaccatccacttcatcgaggagatgatgcccgagaacttctgcgtgaagggcctggagctgttcagcctgttcctgttcagagacatcctggagctgtacgactggaacctgaagggccccctgttcgaggacagccccccctgctgccccagattccacttcatgcccagattcgtgagattcctgcccgacggcggcaaggaggtgctgagcatgcaccagatcctgctgtacctgctgagatgcagcaaggccctggtgcccgaggaggagatcgccaacatgctgcagtgggaggagctggagtggcagaagtacgccgaggagtgcaagggcatgatcgtgaccaaccccggcaccaagcccagcagcgtgagaatcgaccagctggacagagagcagttcaaccccgacgtgatcaccttccccatcatcgtgcacttcggcatcagacccgcccagctgagctacgccggcgacccccagtaccagaagctgtggaagagctacgtgaagctgagacacctgctggccaacagccccaaggtgaagcagaccgacaagcagaagctggcccagagagaggaggccctgcagaagatcagacagaagaacaccatgagaagagaggtgaccgtggagctgagcagccagggcttctggaagaccggcatcagaagcgacgtgtgccagcacgccatgatgctgcccgtgctgacccaccacatcagataccaccagtgcctgatgcacctggacaagctgatcggctacaccttccaggacagatgcctgctgcagctggccatgacccaccccagccaccacctgaacttcggcatgaaccccgaccacgccagaaacagcctgagcaactgcggcatcagacagcccaagtacggcgacagaaaggtgcaccacatgcacatgagaaagaagggcatcaacaccctgatcaacatcatgagcagactgggccaggacgaccccacccccagcagaatcaaccacaacgagagactggagttcctgggcgacgccgtggtggagttcctgaccagcgtgcacctgtactacctgttccccagcctggaggagggcggcctggccacctacagaaccgccatcgtgcagaaccagcacctggccatgctggccaagaagctggagctggacagattcatgctgtacgcccacggccccgacctgtgcagagagagcgacctgagacacgccatggccaactgcttcgaggccctgatcggcgccgtgtacctggagggcagcctggaggaggccaagcagctgttcggcagactgctgttcaacgaccccgacctgagagaggtgtggctgaactaccccctgcaccccctgcagctgcaggagcccaacaccgacagacagctgatcgagaccagccccgtgctgcagaagctgaccgagttcgaggaggccatcggcgtgatcttcacccacgtgagactgctggccagagccttcaccctgagaaccgtgggcttcaaccacctgaccctgggccacaaccagagaatggagttcctgggcgacagcatcatgcagctggtggccaccgagtacctgttcatccacttccccgaccaccacgagggccacctgaccctgctgagaagcagcctggtgaacaacagaacccaggccaaggtggccgaggagctgggcatgcaggagtacgccatcaccaacgacaagaccaagagacccgtggccctgagaaccaagaccctggccgacctgctggagagcttcatcgccgccctgtacatcgacaaggacctggagtacgtgcacaccttcatgaacgtgtgcttcttccccagactgaaggagttcatcctgaaccaggactggaacgaccccaagagccagctgcagcagtgctgcctgaccctgagaaccgagggcaaggagcccgacatccccctgtacaagaccctgcagaccgtgggccccagccacgccagaacctacaccgtggccgtgtacttcaagggcgagagaatcggctgcggcaagggccccagcatccagcaggccgagatgggcgccgccatggacgccctggagaagtacaacttcccccagatggcccaccagaagagattcatcgagagaaagtacagacaggagctgaaggagatgagatgggagagagagcaccaggagagagagcccgacgagaccgaggacatcaagaagtag

SEQ ID NO: 40502 - DNA, 3558 bp, Artificial Sequence
  derived and/or modified sequence
cacagaatgtcgttccacccgggacgagggtgtccccgaggacgaggaggacatggagccagaccctcagcaccatcctttaggccccaaaatctgaggctgcttcaccctcagcagcctcctgtgcaatatcaatatgaacctccaagtgccccttccaccactttctcaaactctccagcccccaattttctccctccacgaccagactttgtacccttccccccacccatgcctccgtcagcgcaaggccctcttcccccctgcccaatcaggccgcctttccccaaccaccagatgaggcaccccttcccagttcctccttgttttcctcccatgccaccaccaatgccttgtcctaataaccccccagtccctggggcacctcctggacaaggcactttccccttcatgatgccccctccctccatgcctcatcccccgccccctccagtcatgccgcagcaggttaattatcagtaccctccgggctattctcaccacaacttcccacctcccagttttaatagtttccagaacaaccctagttctttcctgcccagtgctaataacagcagtagtcctcatttcagacatctccctccatacccactcccaaaggctcccagtgagagaaggtccccagaaaggctgaaacactatgatgaccacaggcaccgagatcacagtcatgggcgaggtgagaggcatcggtccctggatcggcgggagcgaggccgcagtcccgacaggagaagacaagacagccggtacagatctgattatgaccgagggagaacaccatctcgccaccgcagctacgaacggagcagagagcgagaacgggagagacacaggcatcgagacaaccgaagatcaccatctctggaaaggtcctacaaaaaagagtataagagatctggaagtcgctccccaagtagggagaagaagagagctcgttgggaggaagaaaaagaccgttggagtgacaaccagagttctggcaaagacaagaactatacctcaatcaaggaaaaagagcccgaggagaccatgcctgacaagaatgaggaggaagaagaagaacttcttaagcctgtgtggattcgatgcactcattcagaaaactactactccagtgaccccatggatcaggtgggagattctacagtggttggaacgagtaggcttcgtgacttatatgacaaatttgaggaggagttggggagcaggcaagaaaaggccaaagctgctcggcctccgtgggaacctccaaagacgaagctcgatgaagatttagagagttccagtgaatccgagtgtgagtctgatgaggacagcacctgttctagcagctcagactctgaagtttttgacgttattgcagaaatcaaacgcaaaaaggcccaccctgaccgacttcatgatgaactttggtacaacgatccaggccagatgaatgatggaccactctgcaaatgcagcgcaaaggcaagacgcacaggaattaggcacagcatttatcctggagaagaggccatcaagccctgtcgtcctatgaccaacaatgctggcagacttttccactaccggatcacagtctccccgcctacgaactttttaactgacaggccaactgttatagaatacgatgatcacgagtatatctttgaaggattttctatgtttgcacatgcccccctgaccaatattccactgtgtaaagtaattagattcaacatagactacacgattcatttcattgaagagatgatgccggagaatttttgtgtgaaagggcttgaactcttttcactgttcctattcagagatattttggaattatatgactggaatcttaaaggtcctttgtttgaagacagccctccctgctgcccaagatttcatttcatgccacgttttgtaagatttcttccagatggaggaaaggaagtgctgtccatgcaccagattctcctgtacttgttaaggtgcagcaaagccctggtgcctgaggaggagattgccaatatgcttcagtgggaggagctggagtggcagaaatatgcagaagaatgcaaaggcatgattgttaccaaccctgggacgaaaccaagctctgtccgtatcgatcaactggatcgtgaacagttcaaccccgatgtgattacttttccgattatcgtccactttgggatacgccctgcacagttgagttatgcaggagacccacagtaccaaaaactgtggaagagttatgtgaaacttcgccacctcctagcaaatagtcccaaagtcaaacaaactgacaaacagaagctggcacagagggaggaagccctccaaaaaatacggcagaagaatacaatgagacgagaagtaacggtggagctaagtagccaaggattctggaaaactggcatccgttctgatgtctgtcagcatgcaatgatgctacctgttctgacccatcatatccgctaccaccaatgcctaatgcatttggacaagttgataggatatactttccaagatcgttgtctgttgcagctggccatgactcatccaagtcatcatttaaattttggaatgaatcctgatcatgccaggaattcattatctaactgtggaattcggcagcccaaatacggagacagaaaagttcatcacatgcacatgcggaagaaagggattaacaccttgataaatatcatgtcacgccttggccaagatgacccaactccctcgaggattaaccacaatgaacggttggaattcctgggtgatgctgttgttgaatttctgaccagcgtccatttgtactatttgtttcctagtctggaagaaggaggattagcaacctatcggactgccattgttcagaatcagcaccttgccatgctagcaaagaaacttgaactggatcgatttatgctgtatgctcacgggcctgacctttgtagagaatcggaccttcgacatgcaatggccaattgttttgaagcgttaataggagctgtttacttggagggaagcctggaggaagccaagcagttatttggacgcttgctctttaatgatccggacctgcgcgaagtctggctcaattatcctctccacccactccaactacaagagccaaatactgatcgacaacttattgaaacttctccagttctacaaaaacttactgagtttgaagaagcaattggagtaatttttactcatgttcgacttctggcaagggcattcacattgagaactgtgggatttaaccatctgaccctaggccacaatcagagaatggaattcctaggtgactccataatgcaactggtagccacagagtacttattcattcatttcccagatcatcatgaaggacacttaactttgttgcgaagctctttggtgaataatagaactcaggccaaggtagcggaggagctgggcatgcaggagtggagtatttacttgctcagtaactgtgactgttgtctattgagacctagcctagttttcctgcagacaatgaatgaagtgtgctcattgaaataa

SEQ ID NO: 40503 - DNA, 4991 bp, Artificial Sequence
  derived and/or modified sequence
gagcttatattctctgtggaagatgtgacatatccaggcggaacatcatgatgcagggaaacacatgtcacagaatgtcgttccacccgggacgagggtgtccccgaggacgaggaggacatggagccagaccctcagcaccatcctttaggccccaaaatctgaggctgcttcaccctcagcagcctcctgtgcaatatcaatatgaacctccaagtgccccttccaccactttctcaaactctccagcccccaattttctccctccacgaccagactttgtacccttccccccacccatgcctccgtcagcgcaaggccctcttcccccctgcccaatcaggccgcctttccccaaccaccagatgaggcaccccttcccagttcctccttgttttcctcccatgccaccaccaatgccttgtcctaataaccccccagtccctggggcacctcctggacaaggcactttccccttcatgatgccccctccctccatgcctcatcccccgccccctccagtcatgccgcagcaggttaattatcagtaccctccgggctattctcaccacaacttcccacctcccagttttaatagtttccagaacaaccctagttctttcctgcccagtgctaataacagcagtagtcctcatttcagacatctccctccatacccactcccaaaggctcccagtgagagaaggtccccagaaaggctgaaacactatgatgaccacaggcaccgagatcacagtcatgggcgaggtgagaggcatcggtccctggatcggcgggagcgaggccgcagtcccgacaggagaagacaagacagccggtacagatctgattatgaccgagggagaacaccatctcgccaccgcagctacgaacggagcagagagcgagaacgggagagacacaggcatcgagacaaccgaagatcaccatctctggaaaggtcctacaaaaaagagtataagagatctggaagtcgctccccaagtagggagaagaagagagctcgttgggaggaagaaaaagaccgttggagtgacaaccagagttctggcaaagacaagaactatacctcaatcaaggaaaaagagcccgaggagaccatgcctgacaagaatgaggaggaagaagaagaacttcttaagcctgtgtggattcgatgcactcattcagaaaactactactccagtgaccccatggatcaggtgggagattctacagtggttggaacgagtaggcttcgtgacttatatgacaaatttgaggaggagttggggagcaggcaagaaaaggccaaagctgctcggcctccgtgggaacctccaaagacgaagctcgatgaagatttagagagttccagtgaatccgagtgtgagtctgatgaggacagcacctgttctagcagctcagactctgaagtttttgacgttattgcagaaatcaaacgcaaaaaggcccaccctgaccgacttcatgatgaactttggtacaacgatccaggccagatgaatgatggaccactctgcaaatgcagcgcaaaggcaagacgcacaggaattaggcacagcatttatcctggagaagaggccatcaagccctgtcgtcctatgaccaacaatgctggcagacttttccactaccggatcacagtctccccgcctacgaactttttaactgacaggccaactgttatagaatacgatgatcacgagtatatctttgaaggattttctatgtttgcacatgcccccctgaccaatattccactgtgtaaagtaattagattcaacatagactacacgattcatttcattgaagagatgatgccggagaatttttgtgtgaaagggcttgaactcttttcactgttcctattcagagatattttggaattatatgactggaatcttaaaggtcctttgtttgaagacagccctccctgctgcccaagatttcatttcatgccacgttttgtaagatttcttccagatggaggaaaggaagtgctgtccatgcaccagattctcctgtacttgttaaggtgcagcaaagccctggtgcctgaggaggagattgccaatatgcttcagtgggaggagctggagtggcagaaatatgcagaagaatgcaaaggcatgattgttaccaaccctgggacgaaaccaagctctgtccgtatcgatcaactggatcgtgaacagttcaaccccgatgtgattacttttccgattatcgtccactttgggatacgccctgcacagttgagttatgcaggagacccacagtaccaaaaactgtggaagagttatgtgaaacttcgccacctcctagcaaatagtcccaaagtcaaacaaactgacaaacagaagctggcacagagggaggaagccctccaaaaaatacggcagaagaatacaatgagacgagaagtaacggtggagctaagtagccaaggattctggaaaactggcatccgttctgatgtctgtcagcatgcaatgatgctacctgttctgacccatcatatccgctaccaccaatgcctaatgcatttggacaagttgataggatatactttccaagatcgttgtctgttgcagctggccatgactcatccaagtcatcatttaaattttggaatgaatcctgatcatgccaggaattcattatctaactgtggaattcggcagcccaaatacggagacagaaaagttcatcacatgcacatgcggaagaaagggattaacaccttgataaatatcatgtcacgccttggccaagatgacccaactccctcgaggattaaccacaatgaacggttggaattcctgggtgatgctgttgttgaatttctgaccagcgtccatttgtactatttgtttcctagtctggaagaaggaggattagcaacctatcggactgccattgttcagaatcagcaccttgccatgctagcaaagaaacttgaactggatcgatttatgctgtatgctcacgggcctgacctttgtagagaatcggaccttcgacatgcaatggccaattgttttgaagcgttaataggagctgtttacttggagggaagcctggaggaagccaagcagttatttggacgcttgctctttaatgatccggacctgcgcgaagtctggctcaattatcctctccacccactccaactacaagagccaaatactgatcgacaacttattgaaacttctccagttctacaaaaacttactgagtttgaagaagcaattggagtaatttttactcatgttcgacttctggcaagggcattcacattgagaactgtgggatttaaccatctgaccctaggccacaatcagagaatggaattcctaggtgactccataatgcaactggtagccacagagtacttattcattcatttcccagatcatcatgaaggacacttaactttgttgcgaagctctttggtgaataatagaactcaggccaaggtagcggaggagctgggcatgcaggagtacgccataaccaacgacaagaccaagaggcctgtggcgcttcgcaccaagaccttggcggaccttttggaatcatttattgcagcgctgtacattgataaggatttggaatatgttcatactttcatgaatgtctgcttctttccacgattgaaagagttcattttgaatcaggattggaatgaccccaaatcccagcttcagcagtgttgcttgacacttaggacagaaggaaaagagccagacattcctctgtacaagactctgcagacagtgggcccatcccatgcccgaacctacactgtggctgtttatttcaagggagaaagaataggctgtgggaaaggaccaagtattcagcaagcggaaatgggagcagcaatggatgcgcttgaaaaatataattttccccagatggcccatcagaagcggttcatcgaacggaagtacagacaagagttaaaagaaatgaggtgggaaagagagcatcaagagagagagccagatgagactgaagacatcaagaaataaaggagggcatgcaagtgtggagtatttacttgctcagtaactgtgactgttgtctattgagacctagcctagttttcctgcagacaatgaatgaagtgtgctcattgaaataaaatacagagtcaaatcgctattgttgttttaatgatctgtttttagctggatggtctttattacaaagtattagatttttcttctatttaacggaaaacttgactttggtgaatgtgcattacttccttttattttgctctttaaataataaaattcaagaagcatattctatgtggaatagatcctgtttttccatctgtgtcccagattgtgaccctagactttcaattgacaagtaaaaaattgactttactagacattttgactgtgctctagtaacatctatcctttttcaaatctctggatttttaagtagattgttcagctttcatccggtggctgttcatcaagttatcagctgcaaatattgaacttacctctctctaagcagtgagtgttttgtagaaggaatccgtttaacaattaattggctaatgggagaaggggaaagactgatattcaagtcatacagattctttgaatcattagaataggagagaaatcatgattctaagccaggccacactttaaaccaagtgctctcaccctggggttagtggaacctttaagaagttaatgaacagacttcaaggaagtcaaaaacctcccaatactatattcaattttctgtgtgtgtttgagatttgagagggcatggggagcaggaaggaggagggtttatagcttttatcagcctctctaagtgggccctgcagtaaaaggctaacatgacattcaaagacataacattttaaaaaaagttattccaaactaaacatcactggtttcttattaataaaggcaaaacttctttgt

SEQ ID NO: 40504 - protein, 297 aa, Artificial Sequence
  derived and/or modified sequence
MNEEEQFVNIDLNDDNICSVCKLGTDKETLSFCHICFELNIEGVPKSDLLHTKSLRGHKDCFEKYHLIANQGCPRSKLSKSTYEEVKTILSKKINWIVQYAQNKDLDSDSECSKNPQHHLFNFRHKPEEKLLPQFDSQVPKYSAKWIDGSAGGISNCTQRILEQRENTDFGLSMLQDSGATLCRNSVLWPHSHNQAQKKEETISSPEANVQTQHPHYSREELNSMTLGEVEQLNAKLLQQIQEVFEELTHQVQEKDSLASQLHVRHVAIEQLLKNCSKLPCLQVGRTGMKSHLPINN

SEQ ID NO: 40505 - protein, 221 aa, Artificial Sequence
  derived and/or modified sequence
MNEEEQFVNIDLNDDNICSVCKLGTDKETLSFCHICFELNIEGVPKSDLLHTKSLRGHKDCFEKYHLIANQGCPRSKLSKSTYEEVKTILSKKINWIVQYAQNKDLDSDSECSKNPQHHLFNFRHKPEEKLLPQFDSQVPKYSAKWIDGSAGGISNCTQRILEQRENTDFGLSMLQDSGATLCRNSVLWPHSHNQAQKKEETISSPEANVQTQHPHYSREE

SEQ ID NO: 40506 - DNA, 5433 bp, Artificial Sequence
  derived and/or modified sequence
gcggccgcctctgctgcggccggaaacaatagtggaggaacccgagccgcacggaacggcggtggtggcccgcggagccggacggggcactatgaacgaagaggagcagtttgtaaacattgatttgaatgatgacaacatttgcagtgtttgtaaactgggaacagacaaagaaacactctccttctgccacatttgttttgagctaaatattgagggggtaccaaagtctgatctcttgcacaccaaatcattaaggggccataaagactgctttgaaaaataccatttaattgcaaaccagggttgtcctcgatctaagctttcaaaaagtacttatgaagaagttaaaaccattttgagtaagaagataaactggattgtgcagtatgcacaaaataaggatctggattcagattctgaatgttctaaaaacccccagcatcatctgtttaatttcaggcataagccagaagaaaaattactcccacagtttgactcccaagtaccaaaatattctgcaaaatggatagatggaagtgcaggtggcatctctaactgtacacaaagaattttggagcagagggaaaatacagactttggactttctatgttacaagattcaggtgccactttatgtcgtaacagtgtattgtggcctcatagtcacaaccaggcacagaaaaaagaagagacaatctctagtccagaggctaatgtccagacccagcatccacattacagcagagaggaattgaattcgatgactcttggtgaggtagagcaactgaatgcaaagctcctacagcaaatccaggaagtttttgaagagttaactcaccaagtgcaagaaaaagattctttggcctcacagctccatgtccgccacgttgccatcgaacagcttctgaagaactgttctaagttaccatgtctgcaagtagggcgaacaggaatgaagtcgcacctacccataaacaactgacctaaacagacttacttcgtatgccctgccctttattggtctcccagacatgcaaactttgaagaagtttgaagaaagttgtggtccgtttttttatggtcattaaatttgccaaacataaggcagtatttaacatctttgtcaaataaagcagatcattatactctagtcttctagggctaatcattttggctcatttggggactcttttttcccagaattactaaacaaattttatcacatgtgactacttaaatatactgttacagtgtcattttattaaacattttaattcacctgtcaaaacaacagattaactccttagtgtaaactactagagataatttttaagagggaaatggaattcatatcacctcttatttattatgagcaatattttaatataaaaattttatatgtgaaaatgctattttaggtactttgccattctctttataaatgtgtatttgagtggttctgtatatttatttacattatcatgtgtgaatatgttcacccatatttcaggtcactgcattttattctcttaatacaatgttttcacaacggttaccttgctttccaaagataaatatattttggattagaaatctgagttgttttaatttctaatacctcttgtaaaagaagaattaataactttttaaagcagtattcaggtaaatacaatacattattttgttttctaacaaaagcagttcttagttcaggaagaaaagactaatctggcttctatgtcaatttgtctccatagaaatgaaagcctcctcttgcttctttcattattagcttcacaccagtgactgtgatgcattagaatttggacagagtaagtcaagcctcacttccaattcaaatataatgtctatcttcaaattgagtgtgctgtgaaattgttctgtctttgaaaaaaaaaagtaagattattttgtgtgccactttgggtaaagtttcaagaatacttaaactgtccaaattgtattatcaccatcattgaacttagtgctcaaagaaagcattgtgaggtatttttctaaactttagactctatagagaaatataggattgttctacagaagaaaagcaaaactcctaattaaaaaaaaataaacctatgtattaagagaatgttctcgtaagttgcctatgatgcttccaaagagtttttatctaacagattgtgccaaacagctagataaattttaataatgtattacagtaaaggctataaccaatgcagaattaaaatgggctctaaattctgtttttaactcatgtttagaatgtacttatgaggtagatccttgcttgaaagtatctgctgaaaagcccagtaacgtggcagcttcatgcataaagatataaatgacatttgccttaaatttggcagcctaccctggcttgggtcagattttgttgttgaacacaagaaagtatttaagcaaagaaacacttcagtttaattgaaaacaactttttgtaatgctgacgtgttaaattggcctgagggtattaattgatatctgttgattttgtttttctttgaagtataacattactttttggagggaatttttgaaagatgctttcgatttctctcaattctttaagtcatgcaaaatgaatttaaaatccagggagtatggatgcattgccttagttttgatgagctttaaattaaatgtgtgcaatatcaaaatattcaaacttacaagctgggtaaatacatttcctgattaatatcttagtgcttaattgttcccacattttcaaatttgactttactcttttttggcgtaattcagtaagattgttaccagccagtgtgtttgcacacatttgggtttgtgtttagatgagttagggacagtcataaaagttggggatatgttgcatttgatatcaatagtagcatatttccagaatatgagccataagttgcagtcctgaatacaacagtgttatccaaagaaaggagttttctgacaaatatacatagctttgctaatgagtacggaacaagtggatgaacgtgtgcatgtgctaaggtcttaagtgggactctgatttattccatttagatatttctacttaagctctaaaaaggagaggtgctcttaaaaaaaactttgtggtgctggtactcacactactttatttggatgagttcctagtaaaaaaaactttttgttgaagtattttgcacagcagtttatccaaatgtttggtaaacttataatttagtcctatgttagttttcttaatcaaatatgcaattactgtgtatgcaaatataagtatcaggtacagagttgagttctaacaagagaacatgaaatatcacaaatattgttttccacacttggctattctctacagttgttagtaatttttgagaatgttttgaagcatatctcatgtactactgtttaaaaagtggcaaaacagactgccagtcatccattactaaattttcagagcttatatgattaaggggagtgagataagacaaatctttttcacgttcagttttataatttgacacgttaaattgagttttaaaaattagaaaagtgtttttgaccacacaggttgttctctttaaagttcagccttataatgaagctaaaaatcaattatgttttactttgagattatcatcttatcctttgatcctcatattaatatctaaattagtcttttttaaaaggcatgcacttgagactccagtaatagatgattcaggcagcagaatagtgttttgttgtgtcgttgactatgcacaatggtggagcaaagacacattcttagtttttcaaaacacatgttcattttaccacaaagtgcccatttttatatacatttaaggattattttttcaatgtcaagttcatgttagtgatttcagaaatatagtcaaaatatatagtcaaatatatcttgacaggcatcttgagatttggtttttcattttactatatttatgactgaaaatggttttgtgttttctttatgttgtttatatattttttaccttagtgtttacactggtaaggcttgttagtccatttttgtagtttttttaaagtaagcttttagatctatttgtgttttaatgtttcccagtttgggttttgttttgttttggaagaatctgctttcattattaaattataaaatgtaaatgctctaaagtaggaatttttaaagagtaaattatttgtgtagcttattaggaggttcaggttagtgaccataaagtgggttacttgtacatgaaaatttgaaatggtaccatgtaaaattcttctattgtcaactttttctgatgtatgccagttcatttactgacaaatgttgttactaagtgcttattaagaagtgtaatacgctataaaaaagttaatactttttgttcagatgtaaggcaaagataattgatgccgtttcagtgtatgattgtatttttaacttttacgttggtgggagtaactatttgaggaaatttgtggtgagaattagtaagagataaaacccccaacagtttattcttaccaagtaaagttttgtggtcatggggcagggaagagtttatttaccagaatactagagccctcacacaaaataaaggtaacttggaggagggctataatgcttgcatctcagtattttcatttcacttcatcctttcataattgccttgattatggtgcagtctaacctattaagcaacttctggctatggtaacattgatatgaaccatattatatcaagtctccaaaacatctagtttgttaacatacactttccctgttctttttagtttgagtccacattactaatacattttaataatatttaattatttcacaattttaagtttaccaaagtaaacaaaaattcatgaagatgagtattgccctctcccaaaaaaggtttaaagattagttgaacttccctcaactacacctaaagcaaaggggaattttagtaagtgtgtgtaccttgtttctttcagacgcatctagaatgtttttctttcaccgtacctccaaaagaggcaatttagaaagtattaagtagtgacttttgttcagttccattttgtgtgtgtgtgtgtgtgtgtgtgtgtgtgtgtgaaccttgctttaaaacagtagcgtatactatggtcattgaacttaatctctctggtgttagaaatttactttacaaaattgtgttaagacttttggaaaaagaaaatgaaactgctgtggtaaaaaccaagtttgtttcaaaaaagtaggcaattatttggctgttatattttctttgaaaactgcaataatttatatatttgtattgctctgcttgggaactgtatatatgcttgtctactatttttaattttacaacaataaaataagtattttgttatctgcta

SEQ ID NO: 40507 - DNA, 894 bp, Artificial Sequence
  derived and/or modified sequence
atgaacgaggaggagcagttcgtgaacatcgacctgaacgacgacaacatctgcagcgtgtgcaagctgggcaccgacaaggagaccctgagcttctgccacatctgcttcgagctgaacatcgagggcgtgcccaagagcgacctgctgcacaccaagagcctgagaggccacaaggactgcttcgagaagtaccacctgatcgccaaccagggctgccccagaagcaagctgagcaagagcacctacgaggaggtgaagaccatcctgagcaagaagatcaactggatcgtgcagtacgcccagaacaaggacctggacagcgacagcgagtgcagcaagaacccccagcaccacctgttcaacttcagacacaagcccgaggagaagctgctgccccagttcgacagccaggtgcccaagtacagcgccaagtggatcgacggcagcgccggcggcatcagcaactgcacccagagaatcctggagcagagagagaacaccgacttcggcctgagcatgctgcaggacagcggcgccaccctgtgcagaaacagcgtgctgtggccccacagccacaaccaggcccagaagaaggaggagaccatcagcagccccgaggccaacgtgcagacccagcacccccactacagcagagaggagctgaacagcatgaccctgggcgaggtggagcagctgaacgccaagctgctgcagcagatccaggaggtgttcgaggagctgacccaccaggtgcaggagaaggacagcctggccagccagctgcacgtgagacacgtggccatcgagcagctgctgaagaactgcagcaagctgccctgcctgcaggtgggcagaaccggcatgaagagccacctgcccatcaacaactag

SEQ ID NO: 40508 - DNA, 894 bp, Artificial Sequence
  derived and/or modified sequence
atgaatgaggaggaacagttcgttaacattgatctcaacgacgacaacatctgttccgtctgtaagctgggaaccgacaaggagaccctgtcgttctgccacatttgcttcgaactgaacattgagggtgtgcccaaatcagacctcctgcacacaaaaagtctgcgaggtcacaaggactgctttgagaaataccacctgattgcaaatcagggttgccctcggagtaagttgagcaagagcacttatgaagaggtgaaaaccattctcagcaagaaaataaactggattgtgcagtatgcacagaacaaagatctggacagcgattccgagtgctctaaaaatccccaacatcatctgttcaattttagacacaaacctgaagagaagctgctgcctcagtttgattcccaggtgcctaagtattcagcaaagtggatcgacggaagcgcaggcggcattagtaattgtacccagaggatcctggaacagcgggaaaacactgatttcggactgtctatgctgcaagacagtggcgcaacgctgtgccggaacagcgtgttgtggcctcacagccacaaccaggcccaaaaaaaagaggagaccatctccagccctgaagccaatgtacagacgcagcacccgcactacagccgagaagagctgaactccatgacgttgggggaggtggaacagctgaacgccaagctgcttcaacaaatccaggaggttttcgaggagcttacacaccaggtgcaggaaaaggactcactggcctctcagcttcacgtgcgtcatgtggctatcgaacaactgttgaagaattgctcgaaactgccatgcctccaggttggacgaacaggaatgaaatcccacctccccattaataactag

SEQ ID NO: 40509 - DNA, 894 bp, Artificial Sequence
  derived and/or modified sequence
atgaatgaggaggagcagtttgtgaacatcgacctgaatgatgacaacatctgcagcgtgtgcaagctgggcacagacaaggagaccctgtccttctgccacatctgctttgagctgaacattgaaggagtgcccaagagtgacctgctgcacaccaagagcctgcggggccacaaggactgctttgagaagtaccacctgattgccaaccagggctgccccaggagcaagctgagcaagagcacctatgaggaggtgaagaccatcctgagcaagaagatcaactggatcgtgcagtatgcccagaacaaggacctggacagcgacagtgaatgttccaagaacccccagcaccacctgttcaacttccgccacaagccagaggagaagctgctgccccagtttgacagccaggtgcccaagtacagcgccaagtggattgatggcagcgctgggggcatcagcaactgcacccagaggatcctggagcagcgggagaacacagactttggcctgtccatgctgcaggacagcggggccaccctgtgcaggaacagcgtgctgtggccccacagccacaaccaggcccagaagaaggaggagaccatcagcagccctgaggccaacgtgcagacccagcacccccactacagccgggaggagctgaacagcatgaccctgggggaggtggagcagctgaatgccaagctgctgcagcagatccaggaggtgtttgaggagctgacccaccaggtgcaggagaaggacagcctggccagccagctgcacgtgcgccacgtggccatcgagcagctgctgaagaactgcagcaagctgccctgcctgcaggtgggccgcacaggcatgaagagccacctgcccatcaacaactag

SEQ ID NO: 40510 - DNA, 894 bp, Artificial Sequence
  derived and/or modified sequence
atgaacgaggaggagcagttcgtgaacatcgacctgaacgacgacaatatatgcagcgtatgcaagcttgggaccgacaaagaaaccctgagcttttgccacatttgctttgaacttaatatcgagggcgttcctaaatccgacctcctccacactaagagcttgcggggccacaaagattgtttcgaaaagtatcatttaatcgccaaccaggggtgtcccagatccaaactatctaagtccacctatgaagaggtcaagacaattctgtctaagaaaattaattggatcgtgcagtacgctcagaataaagacctggattcagattccgaatgctctaaaaatccccaacatcatttattcaatttcagacacaagcctgaagagaagctgctgcctcagttcgatagccaggtcccgaaatactcagctaaatggattgacggatcagctggagggatatcaaactgcacccagcgtatcctggagcaacgggagaacactgatttcggcctaagtatgctacaagactccggcgccactctttgtcgaaattccgtgctgtggccccattcacacaaccaggcccaaaagaaagaggaaaccatatcatccccagaagctaacgttcagactcagcaccctcactacagccgggaagagctcaattcgatgacccttggagaggtagaacagctcaacgccaagcttctgcagcagatacaggaagtgtttgaggaactaacacatcaggtccaggaaaaagacagtctcgctagccaacttcacgtcaggcatgttgccatcgagcagctcctcaagaattgttctaaactgccttgtttgcaggtgggtcgcactggcatgaaaagtcatcttcctattaacaactag

SEQ ID NO: 40511 - DNA, 894 bp, Artificial Sequence
  derived and/or modified sequence
atgaatgaggaggagcagtttgtgaatatcgaccttaatgatgataacatctgctccgtttgcaagctgggcacagataaggagacgctgagtttctgccacatttgctttgaactgaatatcgaaggggttccaaagagtgacctccttcacacaaaatcattgcgcggacataaggattgcttcgaaaagtaccatctaatagctaaccaggggtgtcctcgctccaagctctcaaagtctacatacgaggaggtaaaaactatcctgtctaagaaaatcaactggatagtccaatacgcgcagaacaaagatcttgatagcgactctgaatgcagcaagaacccccagcaccatctgttcaatttccggcacaaacccgaggaaaagctcctgcctcagtttgattcacaagtacccaaatattcagcgaagtggatcgatggatccgcgggaggcatctctaattgcacccagaggattctggaacaacgtgagaacaccgattttggactgagcatgctccaggactcaggagctacattgtgcagaaacagcgtcctgtggccccatagccacaatcaggcacaaaagaaggaggaaacgatctcctctcctgaggccaatgtacagacacagcacccccattatagccgggaagagttaaacagtatgaccctgggcgaagtggagcagctgaacgctaaactcctgcaacagatccaagaagtgttcgaagaattgacacatcaggttcaagagaaagatagtctggcttcacaactccacgtgcgtcatgtggcgatagagcagctgttaaagaattgctccaagttaccctgtcttcaggtgggcaggaccggaatgaagtcccacctcccgatcaacaattag

SEQ ID NO: 40512 - DNA, 666 bp, Artificial Sequence
  derived and/or modified sequence
atgaacgaggaggagcagttcgtgaacatcgacctgaacgacgacaacatctgcagcgtgtgcaagctgggcaccgacaaggagaccctgagcttctgccacatctgcttcgagctgaacatcgagggcgtgcccaagagcgacctgctgcacaccaagagcctgagaggccacaaggactgcttcgagaagtaccacctgatcgccaaccagggctgccccagaagcaagctgagcaagagcacctacgaggaggtgaagaccatcctgagcaagaagatcaactggatcgtgcagtacgcccagaacaaggacctggacagcgacagcgagtgcagcaagaacccccagcaccacctgttcaacttcagacacaagcccgaggagaagctgctgccccagttcgacagccaggtgcccaagtacagcgccaagtggatcgacggcagcgccggcggcatcagcaactgcacccagagaatcctggagcagagagagaacaccgacttcggcctgagcatgctgcaggacagcggcgccaccctgtgcagaaacagcgtgctgtggccccacagccacaaccaggcccagaagaaggaggagaccatcagcagccccgaggccaacgtgcagacccagcacccccactacagcagagaggagtag

SEQ ID NO: 40513 - DNA, 666 bp, Artificial Sequence
  derived and/or modified sequence
atgaatgaagaggaacagttcgtcaacatcgatctgaacgatgacaacatctgttctgtgtgcaagcttggaacagacaaggagacgctttccttctgtcacatctgcttcgaactgaatatcgaaggcgtgcccaagagcgatctgctgcatacgaagtcactgaggggacataaagattgtttcgagaagtaccatcttattgctaatcaggggtgccccagatccaagctctctaagagtacatacgaggaagtgaaaacaatcctgagcaagaaaatcaactggattgttcagtatgcccagaacaaagatttagattcagattctgagtgctctaagaaccctcagcaccaccttttcaatttcagacacaagcccgaagaaaagctgctcccccagttcgattctcaagtccctaagtacagtgctaaatggatcgatgggagcgccggcggaatctctaattgcacccagagaatcctggaacagagagagaacacagactttggcctgtcgatgcttcaagactccggcgctactctgtgtcgaaactcggtcttgtggccccacagccacaatcaggctcagaagaaagaggaaaccatttcatcccctgaggcaaatgtccaaacccagcaccctcactatagcagagaagagtag

SEQ ID NO: 40514 - DNA, 666 bp, Artificial Sequence
  derived and/or modified sequence
atgaatgaggaggagcagtttgtgaacatcgacctgaatgatgacaacatctgcagcgtgtgcaagctgggcacagacaaggagaccctgtccttctgccacatctgctttgagctgaacattgaaggagtgcccaagagtgacctgctgcacaccaagagcctgcggggccacaaggactgctttgagaagtaccacctgattgccaaccagggctgccccaggagcaagctgagcaagagcacctatgaggaggtgaagaccatcctgagcaagaagatcaactggatcgtgcagtatgcccagaacaaggacctggacagcgacagtgaatgttccaagaacccccagcaccacctgttcaacttccgccacaagccagaggagaagctgctgccccagtttgacagccaggtgcccaagtacagcgccaagtggattgatggcagcgctgggggcatcagcaactgcacccagaggatcctggagcagcgggagaacacagactttggcctgtccatgctgcaggacagcggggccaccctgtgcaggaacagcgtgctgtggccccacagccacaaccaggcccagaagaaggaggagaccatcagcagccctgaggccaacgtgcagacccagcacccccactacagccgggaggagtag

SEQ ID NO: 40515 - DNA, 666 bp, Artificial Sequence
  derived and/or modified sequence
atgaacgaggaggagcagttcgtgaacatcgacctgaacgacgacaatatctgttctgtatgtaagctgggcaccgacaaggaaactctctctttttgtcacatttgcttcgaactaaatattgagggcgttcccaagtcagacctgcttcatacgaagagcctccggggccataaagattgctttgaaaaataccacctgatagccaaccagggatgcccccggagcaagctgagcaaaagtacttacgaggaggtgaagacgattctaagcaagaaaattaactggattgtacagtacgcccagaacaaggaccttgactccgactctgagtgtagcaagaatccccagcaccacctttttaacttcaggcataaaccggaagaaaaactcttgccgcaatttgatagtcaggtgccgaagtattctgctaaatggattgatggaagtgccgggggtatcagtaactgcacacaacgcatcctcgaacagagggagaatacagattttggtttatcaatgctgcaggactccggggccacgctgtgccggaactctgttctgtggccccatagccacaatcaggcacaaaagaaagaggaaacgatctccagtcccgaagctaatgtccagacacagcaccctcactatagccgggaggaatag

SEQ ID NO: 40516 - DNA, 666 bp, Artificial Sequence
  derived and/or modified sequence
atgaatgaggaagagcaattcgtgaatatcgatctgaacgatgacaacatatgtagcgtctgtaaactgggtacggataaagagactctctcgttttgccacatatgctttgaactcaatatcgaaggagtgcctaagtcagacctgcttcacacgaagtctttacgcggtcataaggattgtttcgagaagtaccacctgatcgcaaatcaaggctgccctcggtcaaagctgagcaagagcacgtatgaagaggtcaagacaattctgagcaagaaaattaattggatagtgcaatatgcacaaaataaggatttagatagcgactccgagtgcagcaagaatccccagcatcaccttttcaacttccgccataagccagaagaaaaacttttgccccaatttgactctcaagtgccgaaatatagcgccaagtggatcgacggcagcgccggaggaatttccaactgcactcaacgtattctggaacaaagggagaacaccgactttggcttgtccatgcttcaggactccggagctacattatgtaggaatagtgttctgtggccacattctcataaccaggcccagaaaaaggaggagacaatctccagtccggaggcaaatgtgcagactcagcatccccactatagtagagaagagtag

SEQ ID NO: 40517 - protein, 608 aa, Artificial Sequence
  derived and/or modified sequence
MADNLSDTLKKLKITAVDKTEDSLEGCLDCLLQALAQNNTETSEKIQASGILQLFASLLTPQSSCKAKVANIIAEVAKNEFMRIPCVDAGLISPLVQLLNSKDQEVLLQTGRALGNICYDSHEGRSAVDQAGGAQIVIDHLRSLCSITDPANEKLLTVFCGMLMNYSNENDSLQAQLINMGVIPTLVKLLGIHCQNAALTEMCLVAFGNLAELESSKEQFASTNIAEELVKLFKKQIEHDKREMIFEVLAPLAENDAIKLQLVEAGLVECLLEIVQQKVDSDKEDDITELKTGSDLMVLLLLGDESMQKLFEGGKGSVFQRVLSWIPSNNHQLQLAGALAIANFARNDANCIHMVDNGIVEKLMDLLDRHVEDGNVTVQHAALSALRNLAIPVINKAKMLSAGVTEAVLKFLKSEMPPVQFKLLGTLRMLIDAQAEAAEQLGKNVKLVERLVEWCEAKDHAGVMGESNRLLSALIRHSKSKDVIKTIVQSGGIKHLVTMATSEHVIMQNEALVALALIAALELGTAEKDLESAKLVQILHRLLADERSAPEIKYNSMVLICALMGSECLHKEVQDLAFLDVVSKLRSHENKSVAQQASLTEQRLTVES

SEQ ID NO: 40518 - DNA, 1827 bp, Artificial Sequence
  derived and/or modified sequence
atggccgataatctgagcgatacgctgaagaaactcaaaataactgccgtagataaaaccgaggactcattagaaggttgcttagattgtctcctgcaggctctcgcacaaaataatacagaaactagtgaaaaaatccaggcttccggcatactgcagctctttgcctcccttctgaccccacagagctcctgcaaggcaaaggttgccaatattatcgcggaggtcgccaagaacgagtttatgcgcataccgtgtgttgacgctgggttgatttctcccttggtgcagctgcttaacagcaaagatcaagaggtgctgctgcagaccggaagggcgctcggcaacatttgttatgactctcatgagggaagatcggccgtagaccaagctgggggcgctcagatcgtcatagatcacctaaggtctctgtgtagcattactgatccggcaaatgagaaactgctaacagtcttttgcggaatgctcatgaactactccaatgaaaatgatagtcttcaggctcaacttatcaacatgggcgtaatcccgactttggtcaagcttctcggaatccactgccagaatgccgccctaacagagatgtgcctggtggcctttgggaatctagccgaattggaatcgtcaaaagagcagttcgcatcaaccaacatcgcagaggaactcgttaagttatttaaaaagcagatcgagcacgataagagggagatgattttcgaagtccttgccccattagccgaaaatgacgctatcaaattacagttggttgaagctggtctggtcgaatgcctcttagagatagttcaacagaaggtggactcagataaagaggacgatattacagaattgaaaactggcagtgacctgatggtcctgcttctgctgggcgacgaaagcatgcaaaagctgttcgagggcggaaagggctcagtctttcagagggtcctgagctggatcccctcgaacaaccaccagcttcaacttgctggagccttggctatcgccaatttcgcgcggaacgacgcaaactgtatccatatggttgataacgggatcgtcgagaagctcatggacctcctcgatagacatgtagaggatgggaatgtgacggtccagcacgccgcccttagtgcccttcgaaatctcgccattccagtgataaacaaagccaagatgctgagcgcaggggttacagaggctgtcctgaagttcctcaagtcagaaatgcccccagtgcagtttaaactgctggggactctaaggatgctgattgacgctcaggcggaagcagcagagcaactgggcaaaaatgtgaagctggtggagaggctggtggagtggtgcgaagccaaggatcacgccggggtgatgggcgaaagcaatcgactgctctctgcactaattcgacattcaaagtcaaaggacgttatcaagactatcgtccagagtggcggtatcaaacatctcgtgacaatggctacttcagagcatgtgattatgcaaaatgaggcactcgtggctctggccttgatagccgccctagaacttggtacagcagaaaaggacttggagtccgctaagttggtacagattctccacagacttttggccgacgaacgcagtgccccggagatcaaatacaattcaatggtgcttatttgcgccctgatggggtcagagtgccttcacaaggaggttcaggaccttgccttccttgatgtcgtcagtaagctgaggagtcacgaaaacaagtctgtggcccagcaggcctcgttaacagagcagcgcttaacagtcgagagctag

SEQ ID NO: 40519 - DNA, 1827 bp, Artificial Sequence
  derived and/or modified sequence
atggctgacaacctgagtgacaccctgaagaagctgaagatcacagctgtggacaagacagaggacagcctggagggctgcctggactgcctgctgcaggccctggcccagaacaacacagagaccagcgagaagatccaggccagcggcatcctgcagctgtttgccagcctgctgaccccccagagcagctgcaaggccaaggtggccaacatcatcgccgaggtggccaagaatgagttcatgaggatcccctgtgtggatgctggcctcatcagccccctggtgcagctgctgaacagcaaggaccaggaggtgctgctgcagacaggccgggccctgggcaacatctgctatgacagccatgagggccgctctgctgtggaccaggccggcggggcccagatcgtcatcgaccacctgcggagcctgtgcagcatcacagatcctgccaatgagaagctgctgactgtgttctgtggcatgctgatgaactacagcaatgaaaatgacagcctgcaggcccagctgatcaacatgggcgtcatccccaccctggtgaagctgctgggcatccactgccagaatgctgccctgacagagatgtgcctggtggcctttggaaacctggccgagctggagagcagcaaggagcagtttgccagcaccaacattgctgaggagctggtgaagctgttcaagaagcagattgaacatgacaagcgggagatgatctttgaggtgctggcccccctggccgagaatgatgccatcaagctgcagctggtggaggccggcctggtggagtgcctgctggagatcgtgcagcagaaggtggacagcgacaaggaggatgacatcacagagctgaagacaggcagtgacctgatggtgctgctgctgctgggagatgagagcatgcagaagctgtttgaaggaggaaaaggatctgtgttccagagggtgctgtcctggatccccagcaacaaccaccagctgcagctggccggggccctggccatcgccaactttgccagaaatgatgccaactgcatccacatggtggacaatggaattgtggagaagctgatggacctgctggacagacatgtggaggatggaaatgtgacagtgcagcacgccgccctgagcgccctgaggaacctggccatccctgtgatcaacaaggccaagatgctgtctgctggggtgacagaagctgtgctgaagttcctgaagtctgagatgcctcctgtgcagttcaagctgctgggcaccctgaggatgctgattgatgcccaggccgaggccgctgagcagctgggcaagaatgtgaagctggtggagcggctggtggagtggtgtgaggccaaggaccatgctggggtgatgggagagagcaaccggctgctgagcgccctgatccgccacagcaagagcaaggatgtgatcaagaccatcgtgcagagcggcggcatcaagcacctggtgaccatggccaccagcgagcacgtgatcatgcagaatgaggccctggtggccctggccctgattgctgccctggagctgggcacagctgagaaggacctggagagcgccaagctggtgcagatcctgcaccggctgctggctgatgagaggtctgcccctgagatcaagtacaacagcatggtgctgatctgtgccctgatgggctctgaatgtctgcacaaggaggtgcaggacctggccttcctggatgtggtgtccaagctgcggagccatgagaacaagtctgtggcccagcaggccagcctgacagagcagaggctgactgtggagagctag

SEQ ID NO: 40520 - DNA, 1827 bp, Artificial Sequence
  derived and/or modified sequence
atggccgacaacctgagcgacaccctgaagaagctgaagatcaccgcagtggacaagacggaagattctctggaaggatgcctggactgtttgttgcaggctctcgctcaaaacaacactgaaacctctgaaaagatacaggcttcagggatcctgcagctgtttgcaagcttattaactccccaatcttcttgtaaggctaaggtcgccaatattatcgcagaagttgccaaaaatgaattcatgagaatcccatgtgtggatgccggcttgatttctcccctggtccagctcctgaattcaaaagaccaagaggtgctgctgcagaccggccgtgctctgggcaacatctgttacgatagtcatgagggaaggtcggccgtcgaccaggcagggggcgctcagattgtgatcgatcatctgcgaagcctatgcagtattactgacccagcaaatgaaaaactactgacagtgttctgtggcatgctgatgaattactcaaacgagaacgactccctgcaggcccagctgattaatatgggcgtgatacccaccttagtcaaacttcttggcattcattgccagaacgcagcactcaccgagatgtgcctggtggcttttggcaacctcgcagaactggagtcctctaaggagcagttcgcgagcactaacatagccgaggagctggtgaagctgttcaaaaaacagatcgagcacgataagcgcgagatgatctttgaagtcctcgcccctcttgctgagaatgatgccattaagttacagctggtggaggctggcctggtcgagtgcctgctggaaatcgtccaacagaaagtggattccgataaggaggacgatattactgaactcaagactggctcagatctgatggtactgctcttgctcggcgacgagtccatgcagaaactattcgaggggggcaaaggcagcgtgtttcagagggtgttgtcctggataccctctaacaatcaccagctgcagctggcaggggccttagctatcgccaactttgcacggaacgatgccaattgcatccacatggtagataatgggatcgtcgaaaagctgatggaccttctcgaccgacacgtggaagacggaaacgttaccgtgcagcacgccgccctctctgccttgcggaatctggcgataccagtgatcaataaagctaagatgctcagcgccggagtgaccgaggccgtgttgaagtttctaaaatcggaaatgccccccgtgcagttcaagctacttgggacgcttaggatgcttatcgatgctcaggccgaagccgctgaacagctcgggaagaatgtcaagctggtcgaacgcctagtggagtggtgcgaagctaaagaccatgccggcgtaatgggcgagtcaaacaggctactctctgctctaattcggcacagtaaatccaaagacgtgatcaaaactattgtgcagtccgggggcattaaacatctggtgactatggccacatcagagcatgtgattatgcaaaacgaagcccttgttgcactcgctctgatagccgctctcgaactcggcaccgccgaaaaagacctggagtccgccaagctggttcagattctgcatagattgttggcagatgagcgctctgccccagagataaagtacaactctatggtcctgatatgtgctctgatgggatcagagtgtctgcacaaggaggtgcaggatctagcttttctggacgtggtatcaaaactccggtcacacgagaataaatccgttgcgcagcaagcctcccttaccgaacagaggttaaccgtggaatcatag

SEQ ID NO: 40521 - DNA, 1827 bp, Artificial Sequence
  derived and/or modified sequence
atggcagacaatctgtccgatactcttaagaaactgaaaatcactgcagttgacaagacggaggactctcttgaaggatgcctcgactgccttcttcaggcactagcacagaataatacggaaactagcgaaaagattcaggcctctggtattctgcagctgttcgctagcctgctgacgcctcagtcatcttgtaaggcaaaggtggcaaatatcattgcagaagtggcgaaaaatgaatttatgcggatcccctgcgtcgatgccggattgatttccccactggtacagctgcttaactccaaagaccaggaggtgctgctccagacaggtagagccctgggaaacatatgttatgacagccacgaaggacgtagcgcagtcgaccaggccggaggggctcagatcgtgatagaccacctgagatctctctgttcgatcacagatcccgctaatgaaaagctgctgaccgtgttctgtgggatgttaatgaattacagcaatgaaaatgacagcttacaggcccagctcatcaacatgggtgtgatccctacccttgtgaaactactgggaatacattgtcaaaatgcagccctgactgagatgtgcctggtagctttcggaaacttggccgaactcgagagcagtaaggagcagtttgcctccactaatatcgccgaggagttagttaagctgtttaagaaacagatcgaacacgacaaacgcgagatgatctttgaagtgctcgctcccctggctgagaatgatgctatcaagctgcagttggtggaagctggactcgtagagtgcttattggagatcgtgcagcagaaggttgattccgacaaggaggacgacattactgaattgaaaacaggctcggatttgatggttttgttgctcctcggagacgaaagcatgcagaagttgtttgagggcggaaagggcagcgttttccagagggtgctctcttggatcccatccaacaaccaccagctgcaactggccggagccctggcaatagcaaacttcgcacgcaatgatgcaaattgtattcacatggtggataatggtatagtggaaaaactgatggatctactcgatcgccacgtagaggatggaaatgttactgtgcagcacgccgcactgtcagcattgagaaacctcgctattcccgtcatcaacaaggccaaaatgctcagtgctggagtaactgaggccgtactgaagttcctgaagtccgaaatgcctcctgtccaattcaagctcttaggaaccctgcgaatgttaatcgacgctcaggctgaagcagcagagcaattgggaaaaaatgtgaagttagtggagcggctggtggagtggtgtgaggctaaggatcacgcaggagttatgggggagagtaatcggttacttagcgcccttatccgccactccaaatccaaggatgtgataaaaaccatagtgcagtccggaggcattaaacatctcgtcactatggctacatcagaacatgtcattatgcaaaacgaggctctggtcgcactggcacttattgctgctttagaactgggcactgcggaaaaggatctcgagtcggccaagttggtgcagatacttcatcgcctcttagccgatgagaggtccgctccggaaattaaatacaattctatggttctaatctgtgcccttatggggtccgagtgtctgcacaaggaagtgcaggatctggccttccttgatgtggtgagtaagttaagatcacatgaaaacaagtctgtcgctcagcaggcatcattaacggagcagcggctgacggtggaatcatag

SEQ ID NO: 40522 - DNA, 2092 bp, Artificial Sequence
  derived and/or modified sequence
cacagaccttcgcctcgccccgccggttcctcaccctcggggagcaacatggcagataatctcagtgataccttgaagaagctgaagataacagctgttgacaagactgaggatagtttagaaggatgcttggattgtctgcttcaagccctggctcaaaataatacggaaacaagtgaaaaaatccaagcaagtggaatacttcagctgtttgcaagtctgttgactccacagtcttcctgcaaagccaaagtagctaacatcatagcagaagtagccaaaaatgagtttatgcgaattccatgtgtggatgctggattgatttcaccactggtgcagctgctaaatagcaaagaccaggaagtgctgcttcaaacgggcagggctctaggaaacatatgttacgatagccatgagggcagaagtgcagttgaccaagcaggtggtgcacagattgtaattgaccatttaaggtcactgtgcagtataacagatcccgccaatgagaagctcttgactgtcttttgtggcatgctgatgaactatagcaatgagaatgattcgcttcaagctcagcttatcaatatgggtgttattcctaccttagtgaaattactgggcatccactgccaaaatgcagctcttacagaaatgtgtcttgttgcatttggtaatttagcagaacttgagtcaagtaaagaacagtttgccagtacaaacattgctgaagagctagtaaaactcttcaagaaacaaatagaacatgataagagagaaatgatttttgaagttcttgctccattggcagaaaatgatgctattaaactacagctggttgaagcaggcctagtagagtgtctactagagattgttcagcaaaaagtggatagtgacaaagaagatgatattactgagctcaaaactggttcagatctcatggttttattacttcttggagatgaatccatgcagaagttatttgaaggaggaaaaggtagtgtatttcaaagggtactctcttggatcccatcaaataaccaccagctacagcttgctggagcattggcaattgcaaattttgccagaaatgatgcaaattgtattcatatggtagacaatgggattgtagaaaaacttatggatttactggacagacatgtagaagatggaaatgtaacagtacagcatgcagcactaagtgccctcagaaacctggccattccagttataaataaagcaaagatgttatcagctggggtcacagaggcagttttgaaatttcttaaatctgaaatgcctcctgttcagttcaaacttctgggaacattaagaatgttaatagatgcacaagcagaagctgctgaacaattgggaaagaatgttaagttagtggagcgtttggtggaatggtgtgaagccaaagatcatgctggtgtgatgggggagtcaaacagactgctgtctgcccttatacgacacagtaaatcaaaagatgtaattaaaaccattgtgcagagtggtggcatcaagcatctagttaccatggcaactagtgaacatgtaataatgcagaatgaagctcttgttgctttggcattaatagcagctttagaattgggcactgctgagaaagatctagaaagtgctaaacttgtacagattttacatagactgctagcagatgagagaagtgctcctgaaatcaaatataattccatggtcctgatatgtgctcttatgggatctgaatgtctacacaaggaagtacaggatttggcttttctagatgtcgtatccaaacttcgcagtcatgagaacaaaagtgttgcccagcaggcctctctcacagagcagagacttactgtggaaagctgagaactgcccgatacacggcatcatcccatctctaatttcccctctgtcctccatccagcggcttcttccgcttcattctctaccataccacttgtgcatgcatgtgatgttctaataccaattgaagaaccgctgtaggtacctccctaataagatttctaaacctatagttagtgtgatcatgactttgtcaaaggcaagtctccacccataaccg

SEQ ID NO: 40523 - DNA, 1827 bp, Artificial Sequence
  derived and/or modified sequence
atggccgacaacctgagcgacaccctgaagaagctgaagatcaccgccgtggacaagaccgaggacagcctggagggctgcctggactgcctgctgcaggccctggcccagaacaacaccgagaccagcgagaagatccaggccagcggcatcctgcagctgttcgccagcctgctgaccccccagagcagctgcaaggccaaggtggccaacatcatcgccgaggtggccaagaacgagttcatgagaatcccctgcgtggacgccggcctgatcagccccctggtgcagctgctgaacagcaaggaccaggaggtgctgctgcagaccggcagagccctgggcaacatctgctacgacagccacgagggcagaagcgccgtggaccaggccggcggcgcccagatcgtgatcgaccacctgagaagcctgtgcagcatcaccgaccccgccaacgagaagctgctgaccgtgttctgcggcatgctgatgaactacagcaacgagaacgacagcctgcaggcccagctgatcaacatgggcgtgatccccaccctggtgaagctgctgggcatccactgccagaacgccgccctgaccgagatgtgcctggtggccttcggcaacctggccgagctggagagcagcaaggagcagttcgccagcaccaacatcgccgaggagctggtgaagctgttcaagaagcagatcgagcacgacaagagagagatgatcttcgaggtgctggcccccctggccgagaacgacgccatcaagctgcagctggtggaggccggcctggtggagtgcctgctggagatcgtgcagcagaaggtggacagcgacaaggaggacgacatcaccgagctgaagaccggcagcgacctgatggtgctgctgctgctgggcgacgagagcatgcagaagctgttcgagggcggcaagggcagcgtgttccagagagtgctgagctggatccccagcaacaaccaccagctgcagctggccggcgccctggccatcgccaacttcgccagaaacgacgccaactgcatccacatggtggacaacggcatcgtggagaagctgatggacctgctggacagacacgtggaggacggcaacgtgaccgtgcagcacgccgccctgagcgccctgagaaacctggccatccccgtgatcaacaaggccaagatgctgagcgccggcgtgaccgaggccgtgctgaagttcctgaagagcgagatgccccccgtgcagttcaagctgctgggcaccctgagaatgctgatcgacgcccaggccgaggccgccgagcagctgggcaagaacgtgaagctggtggagagactggtggagtggtgcgaggccaaggaccacgccggcgtgatgggcgagagcaacagactgctgagcgccctgatcagacacagcaagagcaaggacgtgatcaagaccatcgtgcagagcggcggcatcaagcacctggtgaccatggccaccagcgagcacgtgatcatgcagaacgaggccctggtggccctggccctgatcgccgccctggagctgggcaccgccgagaaggacctggagagcgccaagctggtgcagatcctgcacagactgctggccgacgagagaagcgcccccgagatcaagtacaacagcatggtgctgatctgcgccctgatgggcagcgagtgcctgcacaaggaggtgcaggacctggccttcctggacgtggtgagcaagctgagaagccacgagaacaagagcgtggcccagcaggccagcctgaccgagcagagactgaccgtggagagctag

SEQ ID NO: 40524 - protein, 607 aa, Artificial Sequence
  derived and/or modified sequence
MDNLSDTLKKLKITAVDKTEDSLEGCLDCLLQALAQNNTETSEKIQASGILQLFASLLTPQSSCKAKVANIIAEVAKNEFMRIPCVDAGLISPLVQLLNSKDQEVLLQTGRALGNICYDSHEGRSAVDQAGGAQIVIDHLRSLCSITDPANEKLLTVFCGMLMNYSNENDSLQAQLINMGVIPTLVKLLGIHCQNAALTEMCLVAFGNLAELESSKEQFASTNIAEELVKLFKKQIEHDKREMIFEVLAPLAENDAIKLQLVEAGLVECLLEIVQQKVDSDKEDDITELKTGSDLMVLLLLGDESMQKLFEGGKGSVFQRVLSWIPSNNHQLQLAGALAIANFARNDANCIHMVDNGIVEKLMDLLDRHVEDGNVTVQHAALSALRNLAIPVINKAKMLSAGVTEAVLKFLKSEMPPVQFKLLGTLRMLIDAQAEAAEQLGKNVKLVERLVEWCEAKDHAGVMGESNRLLSALIRHSKSKDVIKTIVQSGGIKHLVTMATSEHVIMQNEALVALALIAALELGTAEKDLESAKLVQILHRLLADERSAPEIKYNSMVLICALMGSECLHKEVQDLAFLDVVSKLRSHENKSVAQQASLTEQRLTVES

SEQ ID NO: 40525 - DNA, 1824 bp, Artificial Sequence
  derived and/or modified sequence
atggacaatctttcagacacattgaagaaacttaagattaccgcagtagataaaaccgaagattcactggaaggatgcctggattgtctgttacaggctttggcacagaacaataccgaaacgtctgagaaaattcaagctagcggcatactccaattgttcgcctccttactcaccccccagagtagctgtaaagctaaggtcgcaaatattatcgccgaagtcgctaagaatgaatttatgcgaattccctgcgttgacgcaggcctgatctcccccctcgtgcagctgctgaactcgaaagatcaggaggtgctactccagaccgggcgagctttggggaacatctgttatgacagtcacgagggtcggtctgccgtcgaccaggccggcggtgctcagattgtcatcgaccatcttcggagtctctgtagtattactgatccagccaacgagaaactcctaaccgtgttttgcggcatgttgatgaactatagtaacgaaaacgacagcctccaggctcagctcatcaatatgggcgtcatcccaactttagttaagcttcttggcattcattgtcagaacgccgccctgactgagatgtgcttggtggcctttggcaatctggccgaattggaaagttctaaggagcagttcgcttcaaccaatattgctgaggagctggtgaagctgttcaaaaaacagatcgagcatgacaaaagggagatgatctttgaagttctggcgcctcttgccgaaaacgacgccattaaattgcagttagttgaggcaggcttggtggagtgcctccttgagattgtccagcagaaagtggatagcgataaggaggacgacattacggaactcaaaacaggttctgacctgatggttctgctcctgctgggagacgagagcatgcaaaagctcttcgaaggtggtaaggggtccgtgttccagcgagtgctcagctggatcccatccaataatcaccaactgcagctagccggagcccttgcgattgctaattttgctcgcaatgacgctaactgtatccatatggtggacaacgggatcgttgagaaactgatggatcttttggataggcatgttgaggatgggaatgtgaccgtgcaacacgccgcactctctgcactaaggaacttggccattcctgtgatcaataaggcaaagatgctctccgcaggcgttactgaggccgttctaaagtttttgaaatccgagatgccgccagtccagttcaagttgctaggcactcttcggatgctcattgatgcccaggcggaagcggcagagcagctgggcaagaacgttaaactggttgaacggctggtcgagtggtgtgaggccaaagatcatgcgggagttatgggcgagagcaaccgcttgctctccgcgctgatacgtcactccaagtccaaggacgtcatcaagactatagtgcagtccggcggtatcaagcacttggtaaccatggctacgagcgaacacgtgattatgcagaacgaagcgctggtggctcttgctctgatcgccgccctcgaactagggaccgctgagaaggaccttgagtctgctaaactggtacagattctccatcgtctcctggccgatgagagatccgcacctgaaattaagtacaacagtatggtgcttatctgcgccttgatgggatcagaatgcctgcacaaagaagtccaggatctagcttttctggacgtggtgtcgaaactaaggtcccacgaaaataagtcagtggctcagcaggcatctctgacggaacagcgtttgaccgtggaatcttag

SEQ ID NO: 40526 - DNA, 1824 bp, Artificial Sequence
  derived and/or modified sequence
atggacaacctgagtgacaccctgaagaagctgaagatcacagctgtggacaagacagaggacagcctggagggctgcctggactgcctgctgcaggccctggcccagaacaacacagagaccagcgagaagatccaggccagcggcatcctgcagctgtttgccagcctgctgaccccccagagcagctgcaaggccaaggtggccaacatcatcgccgaggtggccaagaatgagttcatgaggatcccctgtgtggatgctggcctcatcagccccctggtgcagctgctgaacagcaaggaccaggaggtgctgctgcagacaggccgggccctgggcaacatctgctatgacagccatgagggccgctctgctgtggaccaggccggcggggcccagatcgtgattgaccacctgcggagcctgtgcagcatcacagatcctgccaatgagaagctgctgaccgtcttctgtggcatgctgatgaactacagcaatgaaaatgacagcctgcaggcccagctgatcaacatgggcgtcatccccaccctggtgaagctgctgggcatccactgccagaatgctgccctgacagagatgtgcctggtggccttcggcaacctggccgagctggagagcagcaaggagcagtttgccagcaccaacattgctgaggagctggtgaagctgttcaagaagcagatcgagcatgacaagcgggagatgatctttgaggtgctggcccccctggctgaaaatgatgccatcaagctgcagctggtggaggccggcctggtggagtgcctgctggagatcgtgcagcagaaggtggacagcgacaaggaggatgacatcacagagctgaagacaggcagtgacctgatggtgctgctgctgctgggagatgagagcatgcagaagctgtttgagggcggcaagggcagcgtcttccagagggtgctgtcctggatccccagcaacaaccaccagctgcagctggccggggccctggccatcgccaactttgccagaaatgatgccaactgcatccacatggtggacaatggcatcgtggagaagctgatggacctgctggacagacatgtggaggatggaaatgtgacagtgcagcacgccgccctgagcgccctgaggaacctggccatccctgtgatcaacaaggccaagatgctgtctgctggggtgacagaggccgtgctgaagttcctgaagtctgagatgcctcctgtgcagttcaagctgctgggcaccctgaggatgctgattgatgcccaggccgaggccgctgagcagctgggcaagaatgtgaagctggtggagcggctggtggagtggtgtgaggccaaggaccacgccggcgtgatgggagagagcaaccggctgctgagcgccctgatccgccacagcaagagcaaggatgtgatcaagaccatcgtgcagagcggcggcatcaagcacctggtgaccatggccaccagcgagcacgtgatcatgcagaatgaggccctggtggccctggccctgattgctgccctggagctgggcacagctgagaaggacctggagagcgccaagctggtgcagatcctgcaccggctgctggctgatgagaggtctgcccctgagatcaagtacaacagcatggtgctgatctgtgccctgatgggcagcgagtgcctgcacaaggaggtgcaggacctggccttcctggatgtggtgtccaagctgcggagccatgagaacaagtctgtggcccagcaggccagcctgacagagcagaggctgactgtggagagctag

SEQ ID NO: 40527 - DNA, 1824 bp, Artificial Sequence
  derived and/or modified sequence
atggacaacctgagcgacaccctgaagaagctgaagatcaccgccgtggacaaaacagaggactctctcgaagggtgcctggactgcttactgcaggcactagcacagaataacacagaaaccagtgagaaaatccaagcgagcgggatcctgcagcttttcgcatcattactgacccctcagtcttcctgtaaagccaaggtggccaatattatcgccgaggtggcaaaaaacgagtttatgcgtatcccttgtgtggatgctggtctcattagcccactggtacagctgctcaactccaaagaccaagaagtattgttgcagacgggtagagccttaggcaatatctgttacgacagccacgaagggcggagtgcagtcgaccaggccggtggtgcgcagatcgtgattgatcatcttcgcagcctatgttccattaccgacccagccaacgagaagctcctaaccgtcttttgtggtatgctgatgaactatagcaacgaaaatgattcattgcaggcccaactgatcaatatgggcgtcattccgacactggtaaagctgttagggatccactgccagaacgcagccctgacagaaatgtgccttgtggctttcggcaatctcgcagaactggaatcatctaaggaacaatttgctagtactaacatcgccgaggaattggtgaaattgttcaaaaagcagattgagcacgataaacgagaaatgatattcgaggtactggcccctttggccgaaaatgacgctattaagctgcagctggtcgaggcgggactagtggaatgcctgcttgagatagttcagcagaaggtagatagcgacaaggaggacgacattaccgagttgaaaactggctcagacctcatggtcctcctgctcttgggtgacgagagcatgcagaaactcttcgagggtggcaaagggtctgttttccagagagtgctttcctggattccatccaataatcatcagctccagttagccggagcgctggccatagccaatttcgcaaggaatgacgctaattgcattcacatggtcgataacggcatcgtggagaagctgatggacctcctagacaggcatgtggaagacggaaatgttactgtgcagcatgctgctctgtcagccctacgcaatctcgctatccccgtgattaacaaggccaagatgttgagcgccggcgtaaccgaagcagtgctgaagtttctgaaatctgaaatgccacccgtgcagttcaagttgttaggtactctgagaatgttaatcgacgctcaggctgaggcagcagagcagctggggaaaaatgtgaaactggtggaaaggctggtggagtggtgcgaagcaaaagaccacgcaggcgtgatgggagagtctaacagactgctcagcgccctgattcgtcactcgaagagtaaagacgtgatcaagacgattgtgcagtcaggaggcatcaagcatctggtcaccatggcaacttcagagcacgtgataatgcagaacgaggcgttggtggcgttggctctgatcgcagcactcgagcttgggaccgcagagaaggatttagaatccgcaaagctcgtgcagatcctgcatcgactgttagcagacgagcgttccgcaccagagattaaatataattcgatggtgctaatttgcgcgttaatgggctcagagtgcttacacaaggaagttcaggatctcgctttccttgacgtggtgagcaagcttaggagtcatgaaaacaagagcgtggcccaacaggcaagcctgacggaacagaggttgacggtcgagtcctag

SEQ ID NO: 40528 - DNA, 1824 bp, Artificial Sequence
  derived and/or modified sequence
atggataacctaagcgatactctcaagaagctcaaaatcaccgcagttgataagacagaggattcgttggagggatgtcttgattgcctgctgcaggcactggcacagaacaatacggagacaagcgagaaaatccaggcatccggaattctccaactatttgccagcctgctcacgcctcagtcttcttgcaaagccaaagtggccaatatcattgccgaggtggctaaaaacgaatttatgagaatcccttgcgtcgacgcaggcctcatctcacctctggtgcaactacttaattcaaaagaccaggaggtcctgttgcagaccggccgagccctgggcaacatctgttacgattctcacgaagggaggtccgccgtcgaccaagcgggtggggcacaaatcgtcatcgaccatctgagatcactgtgcagtatcaccgaccccgcaaatgaaaagcttctcaccgttttctgcggaatgttaatgaattactccaacgagaacgactctctgcaggctcagctcatcaatatgggtgttatacctacactggtaaagttactgggaatacactgtcagaatgctgccctgactgagatgtgcctggttgcattcggcaacctggctgagctggaatcttctaaggaacagtttgcatccacgaacattgccgaagagctcgttaagctgttcaaaaagcagattgagcacgacaaaagggaaatgattttcgaggtgctcgcacccctggcggaaaatgacgcaatcaaactgcagctagttgaggctgggctggtggaatgtttactggagattgtgcagcagaaggtcgactccgataaggaagacgacattaccgagcttaaaaccggtagcgacttaatggtgttactccttttgggcgatgagtctatgcaaaagctttttgagggcggaaaaggatccgtgtttcagagagtactgagctggatcccttcaaacaaccatcagctgcagctggctggagcacttgccatagcaaattttgcacgcaatgacgcgaattgtatccacatggtcgacaacgggatcgtagagaaactcatggaccttctggatcggcacgtggaggacggtaatgtgacggtgcaacatgctgccctttcagccctccggaaccttgcaatacccgtcataaataaagccaaaatgttgtcggccggagtcaccgaagccgtgctgaaattcctgaagtctgagatgccccctgtgcagtttaaactactcggaacgcttcgtatgctcatcgacgctcaagcggaagcagcggaacagctcggaaaaaatgtgaagttagtggagcggctcgtagagtggtgcgaagctaaagaccatgctggagtcatgggagaatccaataggttgttatccgctctcatccggcactcaaagtctaaagacgtaatcaagacgatcgttcagtctggtggaataaagcacctcgtgacaatggcgacaagcgagcatgtcatcatgcagaacgaagcgcttgtcgcacttgcgttaatcgcggctctggagttgggaactgctgagaaagacttggagagtgccaaactcgtccagatcttgcatcggctgctggctgacgagagatctgctcccgagatcaaatataacagtatggtgcttatctgcgcgctcatgggcagcgagtgcctccacaaagaggttcaagatctggcattcctcgacgtcgtgagcaagcttcgctcacatgaaaacaaatccgttgcgcagcaagcaagcctgaccgaacagagactgactgtggagagctag

SEQ ID NO: 40529 - DNA, 3681 bp, Artificial Sequence
  derived and/or modified sequence
gggtccctccctggctgcgggagagacggaggtagagggaggacacagagccgcgccgcccgcaccacagaccttcgcctcgccccgccggttcctcaccctcggggagcaacatggataatctcagtgataccttgaagaagctgaagataacagctgttgacaagactgaggatagtttagaaggatgcttggattgtctgcttcaagccctggctcaaaataatacggaaacaagtgaaaaaatccaagcaagtggaatacttcagctgtttgcaagtctgttgactccacagtcttcctgcaaagccaaagtagctaacatcatagcagaagtagccaaaaatgagtttatgcgaattccatgtgtggatgctggattgatttcaccactggtgcagctgctaaatagcaaagaccaggaagtgctgcttcaaacgggcagggctctaggaaacatatgttacgatagccatgagggcagaagtgcagttgaccaagcaggtggtgcacagattgtaattgaccatttaaggtcactgtgcagtataacagatcccgccaatgagaagctcttgactgtcttttgtggcatgctgatgaactatagcaatgagaatgattcgcttcaagctcagcttatcaatatgggtgttattcctaccttagtgaaattactgggcatccactgccaaaatgcagctcttacagaaatgtgtcttgttgcatttggtaatttagcagaacttgagtcaagtaaagaacagtttgccagtacaaacattgctgaagagctagtaaaactcttcaagaaacaaatagaacatgataagagagaaatgatttttgaagttcttgctccattggcagaaaatgatgctattaaactacagctggttgaagcaggcctagtagagtgtctactagagattgttcagcaaaaagtggatagtgacaaagaagatgatattactgagctcaaaactggttcagatctcatggttttattacttcttggagatgaatccatgcagaagttatttgaaggaggaaaaggtagtgtatttcaaagggtactctcttggatcccatcaaataaccaccagctacagcttgctggagcattggcaattgcaaattttgccagaaatgatgcaaattgtattcatatggtagacaatgggattgtagaaaaacttatggatttactggacagacatgtagaagatggaaatgtaacagtacagcatgcagcactaagtgccctcagaaacctggccattccagttataaataaagcaaagatgttatcagctggggtcacagaggcagttttgaaatttcttaaatctgaaatgcctcctgttcagttcaaacttctgggaacattaagaatgttaatagatgcacaagcagaagctgctgaacaattgggaaagaatgttaagttagtggagcgtttggtggaatggtgtgaagccaaagatcatgctggtgtgatgggggagtcaaacagactgctgtctgcccttatacgacacagtaaatcaaaagatgtaattaaaaccattgtgcagagtggtggcatcaagcatctagttaccatggcaactagtgaacatgtaataatgcagaatgaagctcttgttgctttggcattaatagcagctttagaattgggcactgctgagaaagatctagaaagtgctaaacttgtacagattttacatagactgctagcagatgagagaagtgctcctgaaatcaaatataattccatggtcctgatatgtgctcttatgggatctgaatgtctacacaaggaagtacaggatttggcttttctagatgtcgtatccaaacttcgcagtcatgagaacaaaagtgttgcccagcaggcctctctcacagagcagagacttactgtggaaagctgagaactgcccgatacacggcatcatcccatctctaatttcccctctgtcctccatccagcggcttcttccgcttcattctctaccataccacttgtgcatgcatgtgatgttctaataccaattgaagaaccgctgtaggtacctccctaataagatttctaaacctatagttagtgtgatcatgactttgtcaaaggcaagtctccacccataaccgttctcttgtattcctgttgcttgagctacattaagtagaatgtgcatgttgtagtcctatgatgatgtaaacttggtactacataatgacttgctccacacatgcagtaaactacataatgatgtactggtaaactagaaacaaagaatgcagcaggatctgtctagcttattaaagatgaaactgaattggaaaaatagctccattttttggtgcttgggaagcacagtgaccaaaaaagttgtatggctgcttattcattagtctttcctactgatgtcaaatccatggtacctagagttaaataaaattccaatgctcttactctttaacttctggtttctcctttttcctttttagactattgaaactgccacaaacttggcaagactttctgaggtttctgattccatatttaattgactattatcaatagcctgatattgaaaaacatttgtagttttcagtgtgaaactaaggggttgaagaatcactattacaatccctattacagagcatttcgggttttgcttgtattttagattctgatacatacgctgtttcactcaggaactacttctaccagttaatcagcattatccagcacttgtctttaaaattcatttggcgcttgtttgttttcaactgaggaaattgagtatagttcattgaagaatggaatttttttttttttttttttttttgctgtttttcatcattcagctagaaagtgagaagttttatcttccatagtccttttaaatcttatgttagaactagcaggacgtaggtggaaagatgaagaaataagcttgtctagactaaagaaaggaaagcaggttataaaagccatagtagccagtccagttcattctgcagatggccccataccaatcgctgttagagtttgccacctccactttcccactgagaactgcagcaattttaaaggatatgagaaagccaagactcaagagatgagaagacccccttggcgaaatatagtgtactcttcactgccactgccaccaccaaatgggtttttagagctttgaaacacaatctttgtaaattaatcaaaacctccctgtgacccacctgccttctccccatacccaaatttgaccactactggcctaaaaggcaagatgggcttcgatatagaaggactgcaagacagtagaaagggctgccacggaggtgacagtagctccttcctctccaacatgtgatgctacacatctctgtggataatctaagttggacttttgactctaaaacagctataatccaagaaagttaaattctaatggaggtaaagaatcttgactgattgttccctttgatgtccaaataagggaactattgtgagtacgtatgctacacttactataagaatgatactgtttgttgtctttctcctgggctggatagtggactatattttattacaggctttgaaagacatctgtaatgttgcatatctgttcatattaataacttaataaatagtatatgaagctataa

SEQ ID NO: 40530 - DNA, 1824 bp, Artificial Sequence
  derived and/or modified sequence
atggacaacctgagcgacaccctgaagaagctgaagatcaccgccgtggacaagaccgaggacagcctggagggctgcctggactgcctgctgcaggccctggcccagaacaacaccgagaccagcgagaagatccaggccagcggcatcctgcagctgttcgccagcctgctgaccccccagagcagctgcaaggccaaggtggccaacatcatcgccgaggtggccaagaacgagttcatgagaatcccctgcgtggacgccggcctgatcagccccctggtgcagctgctgaacagcaaggaccaggaggtgctgctgcagaccggcagagccctgggcaacatctgctacgacagccacgagggcagaagcgccgtggaccaggccggcggcgcccagatcgtgatcgaccacctgagaagcctgtgcagcatcaccgaccccgccaacgagaagctgctgaccgtgttctgcggcatgctgatgaactacagcaacgagaacgacagcctgcaggcccagctgatcaacatgggcgtgatccccaccctggtgaagctgctgggcatccactgccagaacgccgccctgaccgagatgtgcctggtggccttcggcaacctggccgagctggagagcagcaaggagcagttcgccagcaccaacatcgccgaggagctggtgaagctgttcaagaagcagatcgagcacgacaagagagagatgatcttcgaggtgctggcccccctggccgagaacgacgccatcaagctgcagctggtggaggccggcctggtggagtgcctgctggagatcgtgcagcagaaggtggacagcgacaaggaggacgacatcaccgagctgaagaccggcagcgacctgatggtgctgctgctgctgggcgacgagagcatgcagaagctgttcgagggcggcaagggcagcgtgttccagagagtgctgagctggatccccagcaacaaccaccagctgcagctggccggcgccctggccatcgccaacttcgccagaaacgacgccaactgcatccacatggtggacaacggcatcgtggagaagctgatggacctgctggacagacacgtggaggacggcaacgtgaccgtgcagcacgccgccctgagcgccctgagaaacctggccatccccgtgatcaacaaggccaagatgctgagcgccggcgtgaccgaggccgtgctgaagttcctgaagagcgagatgccccccgtgcagttcaagctgctgggcaccctgagaatgctgatcgacgcccaggccgaggccgccgagcagctgggcaagaacgtgaagctggtggagagactggtggagtggtgcgaggccaaggaccacgccggcgtgatgggcgagagcaacagactgctgagcgccctgatcagacacagcaagagcaaggacgtgatcaagaccatcgtgcagagcggcggcatcaagcacctggtgaccatggccaccagcgagcacgtgatcatgcagaacgaggccctggtggccctggccctgatcgccgccctggagctgggcaccgccgagaaggacctggagagcgccaagctggtgcagatcctgcacagactgctggccgacgagagaagcgcccccgagatcaagtacaacagcatggtgctgatctgcgccctgatgggcagcgagtgcctgcacaaggaggtgcaggacctggccttcctggacgtggtgagcaagctgagaagccacgagaacaagagcgtggcccagcaggccagcctgaccgagcagagactgaccgtggagagctag

SEQ ID NO: 40531 - protein, 559 aa, Artificial Sequence
  derived and/or modified sequence
MADNLSDTLKKLKITAVDKTEDSLEGCLDCLLQALAQNNTETSEKIQASGILQLFASLLTPQSSCKAKVANIIAEVAKNEFMRIPCVDAGLISPLVQLLNSKDQEVLLQTGRALGNICYDSHSLQAQLINMGVIPTLVKLLGIHCQNAALTEMCLVAFGNLAELESSKEQFASTNIAEELVKLFKKQIEHDKREMIFEVLAPLAENDAIKLQLVEAGLVECLLEIVQQKVDSDKEDDITELKTGSDLMVLLLLGDESMQKLFEGGKGSVFQRVLSWIPSNNHQLQLAGALAIANFARNDANCIHMVDNGIVEKLMDLLDRHVEDGNVTVQHAALSALRNLAIPVINKAKMLSAGVTEAVLKFLKSEMPPVQFKLLGTLRMLIDAQAEAAEQLGKNVKLVERLVEWCEAKDHAGVMGESNRLLSALIRHSKSKDVIKTIVQSGGIKHLVTMATSEHVIMQNEALVALALIAALELGTAEKDLESAKLVQILHRLLADERSAPEIKYNSMVLICALMGSECLHKEVQDLAFLDVVSKLRSHENKSVAQQASLTEQRLTVES

SEQ ID NO: 40532 - DNA, 1680 bp, Artificial Sequence
  derived and/or modified sequence
atggccgataacctctccgatacactaaaaaagctgaagattactgccgtggataaaacggaagattcactggagggatgcctggattgcctgctgcaggccctggcccagaacaacaccgaaactagcgaaaagattcaagctagcggaatcctccagcttttcgcctctctgctgaccccacagagtagctgcaaggcgaaggtcgctaatattatcgcggaggtggccaaaaacgaattcatgaggattccctgtgtggacgctggcttgatttctcccctggtgcagctgttgaactctaaagaccaggaggtgttactgcagactggtcgcgctctagggaatatctgctatgacagccacagcctccaggcacagcttatcaacatgggagtgattccaacattagtgaaactgctgggcattcactgtcagaacgctgctttgaccgaaatgtgtctagtggctttcggtaaccttgccgagctggagtcctccaaggagcagtttgcctctactaacatcgccgaggagctggtgaaactgtttaagaagcagattgagcatgataagcgggagatgattttcgaggtgctggctccccttgccgaaaacgacgccatcaaactgcaattggttgaggcgggcctggtggaatgtttgctggagattgttcagcagaaagtggatagtgacaaggaggatgacatcactgagttgaagaccggctccgatttgatggtcttgcttttactgggcgatgagtccatgcagaagttatttgaaggcggcaaaggatccgtgttccagcgcgtgctgtcatggattcccagcaataaccaccagcttcagctggcaggcgctctcgccatagcaaacttcgccaggaatgacgctaattgcattcatatggtggacaatggaattgtcgagaagctgatggacctcctagatcgccatgtggaagatgggaacgtgactgtccagcacgctgctctgtcagcactgcgtaacctggctattcccgttatcaacaaggccaaaatgctcagcgcaggcgtgactgaggccgtgttaaaatttctgaagtccgaaatgccgcctgtgcagtttaagctgctgggtaccttgagaatgctgatcgatgcacaggccgaggcagccgagcagttggggaagaatgtgaagctcgtggaacgtctcgtggagtggtgtgaagccaaggatcacgcaggggtaatgggtgaaagcaatcgactactcagtgctcttatacggcactccaaatccaaggatgtgattaagaccatagtgcagtctggtgggattaagcatctggtcaccatggctactagtgagcatgtcattatgcaaaacgaagccctggttgcgttggctctgatcgctgctctggaattgggcacggccgagaaagaccttgagagcgctaagctggtccagatactgcacaggctcctggcggacgaacgctccgcaccagagataaaatacaacagcatggtgcttatctgtgcactcatgggcagcgagtgcttgcataaggaggtacaggatctggcctttctggacgtcgtaagtaagctgcgcagtcatgagaacaaaagcgtggcccagcaggcctcactaaccgaacaaagattgaccgtggagtcatag

SEQ ID NO: 40533 - DNA, 1680 bp, Artificial Sequence
  derived and/or modified sequence
atggctgacaacctgagtgacaccctgaagaagctgaagatcacagctgtggacaagacagaggacagcctggagggctgcctggactgcctgctgcaggccctggcccagaacaacacagagaccagcgagaagatccaggccagcggcatcctgcagctgtttgccagcctgctgaccccccagagcagctgcaaggccaaggtggccaacatcatcgccgaggtggccaagaatgagttcatgaggatcccctgtgtggatgctggcctcatcagccccctggtgcagctgctgaacagcaaggaccaggaggtgctgctgcagacaggccgggccctgggcaacatctgctatgacagccacagcctgcaggcccagctgatcaacatgggcgtcatccccaccctggtgaagctgctgggcatccactgccagaatgctgccctgacagagatgtgcctggtggccttcggcaacctggccgagctggagagcagcaaggagcagtttgccagcaccaacattgctgaggagctggtgaagctgttcaagaagcagatcgagcatgacaagcgggagatgatctttgaggtgctggcccccctggctgaaaatgatgccatcaagctgcagctggtggaggccggcctggtggagtgcctgctggagatcgtgcagcagaaggtggacagcgacaaggaggatgacatcacagagctgaagacaggcagtgacctgatggtgctgctgctgctgggagatgagagcatgcagaagctgtttgagggcggcaagggcagcgtcttccagagggtgctgtcctggatccccagcaacaaccaccagctgcagctggccggggccctggccatcgccaactttgccagaaatgatgccaactgcatccacatggtggacaatggcatcgtggagaagctgatggacctgctggacagacatgtggaggatggaaatgtgacagtgcagcacgccgccctgagcgccctgaggaacctggccatccctgtgatcaacaaggccaagatgctgtctgctggggtgacagaggccgtgctgaagttcctgaagtctgagatgcctcctgtgcagttcaagctgctgggcaccctgaggatgctgattgatgcccaggccgaggccgctgagcagctgggcaagaatgtgaagctggtggagcggctggtggagtggtgtgaggccaaggaccacgccggcgtgatgggagagagcaaccggctgctgagcgccctgatccgccacagcaagagcaaggatgtgatcaagaccatcgtgcagagcggcggcatcaagcacctggtgaccatggccaccagcgagcacgtgatcatgcagaatgaggccctggtggccctggccctgattgctgccctggagctgggcacagctgagaaggacctggagagcgccaagctggtgcagatcctgcaccggctgctggctgatgagaggtctgcccctgagatcaagtacaacagcatggtgctgatctgtgccctgatgggcagcgagtgcctgcacaaggaggtgcaggacctggccttcctggatgtggtgtccaagctgcggagccatgagaacaagtctgtggcccagcaggccagcctgacagagcagaggctgactgtggagagctag

SEQ ID NO: 40534 - DNA, 1680 bp, Artificial Sequence
  derived and/or modified sequence
atggccgacaacctgagcgacaccctgaagaagctgaagatcaccgctgtggataaaacagaggacagtctggaggggtgtctggactgtcttcttcaggcccttgcacaaaacaacactgagacatcagaaaaaatccaggcatccggcatacttcagctgttcgcctctctattgactccacagtcctcttgtaaagctaaagtggcgaatattatcgcagaagtcgctaaaaatgagttcatgcgcataccatgtgtagacgccggactaatttcaccactggtgcagctcctgaatagcaaggatcaggaggtattactccagacggggcgggccctcggcaatatttgctatgacagccactcactgcaggcccaactgatcaacatgggcgtgatccctacacttgtaaagctgctcggaattcattgccagaatgccgctctcaccgagatgtgtctggttgccttcggcaacctggccgaattagagtcttctaaagagcaattcgcatccacaaacatcgccgaggagctggtgaagttgttcaagaagcagattgagcacgataaacgggaaatgatttttgaagtccttgctccgctggcggagaatgatgcaattaaattacagctagtggaggccggactggtcgagtgcctcttggaaattgtccagcagaaagtggactctgataaagaggatgacattactgaactaaaaaccggctcagatcttatggtcctgctcctcctgggtgacgaatccatgcaaaagctctttgaggggggcaaaggctcagttttccagcgagtcctttcctggattccaagtaacaaccaccaactgcagcttgctggggctctagccatcgctaattttgctcggaacgacgcgaattgcatccatatggtcgacaatggtattgtggagaaactaatggatctcctggacagacacgtggaggacggaaacgttaccgttcagcacgcagctctgtccgccctacgcaatttggctatccctgtgattaacaaagccaagatgctttcagcaggggttacagaggctgtgttgaaattcctgaaatcggagatgccacctgtgcagtttaaactgctcggtaccctgcgcatgttaatcgatgcccaggctgaggccgccgagcagctgggaaaaaatgtgaagctggttgagcgactggtcgagtggtgtgaggctaaggatcacgcgggggttatgggagagtctaataggctgctgagcgccctcattcgacattctaaatccaaagatgtgatcaagacaattgtgcagagcgggggcatcaaacatcttgtaaccatggccacctcagaacatgttataatgcaaaacgaggccttggtggcattggccctcatcgcggcactcgaactcggaaccgcggaaaaggatttggaaagcgctaaattggtgcagattttgcaccgcctgttggcggatgaacgaagtgccccggagattaaatataattctatggttttgatttgcgcactgatgggatcggaatgcctacacaaggaagtccaggacctcgcgtttttggacgtggtcagcaaactgcggagccatgaaaataaaagtgttgcacagcaggcaagcctcactgagcagagactgaccgtggagtcctag

SEQ ID NO: 40535 - DNA, 1680 bp, Artificial Sequence
  derived and/or modified sequence
atggcagacaatctctcagataccttaaagaagttgaagatcacagccgtggataagactgaggattcattggagggctgcctggattgtctgctgcaggctctggcccaaaataacaccgaaacatctgagaaaattcaagctagcggaatcctccagttgttcgcgtcgctgctgacgcctcaaagtagttgcaaagcgaaggttgccaacatcatagcagaagtcgcaaagaatgagtttatgagaataccatgcgtcgacgcgggactgatctcacctctggtccagctgctgaatagtaaggatcaggaggttctccttcagactggccgtgccttaggaaatatatgctacgattcccactcactccaggcacagctgattaacatgggcgtgatccccactctggttaagcttcttggaattcattgccaaaacgctgcccttaccgagatgtgccttgttgctttcggaaacctagccgaactggaatcctccaaagaacagtttgcctctacgaatatcgcagaagaattagtgaaattgtttaagaaacagatcgagcatgataaacgtgagatgattttcgaggttctggctccgctggcggagaacgatgcaattaagctacagctcgtggaagctgggctcgtagaatgtctgctcgaaattgtccagcagaaagtcgactcagataaagaggatgatatcactgagctgaagacagggagcgatctgatggtcctgctgctccttggggatgagagtatgcagaaactcttcgagggcggtaagggatcggtttttcagcgggtgctttcctggatcccctcaaataaccatcagttgcagctggctggcgcactggccatcgcaaacttcgctcggaatgatgccaactgcatccatatggtggacaacggcatcgtggaaaagctcatggatctgctggatcgtcacgtcgaagacggtaacgtgaccgttcaacacgctgccctgagtgctctccggaatcttgctatcccggtgattaataaggctaaaatgcttagcgctggtgttacagaagcagttttgaaattcctaaagtctgagatgcctcccgtccagttcaagctgctgggtacactacgcatgttgattgacgcacaggcagaggctgctgagcaactgggaaaaaatgttaagctggtggaacgcctggtggagtggtgcgaggcgaaagatcacgcaggtgtgatgggcgagtcgaataggctgctgtcagcacttattcggcacagcaagagtaaagatgtaattaagactatcgttcagtccggtggcattaagcacctcgtgacaatggccacaagcgagcacgtgatcatgcaaaatgaggcactggtagcgttggcattaatcgctgcccttgaactggggaccgcggagaaagaccttgagagtgctaagctggtacagattttgcatagactattggcagatgaacgctccgctccagagattaaatacaactctatggtcctaatctgtgccctcatggggtccgaatgcctccataaggaggtgcaggacttggcattcttggacgtagtctccaaactccgcagccatgaaaataagtctgtggctcagcaagcctcactcacagagcagagactgacggtggagtcttag

SEQ ID NO: 40536 - DNA, 2085 bp, Artificial Sequence
  derived and/or modified sequence
agcaccagctgctcctccccggcggccgccccccgcgggtccctccctggctgcgggagagacggaggtagagggaggacacagagccgcgccgcccgcaccacagaccttcgcctcgccccgccggttcctcaccctcggggagcaacatggcagataatctcagtgataccttgaagaagctgaagataacagctgttgacaagactgaggatagtttagaaggatgcttggattgtctgcttcaagccctggctcaaaataatacggaaacaagtgaaaaaatccaagcaagtggaatacttcagctgtttgcaagtctgttgactccacagtcttcctgcaaagccaaagtagctaacatcatagcagaagtagccaaaaatgagtttatgcgaattccatgtgtggatgctggattgatttcaccactggtgcagctgctaaatagcaaagaccaggaagtgctgcttcaaacgggcagggctctaggaaacatatgttacgatagccattcgcttcaagctcagcttatcaatatgggtgttattcctaccttagtgaaattactgggcatccactgccaaaatgcagctcttacagaaatgtgtcttgttgcatttggtaatttagcagaacttgagtcaagtaaagaacagtttgccagtacaaacattgctgaagagctagtaaaactcttcaagaaacaaatagaacatgataagagagaaatgatttttgaagttcttgctccattggcagaaaatgatgctattaaactacagctggttgaagcaggcctagtagagtgtctactagagattgttcagcaaaaagtggatagtgacaaagaagatgatattactgagctcaaaactggttcagatctcatggttttattacttcttggagatgaatccatgcagaagttatttgaaggaggaaaaggtagtgtatttcaaagggtactctcttggatcccatcaaataaccaccagctacagcttgctggagcattggcaattgcaaattttgccagaaatgatgcaaattgtattcatatggtagacaatgggattgtagaaaaacttatggatttactggacagacatgtagaagatggaaatgtaacagtacagcatgcagcactaagtgccctcagaaacctggccattccagttataaataaagcaaagatgttatcagctggggtcacagaggcagttttgaaatttcttaaatctgaaatgcctcctgttcagttcaaacttctgggaacattaagaatgttaatagatgcacaagcagaagctgctgaacaattgggaaagaatgttaagttagtggagcgtttggtggaatggtgtgaagccaaagatcatgctggtgtgatgggggagtcaaacagactgctgtctgcccttatacgacacagtaaatcaaaagatgtaattaaaaccattgtgcagagtggtggcatcaagcatctagttaccatggcaactagtgaacatgtaataatgcagaatgaagctcttgttgctttggcattaatagcagctttagaattgggcactgctgagaaagatctagaaagtgctaaacttgtacagattttacatagactgctagcagatgagagaagtgctcctgaaatcaaatataattccatggtcctgatatgtgctcttatgggatctgaatgtctacacaaggaagtacaggatttggcttttctagatgtcgtatccaaacttcgcagtcatgagaacaaaagtgttgcccagcaggcctctctcacagagcagagacttactgtggaaagctgagaactgcccgatacacggcatcatcccatctctaatttcccctctgtcctccatccagcggcttcttccgcttcattctctaccataccacttgtgcatgcatgtgatgttctaataccaattgaagaaccgctgtaggtacctccctaataagatttctaaacctatagttagtgtgatcatgactttgtcaaaggcaagtctccacccataaccgttctcttgtattcctgttgcttgagctacattaagtaga

SEQ ID NO: 40537 - DNA, 1680 bp, Artificial Sequence
  derived and/or modified sequence
atggccgacaacctgagcgacaccctgaagaagctgaagatcaccgccgtggacaagaccgaggacagcctggagggctgcctggactgcctgctgcaggccctggcccagaacaacaccgagaccagcgagaagatccaggccagcggcatcctgcagctgttcgccagcctgctgaccccccagagcagctgcaaggccaaggtggccaacatcatcgccgaggtggccaagaacgagttcatgagaatcccctgcgtggacgccggcctgatcagccccctggtgcagctgctgaacagcaaggaccaggaggtgctgctgcagaccggcagagccctgggcaacatctgctacgacagccacagcctgcaggcccagctgatcaacatgggcgtgatccccaccctggtgaagctgctgggcatccactgccagaacgccgccctgaccgagatgtgcctggtggccttcggcaacctggccgagctggagagcagcaaggagcagttcgccagcaccaacatcgccgaggagctggtgaagctgttcaagaagcagatcgagcacgacaagagagagatgatcttcgaggtgctggcccccctggccgagaacgacgccatcaagctgcagctggtggaggccggcctggtggagtgcctgctggagatcgtgcagcagaaggtggacagcgacaaggaggacgacatcaccgagctgaagaccggcagcgacctgatggtgctgctgctgctgggcgacgagagcatgcagaagctgttcgagggcggcaagggcagcgtgttccagagagtgctgagctggatccccagcaacaaccaccagctgcagctggccggcgccctggccatcgccaacttcgccagaaacgacgccaactgcatccacatggtggacaacggcatcgtggagaagctgatggacctgctggacagacacgtggaggacggcaacgtgaccgtgcagcacgccgccctgagcgccctgagaaacctggccatccccgtgatcaacaaggccaagatgctgagcgccggcgtgaccgaggccgtgctgaagttcctgaagagcgagatgccccccgtgcagttcaagctgctgggcaccctgagaatgctgatcgacgcccaggccgaggccgccgagcagctgggcaagaacgtgaagctggtggagagactggtggagtggtgcgaggccaaggaccacgccggcgtgatgggcgagagcaacagactgctgagcgccctgatcagacacagcaagagcaaggacgtgatcaagaccatcgtgcagagcggcggcatcaagcacctggtgaccatggccaccagcgagcacgtgatcatgcagaacgaggccctggtggccctggccctgatcgccgccctggagctgggcaccgccgagaaggacctggagagcgccaagctggtgcagatcctgcacagactgctggccgacgagagaagcgcccccgagatcaagtacaacagcatggtgctgatctgcgccctgatgggcagcgagtgcctgcacaaggaggtgcaggacctggccttcctggacgtggtgagcaagctgagaagccacgagaacaagagcgtggcccagcaggccagcctgaccgagcagagactgaccgtggagagctag

SEQ ID NO: 40538 - protein, 558 aa, Artificial Sequence
  derived and/or modified sequence
MDNLSDTLKKLKITAVDKTEDSLEGCLDCLLQALAQNNTETSEKIQASGILQLFASLLTPQSSCKAKVANIIAEVAKNEFMRIPCVDAGLISPLVQLLNSKDQEVLLQTGRALGNICYDSHSLQAQLINMGVIPTLVKLLGIHCQNAALTEMCLVAFGNLAELESSKEQFASTNIAEELVKLFKKQIEHDKREMIFEVLAPLAENDAIKLQLVEAGLVECLLEIVQQKVDSDKEDDITELKTGSDLMVLLLLGDESMQKLFEGGKGSVFQRVLSWIPSNNHQLQLAGALAIANFARNDANCIHMVDNGIVEKLMDLLDRHVEDGNVTVQHAALSALRNLAIPVINKAKMLSAGVTEAVLKFLKSEMPPVQFKLLGTLRMLIDAQAEAAEQLGKNVKLVERLVEWCEAKDHAGVMGESNRLLSALIRHSKSKDVIKTIVQSGGIKHLVTMATSEHVIMQNEALVALALIAALELGTAEKDLESAKLVQILHRLLADERSAPEIKYNSMVLICALMGSECLHKEVQDLAFLDVVSKLRSHENKSVAQQASLTEQRLTVES

SEQ ID NO: 40539 - DNA, 1677 bp, Artificial Sequence
  derived and/or modified sequence
atggacaatctctcagatacccttaagaagctcaaaatcaccgctgtggacaagaccgaagatagcctggaggggtgcttggattgcttacttcaggccctggctcaaaacaatacggagacatcagagaagatacaggcaagcggcatcttgcagctgttcgcttctttgctaacgccccaatcttcctgtaaggctaaggtcgcaaatatcatcgctgaggtggctaagaacgaatttatgagaattccttgcgtcgacgcgggactgataagcccccttgtgcagctccttaactcgaaagaccaggaagttcttctccaaactggaagagcactgggtaacatctgttacgattcacattctcttcaggctcagctcatcaatatgggagtgattcccaccctggtcaaacttcttgggatacactgtcagaacgccgcacttactgagatgtgtttggtggccttcggtaatctcgccgagttggaaagctcaaaggagcagtttgcgagtacaaatatcgcggaggaactggttaagctctttaaaaagcagatcgagcatgataagagggagatgatatttgaggtgctggcccctctcgcggagaacgatgctatcaagctgcagctggtggaagctggcctggtggaatgcctgttggagatagtccagcaaaaggtcgattcagataaggaagatgatatcaccgaacttaagactggtagtgatctgatggtgctgcttctccttggggacgagtccatgcagaaactgttcgagggcggaaagggatccgtgttccagagagtcctatcatggattccaagtaacaaccatcagctccaactggccggcgcactcgctattgccaattttgcccggaacgatgctaattgcatccacatggtggacaatggaatagtggaaaagctgatggaccttctggaccgacacgtggaggacggcaacgtaactgtacagcacgccgcactttcggcactgaggaaccttgccattccagtcataaataaagccaaaatgctgtctgccggtgtgactgaggcggttttgaagtttctcaagtcagaaatgccgcctgtacagtttaagctgctgggtaccctccggatgctgatagacgcccaggcagaagctgccgagcagctgggtaagaatgtcaaattagtcgagcgcttagtggaatggtgcgaggccaaggatcacgccggcgtgatgggagaatccaataggctcttgagcgcgctgattcggcacagtaaaagtaaagacgttattaaaacaatcgtccagtctggtgggattaagcacctcgttacaatggccacgagcgaacacgtgattatgcagaacgaggctcttgtggcactcgcccttatcgctgcgttggaacttggaacagcggaaaaagatctggagtctgccaaacttgttcagattctgcaccgactccttgctgatgagcggagcgccccagaaataaaatataactccatggttctcatctgtgcactcatggggagtgaatgtcttcacaaggaggtgcaggatctggcctttcttgatgtggtcagtaaactgcgatcccacgagaacaaatccgtggcccaacaggcatcccttaccgagcagcggctgacggtggagtcgtag

SEQ ID NO: 40540 - DNA, 1677 bp, Artificial Sequence
  derived and/or modified sequence
atggacaacctgagtgacaccctgaagaagctgaagatcacagctgtggacaagacagaggacagcctggagggctgcctggactgcctgctgcaggccctggcccagaacaacacagagaccagcgagaagatccaggccagcggcatcctgcagctgtttgccagcctgctgaccccccagagcagctgcaaggccaaggtggccaacatcatcgccgaggtggccaagaatgagttcatgaggatcccctgtgtggatgctggcctcatcagccccctggtgcagctgctgaacagcaaggaccaggaggtgctgctgcagacaggccgggccctgggcaacatctgctatgacagccacagcctgcaggcccagctgatcaacatgggcgtcatccccaccctggtgaagctgctgggcatccactgccagaatgctgccctgacagagatgtgcctggtggcctttggaaacctggccgagctggagagcagcaaggagcagtttgccagcaccaacattgctgaggagctggtgaagctgttcaagaagcagattgaacatgacaagcgggagatgatctttgaggtgctggcccccctggccgagaatgatgccatcaagctgcagctggtggaggccggcctggtggagtgcctgctggagatcgtgcagcagaaggtggacagcgacaaggaggatgacatcacagagctgaagacaggcagtgacctgatggtgctgctgctgctgggagatgagagcatgcagaagctgtttgaaggaggaaaaggatctgtgttccagagggtgctgtcctggatccccagcaacaaccaccagctgcagctggccggggccctggccatcgccaactttgccagaaatgatgccaactgcatccacatggtggacaatggaattgtggagaagctgatggacctgctggacagacatgtggaggatggaaatgtgacagtgcagcacgccgccctgagcgccctgaggaacctggccatccctgtgatcaacaaggccaagatgctgtctgctggggtgacagaagctgtgctgaagttcctgaagtctgagatgcctcctgtgcagttcaagctgctgggcaccctgaggatgctgattgatgcccaggccgaggccgctgagcagctgggcaagaatgtgaagctggtggagcggctggtggagtggtgtgaggccaaggaccatgctggggtgatgggagagagcaaccggctgctgagcgccctgatccgccacagcaagagcaaggatgtgatcaagaccatcgtgcagagcggcggcatcaagcacctggtgaccatggccaccagcgagcacgtgatcatgcagaatgaggccctggtggccctggccctgattgctgccctggagctgggcacagctgagaaggacctggagagcgccaagctggtgcagatcctgcaccggctgctggctgatgagaggtctgcccctgagatcaagtacaacagcatggtgctgatctgtgccctgatgggctctgaatgtctgcacaaggaggtgcaggacctggccttcctggatgtggtgtccaagctgcggagccatgagaacaagtctgtggcccagcaggccagcctgacagagcagaggctgactgtggagagctag

SEQ ID NO: 40541 - DNA, 1677 bp, Artificial Sequence
  derived and/or modified sequence
atggacaacctgagcgacaccctgaagaagctgaagatcaccgccgtagataagaccgaggatagcctggaaggctgtttagattgtctgctgcaggctctggctcaaaacaatacggagacatcagaaaagattcaggccagcggcattcttcagctgttcgcttctctgctgacaccacagagcagttgtaaagcgaaggtggctaacatcattgccgaggtcgccaagaatgagtttatgaggattccatgtgtcgacgccggcctcatcagtcccctggttcagctgctaaattctaaggatcaggaagtgctgttgcagacggggagagctttaggaaatatctgctatgacagtcattctctacaggctcaattaattaatatgggagttatccctacactggtgaagctcctcggcatccattgtcagaacgccgccctcaccgagatgtgccttgtggcatttgggaatctggcggagctggaatcctctaaagagcaatttgcctcaaccaacatcgctgaggagctcgtgaaactgttcaaaaagcaaatcgagcacgataagagagaaatgatcttcgaagttctggccccgctggcggagaatgacgctattaaactccagctcgtagaagcaggccttgtggaatgtttactggaaatcgttcaacaaaaggtcgatagtgacaaggaagacgatatcacagagctgaaaacgggcagcgatctgatggtgttattattattgggcgatgagagtatgcagaaactgtttgagggagggaaaggctccgtctttcagcgggtcctttcctggatcccttcaaataaccaccaactccagcttgcaggcgcactggcgatcgctaatttcgccagaaacgacgcaaattgcatacatatggtcgataacggtatagtggagaaactcatggacttactggaccgtcacgtcgaagatggcaacgtgaccgttcagcacgcggctctgtccgcgttgaggaacctggcaattccagtcattaataaggcgaaaatgctgtcagccggtgtgaccgaggcagtactaaagtttctaaaaagcgagatgcctccggtgcaatttaagctcctgggcacgctccggatgctgattgacgcccaggccgaggcggccgaacagctcggaaaaaatgtcaagctggttgaacgcctcgtcgaatggtgtgaagcaaaagatcacgcaggagttatgggagagtccaacaggcttctttctgcgctgattcgccactccaagtcaaaagacgtaattaagactatagttcagtccggcggtatcaagcacttggtcaccatggctactagcgaacacgtgattatgcagaacgaagctctggtggccctggctctgatcgccgcactcgagttgggcaccgccgaaaaggacctagagtctgctaaactggtgcaaatcttgcacagattgttggcggatgaacgtagtgcaccagagataaaatataatagcatggtcttgatctgcgctttaatggggtccgagtgtttgcataaggaagtccaggatctagcgtttctggatgtcgttagtaagctacggagtcacgaaaacaaatccgttgcccaacaggcatctctgactgaacagcgtctcaccgtggagtcttag

SEQ ID NO: 40542 - DNA, 1677 bp, Artificial Sequence
  derived and/or modified sequence
atggataacttatctgataccctaaagaagcttaaaattacagccgtggataaaacagaggactccttggagggttgcctcgattgcttgctgcaggctttggctcagaacaatacagaaacctcagaaaagattcaggcatcaggaattttacaattattcgcctctctgctaaccccccaaagctcatgcaaggctaaagtcgctaatatcatcgctgaagtggctaaaaacgagttcatgcgcattccatgtgtcgatgcaggactgatttctccactggtgcagttgctgaactcaaaagaccaagaggtcctgctgcagacgggtcgggctctgggtaacatctgttacgattcgcattccctacaggcccagttaataaacatgggagtgattcccacactggtcaagctactagggatacactgtcagaacgcagctctgacagagatgtgcctcgtcgccttcgggaatctcgctgagctcgaaagttctaaggagcagtttgccagtaccaacattgcagaagagctggtgaagctgtttaaaaagcagatcgaacacgacaaacgggaaatgattttcgaggtgttggccccactggccgagaacgatgccatcaagctgcaattggtggaagccggtttagttgagtgtttgctcgagatcgtgcagcagaaagtggattccgacaaggaggacgacatcaccgaacttaagaccggaagcgatttgatggtgctgctacttctcggtgacgagtctatgcagaaactattcgagggtggcaagggttcggtgttccagagggtactatcctggatcccctctaacaaccaccagttgcagttggctggcgctctggctatcgctaacttcgctcggaatgatgcaaattgcattcatatggtcgacaacggaatcgttgagaagctgatggacctccttgaccgtcacgttgaggatggaaatgtgacggtccagcatgctgcattaagcgccttgcggaacttggcaattccagtgataaataaggccaaaatgctcagcgcgggagttacagaggccgtgttaaaattcctgaagtctgagatgcccccagtgcagtttaaactgctagggacactgcggatgttgatcgacgcccaagccgaggcagctgagcagctgggaaaaaacgttaagctggtggagcgactggtggaatggtgtgaggcgaaggaccacgccggtgtgatgggtgaaagcaataggctcctttcagccctaattaggcactctaagtcaaaggacgtcatcaaaaccatagtgcaaagtggagggatcaagcatctcgtcaccatggcgacttctgagcatgttatcatgcagaatgaagctctggttgcactggctctcatcgccgcactggaactgggaactgccgaaaaggacctcgagtccgctaagctggtgcagattctgcatcggctactggccgatgagcgcagtgcccctgaaatcaaatacaattctatggtcttaatttgcgccctcatgggaagtgagtgtttacataaagaagtgcaggacctggctttcttggacgtggtgtccaagctcaggagccatgaaaataagtctgttgcccagcaggcgagcctgactgagcagcgtctgactgtagaaagctag

SEQ ID NO: 40543 - DNA, 1942 bp, Artificial Sequence
  derived and/or modified sequence
cacagaccttcgcctcgccccgccggttcctcaccctcggggagcaacatggataatctcagtgataccttgaagaagctgaagataacagctgttgacaagactgaggatagtttagaaggatgcttggattgtctgcttcaagccctggctcaaaataatacggaaacaagtgaaaaaatccaagcaagtggaatacttcagctgtttgcaagtctgttgactccacagtcttcctgcaaagccaaagtagctaacatcatagcagaagtagccaaaaatgagtttatgcgaattccatgtgtggatgctggattgatttcaccactggtgcagctgctaaatagcaaagaccaggaagtgctgcttcaaacgggcagggctctaggaaacatatgttacgatagccattcgcttcaagctcagcttatcaatatgggtgttattcctaccttagtgaaattactgggcatccactgccaaaatgcagctcttacagaaatgtgtcttgttgcatttggtaatttagcagaacttgagtcaagtaaagaacagtttgccagtacaaacattgctgaagagctagtaaaactcttcaagaaacaaatagaacatgataagagagaaatgatttttgaagttcttgctccattggcagaaaatgatgctattaaactacagctggttgaagcaggcctagtagagtgtctactagagattgttcagcaaaaagtggatagtgacaaagaagatgatattactgagctcaaaactggttcagatctcatggttttattacttcttggagatgaatccatgcagaagttatttgaaggaggaaaaggtagtgtatttcaaagggtactctcttggatcccatcaaataaccaccagctacagcttgctggagcattggcaattgcaaattttgccagaaatgatgcaaattgtattcatatggtagacaatgggattgtagaaaaacttatggatttactggacagacatgtagaagatggaaatgtaacagtacagcatgcagcactaagtgccctcagaaacctggccattccagttataaataaagcaaagatgttatcagctggggtcacagaggcagttttgaaatttcttaaatctgaaatgcctcctgttcagttcaaacttctgggaacattaagaatgttaatagatgcacaagcagaagctgctgaacaattgggaaagaatgttaagttagtggagcgtttggtggaatggtgtgaagccaaagatcatgctggtgtgatgggggagtcaaacagactgctgtctgcccttatacgacacagtaaatcaaaagatgtaattaaaaccattgtgcagagtggtggcatcaagcatctagttaccatggcaactagtgaacatgtaataatgcagaatgaagctcttgttgctttggcattaatagcagctttagaattgggcactgctgagaaagatctagaaagtgctaaacttgtacagattttacatagactgctagcagatgagagaagtgctcctgaaatcaaatataattccatggtcctgatatgtgctcttatgggatctgaatgtctacacaaggaagtacaggatttggcttttctagatgtcgtatccaaacttcgcagtcatgagaacaaaagtgttgcccagcaggcctctctcacagagcagagacttactgtggaaagctgagaactgcccgatacacggcatcatcccatctctaatttcccctctgtcctccatccagcggcttcttccgcttcattctctaccataccacttgtgcatgcatgtgatgttctaataccaattgaagaaccgctgtaggtacctccctaataagatttctaaacctatagttagtgtgatcatgactttgtcaaaggcaagtctccacccataaccg

SEQ ID NO: 40544 - DNA, 1677 bp, Artificial Sequence
  derived and/or modified sequence
atggacaacctgagcgacaccctgaagaagctgaagatcaccgccgtggacaagaccgaggacagcctggagggctgcctggactgcctgctgcaggccctggcccagaacaacaccgagaccagcgagaagatccaggccagcggcatcctgcagctgttcgccagcctgctgaccccccagagcagctgcaaggccaaggtggccaacatcatcgccgaggtggccaagaacgagttcatgagaatcccctgcgtggacgccggcctgatcagccccctggtgcagctgctgaacagcaaggaccaggaggtgctgctgcagaccggcagagccctgggcaacatctgctacgacagccacagcctgcaggcccagctgatcaacatgggcgtgatccccaccctggtgaagctgctgggcatccactgccagaacgccgccctgaccgagatgtgcctggtggccttcggcaacctggccgagctggagagcagcaaggagcagttcgccagcaccaacatcgccgaggagctggtgaagctgttcaagaagcagatcgagcacgacaagagagagatgatcttcgaggtgctggcccccctggccgagaacgacgccatcaagctgcagctggtggaggccggcctggtggagtgcctgctggagatcgtgcagcagaaggtggacagcgacaaggaggacgacatcaccgagctgaagaccggcagcgacctgatggtgctgctgctgctgggcgacgagagcatgcagaagctgttcgagggcggcaagggcagcgtgttccagagagtgctgagctggatccccagcaacaaccaccagctgcagctggccggcgccctggccatcgccaacttcgccagaaacgacgccaactgcatccacatggtggacaacggcatcgtggagaagctgatggacctgctggacagacacgtggaggacggcaacgtgaccgtgcagcacgccgccctgagcgccctgagaaacctggccatccccgtgatcaacaaggccaagatgctgagcgccggcgtgaccgaggccgtgctgaagttcctgaagagcgagatgccccccgtgcagttcaagctgctgggcaccctgagaatgctgatcgacgcccaggccgaggccgccgagcagctgggcaagaacgtgaagctggtggagagactggtggagtggtgcgaggccaaggaccacgccggcgtgatgggcgagagcaacagactgctgagcgccctgatcagacacagcaagagcaaggacgtgatcaagaccatcgtgcagagcggcggcatcaagcacctggtgaccatggccaccagcgagcacgtgatcatgcagaacgaggccctggtggccctggccctgatcgccgccctggagctgggcaccgccgagaaggacctggagagcgccaagctggtgcagatcctgcacagactgctggccgacgagagaagcgcccccgagatcaagtacaacagcatggtgctgatctgcgccctgatgggcagcgagtgcctgcacaaggaggtgcaggacctggccttcctggacgtggtgagcaagctgagaagccacgagaacaagagcgtggcccagcaggccagcctgaccgagcagagactgaccgtggagagctag

SEQ ID NO: 40545 - protein, 516 aa, Artificial Sequence
  derived and/or modified sequence
MADNLSDTLKKLKITAVDKTEDSLEGCLDCLLQALAQNNTETSEKIQASGILQLFASLLTPQSSCKAKVANIIAEVAKNEFMRIPCVDAGLISPLVQLLNSKDQEVLLQTGRALGNICYDSQSSKEQFASTNIAEELVKLFKKQIEHDKREMIFEVLAPLAENDAIKLQLVEAGLVECLLEIVQQKVDSDKEDDITELKTGSDLMVLLLLGDESMQKLFEGGKGSVFQRVLSWIPSNNHQLQLAGALAIANFARNDANCIHMVDNGIVEKLMDLLDRHVEDGNVTVQHAALSALRNLAIPVINKAKMLSAGVTEAVLKFLKSEMPPVQFKLLGTLRMLIDAQAEAAEQLGKNVKLVERLVEWCEAKDHAGVMGESNRLLSALIRHSKSKDVIKTIVQSGGIKHLVTMATSEHVIMQNEALVALALIAALELGTAEKDLESAKLVQILHRLLADERSAPEIKYNSMVLICALMGSECLHKEVQDLAFLDVVSKLRSHENKSVAQQASLTEQRLTVES

SEQ ID NO: 40546 - DNA, 1551 bp, Artificial Sequence
  derived and/or modified sequence
atggccgataatttgtccgacactctgaagaagctgaagatcacggccgttgacaagaccgaggactccctagagggctgtctcgattgtttactgcaggccttggcgcagaacaacactgaaacctcagaaaaaatccaggccagcggtattctgcaactttttgcgtccctgctcactccccagtcttcttgcaaagcaaaggtcgccaatattatagccgaagtcgccaagaatgagttcatgaggatcccctgcgtggacgctggccttatttccccccttgttcaactgcttaactccaaggatcaagaggtgttgctgcaaacaggaagagccctgggcaacatttgctatgactcacagtcctcaaaggaacaatttgcttccacgaatatcgccgaagagcttgttaagctttttaaaaaacaaatcgagcacgataagagagaaatgatttttgaggtcctcgccccactggcagaaaacgatgccattaagttacagttggttgaggcaggtctggtggaatgcctccttgagatcgtgcagcagaaagtcgatagcgacaaggaggacgatattacggagttgaaaaccggctctgatctgatggtacttctgctgctgggagacgagtcaatgcagaagctgttcgaaggggggaaaggcagcgtgttccagagggtcttaagctggattccatctaacaaccaccaactccagctggccggggccctcgcaattgccaattttgcacgcaacgacgctaactgcatacacatggtagacaatggtatcgtggagaagctgatggacctcctggaccggcatgtggaagacgggaacgtgacagtccagcatgcagcattgtctgcccttaggaacctggctatccccgtgatcaataaggccaaaatgctctccgcaggcgtgactgaggccgtcctcaaatttttgaaatctgaaatgcctcctgttcagtttaagttactgggtactctcagaatgcttatcgacgcccaggccgaggccgcggagcagctggggaaaaatgtcaagctcgttgagaggctggtggaatggtgtgaggctaaggaccatgctggggtcatgggagagtccaaccggctgttgagcgcgttgatcagacactcaaagagcaaggatgttatcaagactatcgtgcagagcgggggcatcaaacatctcgttaccatggccacctccgaacacgtgattatgcaaaatgaagctctggtggccttggccctcattgccgctctcgaactgggaaccgcagagaaagacctggagtctgccaagttggtacaaatacttcatcggttgctcgccgacgaacgatcggctccagagatcaagtacaactctatggtgctgatttgtgccttaatggggtcagaatgcctccacaaggaggtgcaggacctggcattcttggacgtcgtttccaagctgaggtctcacgagaataagtcagtcgctcagcaggctagtctgacggagcagcggctgactgtcgagagctag

SEQ ID NO: 40547 - DNA, 1551 bp, Artificial Sequence
  derived and/or modified sequence
atggctgacaacctgagtgacaccctgaagaagctgaagatcacagctgtggacaagacagaggacagcctggagggctgcctggactgcctgctgcaggccctggcccagaacaacacagagaccagcgagaagatccaggccagcggcatcctgcagctgtttgccagcctgctgaccccccagagcagctgcaaggccaaggtggccaacatcatcgccgaggtggccaagaatgagttcatgaggatcccctgtgtggatgctggcctcatcagccccctggtgcagctgctgaacagcaaggaccaggaggtgctgctgcagacaggccgggccctgggcaacatctgctatgacagccagagcagcaaggagcagtttgccagcaccaacattgctgaggagctggtgaagctgttcaagaagcagattgaacatgacaagcgggagatgatctttgaggtgctggcccccctggccgagaatgatgccatcaagctgcagctggtggaggccggcctggtggagtgcctgctggagatcgtgcagcagaaggtggacagcgacaaggaggatgacatcacagagctgaagacaggcagtgacctgatggtgctgctgctgctgggagatgagagcatgcagaagctgtttgaaggaggaaaaggatctgtgttccagagggtgctgtcctggatccccagcaacaaccaccagctgcagctggccggggccctggccatcgccaactttgccagaaatgatgccaactgcatccacatggtggacaatggaattgtggagaagctgatggacctgctggacagacatgtggaggatggaaatgtgacagtgcagcacgccgccctgagcgccctgaggaacctggccatccctgtgatcaacaaggccaagatgctgtctgctggggtgacagaagctgtgctgaagttcctgaagtctgagatgcctcctgtgcagttcaagctgctgggcaccctgaggatgctgattgatgcccaggccgaggccgctgagcagctgggcaagaatgtgaagctggtggagcggctggtggagtggtgtgaggccaaggaccatgctggggtgatgggagagagcaaccggctgctgagcgccctgatccgccacagcaagagcaaggatgtgatcaagaccatcgtgcagagcggcggcatcaagcacctggtgaccatggccaccagcgagcacgtgatcatgcagaatgaggccctggtggccctggccctgattgctgccctggagctgggcacagctgagaaggacctggagagcgccaagctggtgcagatcctgcaccggctgctggctgatgagaggtctgcccctgagatcaagtacaacagcatggtgctgatctgtgccctgatgggctctgaatgtctgcacaaggaggtgcaggacctggccttcctggatgtggtgtccaagctgcggagccatgagaacaagtctgtggcccagcaggccagcctgacagagcagaggctgactgtggagagctag

SEQ ID NO: 40548 - DNA, 1551 bp, Artificial Sequence
  derived and/or modified sequence
atggccgacaacctgagcgacaccctgaagaagctgaagatcaccgcagttgataagactgaggattcactagaggggtgcctcgattgcctcttgcaagcgctggcgcagaataatacggaaaccagcgagaagatccaagccagcggcatcctacagctgttcgctagcttactgacacctcagagcagctgcaaagccaaagtagccaacattatcgcggaagtggccaaaaacgaatttatgagaattccttgcgtagacgcaggactcatctcacctttggtgcagctactcaactccaaggaccaggaggtcctgttgcagacggggcgggccctcggtaatatatgttacgactcccagagcagcaaggagcaattcgcctctacaaatatcgctgaggaactggtcaaactattcaaaaagcagatcgagcacgataaacgggagatgatctttgaagtactcgcccctctagctgagaacgatgctattaagctccagctggtggaggcggggctggtggagtgtctcctggaaatagtacagcaaaaagtcgattcagacaaagaggatgacattactgaacttaagaccgggagtgatctgatggtcctactacttttgggggatgagagtatgcagaagttgttcgaaggcggcaagggttcagtgttccagcgagtgctgtcctggataccttccaacaaccatcagctgcaactggcgggggcccttgccattgctaactttgctcgtaatgacgctaattgtatccacatggtggacaatggcatagttgaaaaactgatggatctgcttgatagacacgtcgaggacggtaatgtcacagtgcagcacgctgctctctccgcactgcgcaatctggcaatccctgttatcaacaaagccaaaatgctctccgctggagtcactgaagctgtacttaaattcttgaagagcgaaatgcctccagttcaatttaagctcctgggcactttgcgcatgcttatcgatgcacaggcagaggcggcggaacagctagggaaaaatgtgaaactcgttgagaggttggtcgagtggtgtgaagcgaaagaccatgcaggcgtcatgggagaatccaatcggttactgagtgccttgatccgccatagcaagagtaaagatgtgatcaaaaccatcgtgcagagcggtggcattaagcatctggttaccatggccacgagcgaacacgttatcatgcagaacgaggcactggtagccctggccctgatagcggccctggaacttggcacagcagaaaaggacctcgagagcgccaaattggtgcagatactgcacaggctgcttgccgatgagcgcagcgccccggaaatcaagtataactctatggtgctaatctgcgcactaatggggtccgagtgtttgcacaaggaagttcaggacttggcatttctggacgtagttagcaaactccgatcacacgaaaataagagtgttgctcagcaagccagtctgacggagcagcgccttactgtggaatcctag

SEQ ID NO: 40549 - DNA, 1551 bp, Artificial Sequence
  derived and/or modified sequence
atggcagataacctcagcgacaccctgaaaaaattgaagattaccgcagtcgataagactgaggactccctggagggatgcctcgactgtcttttacaggctctggcgcagaataatacggagacctctgagaaaattcaggcgtcaggaatcctgcaattatttgcatccctgctcaccccccaaagctcctgtaaggcaaaggttgccaacatcatcgccgaagttgctaagaatgaatttatgagaatcccatgtgttgacgctgggctgatcagcccccttgtgcagcttttgaacagtaaggaccaagaagttctgctgcagactggcagggccttgggaaacatatgctatgactcacagtccagtaaggagcagtttgcatccactaacatcgccgaggaactcgtgaaactctttaagaaacaaatcgagcatgacaaacgagagatgatattcgaggtcttggccccactggccgagaacgatgccataaagctgcagctggtggaggcaggcctagttgaatgtttgctcgaaatcgtccagcagaaggtagactctgataaggaggatgacattacggagttgaagaccggaagcgacctaatggtcctgctgctactcggcgacgagagtatgcagaaactgttcgaaggaggcaaaggaagtgttttccagcgggtactgtcgtggatccctagcaacaaccaccagctccagctcgcaggagccctggccatagccaatttcgctagaaatgatgcgaactgtattcatatggttgataacggaatcgtggaaaagctgatggatctccttgaccgccatgtcgaggatggcaacgtgacagtccagcacgcagcgctgagcgcactccgcaacttggcgatcccagtgatcaacaaggcgaaaatgctcagcgcgggtgttacagaggctgtgctgaagtttctaaaaagcgaaatgccacccgtgcaatttaagctgttgggtactttacgcatgctcattgatgcacaggccgaggctgcggaacaattgggaaagaacgtgaaactagtggaacgcctggttgagtggtgcgaggctaaggaccacgctggtgtcatgggtgaatccaaccgcctgttgtcagctctcatcaggcacagcaagtcaaaagacgtgattaagactatcgttcagtcgggaggtattaagcacctcgtcactatggcgacaagtgaacatgtaattatgcagaatgaggcactggtggccttggccctgattgccgctctggagctgggtaccgcagagaaagatctggaaagcgctaagctcgttcaaatcctgcaccggcttctcgccgacgagcgctcagccccagaaattaagtacaattctatggttctcatttgtgccctgatgggctcagaatgtctgcacaaagaggtccaggatctagcctttctggacgttgtgtctaagctccggtctcatgagaataagagcgtggcccaacaggcatccctaaccgagcagcgcctgactgtcgagtcttag

SEQ ID NO: 40550 - DNA, 1686 bp, Artificial Sequence
  derived and/or modified sequence
ctccccggcggccgccccccgcgggtccctccctggctgcgggagagacggaggtagagggaggacacagagccgcgccgcccgcaccacagaccttcgcctcgccccgccggttcctcaccctcggggagcaacatggcagataatctcagtgataccttgaagaagctgaagataacagctgttgacaagactgaggatagtttagaaggatgcttggattgtctgcttcaagccctggctcaaaataatacggaaacaagtgaaaaaatccaagcaagtggaatacttcagctgtttgcaagtctgttgactccacagtcttcctgcaaagccaaagtagctaacatcatagcagaagtagccaaaaatgagtttatgcgaattccatgtgtggatgctggattgatttcaccactggtgcagctgctaaatagcaaagaccaggaagtgctgcttcaaacgggcagggctctaggaaacatatgttacgatagccagtcaagtaaagaacagtttgccagtacaaacattgctgaagagctagtaaaactcttcaagaaacaaatagaacatgataagagagaaatgatttttgaagttcttgctccattggcagaaaatgatgctattaaactacagctggttgaagcaggcctagtagagtgtctactagagattgttcagcaaaaagtggatagtgacaaagaagatgatattactgagctcaaaactggttcagatctcatggttttattacttcttggagatgaatccatgcagaagttatttgaaggaggaaaaggtagtgtatttcaaagggtactctcttggatcccatcaaataaccaccagctacagcttgctggagcattggcaattgcaaattttgccagaaatgatgcaaattgtattcatatggtagacaatgggattgtagaaaaacttatggatttactggacagacatgtagaagatggaaatgtaacagtacagcatgcagcactaagtgccctcagaaacctggccattccagttataaataaagcaaagatgttatcagctggggtcacagaggcagttttgaaatttcttaaatctgaaatgcctcctgttcagttcaaacttctgggaacattaagaatgttaatagatgcacaagcagaagctgctgaacaattgggaaagaatgttaagttagtggagcgtttggtggaatggtgtgaagccaaagatcatgctggtgtgatgggggagtcaaacagactgctgtctgcccttatacgacacagtaaatcaaaagatgtaattaaaaccattgtgcagagtggtggcatcaagcatctagttaccatggcaactagtgaacatgtaataatgcagaatgaagctcttgttgctttggcattaatagcagctttagaattgggcactgctgagaaagatctagaaagtgctaaacttgtacagattttacatagactgctagcagatgagagaagtgctcctgaaatcaaatataattccatggtcctgatatgtgctcttatgggatctgaatgtctacacaaggaagtacaggatttggcttttctagatgtcgtatccaaacttcgcagtcatgagaacaaaagtgttgcccagcaggcctctctcacagagcagagacttactgtggaaagctga

SEQ ID NO: 40551 - DNA, 1551 bp, Artificial Sequence
  derived and/or modified sequence
atggccgacaacctgagcgacaccctgaagaagctgaagatcaccgccgtggacaagaccgaggacagcctggagggctgcctggactgcctgctgcaggccctggcccagaacaacaccgagaccagcgagaagatccaggccagcggcatcctgcagctgttcgccagcctgctgaccccccagagcagctgcaaggccaaggtggccaacatcatcgccgaggtggccaagaacgagttcatgagaatcccctgcgtggacgccggcctgatcagccccctggtgcagctgctgaacagcaaggaccaggaggtgctgctgcagaccggcagagccctgggcaacatctgctacgacagccagagcagcaaggagcagttcgccagcaccaacatcgccgaggagctggtgaagctgttcaagaagcagatcgagcacgacaagagagagatgatcttcgaggtgctggcccccctggccgagaacgacgccatcaagctgcagctggtggaggccggcctggtggagtgcctgctggagatcgtgcagcagaaggtggacagcgacaaggaggacgacatcaccgagctgaagaccggcagcgacctgatggtgctgctgctgctgggcgacgagagcatgcagaagctgttcgagggcggcaagggcagcgtgttccagagagtgctgagctggatccccagcaacaaccaccagctgcagctggccggcgccctggccatcgccaacttcgccagaaacgacgccaactgcatccacatggtggacaacggcatcgtggagaagctgatggacctgctggacagacacgtggaggacggcaacgtgaccgtgcagcacgccgccctgagcgccctgagaaacctggccatccccgtgatcaacaaggccaagatgctgagcgccggcgtgaccgaggccgtgctgaagttcctgaagagcgagatgccccccgtgcagttcaagctgctgggcaccctgagaatgctgatcgacgcccaggccgaggccgccgagcagctgggcaagaacgtgaagctggtggagagactggtggagtggtgcgaggccaaggaccacgccggcgtgatgggcgagagcaacagactgctgagcgccctgatcagacacagcaagagcaaggacgtgatcaagaccatcgtgcagagcggcggcatcaagcacctggtgaccatggccaccagcgagcacgtgatcatgcagaacgaggccctggtggccctggccctgatcgccgccctggagctgggcaccgccgagaaggacctggagagcgccaagctggtgcagatcctgcacagactgctggccgacgagagaagcgcccccgagatcaagtacaacagcatggtgctgatctgcgccctgatgggcagcgagtgcctgcacaaggaggtgcaggacctggccttcctggacgtggtgagcaagctgagaagccacgagaacaagagcgtggcccagcaggccagcctgaccgagcagagactgaccgtggagagctag

SEQ ID NO: 40552 - protein, 305 aa, Artificial Sequence
  derived and/or modified sequence
MGILLGLLLLGHLTVDTYGRPILEVPESVTGPWKGDVNLPCTYDPLQGYTQVLVKWLVQRGSDPVTIFLRDSSGDHIQQAKYQGRLHVSHKVPGDVSLQLSTLEMDDRSHYTCEVTWQTPDGNQVVRDKITELRVQKHSSKLLKTKTEAPTTMTYPLKATSTVKQSWDWTTDMDGYLGETSAGPGKSLPVFAIILIISLCCMVVFTMAYIMLCRKTSQQEHVYEAARAHAREANDSGETMRVAIFASGCSSDEPTSQNLGNNYSDEPCIGQEYQIIAQINGNYARLLDTVPLDYEFLATEGKSVC

SEQ ID NO: 40553 - DNA, 918 bp, Artificial Sequence
  derived and/or modified sequence
atgggcatcctgctgggcctgctgctgctgggccacctgaccgtggacacctacggcagacccatcctggaggtgcccgagagcgtgaccggcccctggaagggcgacgtgaacctgccctgcacctacgaccccctgcagggctacacccaggtgctggtgaagtggctggtgcagagaggcagcgaccccgtgaccatcttcctgagagacagcagcggcgaccacatccagcaggccaagtaccagggcagactgcacgtgagccacaaggtgcccggcgacgtgagcctgcagctgagcaccctggagatggacgacagaagccactacacctgcgaggtgacctggcagacccccgacggcaaccaggtggtgagagacaagatcaccgagctgagagtgcagaagcacagcagcaagctgctgaagaccaagaccgaggcccccaccaccatgacctaccccctgaaggccaccagcaccgtgaagcagagctgggactggaccaccgacatggacggctacctgggcgagaccagcgccggccccggcaagagcctgcccgtgttcgccatcatcctgatcatcagcctgtgctgcatggtggtgttcaccatggcctacatcatgctgtgcagaaagaccagccagcaggagcacgtgtacgaggccgccagagcccacgccagagaggccaacgacagcggcgagaccatgagagtggccatcttcgccagcggctgcagcagcgacgagcccaccagccagaacctgggcaacaactacagcgacgagccctgcatcggccaggagtaccagatcatcgcccagatcaacggcaactacgccagactgctggacaccgtgcccctggactacgagttcctggccaccgagggcaagagcgtgtgctag

SEQ ID NO: 40554 - DNA, 918 bp, Artificial Sequence
  derived and/or modified sequence
atgggaatactccttggtctgcttctcttaggtcatttgacagttgacacgtatggcagaccgatcttggaggttcccgagtctgtcactggaccatggaagggggatgttaacctcccctgcacatacgaccccctccagggctatacacaagttctggttaaatggctggtgcagagaggcagtgaccccgtgaccatcttcctgagggacagcagcggcgatcacatacaacaggcgaaatatcaggggcgattgcacgtgtcccacaaagtgccaggagatgtcagtctccaactttccaccctggaaatggatgacaggtcccactatacttgcgaggttacctggcaaaccccagatggcaaccaggtggtaagggacaaaatcaccgagctgcgtgtgcagaagcacagttctaaactcctcaagacaaagaccgaagcacctaccactatgacttacccactgaaagcgacctcaaccgtaaagcagagttgggattggactaccgacatggacgggtacttaggagaaacctccgcaggcccggggaagagcctgcccgtcttcgctatcatcctcataatttcattatgttgtatggttgtgttcaccatggcgtatatcatgctgtgtagaaaaacatcacagcaggaacacgtctacgaagccgcccgcgctcatgccagggaggctaatgacagcggtgagaccatgagagtcgctatctttgctagcggttgttctagcgacgagccaaccagccaaaatttggggaataattatagcgacgagccgtgtatcgggcaggaataccagatcatcgcgcaaattaacggcaattatgcccgattgctggataccgtgccactcgattatgagtttctcgccaccgaggggaaatcagtgtgctag

SEQ ID NO: 40555 - DNA, 918 bp, Artificial Sequence
  derived and/or modified sequence
atgggcatcctgctgggcctgctgctgctgggccacctgactgtggacacctacggccggcccatcctggaggtgcctgagagcgtgacaggcccctggaagggagatgtgaacctgccctgcacctatgaccccctgcagggctacacccaggtgctggtgaagtggctggtgcagaggggcagtgaccctgtgaccatcttcctgcgggacagcagcggggaccacatccagcaggccaagtaccagggccgcctgcacgtgagccacaaggtgcctggagatgtgtccctgcagctgagcaccctggagatggatgacaggagccactacacctgtgaggtgacctggcagaccccagatggcaaccaggtggtgcgggacaagatcacagagctgcgggtgcagaagcacagcagcaagctgctgaagaccaagacagaggcccccaccaccatgacctaccccctgaaggccaccagcacagtgaagcagagctgggactggaccacagacatggatggctacctgggggagaccagcgctggccctgggaagagcctgcctgtgtttgccatcatcctgatcatcagcctgtgctgcatggtggtgttcaccatggcctacatcatgctgtgcaggaagaccagccagcaggagcacgtgtatgaagctgcccgggcccacgcccgggaggccaatgacagcggggagaccatgagggtggccatctttgccagcggctgcagcagtgatgagcccaccagccagaacctgggcaacaactacagtgatgagccctgcatcggccaggagtaccagatcatcgcccagatcaatggaaattatgcccggctgctggacacagtgcccctggactatgagttcctggccacagagggcaagtctgtgtgctag

SEQ ID NO: 40556 - DNA, 918 bp, Artificial Sequence
  derived and/or modified sequence
atgggcatcctgctgggcctgctgctgctgggccacctgaccgtggatacgtacgggcgccccatcctcgaagttcccgagagtgttaccgggccatggaaaggggatgtgaatttaccttgcacatacgacccactgcaaggctatacacaggtgctagtaaaatggttagttcagcgcggctccgatccagtcacgattttcttgagggactccagtggcgaccatatacagcaggccaagtatcagggtaggctgcatgtcagccataaggttccaggagatgtgtcattacagctttctacgctggaaatggacgaccgatcgcactatacctgcgaggtaacgtggcaaacccctgacggaaatcaggtggtccgcgataaaatcactgaactgagagtccaaaaacactccagtaaactactgaaaacaaagaccgaggctcccaccaccatgacctatccgctcaaagccaccagtaccgtgaagcagagctgggattggacgacggacatggacggctacctgggcgagacatcagccggacccggaaaaagtctgccagtcttcgcaataatacttatcatctccctttgttgcatggtggtgttcacaatggcctacatcatgctttgcagaaaaacgtcacagcaggagcacgtttatgaggctgcaagggcccatgcccgagaagccaacgattctggtgagaccatgagagtagcaatatttgcaagcggatgctcatccgacgaaccaacgtcccagaacttaggcaacaactatagcgacgaaccatgtatcggtcaggaatatcagattatagcccaaataaacggtaattacgctcgtctcctggacacagttcctctggactacgaattcctggctaccgagggaaagtccgtatgttag

SEQ ID NO: 40557 - DNA, 918 bp, Artificial Sequence
  derived and/or modified sequence
atgggtatcctccttggcctgctacttctggggcatcttacggtggacacatacggccgacctatcttagaagtgcctgaaagcgtcacaggcccatggaagggtgatgtgaatctaccgtgcacctacgatcccctccagggctatactcaggttcttgtgaagtggctggtacagaggggttctgatccagtcacgattttccttagagactcctcaggagatcacatccagcaggcaaaatatcagggcaggttgcacgtgtcacataaggtgccaggcgatgtgagcctccagctctcaacgttggagatggacgaccggtctcactacacctgtgaggtcacatggcagacaccggatggcaaccaggtcgtaagagacaagattaccgagctgagggtgcagaaacattcgtctaagctgttaaagaccaaaaccgaagccccaacaaccatgacgtaccctctgaaggctactagcacagtaaagcagtcttgggactggacaactgatatggacgggtatctgggcgagacaagcgccggacctggaaagtcgttacctgtcttcgcaatcatactcattatcagtctgtgttgcatggtggtcttcacaatggcttacatcatgctttgcagaaagacaagtcagcaggaacatgtctacgaagctgccagggcccacgcacgggaggcaaacgactccggcgaaacaatgcgagtcgcaatatttgcatccgggtgcagcagtgatgaaccgactagccagaacctagggaacaactatagcgacgagccctgcattggacaggaatatcaaatcattgcccaaataaacggaaactatgctcggctgctcgataccgtgcccttggattacgagtttctggctacagaaggcaagtcggtttgctag

SEQ ID NO: 40558 - DNA, 1474 bp, Artificial Sequence
  derived and/or modified sequence
gaagtttgagcctctttggtagcaggaggctggaagaaaggacagaagtagctctggctgtgatggggatcttactgggcctgctactcctggggcacctaacagtggacacttatggccgtcccatcctggaagtgccagagagtgtaacaggaccttggaaaggggatgtgaatcttccctgcacctatgaccccctgcaaggctacacccaagtcttggtgaagtggctggtacaacgtggctcagaccctgtcaccatctttctacgtgactcttctggagaccatatccagcaggcaaagtaccagggccgcctgcatgtgagccacaaggttccaggagatgtatccctccaattgagcaccctggagatggatgaccggagccactacacgtgtgaagtcacctggcagactcctgatggcaaccaagtcgtgagagataagattactgagctccgtgtccagaaacactcctcaaagctactcaagaccaagactgaggcacctacaaccatgacataccccttgaaagcaacatctacagtgaagcagtcctgggactggaccactgacatggatggctaccttggagagaccagtgctgggccaggaaagagcctgcctgtctttgccatcatcctcatcatctccttgtgctgtatggtggtttttaccatggcctatatcatgctctgtcggaagacatcccaacaagagcatgtctacgaagcagccagggcacatgccagagaggccaacgactctggagaaaccatgagggtggccatcttcgcaagtggctgctccagtgatgagccaacttcccagaatctgggcaacaactactctgatgagccctgcataggacaggagtaccagatcatcgcccagatcaatggcaactacgcccgcctgctggacacagttcctctggattatgagtttctggccactgagggcaaaagtgtctgttaaaaatgccccattaggccaggatctgctgacataattgcctagtcagtccttgccttctgcatggccttcttccctgctacctctcttcctggatagcccaaagtgtccgcctaccaacactggagccgctgggagtcactggctttgccctggaatttgccagatgcatctcaagtaagccagctgctggatttggctctgggcccttctagtatctctgccgggggcttctggtactcctctctaaataccagagggaagatgcccatagcactaggacttggtcatcatgcctacagacactattcaactttggcatcttgccaccagaagacccgagggaggctcagctctgccagctcagaggaccagctatatccaggatcatttctctttcttcagggccagacagcttttaattgaaattgttatttcacaggccagggttcagttctgctcctccactataagtctaatgttctgactctctcctg

SEQ ID NO: 40559 - protein, 892 aa, Artificial Sequence
  derived and/or modified sequence
MDHYDSQQTNDYMQPEEDWDRDLLLDPAWEKQQRKTFTAWCNSHLRKAGTQIENIEEDFRDGLKLMLLLEVISGERLAKPERGKMRVHKISNVNKALDFIASKGVKLVSIGAEEIVDGNVKMTLGMIWTIILRFAIQDISVEETSAKEGLLLWCQRKTAPYKNVNIQNFHISWKDGLGFCALIHRHRPELIDYGKLRKDDPLTNLNTAFDVAEKYLDIPKMLDAEDIVGTARPDEKAIMTYVSSFYHAFSGAQKAETAANRICKVLAVNQENEQLMEDYEKLASDLLEWIRRTIPWLENRVPENTMHAMQQKLEDFRDYRRLHKPPKVQEKCQLEINFNTLQTKLRLSNRPAFMPSEGRMVSDINNAWGCLEQVEKGYEEWLLNEIRRLERLDHLAEKFRQKASIHEAWTDGKEAMLRQKDYETATLSEIKALLKKHEAFESDLAAHQDRVEQIAAIAQELNELDYYDSPSVNARCQKICDQWDNLGALTQKRREALERTEKLLETIDQLYLEYAKRAAPFNNWMEGAMEDLQDTFIVHTIEEIQGLTTAHEQFKATLPDADKERLAILGIHNEVSKIVQTYHVNMAGTNPYTTITPQEINGKWDHVRQLVPRRDQALTEEHARQQHNERLRKQFGAQANVIGPWIQTKMEEIGRISIEMHGTLEDQLSHLRQYEKSIVNYKPKIDQLEGDHQLIQEALIFDNKHTNYTMEHIRVGWEQLLTTIARTINEVENQILTRDAKGISQEQMNEFRASFNHFDRDHSGTLGPEEFKACLISLGYDIGNDPQGEAEFARIMSIVDPNRLGVVTFQAFIDFMSRETADTDTADQVMASFKILAGDKNYITMDELRRELPPDQAEYCIARMAPYTGPDSVPGALDYMSFSTALYGESDL

SEQ ID NO: 40560 - protein, 1395 aa, Artificial Sequence
  derived and/or modified sequence
MYPICTVVVDGLPSESSSSSYPGPVSVSEMSLLHALGPVQTWLGQELEKCGIDAMIYTRYVLSLLLHDSYDYDLQEQENDIFLGWEKGAYKKWGKSKKKCSDLTLEEMKKQAAVQCLRSASDESSGIETLVEELCSRLKDLQSKQEEKIHKKLEGSPSPEAELSPPAKDQVEMYYEAFPPLSEKPVCLQEIMTVWNKSKVCSYSSSSSSSTAPPASTDTSSPKDCNSESEVTKERSSEVPTTVHEKTQSKSKNEKENKFSNGTIEEKPALYKKQIRHKPEGKIRPRSWSSGSSEAGSSSSGNQGELKASMKYVKVRHKAREIRNKKGRNGQSRLSLKHGEKAERNIHTGSSSSSSSGSVKQLCKRGKRPLKEIGRKDPGSTEGKDLYMENRKDTEYKEEPLWYTEPIAEYFVPLSRKSKLETTYRNRQDTSDLTSEAVEELSESVHGLCISNNNLHKTYLAAGTFIDGHFVEMPAVINEDIDLTGTSLCSLPEDNKYLDDIHLSELTHFYEVDIDQSMLDPGASETMQGESRILNMIRQKSKENTDFEAECCIVLDGMELQGERAIWTDSTSSVGAEGLFLQDLGNLAQFWECCSSSSGDADGESFGGDSPVRLSPILDSTVLNSHLLAGNQELFSDINEGSGINSCFSVFEVQCSNSVLPFSFETLNLGNENTDSSANMLGKTQSRLLIWTKNSAFEENEHCSNLSTRTCSPWSHSEETRSDNETLNIQFEESTQFNAEDINYVVPRVSSNYVDEELLDFLQDETCQQNSRTLGEIPTLVFKKTSKLESVCGIQLEQKTENKNFETTQVCNESPHGDGYSSGVIKDIWTKMADTNSVATVEIERTDAELFSADVNNYCCCLDAEAELETLQEPDKAVRRSEYHLWEGQKESLEKRAFASSELSNVDGGDYTTPSKPWDVAQDKENTFILGGVYGELKTFNSDGEWAVVPPSHTKGSLLQCAASDVVTIAGTDVFMTPGNSFAPGHRQLWKPFVSFEQNDQPKSGENGLNKGFSFIFHEDLLGACGNFQVEDPGLEYSFSSFDLSNPFSQVLHVECSFEPEGIASFSPSFKPKSILCSDSDSEVFHPRICGVDRTQYRAIRISPRTHFRPISASELSPGGGSESEFESEKDEANIPIPSQVDIFEDPQADLKPLEEDAEKEGHYYGKSELESGKFLPRLKKSGMEKSAQTSLDSQEESTGILSVGKQNQCLECSMNESLEIDLESSEANCKIMAQCEEEINNFCGCKAGCQFPAYEDNPVSSGQLEEFPVLNTDIQGMNRSQEKQTWWEKALYSPLFPASECEECYTNAKGESGLEEYPDAKETPSNEERLLDFNRVSSVYEARCTGERDSGAKSDGFRGKMCSSASSTSEETGSEGGGEWVGPSEEELFSRTHL

SEQ ID NO: 40561 - DNA, 4188 bp, Artificial Sequence
  derived and/or modified sequence
atgtaccccatctgcaccgtggtggtggacggcctgcccagcgagagcagcagcagcagctaccccggccccgtgagcgtgagcgagatgagcctgctgcacgccctgggccccgtgcagacctggctgggccaggagctggagaagtgcggcatcgacgccatgatctacaccagatacgtgctgagcctgctgctgcacgacagctacgactacgacctgcaggagcaggagaacgacatcttcctgggctgggagaagggcgcctacaagaagtggggcaagagcaagaagaagtgcagcgacctgaccctggaggagatgaagaagcaggccgccgtgcagtgcctgagaagcgccagcgacgagagcagcggcatcgagaccctggtggaggagctgtgcagcagactgaaggacctgcagagcaagcaggaggagaagatccacaagaagctggagggcagccccagccccgaggccgagctgagcccccccgccaaggaccaggtggagatgtactacgaggccttcccccccctgagcgagaagcccgtgtgcctgcaggagatcatgaccgtgtggaacaagagcaaggtgtgcagctacagcagcagcagcagcagcagcaccgccccccccgccagcaccgacaccagcagccccaaggactgcaacagcgagagcgaggtgaccaaggagagaagcagcgaggtgcccaccaccgtgcacgagaagacccagagcaagagcaagaacgagaaggagaacaagttcagcaacggcaccatcgaggagaagcccgccctgtacaagaagcagatcagacacaagcccgagggcaagatcagacccagaagctggagcagcggcagcagcgaggccggcagcagcagcagcggcaaccagggcgagctgaaggccagcatgaagtacgtgaaggtgagacacaaggccagagagatcagaaacaagaagggcagaaacggccagagcagactgagcctgaagcacggcgagaaggccgagagaaacatccacaccggcagcagcagcagcagcagcagcggcagcgtgaagcagctgtgcaagagaggcaagagacccctgaaggagatcggcagaaaggaccccggcagcaccgagggcaaggacctgtacatggagaacagaaaggacaccgagtacaaggaggagcccctgtggtacaccgagcccatcgccgagtacttcgtgcccctgagcagaaagagcaagctggagaccacctacagaaacagacaggacaccagcgacctgaccagcgaggccgtggaggagctgagcgagagcgtgcacggcctgtgcatcagcaacaacaacctgcacaagacctacctggccgccggcaccttcatcgacggccacttcgtggagatgcccgccgtgatcaacgaggacatcgacctgaccggcaccagcctgtgcagcctgcccgaggacaacaagtacctggacgacatccacctgagcgagctgacccacttctacgaggtggacatcgaccagagcatgctggaccccggcgccagcgagaccatgcagggcgagagcagaatcctgaacatgatcagacagaagagcaaggagaacaccgacttcgaggccgagtgctgcatcgtgctggacggcatggagctgcagggcgagagagccatctggaccgacagcaccagcagcgtgggcgccgagggcctgttcctgcaggacctgggcaacctggcccagttctgggagtgctgcagcagcagcagcggcgacgccgacggcgagagcttcggcggcgacagccccgtgagactgagccccatcctggacagcaccgtgctgaacagccacctgctggccggcaaccaggagctgttcagcgacatcaacgagggcagcggcatcaacagctgcttcagcgtgttcgaggtgcagtgcagcaacagcgtgctgcccttcagcttcgagaccctgaacctgggcaacgagaacaccgacagcagcgccaacatgctgggcaagacccagagcagactgctgatctggaccaagaacagcgccttcgaggagaacgagcactgcagcaacctgagcaccagaacctgcagcccctggagccacagcgaggagaccagaagcgacaacgagaccctgaacatccagttcgaggagagcacccagttcaacgccgaggacatcaactacgtggtgcccagagtgagcagcaactacgtggacgaggagctgctggacttcctgcaggacgagacctgccagcagaacagcagaaccctgggcgagatccccaccctggtgttcaagaagaccagcaagctggagagcgtgtgcggcatccagctggagcagaagaccgagaacaagaacttcgagaccacccaggtgtgcaacgagagcccccacggcgacggctacagcagcggcgtgatcaaggacatctggaccaagatggccgacaccaacagcgtggccaccgtggagatcgagagaaccgacgccgagctgttcagcgccgacgtgaacaactactgctgctgcctggacgccgaggccgagctggagaccctgcaggagcccgacaaggccgtgagaagaagcgagtaccacctgtgggagggccagaaggagagcctggagaagagagccttcgccagcagcgagctgagcaacgtggacggcggcgactacaccacccccagcaagccctgggacgtggcccaggacaaggagaacaccttcatcctgggcggcgtgtacggcgagctgaagaccttcaacagcgacggcgagtgggccgtggtgccccccagccacaccaagggcagcctgctgcagtgcgccgccagcgacgtggtgaccatcgccggcaccgacgtgttcatgacccccggcaacagcttcgcccccggccacagacagctgtggaagcccttcgtgagcttcgagcagaacgaccagcccaagagcggcgagaacggcctgaacaagggcttcagcttcatcttccacgaggacctgctgggcgcctgcggcaacttccaggtggaggaccccggcctggagtacagcttcagcagcttcgacctgagcaaccccttcagccaggtgctgcacgtggagtgcagcttcgagcccgagggcatcgccagcttcagccccagcttcaagcccaagagcatcctgtgcagcgacagcgacagcgaggtgttccaccccagaatctgcggcgtggacagaacccagtacagagccatcagaatcagccccagaacccacttcagacccatcagcgccagcgagctgagccccggcggcggcagcgagagcgagttcgagagcgagaaggacgaggccaacatccccatccccagccaggtggacatcttcgaggacccccaggccgacctgaagcccctggaggaggacgccgagaaggagggccactactacggcaagagcgagctggagagcggcaagttcctgcccagactgaagaagagcggcatggagaagagcgcccagaccagcctggacagccaggaggagagcaccggcatcctgagcgtgggcaagcagaaccagtgcctggagtgcagcatgaacgagagcctggagatcgacctggagagcagcgaggccaactgcaagatcatggcccagtgcgaggaggagatcaacaacttctgcggctgcaaggccggctgccagttccccgcctacgaggacaaccccgtgagcagcggccagctggaggagttccccgtgctgaacaccgacatccagggcatgaacagaagccaggagaagcagacctggtgggagaaggccctgtacagccccctgttccccgccagcgagtgcgaggagtgctacaccaacgccaagggcgagagcggcctggaggagtaccccgacgccaaggagacccccagcaacgaggagagactgctggacttcaacagagtgagcagcgtgtacgaggccagatgcaccggcgagagagacagcggcgccaagagcgacggcttcagaggcaagatgtgcagcagcgccagcagcaccagcgaggagaccggcagcgagggcggcggcgagtgggtgggccccagcgaggaggagctgttcagcagaacccacctgtag

SEQ ID NO: 40562 - DNA, 4188 bp, Artificial Sequence
  derived and/or modified sequence
atgtatccgatctgcacagtcgttgtggatggcctgccctcagagtcaagctctagttcctaccccggtccagtctccgtctctgaaatgtctctcctccacgcactgggacctgtgcagacctggctggggcaggaactagagaaatgcggcatcgatgccatgatctacacgcggtatgtgctgtctctgctcctgcatgacagttacgattatgacctccaagaacaggaaaacgacatcttcctcgggtgggagaagggtgcctataaaaagtgggggaaatcaaagaagaaatgttcagatctgacccttgaggagatgaagaaacaagccgccgtgcagtgcctgagatctgcctctgacgaatcatcagggatagaaacattagtcgaggagctgtgtagcaggctgaaggatctccaatccaaacaggaggaaaagatccacaaaaagcttgaaggctctccctcaccagaggccgaattgtcgccccctgcgaaggatcaggtggaaatgtattacgaagctttcccaccactctcagagaaacccgtatgtttgcaggaaatcatgactgtctggaacaagagtaaggtctgtagttattcttcttctagtagttcttccaccgctccacccgcgtccaccgacacctcaagcccgaaggactgtaactcggagagcgaggtcaccaaagagaggtcctccgaggtccccacaaccgtgcatgaaaaaactcagagtaagagtaaaaatgagaaagagaataagtttagtaacggtacaatagaggaaaagccggctctgtataaaaaacagatcaggcacaagcccgaaggtaaaattcgcccccgatcgtggtcaagcggcagctccgaagccggaagctccagcagtggaaaccagggcgagctcaaagccagcatgaaatatgtgaaggtccgccacaaggccagggagatccggaacaagaagggcagaaatggacagtcaaggctttcccttaagcatggcgaaaaggctgagcggaatatacacaccgggtcttcaagctctagctccagcgggtctgtgaagcagctgtgtaagaggggcaagcggcccctcaaggagatcggaagaaaagacccagggagtacagagggcaaggatctgtacatggaaaaccgtaaggacacggagtacaaagaggagccattgtggtataccgagccgatcgctgagtactttgtaccactgagcaggaaaagcaagttggagacaacctacagaaaccggcaagacacaagcgaccttacgagtgaggccgttgaggaactgagcgaatcggtgcatggcctctgcattagcaacaataatctccacaaaacctacctggcagcgggcactttcattgacgggcattttgtggagatgcccgctgtgatcaatgaggacattgatttaaccgggactagcctgtgctcccttccagaagacaacaaatatcttgacgacattcacctctctgaattaacccacttctacgaggtcgatattgaccagagtatgcttgacccaggtgcatcggagacaatgcagggagagtctcggatactgaacatgattcgccagaagagtaaagagaacaccgatttcgaggcagagtgttgcatcgtgcttgacgggatggagctgcaaggcgagcgtgctatctggacagattccactagctccgtaggtgctgagggattgttcctacaagacctgggaaacttagctcagttctgggagtgctgctcatcatcttcaggtgacgctgacggagaatcattcggaggggatagccctgttcgattgtcaccaattctggattcgacagtcttaaatagccacctgctggctgggaaccaggagcttttcagtgacattaacgaaggaagcggcataaactcttgcttcagtgtctttgaagtgcagtgtagcaacagcgtgcttcccttttcctttgagactctaaatctgggcaacgagaatacggattcatctgcaaatatgctgggaaagactcagtccaggttactcatctggaccaaaaatagtgcatttgaggagaacgaacattgctctaatctgtctaccagaacatgttccccatggagccacagtgaagagaccagatctgacaacgaaacgctgaatatccagtttgaggagagcacacaatttaatgctgaagatatcaactatgtcgtgcccagagttagctcgaattacgttgacgaagagctcttagacttcctgcaagatgagacctgtcagcagaactctcgaacgctgggcgaaatacctacactggtgtttaaaaagacatctaagcttgaatctgtctgcgggatacagcttgagcagaagacagaaaacaagaattttgagacaacccaggtttgtaacgaatcccctcatggagatggctattcatcaggtgtcataaaggatatttggacaaaaatggccgataccaacagcgttgctacagtggaaattgaacgtacagacgctgaactcttctctgccgacgtgaacaattactgttgctgcctcgatgcggaagcggagctcgagacgttacaagagcctgataaggccgttcggcgttctgagtaccacctgtgggaagggcagaaggagtctttggagaagagggccttcgcatcctctgagcttagcaatgtcgatggtggcgattacactacaccaagtaagccttgggatgtggctcaggacaaggaaaacactttcattctgggcggcgtctatggagagctgaagacatttaacagcgatggggaatgggcagttgtccccccaagtcataccaagggatcgctccttcaatgcgcagcctccgatgtcgtgacaattgccggtaccgacgtgttcatgacgcctggcaactcattcgccccaggccatcggcaactgtggaagccttttgtctctttcgagcagaacgaccagccaaagtccggggagaacgggctgaacaaaggcttttctttcatcttccacgaggacctgttgggagcgtgtggcaacttccaagtagaggacccaggattggagtattcttttagttcttttgatctttctaatccgtttagtcaggtgttgcatgttgaatgcagcttcgagcctgagggcatcgccagtttctccccgtccttcaaaccgaagagcatcttgtgctctgactcagacagcgaggtctttcacccccgtatttgtggggtcgacaggactcaatacagggcaattaggatcagccctcgcacccactttcgcccgatctcggctagcgagctgtcgccaggaggcggctccgagtcggaatttgaatccgaaaaggacgaggccaatatcccaattccttctcaggtcgatatctttgaggacccccaggccgacctcaaacccttagaggaagatgctgagaaggaggggcactactacggtaaaagcgaattagaaagtgggaaattcctacctcggctgaaaaaaagcgggatggaaaagagcgctcaaaccagtctggactcccaggaggagtcaaccggcatactgtcagttggaaagcagaaccagtgcctcgagtgctcaatgaacgaatccctggagatcgacttggaaagtagcgaagccaattgtaagatcatggcacagtgtgaagaggagattaataatttctgcgggtgcaaagccggctgccagttccctgcatacgaagacaacccggtgagctccggccagctggaagaattcccagtgctcaacaccgatatccagggaatgaaccgcagtcaagaaaaacagacctggtgggaaaaggcactgtatagccctctcttccccgcctctgagtgtgaggagtgctataccaacgctaaaggggaaagtggtctggaggagtatcctgacgcaaaggagacaccgtccaatgaagagcgcctgctggattttaaccgggtgagtagcgtgtacgaagcccgctgcaccggcgaacgtgactccggggcgaaatctgacggcttcagagggaagatgtgctcctctgcatcaagtacttcagaggagaccgggtccgagggcggcggggagtgggtgggcccttcagaagaagaattattttcccggacccacctgtag

SEQ ID NO: 40563 - DNA, 4188 bp, Artificial Sequence
  derived and/or modified sequence
atgtatcccatttgcactgttgtggtggacggtttaccctctgaatcttccagctctagctacccgggtcccgttagtgtatcggagatgagtctgcttcacgctctgggcccggtccagacgtggctaggtcaggaattggagaaatgcgggatcgacgcaatgatatacactcgttacgttttatccttgctgctccatgattcctacgactatgatctgcaagaacaggagaacgacattttccttggctgggaaaagggggcctataagaagtgggggaagtctaagaagaagtgtagcgatctgaccctcgaggaaatgaaaaagcaggctgctgtgcagtgtctccggtcagcctccgacgaatcttcgggcattgaaacgctcgttgaggagctctgtagccgtcttaaggacttgcaatccaagcaggaagaaaagatccacaaaaaactggaaggcagtccctcacccgaagctgaactttcacctcctgccaaggatcaggtggaaatgtactacgaggcctttccacccctgtccgagaagcctgtttgtttacaagagataatgacagtttggaacaagagcaaggtctgttcttactcgagttctagctctagcagtacggcgccacccgccagtactgacacttccagcccaaaagactgcaattcggaaagtgaggtgacgaaagagagatcaagcgaggtacctacaacagtccatgagaaaacgcaatcaaagagcaagaacgagaaggaaaataaattctccaatggcacaattgaggagaaacctgcactgtacaagaaacagataagacataaacccgaggggaagattcggccgagatcctggagtagtggcagctccgaggccggatcaagcagctccggcaaccaaggtgaattaaaggctagcatgaagtacgtcaaagtgcggcataaagccagggaaatacggaacaaaaagggtagaaatggccaatctcggctgtctctgaagcatggcgagaaagccgagagaaacattcacacaggcagcagtagctctagctctagcggcagtgtgaaacagctgtgcaagcgcgggaaaaggccactcaaagaaattggccgcaaagatcccggatctactgaagggaaagatctgtatatggagaaccgaaaagataccgaatacaaagaggagcctttatggtacacagaacccattgctgagtattttgtgcccctaagcaggaagagcaagctggagactacataccggaatcgtcaagacacatctgatttaactagtgaagccgtagaggaactgagcgagtccgtgcacggactctgcatctctaacaacaacctgcataagacttatctggccgctggcacttttatcgatggccactttgtggaaatgccagcagtgatcaatgaagatattgacctgaccggcacctctttgtgcagcctgccagaggacaacaagtatctagatgacatacacctctcggagctgacacatttttacgaagttgacatagatcagagcatgcttgaccctggcgcaagtgaaactatgcaaggcgagtctcgtatcctgaacatgatccggcagaagagcaaggagaacacagacttcgaagctgaatgttgcatagtgttggatggcatggaacttcagggagagagggcaatctggacagatagtactagctctgtgggcgccgaaggcctgttcttgcaggacttagggaatctggcccagttctgggagtgttgttcttcttcttccggggatgcagatggggagtccttcggcggcgatagccccgtgcgtctctctccaatcctcgactctactgtgctgaactctcacctcctggctgggaatcaggagctgtttagcgacatcaatgaagggagcggcatcaattcgtgtttctcagtttttgaggttcagtgtagcaattcggtgttaccttttagtttcgagacgttgaacctgggaaatgaaaacacagacagctcggcaaatatgctggggaagacccagtcaaggctgctcatctggaccaagaattcagccttcgaggaaaacgaacactgtagcaatttgagtactcggacctgttctccctggtcccactcggaggaaacccggtccgataacgagactttaaatattcagttcgaggaatccacccagttcaacgccgaagatatcaattacgtggttcctcgcgtttcttctaattatgtggatgaggaacttctggattttctccaggatgagacatgccaacagaattcccgaactctgggggagattcctaccctggtgttcaaaaaaactagcaaactggaatccgtgtgtggaatccagttggagcaaaaaacagagaataagaacttcgagaccacccaggtgtgcaacgaatcccctcacggagatggctattccagcggcgttatcaaggacatatggactaaaatggccgacactaacagcgttgctaccgtggaaatagaaagaactgatgctgaactcttttctgctgacgtgaacaattactgttgctgcctggatgcagaggcagagctggaaacactgcaggaacctgacaaggctgtacgccgcagcgaatatcatctatgggaaggacagaaagaaagtctggaaaagagggcattcgcctcctctgagctgtcgaacgtggacggtggagattatacgaccccttctaaaccttgggacgtggctcaggataaggagaacacttttatccttggtggcgtgtacggtgaattaaaaacattcaacagtgatggagaatgggctgtggtccctccttctcatactaaaggcagtctgttacagtgcgccgcttccgacgtagtcactattgcagggacagacgtgttcatgactccaggaaatagcttcgcacccggccatcggcagctgtggaaacctttcgtgagcttcgagcagaacgaccagcccaagtcaggcgagaacggattgaataagggcttcagctttatcttccacgaggatctactgggcgcctgtgggaattttcaggtggaggatcccggcctggaatactctttcagcagcttcgacctgagtaacccttttagccaagtgctgcacgtagaatgttcttttgagccagagggcattgctagcttctcgccaagttttaaacctaagtctattctttgttccgattcagactcagaagtgttccaccctcggatctgtggggtggataggacccagtaccgcgcaatcagaatctcccctcggactcactttcgacctatctccgcctccgaattgtcccccggtggaggatctgagagcgagtttgagagcgagaaggacgaagcgaatattccgatcccgagccaggtggacattttcgaggatcctcaagcagaccttaagcctctggaagaagatgccgagaaggaaggacactattacggaaaaagcgagctggaaagcggaaagtttctgccacggttgaagaaatctggcatggagaaatctgcccagacctctttagactcacaggaggaatctacaggaatcctcagtgtgggaaagcagaatcagtgcttggagtgttccatgaacgagtctctggagattgatctagagtcatccgaggcaaattgtaaaattatggcacagtgtgaagaagaaataaacaatttctgtggatgtaaagcgggctgccaatttccggcgtatgaggataaccccgtttcaagcgggcagctagaggaatttccagtgctgaacaccgacattcagggcatgaatagatcccaagagaaacaaacttggtgggagaaggccctctactctcccctattcccagccagtgaatgcgaggaatgttacacaaacgccaagggagagagtggcctggaagagtacccagacgccaaggagaccccctctaatgaggagcgtcttctggattttaaccgggtgagttccgtctacgaggcccgatgcacaggggaaagagacagtggtgcaaagagtgatggttttaggggaaagatgtgttcctcagcctcctcaacaagtgaagaaacaggaagtgaaggaggaggtgagtgggttggaccttccgaagaagaactcttttcccgcacccacctttag

SEQ ID NO: 40564 - DNA, 4188 bp, Artificial Sequence
  derived and/or modified sequence
atgtaccccatctgcaccgtggtggtggatggcctgcccagcgagagcagcagcagcagctacccaggccctgtgtctgtgtctgagatgagcctgctgcacgccctgggccctgtgcagacctggctgggccaggagctggagaagtgtggcattgatgccatgatctacacccgctacgtgctgagcctgctgctgcatgacagctatgactatgacctgcaggagcaggagaatgacatcttcctgggctgggagaagggggcctacaagaagtggggcaagagcaagaagaagtgcagcgacctgaccctggaggagatgaagaagcaggccgctgtgcagtgcctgcggagcgccagtgatgagagcagcggcatcgagaccctggtggaggagctgtgcagccggctgaaggacctgcagagcaagcaggaggagaagatccacaagaagctggagggcagccccagccctgaggccgagctgagccccccagccaaggaccaggtggagatgtactatgaggccttcccccccctgtctgagaagcctgtgtgcctgcaggagatcatgacagtgtggaacaagagcaaggtgtgcagctacagcagcagcagcagcagcagcacagcccccccagccagcacagacaccagcagccccaaggactgcaacagcgagagcgaggtgaccaaggagaggagcagcgaggtgcccaccaccgtgcatgagaagacccagagcaagagcaagaatgagaaggagaacaagttcagcaatggcaccatcgaggagaagccagccctgtacaagaagcagatccgccacaagccagagggcaagatccggcccaggtcctggagcagcggcagcagcgaggccggcagcagcagcagcggcaaccagggcgagctgaaggcctccatgaagtatgtgaaggtgcgccacaaggcccgggagatccggaacaagaagggcagaaatggccagagccggctgagcctgaagcacggggagaaggccgagaggaacatccacacaggcagcagcagcagcagcagcagcggctctgtgaagcagctgtgcaagaggggcaagaggcccctgaaggagattggaaggaaggaccccggcagcacagagggcaaggacctgtacatggagaacaggaaggacacagagtacaaggaggagcccctgtggtacacagagcccatcgccgagtactttgtgcccctgagcaggaagagcaagctggagaccacctacagaaaccggcaggacaccagtgacctgaccagcgaggccgtggaggagctgtctgagagcgtgcacggcctgtgcatcagcaacaacaacctgcacaagacctacctggccgccggcaccttcattgatggccactttgtggagatgcctgctgtgatcaatgaagatattgacctgaccggcaccagcctgtgcagcctgcctgaggacaacaagtacctggatgacatccacctgtctgagctgacccacttctatgaggtggacatcgaccagagcatgctggaccccggggccagcgagaccatgcagggcgagagccgcatcctgaacatgatccggcagaagagcaaagaaaatacagactttgaagctgagtgctgcatcgtgctggatggcatggagctgcagggcgagcgggccatctggacagacagcaccagctctgtgggcgctgagggcctcttcctgcaggacctgggcaacctggcccagttctgggagtgctgcagcagcagcagtggagatgctgatggagagagctttggaggagacagccctgtgcggctgagccccatcctggacagcacagtgctgaacagccacctgctggccggcaaccaggagctgttcagtgacatcaatgaaggcagcggcatcaacagctgcttctctgtgtttgaggtgcagtgcagcaacagcgtgctgcccttctcctttgagaccctgaacctgggcaatgaaaatacagacagcagcgccaacatgctgggcaagacccagagccggctgctgatctggaccaagaacagcgcctttgaagaaaatgagcactgcagcaacctgagcaccaggacctgcagcccctggagccacagcgaggagaccaggagtgacaatgagaccctgaacatccagtttgaggagagcacccagttcaatgctgaggacatcaactacgtggtgccccgggtgagcagcaactacgtggatgaggagctgctggacttcctgcaggatgagacctgccagcagaacagcaggaccctgggggagatccccaccctggtgttcaagaagaccagcaagctggagagcgtgtgtggcatccagctggagcagaagacagagaacaagaactttgagaccacccaggtgtgcaatgaaagcccccatggagatggctacagcagcggggtcatcaaggacatctggaccaagatggctgacaccaacagcgtggccaccgtggagattgaaagaacagatgctgagctgttcagcgcagatgtgaacaactactgctgctgcctggatgctgaggccgagctggagaccctgcaggagccagacaaggctgtgagaagaagtgagtaccacctgtgggagggccagaaggagagcctggagaagagggcctttgccagcagcgagctgagcaatgtggatggaggagactacaccacccccagcaagccctgggatgtggcccaggacaaggagaacaccttcatcctgggcggcgtgtatggagagctgaagaccttcaacagtgatggagagtgggccgtggtgccccccagccacaccaagggcagcctgctgcagtgtgccgccagtgatgtggtgaccatcgccggcacagatgtgttcatgaccccaggcaacagctttgcccctggccaccggcagctgtggaagccctttgtgtcctttgagcagaatgaccagcccaagagcggggagaatggcctgaacaagggcttctccttcatcttccacgaggacctgctgggcgcctgtggcaacttccaggtggaggaccccggcctggagtacagcttcagcagctttgacctgagcaaccccttcagccaggtgctgcacgtggagtgcagctttgagcctgagggcatcgccagcttcagccccagcttcaagcccaagagcatcctgtgcagcgacagcgacagcgaggtgttccacccccgcatctgtggggtggacaggacccagtaccgggccatccgcatcagccccaggacccacttccggcccatcagcgccagcgagctgagccctgggggcggcagcgagagcgagtttgagagcgagaaggatgaggccaacatccccatccccagccaggtggacatctttgaggacccccaggccgacctgaagcccctggaggaggatgctgagaaggagggccactactacggcaagtctgagctggagagcggcaagttcctgccccggctgaagaagagcggcatggagaagagcgcccagaccagcctggacagccaggaggagagcacaggcatcctgtctgtgggcaagcagaaccagtgcctggagtgcagcatgaatgaaagcctggagattgacctggagagcagcgaggccaactgcaagatcatggcccagtgtgaggaggagatcaacaacttctgtggctgcaaggccggctgccagtttcctgcctatgaggacaaccctgtgagcagcggccagctggaggagttccctgtgctgaacacagacatccagggcatgaacagaagccaggagaagcagacctggtgggagaaggccctgtacagccccctcttccctgcctctgaatgtgaggagtgctacaccaatgccaagggggagagcggcctggaggagtacccagatgccaaggagacccccagcaatgaggagcggctgctggacttcaacagagtgtcctctgtgtatgaggcccgctgcaccggggagcgggacagcggggccaagagtgatggcttccggggcaagatgtgcagcagcgccagcagcaccagcgaggagactggaagtgaaggaggaggagagtgggtgggccccagcgaggaggagctgttcagcaggacccacctgtag

SEQ ID NO: 40565 - DNA, 4188 bp, Artificial Sequence
  derived and/or modified sequence
atgtaccccatctgcaccgtggtggtggacggcctgcccagcgagtcatcatccagctcgtaccctggtcctgtgtccgtttccgagatgagcctgctgcatgctctgggacccgtgcaaacctggctggggcaagagctcgaaaaatgcgggatagatgcaatgatctacacccgatacgtgctctcattgctgttacacgacagctacgactatgacctgcaagagcaggagaacgacatattcctgggatgggaaaagggggcatataagaaatggggaaaatcaaagaagaagtgttctgacctgaccctggaggaaatgaagaaacaggctgctgtgcagtgcttgcgctccgcttctgatgaaagcagcggtatcgagacattggtagaagaattatgttctcggctgaaagacctgcagtctaaacaggaagagaagatacacaagaaattggaagggagccccagtccagaagcagaattgtcacctcctgcaaaagaccaggtcgaaatgtattacgaggccttcccaccgctgtcagagaaacctgtctgcctgcaagagatcatgactgtctggaacaagtcaaaagtttgtagctactccagttctagctcttccagtactgcccctcctgccagtaccgatacttcctcgccaaaagactgcaacagtgagagcgaggtgactaaggagagaagcagcgaagtacctactaccgtgcacgaaaaaacccagagtaagtctaagaatgaaaaagagaacaaattttcgaacggaactatagaggagaagcccgccctgtacaaaaagcagatcaggcacaagccagagggcaaaatcaggcctcgatcctggagcagcgggagtagtgaagccgggtcctcgtccagtggtaaccagggcgagctgaaggccagtatgaagtacgtaaaggtacgccacaaggccagagaaatcagaaacaaaaaagggcggaacggtcagtcccgcctgtcacttaagcacggagaaaaggcagaacgcaatatacacactggctcttcatcctccagttcttctggatcagtcaaacaactctgcaaaagaggaaagcgcccactgaaggagataggtagaaaggatccaggcagtaccgagggtaaggacctgtacatggagaacagaaaggatacagaatataaggaagagcccctgtggtacacagaacctattgcagagtactttgttccgctgtccagaaagagcaaactggagaccacttatcggaatcggcaggacactagtgacctgacctccgaagctgtagaggagctgtctgagtctgtccatggactctgcatctctaacaataacctgcacaagacatatttagcagccggtacctttatagacgggcactttgtggagatgccggcagtgattaacgaagacatcgatctcactggaaccagtctgtgcagcctgccagaggataacaagtacctcgacgatatccatctgagcgagttgacccacttttacgaggttgacattgaccagagcatgcttgatccgggcgcaagtgagaccatgcagggtgagtctcggattctcaacatgattagacagaaaagtaaagaaaataccgacttcgaagctgaatgctgcattgtgttggacgggatggagcttcagggcgagagagccatctggaccgactctacctctagcgtgggagccgagggattatttctgcaggatttagggaatctcgcacagttttgggaatgctgttcttccagcagcggggatgcagatggggagagctttggaggcgatagccccgtgaggctctctcccattctggatagcacagtcctcaactcccatctcctggctggaaaccaggagctgtttagcgatatcaatgaaggtagtggtattaatagctgtttctcagtattcgaggtccaatgctccaacagcgtgttgccgtttagcttcgagaccctcaatctaggaaatgagaatacggactcctccgccaatatgctgggcaagacacagtccaggctgctgatatggacgaagaatagtgccttcgaggagaacgagcactgttctaatctgtccactcgcacatgcagtccttggtcccacagcgaggaaacccggtcagacaatgaaaccctcaatatccaattcgaagagtctacacagtttaacgcagaagacattaactatgttgtgcccagagtttcctctaattacgtggacgaagagttactggatttcctccaggatgagacctgccagcaaaatagtcgaaccttaggcgagatcccaacgcttgtgtttaaaaagaccagcaaacttgaaagcgtgtgcggcatacagctggaacagaagaccgaaaataagaatttcgaaaccactcaggtgtgcaacgagtcaccccatggggacgggtactcctcaggtgtcatcaaggacatttggaccaaaatggccgacacgaactccgtcgcgaccgtggagattgaaaggaccgacgctgaacttttctctgccgacgtaaacaattactgttgttgcctagatgcggaagccgaactggaaaccttgcaggagcccgataaggccgtacgccgctccgaatatcatctttgggaaggacaaaaggaatccttggagaagcgagcattcgcctcttctgagctgagcaacgtcgatgggggcgactacaccacaccctctaaaccctgggatgttgcccaggacaaagaaaatacttttattttgggtggggtgtacggcgaacttaaaacgtttaatagcgacggagaatgggctgtggtgcctccgagtcataccaagggatccctgctacagtgcgccgcttcagacgtagttacaattgccggcacagacgtgttcatgactcccggtaattccttcgccccgggacacaggcaactatggaaacccttcgtgagcttcgaacaaaatgatcaacctaagagcggagagaacgggctgaacaaaggattctccttcatatttcatgaggatctgttaggggcctgcggcaactttcaagtcgaggacccggggttagagtacagttttagttcatttgatctctctaacccattcagccaagttctgcacgtcgaatgttcttttgaacctgagggaatagcctcttttagcccctctttcaaacccaaaagcattctatgtagcgactctgattctgaggtgtttcacccccggatatgcggcgtcgaccggactcagtaccgcgcaatccggatatcaccgagaacgcattttcgacctatctcagcatcagaactaagccctgggggaggcagtgagtcggagttcgaatctgagaaagacgaagcaaacattccgataccgagccaggttgacattttcgaggatccccaggcggacctgaagcccctggaggaggatgccgagaaagagggccactattacggcaagagtgagctagagagcggcaaattcctgcctaggcttaagaagtcaggtatggagaaatcggcacagactagcctcgacagccaggaagaatccaccggaattttatccgtgggaaaacagaatcagtgtttggaatgtagtatgaacgaatcgttggagatcgatcttgaatcaagtgaggctaactgcaaaatcatggcacaatgtgaggaagaaatcaacaacttttgcggctgcaaggccggttgccagtttcccgcctatgaagataaccctgtttcctcaggccagctggaagagttcccagttctgaacacagacatccagggcatgaaccgatcgcaggaaaagcagacttggtgggagaaggcattgtatagccctttattcccggcctcagaatgtgaagaatgttatacaaacgcaaaaggcgaatccggtctcgaagagtatccagacgccaaagagactcccagcaacgaggagcgactgttggattttaacagagtgtcttcagtctatgaagcacgctgtaccggggagagggactctggagctaaaagcgacggcttccggggcaaaatgtgcagtagcgccagctcgacaagcgaagagacaggatccgaaggaggaggcgaatgggtgggccccagtgaggaagaactgttttctcggacccatttgtag

SEQ ID NO: 40566 - DNA, 4188 bp, Artificial Sequence
  derived and/or modified sequence
atgtaccccatctgcaccgtggtggtggacggcctgcccagcgagtcctcatccagttcgtaccccggacccgtctccgtgtcagagatgagcctgcttcatgctctcggaccagtacagacttggctcgggcaggagttagaaaaatgcggtatcgacgccatgatttatacccgatatgttctcagcttattgctgcacgatagctatgactacgacctgcaggagcaagaaaacgacatttttcttggctgggagaaaggagcctataagaagtggggcaaaagtaagaagaaatgttccgaccttacgctggaggagatgaaaaaacaggctgctgtccagtgtctccgatccgcgagtgatgaaagcagcggcattgaaaccctggtggaagagctgtgttcaagactaaaggacctgcagagtaaacaggaggaaaaaattcacaagaaactggaaggatccccgtcgcccgaggctgaactctcaccacccgccaaggaccaggtagagatgtactatgaggcatttccccccctatctgagaaacccgtttgtcttcaggagatcatgacagtatggaacaagagcaaggtttgtagctattcctcttcatcatcttcaagcactgctccgccagcctctactgacactagcagtcccaaggattgcaattctgaaagcgaagtgaccaaggagaggtcaagtgaagtaccaactaccgtccacgaaaagacccagagtaagagtaagaacgagaaagaaaacaaattttcaaatggtaccattgaagaaaagcctgcactctataaaaaacagatcagacataaacctgagggtaagatacggcctcggtcatggtcatctggaagctctgaggccgggtcatcgagctctggtaaccaaggggaattgaaggccagcatgaaatatgttaaggtgcgccataaggcacgcgagatacggaacaagaaggggcgaaatggacagtctcgcctgagtctgaagcatggcgagaaggcagagcgaaacattcacaccggatccagtagctctagcagcagcggttcagtgaaacagctctgtaagaggggcaaaaggcctctgaaggagatcggaaggaaggatccaggctcgacagagggtaaggacctctacatggagaaccgcaaggatacggagtataaggaggagcccctgtggtacactgaaccaatcgccgagtattttgtacctctgagccggaagagtaaactggagaccacataccggaaccgacaggacacttcagatttgaccagtgaagccgtcgaggagctgagtgaaagtgtacatggactgtgtatctcaaataataaccttcacaagacctatctggcagctggcacgttcatcgacggacacttcgtggaaatgcccgccgtgattaacgaggacatcgacctaaccggcacaagtctgtgctctctaccagaagacaataagtacctcgatgacattcatctctctgagctgacccatttctacgaggtggacatcgatcaaagcatgctggatcctggagcttctgaaacgatgcagggggagagtaggatccttaacatgattcgtcagaaaagcaaagagaataccgactttgaagccgagtgctgcattgtgttagatggaatggagttgcagggtgaaagagccatttggacagactctaccagcagtgttggcgcagagggcctttttctgcaggacctgggcaacctcgctcagttctgggaatgttgtagctcatcctcaggagatgccgacggcgagtcctttggcggcgatagtcccgtaaggctgtcaccgatccttgactcgaccgtgttgaattcacatctactggccggaaatcaggaactgttttctgacatcaatgaggggagcgggatcaattcttgcttcagcgtgttcgaagtgcagtgctctaactcagtgctgcccttttcattcgagacacttaatctgggtaatgaaaataccgactcttccgccaacatgctgggtaaaacacagtcccggctcctcatttggacgaaaaatagtgcattcgaagagaacgagcattgctcaaacctctcgacgcgaacctgcagcccctggagtcatagcgaggaaacaagatctgacaatgagaccctgaatatacaatttgaggagtccacacagtttaatgctgaggatatcaattacgtggtgcctcgcgtctccagcaattacgtcgatgaagaacttttagattttcttcaggacgaaacgtgtcaacagaactccagaacccttggcgagatcccaactttagtgttcaagaagaccagcaagctggagtcagtctgcgggattcagctggagcaaaaaaccgaaaataaaaacttcgaaaccactcaggtctgcaatgaatcaccacacggggacggttactcctctggcgtgattaaagacatttggacaaaaatggccgacaccaacagtgtagccacggttgaaatcgagcgcaccgatgcagagctcttctcagccgatgtgaacaattactgctgttgtcttgacgccgaagcagagcttgagacgcttcaagaacccgacaaagcggtacgcaggagcgaataccacctgtgggaaggtcagaaagagtctcttgagaagagggcctttgcatccagcgagctctctaatgtcgatgggggtgactataccaccccctcaaagccatgggacgtggcccaggacaaagagaatacctttatactggggggggtgtacggtgagttgaagactttcaacagcgacggagagtgggccgtcgttccgcccagccacaccaaaggttccctcctccagtgtgccgcctccgacgtggtcaccatagccggtaccgacgtttttatgacacccgggaatagtttcgcaccagggcatcgccagctgtggaagcctttcgtgtccttcgaacagaacgaccagccaaagagtggagagaatggtctcaataagggtttttcttttatctttcacgaggatctcctgggtgcctgcggcaatttccaggtcgaggatcccggtcttgagtactctttcagctcatttgatctttctaaccctttttcccaggttctgcacgtggagtgttccttcgagcctgaaggcattgcgagttttagtcctagctttaaacccaagtcaatcctgtgttctgattccgatagcgaagttttccacccacgcatttgtggtgtcgatcgcacgcagtaccgtgccatccgcatttctccacgtacccactttcggccaatttcggcttctgaactgtctcctgggggaggatcggaatctgagttcgaaagtgaaaaagacgaagccaacatccccatccctagccaggtggacatttttgaggatcctcaggctgatctgaagcccctggaagaggatgccgagaaagaaggacactattacgggaaatccgagctggagtctggaaagtttttgccccgccttaagaaatccggaatggagaagagcgcacaaacatctctggactcgcaggaagaatcgaccggaattcttagcgtgggcaaacagaaccagtgtctggaatgctccatgaacgaaagcctcgagattgatctggagagttcagaggctaattgtaagattatggcccaatgtgaggaagaaattaataacttttgcggatgcaaggccgggtgtcagttccccgcttatgaagacaaccctgtttcttctggccagttggaggagtttcctgttctgaacactgatatccagggcatgaatcgcagccaggaaaaacagacctggtgggaaaaggctttgtacagtcccctctttcctgcctctgaatgcgaagaatgctatacaaacgctaaaggcgaatcagggctggaggaataccctgatgcaaaggaaacgcctagcaacgaagaacgactgctcgactttaatagggttagcagcgtttacgaagctcgctgtaccggcgagcgcgattcaggggctaaaagcgatggcttccgtggcaagatgtgtagtagtgcttcaagcacttcggaggaaacagggtctgaaggcggcggcgagtgggtgggcccttcggaagaggagctattctccagaacacatctgtag

SEQ ID NO: 40567 - DNA, 4188 bp, Artificial Sequence
  derived and/or modified sequence
atgtaccccatttgcacggttgttgttgatgggctgccatccgagtcttcaagttcttcatatcccggtcccgtatcagtaagcgaaatgtcgctcctccatgcactggggccagtacaaacttggctgggtcaagagctcgaaaagtgcgggatagacgcgatgatatatactcgctatgtcctgagtttgctacttcatgactcctacgactacgatctgcaagagcaggaaaacgacatctttctgggatgggagaaaggcgcatataagaagtggggaaagagcaaaaagaagtgctcagacctaaccctggaggaaatgaagaaacaggcagctgtgcagtgcttgaggagcgcctccgatgaatcaagcggtatcgagacactagtcgaggaactctgtagccgtctgaaagacctacagtccaagcaggaggagaagattcataagaaattggagggatccccctctcccgaggcggagttgtcacctccggctaaggaccaggtcgaaatgtattacgaggcattcccccctcttagcgagaaacccgtgtgtctccaggaaataatgaccgtgtggaataaatccaaggtctgcagctatagcagcagttcgagcagctcaactgcgccacccgctagtactgacacttcgtctccgaaggactgcaactcagagtccgaggtcaccaaagagaggagctcagaggttcccaccaccgtgcacgagaagacgcaatctaagagcaaaaatgagaaagagaacaagttttcaaatggcactatagaggagaagccagccctctacaaaaagcaaattcggcacaagccagagggtaagattcgccctcggagttggtcttctggcagtagtgaagctggcagtagtagttccggaaaccagggcgaactgaaggcaagtatgaaatatgtcaaggtcaggcataaagcccgagaaatcagaaacaaaaaaggtcgaaatggccagtctagactgtctctcaaacacggcgaaaaggcggagaggaacattcacacagggtcatcgtcttctagctcttccggatccgttaagcagctgtgtaagcgaggtaaaaggcctctgaaagagataggcagaaaagaccccggttccacagaaggaaaagacctgtatatggagaaccggaaggatacggagtataaagaagaaccactctggtacacagagcctatcgccgaatacttcgtacctcttagccgcaagtccaaactcgagacaacctacaggaacagacaggatacgtcagatctaacttccgaagctgttgaggagctgtccgagtctgtgcacggcctttgcatatccaacaacaacctgcacaagacctacctggccgcagggaccttcattgacggccactttgtcgaaatgcccgctgtgattaacgaggacattgatctgacaggcacatctctgtgttccctaccagaagataacaagtatttggacgacatccacctaagcgaactgacgcatttttacgaagtagatattgaccagtcgatgttagacccgggagctagcgaaactatgcagggtgagtcaaggatccttaacatgataagacagaagagtaaggaaaacacagatttcgaggccgagtgctgcatcgtgctggacggaatggagctgcagggagaaagggcaatctggacggacagtacctcctctgtgggggcagagggactgttcctacaggacctgggcaacttggcccaattctgggaatgttgcagctccagtagtggagacgctgatggcgaaagtttcggaggagatagccctgtgcgtctctcacccattctggacagcaccgtgctgaactcacacctgctagccggaaatcaggagctgttttctgacattaatgagggatctggcattaattcatgcttctcagtattcgaagttcagtgctctaactccgtgctccccttttccttcgagactctgaatcttggaaacgaaaacacggattcatctgctaacatgctcggtaaaactcagtcccggctccttatttggactaaaaatagcgcctttgaggagaatgaacattgcagcaacttgtcaacaaggacctgttccccttggagccactcagaggaaacaagatccgataatgagacgctcaacatacagttcgaagagtccacccagttcaacgccgaggacatcaactatgttgttccaagagtctcctccaactacgtggacgaagaattgctggactttctgcaggatgaaacctgtcaacagaactcaaggacgctaggagaaattcccacgctcgtgtttaaaaagaccagcaagctagagagcgtgtgtggcatacagctggaacagaagacagaaaataaaaatttcgaaacaacacaggtgtgtaatgaatctccacatggagacggttattcgtccggtgttattaaagacatctggactaagatggcagataccaacagcgtcgccaccgtcgagattgaaagaacagatgcagagctgttcagcgctgacgtcaataattattgctgctgtctggatgccgaggctgagctggagactctgcaagaacccgataaggcggttaggaggtccgagtaccacctgtgggaaggccagaaggaatcattggaaaagagagcttttgcaagcagcgagctcagtaatgtggacggaggggattacacgaccccctctaagccttgggacgtcgcccaggacaaggaaaacaccttcatactggggggagtctatggcgaactcaagacgtttaatagcgatggtgagtgggcagtcgtaccaccgagccacacgaagggctctctgctccaatgcgctgcatccgatgttgttactattgcaggcaccgatgtgttcatgacacccggaaattcttttgcccctggtcacagacagttgtggaagccctttgtctctttcgagcagaatgatcagccaaaatccggcgagaacggattaaataagggcttcagctttatattccacgaggatctgctcggagcctgtggtaattttcaggttgaagacccgggtctggagtacagtttctccagttttgaccttagtaaccctttctcgcaggtgctgcacgtggaatgcagcttcgagcccgagggcatcgcctcattcagcccttcgtttaagcccaagagcatcctgtgctccgactccgactccgaggtcttccacccaaggatctgcggtgtggacaggactcagtacagagccatccggatttcacccaggacccattttaggcccatctcagcatctgagttgtctcccggaggcggttcggaaagcgaattcgagtcggagaaagatgaagcaaacatcccaataccgagtcaggtggacatattcgaggatcctcaggccgatttaaagcccctcgaagaggacgccgaaaaagagggtcactattatggcaagagcgagctggagtcagggaagttcctcccacgcctgaaaaaatcggggatggagaagtctgcccaaaccagtttggactctcaggaggaaagcaccggaatactgagcgttggcaagcagaaccaatgcttagaatgctctatgaacgaatcccttgaaatcgatcttgaatcaagcgaggcaaattgcaaaattatggcccaatgtgaagaagagatcaacaatttctgtggctgcaaagctggctgtcaatttccagcttatgaagataaccccgtgagctctggacaactggaggagtttccggtactgaacacagatatccagggcatgaatcgatcccaggagaagcagacatggtgggagaaggcactgtactcaccacttttcccagccagtgagtgcgaagaatgttatacaaatgcaaagggcgaatctgggctggaagagtaccctgatgccaaagagacaccatccaatgaggaacgactactcgacttcaacagggtctcctcagtttatgaggctaggtgtacaggggagcgcgattcgggagcaaagtccgacggatttcggggaaagatgtgcagctctgccagcagtaccagcgaagagacaggctcagagggtgggggagaatgggtcggtccgagtgaagaggagctcttctcaaggacacatttgtag

SEQ ID NO: 40568 - DNA, 4188 bp, Artificial Sequence
  derived and/or modified sequence
atgtatcccatctgcacagttgtggtggacggcctgccttctgagtctagctcgtcctcctacccaggcccagtgtccgtttctgagatgtcactgctgcacgcgctgggacccgtgcaaacttggctcggacaggagctggagaagtgtggcattgacgcaatgatctatactcgatacgtgctgtctttgctgctgcatgacagctacgattacgacctgcaggagcaagaaaatgatattttcctgggctgggaaaagggggcttacaaaaaatggggcaaatccaaaaagaaatgctccgacctaaccttggaagaaatgaagaagcaggcagctgttcagtgcctgaggtcagccagcgatgagagcagcggcatcgagaccctggtggaagagctttgtagccggctcaaggacctccaatcgaaacaggaggagaaaatccacaagaaactcgaaggaagccccagccctgaagccgagctgtcgccacctgccaaagatcaggtcgagatgtactacgaagcgtttccacccctctctgagaagccagtatgcctccaagagatcatgacggtgtggaataagagcaaagtgtgctcatattccagctcgtcttcaagtagcacagcaccaccggcaagcacagacacctccagtcccaaagattgtaatagtgagtctgaagtcacaaaggagcgctcctcggaggttccaaccaccgttcacgagaaaacacagtctaagtccaaaaacgagaaagaaaataagttttccaatggtaccatcgaagagaagcctgccttgtataagaagcagatacggcacaaaccagaaggcaaaatccgcccaaggtcttggagcagcggctccagcgaagccggatcctcaagctcaggcaaccagggagagttgaaggccagcatgaagtatgtgaaagttagacacaaggcccgagagataagaaataagaagggtagaaacgggcagagccgcctgagcttgaagcacggtgagaaagccgagcgcaacatccataccggcagcagttcatcctctagcagtgggtccgtaaagcagttgtgcaagaggggtaagagaccgttaaaagagattgggagaaaagaccccggatccacagagggaaaggatctgtatatggagaaccgcaaggatacggaatacaaagaggagcctctgtggtacacagaacccatcgcggagtactttgtgcctctgtcgaggaagagcaaactggagaccacatatcgcaatcgccaggatacctctgatctgacctcagaggcagtggaggaactttctgagtcagtccacggactgtgcatatcgaacaacaatttacacaagacatacttggctgccggaaccttcattgatggccacttcgtcgaaatgccagctgttatcaatgaagacatcgatctaacaggtacgtccttatgtagcttgcctgaggataacaagtacctcgacgacattcacctgagtgagctgacacatttctacgaagtggatatcgatcagtccatgctggatcccggagcgagtgagactatgcaaggcgaaagtagaatcctcaacatgatccgacaaaaatcgaaggaaaatactgatttcgaggctgagtgttgcatcgtgctagacggcatggagttacagggagaaagagcgatatggacggactctacctctagtgtgggagccgagggcctgtttttgcaggacctgggcaacttggcacagttttgggagtgctgttctagtagctccggggatgccgatggggagagctttggaggagattctccagtaagactttcacctattctggacagtacagtattaaatagccaccttctggcgggaaatcaggaattgttttccgacataaatgaggggagcggtatcaactcatgcttctccgtattcgaggtgcagtgctctaacagtgttctacctttcagtttcgaaacattgaacctcgggaacgaaaacaccgactcatcagcaaatatgttgggaaaaacacaaagcaggcttctgatttggaccaaaaattcagcttttgaggagaatgagcactgctccaacttgtcgactcgtacatgttcaccttggtcccattctgaagagactcgttccgacaacgaaactctaaatattcagtttgaggaatctacccagtttaacgctgaggacattaattacgtcgttcccagggtttcatctaattatgttgacgaagagctgctggactttcttcaggatgagacatgccaacaaaatagccggacactgggggagattccaacattagtattcaaaaagacctccaaactggaaagcgtgtgtgggattcaacttgagcagaagactgagaacaaaaattttgagaccacccaagtgtgcaacgaatcaccccacggcgacggctactcttcaggggtgattaaggacatttggaccaaaatggctgataccaattcggtggcgacggtcgaaattgaaaggactgatgctgaactgtttagcgccgacgtgaataattactgttgctgtctggacgctgaggctgagctggaaacattgcaagaacccgacaaggcagtgagaagaagtgagtatcatttatgggaagggcagaaagagagtcttgagaagcgagctttcgccagcagcgagctgagcaatgtagatggaggcgactacactaccccctccaaaccctgggacgtagcgcaggacaaagagaacacttttatactggggggtgtctacggggaactaaagacattcaattctgatggggaatgggccgtggtccctccttcacacacaaaagggtccctgctacaatgtgctgcctccgacgtggtcaccattgccggaaccgatgtatttatgactccaggtaatagctttgcaccagggcataggcagctgtggaagcccttcgtgagcttcgaacagaatgaccagccaaaaagcggagagaacggtctgaataaaggtttctcctttatcttccacgaagatctgctgggagcctgcggcaatttccaggtagaagaccccggactggaatactctttcagcagcttcgacctctccaacccattctcacaggtactccacgtagaatgttccttcgaacctgaagggattgcctcattcagcccgtcctttaaacccaagtcaatactgtgttcggattcagactccgaggtgttccatcccaggatttgtggggtggaccgcacgcagtatcgagcaatccggatttccccgcgtacccacttccggcctattagcgcatccgagctgtccccaggaggaggaagcgaatcggagttcgaatcagagaaagacgaggctaatatacctatcccatcccaagtagatatctttgaggaccctcaggcagacttgaagccactggaagaggatgcggagaaggagggccactactacggcaaatccgagttagagagtgggaagttcctgcctcgcctgaaaaaaagcggcatggaaaagtccgcgcagacgagtctggattcccaggaagagtcaaccggcatactgtccgttggaaagcagaaccagtgtctcgaatgctctatgaacgaaagtctggagattgacttagagtcaagcgaagctaactgcaagattatggcacagtgtgaggaggagattaataatttctgcggctgtaaggcaggctgtcaatttcccgcatacgaagacaacccagtgagcagcgggcagctggaggaatttccagtcctgaatacagacatccagggaatgaacaggtctcaagaaaaacaaacatggtgggagaaggccctgtacagcccattgtttcccgctagcgagtgtgaagagtgttacaccaatgctaagggtgagtccggcctcgaagagtatccagacgctaaggaaaccccttctaacgaggaacggctgctggatttcaacagggtctcaagtgtctacgaagctagatgcaccggtgagcgcgacagcggggctaaatctgacggattccgtggtaagatgtgtagctctgctagttccacctctgaggagaccggtagcgaagggggaggagagtgggtcggaccatccgaggaggaactctttagtcgtacacacctctag

SEQ ID NO: 40569 - DNA, 7841 bp, Artificial Sequence
  derived and/or modified sequence
cgcaggccagggccgcccggcgctcggcagccgcccgcagcccctcggagccagaggagaggcgcccccgccggccgccgcgccgcccggcagcctcggcaggtagtgtacactgataaaggtagggcgcggtggactctgcccctgtaaccgttccggagaatgcgttgagaatgaagacaaccagttctgccggagacttccatttggcctcaatgtgaaattaaagtagaaaatcacatctacatgcatgttgctatcaggatgttgattcattagtcatgcctgaagagggaaagtctgttttaggtggctgactaccagcaaaaataaatgcttatcctacatgtcaagcatctctactttttactggagtgaaaatcccctccagataccaacagaatatcaactgcagaaaatgcttcacattttaaggatgtcggcaacctaaattcatgtaccctatctgtacagttgttgtggatggtttgccatctgaaagctcctcaagttcttatccaggccctgtgtctgtttctgaaatgtctctgcttcatgctttgggtccagtgcagacctggctgggacaagagctcgagaaatgtggcattgatgccatgatttacactcggtatgtcctcagtcttctgctgcatgacagctatgactacgacctgcaggaacaggagaatgacatcttcctgggctgggaaaaaggagcttataagaaatggggaaagagtaagaaaaaatgttcagatctaactctagaagaaatgaaaaaacaggctgctgtccagtgtcttcgatctgcttctgatgaaagctctggtatcgagactttagtggaggagctctgctccagactgaaagaccttcagagtaagcaagaagagaagattcacaaaaagttagaggggtctccctctccagaggcagaattatcccctccagcaaaggatcaagtggaaatgtactatgaagcatttccaccactttctgagaaaccagtttgcctgcaagaaatcatgactgtgtggaacaagtctaaagtctgttcttactctagctcttcttcatcatccacagccccaccagctagcacagatacttcctctcctaaggactgcaacagtgaaagtgaagtcaccaaggaaagaagcagtgaagtacccaccactgtgcatgagaaaacccagagcaaaagcaaaaacgagaaggaaaacaaatttagtaatggcacaattgaagaaaagcctgctttgtacaaaaagcaaatccgacataaacctgaaggaaagattcgccctcgctcgtggtcttctggctccagtgaagcaggctcaagttccagtgggaatcagggagaattaaaagcatccatgaagtatgttaaagtaagacacaaggcacgagagattcgaaacaaaaaagggcggaatgggcaaagcaggctttctttgaagcacggtgaaaaggctgaaaggaacattcatactggaagtagtagcagtagcagcagtggttctgtcaaacagctgtgcaagcggggtaagagacctttaaaagaaatagggagaaaagatcctgggagcactgaaggaaaagacctgtacatggagaatagaaaggacacagagtataaagaggagcccttgtggtacaccgagccaattgctgaatattttgttcctctgagcagaaaaagtaaactagagaccacataccgaaacagacaggatacaagtgatctgacatcagaggcagtggaagaattgtctgaatcagtgcatggtctttgtatcagcaacaataatcttcataaaacatacctcgcagcaggtactttcattgatggtcattttgtagaaatgcctgcagttataaatgaggatattgacctcactgggacctcattatgttctctaccagaggacaataaatacctggatgatattcatctatcagaattaacgcacttctatgaagtggatattgatcaatccatgttggatcctggtgcctcagaaacaatgcaaggagaaagtcggattttgaatatgattcgacagaaaagcaaagagaacacagattttgaggcagaatgttgcatagtgttagatggtatggagttgcaaggggaacgtgcaatatggacagattctaccagctccgtaggtgctgagggcttattcctgcaggaccttggcaatctggctcagttttgggagtgctgttcatccagctccggtgatgctgatggggagagttttggaggagactctccagttagactctctcccatcttagacagcacagtgctcaattcacacctgcttgctggcaatcaagagctcttttcagatattaatgaaggatctggtataaactcttgtttttcagtgtttgaagtgcaatgcagtaattctgttttaccattttcttttgaaacactcaacttgggaaatgaaaatacagattctagtgctaatatgcttgggaaaacacagtctagattgctaatatggaccaaaaatagtgcctttgaagaaaatgaacactgttctaatctttcaacaagaacttgtagtccatggtcccattcagaagaaacacgttcagacaatgaaacattaaatattcagtttgaagaatccacacagtttaatgccgaagatattaattatgtagttcctagagtctcgtcaaattatgtagatgaagaacttctagattttttgcaagatgaaacttgccagcaaaacagtagaactttaggtgagattcctacattagttttcaaaaaaacatctaaactagaatccgtctgtggtattcagctagaacaaaaaacagaaaacaaaaattttgaaactacacaagtatgtaatgaaagtccacatggagatggctacagctcaggggttattaaagacatttggacaaagatggcagacacaaattctgtggctacagtagaaatagaaagaactgatgctgagttgttttcggcagatgtaaataactactgctgctgtctagatgctgaagctgaactggagacccttcaggagcctgataaggctgtgcggaggtcagagtaccatctgtgggagggacagaaagagagcctggagaaaagagcatttgcttctagtgagctatcaaacgtggatggtggtgattatacaacaccctctaaaccctgggatgtagcccaagataaagaaaacacattcattcttggaggagtttatggagaactcaaaaccttcaatagtgatggggagtgggcagtcgtaccacctagtcacacaaaaggaagtctgttacagtgtgcagcttctgatgttgtgacgatagctggtacagatgtctttatgaccccaggaaacagttttgctcctgggcacaggcagttatggaaacccttcgtgtcatttgaacagaatgatcagccgaagagtggggaaaatgggttaaataagggattttcttttatcttccatgaagacttactaggagcttgtggcaactttcaagtcgaagatcctggacttgaatactcattttcttcctttgacttaagcaatccattttcacaagttcttcatgtagaatgctcatttgaacctgaagggattgcatctttcagccccagttttaaaccgaaatcaatcctctgttctgattcagacagtgaagtgtttcaccccaggatatgtggtgttgacagaacacaatacagggctattcggatctctcctcggactcactttcgcccaatttctgcatccgaactgtccccaggaggaggaagcgagtcagaatttgaatctgagaaagatgaagcaaatattcccattccttctcaagttgatatatttgaagatccgcaggcagatctcaaacctttggaagaagatgcagagaaagaaggccattactatggaaaatcagagcttgagtctggaaaattccttcccaggttaaaaaaatctgggatggaaaagagtgctcagacatcactggattcccaggaggaatcaactgggattctttcagtaggaaagcaaaatcagtgtttggaatgtagcatgaatgaatccctggaaatagatttagaaagctcagaagcaaattgtaaaataatggcacaatgcgaggaagaaattaataatttttgtggttgcaaagcaggttgtcagtttcctgcttatgaagataatccagtttcttcgggacagctggaagagttccctgtattgaacactgatatacaaggaatgaatagaagtcaagaaaaacagacctggtgggaaaaagccttgtactctcctctttttcctgcatcagagtgtgaagaatgttacacaaatgccaagggagagagtggtttagaagaatatccagatgctaaagagacacccagtaatgaagagcgcctgttagattttaatagggtgtcttctgtttatgaagcaagatgtacaggagagagagattctggagcaaagtcagatggcttccgcggaaagatgtgctccagcgccagctccacctcggaagagacaggctcagaaggcggaggcgagtgggtgggccctagtgaagaggagctcttttctcgaactcatctctaaacctgcaaaatagtacaaattattgtttaaaaatgatatgtgatggaaaattactcttcagtgagacctgttaatctaaaacaacaacttaggtttcctcttcaattaactgattcagattggtaataattatctttctcttcttgcttattttagagttgaggacagctatcctgttaaagattttttttcccagctgttaaattcttggctatttgaaatagactagattgtgttgtcaaatcaagaatgggtgtgcatgtgcttgtcttagaagtatcactgctttttgcatcttaactgcagttaattttccttccgactgcggttatatcactatgaccttactagcattgcagtgtcaacaaccacttctgctcttcagagacttcagctttggagcatttaggctttgttctccaagaactgggatatccattcttaccctacagtggcttgatgcctttctgaaggcgagagggaagcctgggtgactcagcggtggtctccattcagcaaaatctcatgtacatttccagtaggaaccgcagaggtgtgcttttcaagactcaccaaatactgtgttttctctcttaggatttcttttcccctaaagtatcacggaagatactatggttcgtgactttcttgctaactgaagaagccaaggatttggggtgtggggtcgtatgcgagacacagtggggtaagggtgcataccccaccccttacctgctctcatactgcagttacatttacaccaaaaccccatgcagggttctttgtggtgagtgttccatacgtgctaaggaccttagttacagattgttactttctggtgacctatgttgaattgaaacccccaaaacttgaaattgtgaacatttgacatgcagtaaaggccacctcatcacccagagaaatctttggctgctgcagctagccgcttcttggctgtgatgtagtatagcttcgatctcattttgtgtttgagagaatgttctgggcaagttctgtgtgtggtgggttggggcgggtagagtcatgagttttccacatccctgtgtggtggttttgctgactgtcgctccgtgggactggctcccgtttctccttggtgagcccggggagccggcgcatcttgtgagtcgcgtctgtgcatggcgatccgctcctccggctctcatggcattgtgccacaggcagaggccaggaggagcagtatgtgcacagccgaaacattttacattttttacattgtttttcttttttaaccaactcattgtttaaaaaacaaaaacaaaaaaaacctaatctgtgaaatcagcgtagcatgcctggagcatcaggaatggcagaaaagtctgatgcgctctagacagcttcaccactcatttgggcaggcagtaaacacacatataatttattagctgggagctgaactggctgtgaaatctatgatttgctttgaacatttgggttttgttgcctttttcttaattgataacacagaaaagaaagtaccatcaaagactgtggagtcattgagggtctgtgtgtcctcaccgagagggacctggtgtgcccgccgggtcgatcttcccacgtgttagggtttatttttatacaacacattttttgacactttaaggtgggtgggtgtgtgtgtgtgtgtgtgtgtgcgcgcgtgcgcgcgcgcatgtgtaaggttttatgttgctgttatttatttacgaacttcagatacgtttttatgtatttttcattcttctggagcttcctaaaaattgataagcatctgcactgaaatataatttaacagcaaaagtaaaaaaggattgaaagttgtaaattcctcatatcactacagtgacgattattctagaaatcgttgcttgtgtagcaaagaccaaataaatagatttcagacacaaccttgagcacagttgattttggacagctgctgtttattaggaaagggctccaggtggcaaaggtgcacacttcctcagacacaggtgagaagatgcagcaccttccacaggtgaatgggacggattcgaagtgagcaaagggattcacaaattatgtatttatttgttttcatagttaagtagctgaagctcagaggctttcagcaacagagatgaaagtgtggctttttagttttgtgaatggatgatcacaaagaaaaagcatttttaaaaagttggcaaacgctgaaacgcactgtggtatgaagcgcattgcatttccatagcactgaagtaccagtttccattcctgggctgagattgtttttcccgtggttgtattgttctgatttcacgtacaccagagtaactgatttttttttgtttgttttcttgtggagttaacaccaaataaaaattgtaaaaaacagtttgttgtttttatttctcatagcaaagcttcttttgtaaagaactccagcttccttttactcatgagcatccgtggaagagcaagtgcccaggttacatttgttctagatggaggtcatttagctctcattgcagacactgctgaaaacattgtgcagctttgctagggaagaaagtggtgtggcctgctgagaaatcagcggctcctccccatctcacccccagcacacgcagggactactacctgagtctgcaaaacacatagcatttttgtccgtggatggtacacaaagctcaatctttttgttttcttctggggaaaaaattaaatctttatatgttaatatgattgatattcattgtgcaaaaaaaatcagtgtgtttttaaagaagtataagggaaaaggaaaactcatatgtccttctgtcactctgagacatacactggtaacatctgtgcaagcccctttccaggattctgaatgtacagtatatatgaatgcatacacagagaaatttacattcaagagtgtactatacttgttcttctataacatcagaaataggtttttactcagatgtcttcatgtcggtaattatagaactacataattatttttatagctgtattatgtagatttaacaggttcctcattgataaaacaatgtttttttggttgtttattcagtatctgaataacgtttctatggacatctgtaaacatgtatgaggggacttttaaaagttcatggaaaatggaattaaaagaaaaataaaaaaatataaacttta

SEQ ID NO: 40570 - DNA, 7771 bp, Artificial Sequence
  derived and/or modified sequence
acgtaaggcgcaggccagggccgcccggcgctcggcagccgcccgcagcccctcggagccagaggagaggcgcccccgccggccgccgcgccgcccggcagcctcggcaggttctgccggagacttccatttggcctcaatgtgaaattaaagtagaaaatcacatctacatgcatgttgctatcaggatgttgattcattagtcatgcctgaagagggaaagtctgttttaggtggctgactaccagcaaaaataaatgcttatcctacatgtcaagcatctctactttttactggagtgaaaatcccctccagataccaacagaatatcaactgcagaaaatgcttcacattttaaggatgtcggcaacctaaattcatgtaccctatctgtacagttgttgtggatggtttgccatctgaaagctcctcaagttcttatccaggccctgtgtctgtttctgaaatgtctctgcttcatgctttgggtccagtgcagacctggctgggacaagagctcgagaaatgtggcattgatgccatgatttacactcggtatgtcctcagtcttctgctgcatgacagctatgactacgacctgcaggaacaggagaatgacatcttcctgggctgggaaaaaggagcttataagaaatggggaaagagtaagaaaaaatgttcagatctaactctagaagaaatgaaaaaacaggctgctgtccagtgtcttcgatctgcttctgatgaaagctctggtatcgagactttagtggaggagctctgctccagactgaaagaccttcagagtaagcaagaagagaagattcacaaaaagttagaggggtctccctctccagaggcagaattatcccctccagcaaaggatcaagtggaaatgtactatgaagcatttccaccactttctgagaaaccagtttgcctgcaagaaatcatgactgtgtggaacaagtctaaagtctgttcttactctagctcttcttcatcatccacagccccaccagctagcacagatacttcctctcctaaggactgcaacagtgaaagtgaagtcaccaaggaaagaagcagtgaagtacccaccactgtgcatgagaaaacccagagcaaaagcaaaaacgagaaggaaaacaaatttagtaatggcacaattgaagaaaagcctgctttgtacaaaaagcaaatccgacataaacctgaaggaaagattcgccctcgctcgtggtcttctggctccagtgaagcaggctcaagttccagtgggaatcagggagaattaaaagcatccatgaagtatgttaaagtaagacacaaggcacgagagattcgaaacaaaaaagggcggaatgggcaaagcaggctttctttgaagcacggtgaaaaggctgaaaggaacattcatactggaagtagtagcagtagcagcagtggttctgtcaaacagctgtgcaagcggggtaagagacctttaaaagaaatagggagaaaagatcctgggagcactgaaggaaaagacctgtacatggagaatagaaaggacacagagtataaagaggagcccttgtggtacaccgagccaattgctgaatattttgttcctctgagcagaaaaagtaaactagagaccacataccgaaacagacaggatacaagtgatctgacatcagaggcagtggaagaattgtctgaatcagtgcatggtctttgtatcagcaacaataatcttcataaaacatacctcgcagcaggtactttcattgatggtcattttgtagaaatgcctgcagttataaatgaggatattgacctcactgggacctcattatgttctctaccagaggacaataaatacctggatgatattcatctatcagaattaacgcacttctatgaagtggatattgatcaatccatgttggatcctggtgcctcagaaacaatgcaaggagaaagtcggattttgaatatgattcgacagaaaagcaaagagaacacagattttgaggcagaatgttgcatagtgttagatggtatggagttgcaaggggaacgtgcaatatggacagattctaccagctccgtaggtgctgagggcttattcctgcaggaccttggcaatctggctcagttttgggagtgctgttcatccagctccggtgatgctgatggggagagttttggaggagactctccagttagactctctcccatcttagacagcacagtgctcaattcacacctgcttgctggcaatcaagagctcttttcagatattaatgaaggatctggtataaactcttgtttttcagtgtttgaagtgcaatgcagtaattctgttttaccattttcttttgaaacactcaacttgggaaatgaaaatacagattctagtgctaatatgcttgggaaaacacagtctagattgctaatatggaccaaaaatagtgcctttgaagaaaatgaacactgttctaatctttcaacaagaacttgtagtccatggtcccattcagaagaaacacgttcagacaatgaaacattaaatattcagtttgaagaatccacacagtttaatgccgaagatattaattatgtagttcctagagtctcgtcaaattatgtagatgaagaacttctagattttttgcaagatgaaacttgccagcaaaacagtagaactttaggtgagattcctacattagttttcaaaaaaacatctaaactagaatccgtctgtggtattcagctagaacaaaaaacagaaaacaaaaattttgaaactacacaagtatgtaatgaaagtccacatggagatggctacagctcaggggttattaaagacatttggacaaagatggcagacacaaattctgtggctacagtagaaatagaaagaactgatgctgagttgttttcggcagatgtaaataactactgctgctgtctagatgctgaagctgaactggagacccttcaggagcctgataaggctgtgcggaggtcagagtaccatctgtgggagggacagaaagagagcctggagaaaagagcatttgcttctagtgagctatcaaacgtggatggtggtgattatacaacaccctctaaaccctgggatgtagcccaagataaagaaaacacattcattcttggaggagtttatggagaactcaaaaccttcaatagtgatggggagtgggcagtcgtaccacctagtcacacaaaaggaagtctgttacagtgtgcagcttctgatgttgtgacgatagctggtacagatgtctttatgaccccaggaaacagttttgctcctgggcacaggcagttatggaaacccttcgtgtcatttgaacagaatgatcagccgaagagtggggaaaatgggttaaataagggattttcttttatcttccatgaagacttactaggagcttgtggcaactttcaagtcgaagatcctggacttgaatactcattttcttcctttgacttaagcaatccattttcacaagttcttcatgtagaatgctcatttgaacctgaagggattgcatctttcagccccagttttaaaccgaaatcaatcctctgttctgattcagacagtgaagtgtttcaccccaggatatgtggtgttgacagaacacaatacagggctattcggatctctcctcggactcactttcgcccaatttctgcatccgaactgtccccaggaggaggaagcgagtcagaatttgaatctgagaaagatgaagcaaatattcccattccttctcaagttgatatatttgaagatccgcaggcagatctcaaacctttggaagaagatgcagagaaagaaggccattactatggaaaatcagagcttgagtctggaaaattccttcccaggttaaaaaaatctgggatggaaaagagtgctcagacatcactggattcccaggaggaatcaactgggattctttcagtaggaaagcaaaatcagtgtttggaatgtagcatgaatgaatccctggaaatagatttagaaagctcagaagcaaattgtaaaataatggcacaatgcgaggaagaaattaataatttttgtggttgcaaagcaggttgtcagtttcctgcttatgaagataatccagtttcttcgggacagctggaagagttccctgtattgaacactgatatacaaggaatgaatagaagtcaagaaaaacagacctggtgggaaaaagccttgtactctcctctttttcctgcatcagagtgtgaagaatgttacacaaatgccaagggagagagtggtttagaagaatatccagatgctaaagagacacccagtaatgaagagcgcctgttagattttaatagggtgtcttctgtttatgaagcaagatgtacaggagagagagattctggagcaaagtcagatggcttccgcggaaagatgtgctccagcgccagctccacctcggaagagacaggctcagaaggcggaggcgagtgggtgggccctagtgaagaggagctcttttctcgaactcatctctaaacctgcaaaatagtacaaattattgtttaaaaatgatatgtgatggaaaattactcttcagtgagacctgttaatctaaaacaacaacttaggtttcctcttcaattaactgattcagattggtaataattatctttctcttcttgcttattttagagttgaggacagctatcctgttaaagattttttttcccagctgttaaattcttggctatttgaaatagactagattgtgttgtcaaatcaagaatgggtgtgcatgtgcttgtcttagaagtatcactgctttttgcatcttaactgcagttaattttccttccgactgcggttatatcactatgaccttactagcattgcagtgtcaacaaccacttctgctcttcagagacttcagctttggagcatttaggctttgttctccaagaactgggatatccattcttaccctacagtggcttgatgcctttctgaaggcgagagggaagcctgggtgactcagcggtggtctccattcagcaaaatctcatgtacatttccagtaggaaccgcagaggtgtgcttttcaagactcaccaaatactgtgttttctctcttaggatttcttttcccctaaagtatcacggaagatactatggttcgtgactttcttgctaactgaagaagccaaggatttggggtgtggggtcgtatgcgagacacagtggggtaagggtgcataccccaccccttacctgctctcatactgcagttacatttacaccaaaaccccatgcagggttctttgtggtgagtgttccatacgtgctaaggaccttagttacagattgttactttctggtgacctatgttgaattgaaacccccaaaacttgaaattgtgaacatttgacatgcagtaaaggccacctcatcacccagagaaatctttggctgctgcagctagccgcttcttggctgtgatgtagtatagcttcgatctcattttgtgtttgagagaatgttctgggcaagttctgtgtgtggtgggttggggcgggtagagtcatgagttttccacatccctgtgtggtggttttgctgactgtcgctccgtgggactggctcccgtttctccttggtgagcccggggagccggcgcatcttgtgagtcgcgtctgtgcatggcgatccgctcctccggctctcatggcattgtgccacaggcagaggccaggaggagcagtatgtgcacagccgaaacattttacattttttacattgtttttcttttttaaccaactcattgtttaaaaaacaaaaacaaaaaaaacctaatctgtgaaatcagcgtagcatgcctggagcatcaggaatggcagaaaagtctgatgcgctctagacagcttcaccactcatttgggcaggcagtaaacacacatataatttattagctgggagctgaactggctgtgaaatctatgatttgctttgaacatttgggttttgttgcctttttcttaattgataacacagaaaagaaagtaccatcaaagactgtggagtcattgagggtctgtgtgtcctcaccgagagggacctggtgtgcccgccgggtcgatcttcccacgtgttagggtttatttttatacaacacattttttgacactttaaggtgggtgggtgtgtgtgtgtgtgtgtgtgtgcgcgcgtgcgcgcgcgcatgtgtaaggttttatgttgctgttatttatttacgaacttcagatacgtttttatgtatttttcattcttctggagcttcctaaaaattgataagcatctgcactgaaatataatttaacagcaaaagtaaaaaaggattgaaagttgtaaattcctcatatcactacagtgacgattattctagaaatcgttgcttgtgtagcaaagaccaaataaatagatttcagacacaaccttgagcacagttgattttggacagctgctgtttattaggaaagggctccaggtggcaaaggtgcacacttcctcagacacaggtgagaagatgcagcaccttccacaggtgaatgggacggattcgaagtgagcaaagggattcacaaattatgtatttatttgttttcatagttaagtagctgaagctcagaggctttcagcaacagagatgaaagtgtggctttttagttttgtgaatggatgatcacaaagaaaaagcatttttaaaaagttggcaaacgctgaaacgcactgtggtatgaagcgcattgcatttccatagcactgaagtaccagtttccattcctgggctgagattgtttttcccgtggttgtattgttctgatttcacgtacaccagagtaactgatttttttttgtttgttttcttgtggagttaacaccaaataaaaattgtaaaaaacagtttgttgtttttatttctcatagcaaagcttcttttgtaaagaactccagcttccttttactcatgagcatccgtggaagagcaagtgcccaggttacatttgttctagatggaggtcatttagctctcattgcagacactgctgaaaacattgtgcagctttgctagggaagaaagtggtgtggcctgctgagaaatcagcggctcctccccatctcacccccagcacacgcagggactactacctgagtctgcaaaacacatagcatttttgtccgtggatggtacacaaagctcaatctttttgttttcttctggggaaaaaattaaatctttatatgttaatatgattgatattcattgtgcaaaaaaaatcagtgtgtttttaaagaagtataagggaaaaggaaaactcatatgtccttctgtcactctgagacatacactggtaacatctgtgcaagcccctttccaggattctgaatgtacagtatatatgaatgcatacacagagaaatttacattcaagagtgtactatacttgttcttctataacatcagaaataggtttttactcagatgtcttcatgtcggtaattatagaactacataattatttttatagctgtattatgtagatttaacaggttcctcattgataaaacaatgtttttttggttgtttattcagtatctgaataacgtttctatggacatctgtaaacatgtatgaggggacttttaaaagttcatggaaaatggaattaaaagaaaaataaaaaaatataaactttatttctc

SEQ ID NO: 40571 - protein, 213 aa, Artificial Sequence
  derived and/or modified sequence
MRVRGPARLIASGARLLLRMLSALPGWGPAHLQRPLLGPASCLGILRPAMTAHSFALPVIIFTTFWGLVGIAGPWFVPKGPNRGVIITMLVATAVCCYLLCPALGMTVAPLSLTTPSSGPSPTQLCLVTSSLLLAPRDPDPQGLPGSWKSSQSSQPARALGSPGHSSGRGDVLLQYPHCSGVCPLSQGDAAGELVWVGSFPLQTGQMPGLSPS

SEQ ID NO: 40572 - protein, 164 aa, Artificial Sequence
  derived and/or modified sequence
MTAHSFALPVIIFTTFWGLVGIAGPWFVPKGPNRGVIITMLVATAVCCYLLCPALGMTVAPLSLTTPSSGPSPTQLCLVTSSLLLAPRDPDPQGLPGSWKSSQSSQPARALGSPGHSSGRGDVLLQYPHCSGVCPLSQGDAAGELVWVGSFPLQTGQMPGLSPS

SEQ ID NO: 40573 - DNA, 546 bp, Artificial Sequence
  derived and/or modified sequence
atgagaccctcaggcacctgcgcctcgtgcggttctgatcccccccctccaacacaagtccccagttcccggaacgattgtggttctacagtgcctgacaatcccttcgtgcgtaccctgcctcacaccaccatgagcggacatcaactaccacccgcaggcacccagcggccgggaccagccgcctgtctagtgcctggctcccttcctagtctcccatcacagccaggtccctggggcgcactgggcacagcggccgctgagggaatgtcttgttctaacacccggactgccctcgagttcgccttgtttccaaaagagatgctactagggtcatggtacggttggggtttgagcctgtataggcggggccggtgtcaggactctgctcatccagaagaagacacgtgtccccacggggagggcgcacccgcacaggcaggtgagtcagtaccaagccagcagctgtgccaccacccagcaggcaattggggcggtttgtattgggtgattggcaaggccttctctttggcctggaattgctag

SEQ ID NO: 40574 - DNA, 642 bp, Artificial Sequence
  derived and/or modified sequence
atgagagttcggggacccgcgcgcctgattgcaagtggtgccaggctgttgctgcgaatgctgagcgccctgccaggatggggcccggcgcaccttcaacgccctctgctgggcccggccagctgtcttggaatccttaggccagcaatgactgcgcactctttcgctctgcccgtaattatttttaccactttctgggggctggtgggtatagccggtccttggtttgtcccaaaagggcctaataggggagtcatcatcacaatgctggtcgccacagccgtgtgttgctatttgctgtgtcctgcactgggcatgacagtggcaccactgagtttgaccacaccatcatccggcccgtcccctacccagctttgcctagttacatcaagtcttctcctggctcctagggaccctgaccctcagggcctgcccgggagctggaaatcatcacagagctcccagcctgctagggcgctcggatctccagggcactcttccggtaggggcgatgttctcctccagtatcctcactgctcaggcgtttgccctctttcacaaggggatgccgcaggtgagctagtgtgggttgggagcttccccttgcagacaggccagatgcccgggctctcaccatcatag

SEQ ID NO: 40575 - DNA, 495 bp, Artificial Sequence
  derived and/or modified sequence
atgacggcacactcttttgcactcccagtcatcattttcaccactttctgggggctcgtggggattgccgggccatggttcgtacctaagggacccaatcggggcgtcattattactatgcttgtggctacagcagtctgttgctacttgctttgccccgctcttggaatgacagtagcgccactgagcctcaccactccgagttctgggccctctccaacccagctgtgtttggtgacatcgtcactactgcttgcacctcgggatcccgacccccagggactgcctggtagttggaagagctctcaaagctctcagcccgcacgggccctgggctcgccaggtcactcatcaggacgaggggacgtgctcctccagtatccacactgttcaggcgtatgccctctctcacagggcgatgccgcgggcgaactcgtgtgggtaggctccttcccccttcaaacaggtcagatgccagggctgagcccttcttag

SEQ ID NO: 40576 - DNA, 642 bp, Artificial Sequence
  derived and/or modified sequence
atgagggtgcggggccctgcccggctcatcgccagcggggcccggctgctgctgaggatgctgagcgccctgcccggctggggccctgcccacctgcagaggcccctgctgggccctgccagctgcctgggcatcctgcggcctgccatgacagcccacagctttgccctgcccgtcatcatcttcaccaccttctggggcctggtgggcattgctggcccctggtttgtgcccaagggccccaacagaggagtcatcatcaccatgctggtggccacagctgtgtgctgctacctgctgtgcccagccctgggcatgacagtggcccccctgagcctgaccacccccagcagcggccccagccccacccagctgtgcctggtgaccagcagcctgctgctggccccccgggaccctgacccccagggcctgcccggctcctggaagagcagccagagcagccagcctgcccgggccctgggcagccctggccacagcagcggcagaggagatgtgctgctgcagtacccccactgcagcggcgtgtgccccctgagccagggagatgctgctggggagctggtgtgggtgggcagcttccccctgcagacaggccagatgcctggcctgagccccagctag

SEQ ID NO: 40577 - DNA, 495 bp, Artificial Sequence
  derived and/or modified sequence
atgacagcccacagctttgccctgcctgtgatcatcttcaccaccttctggggcctggtgggcattgctggcccctggtttgtgcccaagggccccaacagaggagtcatcatcaccatgctggtggccacagctgtgtgctgctacctgctgtgcccagccctgggcatgacagtggcccccctgagcctgaccacccccagcagcggccccagccccacccagctgtgcctggtgaccagcagcctgctgctggccccccgggaccctgacccccagggcctgcccggctcctggaagagcagccagagcagccagcctgcccgggccctgggcagccctggccacagcagcggcagaggagatgtgctgctgcagtacccccactgcagcggcgtgtgccccctgagccagggagatgctgctggggagctggtgtgggtgggcagcttccccctgcagacaggccagatgcctggcctgagccccagctag

SEQ ID NO: 40578 - DNA, 546 bp, Artificial Sequence
  derived and/or modified sequence
atgcggcccagcggcacctgcgccagctgcggcagcgaccccccccctcctacccaagttccctctagccgcaacgattgtggctcaaccgtgcccgacaatccttttgtacgcaccttacctcatacaactatgtctggccaccaactgcctcctgccggaacccagcgacccggacccgccgcctgcctggtccccggtagcttaccaagcttaccttcccagcctggcccttggggggctctcggtacagccgccgccgaaggaatgtcttgctccaatacaagaaccgcactcgaatttgctcttttccccaaggaaatgctgttggggtcctggtatggatggggactgagcctgtatcgaagagggaggtgccaggattccgctcaccctgaggaagacacttgcccacacggagagggcgccccagcccaagccggggaaagtgtgccctcacagcagttgtgtcaccatcccgccggtaactggggcggactgtactgggtgattggcaaagcttttagtctggcttggaactgttag

SEQ ID NO: 40579 - DNA, 642 bp, Artificial Sequence
  derived and/or modified sequence
atgcgggtgcggggccccgcccggctgatcgccagcggcgcccggctgcttctccgcatgctgagtgcactgccaggatggggacctgctcaccttcaaaggccgctattggggccggctagttgtctgggtatcttacgaccagccatgactgcccactcgttcgcactgcctgtgatcatctttaccactttctggggtttggtgggcattgctggtccgtggtttgtgcctaagggaccaaaccgcggggtcataataaccatgctcgtcgccacagctgtgtgttgttatctgttgtgtcctgcactcgggatgactgtcgctcccctgagcctgaccacaccgtcctccggtccgtcccctacacagctgtgtctcgtgacatcctccctgctactggcacctcgagatccggatccacaaggcctccctggctcttggaagtcaagccagagctctcagccagcacgggccctgggcagcccaggccacagcagtggccgtggagatgttttgctacagtacccccactgcagcggtgtttgtcccctgtctcagggggatgctgctggcgagctggtatgggtggggtcttttcctctgcaaactggacagatgccaggactgtcgcccagctag

SEQ ID NO: 40580 - DNA, 495 bp, Artificial Sequence
  derived and/or modified sequence
atgaccgcccacagcttcgccctgcccgtgatcatcttcaccaccttctggggcttggtgggcatcgcaggcccctggttcgtgcctaaaggtccaaacaggggagtaattatcactatgctggtagctaccgcagtgtgctgttatctcctgtgtcccgccctaggtatgactgtggcccccctgtccttaaccactccctctagtggcccgagccccacccagttgtgcctcgtgacttcaagtctgctgttggctcccagggaccctgatccacagggcctgcccggcagctggaagagctcccagtcttcacaacctgctagagccctgggtagcccaggacattcttccggcaggggggatgtgctgctgcagtacccacactgctctggggtatgcccattgtctcagggagatgccgccggcgagcttgtctgggttgggtcttttcctctgcagaccgggcagatgcctggcctgtcccctagctag

SEQ ID NO: 40581 - DNA, 642 bp, Artificial Sequence
  derived and/or modified sequence
atgcgggtgaggggtccagctcgtcttatcgcctccggtgctaggttactgctaagaatgttatctgcacttcctgggtggggcccagctcatcttcagcgcccactactcggacccgcttcatgccttgggattctcagaccagcgatgactgcccactctttcgccctgccagtgatcatcttcaccacgttctggggcctggtgggtatcgccggaccttggtttgtgccaaaaggtcctaacagaggtgtgatcatcacgatgctcgtagctaccgcagtctgttgctatctcctgtgtcctgcattgggcatgacagtggcacccctgtccttaactaccccctcaagcggcccatcaccgactcaactgtgtctagtaacttcaagcctgctgctggctcccagggatcccgatccccaaggcttgcccggatcctggaaatccagccagtcctcccagcccgctcgagccctagggagtcccggtcatagcagcggaagaggggatgtcctgctccaatacccacactgtagcggagtgtgcccactctctcagggcgacgcagccggtgaattggtgtgggtcggtagctttcctctccagacaggtcagatgcccggtttgtcccccagttag

SEQ ID NO: 40582 - DNA, 495 bp, Artificial Sequence
  derived and/or modified sequence
atgactgcacattcgtttgcacttccagtgattatcttcacaaccttctggggcctggtaggcatagctggtccctggttcgtcccaaaaggacctaatagaggggtaatcattactatgctggtggccacggcggtctgttgttacctgctttgcccagcactcggaatgacggtagcccctttgagcctgactaccccgagctccggcccaagcccaacacagctgtgtcttgtcacatcttcccttctactcgctccgagagatcctgatccacaaggcctgcctggttcttggaaatcaagtcagtcgtcccagccagccagggcgctgggttcacccggtcatagctcaggacggggagacgtgcttttgcaatatcctcactgcagcggcgtatgccccctctctcagggagatgctgctggcgagctagtgtgggtggggtcatttccattgcagacaggacaaatgcctggcctgtccccttcttag

SEQ ID NO: 40583 - DNA, 2605 bp, Artificial Sequence
  derived and/or modified sequence
gttgctagagataccgcctggaggccactgatctgtaaaagggatctctacagaagatagggatttttgatcgccagagaagaagggatatgtgagatccaaacgccgaaggaggaaagcaggctccgtggtctcttccagccctgatggaagaaactaccgagccttattatactaggtgctttccacatgcctattcatttaatcctccagcaaccttgtaagaagggccatcccattttatatttaaacaaaccttaactactgacgcaaggagtcaaggatctaatcccaaagcctctgcctggttcgctgcagatggatgtccgcgaggacgccagccctccgcctcccgccgggtccctgaacgccggcccggccggtccaacctcattccgcttcccgccatcgaaacgcgaagcccccgccttcccccaaacgtctcagcgccgctggggcctttctggctgcgccgcctccgaccccaggccccggtccgcgcccgccgctcgctagtcctgggagtgaggagaacgcgtgctgaggacccggccagagggacagcggggaccgccctcccgctgcgtctctgaaagcgaggccgttcctcccgcgtccgacccccgcggggccgtcaggttcggggcggcccaggctgcgggtccgcagggcgcttcgggccgagccggcgcggcgcgtgaagggcaggggacgccccgaaagaccgctggggtgggaccccaagctccaggggtctttggaaataagaatgcggcgtgacgttggctgtgcgggcgcggggctgacgcggaccctataacccatcgccgaaaccgggcggccgcgcccctattcctcggcatttctctctgtccgcggccctgctcagccaatcagcgagtgggctcctaggcaggtcctgagtgacagcgcggcgggctggatcaggagatgcgcgtgcgcggcccggcccggctgatcgcttcgggtgctcgactcctgttgcgcatgctcagcgcgctgcccggctggggacccgcgcacctgcagcgcccgctgctcggccctgcatcctgcctgggcatcctgcgcccggccatgacggcgcactcattcgccctcccggtcatcatcttcaccacgttctggggcctcgtcggcatcgccgggccctggttcgtgccgaagggacccaaccgcggagtgatcatcaccatgctggtcgccaccgccgtctgctgttacctcttgtgcccagctctcggaatgactgtggctccactgtccctgacaaccccttcgtccggaccctcccccacacaactatgtctggtcaccagctccctcctgctggcacccagagacccggacccgcagggcctgcctggttcctggaagtcttcccagtcttcccagccagcccgggccctggggagccctgggcacagcagcggccgaggggatgtcctgctccaatacccgcactgctctggagtttgccctctttcccaaggagatgctgctggggagctggtatgggtggggtctttccctttacagacggggcagatgccaggactcagcccatcctgaggaggacacgtgtcctcatggagagggtgctccggcccaggcgggggagtcagtgcccagtcagcagctctgccaccatcctgctgggaactgggggggcctctattgggttataggcaaggccttttctctggcatggaattgttaattttctgacacgtctagatgtgaaatttctgaaaatgttgaagcagagaaacattcacacacaaaaagcaacatagtcatgtgggtccagatggcctcagtcctagatgttggcaccctttgctgtgtctcctcagagtatcctgttccgcctcctgccacctggacctccctcagtggatgtcttccctcccccgaccccagcctgtcagtccgagcacagtgcaggtttggctctgacttgggcttttggctgcagtgggggtggatttcagagcctctcatggcagcatctaagtgaccagagctgggatgagagaggggaaggggcaatgtgagtggcgctatgggacgggccagccctgctcctgagccagccccgccctctgccccctggccctgggctctgtgctagggatggtgaagaatgggggcgtgccagcctggcaggagtgggaagcaacacgcaggggtcccggacctctccagccttgccctcacgcttacccgagctcccagtgtggttagcacagagctcacccaccttgcctggctcccagctggggcctgtcctcactggtgctccaggggaagaaacgacagcctcacttctgtatggactgctgatgtggcctgccatcctgttcagcgggcattgtctttggagcagcaggagaataggatgcctctcactcacatgccagttcctggctggccagctgctcagggctcaggctggggcctcccattgacatcctccccctacactccctctctgagcctccgtcgcccctcctgttgggtaagggtgttgagtgtgacttgtgctgaaaacctggttcatatataataaataatggtgatg

SEQ ID NO: 40584 - DNA, 2614 bp, Artificial Sequence
  derived and/or modified sequence
gttgctagagataccgcctggaggccactgatctgtaaaagggatctctacagaagatagggatttttgatcgccagagaagaagggatatgtgagatccaaacgccgaaggaggaaagcaggctccgtggtctcttccagccctgatggaagaaactaccgagccttattatactaggtgctttccacatgcctattcatttaatcctccagcaaccttgtaagaagggccatcccattttatatttaaacaaaccttaactactgacgcaaggagtcaaggatctaatcccaaagcctctgcctggttcgctgcagatggatgtccgcgaggacgccagccctccgcctcccgccgggtccctgaacgccggcccggccggtccaacctcattccgcttcccgccatcgaaacgcgaagcccccgccttcccccaaacgtctcagcgccgctggggcctttctggctgcgccgcctccgaccccaggccccggtccgcgcccgccgctcgctagtcctgggagtgaggagaacgcgtgctgaggacccggccagagggacagcggggaccgccctcccgctgcgtctctgaaagcgaggccgttcctcccgcgtccgacccccgcggggccgtcaggttcggggcggcccaggctgcgggtccgcagggcgcttcgggccgagccggcgcggcgcgtgaagggcaggggacgccccgaaagaccgctggggtgggaccccaagctccaggggtctttggaaataagaatgcggcgtgacgttggctgtgcgggcgcggggctgacgcggaccctataacccatcgccgaaaccgggcggccgcgcccctattcctcggcatttctctctgtccgcggccctgctcagccaatcagcgagtgggctcctaggcaggtcctgagtgacagcgcggcgggctggatcaggagatgcgcgtgcgcggcccggcccggctgatcgcttcgggtgctcgactcctgttgcgcatgctcagcgcgctgcccggctggggacccgcgcacctgcagcgcccgctgctcggccctgcatcctgcctgggcatcctgcgcccggccatgacggcgcactcattcgccctcccggtcatcatcttcaccacgttctggggcctcgtcggcatcgccgggccctggttcgtgccgaagggacccaaccgcggagtgatcatcaccatgctggtcgccaccgccgtctgctgttacctcttgtgcccagctctcggaatgactgtggctccactgtccctgacaaccccttcgtccggaccctcccccacacaactatgtctggtcaccagctccctcctgctggcacccagagacccggacccgcagggcctgcctggttcctggaagtcttcccagtcttcccagccagcccgggccctggggagccctgggcacagcagcggccgaggggatgtcctgctccaatacccgcactgctctggagtttgccctctttcccaaggagatgctgctggggagctggtatgggtggggtctttccctttacagacggggcagatgccaggactcagcccatcctgaggaggacacgtgtcctcatggagagggtgctccggcccaggcgggggagtcagtgcccagtcagcagctctgccaccatcctgctgggaactgggggggcctctattgggttataggcaaggccttttctctggcatggaattgttaattttctgacacgtctagatgtgaaatttctgaaaatgttgaagcagagaaacattcacacacaaaaagcaacatagtcatgtgggtccagatggcctcagtcctagatgttggcaccctttgctgtgtctcctcagagtatcctgttccgcctcctgccacctggacctccctcagtggatgtcttccctcccccgaccccagcctgtcagtccgagcacagtgcaggtttggctctgacttgggcttttggctgcagtgggggtggatttcagagcctctcatggcagcatctaagtgaccagagctgggatgagagaggggaaggggcaatgtgagtggcgctatgggacgggccagccctgctcctgagccagccccgccctctgccccctggccctgggctctgtgctagggatggtgaagaatgggggcgtgccagcctggcaggagtgggaagcaacacgcaggggtcccggacctctccagccttgccctcacgcttacccgagctcccagtgtggttagcacagagctcacccaccttgcctggctcccagctggggcctgtcctcactggtgctccaggggaagaaacgacagcctcacttctgtatggactgctgatgtggcctgccatcctgttcagcgggcattgtctttggagcagcaggagaataggatgcctctcactcacatgccagttcctggctggccagctgctcagggctcaggctggggcctcccattgacatcctccccctacactccctctctgagcctccgtcgcccctcctgttgggtaagggtgttgagtgtgacttgtgctgaaaacctggttcatatataataaataatggtgatgaaaagatta

SEQ ID NO: 40585 - DNA, 546 bp, Artificial Sequence
  derived and/or modified sequence
atgagacccagcggcacctgcgccagctgcggcagcgacccccccccccccacccaggtgcccagcagcagaaacgactgcggcagcaccgtgcccgacaaccccttcgtgagaaccctgccccacaccaccatgagcggccaccagctgccccccgccggcacccagagacccggccccgccgcctgcctggtgcccggcagcctgcccagcctgcccagccagcccggcccctggggcgccctgggcaccgccgccgccgagggcatgagctgcagcaacaccagaaccgccctggagttcgccctgttccccaaggagatgctgctgggcagctggtacggctggggcctgagcctgtacagaagaggcagatgccaggacagcgcccaccccgaggaggacacctgcccccacggcgagggcgcccccgcccaggccggcgagagcgtgcccagccagcagctgtgccaccaccccgccggcaactggggcggcctgtactgggtgatcggcaaggccttcagcctggcctggaactgctag

SEQ ID NO: 40586 - DNA, 642 bp, Artificial Sequence
  derived and/or modified sequence
atgagagtgagaggccccgccagactgatcgccagcggcgccagactgctgctgagaatgctgagcgccctgcccggctggggccccgcccacctgcagagacccctgctgggccccgccagctgcctgggcatcctgagacccgccatgaccgcccacagcttcgccctgcccgtgatcatcttcaccaccttctggggcctggtgggcatcgccggcccctggttcgtgcccaagggccccaacagaggcgtgatcatcaccatgctggtggccaccgccgtgtgctgctacctgctgtgccccgccctgggcatgaccgtggcccccctgagcctgaccacccccagcagcggccccagccccacccagctgtgcctggtgaccagcagcctgctgctggcccccagagaccccgacccccagggcctgcccggcagctggaagagcagccagagcagccagcccgccagagccctgggcagccccggccacagcagcggcagaggcgacgtgctgctgcagtacccccactgcagcggcgtgtgccccctgagccagggcgacgccgccggcgagctggtgtgggtgggcagcttccccctgcagaccggccagatgcccggcctgagccccagctag

SEQ ID NO: 40587 - DNA, 495 bp, Artificial Sequence
  derived and/or modified sequence
atgaccgcccacagcttcgccctgcccgtgatcatcttcaccaccttctggggcctggtgggcatcgccggcccctggttcgtgcccaagggccccaacagaggcgtgatcatcaccatgctggtggccaccgccgtgtgctgctacctgctgtgccccgccctgggcatgaccgtggcccccctgagcctgaccacccccagcagcggccccagccccacccagctgtgcctggtgaccagcagcctgctgctggcccccagagaccccgacccccagggcctgcccggcagctggaagagcagccagagcagccagcccgccagagccctgggcagccccggccacagcagcggcagaggcgacgtgctgctgcagtacccccactgcagcggcgtgtgccccctgagccagggcgacgccgccggcgagctggtgtgggtgggcagcttccccctgcagaccggccagatgcccggcctgagccccagctag

SEQ ID NO: 40588 - protein, 765 aa, Artificial Sequence
  derived and/or modified sequence
MAGFKRGYDGKIAGLYDLDKTLGRGHFAVVKLARHVFTGEKVAVKVIDKTKLDTLATGHLFQEVRCMKLVQHPNIVRLYEVIDTQTKLYLILELGDGGDMFDYIMKHEEGLNEDLAKKYFAQIVHAISYCHKLHVVHRDLKPENVVFFEKQGLVKLTDFGFSNKFQPGKKLTTSCGSLAYSAPEILLGDEYDAPAVDIWSLGVILFMLVCGQPPFQEANDSETLTMIMDCKYTVPSHVSKECKDLITRMLQRDPKRRASLEEIENHPWLQGVDPSPATKYNIPLVSYKNLSEEEHNSIIQRMVLGDIADRDAIVEALETNRYNHITATYFLLAERILREKQEKEIQTRSASPSNIKAQFRQSWPTKIDVPQDLEDDLTATPLSHATVPQSPARAADSVLNGHRSKGLCDSAKKDDLPELAGPALSTVPPASLKPTASGRKCLFRVEEDEEEDEEDKKPMSLSTQVVLRRKPSVTNRLTSRKSAPVLNQIFEEGESDDEFDMDENLPPKLSRLKMNIASPGTVHKRYHRRKSQGRGSSCSSSETSDDDSESRRRLDKDSGFTYSWHRRDSSEGPPGSEGDGGGQSKPSNASGGVDKASPSENNAGGGSPSSGSGGNPTNTSGTTRRCAGPSNSMQLASRSAGELVESLKLMSLCLGSQLHGSTKYIIDPQNGLSFSSVKVQEKSTWKMCISSTGNAGQVPAVGGIKFFSDHMADTTTELERIKSKNLKNNVLQLPLCEKTISVNIQRNPKEGLLCASSPASCCHVI

SEQ ID NO: 40589 - DNA, 2298 bp, Artificial Sequence
  derived and/or modified sequence
atggctggttttaaaagagggtatgatggtaagatcgccggcttatacgatctggacaaaacattggggcgtggccacttcgccgtagtcaagcttgctcggcacgtcttcacaggggaaaaggtcgccgtgaaagtcatcgacaagactaagctcgacaccttggccacaggccatctatttcaggaggtcagatgcatgaagctcgtgcagcatcccaacatcgtaaggctgtacgaagtgatagatacccagaccaagctgtacctgatcctggagctaggagacggaggagatatgttcgactacattatgaaacacgaggagggcctcaacgaagacctggcaaaaaaatacttcgcacaaatagtgcacgccatctcgtattgccataagctccacgtggtacatcgggatttgaagcctgagaatgtagtgtttttcgagaaacaggggttggtgaagctcactgactttggattctccaataagtttcagccggggaaaaaactcaccacatcttgcggttctttggcgtactctgcgccggagatcctgctgggggacgagtacgacgcccctgcggtggacatctggagcctgggcgttatcctgttcatgctggtctgcggacagcccccctttcaggaagctaatgacagcgaaactttaacaatgatcatggattgcaagtataccgtgccatcgcatgtgagtaaagagtgtaaggacctaattacacgtatgttacagagagacccaaagcgcagagcttcactggaggagatcgagaatcacccttggctccaaggcgttgatcccagcccagccaccaaatacaatattccgctggtctcctacaaaaaccttagcgaagaagaacacaactctatcattcagaggatggtactcggagacattgctgatcgtgacgccatcgtggaggccttagagacaaataggtataatcacattacggctacatatttcctgcttgcggagagaattctgagggaaaagcaggagaaagagatccagactcgctcggccagtcctagtaacatcaaggctcaattccgtcagtcctggcccaccaaaattgacgtgccgcaggacctggaggacgacctcacagcgactcccctctctcatgcaacagtaccgcaatcgcccgcccgtgcagcagactctgtgcttaacggtcaccgatcaaaggggctgtgtgatagtgctaagaaagacgatctgcctgaactggctggacccgcactgtctacagttccgcccgccagcctgaagccaacagcgagcgggcgtaagtgcttatttcgtgtcgaggaggatgaggaggaagacgaagaggataagaaacccatgtcactatctacacaggtagtgctccgtcggaagccgagcgtcactaatagattaacctcgagaaagagtgccccagtgctgaatcaaatttttgaagaaggcgaatcggacgacgagtttgatatggacgagaatctcccgcccaagctgtccaggctcaagatgaacatagcctcccccggcactgtccataaaaggtatcacagacgtaaatcacaagggagagggagttcatgtagcagcagcgagacgtcagacgacgattctgaatcaaggagacggctcgataaagacagtggtttcacatatagctggcaccgccgggatagttctgagggaccccccggtagcgaaggggacgggggaggccaatccaagccttcaaacgctagcggaggtgttgataaggcatccccatctgagaataacgctgggggcggcagtcccagctctggatctggcggaaatcccactaatacctctggaactacccgcagatgtgcaggaccaagtaactctatgcagcttgccagtagatctgcaggggagctggtggagtcactgaagctgatgtctctttgcctcgggtctcagctccacggttcgaccaagtatattattgatcctcagaatggcctgtccttctcttccgtgaaagtgcaggagaaaagtacgtggaagatgtgcatcagcagtaccggcaacgcagggcaagtaccagccgtaggaggcataaaattttttagcgatcatatggccgacaccacgacagaattagagcgaatcaaaagtaaaaaccttaagaataacgttcttcagctcccgctctgcgaaaagaccatcagcgtgaatatacagagaaacccaaaggagggcctgctgtgcgctagtagccctgcctcatgttgtcacgtgatttag

SEQ ID NO: 40590 - DNA, 2298 bp, Artificial Sequence
  derived and/or modified sequence
atggccgggtttaagcgcggctacgatggtaaaattgcaggcctatatgatctggacaaaaccctgggtcgggggcactttgccgtggtgaagctggctcggcatgtgttcactggcgagaaagtggctgtgaaggttatcgacaagactaaactggacacactggctaccggccacttatttcaggaggtgagatgtatgaagctggttcagcaccctaacattgtccgcctctacgaggttatcgacacacagacgaaactgtatttgatcctcgagctgggcgacgggggagacatgtttgattacataatgaaacatgaagaggggcttaatgaggatcttgcaaagaaatattttgcacagatcgtccacgccataagctactgtcataaattacacgtggtgcaccgggatttaaaacctgaaaatgtcgtcttcttcgagaagcagggactggtcaaattgacggatttcgggttctctaacaagtttcagcccggcaaaaaacttaccacaagctgcgggtctttagcctattcagctccggagattcttttaggcgatgagtacgacgctcccgctgtcgatatctggagcttaggggtgatactgttcatgcttgtatgtggccagccaccattccaggaggctaatgactcagaaactctgaccatgattatggactgtaagtacaccgtgcctagccacgtcagtaaagaatgtaaggacctaatcactaggatgctccagcgagatccaaagcgcagggcctcgctcgaagagattgaaaatcatccatggctccagggtgttgatccaagcccagctaccaaatacaatattcctctggtgtcttataagaatctgagcgaagaagagcacaattctattatccagcggatggttctgggcgacatcgccgaccgggatgctatcgtggaagcgcttgagactaacagatacaaccacataaccgccacctactttttgctcgccgaacgtatcctaagggagaagcaagagaaagaaatccagactaggtcggctagcccgtctaacattaaggctcaattcaggcagtcgtggccaacgaagatagacgttccacaggacctagaggatgatctgaccgctacaccgctttcgcacgctacagttcctcaatccccagcccgggccgctgatagcgttctcaacggccaccgctcaaaaggactgtgtgacagcgcaaagaaagacgacctacctgagctggcaggtccagctctcagtacagtccctcctgcttcactgaaaccaaccgcctcgggcagaaagtgcttattcagagtcgaggaggacgaagaagaggacgaagaagacaaaaagcctatgtccctatctacgcaagtagttctgaggaggaagccctcagtgaccaaccgcttaacgtccaggaagtcagcaccagtcttaaatcagatctttgaggagggcgaatctgacgatgaatttgacatggacgaaaacctccctcctaagttgagtaggctaaagatgaacatagcttcacccggcacagtacataaacggtaccatcggcggaagtcacaggggagagggagcagctgcagctcaagcgagaccagcgacgatgacagcgagtcacgcagacggctcgacaaggattctgggttcacatattcatggcaccggcgggattcctccgaaggtccacctgggtcagagggcgacggcggaggtcagagcaagccatctaatgcctcaggaggcgtcgacaaggcctctccctctgaaaataacgccggtggtggcagcccgtcttctggatcaggagggaatcctacaaatacttccgggacgactaggcggtgcgccgggccatctaactccatgcagctcgccagcaggtctgccggagaactggttgaaagtctgaaattaatgagcctgtgcctaggtagccagctccatggcagcaccaaatatattattgacccccaaaatggcttgagcttttcatccgtcaaagtgcaggagaagagtacctggaaaatgtgcatcagcagtacaggtaacgccggacaggtgcccgccgtgggcggcataaagttcttcagtgatcacatggcagatactacgaccgaactggagcgtatcaagtcgaagaatctcaagaacaacgtcctgcagttacccctttgtgagaaaaccatttccgtgaatatacaacgcaatccgaaagagggcctcctgtgtgcttcctccccagcatcttgttgccatgtgatttag

SEQ ID NO: 40591 - DNA, 2298 bp, Artificial Sequence
  derived and/or modified sequence
atggctggatttaagagaggttatgacggcaagatcgctggactttatgacctcgataaaaccctgggacggggccattttgcagtcgtgaaacttgctagacacgtgttcactggcgaaaaagtggctgtgaaggtcatcgacaaaaccaaactggataccctggccacaggccatctttttcaggaagtgcgctgcatgaagctggtgcaacaccccaatatagtgagattgtacgaagtcatagatacccagactaagctgtatctcatcctggaactgggggacggcggcgatatgttcgactatattatgaagcacgaggagggactgaatgaagatcttgcaaaaaaatactttgcccagatcgtgcacgctatttcatattgtcataagctgcatgtggtgcatagggatttaaagcctgaaaacgtggtgttcttcgagaaacaggggctcgtaaagttaaccgactttggcttctctaataaatttcagccaggcaaaaaactcactacctcttgcgggtctctggcttacagtgccccggaaatcctacttggagacgagtacgacgcccccgcagtggacatctggtcattgggcgtcattctgttcatgcttgtatgcgggcagccgccatttcaggaagccaacgactccgagactctgaccatgatcatggattgcaaatatacggtaccgagtcacgtaagcaaagaatgcaaggaccttatcacgaggatgctccaacgagatcccaaacgccgggcaagtctggaagagatcgagaaccacccttggctgcagggtgtcgaccctagccctgcaacaaagtacaacatccctctggtgtcgtacaaaaatctctcagaagaagagcacaatagcatcatccagagaatggtgctgggcgatattgctgatcgcgatgcgatcgtggaagcactggaaacgaaccgctacaatcacatcacagccacatacttccttctggccgaaagaatcctgagggagaaacaggaaaaagagatccagaccaggtctgcctccccaagcaacatcaaggctcagttccgccaaagctggccaactaagatcgatgtgccccaggatcttgaagatgatcttaccgccacgcccctgagccacgctactgtaccacagagcccagctcgtgcagcagactctgtgctgaacggtcaccggagcaaaggattgtgcgattcagccaaaaaagatgatttgcctgaactcgccggccctgctctttccacggttcccccggcctccctaaagcccaccgcttccggcagaaaatgcttattccgcgttgaggaagatgaggaggaggatgaggaggataagaagcccatgagccttagtactcaggtcgtgcttaggcgaaagccatccgttaccaataggctgacttccaggaagtcagcccctgttctcaaccagatcttcgaagagggggagtccgacgatgaatttgatatggatgagaacttgcctcccaagctatctagactcaagatgaatattgccagtccaggaaccgtgcataagagatatcacagacgcaagagccagggccggggatcatcgtgtagctccagcgaaaccagcgatgacgactcagagtctagaagaagacttgataaggactcgggatttacatactcctggcacaggagagattcctctgagggccccccgggctcagagggagacgggggggggcaatccaagcccagcaacgctagcggtggcgtggacaaggcctcccctagcgaaaataacgccgggggaggttccccctcatccggatccgggggtaaccccaccaacacctctggaacgacgagaagatgcgcagggccttctaattccatgcaactggcctcccggtcggctggggaactcgtcgagtccttaaagctgatgagcctttgcctgggcagccagttacatgggagcaccaaatacattatcgaccctcagaacggactgagcttttcaagtgtgaaggtccaagagaaatcaacatggaagatgtgcatctcaagcaccggcaacgcaggccaggtgcccgccgtggggggtattaagttctttagtgatcatatggcagacacaaccaccgagctggaacgtatcaaatccaagaatctgaagaataatgtgttgcagttgcccttgtgtgaaaagacaatttcagtaaacatccaacgcaaccctaaagaagggttgctctgcgctagttctccggcctcctgctgccacgtcatctag

SEQ ID NO: 40592 - DNA, 2298 bp, Artificial Sequence
  derived and/or modified sequence
atggccggcttcaagaggggctatgatggcaagattgctggcctgtatgacctggacaagaccctgggccggggccactttgctgtggtgaagctggcccggcacgtgttcaccggggagaaggtggccgtgaaggtgattgacaagaccaagctggacaccctggccaccggccacctgttccaggaggtgcgctgcatgaagctggtgcagcaccccaacatcgtgcggctgtatgaagtcatcgacacccagaccaagctgtacctgatcctggagctgggagatggaggagacatgtttgactacatcatgaagcatgaggagggcctgaatgaagacctggccaagaagtactttgcccagatcgtgcacgccatctcctactgccacaagctgcacgtggtgcaccgggacctgaagccagaaaatgtggtgttctttgagaagcagggcctggtgaagctgacagactttggcttcagcaacaagttccagcccgggaagaagctgaccaccagctgtggcagcctggcctacagcgcccctgagatcctgctgggagatgaatatgatgccccagctgtggacatctggagcctgggcgtcatcctcttcatgctggtgtgtggccagccccccttccaggaggccaatgattctgagaccctgaccatgatcatggactgcaagtacacagtgcccagccacgtgtccaaagaatgcaaggacctgatcaccaggatgctgcagagggaccccaagaggcgggccagcctggaggagattgagaaccacccctggctgcagggcgtggaccccagccctgccaccaagtacaacatccccctggtgtcctacaagaacctgtctgaggaggagcacaacagcatcatccagaggatggtgctgggggacattgctgacagagatgccatcgtggaggccctggagaccaaccgctacaaccacatcacagccacctacttcctgctggccgagcgcatcctgcgggagaagcaggagaaggagatccagaccaggtctgccagccccagcaacatcaaggcccagttccggcagagctggcccaccaagattgatgtgccccaggacctggaggatgacctgacagccacccccctgagccacgccaccgtgccccagagccctgcccgggctgctgacagcgtgctgaatggccacaggagcaagggcctgtgtgacagcgccaagaaggatgacctgcctgagctggccggccctgccctgagcacagtgcccccagccagcctgaagcccacagccagcggcaggaagtgcctcttccgggtggaggaggatgaggaggaggatgaggaggacaagaagcccatgagcctgagcacccaggtggtgctgcggaggaagcccagcgtgaccaaccggctgaccagcaggaagagcgcccctgtgctgaaccagatctttgaggagggggagagtgatgatgaatttgacatggatgagaacctgccccccaagctgagccggctgaagatgaacatcgccagccctggcaccgtgcacaagcgctaccacaggaggaagagccagggccggggcagcagctgcagcagcagcgagaccagtgatgatgacagcgagagcagaagaaggctggacaaggacagcggcttcacctacagctggcaccggcgggacagcagcgagggccccccaggctctgaaggagatggcggcggccagagcaagcccagcaatgccagcggcggcgtggacaaggccagccccagcgagaacaatgccggcggcggcagccccagcagcggcagcggcggcaaccccaccaacaccagcggcaccacccggcgctgtgccggccccagcaacagcatgcagctggccagccgctctgctggggagctggtggagagcctgaagctgatgagcctgtgcctgggcagccagctgcacggcagcaccaagtacatcatcgacccccagaatggcctgtccttcagctctgtgaaggtgcaggagaagagcacctggaagatgtgcatcagcagcactggaaatgccggccaggtgcctgctgtgggcggcatcaagttcttcagtgaccacatggctgacaccaccacagagctggagcgcatcaagagcaagaacctgaagaacaacgtgctgcagctgcccctgtgtgagaagaccatctctgtgaacatccagaggaaccccaaggagggcctgctgtgtgccagcagccctgccagctgctgccacgtgatctag

SEQ ID NO: 40593 - DNA, 2298 bp, Artificial Sequence
  derived and/or modified sequence
atggccggcttcaagcggggctacgacggcaagatcgccggcctgtacgatctcgataaaacacttggccggggccacttcgccgtcgttaaactggctcggcacgtgttcaccggagaaaaggtggccgtgaaagttattgacaagaccaaactcgacaccctggccacagggcacttgttccaagaagttcggtgtatgaagctagtgcagcaccccaatatcgtgcggctatacgaagtgattgacacgcagacaaagttgtacctaatcctcgagctcggtgacgggggggatatgtttgactacatcatgaagcatgaagaaggtctgaatgaggacctggccaaaaagtactttgcacagattgtgcatgcgatttcatactgtcacaagctgcacgttgtccaccgggacctgaaaccagaaaatgtggtgttttttgaaaaacagggtctggtgaaattgactgacttcggctttagcaacaaattccagccagggaagaagcttaccacaagctgcggctcactggcttattccgctccagaaatactattaggtgacgaatatgacgctcctgctgtcgacatatggagtctgggtgtgatcctgtttatgctagtctgcgggcagcctccattccaagaggccaacgattctgagacactgacaatgatcatggactgcaagtacacagtcccgtcccatgtgagcaaagagtgtaaggaccttatcacaagaatgctgcagcgggatccaaagcgcagagccagccttgaggagatcgaaaatcacccttggctgcagggcgtagacccctcaccggcaacaaagtacaacatcccgctcgttagttacaagaatctctctgaggaggaacacaatagcattatacaacggatggtcttgggtgacatcgcagatcgagatgccatagtggaggccttagaaaccaatcgctataatcatattaccgccacatacttcctcctcgccgaaagaattctccgagagaaacaggaaaaggaaattcagactaggagcgcctccccgagcaacatcaaagcccagttccggcagagctggcctactaaaatcgacgttccgcaggacctggaggacgatctcactgcaacgccattatcacacgcaacagtgcctcagtcgccagccagagccgccgatagcgttctcaacggtcataggagcaaaggtctttgtgactccgctaagaaagacgacctgccagaacttgccggtcctgccctgagtaccgtcccaccagcgtcgctgaagcctaccgcctcagggaggaaatgccttttcagagtggaggaggatgaagaagaggacgaggaagacaagaagccaatgagcctcagtacacaggtcgtcttacggcgcaaaccgtcagtcactaatcgactcacgagtcgcaaaagcgcacccgtgttgaatcaaatcttcgaggaaggcgagagcgacgacgaattcgacatggacgagaacctgcccccgaaattatcaaggctcaagatgaatatcgcatctcctgggacggttcataaacggtatcataggcggaagtctcaaggtcgggggagtagctgttctagcagcgagacttccgacgatgactctgagtctcggaggaggctagataaggacagcggcttcacctattcctggcaccggcgagatagctccgagggaccccctggatccgaaggcgacggagggggacagtcaaagcctagtaacgcgagcgggggcgtcgacaaagcaagcccgtccgaaaacaatgcaggaggcgggtctcccagcagcggctcaggggggaaccccaccaacacaagcggcacaacgcgtcggtgtgcgggcccaagtaacagcatgcagcttgcctctcgttctgccggagaacttgtggaatcgttgaaacttatgagtctctgtctaggttcgcaactgcacggcagcacaaagtacattatagatccccagaatggtctaagttttagtagcgtgaaagttcaggagaagtccacctggaagatgtgtatctcctctacggggaacgctggccaggtcccagcagtgggcggcatcaagttttttagcgatcacatggccgacaccaccaccgagttggaacggatcaagtctaaaaacctgaaaaataacgtccttcagctgcctttgtgtgagaaaactatttcggtgaacatacaaaggaatcccaaagagggtctgctctgcgcaagctcacccgctagttgctgccatgtgatctag

SEQ ID NO: 40594 - DNA, 2298 bp, Artificial Sequence
  derived and/or modified sequence
atggccggcttcaagcggggctacgacggcaagatcgccggcctgtatgatcttgacaagactctgggaaggggacacttcgccgtcgttaagttggcacgacacgtcttcaccggggaaaaagtggctgtgaaagtgatcgacaagacaaaacttgataccctagccacaggacatctttttcaagaggttcgttgcatgaagttggtccagcatcctaatatcgtgaggctatatgaagtaattgatacccagaccaagttgtacctgatcctcgaactcggagacggcggtgatatgtttgactacatcatgaagcacgaggagggactgaatgaggacctggcgaagaagtatttcgcccagattgtgcacgcgatatcatactgccacaaactgcacgtcgtccacagagacctaaagccagaaaacgttgttttcttcgagaagcaggggctggtcaagttaacagattttggattttccaataaattccaaccggggaaaaaactaactacatcctgcggctcactggcctacagtgcccccgagatcctgttaggtgacgagtacgatgcccccgccgtcgacatttggtcccttggggtaatcttgtttatgcttgtgtgcggtcagccaccctttcaagaggctaacgactcagaaaccttaaccatgatcatggattgcaaatatactgtccctagccacgtgagcaaagagtgtaaagatttaatcactcgtatgctgcagcgagaccccaagaggcgcgccagcctggaagagattgaaaatcacccttggctgcaaggcgtggaccccagccccgccaccaagtataacatccctctggtgtcatacaaaaatctgtccgaggaggagcacaacagcattattcagcgaatggttctgggggacatcgctgaccgtgatgcaattgttgaggccttagaaactaaccgatacaaccatatcacggcgacttactttctgctggctgaacgaatcctcagagaaaaacaggagaaagagattcaaacccggtccgcgagcccctcaaatatcaaagctcaattccggcagtcttggccgacaaaaattgatgttcctcaggacctggaggatgatctgactgctacccccttgagccatgctacagtaccgcagagtcccgcaagggccgccgactccgtcctgaacggccacaggtctaaggggctttgcgatagcgctaaaaaggacgatctgcccgagttggcaggccccgcactcagcaccgtaccgccggctagcctcaagcctactgcaagcggaaggaaatgtctgttccgcgttgaggaagacgaagaggaagacgaagaggacaaaaaacccatgagcctgtctacacaggttgttctccgccgaaaaccatccgtcaccaaccggctcacttcaagaaagtcggctcctgttcttaaccaaatcttcgaggagggcgagtctgatgatgaattcgacatggacgaaaacctcccacctaagctgagccggctgaagatgaacatcgcctctcccggaacagtgcacaagaggtaccacaggcgcaagtcccaaggtagagggtcatcctgcagctcctccgaaacatccgatgatgactccgaaagccgccgcaggctggacaaagactccggatttacgtactcttggcataggagggatagctccgagggccctccaggatccgaaggcgatgggggggggcagtcaaaaccctctaatgcatcagggggcgtcgacaaggcctcccctagtgaaaataatgcagggggaggctcccccagttcaggcagcgggggtaatcctactaatacatccggcaccacccgacgatgtgctggtccctccaacagcatgcaactggcaagtcggtccgccggcgagcttgtggagtcactaaaactgatgagtctgtgtctcgggagccagctccacggaagcaccaaatacatcatcgatcctcagaacggcttaagcttttcttccgtcaaggtgcaggaaaagagcacatggaaaatgtgcatcagctcaacggggaatgcaggccaggtcccagcagtgggcgggatcaagttcttctctgaccatatggcagatacaactactgaactggaaagaataaagagcaagaacctgaagaacaatgtgctgcagctgccactgtgcgagaaaacaatcagtgtcaacatccagcggaacccgaaagagggactcctttgcgcctcttctcccgctagctgctgtcatgtgatttag

SEQ ID NO: 40595 - DNA, 2298 bp, Artificial Sequence
  derived and/or modified sequence
atggccggcttcaagcggggctacgacggcaagatcgccggcctgtatgatttggacaagaccctcggccgtgggcacttcgctgtggttaagctggcaaggcacgtttttacaggagaaaaagtggccgtcaaggtcatagataaaaccaagctggataccttagccaccgggcacctatttcaggaggtgagatgcatgaagctcgtccagcaccccaatatcgtgcggttatatgaagtgatagacacgcaaaccaagctctatctgattttggagttgggcgatggaggcgacatgtttgattacatcatgaagcacgaggagggcctgaatgaagatcttgctaagaagtacttcgcccagatagtgcacgccatttcctattgtcacaaattacacgtagttcacagggatcttaagccagagaatgtggttttctttgaaaagcaggggttggttaaactgactgacttcgggttctccaataaatttcagcctggcaagaagctgacgactagttgcggaagcctggcttacagcgctcccgaaatcctcttgggggacgagtatgatgcgcccgctgtcgatatttggagcctgggggtgatcctattcatgctggtttgcgggcagccacctttccaggaggcgaacgattcagaaacattaactatgattatggactgtaagtataccgtgccttcccatgtttccaaggagtgcaaggatctaatcactcgcatgctgcagcgcgacccaaaaagacgagctagcttagaggaaatcgagaatcatccatggcttcagggcgtggatccaagccctgcgacaaagtacaatatccctttagtcagttataagaatcttagcgaggaagagcataattccatcatccaacgcatggtactcggagacattgcagaccgcgatgcaatcgtcgaggctttggagactaaccgttacaaccatataaccgctacatattttctccttgcagagcgtatcttaagagagaagcaggagaaggagattcagactagatccgctagcccatccaatatcaaagcccagtttcgacagagctggccaacgaagattgacgtgcctcaagatttagaggatgacctaacggctacccccctgtctcatgcaactgtgcctcagagtcccgcacgcgcagccgatagcgtgctgaatgggcaccgatctaagggactgtgtgattccgccaaaaaggacgacttaccagagctagcaggtccagccctgtcgaccgtcccacccgcctctctcaagcctaccgctagcgggcgaaaatgtctattccgagtggaagaggacgaggaagaagatgaagaggataagaaaccaatgagccttagtacacaagtggtgttacggcgcaaaccaagcgtgactaacaggctcacatctcggaagtccgcgcctgtcctgaaccagattttcgaagaaggcgagtctgacgacgagtttgacatggatgagaatctcccaccaaaactcagcagattgaagatgaacatagcatcgcccggcacagttcacaagagataccaccgtaggaaaagccaaggacgggggtcttcctgctcaagttccgaaaccagcgacgatgacagcgaatcccgtcggagattagataaagactctgggttcacctactcctggcataggagggactctagcgagggaccgccaggctcagaaggggacgggggggggcaatctaagcccagtaatgcatcaggcggagtggataaggcatccccaagtgaaaataatgcaggaggagggtcgccaagctcggggagtggagggaaccctaccaatacctctggaacgacccgccgctgcgctggaccttctaactccatgcagttagcttcgcgatctgccggcgaattggtcgaaagcctgaagctcatgtctctctgcttagggtcacaattgcatgggagtacaaaatatatcatcgacccacagaatggattatcattttcatccgtgaaggttcaggaaaaatcaacctggaagatgtgtatctcaagtactggaaacgctggtcaggtacccgctgtcggcgggatcaagtttttcagtgaccatatggcggacactacaaccgagcttgaacggatcaaaagcaagaacttgaagaataatgttcttcaactgcccctgtgcgagaaaacgattagcgtgaatattcaacgtaatccaaaggaaggcctactctgcgccagctcccctgccagctgttgtcacgtcatttag

SEQ ID NO: 40596 - DNA, 2298 bp, Artificial Sequence
  derived and/or modified sequence
atggccggattcaaacgtggttacgacggaaagatcgccggtttgtacgacctggacaaaacactaggcagaggtcattttgccgtggtcaagctcgctcggcacgtcttcactggcgaaaaggtggccgtaaaggtgatcgacaagactaagttagatacgttagcaaccggccacctatttcaagaagtgaggtgtatgaaactcgtgcagcatccaaacatagtgaggctctacgaggtgatcgatacccaaaccaaactttaccttattctggagcttggggacggcggtgacatgttcgactacatcatgaaacatgaggaaggtctgaatgaagacttggctaagaagtattttgctcagattgtgcatgcaataagctactgtcacaaactccatgtcgtacatagggaccttaaaccagagaacgtggtgttcttcgagaaacaagggcttgtgaaactaactgacttcgggttctcaaacaaatttcagcccggaaagaaactgaccactagttgtggatccctggcctactccgccccagagattctattaggcgatgaatacgatgcacctgcagttgatatttggagcctgggggtgatactatttatgttggtgtgcggccagccaccatttcaggaagccaatgactccgaaactctgacgatgattatggattgcaagtacacagtcccaagtcatgtgtcaaaggagtgcaaggatttgatcacccgcatgctccagcgggatcctaagcgacgcgcttcactggaagagatcgaaaatcacccgtggctgcagggagttgatccctcaccagcaactaagtacaatatccccctggtttcatacaaaaatctgagcgaggaggaacataactccattatccagcggatggtcttgggcgatattgccgatagagacgcgattgtcgaggctctggagacaaacaggtataaccatatcaccgctacatatttcctactagcagaaagaatcttgcgggaaaagcaggaaaaggaaattcagactcgctctgcctcaccgtctaatattaaagcccagttcaggcagtcttggccaacaaagatagatgtgccccaagacctcgaggatgatttaacagcaacaccactgtcgcatgctaccgtgcctcagtcacctgctcgggcagcggactctgtgctgaacggccatcggagcaaggggctgtgcgattcggcaaagaaagatgacctcccagagctagctgggcctgccctgagtacagttcctcccgcatcacttaaaccgacagccagcgggagaaagtgcctgttccgggtggaagaagacgaagaggaggacgaagaggacaaaaaaccaatgtccctatccactcaggtcgtactgcgtaggaagccaagcgtcacgaacagattgaccagtaggaagtcagcaccggtcttgaatcaaatttttgaggagggggaatccgacgacgagttcgatatggacgagaaccttcctcctaaacttagtcgcttgaaaatgaacatcgcctcccctggtacggttcacaaacgttaccaccgccgaaagtcccaaggaaggggctcatcctgctcttcgagcgaaacttctgatgacgactcggaaagtcggaggagacttgataaggattccggcttcacgtatagttggcaccgcagagactcaagtgagggcccaccgggttcggaaggcgatgggggaggccaaagcaagcccagcaatgccagcggtggagttgataaagcttcgccctcagaaaacaacgccggaggaggctcaccttctagcgggtccggcggaaacccaactaacacctcaggtacaacccgacgctgtgctgggccatctaacagtatgcagttggctagccgaagtgcaggggagctggtcgaaagcttaaaactcatgtctctctgcctgggaagtcagctgcacggtagtaccaaatacatcattgacccccagaacggcttatccttttcttctgtcaaggtacaggagaaaagcacatggaagatgtgtatttcctctactggaaatgccggacaagtaccagccgtgggagggatcaaatttttctcagatcatatggccgatacaaccaccgagctggagcggattaaatcaaagaacttgaagaataatgtgctccagctgccactgtgtgaaaaaacgatttctgttaatatccagcggaacccgaaagagggactcttatgtgctagctcccccgcttcgtgttgccatgttatctag

SEQ ID NO: 40597 - DNA, 2298 bp, Artificial Sequence
  derived and/or modified sequence
atggccggattcaaaagaggctatgacggaaagattgctggcttgtacgaccttgacaagacacttgggagagggcactttgcagttgttaaattagccaggcacgtcttcacgggggaaaaggttgctgtgaaggtgattgataaaaccaagctcgacacactggcaactggtcaccttttccaagaagtcaggtgtatgaagttagtgcagcatccaaatattgtgagactttacgaggttattgacacccagactaagctctacctgatcctcgagcttggcgatggaggagacatgttcgattacataatgaagcatgaagagggactgaatgaggatctggccaaaaagtactttgcccagatagtgcacgccatatcttattgtcataaacttcatgtagtacacagggacctgaagcccgaaaatgtggtttttttcgaaaagcaaggtctggtgaagctcactgactttggattttcgaacaaattccagcccggaaaaaagcttaccacatcatgcgggtctctcgcctactccgccccagagattctcctgggcgatgaatacgacgcccctgcagtagacatttggtccttaggcgttattctgtttatgttggtctgcggccagccacccttccaagaagccaacgactctgagaccttgactatgatcatggactgtaaatacactgtgccttcacatgtctcaaaagagtgtaaagatctgatcacgcgcatgctgcagagggatccgaagaggagagcttcactggaggaaattgagaaccacccatggctgcaaggcgtggacccctcccctgcaacaaagtacaatatacctctggtgtcctataagaacctgtccgaagaagagcataattctattatccagcgcatggtgcttggcgacatcgcggatcgcgacgctatcgtggaggccctcgagacaaaccgctacaatcacattactgccacctacttcctgctagctgagcgtattctgcgtgagaagcaggagaaggaaattcaaacacggtctgccagcccttctaacataaaagctcagttcaggcaatcttggcccaccaaaatcgacgtgccacaggaccttgaggatgatctgactgccacccccctgagccatgcgacggttccccaaagcccagctcgtgccgctgatagtgttctgaatggacaccgtagcaaaggcctttgcgacagcgcgaagaaggacgacttgcccgagttagcaggaccagctctctctaccgttccaccggctagtttgaagcctacagcgtccggcagaaagtgtctgtttcgggtggaggaagacgaggaagaggacgaagaggataaaaaacctatgtccttgagtacccaggttgtgctgcgccgaaaaccttcagtgacaaataggctgacgtctaggaagtctgcccctgtgttgaatcaaatcttcgaagagggagagagcgacgacgagtttgatatggatgaaaaccttccccctaaactctctcgcctcaagatgaatatcgcctctcctggaacggtgcacaaaagataccatcgcagaaagtcccaggggagaggctccagctgtagctccagcgaaacctctgatgacgactctgagagtaggagaaggctagataaagacagtgggttcacttatagctggcataggagagactcttcagaaggtccacctgggtcggaaggcgacggcggtggccagtccaagccaagcaatgcaagtggaggggtagataaggcttcaccatctgagaataacgccggaggcggaagcccatcatcgggatcgggtggtaacccaaccaacacgtccggtactactagaaggtgcgccggtccctctaacagcatgcagctcgctagtcggagtgctggagaattggtcgagagccttaaactcatgagtctctgcctgggctctcagttgcacgggtccacaaaatacattattgacccccagaatggcctgtctttctcgtcagtaaaggtgcaggaaaaatccacctggaaaatgtgtatcagctctacaggcaatgccggacaggtgcctgccgtgggcggtattaaatttttctccgaccacatggccgatacgactacagaactggaacgcattaaaagtaaaaaccttaagaacaatgtacttcagctgccattatgtgagaagaccatttccgttaacatccaaagaaacccgaaagaaggcttgctctgtgctagttcccccgcatcttgttgccatgtcatctag

SEQ ID NO: 40598 - DNA, 2298 bp, Artificial Sequence
  derived and/or modified sequence
atggctgggttcaaacgcggatacgacgggaaaattgctggcctgtacgatctggataagacactgggcagaggtcacttcgcggtagtaaagctggctcgccatgttttcactggcgagaaagtcgctgtgaaagtgatcgacaagacaaagctagacaccctggcgaccggccacctttttcaggaggtgcgatgcatgaagctggtacagcacccgaacatcgtgagactctacgaggtgatagatacccagacaaaactgtacctgatactcgaactgggtgacggcggtgacatgttcgactacatcatgaagcacgaagagggccttaatgaagacttggctaagaagtatttcgcccagatcgtacacgccatttcctattgccataagctccacgtggtgcaccgtgacctgaaaccagagaatgttgtttttttcgagaagcaaggcctggtgaaacttacagacttcggcttttcaaacaaatttcagcccggtaagaaacttactacctcctgcgggagcctggcctacagtgcccctgaaatcctcctgggagacgagtatgatgctccggctgtcgacatctggtcacttggcgtgatcctcttcatgcttgtgtgcggacagcccccatttcaggaggcaaacgactcagagacacttacaatgattatggactgtaaatatactgttccttcacacgtgagcaaagaatgtaaggaccttatcaccagaatgctgcaaagggacccaaaaagacgcgcatcactggaggagattgagaatcatccctggttgcagggtgtcgatccctcacctgcaacaaagtacaatatccctctggtgtcttacaagaatctgtccgaagaggagcataatagcatcatccaacggatggtcctaggagacatcgccgacagagacgcaatcgttgaagctttggaaaccaatcggtataaccacattactgccacttacttcctcttggcagaaagaatcttgcgagagaagcaagaaaaggaaattcagacgcgaagcgctagccccagcaacattaaagcgcaatttcggcagagctggcccacaaaaatcgatgtgcctcaggacctcgaggatgatcttacagccacgccgctatcacatgcaactgttccacagagccctgctagggcagctgactcagtcctgaatgggcatcgctcaaaaggcctatgtgactcagccaagaaggatgacctgcctgaactcgcaggaccagctctgtcgaccgtgcccccagccagcctgaagcctactgcatccggacggaagtgtctgttcagagttgaggaagacgaagaagaagacgaagaggacaaaaagcctatgtctctgagcacccaggtggtgctgcgccgaaagccctctgtgaccaaccgactaacctcaaggaaatcggcacctgtactgaaccagattttcgaagagggggagtcagacgacgaatttgatatggacgaaaaccttcctcctaagttaagtaggctaaagatgaacattgcctcccctggaaccgtccacaaaaggtaccatcgaagaaagtcgcaggggcgtggctcttcctgctcctcttctgagacctccgacgacgactctgaaagtcggcgacgccttgacaaagatagcggtttcacttactcgtggcacagacgagacagtagcgaggggccacctgggtctgagggcgacggaggcggacagtctaaaccatccaatgcatctggtggcgtggataaggcaagcccatccgaaaacaatgcaggagggggatcaccttccagcggtagcgggggaaatccaactaatactagcggcactacaaggcgatgcgccggaccttcaaatagcatgcagcttgcgtcaagatcagctggagagctggttgagtcactgaaattgatgagcctctgcttaggctcccagctgcacggctcgactaaatacatcatagatccccagaacggtctatccttctcatccgttaaagttcaggagaagagtacgtggaagatgtgcatcagcagcaccgggaatgccggtcaggtgccagccgtcgggggaataaagttttttagtgaccatatggctgacaccaccaccgagctggagcggatcaaatccaagaatcttaagaataacgtcctgcagttacccctgtgcgagaaaactatatctgttaatatccaaagaaaccccaaagagggtctgttatgcgccagcagtccggctagttgctgtcacgtgatctag

SEQ ID NO: 40599 - DNA, 5183 bp, Artificial Sequence
  derived and/or modified sequence
agctacccggcaccccctccccgcggccggcagcccgctcggtattatgattagcgctgggtgcggggtttcggcggccgggagggagttgtcggcgccgcggccgctgcggacggacgctcgcctgccggctgaggaaaaagaagcaactaacaaaacactgtgataataaggattattcagtatgcagtttgcaggatatccatgacgacattgaaaatgaattttttgtattcaccagatattcttatatgagaagatctattttaaacagtctaaatattttttcttctgttggaccagcatggcaggatttaagcgagggtatgatggaaagattgctggattatatgatctggataaaaccttgggtcgaggccattttgccgtggttaaacttgccaggcatgtctttacgggtgaaaaggtggcagtaaaagttattgacaagacaaaactggacactctagctactggtcatcttttccaggaagtgagatgcatgaaactagtgcagcatcctaacatcgtccgcctttatgaagttattgacacccagaccaaactatatcttattctagaacttggggatggaggagatatgtttgattatataatgaaacatgaggagggtcttaatgaagacttggccaagaagtattttgctcagatagttcatgctatatcttattgccataaactccatgtggttcacagagacttaaaaccagagaatgtagtcttctttgaaaaacaaggtcttgtaaagttgacagactttgggttcagcaacaaatttcaaccagggaagaagctcactacaagctgtggatctcttgcatattccgctccagaaattctgcttggtgatgagtatgatgcacctgcagtagatatttggagtctgggagtgatccttttcatgttggtgtgtgggcagccgccctttcaagaagccaatgacagtgaaacactgacaatgatcatggattgcaaatatacagtaccatcccatgtgtctaaagagtgtaaagacctaatcacacggatgctacagagagatcccaagagaagggcttctttagaagagattgaaaatcatccttggcttcagggagtggacccttcaccagctacaaagtataacattccccttgtgtcatacaaaaatctctcggaagaggagcacaacagcatcattcagcgcatggtgcttggggacatagcggatcgagacgccattgtagaagccctggaaaccaacaggtataaccatatcacagccacatacttcctgctggctgaaaggatcctgagagaaaagcaagagaaagaaatacagaccagatctgcaagcccgagcaatatcaaggcccagtttaggcagtcatggccaaccaaaattgatgtaccccaggaccttgaggatgacctcacggccactcctttgtcccacgcgactgtccctcagtctcctgctcgggctgctgacagtgtcctcaatggccacaggagcaaaggcctgtgtgactcagctaagaaagatgacctccctgagttggctggaccagcactctctacggtgccacccgcaagcttaaaacccacagccagtgggcggaagtgtctgttcagggtggaagaagatgaagaggaagatgaggaggacaagaaacccatgtccctctcaacacaagtggttttgcgccggaagccatctgtaaccaaccgcctgacatccaggaagagtgcgcccgtcctcaaccagatctttgaggaaggggaatctgacgatgagtttgacatggatgagaatctgcctcccaagttgagcaggttaaagatgaatatagcttctccaggtacagttcacaaacgctaccaccggaggaaaagtcagggccggggctccagctgcagtagttcggagaccagtgatgatgattctgaaagccggcggcggctcgataaagatagcgggttcacctactcctggcaccgacgggatagcagcgaggggccccctggcagtgagggggatggcgggggccagagcaagccaagcaatgccagtggaggggtggacaaggccagccccagtgagaacaatgctggtgggggcagtccctccagcggctcgggtggcaaccccaccaatacatcgggtaccacacgccgctgtgccggccccagcaactccatgcagctggcctctcgcagtgctggggagctcgttgagagcctcaaactcatgagcctctgcctcggctcccagcttcatgggagcaccaagtacattattgatccacagaatggcttgtcattttccagtgtgaaagtccaagagaaatctacgtggaaaatgtgcattagctccacagggaatgcagggcaggtccctgcagtgggcggcataaagtttttctctgaccacatggcagataccaccactgaattggaacggataaagagcaagaacctgaaaaataacgtgctgcagctacctctgtgcgaaaagaccatctctgtgaacatccagcggaaccctaaggaggggctgctgtgcgcatccagcccagccagctgttgccatgtcatctgactgtggccccatctggccgctagcacgcttcctgctcagagcagtgaagaccggctcacttcactgttccatttggttttactattttaaagtgggcgttaggagcaattatttattacctttccatttgttcgcctgatgatgtgacaatgcatggtctttgtgcatgctgctagacacttttctttcccagccgaaaagcctattatgtaatttttacattcataattttaatgtggatgatcaggattaaatcaagatatatatctggaacctcttataaatggagcacttagaaatttgttgttctgcacttaacctagagagagaaaaaatgcttttctttgtgaaaaatctgaattcctgtcctgaccttctgtgatgtggaaaccctaggctctgagacacactctctggtgtctgagacagaaccaaagcaataacgttgtgatgcccacaggcctggagccagctagcgaccttgtgccgcccagctgtccatggcccgtgcagagcagaggacagtgagtgtctgcactgagaaccttaaaccacagttgaacatacccacacctgtttgtcttaagctatagtgtaaaaacaaagtttgggctctgaaaatttaactgaaaaagatttccttgtttttgtaataggtgagataaagtacttagatttataaggcagcttcccctgtagtgataaattacaagcagacaatcttattttgtaatgtgatgaagtgatgatgtcttaactctacttagagagtgtatgtctgtctaacagaacaaaaagatgctctgtgtaaattccttcctgtagggcacactgcaggatttccatgtagatagaagaactatagggcctagtacagaaggtgcacacaaatgttggcaaagtcaaaaccccatgaattaaaacctactggaatttggtttttaggagtttggtaattagattatctcttttgttattttcattcagttatatcctttggctcagctagctttgaaattggctgatgaaaaaatatacataaaagggtaaaattcacacatacagcaaacaaaaatgcacaaagcctgcttcgtaacttttttttctggaattgtttttcactttgcctttttctgccaaaacaataatcaaagaactcttgctttaacctattcctgtacaaagactgtttttgaccagataatcatctgttgtggcattctatcttgtaggacactgtatattgcaaattgctgattatggaaggggccagttgctgttttttcatgcagtgccctgggagtcttaaaagcagtgcttagcaacattggtgatagcatgtggctgggacccagggcccttccccactcttcagccccgagtcatgtgtctgaggtgacggactgagacgcatctggtcctgtaattcagagagtgggcacatcaccaaagaactgcattgctgtggtcactgtttcttcaagtacacactgactctgctactttaggataaatatattttactcagaactctgaatttcacagtatacttactaaactaagtaaaaatgatacttaaaatacttattttactttctagacctaggctagatgttttaagctacagctctagttcattgtgatatttataatttgaaagctatgagaatagatgtgtgggtgaagccatagaacatatttgcttgaaattcttgagcagggatcttataaagggccagaaataagatgtgtggttcacatagatagtgagcgtaacatctgtattaaacataggagagaagtttataaagggcattggcaataaactctttgttgcagctgttttccaagcagtgtaaatactttttcctgtgattatgtatagccttggaatggcaccttttaactaacccatatgtgtttggtttcaatggttttttatattcagatgtatatatggtgctcactttaggatcagcagtgttgaccatttatgctgcatagctgtattatagccttattagttgtgtggttgacccttggggtatacaaatgtcagtctgagtggtgtcttactcctttgtttataagtgaatgattgtgcatgttttgtatgtcatagtatgtcgtcacataaaagggagggagcgaaaaaccattacattaagataatattggaccaaactacttacttgctctaaacagttacttgtaccccttaacctgtcttcaaaagttgcatatagttacagtagtgtataaattaaatattgtggaaaaacagtcttgtatttttctgtatgtgtgtatatatatataattatgtacttctggcaattctatctgtatttaaagatgtgacaatcttgacaccaattttaagaatagctgtgagaccgaattaaagataatccctaccaagtgaaaattgatgtgtgttaagagggtacagaattatcaactgatttggtcagttgcttccaatgctggttgatttccctcattgtgtaaacattgacaggtatgtgacaaatgggaaaaaaaatccaaataataaagtgacatattggtgttcagcaat

SEQ ID NO: 40600 - DNA, 5128 bp, Artificial Sequence
  derived and/or modified sequence
gcagctacccggcaccccctccccgcggccggcagcccgctcggtattatgattagcgctgggtgcggggtttcggcggccgggagggagttgtcggcgccgcggccgctgcggacggacgctcgcctgccggctgagatatccatgacgacattgaaaatgaattttttgtattcaccagatattcttatatgagaagatctattttaaacagtctaaatattttttcttctgttggaccagcatggcaggatttaagcgagggtatgatggaaagattgctggattatatgatctggataaaaccttgggtcgaggccattttgccgtggttaaacttgccaggcatgtctttacgggtgaaaaggtggcagtaaaagttattgacaagacaaaactggacactctagctactggtcatcttttccaggaagtgagatgcatgaaactagtgcagcatcctaacatcgtccgcctttatgaagttattgacacccagaccaaactatatcttattctagaacttggggatggaggagatatgtttgattatataatgaaacatgaggagggtcttaatgaagacttggccaagaagtattttgctcagatagttcatgctatatcttattgccataaactccatgtggttcacagagacttaaaaccagagaatgtagtcttctttgaaaaacaaggtcttgtaaagttgacagactttgggttcagcaacaaatttcaaccagggaagaagctcactacaagctgtggatctcttgcatattccgctccagaaattctgcttggtgatgagtatgatgcacctgcagtagatatttggagtctgggagtgatccttttcatgttggtgtgtgggcagccgccctttcaagaagccaatgacagtgaaacactgacaatgatcatggattgcaaatatacagtaccatcccatgtgtctaaagagtgtaaagacctaatcacacggatgctacagagagatcccaagagaagggcttctttagaagagattgaaaatcatccttggcttcagggagtggacccttcaccagctacaaagtataacattccccttgtgtcatacaaaaatctctcggaagaggagcacaacagcatcattcagcgcatggtgcttggggacatagcggatcgagacgccattgtagaagccctggaaaccaacaggtataaccatatcacagccacatacttcctgctggctgaaaggatcctgagagaaaagcaagagaaagaaatacagaccagatctgcaagcccgagcaatatcaaggcccagtttaggcagtcatggccaaccaaaattgatgtaccccaggaccttgaggatgacctcacggccactcctttgtcccacgcgactgtccctcagtctcctgctcgggctgctgacagtgtcctcaatggccacaggagcaaaggcctgtgtgactcagctaagaaagatgacctccctgagttggctggaccagcactctctacggtgccacccgcaagcttaaaacccacagccagtgggcggaagtgtctgttcagggtggaagaagatgaagaggaagatgaggaggacaagaaacccatgtccctctcaacacaagtggttttgcgccggaagccatctgtaaccaaccgcctgacatccaggaagagtgcgcccgtcctcaaccagatctttgaggaaggggaatctgacgatgagtttgacatggatgagaatctgcctcccaagttgagcaggttaaagatgaatatagcttctccaggtacagttcacaaacgctaccaccggaggaaaagtcagggccggggctccagctgcagtagttcggagaccagtgatgatgattctgaaagccggcggcggctcgataaagatagcgggttcacctactcctggcaccgacgggatagcagcgaggggccccctggcagtgagggggatggcgggggccagagcaagccaagcaatgccagtggaggggtggacaaggccagccccagtgagaacaatgctggtgggggcagtccctccagcggctcgggtggcaaccccaccaatacatcgggtaccacacgccgctgtgccggccccagcaactccatgcagctggcctctcgcagtgctggggagctcgttgagagcctcaaactcatgagcctctgcctcggctcccagcttcatgggagcaccaagtacattattgatccacagaatggcttgtcattttccagtgtgaaagtccaagagaaatctacgtggaaaatgtgcattagctccacagggaatgcagggcaggtccctgcagtgggcggcataaagtttttctctgaccacatggcagataccaccactgaattggaacggataaagagcaagaacctgaaaaataacgtgctgcagctacctctgtgcgaaaagaccatctctgtgaacatccagcggaaccctaaggaggggctgctgtgcgcatccagcccagccagctgttgccatgtcatctgactgtggccccatctggccgctagcacgcttcctgctcagagcagtgaagaccggctcacttcactgttccatttggttttactattttaaagtgggcgttaggagcaattatttattacctttccatttgttcgcctgatgatgtgacaatgcatggtctttgtgcatgctgctagacacttttctttcccagccgaaaagcctattatgtaatttttacattcataattttaatgtggatgatcaggattaaatcaagatatatatctggaacctcttataaatggagcacttagaaatttgttgttctgcacttaacctagagagagaaaaaatgcttttctttgtgaaaaatctgaattcctgtcctgaccttctgtgatgtggaaaccctaggctctgagacacactctctggtgtctgagacagaaccaaagcaataacgttgtgatgcccacaggcctggagccagctagcgaccttgtgccgcccagctgtccatggcccgtgcagagcagaggacagtgagtgtctgcactgagaaccttaaaccacagttgaacatacccacacctgtttgtcttaagctatagtgtaaaaacaaagtttgggctctgaaaatttaactgaaaaagatttccttgtttttgtaataggtgagataaagtacttagatttataaggcagcttcccctgtagtgataaattacaagcagacaatcttattttgtaatgtgatgaagtgatgatgtcttaactctacttagagagtgtatgtctgtctaacagaacaaaaagatgctctgtgtaaattccttcctgtagggcacactgcaggatttccatgtagatagaagaactatagggcctagtacagaaggtgcacacaaatgttggcaaagtcaaaaccccatgaattaaaacctactggaatttggtttttaggagtttggtaattagattatctcttttgttattttcattcagttatatcctttggctcagctagctttgaaattggctgatgaaaaaatatacataaaagggtaaaattcacacatacagcaaacaaaaatgcacaaagcctgcttcgtaacttttttttctggaattgtttttcactttgcctttttctgccaaaacaataatcaaagaactcttgctttaacctattcctgtacaaagactgtttttgaccagataatcatctgttgtggcattctatcttgtaggacactgtatattgcaaattgctgattatggaaggggccagttgctgttttttcatgcagtgccctgggagtcttaaaagcagtgcttagcaacattggtgatagcatgtggctgggacccagggcccttccccactcttcagccccgagtcatgtgtctgaggtgacggactgagacgcatctggtcctgtaattcagagagtgggcacatcaccaaagaactgcattgctgtggtcactgtttcttcaagtacacactgactctgctactttaggataaatatattttactcagaactctgaatttcacagtatacttactaaactaagtaaaaatgatacttaaaatacttattttactttctagacctaggctagatgttttaagctacagctctagttcattgtgatatttataatttgaaagctatgagaatagatgtgtgggtgaagccatagaacatatttgcttgaaattcttgagcagggatcttataaagggccagaaataagatgtgtggttcacatagatagtgagcgtaacatctgtattaaacataggagagaagtttataaagggcattggcaataaactctttgttgcagctgttttccaagcagtgtaaatactttttcctgtgattatgtatagccttggaatggcaccttttaactaacccatatgtgtttggtttcaatggttttttatattcagatgtatatatggtgctcactttaggatcagcagtgttgaccatttatgctgcatagctgtattatagccttattagttgtgtggttgacccttggggtatacaaatgtcagtctgagtggtgtcttactcctttgtttataagtgaatgattgtgcatgttttgtatgtcatagtatgtcgtcacataaaagggagggagcgaaaaaccattacattaagataatattggaccaaactacttacttgctctaaacagttacttgtaccccttaacctgtcttcaaaagttgcatatagttacagtagtgtataaattaaatattgtggaaaaacagtcttgtatttttctgtatgtgtgtatatatatataattatgtacttctggcaattctatctgtatttaaagatgtgacaatcttgacaccaattttaagaatagctgtgagaccgaattaaagataatccctaccaagtgaaaattgatgtgtgttaagagggtacagaattatcaactgatttggtcagttgcttccaatgctggttgatttccctcattgtgtaaacattgacaggtatgtgacaaatgggaaaaaaaatccaaataataaagtgacatattggtgttcagcaatataaa

SEQ ID NO: 40601 - DNA, 2961 bp, Artificial Sequence
  derived and/or modified sequence
cacagtgacgcgcagcccgcgcaggcgcagctacccggcaccccctccccgcggccggcagcccgctcggtattatgattagcgctgggtgcggggtttcggcggccgggagggagttgtcggcgccgcggccgctgcggacggacgctcgcctgccggctgagagcctcctgagagtctgctttggcatccccagcatttggcctctgctcaggaaaaagaagcaactaacaaaacactgtgataataaggattattcagtatgcagtttgcaggatatccatgacgacattgaaaatgaattttttgtattcaccagatattcttatatgagaagatctattttaaacagtctaaatattttttcttctgttggaccagcatggcaggatttaagcgagggtatgatggaaagattgctggattatatgatctggataaaaccttgggtcgaggccattttgccgtggttaaacttgccaggcatgtctttacgggtgaaaaggtggcagtaaaagttattgacaagacaaaactggacactctagctactggtcatcttttccaggaagtgagatgcatgaaactagtgcagcatcctaacatcgtccgcctttatgaagttattgacacccagaccaaactatatcttattctagaacttggggatggaggagatatgtttgattatataatgaaacatgaggagggtcttaatgaagacttggccaagaagtattttgctcagatagttcatgctatatcttattgccataaactccatgtggttcacagagacttaaaaccagagaatgtagtcttctttgaaaaacaaggtcttgtaaagttgacagactttgggttcagcaacaaatttcaaccagggaagaagctcactacaagctgtggatctcttgcatattccgctccagaaattctgcttggtgatgagtatgatgcacctgcagtagatatttggagtctgggagtgatccttttcatgttggtgtgtgggcagccgccctttcaagaagccaatgacagtgaaacactgacaatgatcatggattgcaaatatacagtaccatcccatgtgtctaaagagtgtaaagacctaatcacacggatgctacagagagatcccaagagaagggcttctttagaagagattgaaaatcatccttggcttcagggagtggacccttcaccagctacaaagtataacattccccttgtgtcatacaaaaatctctcggaagaggagcacaacagcatcattcagcgcatggtgcttggggacatagcggatcgagacgccattgtagaagccctggaaaccaacaggtataaccatatcacagccacatacttcctgctggctgaaaggatcctgagagaaaagcaagagaaagaaatacagaccagatctgcaagcccgagcaatatcaaggcccagtttaggcagtcatggccaaccaaaattgatgtaccccaggaccttgaggatgacctcacggccactcctttgtcccacgcgactgtccctcagtctcctgctcgggctgctgacagtgtcctcaatggccacaggagcaaaggcctgtgtgactcagctaagaaagatgacctccctgagttggctggaccagcactctctacggtgccacccgcaagcttaaaacccacagccagtgggcggaagtgtctgttcagggtggaagaagatgaagaggaagatgaggaggacaagaaacccatgtccctctcaacacaagtggttttgcgccggaagccatctgtaaccaaccgcctgacatccaggaagagtgcgcccgtcctcaaccagatctttgaggaaggggaatctgacgatgagtttgacatggatgagaatctgcctcccaagttgagcaggttaaagatgaatatagcttctccaggtacagttcacaaacgctaccaccggaggaaaagtcagggccggggctccagctgcagtagttcggagaccagtgatgatgattctgaaagccggcggcggctcgataaagatagcgggttcacctactcctggcaccgacgggatagcagcgaggggccccctggcagtgagggggatggcgggggccagagcaagccaagcaatgccagtggaggggtggacaaggccagccccagtgagaacaatgctggtgggggcagtccctccagcggctcgggtggcaaccccaccaatacatcgggtaccacacgccgctgtgccggccccagcaactccatgcagctggcctctcgcagtgctggggagctcgttgagagcctcaaactcatgagcctctgcctcggctcccagcttcatgggagcaccaagtacattattgatccacagaatggcttgtcattttccagtgtgaaagtccaagagaaatctacgtggaaaatgtgcattagctccacagggaatgcagggcaggtccctgcagtgggcggcataaagtttttctctgaccacatggcagataccaccactgaattggaacggataaagagcaagaacctgaaaaataacgtgctgcagctacctctgtgcgaaaagaccatctctgtgaacatccagcggaaccctaaggaggggctgctgtgcgcatccagcccagccagctgttgccatgtcatctgactgtggccccatctggccgctagcacgcttcctgctcagagcagtgaagaccggctcacttcactgttccatttggttttactattttaaagtgggcgttaggagcaattatttattacctttccatttgttcgcctgatgatgtgacaatgcatggtctttgtgcatgctgctagacacttttctttcccagccgaaaagcctattatgtaatttttacattcataattttaatgtggatgatcaggattaaatcaagatatatatctggaacctcttat

SEQ ID NO: 40602 - DNA, 2298 bp, Artificial Sequence
  derived and/or modified sequence
atggccggcttcaagagaggctacgacggcaagatcgccggcctgtacgacctggacaagaccctgggcagaggccacttcgccgtggtgaagctggccagacacgtgttcaccggcgagaaggtggccgtgaaggtgatcgacaagaccaagctggacaccctggccaccggccacctgttccaggaggtgagatgcatgaagctggtgcagcaccccaacatcgtgagactgtacgaggtgatcgacacccagaccaagctgtacctgatcctggagctgggcgacggcggcgacatgttcgactacatcatgaagcacgaggagggcctgaacgaggacctggccaagaagtacttcgcccagatcgtgcacgccatcagctactgccacaagctgcacgtggtgcacagagacctgaagcccgagaacgtggtgttcttcgagaagcagggcctggtgaagctgaccgacttcggcttcagcaacaagttccagcccggcaagaagctgaccaccagctgcggcagcctggcctacagcgcccccgagatcctgctgggcgacgagtacgacgcccccgccgtggacatctggagcctgggcgtgatcctgttcatgctggtgtgcggccagccccccttccaggaggccaacgacagcgagaccctgaccatgatcatggactgcaagtacaccgtgcccagccacgtgagcaaggagtgcaaggacctgatcaccagaatgctgcagagagaccccaagagaagagccagcctggaggagatcgagaaccacccctggctgcagggcgtggaccccagccccgccaccaagtacaacatccccctggtgagctacaagaacctgagcgaggaggagcacaacagcatcatccagagaatggtgctgggcgacatcgccgacagagacgccatcgtggaggccctggagaccaacagatacaaccacatcaccgccacctacttcctgctggccgagagaatcctgagagagaagcaggagaaggagatccagaccagaagcgccagccccagcaacatcaaggcccagttcagacagagctggcccaccaagatcgacgtgccccaggacctggaggacgacctgaccgccacccccctgagccacgccaccgtgccccagagccccgccagagccgccgacagcgtgctgaacggccacagaagcaagggcctgtgcgacagcgccaagaaggacgacctgcccgagctggccggccccgccctgagcaccgtgccccccgccagcctgaagcccaccgccagcggcagaaagtgcctgttcagagtggaggaggacgaggaggaggacgaggaggacaagaagcccatgagcctgagcacccaggtggtgctgagaagaaagcccagcgtgaccaacagactgaccagcagaaagagcgcccccgtgctgaaccagatcttcgaggagggcgagagcgacgacgagttcgacatggacgagaacctgccccccaagctgagcagactgaagatgaacatcgccagccccggcaccgtgcacaagagataccacagaagaaagagccagggcagaggcagcagctgcagcagcagcgagaccagcgacgacgacagcgagagcagaagaagactggacaaggacagcggcttcacctacagctggcacagaagagacagcagcgagggcccccccggcagcgagggcgacggcggcggccagagcaagcccagcaacgccagcggcggcgtggacaaggccagccccagcgagaacaacgccggcggcggcagccccagcagcggcagcggcggcaaccccaccaacaccagcggcaccaccagaagatgcgccggccccagcaacagcatgcagctggccagcagaagcgccggcgagctggtggagagcctgaagctgatgagcctgtgcctgggcagccagctgcacggcagcaccaagtacatcatcgacccccagaacggcctgagcttcagcagcgtgaaggtgcaggagaagagcacctggaagatgtgcatcagcagcaccggcaacgccggccaggtgcccgccgtgggcggcatcaagttcttcagcgaccacatggccgacaccaccaccgagctggagagaatcaagagcaagaacctgaagaacaacgtgctgcagctgcccctgtgcgagaagaccatcagcgtgaacatccagagaaaccccaaggagggcctgctgtgcgccagcagccccgccagctgctgccacgtgatctag

SEQ ID NO: 40603 - protein, 75 aa, Artificial Sequence
  derived and/or modified sequence
MASEVGHNLESPETPGGGGWTRVEFPPPAPKGAATVWCLNRLGSRKLSLIWITFNTGWNMKSRLIILIQQVSCHH

SEQ ID NO: 40604 - DNA, 228 bp, Artificial Sequence
  derived and/or modified sequence
atggccagcgaggtgggccacaacctggagagccccgagacccccggcggcggcggctggaccagagtggagttccccccccccgcccccaagggcgccgccaccgtgtggtgcctgaacagactgggcagcagaaagctgagcctgatctggatcaccttcaacaccggctggaacatgaagagcagactgatcatcctgatccagcaggtgagctgccaccactag

SEQ ID NO: 40605 - DNA, 228 bp, Artificial Sequence
  derived and/or modified sequence
atggcctccgaagtggggcataatttggaatccccggagacaccaggtggcgggggctggactcgggtggaatttccccctccagcgccgaagggcgcggctaccgtctggtgtcttaataggcttggctcgcgaaagttatcactgatctggatcacatttaatactggttggaatatgaagtctagacttataattttgattcagcaggtgagttgtcaccattag

SEQ ID NO: 40606 - DNA, 228 bp, Artificial Sequence
  derived and/or modified sequence
atggccagcgaggtgggccacaacctggagagccctgagaccccaggcggcggcggctggaccagggtggagttccccccaccagcccccaagggagctgccaccgtgtggtgcctgaaccggctgggcagcaggaagctgagcctcatctggatcaccttcaacacaggctggaacatgaagagccgcctcatcatcctgatccagcaggtgtcctgccaccactag

SEQ ID NO: 40607 - DNA, 228 bp, Artificial Sequence
  derived and/or modified sequence
atggccagcgaggtgggccacaacctggagagccccgagacccccggtggcggaggatggacaagagttgaattcccacctcccgctcccaagggagctgccacagtgtggtgtcttaatcgacttggcagtcgcaagctttctctgatttggattacattcaacactggatggaacatgaagtcaaggttaataatcctgatccaacaagtctcttgccaccactag

SEQ ID NO: 40608 - DNA, 228 bp, Artificial Sequence
  derived and/or modified sequence
atggccagcgaagtgggccataatttggaatccccggaaacacctggtggcggaggatggacccgggtggaatttcctccccctgcccctaaaggcgcagcaacagtgtggtgcctgaatcgtttgggatcccgcaagctgagcttgatctggatcacttttaacaccggctggaatatgaagtctcgcctgattattttgatccagcaggtctcatgccaccactag

SEQ ID NO: 40609 - DNA, 2970 bp, Artificial Sequence
  derived and/or modified sequence
aactacaaaattgaaagtagagaggagggggcagccaatggaaaaaaaaatttgcacagcagccaatcctcctgcggcgttttgtgcctttgcccaacaggaaaatgtgtctcatgcagaggggcgttacccagtctccaatgggcgggagccggtggaacggaggagccaatgagtgcgagatgttgagtgacagctgtccaatggaggccctccgtgctagtacggcttgcggcttaagcgccgccgcggtctgcggaatgtcaactattcaacatggaggcggaggtcgataagctggaactgatggtgagtgcaaagtgaaggagatctactgggtagtttatttttcccccatggcctcggaggtggggcacaatttggagtcgccggaaactccgggcggcggaggctggaccagagtcgagttccctcctcctgcaccaaagggagccgccaccgtctggtgtctaaaccgcctcggttccagaaagctgagtctgatctggattacattcaatacaggctggaatatgaaatcaagactaatcatcctgattcagcaagtgagctgtcaccactgactaaagaagagaaaactgcggcagagcaattcaaatttcacatgccagatttatgaagaaatggacttggaaaggaaattctaacagagaagagcttaattccggagaaatttaggaagatgtcttgttaacccttgatgtctagagattgggggctggtgaagggggtttggcttcaatgactggataatgatatctttcatgagagagattataagaagaagggcagataatatatgaataaagttcagccaaaaggatcaaatgagaataaaacgatttaaatatatgtacacacgcatgcacacacacacttagtcttgtaatttcaggccagaaattctcaacactattttgcatctgttttctttttctaagtcatgataatatagatgttctggtctatcataaaagaatgtttatgtacatttcagtcattcggtatgtggctttgtaaattaaagtataggcaaaacatttgtgttatacatgatatataatttcattttgtaaatgttgattgcacatgtggtcacattattgttgagactgcttttatgtgacctgtagtctcccacagaacctaaagtaataagctggcttttctgtgatagccacgtttgcgtatttctttccctatttcccttgcctgctaatgttgaacagcatgaacttgctttctgatgctgttttagactgtccctgttgtatctcaataatatctttgttttccttcagcctttattactataattgttcattctacatgaaagctaggaaactgaaattagaagagcacttatctgctacttgccagttttgcgtgagtgtgttatatgtatgtgtcaatttccctttaaaataactatttattttaaaataactattggcaataaggaaactgttcaaagtagaggcagatcttgatagaaagatgttaatcacagggttgtttataatagcaatatacatacacatttggctagtactaggtgaataggaaaataaatcatgctgtatgtatacaataagaggtcaagttgccaataaattattactgttaatgttctgggaaatgctgaaactatgctaagtgggggagagggaaagcaggtattgcagttttgtagtgaagattgggctttggagtcatatctgagatgtaagtagcagcttttaaattctagctatgaccctgtgcagatcacttaacttttgagtgtcaggatgtttggaaggacaagacaggaaagtgttttaatacagggttcagtatttagtaagccttcaataagtgatattacatacatgtaataaaaactaagcattgaaaggactaggaaaaatgcatcaaatgttagttctgcaggttatagaattatacttttatgtaattttaaaatttcagttatgaacatgtttgtccattaacaaacttataatagctgaaaaacagggttgtgagaacagcttcagttaaaattgtcctgtctagtttgaatatttcaagaacagaaagcctttttttttttttttttttttttgagacggagtctcactctgttgcccaggctggaatgcagtggtacgctctcagctcactgcaacctccacctcccaggttcaagcagttctctgccccaccctcccgagtagctgggattacaggcgcccgccaccacgcccggctatttttttgtatttttagtagagatggggcttcaccatcttgaccaggctggtctttaactcctgatggtgatccacccacctcggcctcccaaagtgctgggattacaggcatgagctaccgtgcctggcccccttttttttaattacagagaaataagttacaccttagtatcagatattaattttcttcagtgttcaggcaattagtatttagaaagctcttgtcatgagatggctctgggatgtgatgatgattgttgggattgaaaaaacggtagtatcatggagagatcataataaattcttagtattaaaagtggttttgctttcagttagggagaaaaattagattgtactatttttcctctatgatttccttcagttatcttccaaatgttgttttttccccacagcccccttaacattgttctctatgcacttctcaatacattttcatttgtttctcaagcctctttgtggatgactcctaaatataacttcttccactagctctagatccgtatttccaataaaatcccctacctgaatattcaagttaaacatgtccagaatacttactgattttattgttaatagccactattctgttgtctggaattaaaacctgtataactaatttgcatccctttatcttcttagtcaataaaacctacaatcctctttctaaaatggt

SEQ ID NO: 40610 - protein, 270 aa, Artificial Sequence
  derived and/or modified sequence
MFAPRLLDFQKTKYARFMNHRVPAHKRYQPTEYEHAANCATHAFWIIPSILGSSNLYFLSDDDWETISAWIYGLGLCGLFVVSTVFHTISWKKSHLRMVEHCLHMFDRMVIYFFIAASYAPWLNLRELGPWASHMRWLVWIMASVGTIYVFFFHERTGSCVQFLRGEACPKAGTACLPARYKLVELLCYVVMGFFPALVILSMPNTEGIWELVTGGVFYCLGMVFFKSDGRIPFAHAIWHLFVAFGAGTHYYAIWRYLYLPSTLQTKVSK

SEQ ID NO: 40611 - DNA, 813 bp, Artificial Sequence
  derived and/or modified sequence
atgttcgctcccaggctccttgatttccagaaaacaaagtacgctcggtttatgaatcaccgggtgcccgctcataaaaggtaccagcctacagagtacgaacacgccgcgaattgtgcaacccacgcgttttggatcattccttctattctggggtctagtaacctttacttcctatcggatgatgactgggaaaccatcagtgcatggatctatggcctcggcctctgtggcctcttcgtagtaagtactgtgttccacaccatctcttggaaaaaaagccatctgcgcatggttgaacactgtttacacatgtttgatcgcatggttatctacttttttattgctgctagttacgcgccatggttgaacctccgtgaattaggtccttgggcttcacacatgagatggctggtttggattatggcttcagtcggcactatttacgtgttcttttttcacgaaagaaccggcagttgtgtacagttcctgcgcggggaagcctgccccaaagcggggactgcatgcctcccagcccggtataagctcgtggagctgctgtgttatgtcgtcatgggcttctttcccgccctggttatcctgagcatgcctaataccgagggaatctgggagctcgtaacgggcggcgtcttttactgtctcggcatggtgttttttaagtccgatgggaggataccctttgcacacgcaatctggcacttgtttgtcgccttcggagcgggcacccactattacgctatttggagatacctttatctcccttcaacactacaaaccaaggtttctaaatag

SEQ ID NO: 40612 - DNA, 813 bp, Artificial Sequence
  derived and/or modified sequence
atgtttgccccccggctgctggacttccagaagaccaagtatgcccgcttcatgaaccaccgggtgcctgcccacaagcgctaccagcccacagaatatgaacatgctgccaactgtgccacccacgccttctggatcatccccagcatcctgggcagcagcaacctgtacttcctgagtgatgatgactgggagaccatcagcgcctggatctacggcctgggcctgtgtggcctgtttgtggtgtccaccgtcttccacaccatctcctggaagaagagccacctgaggatggtggagcactgcctgcacatgtttgacaggatggtgatctacttcttcatcgccgccagctatgccccctggctgaacctgcgggagctgggcccctgggccagccacatgcgctggctggtgtggatcatggcctctgtgggcaccatctacgtgttcttcttccacgagaggacaggcagctgtgtgcagttcctgcggggggaggcctgccccaaggccggcacagcctgcctgcctgcccgctacaagctggtggagctgctgtgctacgtggtgatgggcttcttccctgccctggtgatcctgtccatgcccaacacagagggcatctgggagctggtgactggaggagtcttctactgcctgggcatggtgttcttcaagagtgatggccgcatcccctttgcccacgccatctggcacctgtttgtggcctttggagctggcacccactactatgccatctggagatacctgtacctgcccagcaccctgcagaccaaggtgtccaagtag

SEQ ID NO: 40613 - DNA, 2415 bp, Artificial Sequence
  derived and/or modified sequence
ctcgggatttggcgtcggcggctccgggcgcctccagctccggctcgggctccggctccggctccgggcgccgaccaggtccccttggcccccgccgcgcgccctccaacctgctgctgccgccgccgcgccccccaggctctgccagctacccgcgctctgagcccggggccagattcccatggaagcgccgcgatgttcgccccccggctgctggatttccagaagacgaaatacgcgaggttcatgaaccaccgagtccctgcccacaagaggtaccagcccacagagtatgaacatgcggccaactgtgccacccatgctttctggatcatccccagcatcctgggcagctccaacctctacttcctgtcggacgatgactgggagaccatctctgcctggatctacggcctcggcctctgcggcctcttcgtggtgtccactgtgtttcacaccatctcctggaagaagagccacctcaggatggtggaacactgtctacacatgttcgaccggatggtcatctatttcttcatagcggcttcctacgcaccctggctgaaccttcgggagctgggcccctgggcctcccacatgcgctggctggtctggattatggcttccgtgggcaccatctatgtcttcttcttccatgagcgaacagggagctgtgtgcagtttcttcgtggggaggcatgtcctaaggccggcacggcttgtcttcctgccaggtacaagcttgtggagcttctctgctacgtcgtaatgggcttcttccccgccctggtcatcctctccatgcccaacaccgagggcatctgggagctggtgaccggaggggtcttctactgcctgggcatggtcttcttcaagagtgacgggaggatcccctttgcccacgccatctggcatctctttgtagcatttggtgctggtacccactactatgccatctggaggtacctctatctgcccagcaccctgcagaccaaggtgtccaaatgaggtgacccagacttgagaggtcgtttgggctttaggagtggagcacgtttctgtgaacgttaacccagagcacagcgccaaggcctgtcttccctttattgggtagagttcttgatggctccaaggtgacttctggtgacagccagatcatccctcgagtccccagcgagaaagaaagcatttagccattcttacagaggagaaattaaccctgtaatgtgtttctattttagatgagtgtttcctaatacaagcaacattaacatcttcagaaaaggaagcaggcatggtcctggaaaattggggaatgacgggccaatctgtgtttcctaaggtcctgaagaatctggcaaagagtcctgtgggttgtttatacctgggtggccagggcctccctctctgttaccaaagtccaggctggcgaattgtctctggttcagggaaaggggacagcccagcttgaagatgagggatggtgaatggctgtgaccatggcagacatcaccaatcaagtgcagcacatgggtgatgtcagaattcttcccagcacagtgttctgggcagccagtaccaatcaatttggcactcatgatgggacctctttgcccttcctgtctggtgtgctctgaaatgggataatggccagagtagctgaaaatctccaaatgggcatttgcatgcctatctcctcatctccccctcccttttgggaaactcctggagtaggcagtttgggggcggtagagggaaactgaggcgcacacccatgcagcccctgatgttctgttccaccgtagttgattctcagtagagttgggaatgaggatgctgttacttggccatttcttcccatctccaaaaatccagagacattacgagagctattcattcataagatggggcaaacagcccccaggcacttgctccctgctccatacttaaggtttgtgatgccaacatttggattctctcttggtgccaatcagtggctgttagaggctactcaggtgtaccccaaacagaaggcacatggatctggggcgactgttccaggtcctcccaacctctgaagtgctcagtagcccaacaacaaggctgctgggggcctgttcttcagcccccgtcagggcggggccagcctctctgtccaatgctgcctggacatttactggggaggtgagtagcaggcccagctccaggatctgaattggaatctcagattctctggataaagaatctgtctcaagtcaggaggtcctcattctgcgactcccaaccagggtggagtgggcacagacaggatgccttatgcttatctctagcacattccagggggttccagggttcctgcacctggaatccagtgtgtccaagccagtattaaattatctcaacacattccacaga

SEQ ID NO: 40614 - DNA, 813 bp, Artificial Sequence
  derived and/or modified sequence
atgttcgccccccggctgctggacttccagaagaccaagtacgcccgctttatgaatcatagagtccctgcgcataaaagataccagcccactgagtacgaacatgctgccaactgcgctacccacgccttttggatcattccttcgatactgggaagctctaatctctatttcctgtccgatgacgactgggagacgatcagtgcctggatttatggcctcggcctctgcggcctgttcgttgtttccaccgtctttcacaccatctcttggaagaaatcacaccttcggatggtggaacactgtctgcatatgttcgaccggatggtaatttacttctttattgccgcaagctacgccccctggctgaacctcagagagctcggaccttgggcaagccatatgagatggctcgtgtggatcatggccagcgtgggcactatctacgtttttttctttcatgagcgaaccggctcgtgcgtgcagttcctccgcggtgaagcatgtcctaaagctggtaccgcctgcctcccagctaggtacaagttagtggaactgttgtgctacgtggtgatgggcttcttccctgctcttgtcattttaagcatgcctaacaccgaaggaatctgggagctcgtcaccggaggggtgttttattgcctgggaatggtgttttttaagtcagatgggagaatcccgttcgcccacgccatttggcacctgtttgtggctttcggcgctggcacacactattatgccatttggcgatacttgtatcttccttccacactgcagacaaaagtatccaaatag

SEQ ID NO: 40615 - DNA, 813 bp, Artificial Sequence
  derived and/or modified sequence
atgtttgcccctcgcttgctggatttccagaagactaaatatgcccgattcatgaaccatagagtgccagcccacaagcggtaccagccaacagaatatgaacacgccgctaactgcgcaacacacgccttctggataattccatccatcctggggtcttcaaacctgtattttctctcggatgatgactgggagactatctccgcctggatctatggactgggcctgtgcggcttgttcgtggtcagcacagtttttcacacaatttcttggaaaaagagtcacctccggatggttgagcactgtttgcacatgtttgaccgaatggtcatctacttcttcatagctgctagttatgccccatggcttaacttgagggaactgggtccttgggcgtcacatatgcggtggttggtgtggatcatggcctccgtcgggacaatttacgtgttcttttttcacgagcgcacaggctcctgtgtgcaatttttgcggggagaagcatgtcccaaggccggtacagcctgcttgccagcccgttacaagctggtggaacttctgtgctatgtggtgatgggtttttttcccgctctggtgatcttgtctatgcccaacacagaggggatttgggagctggtgactggcggagtgttttattgcctgggcatggtgttcttcaaatccgatgggagaatccctttcgcccacgctatttggcacctgtttgtcgcctttggagcgggaacacattattatgccatttggaggtatctgtatctgccaagtaccctccagaccaaagtgtcaaaatag

SEQ ID NO: 40616 - DNA, 813 bp, Artificial Sequence
  derived and/or modified sequence
atgttcgcccccagactgctggacttccagaagaccaagtacgccagattcatgaaccacagagtgcccgcccacaagagataccagcccaccgagtacgagcacgccgccaactgcgccacccacgccttctggatcatccccagcatcctgggcagcagcaacctgtacttcctgagcgacgacgactgggagaccatcagcgcctggatctacggcctgggcctgtgcggcctgttcgtggtgagcaccgtgttccacaccatcagctggaagaagagccacctgagaatggtggagcactgcctgcacatgttcgacagaatggtgatctacttcttcatcgccgccagctacgccccctggctgaacctgagagagctgggcccctgggccagccacatgagatggctggtgtggatcatggccagcgtgggcaccatctacgtgttcttcttccacgagagaaccggcagctgcgtgcagttcctgagaggcgaggcctgccccaaggccggcaccgcctgcctgcccgccagatacaagctggtggagctgctgtgctacgtggtgatgggcttcttccccgccctggtgatcctgagcatgcccaacaccgagggcatctgggagctggtgaccggcggcgtgttctactgcctgggcatggtgttcttcaagagcgacggcagaatccccttcgcccacgccatctggcacctgttcgtggccttcggcgccggcacccactactacgccatctggagatacctgtacctgcccagcaccctgcagaccaaggtgagcaagtag

SEQ ID NO: 40617 - DNA, 1335 bp, Artificial Sequence
  derived and/or modified sequence
atgaaagttgttccatcactcctcctctctgtcttacttgcgcaggtgtggttagttccaggactggcccctagcccccagtctccagagacacccgcgccacagaatcagactagtcgggtggttcaggccccaaaggaagaggaagaagacgaacaggaagcatctgaagagaaggccagcgaggaggaaaaggcctggctgatggcaagccgtcagcaacttgcaaaagagacatccaacttcgggttcagtctgctgcgcaaaatctcaatgaggcacgatgggaacatggtgtttagtcccttcggcatgtccttggctatgacagggctgatgctgggcgctacagggcccaccgagactcagatcaagcgggggctgcacctgcaagccctgaagcctacaaaaccgggcctcctgccctcattgtttaagggactacgcgagacgctgagccgtaatttggagcttggtctgacgcaggggagttttgccttcatccataaggattttgacgttaaggaaacttttttcaacctcagtaaaagatattttgacacggagtgtgttccaatgaacttcaggaacgctagccaggcgaagcgtctgatgaatcattacattaataaggaaacccggggaaagatacctaaacttttcgatgaaataaaccctgagaccaagttgattctggtggattatatcctttttaaagggaaatggctgacgccctttgaccctgtcttcactgaagtggacacgttccacttagataaatataaaacaattaaggtacctatgatgtacggtgccggcaagtttgccagcacctttgacaaaaatttccggtgtcacgtattgaagttgccatatcagggcaatgcaacaatgctggttgtcctgatggagaagatgggcgatcacctggccctcgaggattaccttaccaccgatctggtggagacatggcttcgcaacatgaagaccagaaatatggaggtgttctttcccaaattcaagctggaccagaaatacgaaatgcacgaactgttgcgccagatgggcattcgcagaattttcagcccctttgccgatctctccgagctgagtgccacgggacgaaacctgcaggtctcccgggtcctgcagaggacagttattgaggtggacgagagaggtactgaggctgtggcgggcatactcagcgagattactgcctattctatgccccccgtcatcaaggtggaccggcctttccactttatgatctacgaggagacgagcgggatgctgctatttctcggacgagttgtcaatccaaccctcctttag

SEQ ID NO: 40618 - DNA, 1335 bp, Artificial Sequence
  derived and/or modified sequence
atgaaggtggtgccatcccttttgcttagtgtgctattggctcaagtgtggctggtgcctggcctggcgccttcgcctcaaagtcccgagaccccggcgccccagaaccagacatctcgggtcgtacaggctccgaaagaggaggaggaagacgagcaggaagccagcgaggaaaaggcctcggaggaagaaaaagcatggcttatggcaagcagacagcaattggcgaaagaaacctctaactttgggttctcactgcttcggaaaatatcaatgcggcatgacggtaacatggtcttcagccctttcggcatgtccctcgccatgacaggcctgatgctcggcgccaccggaccaacggagacacagattaaaagaggattgcacctgcaggccctcaagccgaccaagcctggtctgctgccatctctctttaaaggcttgcgtgagactcttagcagaaaccttgagctcgggctgactcagggctcttttgcgtttattcataaggattttgatgtgaaagagaccttctttaatctgtccaagcggtacttcgacaccgaatgcgtgccgatgaatttccgaaacgcgtcccaggcaaaacgcctgatgaaccactatattaataaagagacccgtggcaagatcccgaaattattcgatgagatcaatccagagaccaagctgatccttgttgactatatcctgttcaaggggaaatggctgacaccctttgaccctgttttcaccgaggtggatacattccacctggacaaatataagacaatcaaagtaccgatgatgtatggcgccggtaagttcgcaagcacctttgataagaattttcgttgccacgtccttaagttaccctaccaggggaatgccacaatgctcgtggttctgatggagaagatgggcgaccatttggcgttggaggattatttgacgaccgatcttgtggagacatggttgcgcaacatgaagacacgtaatatggaggtgttcttccctaagttcaagttggaccagaagtacgaaatgcacgagttactgagacagatggggatacgccgcatcttctcaccatttgcagacttgagcgagctgagcgctaccggtcggaacctacaggtgtctcgagtgttgcagcgcaccgtaattgaggttgacgagcgaggcaccgaagccgtggctggcatcctgagcgagatcaccgcttattctatgccaccagtgatcaaggtcgatagaccttttcactttatgatctacgaggagacatctggaatgctgctcttcttgggtagggttgttaacccgactcttttgtag

SEQ ID NO: 40619 - DNA, 1335 bp, Artificial Sequence
  derived and/or modified sequence
atgaaggtagtcccatcactgttactctctgtcctgctggcccaggtgtggctcgtacctggcctcgccccatcaccacagagccccgaaacacctgccccccagaaccagacatcaagagtggtccaggcacccaaagaggaggaggaagacgagcaagaggcatccgaggagaaggccagtgaggaagaaaaggcctggttgatggctagtagacagcagctggctaaagagacctcaaattttggcttttctctgcttagaaaaatttctatgcggcatgacgggaatatggttttctccccttttgggatgtccctggccatgaccggcctcatgctaggcgccacagggcccactgagacccagattaaacggggcctccacttgcaggcgcttaaacctaccaaacctggtttactacctagccttttcaaaggactgagagagaccctgtctaggaatctggagcttggcttgacccagggaagttttgccttcatccataaggactttgacgtcaaggaaaccttctttaacctttctaaaagatattttgacactgaatgtgtgcccatgaattttcggaacgcttcacaagcgaagagactcatgaatcattatattaataaagaaacccgcgggaaaatccctaagctatttgatgaaatcaaccccgagacaaaattgatcttggtcgattatatactgttcaagggcaagtggctgactccatttgatccggtgtttaccgaagtggacacgtttcatctcgataaatataagacaattaaagtgccgatgatgtatggagcaggcaagttcgcgtccacctttgataaaaatttcagatgtcacgtgctgaaattgccctatcagggtaacgctactatgctcgtggttttaatggagaagatgggggatcatttggctttggaggattatctgacaaccgacctagtggaaacctggctcaggaatatgaaaacgagaaacatggaagtgttttttccaaagtttaagttggatcagaagtatgagatgcatgagttgctgcgtcagatgggaatcagacgcattttttctccttttgccgacctgtctgagttgtcagccacggggagaaatctgcaagtttcccgcgtacttcagaggaccgtaattgaggtggatgagagaggcaccgaggcagtggctggaattttatccgagattacagcctattccatgccacctgtaatcaaggttgacagacctttccactttatgatctacgaggaaacaagtggaatgctgctgttcctgggaagggtcgtcaatccaacgctgctgtag

SEQ ID NO: 40620 - DNA, 1335 bp, Artificial Sequence
  derived and/or modified sequence
atgaaggtggtgcccagcctgctgctgtctgtgctgctggcccaggtgtggctggtgcccggcctggcccccagcccccagagccctgagaccccagccccccagaaccagaccagccgggtggtgcaggcccccaaggaggaggaggaggatgagcaggaggccagcgaggagaaggccagcgaggaggagaaggcctggctgatggccagccggcagcagctggccaaggagaccagcaactttggcttcagcctgctgaggaagatctccatgagacatgatggcaacatggtgttcagccccttcggcatgagcctggccatgacaggcctgatgctgggcgccaccggccccacagagacccagatcaagaggggcctgcacctgcaggccctgaagcccaccaagccaggcctgctgcccagcctcttcaagggcctgcgggagaccctgagcaggaacctggagctgggcctgacccagggcagctttgccttcatccacaaggactttgatgtgaaggagaccttcttcaacctgagcaagcgctactttgacacagaatgtgtgcccatgaacttcagaaatgccagccaggccaagaggctgatgaaccactacatcaacaaggagacccggggcaagatccccaagctgtttgatgagatcaaccctgagaccaagctgatcctggtggactacatcctcttcaagggcaagtggctgaccccatttgaccccgtcttcacagaggtggacaccttccacctggacaagtacaagaccatcaaggtgcccatgatgtacggggccggcaagtttgccagcacctttgacaagaacttccgctgccacgtgctgaagctgccctaccagggcaatgccaccatgctggtggtgctgatggagaagatgggagaccacctggccctggaggactacctgaccacagacctggtggagacctggctgaggaacatgaagaccaggaacatggaggtgttcttccccaagttcaagctggaccagaagtatgagatgcatgagctgctgcggcagatgggcatccgccgcatcttcagcccctttgctgacctgtctgagctgagcgccactggaagaaacctgcaggtgtcccgggtgctgcagaggacagtcatcgaggtggatgagcggggcacagaagctgtggccggcatcctgtctgagatcacagcctacagcatgcctcctgtgatcaaggtggaccggcccttccacttcatgatctatgaggagaccagcggcatgctgctcttcctgggccgggtggtgaaccccaccctgctgtag

SEQ ID NO: 40621 - DNA, 1335 bp, Artificial Sequence
  derived and/or modified sequence
atgaaggtggtgcccagcctgctgctgagcgtgctgctggcccaggtatggctggtacctggactggccccatcaccacaaagtcccgaaacaccagccccccagaatcaaacttcaagagtcgttcaggcgcccaaagaagaggaggaggatgagcaggaggccagcgaagaaaaggcctctgaggaggagaaagcttggctcatggcctcccggcaacagctggctaaagagacctcgaactttggcttcagcttgcttagaaagatatctatgcgtcatgacggtaatatggtcttttccccctttggcatgtcactggcaatgaccggccttatgctgggcgctacaggaccgacggaaactcagataaagcgaggactgcatctccaggcactaaaaccgaccaagcccggcctgctgccatccctgtttaagggcttacgggaaaccctctcccggaatctcgagctgggcttgacgcagggatcattcgcattcattcacaaagacttcgacgtaaaagaaacttttttcaatttaagcaagagatactttgatacggagtgtgttcctatgaattttcgaaacgctagccaggctaaaaggctgatgaaccattacataaacaaggaaactcgaggaaagatccccaaactgtttgatgagattaacccagaaacaaagctcattctcgtggattatatactgttcaaagggaaatggctcacaccctttgacccggtattcactgaagtcgatacctttcatctggacaagtataaaaccataaaagtgccaatgatgtacggtgccggcaagttcgcctccaccttcgacaagaacttcaggtgtcatgttcttaagctaccataccagggtaatgccaccatgttggtcgtgctgatggagaagatgggagatcacctcgcactcgaagactatcttactaccgacctggtggagacctggcttcggaacatgaaaacacgaaacatggaagtgttcttccctaagttcaagctggaccagaaatacgagatgcacgagctgctgcggcagatggggataagacgcatcttttcgccatttgcggacctctccgaattgtcagccaccggacgcaacctgcaggtatcacgggtcctgcagaggaccgtcatcgaggtggatgagagaggcacggaagctgttgccggaatcctttctgaaataacagcttactccatgcccccagtcataaaggtggaccgtcctttccatttcatgatctatgaggagacaagtggaatgctcttgttccttgggagggtggttaatcccacactgctttag

SEQ ID NO: 40622 - DNA, 1335 bp, Artificial Sequence
  derived and/or modified sequence
atgaaggtggtgcccagcctgctgctgagcgtgctgctggcccaggtgtggttggtcccaggcctggcacccagtccacagtctccggagactccagccccacagaaccagacaagccgagtcgtccaagcccccaaggaggaggaggaggatgaacaggaagcctctgaggagaaagcctccgaagaagaaaaggcttggctgatggcttcacgccagcaactagccaaagaaacttccaattttggattttccctgttaagaaaaattagcatgcgacatgatggaaacatggtgtttagcccattcggcatgtcgctcgccatgacagggcttatgctcggagccactggacctacagagactcaaattaagcgcggtcttcacctccaagcgcttaagccgacaaaacccggattgctcccttctctgtttaaggggctgcgggagacgctatccaggaatctcgaactgggactcacccaaggctcctttgcttttattcataaagattttgatgttaaagaaactttctttaacttgagcaagcggtacttcgatacggagtgcgtgccaatgaacttcagaaatgcttcccaggccaaacgcctaatgaaccattacattaacaaggaaactcgtggtaagattccaaaactcttcgacgagattaatccggaaaccaaactgattctagttgattacattttgtttaaaggcaagtggctcaccccgttcgatccagtgttcaccgaggtggacaccttccacctcgacaaatacaagaccataaaggtccccatgatgtatggcgccggcaagtttgcgtccacatttgacaaaaattttaggtgtcacgtcctgaaactcccctatcaaggaaatgccacaatgttagttgttctgatggagaaaatgggtgatcacttagcccttgaggactatttgactacagatttagtggaaacatggctcagaaatatgaagacccggaatatggaagtgttcttccctaagttcaaattggatcaaaaatacgagatgcatgaacttcttcgtcagatgggtattcggcggatattttctccttttgctgacctctcagagctttcagctactggtaggaacctgcaggtatctcgagtgttacagaggactgtaatcgaggtggatgagaggggcactgaagctgtagcagggatcctgtcagagattacagcatattctatgccaccagttattaaggtcgataggcctttccatttcatgatatacgaggaaacgtccggcatgctgttatttctgggccgggtggtgaaccccaccttgctgtag

SEQ ID NO: 40623 - DNA, 1335 bp, Artificial Sequence
  derived and/or modified sequence
atgaaggtggtgcccagcctgctgctgagcgtgctgctggcccaggtgtggctggtgcctggcctagccccaagcccgcaaagtcccgaaacgcctgcaccgcagaaccagacatcccgcgttgtccaggcaccaaaggaggaggaggaagacgagcaggaggccagtgaagagaaggcctccgaggaggaaaaggcctggttgatggcttctcgacagcagctcgccaaggagaccagcaattttggctttagcctgctcaggaagatatctatgagacacgacgggaatatggtgttcagccccttcgggatgtcactagcgatgacaggtttgatgttaggcgcgacgggacctactgaaacacagattaaaaggggcttgcacctgcaagccctgaagccaacaaaacccgggctcctaccttctctcttcaagggcctgcgcgaaactctcagccggaacctggaattgggcctgactcagggcagcttcgcctttatccataaggacttcgatgttaaagaaacatttttcaatttaagtaaacgatacttcgacactgagtgtgtccccatgaattttcgcaacgccagtcaggcgaaacggctgatgaaccattatatcaataaggagacccggggcaagattccgaaactgtttgacgagatcaatccggagaccaagttaatcttagtggactacatccttttcaaagggaagtggttaactccattcgatcccgtctttaccgaggtggatacttttcacttagataaatacaaaaccattaaagtccccatgatgtatggcgcaggcaagttcgcctcaaccttcgacaaaaacttccgctgtcacgtcttgaagctgccttaccagggcaatgcaacaatgctagtggtactgatggaaaaaatgggcgatcacctggcactcgaggactatctgaccaccgacctcgtggaaacgtggctgcggaatatgaaaaccaggaacatggaggtgttctttcctaagttcaagctcgatcagaaatatgaaatgcatgaattactccgacagatgggaataagacgcatttttagcccattcgctgacctcagcgaattgagtgccacagggcgcaatttgcaggtctcacgcgtgttgcagaggaccgtgatcgaagtcgacgaacgcggaactgaggcggtggccgggattctctcggaaatcaccgcctattccatgccccctgtgattaaagtggatagacctttccacttcatgatttacgaggagacttctggaatgttgcttttcttgggcagagtcgtcaatcccaccctgttatag

SEQ ID NO: 40624 - DNA, 1335 bp, Artificial Sequence
  derived and/or modified sequence
atgaaagttgtacccagcttgctgctcagtgtgctgctggcccaggtgtggctggtgcccggattagctccatcacctcagtctcctgagacgccggcacctcagaatcagaccagcagagtcgttcaggctcctaaggaagaagaggaggatgaacaggaggcttccgaggagaaggcctctgaggaggagaaagcgtggcttatggcctctcggcagcagctcgccaaagagacatccaacttcggattctccctgttgcgtaaaatctccatgcggcacgatggcaatatggtgttcagtcccttcggcatgagcttggccatgacaggactgatgctgggggctactggaccgacagagactcagatcaaacgaggcctccaccttcaggcgcttaaacccacaaagcctgggcttctgccgtcactcttcaaaggcctgcgggaaactctgtcacgaaacttggagctgggcctcacccaaggctcctttgcgttcattcacaaagacttcgatgtaaaggagacatttttcaacctttctaaacggtacttcgacactgaatgcgtcccgatgaacttccggaatgcttcgcaggctaagcggctgatgaaccactacattaacaaggagacgcgcggtaagattcccaagctgtttgacgaaattaaccctgagactaagctaattttggtcgactacatactcttcaaaggtaagtggctgactcctttcgatccggtgttcacagaggtggacaccttccacctcgataaatataaaacaattaaagtccctatgatgtacggcgcagggaagtttgccagcacattcgataaaaacttcagatgccacgttctcaagttgccctaccagggtaatgccaccatgctggtggtgcttatggaaaagatgggtgatcacctcgcgttggaggactacctgacaacagacttagttgagacatggctgcgcaacatgaagacgcgcaatatggaggtcttttttcctaaattcaaattggatcaaaaatacgagatgcacgagctcctaaggcagatgggtatacggagaattttctccccattcgctgatctgtcagagttaagtgcaacaggccgaaatctccaagtttccagggtcctgcagcgcactgtgatcgaagtggacgaaagagggacggaggcggtggcgggaattctgtccgaaattacagcctactctatgcccccagtgatcaaagtggaccggcctttccatttcatgatctacgaagagacgagtggcatgttgctgtttctgggtagggttgtgaacccaactctgttgtag

SEQ ID NO: 40625 - DNA, 1335 bp, Artificial Sequence
  derived and/or modified sequence
atgaaggtggtaccttcccttcttctgagtgttctccttgcgcaggtgtggctggtgccaggcttggccccaagcccccagagcccagagactcctgcaccccagaatcaaacaagccgggtggtccaggctccaaaagaggaggaggaggacgaacaggaggcatccgaggagaaagccagcgaggaggagaaagcctggcttatggcttcaaggcagcaactggcaaaggaaacttcgaactttggcttcagcctgctgcgtaaaataagtatgagacatgacggtaatatggtcttctcaccgttcggaatgtctctcgcaatgaccgggctgatgttgggcgctactgggcctacggagacgcagatcaagaggggcctgcacctgcaggccctgaagcctacgaagcccggtttgcttccatctcttttcaaggggttacgggaaactttatcacggaacctagagttggggttgactcaggggtcatttgccttcatccataaggatttcgatgtcaaggagacgttttttaacctcagtaaacggtattttgacacagagtgcgtcccaatgaattttcggaatgcaagtcaggccaaacgcttgatgaatcattatatcaacaaagaaacgcgcggtaagatccctaaactattcgatgagataaaccctgagacgaaactcatcctggtggattacatccttttcaaagggaaatggctcactccgtttgatcccgtttttactgaggtcgacactttccatcttgacaaatataaaacgatcaaagtaccaatgatgtacggcgctggtaaattcgcttcaacatttgacaaaaattttcgctgccacgtgctgaaactcccttaccaggggaacgccacaatgctcgtagtgctgatggagaaaatgggtgatcaccttgcattagaggattatctgacaaccgacctcgtggaaacttggctgcgtaatatgaagacccggaatatggaggtcttttttccaaagttcaaactagatcaaaagtatgagatgcatgagctgctccgacagatgggcatccgcagaattttctccccattcgccgatctttcggagttgtccgccacaggccgtaacctgcaggtttctcgtgttctgcagcgcacagtgatcgaagtggatgagaggggaaccgaagccgtggccggtattctgtctgagatcacggcatattccatgccaccagttatcaaggtggaccgtccattccacttcatgatctatgaagagacctccgggatgcttctattccttggaagagtggtcaatcccactcttctctag

SEQ ID NO: 40626 - DNA, 1335 bp, Artificial Sequence
  derived and/or modified sequence
atgaaagttgtcccaagcctgctactctcagtgctgctggcccaagtttggctcgtccctggcctcgctccatcaccacaatctccggaaactccggctccacagaatcagacctctcgcgtagtgcaagccccaaaagaggaggaagaggacgaacaagaggctagtgaggagaaggccagcgaagaggaaaaggcctggcttatggccagccgtcagcaactggccaaggagacttcaaacttcggattttcactactgcgaaaaatcagcatgaggcatgatgggaatatggtttttagtccttttggcatgtcgctggcaatgaccggcctcatgctcggcgctaccgggcctaccgagacacaaataaagcgaggacttcacctacaggcactcaaaccaaccaagcccggtctcctcccatccttattcaaaggacttagagaaaccctatcccgaaatctggagttaggattgacacaggggtcgttcgcatttatacataaggactttgacgtcaaagaaacctttttcaacctgtcaaagcgctattttgatacggagtgcgttcccatgaatttccgtaatgccagtcaggcaaagcgactgatgaaccattatatcaataaggagaccagagggaagatcccaaagctgttcgacgaaataaaccccgagaccaagctcatacttgtagactatattttgttcaaggggaagtggctgacccccttcgaccctgtctttacagaggtcgacaccttccatttggataagtataagacaatcaaggtgccaatgatgtacggcgcaggaaagtttgcatctacctttgataaaaacttcagatgtcacgtcctgaaactcccttaccagggaaacgccactatgctggtggtgctcatggagaaaatgggcgaccatcttgcattggaggattatttgaccacagatctggttgagacttggctcagaaacatgaaaactagaaacatggaagtcttctttcctaaatttaaactagatcagaaatacgagatgcatgaactgctacgtcagatgggcatccgaaggatcttctctccatttgccgacctctcagaactttcggccactggaagaaacctgcaggtctccagggttctgcagcggactgtcatcgaggtggacgaacgcggaaccgaggcagtggcaggaattctgtcagagattacagcttatagcatgcccccagtgatcaaagtggacaggccctttcattttatgatctatgaggagacctctggaatgctgctctttctcggaagagtggtgaaccccactctgttgtag

SEQ ID NO: 40627 - DNA, 1335 bp, Artificial Sequence
  derived and/or modified sequence
atgaaggtcgtgccctccctgcttctctctgttcttctggcacaagtgtggctagtcccaggcctggcgccttctcctcagagtcctgaaacaccggctccacagaaccaaacaagccgcgttgtgcaggctcctaaagaggaagaggaggatgaacaggaggccagtgaggaaaaggcctccgaagaggagaaagcatggctcatggcctcgaggcaacagctagcaaaggaaacttctaacttcggtttcagtcttctccgcaaaatttctatgcgtcacgacggtaatatggtgttctctccattcggtatgtccctagccatgacggggctgatgctcggcgccaccggccccacagaaacccagatcaaaaggggcctacatctccaggccctcaaaccaacaaagcccggcctcctgccatctctctttaaaggcctgagggagacactaagtcgaaaccttgagcttggactcactcagggctcgtttgcatttattcacaaagactttgatgtcaaagaaacgttttttaacctgtcaaagagatatttcgatactgaatgcgttcccatgaacttcaggaacgccagtcaagctaagcgcctaatgaaccactatatcaataaggaaacccgtggcaagatccctaaactatttgatgagatcaaccctgaaaccaaacttatacttgtggactatatcctgttcaaagggaaatggctcacccccttcgaccccgtgttcactgaggtcgataccttccacttagacaaatataaaaccataaaagtgccgatgatgtacggtgccggcaagtttgcttcaacgttcgataaaaactttagatgtcatgtgctgaaattaccataccaaggtaacgcaacaatgctcgtggtgctgatggaaaagatgggcgatcatctggccctcgaggactatcttaccaccgacttagttgagacctggctgcgcaatatgaagacccgcaatatggaagtcttttttcccaaattcaagctagaccagaagtatgagatgcacgaattactcaggcagatgggcattcgtcggattttctctccctttgcagacctgtcggagctgagcgcaacaggaagaaacttgcaggtcagtagggtgcttcaacgcacagtaatcgaagtagatgaaaggggtacagaagccgtggctggcatcctcagtgaaatcactgcttactccatgccacccgtaatcaaggtagaccgcccatttcactttatgatatatgaggagacctcaggcatgctactctttctcgggcgggtcgtaaatccaactctgctatag

SEQ ID NO: 40628 - DNA, 1335 bp, Artificial Sequence
  derived and/or modified sequence
atgaaggtggttccctcactgcttctgagcgtactattagcccaagtgtggctggttcccggacttgctccttcaccccagagtcccgagacacccgctccacagaaccaaacctcgcgcgttgtgcaagcacccaaagaagaagaggaagatgaacaggaagcttcagaggagaaggcatcagaagaagagaaagcctggctaatggcctcgcggcagcagcttgccaaagaaacatccaatttcggcttcagcctgcttagaaagataagcatgcgccatgatgggaatatggtgttcagtccatttgggatgtctcttgctatgactggtctcatgttaggtgctactgggccaaccgaaacacagataaaacggggcctgcacctgcaagccctcaaacctacaaagccggggctactgccttctctgttcaagggtcttcgcgaaacgttaagcagaaacttagagctcggcctcacgcagggatccttcgctttcattcacaaagattttgacgtgaaggaaactttttttaacctgtcgaagcgctatttcgataccgagtgcgtgcctatgaatttcaggaacgccagccaggctaaaaggctcatgaatcactacattaataaagagacgagaggcaagatcccaaaactgtttgatgaaattaatccagaaacaaaactgattctcgtagactacatcctctttaaggggaagtggctcaccccattcgaccccgtattcactgaggttgacacattccatctagacaagtataaaacaatcaaggttcctatgatgtatggcgcagggaagttcgcctcaacatttgacaaaaactttagatgccacgtgctgaaactgccataccaggggaacgctactatgctcgttgtgcttatggaaaaaatgggcgatcaccttgctcttgaagattatctaactacagaccttgtcgagacctggttacgaaatatgaagactagaaacatggaggttttctttcctaagttcaaactagaccagaaatacgaaatgcacgaactgttacggcagatgggaatccgccggatattcagcccgtttgctgacctctccgagctgtccgccaccgggcgcaatctgcaagtgagtcgggtgctgcaacgaacagtgattgaagtggatgagagaggaaccgaggcagtcgctggcatcctttctgaaatcactgcctattctatgcctcctgtcattaaagttgataggcctttccatttcatgatctacgaggagacctcaggaatgctcctcttcctgggccgcgtggtgaacccaactcttttgtag

SEQ ID NO: 40629 - DNA, 1335 bp, Artificial Sequence
  derived and/or modified sequence
atgaaagtcgtccctagccttttattatctgtgctactggcacaagtttggctggtccctggcttagcgccttccccacagtccccagagactccagcaccccaaaaccagactagcagggtggtccaggcccccaaggaagaggaggaagatgagcaagaagctagtgaagagaaggcttccgaggaagagaaagcatggctcatggcatctagacaacagctcgccaaagagacctctaattttggttttagcctcctacgcaaaattagcatgcgacatgatggaaatatggttttctctccatttggcatgtccttagctatgacaggtctaatgctgggtgcaacaggtcctacggagacgcaaatcaaaagaggactgcacctccaggctctgaagcccactaaacccgggctgctcccgtccctcttcaaaggcctgcgtgagaccctcagcaggaatctggaactaggcttgacgcagggatccttcgctttcatccacaaagactttgatgttaaggagacattcttcaatcttagcaaacgttatttcgacacagaatgtgttcccatgaacttcaggaacgccagtcaggcaaaacgattgatgaaccactacattaataaggaaacacgaggcaagatcccaaagttattcgatgagattaaccccgaaaccaagctcatcctggtagactacatcttattcaaggggaagtggctgacaccatttgaccccgtgttcacagaagttgatactttccatctcgataaatacaaaactattaaggttcctatgatgtacggtgcaggaaaatttgctagcacttttgataagaatttccggtgccacgtgctaaaattaccttaccagggcaatgctacaatgctcgtcgtactcatggaaaagatgggcgaccaccttgccctcgaggattatttgacgacggacttagtggagacatggctgcggaacatgaaaaccaggaatatggaagtgttttttcccaaatttaaactggatcagaaatacgagatgcacgagctcctccgacagatgggaattcggcgaatatttagtccattcgcggaccttagcgaactctcagccaccggaagaaacctgcaagtgagcagagtcctgcaacgcactgtgatcgaggtagacgaaagaggaaccgaggcagtggccggcattctttcagagattacagcttactcaatgccacctgtgattaaggtcgataggcctttccactttatgatctacgaggagacgtctggcatgctccttttcctggggcgtgtggttaatccaacactgctgtag

SEQ ID NO: 40630 - DNA, 1335 bp, Artificial Sequence
  derived and/or modified sequence
atgaaagtcgtcccatccctcctattgagcgtactccttgctcaagtttggctggtcccgggtctggcacccagccctcagagtcccgaaacacccgcaccacagaaccagacgtcaagggtggtacaagcacccaaagaagaagaggaagatgaacaggaggcttcagaagagaaagcaagtgaggaagagaaagcatggctgatggcctctcgccaacaactggccaaggaaacatccaacttcgggttctctctgctgcgcaagattagtatgcgccacgatggaaatatggtgttctccccattcggaatgtcccttgccatgaccggattgatgttaggggctaccggtcccaccgaaacacagattaagcgtggcctacatctccaggccttgaagcctaccaagccggggttactcccatctttgtttaagggtctaagagaaaccttgtctcgaaacctggagctcggcttaacccaaggaagcttcgccttcatccacaaagactttgatgtgaaagagacgttttttaacttgagcaagcgctatttcgatactgaatgcgtaccaatgaatttcaggaacgccagccaggccaaaagactgatgaatcattatattaacaaggagaccagaggaaaaatacctaaactcttcgacgaaataaaccccgagacgaagctcatccttgtggattatatcttatttaaagggaaatggctaacaccgtttgatccagtcttcacagaagtggatacctttcatctcgacaagtacaagacgatcaaggtacctatgatgtacggagccggtaaattcgcaagcacctttgataaaaacttccgatgccatgtccttaaactgccataccagggaaacgctacaatgctcgtggtgctgatggaaaagatgggcgatcatctggccctcgaggactatcttaccaccgacttagttgagacctggctgcgcaatatgaagacccgcaatatggaagtcttttttcccaaattcaagctagaccagaagtatgagatgcacgaattactcaggcagatgggcattcgtcggattttctctccctttgcagacctgtcggagctgagcgcaacaggaagaaacttgcaggtcagtagggtgcttcaacgcacagtaatcgaagtagatgaaaggggtacagaagccgtggctggcattttgagtgagattactgcttacagcatgcccccagtgattaaagtggatagaccctttcatttcatgatatacgaggagacctccggaatgttactttttttaggcagagttgtgaacccgaccctcttgtag

SEQ ID NO: 40631 - DNA, 1335 bp, Artificial Sequence
  derived and/or modified sequence
atgaaggtggttccctcactgcttctgagcgtactattagcccaagtgtggctggttcccggacttgctccttcaccccagagtcccgagacacccgctccacagaaccaaacctcgcgcgttgtgcaagcacccaaagaagaagaggaagatgaacaggaagcttcagaggagaaggcatcagaagaagagaaagcctggctaatggcctcgcggcagcagcttgccaaagaaacatccaatttcggcttcagcctgcttagaaagataagcatgcgccatgatgggaatatggtgttctccccttttggaatgtctctggccatgaccggattgatgcttggcgcaacgggcccgacagaaacacagattaagcggggactccatttgcaagccctcaaacctaccaagcccggcctgctcccttctcttttcaaaggactccgagagacccttagccgcaaccttgagcttgggctgacacagggatctttcgctttcattcataaggactttgatgttaaagagaccttctttaacttgagtaaacgttatttcgacactgaatgtgttccaatgaatttccgaaatgcctcccaggcaaaacgactcatgaaccattacattaacaaagaaacccgcggcaagatccccaagctatttgatgagatcaatccagagacgaagctaatcctggtagattacatcctgtttaaaggtaagtggttaacccctttcgatccagtgttcactgaagttgacacattccacttggacaaatataagacaatcaaagtgccgatgatgtacggagccggaaaattcgcttccacatttgataaaaatttcaggtgccatgtgctgaaactcccctaccagggaaacgctacaatgttggtcgtgctaatggagaaaatgggggatcacctagccctcgaggattatctcaccacagacctagtagaaacctggctgcgtaatatgaagactcggaatatggaggtcttcttccccaagtttaaactggaccaaaaatatgagatgcatgaactgctgcgacaaatgggaatcaggagaatcttttcgcctttcgctgacctgagcgaattgagtgctactggccggaacctgcaggtatctagagtgctccagcggaccgtaatcgaggttgacgaaagaggtacagaggcagtagcaggtatcttatccgagatcaccgcatattcgatgcccccagtcattaaagtcgacaggcccttccatttcatgatctatgaagaaacttccgggatgttattgtttctcggtcgcgtagtgaaccccaccctcctttag

SEQ ID NO: 40632 - DNA, 1335 bp, Artificial Sequence
  derived and/or modified sequence
atgaaagttgtcccctccctgctgctgtccgtattgctagcgcaagtgtggcttgtgcctggactagcgccgtcaccacaaagcccagaaactccagcccctcagaaccagacctcacgggtggtgcaagcgcctaaagaggaagaagaagacgagcaggaagcgtctgaagaaaaggcgtcagaagaagaaaaagcatggctcatggcctctcgtcagcaattagccaaagagacctcaaattttggtttctcattgctgcgaaagatctcaatgcgacatgacggaaatatggtgttctccccttttggtatgagtctggcgatgactggccttatgttaggcgcgactggaccaaccgaaacacagatcaaacgcggcctgcatctccaggcccttaaacctaccaaacccggattactgccatccctgtttaaggggctccgggaaaccctctcacgaaacctggaactcggcctaacacaggggtccttcgcattcattcacaaggactttgatgtgaaagagacttttttcaatctctcaaaacgctactttgataccgaatgcgtccccatgaactttagaaacgcctcccaagccaaacggctgatgaatcactatatcaacaaagagacacgcggaaagattcctaagcttttcgatgagattaatccagaaactaagttgattctcgtggactacatactcttcaagggaaagtggctcaccccctttgatcccgtttttaccgaggtcgatacttttcacctggataaatataaaaccattaaagtaccaatgatgtacggtgctggaaaatttgcctctacttttgacaagaatttccgatgccatgttctgaaacttccataccagggcaatgccaccatgctggtggtactcatggaaaagatgggcgaccaccttgccctcgaggattatttgacgacggacttagtggagacatggctgcggaacatgaaaaccaggaatatggaagtgttttttcccaaatttaaactggatcagaaatacgagatgcacgagctcctccgacagatgggaattcggcgaatatttagtccattcgcggaccttagcgaactctcagccaccggaagaaacctgcaagtgagcagagtcctgcaacgcactgtgatcgaggtagacgaaagaggaaccgaggcagtggccggcattctgtctgagataactgcctattcaatgccccccgttattaaggtggatagaccttttcattttatgatatacgaagaaacatcaggtatgttactgttcctcggccgcgtggtgaatccgactcttctgtag

SEQ ID NO: 40633 - DNA, 1335 bp, Artificial Sequence
  derived and/or modified sequence
atgaaggtggtgcccagcctgctgctgagcgtgctgctggcccaggtgtggctggtgcccggcctggcccccagcccccagagccccgagacccccgccccccagaaccagaccagcagagtggtgcaggcccccaaggaggaggaggaggacgagcaggaggccagcgaggagaaggccagcgaggaggagaaggcctggctgatggccagcagacagcagctggccaaggagaccagcaacttcggcttcagcctgctgagaaagatcagcatgagacacgacggcaacatggtgttcagccccttcggcatgagcctggccatgaccggcctgatgctgggcgccaccggccccaccgagacccagatcaagagaggcctgcacctgcaggccctgaagcccaccaagcccggcctgctgcccagcctgttcaagggcctgagagagaccctgagcagaaacctggagctgggcctgacccagggcagcttcgccttcatccacaaggacttcgacgtgaaggagaccttcttcaacctgagcaagagatacttcgacaccgagtgcgtgcccatgaacttcagaaacgccagccaggccaagagactgatgaaccactacatcaacaaggagaccagaggcaagatccccaagctgttcgacgagatcaaccccgagaccaagctgatcctggtggactacatcctgttcaagggcaagtggctgacccccttcgaccccgtgttcaccgaggtggacaccttccacctggacaagtacaagaccatcaaggtgcccatgatgtacggcgccggcaagttcgccagcaccttcgacaagaacttcagatgccacgtgctgaagctgccctaccagggcaacgccaccatgctggtggtgctgatggagaagatgggcgaccacctggccctggaggactacctgaccaccgacctggtggagacctggctgagaaacatgaagaccagaaacatggaggtgttcttccccaagttcaagctggaccagaagtacgagatgcacgagctgctgagacagatgggcatcagaagaatcttcagccccttcgccgacctgagcgagctgagcgccaccggcagaaacctgcaggtgagcagagtgctgcagagaaccgtgatcgaggtggacgagagaggcaccgaggccgtggccggcatcctgagcgagatcaccgcctacagcatgccccccgtgatcaaggtggacagacccttccacttcatgatctacgaggagaccagcggcatgctgctgttcctgggcagagtggtgaaccccaccctgctgtag

SEQ ID NO: 40634 - protein, 633 aa, Artificial Sequence
  derived and/or modified sequence
MAAAAAAATTAACSSGSAGTDAAGASGLQQPPPQPQPQPAAAAPAQPPPEPPRKPRMDPRRRQAALSFLTNISLDGRLPPQDAEWGGGEEGGAAKPGAGGACGARTRFSLLAAAERGGCIALAAPGTPAAGLAAGSGPCLPQPSSLPPLIPGGHATVSGPGVARGFASPLGAGRASGEQWQPPRPAPLAACAQLQLLDGSGAAGQEELEEDDAFISVQVPAAAFLGSGTPGSGSGSRGRLNSFTQGILPIAFSRPTSQNYCSLEQPGQGGSTSAFEQLQRSRRRLISQRSSLETLEDIEENAPLRRCRTLSGSPRPKNFKKIHFIKNMRQHDTRNGRIVLISGRRSFCSIFSVLPYRDSTQVGDLKLDGGRQSTGAVSLKEIIGLEGVELGADGKTVSYTQFLLPTNAFGARRNTIDSTSSFSQFRNLSHRSLSIGRASGTQGSLDTGSDLGDFMDYDPNLLDDPQWPCGKHKRVLIFPSYMTTVIDYVKPSDLKKDMNETFKEKFPHIKLTLSKIRSLKREMRKLAQEDCGLEEPTVAMAFVYFEKLALKGKLNKQNRKLCAGACVLLAAKIGSDLKKHEVKHLIDKLEEKFRLNRRELIAFEFPVLVALEFALHLPEHEVMPHYRRLVQSS

SEQ ID NO: 40635 - protein, 306 aa, Artificial Sequence
  derived and/or modified sequence
MRQHDTRNGRIVLISGRRSFCSIFSVLPYRDSTQVGDLKLDGGRQSTGAVSLKEIIGLEGVELGADGKTVSYTQFLLPTNAFGARRNTIDSTSSFSQFRNLSHRSLSIGRASGTQGSLDTGSDLGDFMDYDPNLLDDPQWPCGKHKRVLIFPSYMTTVIDYVKPSDLKKDMNETFKEKFPHIKLTLSKIRSLKREMRKLAQEDCGLEEPTVAMAFVYFEKLALKGKLNKQNRKLCAGACVLLAAKIGSDLKKHEVKHLIDKLEEKFRLNRRELIAFEFPVLVALEFALHLPEHEVMPHYRRLVQSS

SEQ ID NO: 40636 - DNA, 1902 bp, Artificial Sequence
  derived and/or modified sequence
atggcagccgccgctgctgctgccaccactgccgcttgcagttcaggctcggcggggaccgacgcagcaggggccagtggattgcaacagccaccgccccagcctcagccccagcctgctgcagcagcacctgctcaaccacctccggagccaccccgaaagcctcgaatggatccaagaagacggcaagcagcattgtcttttctcacaaatatttcgttggacgggcggctgcctcctcaagacgctgagtgggggggcggagaagagggcggagctgctaagccgggagctgggggggcttgcggagctagaactaggttcagcctccttgcggctgccgaaaggggcggttgcatcgccctagcagcacccggtacccccgctgctggcctggctgctggatctggcccatgtttaccacagccgtcctcacttccccccctgatccccgggggccacgctaccgtttccggccctggcgtcgcacgcggttttgcctctccgctgggggctggtcgcgcttccggcgagcagtggcagccaccgcggcccgccccactcgccgcgtgtgcacagctccagttgttggacggatccggcgccgcaggccaggaagaactcgaggaagatgacgccttcatctccgtacaggtcccggccgcagcctttctcgggtcaggcacccccggtagtggaagcggttctcgtgggagactgaattccttcactcagggaatactgccgatcgcattctcacgacccacttctcaaaactactgcagcctcgagcagcctgggcaggggggctctacttccgcgttcgagcagctgcagcgctctcggaggagactgatatcccagagatcgtcactggaaactctggaggacatcgaggagaacgcccctctccgacgctgcagaacgctttctggatcacccaggcctaagaactttaagaagatccactttatcaagaatatgcgacaacacgacacccgcaatggacgtattgtgcttatctccgggcggcggtccttttgctcaattttctctgtgttgccttaccgcgacagtacccaggtgggagaccttaaactggatggtgggcgccagtcaaccggtgccgtatccctaaaagagataattggactggaaggcgtggagctgggagccgacggaaagacggtaagttacacacagtttttactgccgacaaacgcattcggagcccgacgcaacaccatcgacagcaccagcagctttagccagttccgcaacctctcccacagaagcttgtctatcggcagggccagcgggacacaaggttctcttgacactgggtccgatctgggggacttcatggactatgatcctaatctgctcgatgacccacagtggccgtgtggcaagcataagcgagtgcttatcttcccatcttatatgacaactgtgattgactatgtcaagccaagcgatctgaaaaaggacatgaacgagaccttcaaagagaaattcccccacattaagctcacactcagtaagatacgctcacttaagcgagagatgcgaaagctggcacaggaggattgcggacttgaagagcccaccgtggccatggccttcgtatatttcgagaaactggcactgaagggcaaactgaataagcagaaccgcaagctgtgtgcaggcgcttgtgtattgctcgcagctaaaattggctccgatctgaaaaaacacgaagttaagcacctgatagataaactggaggaaaagttcagactaaatcgaagagaactgatcgcctttgagtttcccgtgctcgtcgcattggagttcgcccttcatttgccagaacatgaagtgatgccccactatcgtaggctggtccagtcttcctag

SEQ ID NO: 40637 - DNA, 1902 bp, Artificial Sequence
  derived and/or modified sequence
atggctgctgctgctgctgctgccaccacagctgcctgcagcagcggcagcgctggaacagatgctgctggggccagcggcctgcagcagcccccaccccagccccagccccagcctgctgctgctgccccagcccagcccccacctgagccccccaggaagcccaggatggacccccggcggcggcaggccgccctgtccttcctgaccaacatcagcctggatggccgcctgcccccccaggatgctgagtggggcggcggggaggagggcggggccgccaagccaggggccggcggggcctgtggggcccggacccgcttcagcctgctggccgctgctgagcggggcggctgcatcgccctggccgcccctggcaccccagctgctggcctggccgccggcagcggcccctgcctgccccagcccagcagcctgcccccactcatccctgggggccacgccaccgtgtctggccctggggtggcccggggctttgccagccccctgggcgccggccgggccagcggggagcagtggcagccccccaggcctgcccccctggccgcctgtgcccagctgcagctgctggatggcagcggggctgctggccaggaggagctggaggaggatgatgccttcatctctgtgcaggtgcctgctgctgccttcctgggcagcggcaccccaggcagcggcagcggcagccggggccgcctgaacagcttcacccagggcatcctgcccatcgccttcagccggcccaccagccagaactactgcagcctggagcagcccggccagggcggcagcaccagcgcctttgagcagctgcagaggagcagaagaagactcatcagccagaggagcagcctggagaccctggaggacatcgaggagaatgcccccctgcggcgctgcaggaccctgagcggcagcccccggcccaagaacttcaagaagatccacttcatcaagaacatgaggcagcacgacaccagaaatggccgcatcgtgctgatcagcggccgccgctccttctgcagcatcttctctgtgctgccctacagagacagcacccaggtgggggacctgaagctggatggcggccggcagagcactggagctgtgtccctgaaggagatcatcggcctggagggcgtggagctgggcgcagatggcaagacagtgtcctacacccagttcctgctgcccaccaatgcctttggagcccggaggaacaccatcgacagcaccagcagcttcagccagttcaggaacctgagccacaggagcctgagcatcggccgggccagcggcacccagggcagcctggacaccggcagtgacctgggggacttcatggactatgaccccaacctgctggatgacccccagtggccctgtgggaagcacaagagggtgctgatcttccccagctacatgaccaccgtcatcgactatgtgaagcccagcgacctgaagaaggacatgaatgagaccttcaaggagaagttcccccacatcaagctgaccctgagcaagatccgcagcctgaagcgggagatgaggaagctggcccaggaggactgtggcctggaggagcccaccgtggccatggcctttgtgtactttgagaagctggccctgaagggcaagctgaacaagcagaacaggaagctgtgtgccggggcctgtgtgctgctggccgccaagattggaagtgacctgaagaagcatgaggtgaagcacctgattgacaagctggaggagaagttccggctgaacagaagagagctgattgcctttgagttccctgtgctggtggccctggagtttgccctgcacctgcctgagcacgaggtgatgccccactacagaaggctggtgcagagcagctag

SEQ ID NO: 40638 - DNA, 1902 bp, Artificial Sequence
  derived and/or modified sequence
atggccgccgccgccgccgccgccaccaccgccgcctgcagcagcgggagcgcgggtactgacgccgccggggcgagcggcttacaacagccaccaccccagcctcagccccagcctgccgcagccgctccagcccagcctccccctgagccaccacgcaaaccccggatggaccctcgtcgaagacaggcggctcttagttttttgactaatatctccttggacgggagacttcctccccaggatgcagaatggggcggtggggaagaaggaggggcagctaagccaggtgccggtggtgcttgtggtgcccgtaccaggttttctctcctggctgccgctgagagagggggttgcatcgccctcgcagcaccaggcacgcccgcggcaggcctggctgcggggtcaggcccctgcctgccccagccctccagtctgccccctttaattccaggcggccacgcaacggtcagcggccccggggtcgcccgcggctttgcaagccctctgggtgccggtagagcaagcggtgagcagtggcagccgccaagacccgccccccttgcagcatgtgctcagctacagctccttgacggctcaggtgcagctggtcaggaagagttggaagaggatgatgccttcatcagcgtacaagtccctgccgctgccttcctgggctcaggcactcctggatccgggtctggttcaagaggccgcctgaatagcttcacccagggcattctgccaatcgctttcagtcgcccgacttcacagaactactgcagcctagagcagcctggtcagggcggaagtactagtgccttcgagcaacttcaacgctcccgtagaagattgatctctcagcgttcatccttggaaacattggaagatatcgaagagaatgctcctctcaggagatgtagaacactgagcgggagtcccagaccaaagaacttcaaaaaaatccacttcataaaaaatatgcggcagcacgatacccgaaatggacgtattgttctgatttctggtcgccgatctttttgctccatctttagcgtcctgccctaccgcgactcgacacaagtgggggatctgaagctcgacggggggcgtcagtcgacaggtgccgttagccttaaggagataattggactcgaaggagtcgagcttggggctgatgggaaaacagtctcttacactcagtttcttctccctaccaacgcctttggagcccgccggaacaccattgattccaccagctccttttcccagttccgcaatttgtctcataggtcgttgtctatcggcagagccagtgggacccagggctccctggataccggaagtgatctgggagattttatggattatgaccctaatctcctggacgatccacagtggccgtgcggaaaacacaagcgggttctgatcttcccttcatacatgactaccgttatcgattatgtcaagcccagcgatctgaagaaggatatgaatgaaacatttaaggagaaattccctcatataaaactcaccctgtccaaaatccgttctcttaagcgtgagatgcgcaagctcgcgcaggaggattgcggcctggaggaacccactgttgccatggcttttgtctattttgagaagttggcactaaaaggcaaacttaacaagcagaataggaagctgtgtgctggcgcctgcgtgttgctcgccgctaaaataggcagcgatctaaagaaacacgaagtgaaacacctcatcgacaaacttgaggagaaatttcggttgaaccggcgggagttgattgccttcgaatttccagtgctggtcgccctagagtttgctctgcatctccccgaacatgaagtgatgccacactacaggcggttggtccagtcctcctag

SEQ ID NO: 40639 - DNA, 1902 bp, Artificial Sequence
  derived and/or modified sequence
atggccgctgctgcagctgccgctaccacagccgcatgctcatcaggctctgccggtactgacgccgcaggtgcctctggattgcagcagccgccaccacagccccagcctcagcctgctgccgcagccccagcccaacctcccccagagcctccacgtaagccccgaatggatccgagacgacggcaggctgcactgtcttttctgaccaatatctcgctggacggtcgactcccacctcaagacgctgaatggggcggaggcgaggagggcggagctgccaagcccggtgccggaggtgcgtgcggggcacgtacaaggttcagtctactcgccgctgccgagcgaggagggtgtattgccctggcggctcccggaacaccagccgcaggcctggccgcaggatccgggccatgcctgccacaaccgtcgtccctgcctccacttattcccggaggtcacgcgacagtgtccgggccaggagtagccagagggttcgcatctccactgggcgctggtcgcgcttctggcgaacagtggcaaccgccaagacccgctcccttagcagcctgcgctcagcttcaactgctggatgggagtggggctgcaggacaagaagaattagaggaggacgacgcttttataagcgtgcaggtccctgctgcggcttttctgggctccggaacacctggaagtggcagtggcagcaggggcaggctcaatagttttactcaaggcatcttacctattgcctttagccgccctacttctcagaattattgttcattggagcagccgggacagggtggcagtacatccgcttttgaacaactccagagatccaggcgcaggttgataagccaacgttcaagcttggaaacactagaggacatagaagagaacgctccgctgcgcaggtgtcggacactgtccgggagcccaagacctaagaatttcaagaaaatacatttcatcaagaacatgaggcagcacgacactcggaatggtagaatcgttctcattagcggtcgacggtctttctgtagtatcttcagcgtgctcccataccgggatagtacgcaagtgggcgatcttaaactggatggaggtaggcagtctaccggggctgtttccctgaaagaaataatcggcctcgagggcgtggaacttggagccgatggcaaaacagtttcttacacacaatttttgttgcccactaatgcattcggcgctcgcagaaacaccatcgattctactagctctttttctcaattccggaatctgtcacaccggtccctgtctattggacgggcatcaggtactcaggggagcctcgataccgggtctgacttgggtgattttatggattacgatcctaaccttctggacgatccccagtggccttgcggcaaacacaaaagggtacttatcttcccttcctatatgacaacggtgatagattatgttaagccctctgatctcaagaaggacatgaatgagactttcaaggagaagttcccacacatcaaactaaccttatctaagatccgatccctaaaaagagaaatgcgaaagctggcccaagaggactgtgggttggaagaacctacagttgcgatggccttcgtgtatttcgagaaattggccctgaaaggaaaactcaacaaacagaaccggaagttgtgcgccggagcctgtgtgctcttagcagccaaaattggttctgatcttaagaagcatgaagtgaagcatctaattgacaaacttgaagaaaagttcagactgaaccggagagaattgatcgcattcgaattccccgtcctggtcgcactggaattcgccctccacctcccagagcatgaggtaatgcctcattacagacggcttgtgcagagtagctag

SEQ ID NO: 40640 - DNA, 5005 bp, Artificial Sequence
  derived and/or modified sequence
atggcggcggcggcggcggccgccaccacggccgcctgcagcagcggcagcgccggcaccgacgccgcgggcgccagcggattgcagcagccgccgccgcagccccagcctcagcccgcggccgccgcgccggcccagccgccgcccgaacccccccggaagccgcgcatggacccgcggcgccgccaggctgccctctccttcctcaccaacatctcgctggacggccggctgccgccgcaggacgcggagtggggcggtggcgaggagggcggcgcggccaagccgggcgccggcggcgcctgcggcgcgaggactcggttcagcttgctcgccgctgccgagcggggcggctgcatcgcgctcgccgcgccgggcacgccggctgcggggttagccgctgggtccggcccctgcctcccacagccctcgtcgctgccgcccttgattcctggcggccatgcgaccgtgtccggccccggggtggcgcgggggttcgcgagtcccctgggcgccggccgggcgtcgggggagcagtggcagccgccccggccggcgcctctcgccgcctgtgcccaactgcagctgctcgacgggtccggggccgccgggcaggaggagttggaggaggacgatgcctttatcagcgtgcaggtgccggcggccgcctttttgggctccgggacccccgggagtgggagcggcagtcggggacgcctcaactcgttcactcagggaatcctgcccatcgccttctccaggccgacttcgcagaactactgctccctggagcagccaggccagggcggcagcaccagcgccttcgagcagctgcagaggtcccgacggcgcctcatctcccagagatcttccttggagaccctggaagatattgaggagaacgcccctctccggagatgtcgaactctctcaggttcacccagaccaaagaattttaagaagattcattttatcaagaacatgcggcaacacgataccaggaatggcagaatagtccttatcagtggcagaagatccttctgtagtatattttcagtgctgccgtatcgcgacagtacccaagtcggggacttgaagttggacggaggaagacaatcaactggtgcagtgagtttgaaagagatcattggtctggaaggtgtggagctgggtgctgatgggaagactgtttcctatacccaatttctgttacccacaaatgcctttggagcccggagaaataccatagactccacctcctctttctcccagttccgtaacctgagccaccgcagcctctccataggccgggcaagcggcacccaggggagcctcgacacaggtagtgacctgggagactttatggactatgacccaaatctcttggatgacccccagtggccttgtggcaaacacaaacgcgttctgatcttcccttcctacatgacaacagtgattgactacgtgaagccctcggatctcaagaaggacatgaacgagaccttcaaggagaagtttcctcacattaagctgacactcagcaaaattaggagtctgaaacgagagatgcggaagcttgcgcaggaggactgtggccttgaggagcccacggtggccatggccttcgtctactttgaaaagctcgccctcaaggggaaactcaacaaacagaaccggaagctgtgtgctggggcatgtgtgctgttagcagccaaaattggaagtgacctcaaaaaacacgaagtcaagcatttaattgacaaactggaagagaagttccggctgaacaggcgagaactgattgcctttgaattcccggtgttagtggccttggaattcgccctccacttgcccgagcacgaagtcatgccccactacagacggctggtccagagttcctagcactggccccgaggacagccaagggccatttcttctcagcttggtggagcagcacttacttactactggaaatgaaaaaaagtagaactcagaataccagacttttcttcctctcgacatagtttggggagaagcagtactagaaactttccaaggagtcttgggtgtgtagccaagaggagccatgagctatggactcctcaagcacgggaagaggaggtgtgtgctgagaacagagaggccctgccctctgtccactagcgagaatccctagctgccccagcccagtctttctccccggcattcacaaactttgcaagcgtggtccagggccttctccagatctgttccaacttggagtgtgaagggcttgagcatacgggggaagagagtctgcagaagttgggggaaaacttttaaaagataccctcattgtgtcaaagagtgtgccaatctatttttgtatcagcattggaagtgcactttcccctggggcgtgtgggtgtgtgaatgtgcaagtgtctgagagatactgcatcagccctagacccccagagccagtcccgccctttacagagcagcccttagcctggggccatgggtcaggctgaccttcaacaattatttctagatgatttctggataagaattgctctctcggtaccagacagtttgacatcctccacccttagaaaatgactgacattgttttgttactgctcctacccaccaaggggataaagaaggcgagttctgagtgttggatgagtcagtcgcgtggaaggacgtggagcgtggcgctctgtaacttcctgccgtctgccaccccgccacgtgtatttaaccctcgcactttctccactgtggagatggctggggcggcgccccacagtgtgtattcctgtcctctatgttagagtgcatcagaagcacatttactgtgctatctatatcgctatataaaagtgttttataaaaacccagaataggagcacgacgcatgattggtgtttgaggcgtttgccagctgggacaaactgcgtttggagctgtggttaagctgactaaggaggcggtggctctttcttaacattcccacgtgcccagggctgttcatgcaagattttaatggtgacttgtcctggcttactgggacagtctgtatgaggcatgtcaccacactgtcgcctcatagctgcaagagagaggcaccagctgaagttcccctgactgaagagagcctgtggccatgtaaaaagagaattaaactcttgttgctttttgtatacctgtatgcgtttgtgtagacgtgtgtctcaccagtcacctttgccctgcattgctgatccccttgcgcacactgattctagtgaggtcacagattcggagcttcacacaccagcccagagaaagggcgatggaaccgaaccgagggtctgcagctttcgttagcagagctgtcagattcttgacagtcttggaggatggagaaattcaagcagcagctggtgagggccaaaacagaatacttggcttcttcagaatcttagattgcactgagtttagtcctaaatattttgctaacaaatttccttggccagaatcagttgtaagacagtgatttgggtggtggggggagggaggagggagaggatatgattaatgtggtctctttggctgatcgaaagctagatcaactggtacttagggcacttgctgtttataaagcaaaattgagaaaatattcaaggtgcctccatcgcctgaactacaaaatgcccttggccttcctcacatggggtctgtcaccttgcatctctgataagccatccaccttcctggtcagtgcctacagggggagagcctttctgagaagcaggtcctgtggtatctgagaatggtctagagagctccccactgcccatctgcccccgaatttcctgccaagctctggggagtggggtggggggagggacgtccgatggatgacaggccgccagcccagacgtggggagagaagcctgagtcctttcctgtgtgataaaatcaggctaatttacttggatttggggtgatttgtttggtttttagcatttatgaggtgagcccatgaagttagtggtccattactttttaaagatgcattttcattttaaactgtctcctggcctgtggatttgtggaatggacagttttgtgggttttaatttatttgtgaggagtcggggctgagaaggcattttatcaggaggtctccttttgcacgtccatgacatgagcttttcggaggcaaaggaagtggaggagggtgagagatgcaggtcactgccagaggcacctctgtgacacggaacattccagacacgtcgcagccttgggcttcggcgaggaggaagtctgagcctgtgaagcgagaaggccaggcagtagactggctctgaggttttgccctttgacctcctccacagagggcagcttcagccccttgtaagccctgccccctctcaggactgccctgaggcctctccagtcctccccacactcagagatctgtggggaagctccgcccagccacactccttgggataatactagccggttctgcctgattccttttcccccggagccagcctagggggcccgggactcctctagtgagccttgactgttaggtaagagacaggaagcagacaagccaagaggttgctgcagctgcccccaggaggaaacgggcagcagggagtgtggcccagcccccactgtacccctccaggggcccgagcccttgccagcccaatgacaccttgaagtcaccacttttcctttcttgcccgctaataaaacctatttaaacaggaaattcataccaaatgcaaatgggttttgttttccttggcattttgttgttccgatcacagatttccctgccagggtgtctgtggttatcagctgcaggctcagcttggggcggccgcttcacacaagccactctgtaccacgtgccctaccttagtgacgggagtaaggagcttccttcccctccatgtcattccttcctgttcccttcattccccaacagcaaataaaactgttgaatgctctg

SEQ ID NO: 40641 - DNA, 1902 bp, Artificial Sequence
  derived and/or modified sequence
atggccgccgccgccgccgccgccaccaccgccgcctgcagcagcggcagcgccggcaccgacgccgccggcgccagcggcctgcagcagccccccccccagccccagccccagcccgccgccgccgcccccgcccagcccccccccgagccccccagaaagcccagaatggaccccagaagaagacaggccgccctgagcttcctgaccaacatcagcctggacggcagactgcccccccaggacgccgagtggggcggcggcgaggagggcggcgccgccaagcccggcgccggcggcgcctgcggcgccagaaccagattcagcctgctggccgccgccgagagaggcggctgcatcgccctggccgcccccggcacccccgccgccggcctggccgccggcagcggcccctgcctgccccagcccagcagcctgccccccctgatccccggcggccacgccaccgtgagcggccccggcgtggccagaggcttcgccagccccctgggcgccggcagagccagcggcgagcagtggcagccccccagacccgcccccctggccgcctgcgcccagctgcagctgctggacggcagcggcgccgccggccaggaggagctggaggaggacgacgccttcatcagcgtgcaggtgcccgccgccgccttcctgggcagcggcacccccggcagcggcagcggcagcagaggcagactgaacagcttcacccagggcatcctgcccatcgccttcagcagacccaccagccagaactactgcagcctggagcagcccggccagggcggcagcaccagcgccttcgagcagctgcagagaagcagaagaagactgatcagccagagaagcagcctggagaccctggaggacatcgaggagaacgcccccctgagaagatgcagaaccctgagcggcagccccagacccaagaacttcaagaagatccacttcatcaagaacatgagacagcacgacaccagaaacggcagaatcgtgctgatcagcggcagaagaagcttctgcagcatcttcagcgtgctgccctacagagacagcacccaggtgggcgacctgaagctggacggcggcagacagagcaccggcgccgtgagcctgaaggagatcatcggcctggagggcgtggagctgggcgccgacggcaagaccgtgagctacacccagttcctgctgcccaccaacgccttcggcgccagaagaaacaccatcgacagcaccagcagcttcagccagttcagaaacctgagccacagaagcctgagcatcggcagagccagcggcacccagggcagcctggacaccggcagcgacctgggcgacttcatggactacgaccccaacctgctggacgacccccagtggccctgcggcaagcacaagagagtgctgatcttccccagctacatgaccaccgtgatcgactacgtgaagcccagcgacctgaagaaggacatgaacgagaccttcaaggagaagttcccccacatcaagctgaccctgagcaagatcagaagcctgaagagagagatgagaaagctggcccaggaggactgcggcctggaggagcccaccgtggccatggccttcgtgtacttcgagaagctggccctgaagggcaagctgaacaagcagaacagaaagctgtgcgccggcgcctgcgtgctgctggccgccaagatcggcagcgacctgaagaagcacgaggtgaagcacctgatcgacaagctggaggagaagttcagactgaacagaagagagctgatcgccttcgagttccccgtgctggtggccctggagttcgccctgcacctgcccgagcacgaggtgatgccccactacagaagactggtgcagagcagctag

SEQ ID NO: 40642 - protein, 353 aa, Artificial Sequence
  derived and/or modified sequence
MDETVAEFIKRTILKIPMNELTTILKAWDFLSENQLQTVNFRQRKESVVQHLIHLCEEKRASISDAALLDIIYMQFHQHQKVWEVFQMSKGPGEDVDLFDMKQFKNSFKKILQRALKNVTVSFRETEENAVWIRIAWGTQYTKPNQYKPTYVVYYSQTPYAFTSSSMLRRNTPLLGQALTIASKHHQIVKMDLRSRYLDSLKAIVFKQYNQTFETHNSTTPLQERSLGLDINMDSRIIHENIVEKERVQRITQETFGDYPQPQLEFAQYKLETKFKSGLNGSILAEREEPLRCLIKFSSPHLLEALKSLAPAALVCRIQKLLCYSGSHSQGTQDPSSWQKDLYLLFVPLYPRC

SEQ ID NO: 40643 - DNA, 1062 bp, Artificial Sequence
  derived and/or modified sequence
atggacgaaacggtcgccgaatttatcaagaggacaatattgaaaatcccaatgaatgagctgacgacaattctcaaagcctgggactttctgagcgagaaccagttgcagactgtgaactttcgtcagaggaaagagagtgtcgttcagcatcttattcacctgtgtgaggagaagcgggcctcaatctccgatgccgcactgctggatatcatctacatgcagtttcaccagcaccagaaagtgtgggaagtgtttcaaatgtctaaaggccctggagaggacgtggacctattcgatatgaagcagtttaaaaactcctttaaaaagattctgcagcgagccttgaaaaacgtgacagtgagcttccgcgagaccgaagagaatgcagtttggattcggattgcttgggggacccagtatactaaacctaaccagtacaaacccacctacgtggtctattactcccagacaccctacgccttcacctcctcatcaatgctgaggcggaacactccgctgctgggacaggcgctgactattgccagcaagcaccaccagatagtgaagatggacctgaggtcacgctaccttgacagcctcaaggccattgtgttcaagcaatacaatcaaacctttgaaacccacaattctacaacaccgctgcaagagcgctcactggggttggacatcaacatggattctcgaatcatccacgagaacattgtcgagaaggagagggtacagaggattactcaagaaacctttggtgattatccacaacctcagctggaatttgcacagtacaaactggaaacaaagtttaaaagcggcctgaatggctcaatattagcagagcgtgaggaaccactcaggtgcttaattaaatttagttcccctcacctactggaggcacttaaatccttggctcctgccgcgctggtgtgtcgcatccagaagctgctgtgctattccgggagtcactcgcaagggacgcaggacccatcatcatggcaaaaagacctatacctgctgttcgttcctctctatcccagatgctag

SEQ ID NO: 40644 - DNA, 1062 bp, Artificial Sequence
  derived and/or modified sequence
atggatgagaccgtggccgagttcatcaagaggaccatcctgaagatccccatgaatgagctgaccaccatcctgaaggcctgggacttcctgtctgagaaccagctgcagacagtgaacttccggcagaggaaggagagcgtggtgcagcacctgatccacctgtgtgaggagaagagggccagcatcagtgatgctgccctgctggacatcatctacatgcagttccaccagcaccagaaggtgtgggaggtgttccagatgagcaagggccctggagaagatgtggacctgtttgacatgaagcagttcaagaacagcttcaagaagatcctgcagagggccctgaagaatgtgacagtgtccttccgggagacagaggagaatgctgtgtggatcagaattgcctggggcacccagtacaccaagcccaaccagtacaagcccacctacgtggtgtactacagccagaccccctatgccttcaccagcagctccatgctgcggaggaacacccccctgctgggccaggccctgaccatcgccagcaagcaccaccagatcgtgaagatggacctgcggagccgctacctggacagcctgaaggccatcgtgttcaagcagtacaaccagacctttgagacccacaacagcaccacccccctgcaggagaggagcctgggcctggacatcaacatggacagccgcatcatccacgagaacatcgtggagaaggagcgggtgcagaggatcacccaggagaccttcggggactacccccagccccagctggagtttgcccagtacaagctggagaccaagttcaagagcggcctgaatggcagcatcctggccgagcgggaggagcccctgcgctgcctgatcaagttcagcagcccccacctgctggaggccctgaagagcctggccccagctgccctggtgtgccgcatccagaagctgctgtgctacagcggcagccacagccagggcacccaggaccccagctcctggcagaaggacctgtacctgctgtttgtgcccctgtacccccgctgctag

SEQ ID NO: 40645 - DNA, 1062 bp, Artificial Sequence
  derived and/or modified sequence
atggacgagaccgtggccgagttcatcaagcggaccatcctgaagatccctatgaacgaactaacgaccatcttgaaagcttgggacttcctctcagagaatcaactacagacagttaattttcggcaacgtaaggagtctgtggtacagcatctgatccatctctgcgaagagaaacgagcttctattagtgacgccgcgctgctggacatcatttatatgcagttccatcaacatcagaaagtctgggaggtgtttcagatgtctaaagggcctggcgaagacgtggatctgtttgatatgaagcagttcaaaaatagcttcaaaaagatcctccagcgtgccttaaagaatgtaactgtatcattcagagagaccgaagaaaacgccgtctggatcaggattgcgtgggggacccagtacaccaagcctaatcaatataagcccacatacgtcgtctactactcccagaccccgtatgcctttacaagctcatctatgctgcgtcgcaatacgcccttactcggacaggctctgactattgcatccaaacatcaccagattgtgaaaatggatttgcgatcgagatatctggattcactgaaagctatcgtcttcaaacagtacaatcaaacatttgagacacataatagtacgacgcctcttcaggagcggtcactgggactggacatcaacatggattcccggataattcatgaaaatatcgttgagaaggagcgtgttcagcgaattacccaagagacttttggggactacccccagccacagctggagttcgcccagtacaagctagaaacgaaattcaagtccgggctgaatggctctatattggcagaaagagaagagccactgaggtgcttaattaagttttccagtccacacctgctggaggcgctgaagagtctggctcccgccgctctggtgtgccggatccagaaacttctctgctattctggttcacattcccaagggactcaagatcctagctcttggcagaaggatctatatctgctgttcgttcctctatacccgcgttgttag

SEQ ID NO: 40646 - DNA, 1062 bp, Artificial Sequence
  derived and/or modified sequence
atggacgagacagtcgccgagtttattaagaggaccattcttaagattccaatgaatgagttgacgactattcttaaggcctgggatttcttaagtgaaaatcaactgcaaactgtgaattttcggcagcggaaggagagtgttgtccagcaccttatacacctgtgcgaagagaagcgggcaagcatctctgatgcagcacttcttgacatcatctacatgcagtttcaccagcaccaaaaagtgtgggaagtcttccaaatgtccaagggacctggggaagacgtggacctgttcgatatgaagcaattcaagaatagttttaagaaaatcctgcagagggccctaaagaatgtcaccgttagctttcgggagaccgaagagaacgctgtctggatccgcattgcttgggggacccagtatactaagcccaatcagtacaaacccacttatgtcgtctattactcccaaaccccctacgccttcacctcatcctctatgctgcgtcgtaacacacccctgctggggcaggcccttactattgcaagcaagcatcatcaaatagtaaaaatggatctccgttcgcgctacctagactctctgaaggccatcgttttcaaacagtataatcagacttttgagacacacaacagtaccacccccctccaagagcgcagtcttggcctggatattaatatggattcccgaattattcatgagaatatcgtcgagaaagagagagtccagaggatcacacaggagactttcggggattacccgcaaccccagcttgagtttgcccagtacaaactcgagacaaagtttaaatcggggctgaacggcagtattctggccgagagagaggaaccattacgctgcctgatcaagttctccagcccccatttgctggaggcactaaaaagcctggcgcctgccgctctggtgtgtcgaatccagaagctgctttgttattcaggcagtcacagccagggcactcaagatccatccagctggcagaaggatctgtatttactgtttgtacccctatatccgcgatgttag

SEQ ID NO: 40647 - DNA, 1556 bp, Artificial Sequence
  derived and/or modified sequence
ggctttgaaggcgcggcgagcgggaacagctcttgaggagtgagactgcaggagatgtgggccgtgccaaagagatggatgagactgttgctgagttcatcaagaggaccatcttgaaaatccccatgaatgaactgacaacaatcctgaaggcctgggattttttgtctgaaaatcaactgcagactgtaaatttccgacagagaaaggaatctgtagttcagcacttgatccatctgtgtgaggaaaagcgtgcaagtatcagtgatgctgccctgttagacatcatttatatgcaatttcatcagcaccagaaagtttgggaagtttttcagatgagtaaaggaccaggtgaagatgttgacctttttgatatgaaacaatttaaaaattcgttcaagaaaattcttcagagagcattaaaaaatgtgacagtcagcttcagagaaactgaggagaatgcagtctggattcgaattgcctggggaacacagtacacaaagccaaaccagtacaaacctacctacgtggtgtactactcccagactccgtacgccttcacgtcctcctccatgctgaggcgcaatacaccgcttctgggtcaggcgctgacaattgctagcaaacaccatcagattgtgaaaatggacctgagaagtcggtatctggactctcttaaggctattgtttttaaacagtataatcagacctttgaaactcacaactctacgacacctctacaggaaagaagccttggactagatataaatatggattcaaggatcattcatgaaaacatagtagaaaaagagagagtccaacgaataactcaagaaacatttggagattatcctcaaccacaactagaatttgcacaatataagcttgaaacgaaattcaaaagtggtttaaatgggagcatcttggctgagagggaagaacccctccgatgcctaataaagttctctagcccacatcttctggaagcattgaaatccttagcaccagcggcacttgtttgcaggatccaaaagctgctctgctattctggaagccacagtcaagggacccaggacccgagcagctggcagaaggacttgtaccttctgtttgtcccattgtatccaagatgttaaaatcatgatgtcacaacatttagacatttaaatggttaatcaaatgtatgtctctcctgatatacagctaactgctatagactaatgcaggcctccttgttaaaatggaccctttgttactcaaatttgaccaatcttggaagcttggatgtgcactgacttgacaaccactttttgtgggacataacactctagacacaggtgcttctagctctaaggggaacagataactaatctgtggccaaccaaccaatgattaatcagctatgctgcctcggatcttgatcaaaaaaggaaaatgtgaaaagtgatacacaaaatggcatcactttggttcagagctctaaaatggagttgggaagccattctaagaaggactgcctgcacaatctgcaacttgcaaaacacaaaaacaaaaaa

SEQ ID NO: 40648 - DNA, 1062 bp, Artificial Sequence
  derived and/or modified sequence
atggacgagaccgtggccgagttcatcaagagaaccatcctgaagatccccatgaacgagctgaccaccatcctgaaggcctgggacttcctgagcgagaaccagctgcagaccgtgaacttcagacagagaaaggagagcgtggtgcagcacctgatccacctgtgcgaggagaagagagccagcatcagcgacgccgccctgctggacatcatctacatgcagttccaccagcaccagaaggtgtgggaggtgttccagatgagcaagggccccggcgaggacgtggacctgttcgacatgaagcagttcaagaacagcttcaagaagatcctgcagagagccctgaagaacgtgaccgtgagcttcagagagaccgaggagaacgccgtgtggatcagaatcgcctggggcacccagtacaccaagcccaaccagtacaagcccacctacgtggtgtactacagccagaccccctacgccttcaccagcagcagcatgctgagaagaaacacccccctgctgggccaggccctgaccatcgccagcaagcaccaccagatcgtgaagatggacctgagaagcagatacctggacagcctgaaggccatcgtgttcaagcagtacaaccagaccttcgagacccacaacagcaccacccccctgcaggagagaagcctgggcctggacatcaacatggacagcagaatcatccacgagaacatcgtggagaaggagagagtgcagagaatcacccaggagaccttcggcgactacccccagccccagctggagttcgcccagtacaagctggagaccaagttcaagagcggcctgaacggcagcatcctggccgagagagaggagcccctgagatgcctgatcaagttcagcagcccccacctgctggaggccctgaagagcctggcccccgccgccctggtgtgcagaatccagaagctgctgtgctacagcggcagccacagccagggcacccaggaccccagcagctggcagaaggacctgtacctgctgttcgtgcccctgtaccccagatgctag

SEQ ID NO: 40649 - protein, 273 aa, Artificial Sequence
  derived and/or modified sequence
MSGSQSEVAPSPQSPRSPEMGRDLRPGSRVLLLLLLLLLVYLTQPGNGNEGSVTGSCYCGKRISSDSPPSVQFMNRLRKHLRAYHRCLYYTRFQLLSWSVCGGNKDPWVQELMSCLDLKECGHAYSGIVAHQKHLLPTSPPISQASEGASSDIHTPAQMLLSTLQSTQRPTLPVGSLSSDKELTRPNETTIHTAGHSLAAGPEAGENQKQPEKNAGPTARTSATVPVLCLLAIIFILTAALSYVLCKRRRGQSPQSSPDLPVHYIPVAPDSNT

SEQ ID NO: 40650 - DNA, 822 bp, Artificial Sequence
  derived and/or modified sequence
atgtctggctcgcaaagcgaagtagccccaagtcctcagtcaccccggtcacctgaaatgggcagagatcttcggcctgggagtcgggtgttgctgcttttactactgttactcttggtatacctgacacagccaggcaacggcaatgaaggcagcgtcacaggctcatgctactgtgggaagagaatatcttctgacagcccgccttcagtccaatttatgaacagactgaggaagcacctgcgggcataccaccggtgcttgtattacactagatttcaactgctgtcctggtccgtctgcggcggcaacaaggatccgtgggtacaggagctcatgagctgtctggacctcaaagagtgtgggcacgcctactcaggcattgtcgcacaccagaagcacctcctgcctacaagccccccaatttctcaagccagcgaaggggcctctagcgacatccacacaccagcccaaatgctgctgtcaacgcttcagtcaactcagcggcctacccttcccgtcggtagcctgagctctgataaggagctcacccggcctaacgaaaccaccattcacaccgctgggcacagtctggcggctgggcccgaggccggtgaaaatcaaaaacagccggaaaagaacgcaggacctactgccaggacctcagctaccgtgccggtcctgtgtctgctggctatcatttttattctgaccgccgctctttcttatgtgctgtgtaagaggcggaggggccaaagtcctcagtcatctcccgacctgcctgttcactacatacctgtcgcgcccgatagcaacacgtag

SEQ ID NO: 40651 - DNA, 822 bp, Artificial Sequence
  derived and/or modified sequence
atgtcgggatcccagtccgaagttgccccttctcctcaaagtccacgcagcccagaaatgggccgcgatctgaggccaggaagccgcgtgctgctgttgttgctattattgctccttgtctacctcacacagcccggtaatggcaatgaaggttccgtgactggttcatgttattgtgggaagcggattagctcggatagtccgccatccgtccagttcatgaatcgactcagaaagcacctgcgagcctaccaccggtgtctgtactacacccggttccagctgctttcatggtccgtctgcggcggcaataaagacccttgggtccaggagctgatgtcttgtttggacctgaaggagtgtggtcatgcttacagcggtattgtagcgcatcagaaacacctgttgcccacgtctccaccgattagccaggcaagcgagggggcttcaagcgacatccacaccccagcccagatgcttttgagtacgctccagagcactcaacggcccacgttacccgtcggctccctgtcatccgacaaggagctcaccagacctaatgaaaccacaattcacacggctgggcattccttggctgcaggccctgaggccggagagaaccagaaacagcctgagaagaacgctggccccaccgcgaggacttccgccaccgtccctgtactgtgtcttttggcgataatctttattctaacggcagctctgtcttatgtcctttgtaagagaaggagagggcagtcaccccaatccagtccagatctgccagtgcactacatccccgttgctcctgattcaaacacatag

SEQ ID NO: 40652 - DNA, 822 bp, Artificial Sequence
  derived and/or modified sequence
atgagcggcagccagagcgaggtggcccccagcccccagagccccaggagccctgagatgggccgggacctgcggcccggcagccgggtgctgctgctgctgctgctgctgctgctggtgtacctgacccagcctggaaatggaaatgaaggctctgtgacaggcagctgctactgcggcaagaggatcagcagtgacagcccccccagcgtgcagttcatgaaccggctgaggaagcacctgcgggcctaccaccgctgcctgtactacacccgcttccagctgctgtcctggagcgtgtgtggcggcaacaaggacccctgggtgcaggagctgatgagctgcctggacctgaaggaatgtggccacgcctacagcggcatcgtggcccaccagaagcacctgctgcccaccagcccccccatcagccaggccagcgagggcgccagcagtgacatccacaccccagcccagatgctgctgagcaccctgcagagcacccagaggcccaccctgcctgtgggcagcctgagcagtgacaaggagctgacccggcccaatgagaccaccatccacacagctggccacagcctggccgccggccctgaggccggggagaaccagaagcagcctgagaagaatgccggccccacagcccggaccagcgccaccgtgcctgtgctgtgcctgctggccatcatcttcatcctgacagctgccctgtcctatgtgctgtgcaagagaagaagaggccagagcccccagagcagcccagacctgcctgtgcactacatccctgtggccccagacagcaacacctag

SEQ ID NO: 40653 - DNA, 822 bp, Artificial Sequence
  derived and/or modified sequence
atgagcggcagccagagcgaggtggcccccagcccccagagccccagaagtcccgagatgggcagggacctccgccccgggagcagagtgctgctgctcttgctgctcctcctgcttgtgtacctcacacagcccggaaacggcaacgagggctctgttactggctcctgctactgcggcaaacgaattagcagtgattctcctccctcggtccagtttatgaaccgcttacgtaaacatctccgagcatatcatcgatgcctatactatacacggttccaactcctctcctggagcgtatgcggcggaaataaggacccctgggtccaggagctcatgtcgtgtctggaccttaaggaatgcggacatgcttacagcggtatcgtagcccaccagaaacacttattaccaaccagtcctcccatttctcaggcctccgagggagcgagcagcgatatccacacacctgcccaaatgctgctttctaccctgcaatcgacacagcgaccgacacttcccgtgggatcactgagctctgacaaagagctcacgcggccaaatgaaactaccattcatactgcaggtcactcactcgccgccggtccagaggcaggggaaaatcagaagcaacccgaaaaaaatgccgggcctaccgcccgtacctccgcgacagtgccagttctctgtctgctagctatcatattcattctgactgccgccttatcctacgtgttatgtaagcggcgcagggggcagagtccacagtcttcaccagaccttccagtccactatatccctgtggcccccgacagtaacacctag

SEQ ID NO: 40654 - DNA, 822 bp, Artificial Sequence
  derived and/or modified sequence
atgagcggcagccagagcgaggtggcccccagcccccagagccccagatccccagagatgggcagggacctgcgccccggctcacgagttttattgcttctcctactcctgttacttgtgtatcttacacagccaggtaacggaaatgaaggctctgtgactggttcttgctactgtggcaaacgaattagcagcgattcacccccatcagtgcagtttatgaatcgtctcaggaagcacttgcgggcatatcaccgatgtctgtactacacacggttccagctgctcagctggagcgtgtgcgggggtaataaggacccctgggttcaggaactcatgagttgtctagacctgaaggagtgcggtcatgcttactctgggatcgtagcccaccagaagcaccttctcccaactagtccccctatctcgcaagcctccgagggtgcatccagtgacatccatactccagcccagatgctgttgtctacgctgcagtcgacccagagaccaacattgcctgtgggctcccttagctcagacaaagagcttactaggcctaatgaaaccaccatacacacagctgggcactcactcgctgctggccctgaagccggggagaatcagaaacagcctgagaaaaacgccggacccactgccagaacaagcgcaacagtgcccgttctgtgcctcctagcgatcatcttcatcctcactgcagccctctcatacgtgctgtgtaaaaggcgaagaggccagtctccccaaagctcccccgatctacccgtccactacattccggtggctcctgacagtaacacatag

SEQ ID NO: 40655 - DNA, 822 bp, Artificial Sequence
  derived and/or modified sequence
atgtccggcagccaatccgaggtcgcacctagcccccagagcccccgatctcctgaaatggggagagacctgagacccggttcccgcgtgctccttctgttgctgcttctactgctggtctatctgacccaaccaggaaatggcaatgaggggtccgtgaccggcagctgctactgtgggaagcgaatcagcagtgactctccacctagtgtgcagtttatgaaccggcttaggaagcatctccgagcgtatcataggtgcctttattatactcggttccagctgttgtcgtggagtgtgtgcggaggaaacaaagatccttgggtccaggagctgatgtcctgtctggatctgaaagagtgtggccatgcatactccgggattgtggcgcaccagaaacacctcctgcctacatctccccctatcagccaggcctccgagggcgcaagctccgacatccacacaccagcccaaatgctgttatctactttgcagtcaactcagagacctaccctccctgtcggtagcctgtccagcgataaggagctgaccagacctaacgagacaacaatccacaccgccggacactctctggcagccggtccagaagccggagaaaaccagaagcagcccgaaaaaaatgctggcccaaccgcccgaacctcggccactgtacccgtgctctgcttactggcaatcatctttatactgaccgccgctctttcatacgtcctctgtaaaaggcgcagaggccagagcccccaatctagccctgacctgcccgtgcattacattccagtggctcctgacagtaacacgtag

SEQ ID NO: 40656 - DNA, 822 bp, Artificial Sequence
  derived and/or modified sequence
atgtctggcagccagagtgaggtcgctccgtcacctcagagcccgaggtctcccgaaatgggaagggacctgcgcccaggatcaagagttctgctcctccttttgctgcttctgttagtgtaccttactcagcccggaaatggaaacgagggtagtgtgacaggttcctgttattgcggaaaaagaatatcatctgactcccccccaagcgtccagtttatgaatcgactgaggaagcatctgagggcatatcataggtgtctctattacactaggttccagctgttatcttggtcagtttgtggcggaaacaaagatccatgggttcaggagctgatgtcctgcctggatctcaaggagtgcggacatgcatatagcggaatcgtggcacaccagaagcacctgctgccaaccagcccgccaatctctcaagcttctgaaggcgcttcctctgacatccatactccagctcagatgttgctcagtaccctgcaaagcacccagaggccgaccttgcctgtgggctcactctcatctgacaaagagctaacacgacccaacgagaccacgatccacacggctggacattcactggcggcaggtcctgaggcaggagagaaccagaaacaaccggaaaagaacgctggtccaacggcaaggactagcgcaaccgtccccgtgctgtgtctgctggccataatttttatcctgacagctgccctatcatatgtcttgtgtaagcgcagacgcggtcagagcccacaatcttcccctgatctgccagtccactacatcccagtggcccctgactctaacacctag

SEQ ID NO: 40657 - DNA, 2324 bp, Artificial Sequence
  derived and/or modified sequence
ggtgcgtccgcgggtggctgccccgcaggtgcgcgcggccggggctggcggcgactctctccaccgggccgcccgggaggctcatgcagcgcggctgggtcccgcggcgcccggatcggggaagtgaaagtgcctcggaggaggagggccggtccggcagtgcagccgcctcacaggtcggcggacgggccaggcgggcggcctcctgaaccgaaccgaatcggctcctcgggccgtcgtcctcccgcccctcctcgcccgccgccggagttttctttcggtttcttccaagattcctggccttccctcgacggagccgggcccagtgcgggggcgcagggcgcgggagctccacctcctcggctttccctgcgtccagaggctggcatggcgcgggccgagtactgagcgcacggtcggggcacagcagggccggggggtgcagctggctcgcgcctcctctccggccgccgtctcctccggtccccggcgaaagccattgagacaccagctggacgtcacgcgccggagcatgtctgggagtcagagcgaggtggctccatccccgcagagtccgcggagccccgagatgggacgggacttgcggcccgggtcccgcgtgctcctgctcctgcttctgctcctgctggtgtacctgactcagccaggcaatggcaacgagggcagcgtcactggaagttgttattgtggtaaaagaatttcttccgactccccgccatcggttcagttcatgaatcgtctccggaaacacctgagagcttaccatcggtgtctatactacacgaggttccagctcctttcctggagcgtgtgtgggggcaacaaggacccatgggttcaggaattgatgagctgtcttgatctcaaagaatgtggacatgcttactcggggattgtggcccaccagaagcatttacttcctaccagccccccaatttctcaggcctcagagggggcatcttcagatatccacacccctgcccagatgctcctgtccaccttgcagtccactcagcgccccaccctcccagtaggatcactgtcctcggacaaagagctcactcgtcccaatgaaaccaccattcacactgcgggccacagtctggcagctgggcctgaggctggggagaaccagaagcagccggaaaaaaatgctggtcccacagccaggacatcagccacagtgccagtcctgtgcctcctggccatcatcttcatcctcaccgcagccctttcctatgtgctgtgcaagaggaggagggggcagtcaccgcagtcctctccagatctgccggttcattatatacctgtggcacctgactctaatacctgagccaagaatggaagcttgtgaggagacggactctatgttgcccaggctgttatggaactcctgagtcaagtgatcctcccaccttggcctctgaaggtgcgaggattataggcgtcacctaccacatccagcctacacgtatttgttaatatctaacataggactaaccagccactgccctctcttaggcccctcatttaaaaacggttatactataaaatctgcttttcacactgggtgataataacttggacaaattctatgtgtattttgttttgttttgctttgctttgttttgagacggagtctcgctctgtcatccaggctggagtgcagtggcatgatctcggctcactgcaacccccatctcccaggttcaagcgattctcctgcctcctcctgagtagctgggactacaggtgctcaccaccacacccggctaattttttgtatttttagtagagacggggtttcaccatgttgaccaggctggtctcgaactcctgacctggtgatctgcccacccaggcctcccaaagtgctgggattaaaggtgtgagccaccatgcctggccctatgtgtgttttttaactactaaaaattatttttgtaatgattgagtcttctttatggaaacaactggcctcagcccttgcgcccttactgtgattcctggcttcattttttgctgatggttccccctcgtcccaaatctctctcccagtacaccagttgttcctcccccacctcagccctctcctgcatcctcctgtacccgcagcgaaggcctgggctttcccaccctccctccttagcaggtgccgtgctgggacaccatacgggttggtttcacctcctcagtcccttgcctaccccagtgagagtctgatcttgtttttattgttattgcttttattattattgcttttattatcattaaaactctagttcttgttttgtctctccgaa

SEQ ID NO: 40658 - DNA, 1668 bp, Artificial Sequence
  derived and/or modified sequence
tccgcgggtggctgccccgcaggtgcgcgcggccggggctggcggcgactctctccaccgggccgcccgggaggctcatgcagcgcggctgggtcccgcggcgcccggatcggggaagtgaaagtgcctcggaggaggagggccggtccggcagtgcagccgcctcacaggtcggcggacgggccaggcgggcggcctcctgaaccgaaccgaatcggctcctcgggccgtcgtcctcccgcccctcctcgcccgccgccggagttttctttcggtttcttccaagattcctggccttccctcgacggagccgggcccagtgcgggggcgcagggcgcgggagctccacctcctcggctttccctgcgtccagaggctggcatggcgcgggccgagtactgagcgcacggtcggggcacagcagggccggggggtgcagctggctcgcgcctcctctccggccgccgtctcctccggtccccggcgaaagccattgagacaccagctggacgtcacgcgccggagcatgtctgggagtcagagcgaggtggctccatccccgcagagtccgcggagccccgagatgggacgggacttgcggcccgggtcccgcgtgctcctgctcctgcttctgctcctgctggtgtacctgactcagccaggcaatggcaacgagggcagcgtcactggaagttgttattgtggtaaaagaatttcttccgactccccgccatcggttcagttcatgaatcgtctccggaaacacctgagagcttaccatcggtgtctatactacacgaggttccagctcctttcctggagcgtgtgtgggggcaacaaggacccatgggttcaggaattgatgagctgtcttgatctcaaagaatgtggacatgcttactcggggattgtggcccaccagaagcatttacttcctaccagccccccaatttctcaggcctcagagggggcatcttcagatatccacacccctgcccagatgctcctgtccaccttgcagtccactcagcgccccaccctcccagtaggatcactgtcctcggacaaagagctcactcgtcccaatgaaaccaccattcacactgcgggccacagtctggcagctgggcctgaggctggggagaaccagaagcagccggaaaaaaatgctggtcccacagccaggacatcagccacagtgccagtcctgtgcctcctggccatcatcttcatcctcaccgcagccctttcctatgtgctgtgcaagaggaggagggggcagtcaccgcagtcctctccagatctgccggttcattatatacctgtggcacctgactctaatacctgagccaagaatggaagcttgtgagggtaaactgtggcttattcttacaaaaagtgtaataaaggagactgacccctgacaacatggtaggcactgtatacatacttgtttttgttttttgttttttagagacggactctatgttgcccaggctgttatggaactcctgagtcaagtgatcctcccaccttggcctctgaaggtgcgaggattataggcgtcacctaccacatccagcctacacgtatttgttaatatctaacataggactaaccagccactgccctctcttaggcccctcatttaaaaacggttatactata

SEQ ID NO: 40659 - DNA, 822 bp, Artificial Sequence
  derived and/or modified sequence
atgagcggcagccagagcgaggtggcccccagcccccagagccccagaagccccgagatgggcagagacctgagacccggcagcagagtgctgctgctgctgctgctgctgctgctggtgtacctgacccagcccggcaacggcaacgagggcagcgtgaccggcagctgctactgcggcaagagaatcagcagcgacagcccccccagcgtgcagttcatgaacagactgagaaagcacctgagagcctaccacagatgcctgtactacaccagattccagctgctgagctggagcgtgtgcggcggcaacaaggacccctgggtgcaggagctgatgagctgcctggacctgaaggagtgcggccacgcctacagcggcatcgtggcccaccagaagcacctgctgcccaccagcccccccatcagccaggccagcgagggcgccagcagcgacatccacacccccgcccagatgctgctgagcaccctgcagagcacccagagacccaccctgcccgtgggcagcctgagcagcgacaaggagctgaccagacccaacgagaccaccatccacaccgccggccacagcctggccgccggccccgaggccggcgagaaccagaagcagcccgagaagaacgccggccccaccgccagaaccagcgccaccgtgcccgtgctgtgcctgctggccatcatcttcatcctgaccgccgccctgagctacgtgctgtgcaagagaagaagaggccagagcccccagagcagccccgacctgcccgtgcactacatccccgtggcccccgacagcaacacctag

SEQ ID NO: 40660 - protein, 217 aa, Artificial Sequence
  derived and/or modified sequence
MWQPATERLQHFQTMLKSKLNVLTLKKEPLPAVIFHEPEAIELCTTTPLMKTRTHSGCKVTYLGKVSTTGMQFLSGCTEKPVIELWKKHTLAREDVFPANALLEIRPFQVWLHHLDHKGEATVHMDTFQVARIAYCTADHNVSPNIFAWVYREINDDLSYQMDCHAVECESKLEAKKLAHAMMEAFRKTFHSMKSDGRIHSNSSSEEVSQELESDDG

SEQ ID NO: 40661 - DNA, 654 bp, Artificial Sequence
  derived and/or modified sequence
atgtggcagcctgcaaccgagagattgcagcacttccagacaatgttaaagtctaagttgaacgtgctcaccctcaaaaaggaacccctgcccgctgtaatctttcacgagccagaggcaattgagctgtgcacgacgacaccactgatgaaaacgcgtacccactccggctgtaaggtgacttatctagggaaggtgtccaccaccgggatgcagttcttaagcggatgcacagaaaaacccgtgatagagctgtggaaaaaacacactctggctagagaagacgtgtttccagcgaacgccctgctggaaatccgcccattccaggtatggctgcaccacttagatcataagggagaggcaacagtgcacatggacacattccaggtggcacgtattgcctactgcacggctgaccacaatgtgagtcccaatatcttcgcctgggtctatagagagatcaatgacgatctttcgtatcagatggattgtcatgctgtcgaatgtgaatcgaagttagaagccaagaagcttgcccatgcgatgatggaggcttttcgcaaaacttttcattcgatgaaatccgacgggcgaatccactcaaactccagttctgaggaggtgagtcaggaattggaaagcgatgacggttag

SEQ ID NO: 40662 - DNA, 507 bp, Artificial Sequence
  derived and/or modified sequence
atgtggcagccagcgacagagcgcttgcaggtgacttacctcgggaaagtgagcacaaccgggatgcagttcctgtccggttgcactgaaaagcccgtcattgagctgtggaaaaagcacactttggcccgcgaggatgtctttcctgctaacgcccttcttgagattagaccgtttcaggtctggctgcatcatcttgaccacaagggagaagccaccgtgcatatggatacgttccaggtcgctagaatagcgtattgtactgccgaccataacgtcagccctaatatcttcgcctgggtctaccgcgaaattaatgacgacttaagttaccaaatggattgccatgcagtggaatgtgaatccaaactggaagccaagaaactcgcccacgctatgatggaggccttcaggaaaaccttccactcaatgaagtcagatgggaggatccacagcaattcctcctccgaagaggtttctcaagagctagaaagcgacgatggctag

SEQ ID NO: 40663 - DNA, 654 bp, Artificial Sequence
  derived and/or modified sequence
atgtggcagcctgccacagagcggctgcagcacttccagaccatgctgaagagcaagctgaatgtgctgaccctgaagaaggagcccctgcctgctgtgatcttccacgagcctgaggccatcgagctgtgcaccaccacccccctgatgaagaccaggacccacagcggctgcaaggtgacctacctgggcaaggtgtccaccaccggcatgcagttcctgagcggctgcacagagaagcctgtgattgagctgtggaagaagcacaccctggcccgggaggatgtgtttcctgccaatgccctgctggagatccggcccttccaggtgtggctgcaccacctggaccacaagggggaggccaccgtgcacatggacaccttccaggtggccagaattgcctactgcacagctgaccacaacgtgagccccaacatctttgcctgggtgtaccgggagatcaatgatgacctgagctaccagatggactgccacgctgtggagtgtgagagcaagctggaggccaagaagctggcccacgccatgatggaggccttcaggaagaccttccacagcatgaagagtgatggccgcatccacagcaacagcagcagcgaggaggtgtcccaggagctggagagtgatgatggatag

SEQ ID NO: 40664 - DNA, 507 bp, Artificial Sequence
  derived and/or modified sequence
atgtggcagcctgccacagagcggctgcaggtgacctacctgggcaaggtgtccaccaccggcatgcagttcctgagcggctgcacagagaagcctgtgattgagctgtggaagaagcacaccctggccagagaagatgtgtttcctgccaatgccctgctggagatccggcccttccaggtgtggctgcaccacctggaccacaagggggaggccaccgtgcacatggacaccttccaggtggcccgcatcgcctactgcacagctgaccacaacgtgagccccaacatctttgcctgggtgtaccgggagatcaatgatgacctgagctaccagatggactgccacgctgtggagtgtgagagcaagctggaggccaagaagctggcccacgccatgatggaggccttcaggaagaccttccacagcatgaagagtgatggccgcatccacagcaacagcagcagcgaggaggtgtcccaggagctggagagtgatgatggatag

SEQ ID NO: 40665 - DNA, 654 bp, Artificial Sequence
  derived and/or modified sequence
atgtggcagcccgccaccgagcggctgcagcacttccagaccatgctgaaaagcaaactaaatgtgctcaccctgaagaaggagccgttaccggcagtgatattccacgagcccgaagctatcgagttgtgtaccactacccctttaatgaagacaaggacacactcaggctgcaaagtgacgtatctgggaaaggtttctactacaggaatgcaatttttgtctgggtgcacagagaagcccgtaattgaattgtggaaaaagcacactctggcccgtgaggatgtgtttccggccaacgccctgttggaaattcgaccatttcaggtgtggctgcaccacctggatcacaaaggggaagctaccgtacatatggataccttccaggtggcaagaattgcatactgtaccgcggatcataacgtcagcccaaatatctttgcatgggtgtacagagagatcaacgatgatctttcttaccagatggactgtcacgcagtggaatgtgaatctaaactcgaggctaaaaaactcgctcatgccatgatggaggcatttagaaaaacgttccatagcatgaagtccgacggtcgcatccatagtaacagtagttcagaagaggtttctcaggaacttgagagtgacgatggttag

SEQ ID NO: 40666 - DNA, 507 bp, Artificial Sequence
  derived and/or modified sequence
atgtggcagcccgccaccgagcggctgcaggtgacctacctgggcaaggtgagcacgactgggatgcagtttctgagcggctgcaccgagaagccagttattgagttgtggaagaagcatacccttgcccgagaggatgtcttcccagccaacgccctgctggagatccgaccatttcaagtgtggctgcaccatctcgatcataaaggggaagctaccgttcacatggatacttttcaggtggcccgaatcgcctactgtactgctgaccacaacgtgtctccgaacatctttgcttgggtgtatcgtgagatcaacgatgacctttcctaccagatggactgtcatgcggtggaatgtgaatccaaactggaggctaagaaactagcccacgccatgatggaggccttcagaaaaacgttccacagcatgaaatcagatggtaggatccactctaatagctcaagcgaagaagtgagccaagaactcgaaagtgatgatggctag

SEQ ID NO: 40667 - DNA, 2533 bp, Artificial Sequence
  derived and/or modified sequence
agtcctctcgcagctgcgccaggacagccggcgcgcggccgtgcccacaagttgccggcagctgagcgccgcgcctcctcctgctcgcagccccctacgcccacccggcggcggtggccagcgccaggacgcacatcccgcggacaccgaccccagatgtaaagcgggaccccagcccctcgccccccggcgcgatcgacagtctcgccagcgtctcctctgccaaaacccagggctggaagatgtggcagccggccacggagcgcctgcagcactttcagaccatgctgaagtctaaattgaatgtcttaacactgaaaaaggaacctctcccagcggtcatcttccatgagccggaggccattgagctgtgcacgaccacaccgctgatgaagacaaggactcacagtggctgcaaggttacctacctgggcaaagtctccaccactggcatgcagtttttgtcaggctgcacagaaaagccagtcattgagctctggaagaagcacacgctagcccgagaggatgtctttccggccaatgccctcctggaaatccggccattccaagtttggctccatcatctcgaccacaaaggggaggccacagtgcacatggataccttccaggtggcccgcatcgcctactgcaccgccgaccacaacgtgagccccaacatcttcgcctgggtctacagggagatcaatgatgacctgtcctaccagatggactgccacgccgtggagtgcgagagcaagctcgaggccaagaaactggcccacgccatgatggaggccttcaggaagactttccacagtatgaagagcgacgggcggatccacagcaacagctcctccgaagaggtttcccaggaattggaatccgatgatggctgaatgaacttgagacgcttcagcaaaggcagcattggtcacggagttcaagggaatagatgagtaagcaacgtttcaaatttgggatgaaaagactgccaaactattggctgaccaaggtttttaaattcagaagagcaattctaaatctaaagaaatgtatcattaaagtaattacgttacattgaaacctgctgctgctgtgactgtgaggagggtgggagtgtggatggggaggaaggttctaggctctcttatttttctcatttcccaatgcctctctgtgggagagctccatgccagttttcaccacgctcaggcaaatactctgcagctgttattggatgggccattccgatctgccttatgaaattccacaagaatgttaggggcacctatgggatctctagtggggtgggcagggtgctgatggggacgctggccgcagggaggaaggaacatctcgggagggccctctgttcctctcccacggcagatgccctcctctgtatgcaaatcagcacagcctttattgagctttacaactaacaacctgatagttggcagttaattcacagttacagataatgcttttatttacataaatataccaagtagtaccctcttattgtattcacttcatctattttcttagaatacttgcaattactaatgaccccttccctttccctcctgctgccctgtccaccctctttccccttctaacatccttagagggatgaaatctcagcatatgttgcaggacaccaaaaggaagaaaacaatcaagcaaataaaataaacagtcaaacaaaccaggagtttaaaacaacaaccccaacaacagaagccttggcaaagaggaataagtgatcagcaagtgaacacactctatgtcaactctccttttatccagctgagatttatggtaacttatttaattaatggtcctgtctgatgcatccttgatggcaagcttcaaatctgatttggtatcaccgaggaaaccttgcccccatcactcagcattgcacttagatacagaatgagttagataaacttggcttgtctagagacccatgtcatcttaacctaaagggaaatcttattgcgttatcataaaattgatgatatcttagggtcagaattgccctttttttttattttgaatgggaagttctcactaaaacaatcctgagatttcttaatttcatggttctttaaatattataaacacagagtcaacatagaatgaaattgtatttgttaaaatacacacattggaggacaagagcagatgactacttttcgaagtaatgctgctccttcctaaaagtctgttttcaatcctggtaatattaggggcactgcggcacctaagaagccttaaatgagagctaatccaatctagagagcgatggtgtcagcatttcggtctgcatatctgtgtgtccgtatctgcgtttgtgtgcgtgtacgtgtgcccctgtgtgtgggcccagttttcaggcatgtagaataagcatggagtcatattgaggaggactcacttcttgaagatatgcttgttgctttacaacatatgtaagctattctttagcataaatgcattcattctttaataaaaatatgtttgcatt

SEQ ID NO: 40668 - DNA, 2387 bp, Artificial Sequence
  derived and/or modified sequence
tctcgcagctgcgccaggacagccggcgcgcggccgtgcccacaagttgccggcagctgagcgccgcgcctcctcctgctcgcagccccctacgcccacccggcggcggtggccagcgccaggacgcacatcccgcggacaccgaccccagatgtaaagcgggaccccagcccctcgccccccggcgcgatcgacagtctcgccagcgtctcctctgccaaaacccagggctggaagatgtggcagccggccacggagcgcctgcaggttacctacctgggcaaagtctccaccactggcatgcagtttttgtcaggctgcacagaaaagccagtcattgagctctggaagaagcacacgctagcccgagaggatgtctttccggccaatgccctcctggaaatccggccattccaagtttggctccatcatctcgaccacaaaggggaggccacagtgcacatggataccttccaggtggcccgcatcgcctactgcaccgccgaccacaacgtgagccccaacatcttcgcctgggtctacagggagatcaatgatgacctgtcctaccagatggactgccacgccgtggagtgcgagagcaagctcgaggccaagaaactggcccacgccatgatggaggccttcaggaagactttccacagtatgaagagcgacgggcggatccacagcaacagctcctccgaagaggtttcccaggaattggaatccgatgatggctgaatgaacttgagacgcttcagcaaaggcagcattggtcacggagttcaagggaatagatgagtaagcaacgtttcaaatttgggatgaaaagactgccaaactattggctgaccaaggtttttaaattcagaagagcaattctaaatctaaagaaatgtatcattaaagtaattacgttacattgaaacctgctgctgctgtgactgtgaggagggtgggagtgtggatggggaggaaggttctaggctctcttatttttctcatttcccaatgcctctctgtgggagagctccatgccagttttcaccacgctcaggcaaatactctgcagctgttattggatgggccattccgatctgccttatgaaattccacaagaatgttaggggcacctatgggatctctagtggggtgggcagggtgctgatggggacgctggccgcagggaggaaggaacatctcgggagggccctctgttcctctcccacggcagatgccctcctctgtatgcaaatcagcacagcctttattgagctttacaactaacaacctgatagttggcagttaattcacagttacagataatgcttttatttacataaatataccaagtagtaccctcttattgtattcacttcatctattttcttagaatacttgcaattactaatgaccccttccctttccctcctgctgccctgtccaccctctttccccttctaacatccttagagggatgaaatctcagcatatgttgcaggacaccaaaaggaagaaaacaatcaagcaaataaaataaacagtcaaacaaaccaggagtttaaaacaacaaccccaacaacagaagccttggcaaagaggaataagtgatcagcaagtgaacacactctatgtcaactctccttttatccagctgagatttatggtaacttatttaattaatggtcctgtctgatgcatccttgatggcaagcttcaaatctgatttggtatcaccgaggaaaccttgcccccatcactcagcattgcacttagatacagaatgagttagataaacttggcttgtctagagacccatgtcatcttaacctaaagggaaatcttattgcgttatcataaaattgatgatatcttagggtcagaattgccctttttttttattttgaatgggaagttctcactaaaacaatcctgagatttcttaatttcatggttctttaaatattataaacacagagtcaacatagaatgaaattgtatttgttaaaatacacacattggaggacaagagcagatgactacttttcgaagtaatgctgctccttcctaaaagtctgttttcaatcctggtaatattaggggcactgcggcacctaagaagccttaaatgagagctaatccaatctagagagcgatggtgtcagcatttcggtctgcatatctgtgtgtccgtatctgcgtttgtgtgcgtgtacgtgtgcccctgtgtgtgggcccagttttcaggcatgtagaataagcatggagtcatattgaggaggactcacttcttgaagatatgcttgttgctttacaacatatgtaagctattctttagcataaatgcattcattctttaataaaaatatgtttgcattaataaa

SEQ ID NO: 40669 - DNA, 654 bp, Artificial Sequence
  derived and/or modified sequence
atgtggcagcctgccactgagcgccttcagcacttccagaccatgctgaagtctaagttaaatgttctgaccctgaagaaagaacctctgccggcagtgatttttcacgaaccggaggctatcgaactgtgtacaactacacctctgatgaagactcggacacacagtggctgcaaggtgacctacctgggcaaagtctccacaaccggaatgcagttcctgtctggctgtaccgaaaagccggtcatcgagctgtggaaaaagcataccctggctcgcgaggacgtgtttccagcaaatgcgcttcttgagattcgacctttccaggtttggctgcatcatcttgaccataaaggtgaggctacagtacacatggacacctttcaagttgctcgcattgcttactgcacagccgaccataacgttagccccaatattttcgcgtgggtttaccgggaaattaacgatgatttaagttaccagatggattgtcacgcggtggagtgcgagtccaagctggaagccaaaaaactggctcatgccatgatggaagcttttagaaagaccttccattcaatgaagtcagatggcaggatccacagcaattccagcagcgaagaagtgagtcaagaactcgaatccgacgacggctag

SEQ ID NO: 40670 - DNA, 507 bp, Artificial Sequence
  derived and/or modified sequence
atgtggcagccggctaccgaacgcctgcaggttacctatctcggcaaagtttcgaccaccgggatgcagttccttagcggttgcacagaaaaacctgtgatcgaactgtggaagaagcataccttagcccgagaagatgtgttccctgccaacgctctcctcgagattaggccatttcaggtctggctgcatcacctggaccacaaaggtgaagccacagttcatatggacaccttccaggtggccagaatcgcctactgcacggccgatcataacgtatcacctaacatctttgcttgggtctatagggaaataaatgatgacctgagttaccagatggattgccatgcagtggagtgtgagagcaagctggaagctaagaaactggctcacgccatgatggaagcttttaggaagacgttccactccatgaagtcggatgggcgaatccactccaattcttcatcagaggaggtttctcaggagctcgaaagcgatgatgggtag

SEQ ID NO: 40671 - DNA, 654 bp, Artificial Sequence
  derived and/or modified sequence
atgtggcagcccgccaccgagagactgcagcacttccagaccatgctgaagagcaagctgaacgtgctgaccctgaagaaggagcccctgcccgccgtgatcttccacgagcccgaggccatcgagctgtgcaccaccacccccctgatgaagaccagaacccacagcggctgcaaggtgacctacctgggcaaggtgagcaccaccggcatgcagttcctgagcggctgcaccgagaagcccgtgatcgagctgtggaagaagcacaccctggccagagaggacgtgttccccgccaacgccctgctggagatcagacccttccaggtgtggctgcaccacctggaccacaagggcgaggccaccgtgcacatggacaccttccaggtggccagaatcgcctactgcaccgccgaccacaacgtgagccccaacatcttcgcctgggtgtacagagagatcaacgacgacctgagctaccagatggactgccacgccgtggagtgcgagagcaagctggaggccaagaagctggcccacgccatgatggaggccttcagaaagaccttccacagcatgaagagcgacggcagaatccacagcaacagcagcagcgaggaggtgagccaggagctggagagcgacgacggctag

SEQ ID NO: 40672 - DNA, 507 bp, Artificial Sequence
  derived and/or modified sequence
atgtggcagcccgccaccgagagactgcaggtgacctacctgggcaaggtgagcaccaccggcatgcagttcctgagcggctgcaccgagaagcccgtgatcgagctgtggaagaagcacaccctggccagagaggacgtgttccccgccaacgccctgctggagatcagacccttccaggtgtggctgcaccacctggaccacaagggcgaggccaccgtgcacatggacaccttccaggtggccagaatcgcctactgcaccgccgaccacaacgtgagccccaacatcttcgcctgggtgtacagagagatcaacgacgacctgagctaccagatggactgccacgccgtggagtgcgagagcaagctggaggccaagaagctggcccacgccatgatggaggccttcagaaagaccttccacagcatgaagagcgacggcagaatccacagcaacagcagcagcgaggaggtgagccaggagctggagagcgacgacggctag

SEQ ID NO: 40673 - protein, 204 aa, Artificial Sequence
  derived and/or modified sequence
MVMAEGTAVLRRNRPGTKAQYIQQNIRADCSNIDKILEPPEGQDEGVWKYEHLRQFCLELNGLAVKLQSECHPDTCTQMTATEQWIFLCAAHKTPKECPAIDYTRHTLDGAACLLNSNKYFPSRVSIKESSVAKLGSVCRRIYRIFSHAYFHHRQIFDEYENETFLCHRFTKFVMKYNLMSKDNLIVPILEEEVQNSVSGESEA

SEQ ID NO: 40674 - DNA, 615 bp, Artificial Sequence
  derived and/or modified sequence
atggtgatggccgagggcaccgccgtgctgagaagaaacagacccggcaccaaggcccagtacatccagcagaacatcagagccgactgcagcaacatcgacaagatcctggagccccccgagggccaggacgagggcgtgtggaagtacgagcacctgagacagttctgcctggagctgaacggcctggccgtgaagctgcagagcgagtgccaccccgacacctgcacccagatgaccgccaccgagcagtggatcttcctgtgcgccgcccacaagacccccaaggagtgccccgccatcgactacaccagacacaccctggacggcgccgcctgcctgctgaacagcaacaagtacttccccagcagagtgagcatcaaggagagcagcgtggccaagctgggcagcgtgtgcagaagaatctacagaatcttcagccacgcctacttccaccacagacagatcttcgacgagtacgagaacgagaccttcctgtgccacagattcaccaagttcgtgatgaagtacaacctgatgagcaaggacaacctgatcgtgcccatcctggaggaggaggtgcagaacagcgtgagcggcgagagcgaggcctag

SEQ ID NO: 40675 - DNA, 615 bp, Artificial Sequence
  derived and/or modified sequence
atggtgatggctgagggtacagccgtcctaaggcggaaccgaccgggtactaaggcccagtatatccaacagaatattagagctgactgttctaacattgataagatactcgagcctcccgaggggcaggacgagggggtatggaaatatgagcacctgaggcagttttgcctggagctgaacggtttggcggtgaaattgcaatctgagtgtcaccctgacacctgtacgcagatgaccgctaccgaacaatggattttcctttgcgccgcccacaagacaccaaaagagtgccccgctatcgattataccagacacaccctggacggcgccgcttgcttactcaattctaataaatacttcccatccagagtctcgataaaagaatcgtccgtggccaaactaggcagcgtttgccggagaatctacaggatattcagccatgcctattttcaccataggcagatcttcgatgagtacgagaacgagacctttctgtgtcacagatttactaagttcgtgatgaagtataacctgatgagcaaagataatctgatagtgccaatcttggaagaagaggtacaaaactctgtgagtggcgagtcagaagcatag

SEQ ID NO: 40676 - DNA, 615 bp, Artificial Sequence
  derived and/or modified sequence
atggtgatggccgagggcacagctgtgctgcggaggaacagacctggcaccaaggcccagtacatccagcagaacatccgggctgactgcagcaacatcgacaagatcctggagcccccagagggccaggatgagggcgtgtggaagtatgagcacctgcggcagttctgcctggagctgaatggcctggccgtgaagctgcagagcgagtgccacccagacacctgcacccagatgacagccacagagcagtggatcttcctgtgtgccgcccacaagacccccaaggaatgtcctgccatcgactacaccaggcacaccctggatggagctgcctgcctgctgaacagcaacaagtacttccccagccgggtgtccatcaaggagagctctgtggccaagctgggctctgtgtgccgccgcatctaccgcatcttcagccacgcctacttccaccaccggcagatctttgatgaatatgaaaatgagaccttcctgtgccaccgcttcaccaagtttgtgatgaagtacaacctgatgagcaaggacaacctgattgtgcccatcctggaggaggaggtgcagaacagcgtgtctggagagagcgaggcctag

SEQ ID NO: 40677 - DNA, 615 bp, Artificial Sequence
  derived and/or modified sequence
atggtgatggccgagggcaccgccgtgctgcggcggaaccggcccggtacgaaagcgcagtacatccaacagaatattagagcagattgctcgaatatagataagatcctggaacctccagaaggccaggacgaaggagtctggaagtacgaacacctaaggcagttctgtctcgagcttaacggtttggcagttaagctccaaagtgagtgtcaccctgacacctgtacccagatgaccgcgactgagcagtggatttttctttgcgccgcccacaagactccaaaagagtgcccagctatcgattacacccggcacaccctcgatggagcggcctgcctccttaacagtaacaaatattttcctagccgagtgtcaatcaaggagtctagcgtagctaagttagggagcgtctgcaggcgcatctaccgcatcttttctcacgcttactttcatcatcgccaaatattcgatgagtacgaaaatgaaactttcctatgtcataggtttacaaaatttgtgatgaaatacaacctgatgagcaaggacaacttaattgtgcctatcttggaggaggaggtgcagaatagtgtgagcggggaatctgaggcctag

SEQ ID NO: 40678 - DNA, 615 bp, Artificial Sequence
  derived and/or modified sequence
atggtcatggcggaggggaccgccgtgctccgcagaaacagaccaggcacaaaagcccagtacattcaacaaaacatcagagcagactgctcaaatatcgataaaatcttggaacctccagaaggccaggatgagggcgtatggaaatatgaacacttacgacagttctgtctggagctcaatgggctcgccgtgaaactgcaaagtgagtgccaccccgacacctgtacacaaatgaccgcaactgaacagtggatctttctctgtgccgctcataagaccccaaaggagtgccctgcaatcgactatacacggcatacactagatggagctgcttgcctcttgaattcgaataagtatttcccttcacgagtgtctatcaaagagtctagcgttgcgaaattaggctcagtatgtcgtagaatatataggatcttctcgcatgcatatttccaccacagacaaattttcgacgaatatgagaacgagacattcctttgtcacagatttaccaagtttgtgatgaaatacaatctgatgtccaaggataatctgatcgttcctatactcgaagaagaagttcagaacagcgtgtccggcgagtcagaggcttag

SEQ ID NO: 40679 - DNA, 1021 bp, Artificial Sequence
  derived and/or modified sequence
acatccgggtaccgactccagccgcctagacgctggcactatggtcatggcggaggggacggcagtgctgaggcggaacaggccgggcaccaaggcgcagtatattcaacagaacataagagcagattgctccaatattgacaaaattcttgaaccacctgaaggccaagatgaaggtgtgtggaagtatgaacatttaaggcagttctgccttgagctaaatggacttgctgtcaaacttcagagtgaatgccatccagatacttgcactcaaatgacagcaactgaacaatggatttttctttgtgcagctcataaaactccaaaagagtgtcctgctatagactatactagacacacacttgatggtgctgcatgtcttctgaatagcaataaatattttcccagcagggttagcataaaggaatcatctgtagcgaaactaggatcagtatgccgtaggatttacagaatattttcacatgcttattttcatcatcggcagatatttgatgaatatgaaaatgaaacatttttgtgtcatcggtttactaagtttgtgatgaaatacaatttgatgtccaaggataacctgattgtaccaattttagaagaggaagtacagaattcagtttctggggaaagtgaagcatgaagggaatcataggaaaaatgtactgatcatataattaacattatgtactgtatatatcattttagacacatcaatcatgtatccatattatagcttctttgtttagtataggtttttgtatgctgggtttgccttttaaaatgggaaatactttttaagttattcataagctgtatattcaccagtgtggcactcatggtttttaaataagattagtattatctgtttataatgcctgttaataaaagaatttacagtttggtaaaattgctgctaaacaatcattggatcacaatcctcatcagacaaacccatctgtaaaaaaaatgagggagagcttgaggtttcacacaagccatttactaa

SEQ ID NO: 40680 - protein, 475 aa, Artificial Sequence
  derived and/or modified sequence
MHTTESKNEHLEDENFQTSTTPQSLIDPNNTAQEETKTVLSDTEEIKPQTKKETYISCPLRGVLNVIITNGVILFVIWCMTWSILGSEALPGGNLFGLFIIFYSAIIGGKILQLIRIPLVPPLPPLLGMLLAGFTIRNVPFINEHVHVPNTWSSILRSIALTIILIRAGLGLDPQALRHLKVVCFRLAVGPCLMEASAAAVFSHFIMKFPWQWAFLLGFVLGAVSPAVVVPYMMVLQENGYGVEEGIPTLLMAASSMDDILAITGFNTCLSIVFSSGGILNNAIASIRNVCISLLAGIVLGFFVRYFPSEDQKKLTLKRGFLVLTMCVSAVLGSQRIGLHGSGGLCTLVLSFIAGTKWSQEKMKVQKIITTVWDIFQPLLFGLVGAEVSVSSLESNIVGISVATLSLALCVRILTTYLLMCFAGFSFKEKIFIALAWMPKATVQINQAILLLFLLREEWTNCKVAKKCEYTKERQ

SEQ ID NO: 40681 - DNA, 1428 bp, Artificial Sequence
  derived and/or modified sequence
atgcacaccaccgagagcaagaacgagcacctggaggacgagaacttccagaccagcaccaccccccagagcctgatcgaccccaacaacaccgcccaggaggagaccaagaccgtgctgagcgacaccgaggagatcaagccccagaccaagaaggagacctacatcagctgccccctgagaggcgtgctgaacgtgatcatcaccaacggcgtgatcctgttcgtgatctggtgcatgacctggagcatcctgggcagcgaggccctgcccggcggcaacctgttcggcctgttcatcatcttctacagcgccatcatcggcggcaagatcctgcagctgatcagaatccccctggtgccccccctgccccccctgctgggcatgctgctggccggcttcaccatcagaaacgtgcccttcatcaacgagcacgtgcacgtgcccaacacctggagcagcatcctgagaagcatcgccctgaccatcatcctgatcagagccggcctgggcctggacccccaggccctgagacacctgaaggtggtgtgcttcagactggccgtgggcccctgcctgatggaggccagcgccgccgccgtgttcagccacttcatcatgaagttcccctggcagtgggccttcctgctgggcttcgtgctgggcgccgtgagccccgccgtggtggtgccctacatgatggtgctgcaggagaacggctacggcgtggaggagggcatccccaccctgctgatggccgccagcagcatggacgacatcctggccatcaccggcttcaacacctgcctgagcatcgtgttcagcagcggcggcatcctgaacaacgccatcgccagcatcagaaacgtgtgcatcagcctgctggccggcatcgtgctgggcttcttcgtgagatacttccccagcgaggaccagaagaagctgaccctgaagagaggcttcctggtgctgaccatgtgcgtgagcgccgtgctgggcagccagagaatcggcctgcacggcagcggcggcctgtgcaccctggtgctgagcttcatcgccggcaccaagtggagccaggagaagatgaaggtgcagaagatcatcaccaccgtgtgggacatcttccagcccctgctgttcggcctggtgggcgccgaggtgagcgtgagcagcctggagagcaacatcgtgggcatcagcgtggccaccctgagcctggccctgtgcgtgagaatcctgaccacctacctgctgatgtgcttcgccggcttcagcttcaaggagaagatcttcatcgccctggcctggatgcccaaggccaccgtgcagatcaaccaggccatcctgctgctgttcctgctgagagaggagtggaccaactgcaaggtggccaagaagtgcgagtacaccaaggagagacagtag

SEQ ID NO: 40682 - DNA, 1428 bp, Artificial Sequence
  derived and/or modified sequence
atgcacacaaccgagagcaagaacgagcacctggaagacgaaaactttcaaactagcactactccacagtctttaatagaccccaacaacacagctcaggaagaaaccaagactgttctgagtgatacagaagagataaagccacagactaaaaaggagacttatatcagctgtccgttgcgaggagtgcttaacgtgatcataactaatggcgtaatcctgttcgttatttggtgcatgacgtggtctattttgggatcagaagcactgccaggcggtaacctctttggattgttcattatcttctactccgccatcattggcggcaaaatcttgcagcttattcggatccccctggtgccacctctgcctcctctcctgggcatgctgctggcggggttcactattcgtaatgtaccgtttatcaatgaacacgttcacgtgcccaatacatggtcatcgattcttcggtccatcgccctcaccattatccttatccgcgctgggttgggactagacccccaggctctgcgccacttgaaagttgtgtgtttccgtttggccgttgggccttgcctgatggaggccagcgccgcagctgttttctcacactttatcatgaagttcccttggcagtgggccttcttgctgggtttcgttctgggggccgtcagccccgcagtggtggtgccctatatgatggtcttgcaggagaacggttacggggttgaggaaggtatccccactctgctaatggcagcctcatcaatggacgacatcttggccataactgggttcaatacatgcctgagcattgtcttttcaagcggggggattttgaacaatgccatcgcttccatccgaaatgtgtgcatttctctactggcaggcattgttctcgggttcttcgtgcgctactttccgagtgaggatcagaaaaagctgacattgaaacgcggctttcttgtattaacaatgtgcgtatccgccgttctgggctctcagcgcatcggactgcacggatcgggtgggctgtgcaccttagtgcttagctttatcgcaggtacgaaatggagtcaggaaaaaatgaaagtgcagaaaattattactacagtgtgggatattttccaaccacttctcttcggcctagttggggcggaagtttcagtatctagtctcgagtccaacattgtagggatcagcgtggccaccctctccttggcactttgcgtgaggatcttgactacatacttgctaatgtgcttcgccggatttagctttaaagagaagatttttattgcgttggcttggatgcccaaggctaccgtccagatcaatcaagccattctcttactttttctccttcgcgaggaatggaccaattgcaaggttgccaagaaatgcgagtacaccaaggagagacagtag

SEQ ID NO: 40683 - DNA, 1428 bp, Artificial Sequence
  derived and/or modified sequence
atgcacaccacagagagcaagaatgagcacctggaggatgagaacttccagaccagcaccaccccccagagcctgattgaccccaacaacacagcccaggaggagaccaagacagtgctgagtgacacagaggagatcaagccccagaccaagaaggagacctacatcagctgccccctgcggggcgtgctgaatgtcatcatcaccaacggggtcatcctgtttgtgatctggtgcatgacctggagcatcctgggcagcgaggccctgcccggcggcaacctgtttggcctcttcatcatcttctacagcgccatcattggaggcaagatcctgcagctgatccgcatccccctggtgccccccctgccccccctgctgggcatgctgctggccggcttcaccatcagaaatgtgcccttcatcaatgaacatgtgcacgtgcccaacacctggagcagcatcctgcggagcatcgccctgaccatcatcctgatccgggccggcctgggcctggacccccaggccctgcggcacctgaaggtggtgtgcttccggctggccgtgggcccctgcctgatggaggccagcgctgctgctgtgttcagccacttcatcatgaagttcccctggcagtgggccttcctgctgggctttgtgctgggcgctgtgtccccagctgtggtggtgccctacatgatggtgctgcaggagaatggctatggagtggaggagggcatccccaccctgctgatggccgccagctccatggatgacatcctggccatcaccggcttcaacacctgcctgagcatcgtgttcagcagcggcggcatcctgaacaatgccatcgccagcatcagaaatgtgtgcatcagcctgctggccggcatcgtgctgggcttctttgtgcgctacttccccagcgaggaccagaagaagctgaccctgaagaggggcttcctggtgctgaccatgtgtgtgtctgctgtgctgggcagccagagaattggcctgcacggcagcggcggcctgtgcaccctggtgctgtccttcatcgccggcaccaagtggagccaggagaagatgaaggtgcagaagatcatcaccaccgtgtgggacatcttccagcccctgctgtttggcctggtgggcgctgaggtgtctgtgagcagcctggagagcaacatcgtgggcatctctgtggccaccctgagcctggccctgtgtgtgcgcatcctgaccacctacctgctgatgtgctttgctggcttctccttcaaggagaagatcttcatcgccctggcctggatgcccaaggccaccgtgcagatcaaccaggccatcctgctgctcttcctgctgcgggaggagtggaccaactgcaaggtggccaagaagtgtgagtacaccaaggagcggcagtag

SEQ ID NO: 40684 - DNA, 1428 bp, Artificial Sequence
  derived and/or modified sequence
atgcacaccaccgagagcaagaacgagcacctggaggacgagaactttcagacatcgaccactccgcagagcctgatagatccaaacaatacagcccaggaagagactaaaactgtgttgtccgatactgaagagatcaaaccccaaaccaagaaagagacctacatttcttgccccctcagaggcgtcctgaatgtcatcataaccaatggagtgattctttttgttatctggtgcatgacctggtccatactggggtctgaggccttacctgggggaaatctcttcggactgtttatcattttttactcagccataataggcggtaagatcctccagttgatcagaattccactagtccctcccttacctcccctgctaggaatgcttttggccggcttcaccatacggaatgtgcctttcatcaacgagcacgttcatgtgcccaatacttggtcttcaatcctgcgcagcatcgcacttaccataattctgattagagcaggtctggggcttgatcctcaggcgctccggcatctaaaggtcgtgtgtttcaggctggccgtcggcccctgcctgatggaggccagtgccgctgcagtatttagtcacttcatcatgaagtttccatggcagtgggctttcctgctcggatttgtgctgggtgcagtgtctccggcagtcgtggtgccctacatgatggtccttcaggaaaatggctatggggtcgaagagggcatccccaccttgctgatggcggccagcagcatggacgacatcctggccattaccggcttcaatacttgtctgtccatagtgttctcatccgggggaatactaaataatgctattgcttctattaggaacgtctgcataagtcttcttgcaggaatagtgctgggcttctttgtgcgctacttcccgtcagaggaccaaaaaaagcttaccctgaagcgcggatttcttgttctgacgatgtgtgtttctgcggtcttgggctcccagcgaataggcttgcacggcagcggtgggctatgcacccttgtgctgtccttcattgccggcactaaatggtctcaagagaaaatgaaagtgcaaaaaatcatcacaaccgtctgggatatctttcagcctctgctgttcggactggtcggagccgaagtgagtgtgtccagcctcgagtctaacatagtgggaatctccgtagccactctttctctggcactgtgcgtgcgcattctgacgacttacctgctgatgtgctttgcaggcttcagtttcaaggagaaaatattcattgcacttgcttggatgccaaaggcaaccgtccagattaaccaggctattctgctcttattcctcctcagagaggaatggacaaattgtaaagtagctaaaaaatgcgagtacaccaaagagcgccagtag

SEQ ID NO: 40685 - DNA, 1428 bp, Artificial Sequence
  derived and/or modified sequence
atgcacacaactgaaagcaagaacgagcacctcgaggacgaaaattttcagacttcaacaaccccccagtctcttatcgaccccaacaacaccgcacaggaagaaactaagaccgtcctgtccgacaccgaggaaattaaaccccagaccaaaaaggagacctacatatcctgccccctgaggggcgtcctgaacgttatcattacgaacggcgtcattctgtttgtgatttggtgcatgacctggagtatccttgggtccgaagccttgccagggggtaatctatttggcctgttcattatattctacagcgccattatcgggggaaagatcctgcagctgatacgtatcccactggtgccccctctacccccactacttggcatgcttctcgcagggtttacaatcagaaatgtgccattcattaatgagcacgttcacgttcccaacacatggtcttccattcttagatctatcgctctgaccattattctgatccgagcaggattgggattggatcctcaggctctgcgacacctgaaggtggtatgttttcggctcgcggtcgggccatgccttatggaggcttccgctgcagccgtattctcgcactttattatgaagtttccctggcaatgggccttcctcctgggtttcgtactgggcgcagtgagccccgctgtggtcgtcccttatatgatggtcctccaggaaaacggttacggggtagaagaaggaatccccactctcctgatggcagcatcttcaatggatgatatactggctatcacaggatttaacacttgcctcagcatcgtgtttagttccgggggtatcctgaacaacgccatcgcttccatcaggaatgtgtgtatctctctcttagccggtattgttctgggctttttcgtgaggtattttccaagcgaagatcagaagaaactcacgttaaagaggggcttcttagtcttaacgatgtgcgtgagcgccgtgctgggcagtcagcgaatcgggttgcacgggagtggcggactgtgcactcttgttctgtcttttatcgcgggtaccaagtggtcccaggaaaagatgaaggtgcagaaaatcataacaaccgtttgggatatcttccagcccttgctctttgggctggtgggcgcagaggtaagtgtcagcagccttgagagcaacattgtgggcatctccgtggctaccttgtctcttgcactgtgtgtccggatcctcaccacatacctcctgatgtgttttgctggcttttcatttaaagaaaagatcttcattgccctcgcgtggatgcctaaggccactgtgcagattaaccaggccatcttgctgctctttctgttgagggaggagtggaccaactgtaaagttgccaagaagtgtgagtacactaaggagagacagtag

SEQ ID NO: 40686 - DNA, 1735 bp, Artificial Sequence
  derived and/or modified sequence
ggaagtctatccgggctttcgcgtcaccaccctgcccacctgggtggcgcgtggcttacgcaacggtcactgggctcctgggccgctcccgggccagcgagggctgcgaaagaagttgtagcatgcataccacagaatcaaaaaatgaacatttggaggatgaaaacttccaaacatctacaactcctcagagtctcattgatcctaataatactgcacaggaagaaactaaaactgtcttatcagatacagaagaaataaaaccacagacaaaaaaggagacatacatttcttgtcctctaagaggagtattgaatgtaattattacaaatggagttatactgtttgtgatatggtgtatgacctggtcaatcttaggctctgaagctctccctggtggaaatttatttgggttgttcattattttttatagtgccattattgggggaaaaattttacaactcattagaatacctttagtgcctccacttccacctcttcttgggatgttactggctggttttacgattaggaatgttccattcatcaatgaacatgtccatgttcctaacacatggtcttcaattttaagaagcattgcccttaccattattctaataagagctgggcttggactcgatccacaggctttgaggcatttgaaggtcgtttgtttcagattggctgtaggtccatgccttatggaggcaagtgcagctgctgttttttcacacttcattatgaaatttccctggcaatgggcatttctattaggttttgttctaggtgctgtctctcctgctgttgttgtcccttacatgatggtgctgcaagaaaatggatatggtgttgaggaaggcattccaaccttattaatggctgctagcagtatggatgacattctggctatcactggattcaatacatgcttgagcatagtcttttcctcaggtggtatacttaataacgccatagcctctataaggaacgtatgtattagtctgctggcaggaattgttttgggattttttgttcgatattttccaagtgaagaccagaaaaaacttacattgaagagaggattccttgttttgactatgtgtgtttctgccgtcttaggcagccaacgtattggtttacatggatctggaggattatgcacactagtgttgagtttcattgcagggacaaaatggtcccaagaaaagatgaaagtccaaaagattattacgactgtatgggatatttttcaaccacttctttttggtttagttggagcagaagtatctgtttcatcgcttgaatcaaatattgttggcatatctgttgccactctaagtttggcattatgtgttcgaattttaaccacatatctattgatgtgctttgctggttttagttttaaggagaaaatatttattgctttagcatggatgcccaaagctacagtacagattaatcaagctatccttctgttgtttcttcttcgggaggaatggacgaactgcaaggtagccaagaagtgcgagtacaccaaggaaaggcaataaccgaagccattctgaaactaaacatgtagatgtgtcagaatctgcagtgctcttggaaaagaattcaaaatagcatgtctagtttcatccttgagcttattctttgttactttttacattaattcctttttaatggatccataaaactgtgaataaataacacaataaagccagctctaccaaag

SEQ ID NO: 40687 - protein, 79 aa, Artificial Sequence
  derived and/or modified sequence
MARSRLTATSVSQVQENGFVKKLEPKSGWMTFLEVTGKICEMLFCPEAILLTRKDTPYCETGLIFLTLTKTIANTYFYF

SEQ ID NO: 40688 - DNA, 240 bp, Artificial Sequence
  derived and/or modified sequence
atggccagaagcagactgaccgccaccagcgtgagccaggtgcaggagaacggcttcgtgaagaagctggagcccaagagcggctggatgaccttcctggaggtgaccggcaagatctgcgagatgctgttctgccccgaggccatcctgctgaccagaaaggacaccccctactgcgagaccggcctgatcttcctgaccctgaccaagaccatcgccaacacctacttctacttctag

SEQ ID NO: 40689 - DNA, 240 bp, Artificial Sequence
  derived and/or modified sequence
atggcaaggagccggctgaccgcaacttccgtatcacaagtgcaggagaacgggttcgttaaaaagctcgagcccaaatccgggtggatgacgttcttggaggtgaccggcaagatctgtgagatgctcttttgccctgaagcaattctattgacacgcaaagacactccgtattgtgagactgggttgatttttcttacacttaccaaaacaatcgccaacacatatttctatttttag

SEQ ID NO: 40690 - DNA, 240 bp, Artificial Sequence
  derived and/or modified sequence
atggcgcgatccaggctgacagcgacttccgtcagccaggtgcaggaaaatggctttgtcaaaaagttagaacccaaatctggatggatgacatttcttgaagttacgggaaaaatatgcgagatgctcttttgtcctgaggccattcttctgactagaaaggatacaccctactgcgaaactggcctgatcttcctaaccctgaccaaaaccatcgctaatacgtacttctatttctag

SEQ ID NO: 40691 - DNA, 240 bp, Artificial Sequence
  derived and/or modified sequence
atggcccggagccggctgacagccacctctgtgtcccaggtgcaggagaatggatttgtgaagaagctggagcccaagagcggctggatgaccttcctggaggtgacaggcaagatctgtgagatgctgttctgcccagaggccatcctgctgaccaggaaggacaccccctactgtgaaacaggcctcatcttcctgaccctgaccaagaccatcgccaacacctacttctacttctag

SEQ ID NO: 40692 - DNA, 240 bp, Artificial Sequence
  derived and/or modified sequence
atggcccggagccggctgaccgccaccagcgtgagccaggtgcaggaaaatgggttcgtgaagaagttagaacctaagtccggttggatgacattcctagaggtgacagggaagatctgcgagatgcttttttgccccgaagcaatcctgctaacccgtaaggacactccatactgcgagaccggactgatctttctgaccttgaccaagaccatcgctaatacctatttttacttctag

SEQ ID NO: 40693 - DNA, 240 bp, Artificial Sequence
  derived and/or modified sequence
atggcccggagccggctgaccgccaccagcgtgagccaggtgcaggaaaatggattcgtgaaaaagttggagcctaaatctggctggatgacgtttctagaggtaaccggcaagatctgtgaaatgctcttttgtccggaggccattctcctgacacggaaggataccccatactgtgaaactggtctcattttcctaaccctgactaagacaattgctaacacatatttctacttttag

SEQ ID NO: 40694 - DNA, 240 bp, Artificial Sequence
  derived and/or modified sequence
atggcgaggtcacgactgactgcaacgagcgtgtcccaggtgcaggagaacggctttgtgaagaaactggagcccaagagcgggtggatgacatttctggaagtgactgggaagatctgtgaaatgctcttctgcccagaggctattctcctgacaagaaaagataccccttactgcgaaaccggcctcattttcctcactctgaccaagacgatcgccaacacatacttctacttttag

SEQ ID NO: 40695 - DNA, 240 bp, Artificial Sequence
  derived and/or modified sequence
atggcccgttcgagactgacagccacctctgtgagccaagtacaggagaacggatttgtaaaaaaacttgaacccaaatcaggttggatgaccttcctggaggtgacaggaaagatctgcgaaatgctattctgcccggaggccatactgctgacccgcaaggatactccctactgcgaaacaggacttatattcttaacactgacaaagacaatcgccaatacttacttttatttctag

SEQ ID NO: 40696 - DNA, 1004 bp, Artificial Sequence
  derived and/or modified sequence
gtttgttcctaaatctaatcgagctcccaaggaactagtatcttatagaacacacatagaaaatagtgctctacagtagtcactttcacatttttttcttggatccaacttcatgataagaaatacattttaactcataatctattcacatgtatatgaataactgaaacagaagtttcacaaaattatgattatgtttgccacaaatggtgtgctctaatattttccttctgtttcatcagaagaaaaatactggttactatccagctaagctgattttgtgacccattaatgagtttcagttctcactttgaaaacactgttctagaattacagaaaggtctagggatgagaactaacaccactgtgcatcacagtgtgtcagtctgtgccaggcagcttataaatattttttgcctctaatttttatacatttatgaggtaagtatcattttctaggtaaggatgctaatctgtctccaagccaaataacacacagtaaatcatggcaccaggatttgaatctgggtctttatacatcatagcccatgctgttctcactgtattttgctttttccaagtataaccccgttttcacacgaatggccccttcacatatttgaagactaccgtcgtgtccgtgctgaccctttctccctgccacacatggctggagtgcaatggcgcgatctcggctcactgcaacctctgtctcccaggttcaggaaaatggctttgtaaagaagcttgagcctaaatctggctggatgacttttctagaagttacaggaaagatctgtgaaatgctcttctgtcctgaagcaatactgttgaccagaaaggacactccatattgtgaaaccggcctaatttttctgactcttacgaaaacgattgccaacacatacttctacttttaaataaacaactttgatgatgtaacttgaccttccagagttacagaaattttgtccctatttaatgaataaattgtatgtattttt

SEQ ID NO: 40697 - DNA, 529 bp, Artificial Sequence
  derived and/or modified sequence
cccgaatcccggacctgcgctgaggaggcggttcatctgtggccagcggtgcttcgggacccgcgctgggggaaccctggcgacggggcctggccctgctatatgcgggggcctcggctggagtgagcggcgtggacgcctctttcctccggctcttcccttgttgctgcgagagcgagagggccgcgggcggcggaggcagcggggccgggatggaggacgttaactctaacgtgaacgcggaccaggaggctggagtgcaatggcgcgatctcggctcactgcaacctctgtctcccaggttcaggaaaatggctttgtaaagaagcttgagcctaaatctggctggatgacttttctagaagttacaggaaagatctgtgaaatgctcttctgtcctgaagcaatactgttgaccagaaaggacactccatattgtgaaaccggcctaatttttctgactcttacgaaaacgattgccaacacatacttctacttttaaataaacaactttgatgatgtaacttga

SEQ ID NO: 40698 - protein, 904 aa, Artificial Sequence
  derived and/or modified sequence
MAERGRLGLPGAPGALNTPVPMNLFATWEVDGSSPSCVPRLCSLTLKKLVVFKELEKELISVVIAVKMQGSKRILRSHEIVLPPSGQVETDLALTFSLQYPHFLKREGNKLQIMLQRRKRYKNRTILGYKTLAAGSISMAEVMQHPSEGGQVLSLCSSIKEAPVKAAEIWIASLSSQPIDHEDSTMQAGPKAKSTDNYSEEEYESFSSEQEASDDAVQGQDLDEDDFDVGKPKKQRRSIVRTTSMTRQQNFKQKVVALLRRFKVSDEVLDSEQDPAEHIPEAEEDLDLLYDTLDMEHPSDSGPDMEDDDSVLSTPKPKLRPYFEGLSHSSSQTEIGSIHSARSHKEPPSPADVPEKTRSLGGRQPSDSVSDTVALGVPGPREHPGQPEDSPEAEASTLDVFTERLPPSGRITKTESLVIPSTRSEGKQAGRRGRSTSLKERQAARPQNERANSLDNERCPDARSQLQVQLQIPRKTVYDQLNHILISDDQLPENIILVNTSDWQGQFLSDVLQRHTLPVVCTCSPADVQAAFSTIVSRIQRYCNCNSQPPTPVKIAVAGAQHYLSAILRLFVEQLSHKTPDWLGYMRFLVIPLGSHPVARYLGSVDYRYNNFFQDLAWRDLFNKLEAQSAVQDTPDIVSRITQYIAGANCAHQLPIAEAMLTYKQKRKKHFHFDFTLSPDEESSQKFIPFVGVVKVGIVEPSSATSGDSDDAAPSGSGTLSSTPPSASPAAKEASPTPPSSPSVSGGLSSPSQGVGAELMGLQVDYWTAAQPADRKRDAEKKDLPVTKNTLKCTFRSLQVSRLPSSGEAAATPTMSMTVVTKEKNKKVMFLPKKAKDKDVESKSQCIEGISRLICTARQQQNMLRVLIDGVECSDVKFFQLAAQWSSHVKHFPICIFGHSKATF

SEQ ID NO: 40699 - DNA, 2715 bp, Artificial Sequence
  derived and/or modified sequence
atggccgagagaggcagactgggcctgcccggcgcccccggcgccctgaacacccccgtgcccatgaacctgttcgccacctgggaggtggacggcagcagccccagctgcgtgcccagactgtgcagcctgaccctgaagaagctggtggtgttcaaggagctggagaaggagctgatcagcgtggtgatcgccgtgaagatgcagggcagcaagagaatcctgagaagccacgagatcgtgctgccccccagcggccaggtggagaccgacctggccctgaccttcagcctgcagtacccccacttcctgaagagagagggcaacaagctgcagatcatgctgcagagaagaaagagatacaagaacagaaccatcctgggctacaagaccctggccgccggcagcatcagcatggccgaggtgatgcagcaccccagcgagggcggccaggtgctgagcctgtgcagcagcatcaaggaggcccccgtgaaggccgccgagatctggatcgccagcctgagcagccagcccatcgaccacgaggacagcaccatgcaggccggccccaaggccaagagcaccgacaactacagcgaggaggagtacgagagcttcagcagcgagcaggaggccagcgacgacgccgtgcagggccaggacctggacgaggacgacttcgacgtgggcaagcccaagaagcagagaagaagcatcgtgagaaccaccagcatgaccagacagcagaacttcaagcagaaggtggtggccctgctgagaagattcaaggtgagcgacgaggtgctggacagcgagcaggaccccgccgagcacatccccgaggccgaggaggacctggacctgctgtacgacaccctggacatggagcaccccagcgacagcggccccgacatggaggacgacgacagcgtgctgagcacccccaagcccaagctgagaccctacttcgagggcctgagccacagcagcagccagaccgagatcggcagcatccacagcgccagaagccacaaggagccccccagccccgccgacgtgcccgagaagaccagaagcctgggcggcagacagcccagcgacagcgtgagcgacaccgtggccctgggcgtgcccggccccagagagcaccccggccagcccgaggacagccccgaggccgaggccagcaccctggacgtgttcaccgagagactgccccccagcggcagaatcaccaagaccgagagcctggtgatccccagcaccagaagcgagggcaagcaggccggcagaagaggcagaagcaccagcctgaaggagagacaggccgccagaccccagaacgagagagccaacagcctggacaacgagagatgccccgacgccagaagccagctgcaggtgcagctgcagatccccagaaagaccgtgtacgaccagctgaaccacatcctgatcagcgacgaccagctgcccgagaacatcatcctggtgaacaccagcgactggcagggccagttcctgagcgacgtgctgcagagacacaccctgcccgtggtgtgcacctgcagccccgccgacgtgcaggccgccttcagcaccatcgtgagcagaatccagagatactgcaactgcaacagccagccccccacccccgtgaagatcgccgtggccggcgcccagcactacctgagcgccatcctgagactgttcgtggagcagctgagccacaagacccccgactggctgggctacatgagattcctggtgatccccctgggcagccaccccgtggccagatacctgggcagcgtggactacagatacaacaacttcttccaggacctggcctggagagacctgttcaacaagctggaggcccagagcgccgtgcaggacacccccgacatcgtgagcagaatcacccagtacatcgccggcgccaactgcgcccaccagctgcccatcgccgaggccatgctgacctacaagcagaagagaaagaagcacttccacttcgacttcaccctgagccccgacgaggagagcagccagaagttcatccccttcgtgggcgtggtgaaggtgggcatcgtggagcccagcagcgccaccagcggcgacagcgacgacgccgcccccagcggcagcggcaccctgagcagcaccccccccagcgccagccccgccgccaaggaggccagccccaccccccccagcagccccagcgtgagcggcggcctgagcagccccagccagggcgtgggcgccgagctgatgggcctgcaggtggactactggaccgccgcccagcccgccgacagaaagagagacgccgagaagaaggacctgcccgtgaccaagaacaccctgaagtgcaccttcagaagcctgcaggtgagcagactgcccagcagcggcgaggccgccgccacccccaccatgagcatgaccgtggtgaccaaggagaagaacaagaaggtgatgttcctgcccaagaaggccaaggacaaggacgtggagagcaagagccagtgcatcgagggcatcagcagactgatctgcaccgccagacagcagcagaacatgctgagagtgctgatcgacggcgtggagtgcagcgacgtgaagttcttccagctggccgcccagtggagcagccacgtgaagcacttccccatctgcatcttcggccacagcaaggccaccttctag

SEQ ID NO: 40700 - DNA, 2715 bp, Artificial Sequence
  derived and/or modified sequence
atggccgagcgggggcggctggggcttccgggcgcacccggtgcactgaatacgcccgtgcccatgaacctttttgcaacatgggaggtggacggttcctccccatcctgcgtcccaagactttgcagcctgacactgaagaaacttgtggtgtttaaagagttagagaaagaactcataagtgtggtgatcgctgtgaagatgcaaggctcgaagcgaattctgcgttctcatgagatagttttgcctccttccggccaggtggagacagacctagccttgactttcagccttcagtatccacacttcctaaagcgagaggggaacaaactgcagattatgttgcaacgtcgtaaacggtacaaaaatcggaccatcctcgggtataagactctcgctgctggatccatctctatggctgaggtgatgcagcaccccagcgagggcggacaggtcctctcgctatgcagctcgattaaagaagccccagttaaggccgccgaaatctggatcgcctccctgagtagccagcccattgaccatgaggattccacaatgcaggccgggcccaaggctaagtcaacagacaactatagcgaagaagagtacgagagcttttctagcgaacaggaggccagcgacgacgcagttcagggtcaggatttggatgaagatgattttgacgtgggcaagcccaagaaacaaagaaggagtattgttagaactacctcaatgactaggcagcaaaattttaagcaaaaagttgtcgccctgcttcggcgattcaaagtttctgacgaggtcttagattcagagcaggaccccgctgaacacatcccggaggctgaggaggacctggatctgctgtatgatacgctcgacatggagcacccaagtgatagcggacccgatatggaagatgacgacagtgtgctgtctacaccgaaacctaaactgagaccgtatttcgaaggtcttagccactcctccagccaaacagagatcgggtctatccacagcgcaaggagccacaaagaaccaccaagtcctgctgacgtgccagaaaagacacgaagcctcggaggtcgtcagccctctgactcagtctcggacacagtggcactcggggtccccggccctagggaacaccctggtcaaccagaagacagccccgaggcagaggcttctaccctcgacgtgttcaccgaaagactgcctccgagcggacggataacaaaaacagagagtttggtgattcccagcacaaggagcgaaggcaagcaggcaggcagacggggtcggagcacttcacttaaggaacgtcaggccgctcgtccccaaaatgagcgggccaattccctggataacgaaaggtgcccagatgctagatctcagctacaggtgcagctgcaaatcccacgtaaaacagtgtacgatcagctgaatcacatcctcatatccgacgatcaactaccagagaatatcattttggtcaacacttccgactggcaagggcagtttttgagcgacgtgctccagaggcacacgctgccagtggtttgtacctgttctcccgcagacgtgcaggctgctttttccacaatcgtttcaagaattcagagatactgtaactgcaatagtcagccacccacacccgttaaaattgcggttgcaggagcccagcactatttaagcgcaatcctgagattgtttgtggagcagctgtctcataaaaccccagattggctgggctacatgagattcctggtgatcccactggggtcccaccctgtagcccgctacttaggcagcgtcgactaccgctataacaacttcttccaggaccttgcatggcgggacctattcaacaagctggaagcccagtctgctgtgcaggatactccggatattgtgtcccggatcactcagtatatagctggggcaaactgcgcccaccaactccctatagccgaagccatgctgacatataaacagaaaagaaaaaaacattttcatttcgattttacattatcaccggatgaggagtcttcccagaaattcatcccttttgtgggtgtcgtgaaggtgggcattgtggagccgagcagcgcaacgtctggggatagcgacgacgccgcgccttcaggaagcggtactctgtcatctacccctccctctgctagtcccgctgccaaggaagcaagtccgacaccccctagttctcccagtgtgagcggcggtcttagtagcccgagtcagggagttggagcagagctcatgggcctccaagtggactactggactgccgcacaaccagctgacaggaagagagatgctgagaagaaggatctgcctgttactaagaataccctgaaatgtacattcaggagtttacaggtgtcccgactcccaagcagcggagaggccgccgccacaccaactatgagtatgacggtggttacgaaggagaagaacaagaaggttatgtttctgccgaaaaaagccaaagacaaagatgtcgagagcaaatcacagtgcatagaagggatatcgcggttaatttgtaccgcccgtcagcagcagaacatgttgagagtcctcatcgatggagtcgagtgtagcgatgtcaaatttttccaactggccgctcagtggagttcccacgtgaagcacttccccatttgcatctttggtcattccaaagccaccttttag

SEQ ID NO: 40701 - DNA, 2715 bp, Artificial Sequence
  derived and/or modified sequence
atggccgagcggggccgcctgggcctgcccggggcccctggggccctgaacacccctgtgcccatgaacctgtttgccacctgggaggtggatggcagcagccccagctgtgtgccccggctgtgcagcctgaccctgaagaagctggtggtgttcaaggagctggagaaggagctgatctctgtggtgattgctgtgaagatgcagggcagcaagaggatcctgcggagccatgagatcgtgctgcccccatctggccaggtggagacagacctggccctgaccttcagcctgcagtacccccacttcctgaagcgggagggcaacaagctgcagatcatgctgcagaggaggaagcgctacaagaacagaaccatcctgggctacaagaccctggccgccggcagcatctccatggccgaggtgatgcagcaccccagcgagggcggccaggtgctgagcctgtgcagcagcatcaaggaggcccctgtgaaggctgctgagatctggatcgccagcctgagcagccagcccatcgaccacgaggacagcaccatgcaggccggccccaaggccaagagcacagacaactacagcgaggaggagtatgagagcttcagcagcgagcaggaggccagtgatgatgctgtgcagggccaggacctggatgaagatgactttgatgtgggcaagcccaagaagcagaggaggagcatcgtgaggaccacctccatgacccggcagcagaacttcaagcagaaggtggtggccctgctgcggcgcttcaaggtgtctgatgaggtgctggacagcgagcaggaccctgctgagcacatccctgaggccgaggaggacctggacctgctgtatgacaccctggacatggagcaccccagcgacagcggccctgacatggaggatgatgacagcgtgctgagcacccccaagcccaagctgcggccctactttgagggcctgagccacagcagcagccagacagaaattggcagcatccacagcgcccggagccacaaggagccccccagccctgcagatgtgcctgagaagaccaggagcctgggcggccggcagcccagcgacagcgtgtctgacacagtggccctgggcgtgcccggcccccgggagcaccctggccagcctgaggacagccctgaggccgaggccagcaccctggatgtgttcacagagcggctgccccccagcggccgcatcaccaagacagagagcctggtgatccccagcaccaggtctgagggcaagcaggccggcagaagaggccgcagcaccagcctgaaggagcggcaggccgcccggccccagaatgaaagagccaacagcctggacaatgaacgctgcccagatgcccggagccagctgcaggtgcagctgcagatccccaggaagacagtgtatgaccagctgaaccacatcctgatcagtgatgaccagctgcctgagaacatcatcctggtgaacaccagtgactggcagggccagttcctgagtgatgtgctgcagaggcacaccctgcctgtggtgtgcacctgcagccctgcagatgtgcaggccgccttcagcaccatcgtgagccgcatccagcgctactgcaactgcaacagccagccccccacccctgtgaagattgctgtggccggggcccagcactacctgagcgccatcctgcggctgtttgtggagcagctgagccacaagaccccagactggctgggctacatgaggttcctggtgatccccctgggcagccaccctgtggcccgctacctgggctctgtggactaccgctacaacaacttcttccaggacctggcctggagggacctcttcaacaagctggaggcccagagcgctgtgcaggacaccccagacatcgtgagccgcatcacccagtacatcgccggggccaactgtgcccaccagctgcccatcgccgaggccatgctgacctacaagcagaagaggaagaagcacttccactttgacttcaccctgagcccagatgaggagagcagccagaagttcatcccctttgtgggcgtggtgaaggtgggcatcgtggagcccagcagcgccaccagcggggacagtgatgatgctgcccccagcggcagcggcaccctgagcagcaccccacccagcgccagccctgctgccaaggaggccagccccaccccacccagcagccccagcgtgtctgggggcctgagcagccccagccagggcgtgggcgctgagctgatgggcctgcaggtggactactggacagctgcccagcctgctgacaggaagagagatgctgagaagaaggacctgcctgtgaccaagaacaccctgaagtgcaccttccgcagcctgcaggtgtcccggctgcccagcagcggggaggccgccgccacccccaccatgtccatgacagtggtgaccaaggagaagaacaagaaggtgatgttcctgcccaagaaggccaaggacaaggatgtggagagcaagagccagtgcatcgagggcatcagccgcctcatctgcacagcccggcagcagcagaacatgctgcgggtgctgattgatggagtggagtgcagtgatgtgaagttcttccagctggccgcccagtggagcagccacgtgaagcacttccccatctgcatcttcggccacagcaaggccaccttctag

SEQ ID NO: 40702 - DNA, 2715 bp, Artificial Sequence
  derived and/or modified sequence
atggccgagcggggccggctgggcctgcccggcgcccccggcgccctgaatacgccggtacctatgaatctgttcgccacttgggaggtcgatggcagtagcccctcatgtgttccaagactgtgcagcctaaccctcaaaaaactggttgtgttcaaggaactggagaaagaattgattagcgtcgttattgccgttaaaatgcagggatcgaagaggatcttgaggtcccacgaaatagttctgccaccaagcgggcaggtggaaaccgatctcgctctgactttttccttacagtatccccatttcttaaaacgggagggcaacaagctccaaatcatgttgcagcgtcggaagcgttataagaatagaactatattgggctataagacactagcagccggttcgatctcaatggctgaggttatgcagcatcctagcgaggggggccaggtcttatctctgtgtagttccattaaagaggcccccgtcaaagccgcagagatctggattgcgtccctgtccagccagcccatcgatcacgaggattcaactatgcaggcgggccctaaagccaaatcaacagataactactcagaggaagagtatgaatcgttcagtagtgagcaggaagctagtgacgatgccgtccaagggcaggatctcgacgaggatgattttgacgttggtaaacccaagaagcagcgcagaagcattgttcgtacaacgagcatgactcgccagcagaactttaagcagaaggtagtggccctgctccgtcgatttaaggtgtctgatgaggtgctggatagtgagcaggaccccgccgaacatattccggaggccgaagaagatttggatctgctttacgacactttggacatggaacatccctctgatagcggcccagacatggaggacgatgacagcgtactgtctacaccaaaacccaagctccggccctatttcgaaggcctctcccactctagctctcagactgaaatcgggagcatccacagtgcccgaagtcataaggaacctccaagtccagccgacgtccctgaaaaaacacggtccctaggagggagacagccatctgactcagtttcagacacggtggccctgggagtgcctgggcctcgagagcaccctgggcagcccgaggactcacccgaagccgaggctagcactctcgacgtgtttacggagagactgccacctagcggaagaatcacaaaaaccgagagcttagttatcccctcgacccgctctgagggcaagcaagccggcagacgtggccggtctactagtcttaaggaaagacaggctgcaaggccacaaaatgagcgggctaattctttggataacgagcggtgtcccgatgcccgttcccagctgcaggtgcaactccaaattcccagaaaaaccgtgtatgatcaactgaaccacattttgatcagcgacgaccagctacctgaaaacattatcctggtgaacacatccgattggcagggccagttcctttccgatgtcctccagcgtcacactctgccagtagtctgcacatgcagccctgctgatgtgcaggccgcttttagcacaattgtgtcccggatccaacggtattgtaactgtaatagccagcctcctacccccgtgaaaattgcagtagccggcgcccaacactatctgtctgccatcctgcggctgtttgttgaacagctgtcacataagacgccagattggcttgggtacatgcgtttcttggtgattcccttgggatctcacccggtggcaaggtatcttggcagcgttgattatcgctacaataacttcttccaggatcttgcctggcgggatttattcaacaagttagaggcgcagtctgccgtacaggacactccagatatagtgagtagaattacacagtacatcgcgggcgccaactgtgcacatcaactcccaatagctgaagcgatgcttacatataaacagaaaaggaagaagcattttcattttgatttcacattatcccccgacgaagagtccagccagaagtttataccatttgtgggcgtggtcaaggtggggatcgtagaacccagtagtgcaaccagcggcgactcagacgacgcagcaccaagtggctctggaacacttagctctactccaccatcagcgtccccggcggccaaggaggcttcacctactccgcccagtagtccctccgtttcaggagggctttcttctccatcacagggcgttggggccgagctcatggggctgcaggtagactactggactgctgcccagcccgccgaccgtaagcgtgacgccgagaaaaaggaccttcctgtcacaaaaaacacccttaagtgcactttcaggtctcttcaggtgtctcgactgcctagcagcggtgaggccgccgccacaccgactatgtctatgacagtcgtgactaaagagaagaacaagaaggtaatgttcctgcctaagaaagctaaggacaaggatgtggaatcaaagtcccagtgtatcgaaggcataagtaggctgatctgcactgcgaggcagcaacagaacatgctacgagtcctgattgacggggtggagtgttccgatgtcaaattcttccagctggctgcccagtggtcttcccacgttaaacatttcccaatctgcattttcggacactccaaggctaccttttag

SEQ ID NO: 40703 - DNA, 3473 bp, Artificial Sequence
  derived and/or modified sequence
ggccgcagctcgtcgccgcccgcgggcctgtccgacgccggggcccggcccgtcccctccgccgcccggcagccatgtgaccgcgccgccgccctccgcgcgcccggcccgcccgccgcgcgtccgcggcccggccgcagccccaggccgccgagggagcggcggggccggcgccatggccgagcgaggccgcctcggcctccccggcgcgcccggcgcgctcaacacgcccgtgcccatgaacctgttcgccacctgggaggtggacggctccagccccagctgcgtgcccaggttgtgcagcctgactctgaagaagctggtggtcttcaaggagctggagaaggagctgatctccgtggtgatcgctgtcaagatgcagggctccaaacgaatcctgcggtcccatgagattgtgctgccccccagtggacaagtggagacagacctggccctgaccttctccttgcagtatcctcacttcttgaagagggaaggcaacaagcttcagatcatgctgcagcgcagaaagcgctacaagaacagaaccatcctgggctacaagacgctggccgcgggctccatcagcatggctgaggtgatgcaacacccgtctgaaggtggccaggtgctgagcctctgcagcagcatcaaggaggcccccgtcaaggcggccgagatctggatcgcctccctgtccagccagcccattgaccacgaagacagcaccatgcaggccggccccaaggccaagtccacggataactactccgaggaggagtatgagagcttctcctccgagcaggaggccagtgacgacgccgtgcaggggcaggacttggacgaggacgactttgacgtggggaagccgaagaagcagcggagatcgattgtaagaacgacgtccatgaccaggcaacagaacttcaagcagaaagtggtagcgctgctgcggaggttcaaagtgtccgacgaggtcctggactcggagcaggaccctgcggagcacatccccgaggcagaggaggacctggacctcctgtatgacaccctggacatggagcaccccagcgacagcggccccgacatggaggatgacgacagcgtcctcagcacccccaagccgaagctgcggccatactttgaaggcctgtcgcactcgagctcgcagacggagattgggagcatccacagcgcccgcagccacaaggagcccccaagcccggctgacgtgcccgagaagacgcggtccctgggaggcaggcagccgagcgacagtgtctctgacacggtggccctcggtgtgccaggcccgagggagcaccctggacagcctgaggacagccccgaggctgaggcctccaccctggatgtgttcacggagaggctgccgcccagcgggaggatcaccaagacagagtcccttgtcatcccctccaccaggtccgaggggaagcaggctggccgacggggccggagcacatccttgaaggagcggcaggcagcacggccccagaatgagcgggccaacagcctggacaacgagcgctgcccggacgcccggagccagctacaggtgcagctgcagatccccaggaagactgtgtatgaccagctcaaccacatcctcatctccgatgaccagcttcccgaaaacatcatccttgtcaacacctcggactggcaggggcagttcctctccgacgtcctgcagaggcacacgctccccgtggtgtgcacgtgctctcctgcggacgtccaggcggccttcagcaccatcgtctcacggatacagagatactgcaactgcaattcccagcccccgacccccgtgaagatcgccgtggcgggagcgcagcattacctcagtgccatcctgcggctctttgtggagcagctgtcccacaagacacccgactggctcggctacatgcgcttcctggtcatcccactgggctcccaccccgtggccaggtacctaggctccgtggactaccgctacaacaacttcttccaggacctggcctggagagacctgttcaacaagctggaggcccagagtgcggtacaggacacgccagacattgtgtcacgcatcacgcagtacatcgcaggggccaactgtgcccaccagctccccatcgcagaggccatgctgacctacaagcagaagaggaaaaagcattttcattttgactttaccctaagccctgacgaagagtcctcccaaaagttcattccctttgtcggggttgtgaaggttggaattgtggagccatcctcggccacatcaggcgactcggacgacgcggccccctcgggctctggcacgctctcctccaccccgccgtccgcatctcctgcggccaaggaggcctcacccaccccgccctcctccccgtcggtgagcggaggcctgtcctcccccagccagggtgtcggcgccgagctgatggggctgcaggtggactactggacggcagcacagcctgcggacaggaagagggacgccgagaagaaggacctgcctgtcaccaaaaacacgctcaagtgcactttccggtccctccaggtcagcaggctgcccagcagcggcgaggctgcagccacgcccaccatgtccatgaccgtggtcaccaaggagaagaacaagaaggtgatgtttctgcccaagaaagcgaaggacaaggacgtggagtctaagagccagtgcattgagggcatcagccggctcatctgcactgccaggcagcagcagaacatgctgcgggtcctcatcgacggcgtggagtgcagcgacgtcaagttcttccagctggccgcgcagtggtcctcgcacgtgaagcacttccccatctgcatcttcggacactccaaggccaccttctagccccacccaccagggggcccacctcctgccccatgctgtgaggggcccagctgcatttctgttaacatttcagtttactacagagacagacgcttaaaacacaaagagaaacagtcttaagtatgaatgtgctcacaacgtggaaactaacgggggagctcctgccaggagccgaataactgctctgcttattaacccgaacgttcggcccggggctgggaagccagaaggacgatgctgagccatggatcgcggaaggcgtcctctggcctcaggagccacccagagcctcacaggctgagttcttgcctctgtgtcctgtccttcctggaagtcaggactctgcttcctcagggagcccggggaaggcggagctcagtggccacaggccgagggccatggggccgctcagtcccgttggggttgtcctgagttgagcctgggggggccgtcctgcccgcctaagagatgcccccagcaccgcacactcgtggttcccaataaactcctgcctgcggcggaggttttatagcagcagatatttttaatgcttttcaatacatgttctaatgtagctgccaaa

SEQ ID NO: 40704 - DNA, 2715 bp, Artificial Sequence
  derived and/or modified sequence
atggccgagcgcggtcggctgggactccccggagccccaggggcactgaacaccccagttcctatgaatcttttcgccacttgggaagtcgacggaagttccccgtcgtgcgtcccacgactatgtagtctcaccctgaaaaagctcgtcgtcttcaaggagttggaaaaagagcttatctccgttgttatcgcagtgaaaatgcagggctcaaagcggatcctgcggtctcacgagatcgtgctgcctccgagcggccaggtggagacagatctcgccctcacattctcactgcagtatccccactttcttaagcgtgaggggaacaaactccagataatgcttcaacggaggaaacgctacaagaatcgcactattttaggctacaagaccctagcagcaggatctatctctatggcagaggtaatgcaacacccatctgaagggggtcaggtcctttccctttgctctagcataaaagaggccccagtcaaagccgcagagatttggatcgcctccctctccagtcagcctatagatcacgaggactccactatgcaggccggacctaaagcaaagtccaccgacaattactctgaggaagaatatgagagcttttcctcagagcaggaggccagtgatgacgccgtgcaaggacaggatttggacgaagatgatttcgacgtgggcaagcccaagaagcagcgcaggtccatagtccgaaccacctcaatgaccaggcagcaaaacttcaaacagaaagtggtagctttgctgaggagattcaaggtttcagatgaggtcttggatagtgaacaggacccagctgagcatattccggaagccgaggaggacctagatctgctgtacgacactctagatatggaacatccatccgatagcgggccagacatggaggatgatgattccgtgctcagcactcccaaacctaagctgagaccttacttcgagggattatcccactctagttcccagactgaaatcggttccatccactccgcacggtcacataaagaacccccatctccagcagatgtgccagaaaagaccaggagcctaggcggtcgccagcccagtgactcagtcagcgataccgtcgccttaggcgtgccaggacctcgcgaacacccaggccaacccgaggattcacctgaagccgaggcttcaactctggatgtcttcacggagagactccccccttcaggcaggatcactaagacggagagtctggtgattccctctacacgctctgaaggcaagcaggctggtcggcgtggccgatctaccagtttgaaagagcgacaggcggctcggcctcagaatgagagggctaatagcctggacaacgaaagatgtcctgatgcgagatcccaactccaggtccagctgcagataccacgcaagaccgtgtacgaccaactgaatcacattctgatctccgacgatcaactgcctgaaaacataattctcgtgaatacctcagattggcagggacagttcctctcggacgtgctgcagcgacataccctgccggtggtctgcacttgctcccctgccgatgtccaggcggcattcagcacgatagtgtccagaattcagagatactgtaactgcaactcccagcctccgacccccgtgaaaatagctgtggccggagcccaacattaccttagcgcgatactccgactctttgtggagcagctgtcgcacaaaactccagactggctcggatatatgaggtttctcgttattcccctgggctcccaccctgtagccaggtatcttggtagcgttgactacagatataacaacttcttccaggatttggcttggagagatcttttcaacaagttagaagcccagagcgcagtgcaagatacacccgacattgtcagtagaattacacagtacatcgcaggcgctaattgcgctcaccaattgcccatcgccgaggccatgctgacctacaaacagaaaagaaaaaagcacttccactttgacttcaccctgtcacccgacgaggagtcaagccagaaattcataccgtttgttggggtggttaaggtgggtatagtggagccctccagcgccacgagcggagattctgacgatgcggcaccttctggctcgggcactctgtccagcacccccccttccgcatctccggctgcaaaagaagctagtccaacccccccaagctccccaagcgtaagtggcggactctccagccctagccagggggtgggagctgagttgatggggctccaagtcgattattggacagccgctcagcccgctgaccggaagagagacgccgagaagaaggacctccccgtgaccaaaaatacgctcaaatgtacattcaggtcattgcaggtgagcaggctaccctccagtggggaagcggctgcaactcccactatgagtatgaccgtagtgaccaaggagaagaacaaaaaggttatgttcctcccgaaaaaggcgaaggacaaggacgtggaatctaaaagtcagtgtatagagggaatatcccgcctaatctgcaccgcacgccagcagcagaatatgctgcgagtcctgatcgatggcgtagagtgttctgacgtgaaattttttcagttggctgctcagtggtcctcacacgtgaaacattttcccatatgcattttcggccactcaaaggcgaccttctag

SEQ ID NO: 40705 - protein, 233 aa, Artificial Sequence
  derived and/or modified sequence
MTQNTVIVNGVAMASRPSQPTHVNVHIHQESALTQLLKAGGSLKKFLFHPGDTVPSTARIGYEQLALGVIAAGAGAIVHEKHPGKLAGYISSLLTLAGFATAMAAVVLCVNSFIWQTEPFLYIDTVCDRSDPVFPTTGYRWMRRSQENQWQKEECRAYMQMLRKLFTAIRALFLAVCVLKVIVSLVSLGVGLRNLCGQSSQPLNEEGSEKRLLGENSVPPSPSREQTSTAIVL

SEQ ID NO: 40706 - DNA, 702 bp, Artificial Sequence
  derived and/or modified sequence
atgacccagaacaccgtgatcgtgaacggcgtggccatggccagcagacccagccagcccacccacgtgaacgtgcacatccaccaggagagcgccctgacccagctgctgaaggccggcggcagcctgaagaagttcctgttccaccccggcgacaccgtgcccagcaccgccagaatcggctacgagcagctggccctgggcgtgatcgccgccggcgccggcgccatcgtgcacgagaagcaccccggcaagctggccggctacatcagcagcctgctgaccctggccggcttcgccaccgccatggccgccgtggtgctgtgcgtgaacagcttcatctggcagaccgagcccttcctgtacatcgacaccgtgtgcgacagaagcgaccccgtgttccccaccaccggctacagatggatgagaagaagccaggagaaccagtggcagaaggaggagtgcagagcctacatgcagatgctgagaaagctgttcaccgccatcagagccctgttcctggccgtgtgcgtgctgaaggtgatcgtgagcctggtgagcctgggcgtgggcctgagaaacctgtgcggccagagcagccagcccctgaacgaggagggcagcgagaagagactgctgggcgagaacagcgtgccccccagccccagcagagagcagaccagcaccgccatcgtgctgtag

SEQ ID NO: 40707 - DNA, 702 bp, Artificial Sequence
  derived and/or modified sequence
atgactcagaacaccgtcatcgtaaacggcgtggccatggccagcagaccaagccagcctacgcacgtcaacgtgcacattcaccaggaaagcgctctcactcagttgctgaaggctgggggcagcctgaaaaaatttctttttcaccctggggacactgtcccaagcaccgcaaggattggctatgagcagcttgctctcggagtgatcgcagccggcgccggggccattgttcacgagaagcaccccggaaagttggctgggtacattagttctttgctcacactggctggcttcgccaccgctatggctgccgtggtgctgtgtgtgaattctttcatctggcaaacagagccctttctgtacatcgacaccgtctgcgatcgctccgatcctgtcttcccaaccaccggctacagatggatgaggagatcacaggaaaaccagtggcaaaaggaggagtgccgcgcctacatgcaaatgctgaggaagctgttcaccgctatacgagcgctctttctggccgtgtgcgtgctgaaggtgattgtctccctcgtttccctcggagtggggctgcgcaacctgtgcggacagagctcacagcccttgaatgaggagggatcagaaaagaggctcctcggggaaaactctgtgccaccttctccgtcacgggaacagacatcgactgccattgtattgtag

SEQ ID NO: 40708 - DNA, 702 bp, Artificial Sequence
  derived and/or modified sequence
atgacccagaacacagtgattgtgaatggagtggccatggccagccggcccagccagcccacccacgtgaatgtgcacatccaccaggagagcgccctgacccagctgctgaaggccggcggcagcctgaagaagttcctgttccaccctggggacacagtgcccagcacagcccgcatcggctatgagcagctggccctgggcgtgattgctgctggggccggggccatcgtgcatgagaagcaccctgggaagctggccggctacatcagcagcctgctgaccctggccggctttgccacagccatggctgctgtggtgctgtgtgtgaacagcttcatctggcagacagagcccttcctgtacatcgacacagtgtgtgacagaagtgaccccgtcttccccaccaccggctaccgctggatgagaagaagccaggagaaccagtggcagaaggaggagtgccgggcctacatgcagatgctgaggaagctgttcaccgccatccgggccctcttcctggccgtgtgtgtgctgaaggtgattgtgtccctggtgtccctgggcgtgggcctgaggaacctgtgtggccagagcagccagcccctgaatgaggagggcagcgagaagaggctgctgggagaaaattctgtgccccccagccccagccgggagcagaccagcacagccatcgtgctgtag

SEQ ID NO: 40709 - DNA, 702 bp, Artificial Sequence
  derived and/or modified sequence
atgacccagaacaccgtgatcgtgaacggcgtggccatggccagcaggccaagccaacccacacacgtgaacgtgcacatccatcaagagagcgcactgactcagcttctgaaggctgggggcagtctgaagaagttcctgtttcatcctggagatacggtaccgtcaacggcaagaataggatatgaacagctcgcacttggcgtgatcgcggccggggcaggcgctattgtgcatgagaagcacccaggcaagcttgctggctatataagctctctgctcacccttgcggggttcgccaccgccatggccgccgtggtgctctgtgtcaacagtttcatatggcagaccgagcccttcctatatatagatacagtgtgcgatagatcagacccggtatttccaaccacagggtacaggtggatgcgccgatctcaggaaaatcaatggcagaaagaggagtgccgcgcctacatgcagatgctgcgaaagctgttcacagctattcgggctctctttttggcagtgtgcgtgcttaaggtgattgtcagccttgtgtcactcggagttggtcttcggaatttgtgcgggcagtcaagccagccacttaatgaggaagggtcggagaaacggttgctgggggagaacagcgttccgccatctccaagtcgagagcagacgtcaacagcaattgtcctgtag

SEQ ID NO: 40710 - DNA, 702 bp, Artificial Sequence
  derived and/or modified sequence
atgacccagaacaccgtaatagttaacggcgtcgctatggctagcagaccatcacagcctacccacgtgaatgtgcacatacatcaagagtcagccctgacccaacttctgaaggccggaggttccctgaagaagttcttatttcacccgggagacactgtgccaagcactgccaggattggatatgagcagctggccctaggcgtgatcgcagcaggtgcaggagctatcgttcatgagaagcacccaggtaagctggctgggtatatttccagtctgttgaccctggctggcttcgccaccgctatggctgccgttgttctatgcgtgaattcctttatctggcagaccgaacctttcctgtatatagatacagtatgtgatagatctgatcccgtgtttcctacaactggttatcggtggatgaggaggtcacaagagaaccaatggcagaaagaagaatgtcgcgcatacatgcagatgctgagaaagctgtttaccgccatcagggctctgttcctcgcggtgtgtgtgctgaaagtgatagtgagtcttgtcagcctcggcgtcggcctacggaacctgtgcggccagtcaagccaaccactgaacgaggagggaagcgagaagagattgttgggcgaaaattctgtgcctcctagcccatctagagagcagacatctaccgctatcgtgctatag

SEQ ID NO: 40711 - DNA, 1006 bp, Artificial Sequence
  derived and/or modified sequence
cccgtcgctcccctgctcggggtcagctagtgtccgctctgctcggccgcgggctcccggaggactgcaggcaggatgacgcaaaacacggtgattgtgaatggagttgctatggcctctaggccatcccagcccacccacgtcaacgtccacatccaccaggagtcagctttgacacaactgctgaaagctggaggttctctgaagaagtttctttttcaccctggggacactgtgccttccacagccaggattggttatgagcagctggctctaggggtgatcgcagcaggagctggggccattgtccatgagaagcacccgggcaaacttgctggctatatatccagcctgctcaccctggcaggctttgctacagctatggctgctgttgtcctctgcgtgaatagcttcatctggcaaactgaaccctttttatacatcgacactgtgtgtgatcgctcagaccctgtcttccctaccactgggtacagatggatgcggcgaagtcaagagaaccaatggcagaaggaggagtgtagagcttacatgcagatgctgaggaagttgttcacagcaatccgtgccctgttcctggctgtctgtgtcttgaaggtcattgtgtccttggtttccttgggagtaggtcttcgaaacttgtgtggccagagctcccagcccctgaatgaggaaggatcagagaagaggctactgggggagaattcagtgcccccttcgccctctagggagcagacctccactgccattgtcctgtgagctgccaaagaccccacggggtgcccgcatgtccctgtctagggcagcccagggcccccactcctggctcctcacacttgcctcccctatggccgctctccagaccctcctcctttcttctccccacatccgcacctgctgttcccactctggggttctcaagtccatgaacagatattgttgcattttccacaatgctgattaaacataataaacaatccagaaaagc

SEQ ID NO: 40712 - protein, 404 aa, Artificial Sequence
  derived and/or modified sequence
MPPFLITLFLFHSCCLRANGHLREGMTLLKTEFALHLYQSVAACRNETNFVISPAGVSLPLEILQFGAEGSTGQQLADALGYTVHDKRVKDFLHAVYATLPTSSQGTEMELACSLFVQVGTPLSPCFVEHVSWWANSSLEPADLSEPNSTAIQTSEGASRETAGGGPSEGPGGWPWEQVSAAFAQLVLVSTMSFQGTWRKRFSSTDTQILPFTCAYGLVLQVPMMHQTTEVNYGQFQDTAGHQVGVLELPYLGSAVSLFLVLPRDKDTPLSHIEPHLTASTIHLWTTSLRRARMDVFLPRFRIQNQFNLKSILNSWGVTDLFDPLKANLKGISGQDGFYVSEAIHKAKIEVLEEGTKASGATALLLLKRSRIPIFKADRPFIYFLREPNTGFVFSIGRVSNPLD

SEQ ID NO: 40713 - protein, 48 aa, Artificial Sequence
  derived and/or modified sequence
MPPFLITLFLFHSCCLRANGHLREGMTLLKTEFALHLYQSVAACRNET

SEQ ID NO: 40714 - protein, 424 aa, Artificial Sequence
  derived and/or modified sequence
MPPFLITLFLFHSCCLRANGHLREGMTLLKTEFALHLYQSVAACRNETNFVISPAGVSLPLEILQFGAEGSTGQQLADALGYTVHDKRVKDFLHAVYATLPTSSQGTEMELACSLFVQVGTPLSPCFVEHVSWWANSSLEPADLSEPNSTAIQTSEGASRETAGGGPSEGPGGWPWEQVSAAFAQLVLVSTMSFQGTWRKRFSSTDTQILPFTCAYGLVLQVPMMHQTTEVNYGQFQDTAGHQVGVLELPYLGSAVSLFLVLPRDKDTPLSHIEPHLTASTIHLWTTSLRRARMDVFLPRFRIQNQFNLKSILNSWGVTDLFDPLKANLKGISGQDGFYVSEAIHKAKIEVLEEGTKASGATALLLLKRSRIPIFKADRPFIYFLREPNTGITVFFDRIQIIYQCLSSNKGSFVHYPLKNKHSF

SEQ ID NO: 40715 - DNA, 1275 bp, Artificial Sequence
  derived and/or modified sequence
ccagcttccagcctaccctgcatctcttccctctgaattgcaggaaccctcccagcctccatgccgcctttcctgatcaccctcttcctctttcactcttgctgcctccgagcaaatggccacctccgtgaaggaatgacattgctgaagactgagtttgcacttcacctctaccagagtgtggccgcgtgtagaaatgagacgaactttgtcatctctcctgctggtgtgtccctccccctggagatcctgcagtttggagcagaagggagcactggtcagcagctggcagatgccctggggtacactgtccatgacaaaagggtgaaagatttcttgcatgctgtttatgccacactacccacctccagccaaggcaccgagatggagctggcctgcagcctttttgtgcaagtgggaacgccactgtccccctgctttgtggagcacgtctcctggtgggctaacagcagcctggaaccagccgacctcagtgagcccaatagcaccgccatccagactagcgaaggggcctccagagagactgcaggtgggggccccagtgagggccctggtggctggccgtgggagcaagtcagtgcagcatttgctcagcttgtgcttgtgagcaccatgtccttccaaggcacttggcgaaagagattctcctccacagacacacagatcctgcctttcacctgtgcctatggcctcgtccttcaggtccccatgatgcaccaaacgaccgaggtcaactacggtcagttccaggacactgcaggccatcaggtgggggtgctggagcttccttacctgggaagtgcagtgagtctgttcctggtgctgccccgtgacaaagacacccccctgagccacatcgagccacacctcacagccagcaccatccacctctggaccaccagcctgaggagagccaggatggatgtgttcctgcccaggtttaggatccaaaatcaattcaacttaaaaagcattttaaattcttggggagtcaccgatctttttgatccactcaaagctaacttgaaaggaatttcaggccaagatggcttttatgtttctgaagcaatccacaaggccaagattgaagttttggaggaaggcaccaaggcatctggagccacagctctgttgttattgaaaaggtctcggattcctatttttaaagcagatcggccattcatctatttcctgagagaacctaacacagggtttgtcttcagtattgggagagtttcaaatcccctagactaa

SEQ ID NO: 40716 - DNA, 1215 bp, Artificial Sequence
  derived and/or modified sequence
atgcctccattcttaattacactatttttgtttcattcgtgttgccttcgcgctaatgggcacctccgggaggggatgactctgctcaagacagagtttgccctccatctataccagtcagtagcagcctgcaggaacgagaccaacttcgttatctctcctgccggagtcagcttgccccttgaaatcttacagtttggcgctgaagggagcactgggcaacaactcgccgacgcactcggctacactgtacatgataagagagtgaaggattttctccacgcggtgtatgccactctgcccaccagctcccagggcacggaaatggagttggcttgtagcctgttcgttcaagttggtactccactctcaccctgtttcgtcgagcatgtgagctggtgggcaaactcctctctggaaccggctgatctcagcgaaccaaactccaccgcaatacagacaagcgagggcgcttctcgggagactgccggtggcggaccatctgagggcccaggaggttggccatgggaacaggtttctgccgcattcgctcagctggtgttagtgagcacaatgagcttccaaggcacttggcgcaagcgcttttccagcactgacacccagatcctcccctttacctgtgcttacggcctggtcctgcaggtcccgatgatgcaccagacgaccgaggtgaattatgggcagttccaagacactgcaggtcatcaagtgggtgtgctggagcttccatacctgggttccgccgtctcattatttctggtccttcctcgggataaggatacaccactctcccacattgagcctcatctaaccgctagtacgatccacttgtggaccacttccctgcgcagagctcgcatggatgtgtttcttcccagatttagaattcagaatcagtttaatctgaaatccattctcaattcttggggtgttacagatttgtttgatcctctgaaggctaaccttaaggggatttccgggcaggacgggttctatgttagcgaagccatccataaagcaaaaattgaggtcctcgaagagggtacgaaagcttccggcgcaaccgcgctgttattgttgaagaggagtcgaatccccatcttcaaggcggatcgacctttcatatacttcctgcgcgagccaaacaccggtttcgtgttctccatcggcagagtgtctaacccactggactag

SEQ ID NO: 40717 - DNA, 147 bp, Artificial Sequence
  derived and/or modified sequence
atgccacctttcttaatcacactgtttttatttcatagctgttgcctgcgggcaaacggtcacctcagggagggcatgaccctgctcaaaactgagtttgcgttgcacctttatcagagcgtggccgcttgtagaaatgaaacctag

SEQ ID NO: 40718 - DNA, 1275 bp, Artificial Sequence
  derived and/or modified sequence
atgcctcccttccttataacactttttctcttccattcatgctgcctgagagccaacgggcatcttagagaggggatgacactgctgaagactgagttcgcattgcacctgtatcagtccgtggccgcttgccgaaacgagacaaactttgttataagccctgccggtgttagcttgccactggagatcttgcagttcggcgctgagggctccactgggcagcaactcgccgatgccctgggatacaccgtgcatgacaagagagtgaaggattttctgcacgccgtgtacgctactttacccacctcgtcacaagggaccgaaatggagttggcctgcagtctgttcgtgcaagtgggaactcccctgtccccctgtttcgttgagcacgtttcatggtgggccaactcttctttggagcccgctgatttgagcgagcccaattccactgcaattcagacgtctgaaggggcaagcagagaaaccgctggaggcggtcccagcgaagggcctggtggatggccctgggagcaggtctccgccgcttttgctcagttagtacttgtatccaccatgtcattccagggcacttggaggaagaggttttcttccactgacacacagatcctgcccttcacatgtgcatacgggctagtgctgcaggttccaatgatgcatcagactacggaagtgaactacggacaattccaggataccgcaggccaccaagtcggcgtgctagaactgccatacttgggttcagcagtatcactgttcctggtactgcccagagataaggacacgcccctgagtcacatagagcctcatttgactgcctccacaattcacctgtggactaccagtctgcgcagagccaggatggatgtgtttctgcctaggtttagaatacagaatcagttcaatcttaaatctatcttgaatagttggggcgtcaccgacttatttgacccccttaaggcgaacttgaaggggatcagcgggcaggatgggttttacgtttctgaggccattcataaagctaaaatagaagtcctagaggagggtactaaggccagcggggctaccgccttgctgctgctgaagagatctcggatcccaatctttaaggccgatcgacccttcatctattttctgagggagcctaacaccggaattacagttttcttcgaccggatccagattatttaccagtgtctgtcttccaacaaaggatcctttgtgcattaccccctgaagaacaagcattctttttag

SEQ ID NO: 40719 - DNA, 1215 bp, Artificial Sequence
  derived and/or modified sequence
atgccccctttcctgatcactctgttcctgttccatagctgctgtctacgggctaacgggcacttaagagaggggatgacccttctcaagactgaattcgcattacatctctaccaatccgtagctgcttgtcgcaacgagacaaactttgttatttctcctgccggtgtgtcacttcccttagagattttgcagtttggtgccgaagggtctaccggacaacaactggcagacgccttgggatacacagtccacgataaacgcgtaaaggactttctccatgcagtgtacgctacactgccgaccagtagccagggaaccgaaatggagctcgcctgctctctgttcgtgcaagtgggaactcccctctcaccctgctttgttgaacatgtgtcgtggtgggcgaatagcagcctggagcccgctgatttatccgagcccaatagcactgcaattcaaacatcagagggggctagcagggaaaccgctgggggaggtccgagcgaaggacctggcggttggccctgggagcaagtttctgctgccttcgcacagctggtgttggtgtcaaccatgagctttcaaggaacctggaggaagaggttctcatccaccgacacccaaatattgcctttcacttgcgcctatggactggtcctgcaagtgcccatgatgcatcagacaacagaggtgaactacgggcagtttcaggatactgccggtcatcaggtgggagttctggaattgccatacctgggctccgccgtcagcctattcctggttctgccacgcgataaagacactcccttgtcacacatcgagcctcacctcacagcttcaacaatacatctatggacaactagcctgcggcgagctcgaatggacgtttttttgccacgattccgcatccaaaatcaattcaatctgaagtccatcctgaatagttggggggtgacagatttattcgatccattaaaggccaacctcaaaggaatttccggtcaggatgggttctatgtgagtgaagcaatccataaggctaaaattgaggtgttggaagaaggcaccaaagcttcaggggctaccgctctcctgctgctcaaaagaagtcggatccccattttcaaagccgacagaccttttatatattttcttcgggagccaaacacaggttttgtgttttctatcggtcgagtttccaatcccttggattag

SEQ ID NO: 40720 - DNA, 356 bp, Artificial Sequence
  derived and/or modified sequence
gacccacaagaacagagtcgagcaaggaaacgtgcaacagtgatacaaaagtctggctttgctaaagtcacacatccagtaagtggccgaagcagatcttcagacccacagtttggctgccaaaggaccacagtgagtatttctaatgctgaaacaagagggtgcagctctgcagcccagacggctgggcctcagggaaccctcccagcctccatgccgcctttcctgatcaccctcttcctctttcactcttgctgcctccgagcaaatggccacctccgtgaaggaatgacattgctgaagactgagtttgcacttcacctctaccagagtgtggccgcgtgtagaaatgagac

SEQ ID NO: 40721 - DNA, 1215 bp, Artificial Sequence
  derived and/or modified sequence
atgcctccattcctgataacattattcctgtttcactcctgctgtctgcgcgccaatggacacttgagagaaggcatgacgttgctcaagaccgagttcgcattacatctttatcagagcgtggccgcatgtagaaacgagaccaatttcgtgatcagtcccgccggagtatcccttccactcgagatacttcagtttggagcagaggggagcaccggccagcagctcgcggatgctctgggatacacggttcacgacaaacgcgtcaaggatttcctgcacgccgtttatgctaccctgccgacctcttcgcaggggaccgagatggagttggcctgcagcctgtttgtgcaagtcgggacaccattgtccccttgcttcgttgaacacgtgtcctggtgggcgaactcctctctcgaacccgcggatctatctgaacctaattccacagccattcagactagcgaaggtgcatctcgggaaacagccggaggaggaccatctgagggaccgggcggctggccatgggagcaggtatccgctgcgttcgcccagctggttttagtgtccacaatgagtttccaaggaacctggcgcaagagattctccagcactgatacacaaatcttgccatttacctgcgcatacggcctggttctccaggtcccgatgatgcatcagacaacagaggtgaactacggccaattccaagacacagccgggcaccaggttggcgtgcttgaactcccttacctgggaagcgcggtgagcctttttctcgtgttgccgcgcgataaagatactccactcagtcatatcgagcctcatctgactgctagcaccatccacctctggaccacaagtctccgaagagcgcgaatggatgtcttcctgccccgcttccgtattcagaaccagtttaatttgaaaagcattcttaattcctggggggtgaccgatttatttgaccctctgaaagcaaacttgaagggaataagcggccaagacggattttacgtatcagaggctattcacaaggcgaagatagaagtccttgaggaagggaccaaagcaagcggcgccacagctttacttctgctcaagagatctcgaattcccatctttaaggccgatcgcccctttatctacttcttgcgcgaacctaatacgggatttgttttcagcattggtagagtctccaatccactcgactag

SEQ ID NO: 40722 - DNA, 147 bp, Artificial Sequence
  derived and/or modified sequence
atgcctcctttcctgattaccctgtttcttttccattcatgttgcctgcgagctaacggccatctacgcgagggaatgacattattgaagaccgaatttgctttacatctgtaccaaagcgtggccgcgtgcagaaatgaaacctag

SEQ ID NO: 40723 - DNA, 1275 bp, Artificial Sequence
  derived and/or modified sequence
atgccgccctttctgatcacattatttttgttccattcatgctgtctgagggctaatggacatctccgtgaaggaatgaccttactaaagacagagttcgccctgcatttgtatcagtctgtcgccgcatgtcgcaacgaaactaacttcgtaatttctccagcaggcgtctccttgcccttagaaatcctgcaatttggtgccgaaggctctactggccagcaactggctgatgccctcgggtatacagtgcacgataaacgagtaaaagacttcttgcacgccgtgtatgcaactttacctacatcatcccagggcacagaaatggagctggcttgcagcttatttgtgcaggttggcaccccactgagcccgtgttttgtggagcatgtgtcatggtgggcaaacagctctttagaacctgccgatttaagtgagcctaattctaccgcaatacagacttccgaaggggcttcacgggaaacggcgggggggggcccatctgagggaccaggtggatggccttgggagcaggtgtccgccgccttcgcgcagctcgttctggtctctactatgtctttccaaggcacatggagaaaacgctttagctcaacggacacgcagatcctacctttcacttgtgcctacggcctcgtgttacaagtgcctatgatgcatcagacaactgaagttaactatggccagttccaggacaccgcaggccaccaggtcggagtccttgaattgccctatctcggctctgctgtatcccttttccttgttttgccccgcgataaagacactcctttgagtcacatagagccccatctgactgctagtaccattcacctctggacgacatccctgcgacgcgcccggatggacgtgttcctgcccaggtttcggatccaaaatcagttcaatctcaagagcatcctgaacagctggggggttaccgatctatttgacccactgaaagctaatctgaagggaatttcgggccaggatgggttttacgtgtcagaggcaatccacaaagccaagatcgaggtgttggaggaagggacgaaagcctcaggcgccacggcgctgcttctgctcaagagatcccgaattccaatatttaaggcggatcggccattcatttatttcctgcgggaaccaaacaccgggattactgtcttctttgaccgtatacagatcatctaccaatgcctatccagcaataaaggctcctttgttcactatcccctgaagaacaaacattctttttag

SEQ ID NO: 40724 - DNA, 1215 bp, Artificial Sequence
  derived and/or modified sequence
atgccacccttcctcattacactatttctgtttcattcttgttgcctacgagcaaacgggcatctgagagaggggatgacactcttaaagactgagttcgcactgcacctgtatcaaagtgtagccgcttgccgcaacgagaccaactttgttatatcacctgcgggggtcagcctgcctctggaaatcctgcagtttggggcagagggcagtaccggtcaacagttggcggatgcactgggatataccgttcatgacaaaagggttaaggactttctgcacgccgtctatgccactcttcccacgtcctcccagggaaccgagatggagctggcttgttctctgttcgtgcaggttggtacccccctatccccatgttttgtggaacatgtcagttggtgggctaactcgtccctcgaacctgctgacttgagtgaacctaactcaactgcgatccagacaagtgaaggagccagccgtgagaccgccggcggcggcccttcagaagggcctgggggctggccctgggagcaggtctcagccgcctttgctcagctcgtgctcgtctctaccatgtcattccaaggaacttggcgaaagagattttcctcaactgacacacagattctcccatttacgtgcgcgtatggcctagtactgcaggtgcctatgatgcatcagaccacagaggttaattatggccagttccaggatactgcagggcatcaggtcggcgttctcgaactgccctacctgggtagcgccgtgtcactgtttcttgtgctccctcgggacaaggatacccctctgagccacatagagccgcacctaactgcctccaccattcatctgtggactaccagcctgcggcgcgcaagaatggatgtgtttctgccaaggttccgaattcagaatcaattcaacctgaagtcaatcctaaattcttggggggtgactgacttattcgatccgctgaaagccaacctcaaaggaatctcaggccaagatggcttctatgtgtcggaagcgattcacaaagcaaaaatagaggttctagaggagggaacaaaagcttcaggcgccacagccttactcctgcttaaaagatctcgcattcctattttcaaagccgacagaccatttatttacttcctgcgtgagcctaacaccggttttgtgtttagtattggacgggtttcgaaccctctggactag

SEQ ID NO: 40725 - DNA, 1215 bp, Artificial Sequence
  derived and/or modified sequence
atgccacctttccttataactctatttctttttcattcctgctgcttacgcgccaatggccacctgagggagggtatgacgcttctgaagactgagttcgccctgcatctgtatcagtcggttgccgcttgtcgtaacgaaaccaacttcgtcattagcccagccggagtaagcctacctctcgagatcctccagttcggcgccgaagggtcaaccggacagcaattagccgatgcactcggatatactgtgcacgacaaaagagtgaaagatttcttacatgcagtgtacgccacactgcctaccagctcacagggaaccgaaatggaattggcctgtagtctgtttgtgcaggtgggtacaccactgtctccatgttttgtcgagcatgtatcttggtgggctaattcttccctggaaccggctgatttgtccgaacctaattccacagcaatacagacttctgagggtgcctctcgagaaactgctgggggcgggcctagtgagggacctggtggctggccatgggagcaagtctccgcagctttcgcccagctggtgttggtcagcacaatgtcattccagggcacgtggagaaagagattctcttctactgacacacagattctcccatttacttgtgcttacggccttgtgctgcaagttccaatgatgcaccagacgaccgaagtgaactacggccagtttcaagacactgcaggacaccaggtgggggtgctggaactgccctatcttggatccgctgtttctctcttcctggtcctacctcgggacaaagacacgcctctttcacacatcgagccccacctcactgcgagcaccattcacctttggactacatcccttcgccgcgctaggatggatgttttcctaccacggttccgtattcagaaccagtttaatttgaaaagcattcttaattcctggggggtgaccgatttatttgaccctctgaaagcaaacttgaagggaataagcggccaagacggattttacgtatcagaggctattcacaaggcgaagatagaagtccttgaggaagggaccaaagcaagcggcgccacagctttacttctgctcaagagatctcgaattcccatctttaaggccgatcgcccctttatctacttcttgcgcgaacctaatacgggatttgttttcagcattggtagagtctccaatccattagactag

SEQ ID NO: 40726 - DNA, 1275 bp, Artificial Sequence
  derived and/or modified sequence
atgcccccatttctgattacgttatttttgtttcacagttgctgtctcagggcaaatggacatctccgagaaggcatgaccttgctgaagaccgaattcgccctgcatctttatcagtctgtagctgcctgcagaaatgagactaactttgttatctccccagccggtgtgtcactccctctcgaaatcttgcaatttggagccgaaggatccaccgggcaacagctcgccgacgcattgggttacacagtccacgacaaacgagtcaaagatttcctgcacgccgtgtacgccactctgccaacctccagtcagggtacagagatggaattagcatgcagcctatttgtacaggtaggcactcctctgtcaccttgctttgtggagcacgtttcatggtgggcgaactcctccctggagcctgcggatctctctgagccaaactcaacagcaatacagacatcagaaggtgcaagccgggagacagcaggcggggggccgtctgaaggacccgggggttggccttgggagcaggtgagcgctgcatttgcacaattggttctggtgtctacaatgtctttccaggggacttggcgtaaaagattttcctccactgatactcaaatccttccctttacttgtgcctacggactggtgctccaggttcctatgatgcaccagacaacagaggtgaactacggacagtttcaagatacagccggacatcaagtaggagtgcttgagcttccttatttgggctcagccgtgtcattattcctggtcctccctcgcgacaaagacacccccctctcccacatcgaaccacacctcacagccagcaccatccatctctggactacctcactgcgaagagcacgcatggatgtattccttccacgattccggattcagaaccaatttaatctcaaatccattctgaacagctggggagtgaccgacttattcgatccattgaaagccaatctcaaaggaatcagcggtcaagacggcttttatgtcagcgaagctatccataaggcaaagatcgaggtcctggaggaaggtaccaaggcctccggtgcaaccgccctactgcttctgaagaggtcacgcattccaatattcaaggctgaccgccctttcatctactttctgagggagcccaacacaggcatcacagtgttttttgatcggatacagattatctaccagtgcctgtcttcaaataaaggttcattcgtccattacccacttaaaaataaacatagcttctag

SEQ ID NO: 40727 - DNA, 1215 bp, Artificial Sequence
  derived and/or modified sequence
atgcccccattcctgataacactgtttctgtttcactcttgttgtcttagggcaaatggtcatctgcgcgaaggaatgacactgctcaaaactgaatttgccttacacctgtaccagtctgtcgccgcatgtcggaatgagaccaatttcgttattagccctgccggggtctccctgcctcttgaaattctgcaattcggggccgaggggagcacaggccaacagctagccgacgccctcggctatacggtccatgacaagagggtcaaagattttctgcacgccgtttacgccaccctgcctacaagcagtcagggaacagagatggaactggcgtgttctctgtttgtccaggtgggtaccccactgtcaccctgtttcgtggagcatgtatcttggtgggctaattctagcctagagcccgctgacctctcagagccgaacagtacagccatccaaacgtctgaaggcgccagccgtgaaacagcaggaggtgggccaagcgaggggcctggcggttggccttgggaacaagtgagcgccgcattcgcgcaactggttcttgtgagcactatgtcttttcaaggaacctggagaaagagatttagctcaaccgacactcaaattctcccatttacttgcgcctatgggcttgtactccaggtcccaatgatgcaccagaccactgaggtgaattacggtcaatttcaggacaccgcagggcaccaagtcggagtgctggaattaccatatttggggagcgctgttagtctctttttggttctcccccgcgacaaagatactcctctttcccacatcgaaccacacctgaccgcttctaccatacacctgtggactacctcacttagacgggcccggatggacgtgttcctccctagatttagaatccagaatcagttcaatctgaaatccattctcaactcttggggcgtaacagatttgtttgatcccctcaaagcgaacctgaaaggtatctcaggacaggacgggttttacgtctctgaagctatacacaaagccaagatcgaagttctcgaggaaggtactaaagcctcaggcgcaaccgcccttttactcctcaaaagaagtcgcatccccatctttaaggccgacagaccattcatttatttcttgagagagcctaataccggatttgtctttagtatcggccgtgtgtctaatccgcttgattag

SEQ ID NO: 40728 - DNA, 1439 bp, Artificial Sequence
  derived and/or modified sequence
ccagcttccagcctaccctgcatctcttccctctgaattgcaggaaccctcccagcctccatgccgcctttcctgatcaccctcttcctctttcactcttgctgcctccgagcaaatggccacctccgtgaaggaatgacattgctgaagactgagtttgcacttcacctctaccagagtgtggccgcgtgtagaaatgagacgaactttgtcatctctcctgctggtgtgtccctccccctggagatcctgcagtttggagcagaagggagcactggtcagcagctggcagatgccctggggtacactgtccatgacaaaagggtgaaagatttcttgcatgctgtttatgccacactacccacctccagccaaggcaccgagatggagctggcctgcagcctttttgtgcaagtgggaacgccactgtccccctgctttgtggagcacgtctcctggtgggctaacagcagcctggaaccagccgacctcagtgagcccaatagcaccgccatccagactagcgaaggggcctccagagagactgcaggtgggggccccagtgagggccctggtggctggccgtgggagcaagtcagtgcagcatttgctcagcttgtgcttgtgagcaccatgtccttccaaggcacttggcgaaagagattctcctccacagacacacagatcctgcctttcacctgtgcctatggcctcgtccttcaggtccccatgatgcaccaaacgaccgaggtcaactacggtcagttccaggacactgcaggccatcaggtgggggtgctggagcttccttacctgggaagtgcagtgagtctgttcctggtgctgccccgtgacaaagacacccccctgagccacatcgagccacacctcacagccagcaccatccacctctggaccaccagcctgaggagagccaggatggatgtgttcctgcccaggtttaggatccaaaatcaattcaacttaaaaagcattttaaattcttggggagtcaccgatctttttgatccactcaaagctaacttgaaaggaatttcaggccaagatggcttttatgtttctgaagcaatccacaaggccaagattgaagttttggaggaaggcaccaaggcatctggagccacagctctgttgttattgaaaaggtctcggattcctatttttaaagcagatcggccattcatctatttcctgagagaacctaacacaggtattacagtattttttgacaggattcagataatttatcagtgtctctctagcaacaagggctcatttgtccactatcccctcaaaaataagcattctttctagctgtttttatggtgcttcagaagctacccagttgctatcttctatcctaagaaaggggactatttcgtaagtacaaaggaaacttatcctccatgttttttacc

SEQ ID NO: 40729 - DNA, 2293 bp, Artificial Sequence
  derived and/or modified sequence
atcagatgcatgcatagcaccacacagctacatcttaaaaaacgtagtgtttactcaaaaacattagggaataacgaaatacataacataaaagcaggaggaggggggaagcattaggtacctggtacccagcaaaagcccaacaagcaaagttatcagtggaattcctcaatgtgacaaagggctggatgaggggttccttgctggtacaaccaggtcacaagcctaagaaggcttgacgggtgtggctggctctccccccacggccctgctctgttcccgatctgggctttgctgccctgggctgggctgcttctcctggctctctgcaggacctccaggctccaggaatttggaccgagtggtagagacatcgccggcagagacggcaatcgccagcttcctctctgtgctgtcttgtgattcaaagcagattctgctccacttttttaaaaggggagcacatgaatgctggagacccacaagaacagagtcgagcaaggaaacgtgcaacagtgatacaaaagtctggctttgctaaagtcacacatccagtaagtggccgaagcagatcttcagacccacagtttggctgccaaaggaccacagaaccctcccagcctccatgccgcctttcctgatcaccctcttcctctttcactcttgctgcctccgagcaaatggccacctccgtgaaggaatgacattgctgaagactgagtttgcacttcacctctaccagagtgtggccgcgtgtagaaatgagacgaactttgtcatctctcctgctggtgtgtccctccccctggagatcctgcagtttggagcagaagggagcactggtcagcagctggcagatgccctggggtacactgtccatgacaaaagggtgaaagatttcttgcatgctgtttatgccacactacccacctccagccaaggcaccgagatggagctggcctgcagcctttttgtgcaagtgggaacgccactgtccccctgctttgtggagcacgtctcctggtgggctaacagcagcctggaaccagccgacctcagtgagcccaatagcaccgccatccagactagcgaaggggcctccagagagactgcaggtgggggccccagtgagggccctggtggctggccgtgggagcaagtcagtgcagcatttgctcagcttgtgcttgtgagcaccatgtccttccaaggcacttggcgaaagagattctcctccacagacacacagatcctgcctttcacctgtgcctatggcctcgtccttcaggtccccatgatgcaccaaacgaccgaggtcaactacggtcagttccaggacactgcaggccatcaggtgggggtgctggagcttccttacctgggaagtgcagtgagtctgttcctggtgctgccccgtgacaaagacacccccctgagccacatcgagccacacctcacagccagcaccatccacctctggaccaccagcctgaggagagccaggatggatgtgttcctgcccaggtttaggatccaaaatcaattcaacttaaaaagcattttaaattcttggggagtcaccgatctttttgatccactcaaagctaacttgaaaggaatttcaggccaagatggcttttatgtttctgaagcaatccacaaggccaagattgaagttttggaggaaggcaccaaggcatctggagccacagctctgttgttattgaaaaggtctcggattcctatttttaaagcagatcggccattcatctatttcctgagagaacctaacacagggtttgtcttcagtattgggagagtttcaaatcccctagactaaatgcatgttctccactttcatcaatgcttttcttcataaagttataatttcattttgctatacccttgaaatttaaaaaaatgtctgataaagtgtaaaaagctaagggtatgtgattttcaatattataaacctaaaaatacttcagtttttaaatgttataagtttattttgcctactcttaatccaaatctattttgaccttcttttctactgcttaccccccaaaccactaaaaggcacagcagtgatcatgaatggtgagtgagtcaggccataagattgcttcctcagtacggatactctaggccatgttgaattgagggtggagaatgaatagcgtggttttccttatcctgtgaaactcaggggggatgcaaaatgagcaaagtcatcttaaaggtgtttcctttccatttagcttataaataaaacagagtttaagtgtgagaa

SEQ ID NO: 40730 - DNA, 1215 bp, Artificial Sequence
  derived and/or modified sequence
atgccccccttcctgatcaccctgttcctgttccacagctgctgcctgagagccaacggccacctgagagagggcatgaccctgctgaagaccgagttcgccctgcacctgtaccagagcgtggccgcctgcagaaacgagaccaacttcgtgatcagccccgccggcgtgagcctgcccctggagatcctgcagttcggcgccgagggcagcaccggccagcagctggccgacgccctgggctacaccgtgcacgacaagagagtgaaggacttcctgcacgccgtgtacgccaccctgcccaccagcagccagggcaccgagatggagctggcctgcagcctgttcgtgcaggtgggcacccccctgagcccctgcttcgtggagcacgtgagctggtgggccaacagcagcctggagcccgccgacctgagcgagcccaacagcaccgccatccagaccagcgagggcgccagcagagagaccgccggcggcggccccagcgagggccccggcggctggccctgggagcaggtgagcgccgccttcgcccagctggtgctggtgagcaccatgagcttccagggcacctggagaaagagattcagcagcaccgacacccagatcctgcccttcacctgcgcctacggcctggtgctgcaggtgcccatgatgcaccagaccaccgaggtgaactacggccagttccaggacaccgccggccaccaggtgggcgtgctggagctgccctacctgggcagcgccgtgagcctgttcctggtgctgcccagagacaaggacacccccctgagccacatcgagccccacctgaccgccagcaccatccacctgtggaccaccagcctgagaagagccagaatggacgtgttcctgcccagattcagaatccagaaccagttcaacctgaagagcatcctgaacagctggggcgtgaccgacctgttcgaccccctgaaggccaacctgaagggcatcagcggccaggacggcttctacgtgagcgaggccatccacaaggccaagatcgaggtgctggaggagggcaccaaggccagcggcgccaccgccctgctgctgctgaagagaagcagaatccccatcttcaaggccgacagacccttcatctacttcctgagagagcccaacaccggcttcgtgttcagcatcggcagagtgagcaaccccctggactag

SEQ ID NO: 40731 - DNA, 147 bp, Artificial Sequence
  derived and/or modified sequence
atgccccccttcctgatcaccctgttcctgttccacagctgctgcctgagagccaacggccacctgagagagggcatgaccctgctgaagaccgagttcgccctgcacctgtaccagagcgtggccgcctgcagaaacgagacctag

SEQ ID NO: 40732 - DNA, 1275 bp, Artificial Sequence
  derived and/or modified sequence
atgccccccttcctgatcaccctgttcctgttccacagctgctgcctgagagccaacggccacctgagagagggcatgaccctgctgaagaccgagttcgccctgcacctgtaccagagcgtggccgcctgcagaaacgagaccaacttcgtgatcagccccgccggcgtgagcctgcccctggagatcctgcagttcggcgccgagggcagcaccggccagcagctggccgacgccctgggctacaccgtgcacgacaagagagtgaaggacttcctgcacgccgtgtacgccaccctgcccaccagcagccagggcaccgagatggagctggcctgcagcctgttcgtgcaggtgggcacccccctgagcccctgcttcgtggagcacgtgagctggtgggccaacagcagcctggagcccgccgacctgagcgagcccaacagcaccgccatccagaccagcgagggcgccagcagagagaccgccggcggcggccccagcgagggccccggcggctggccctgggagcaggtgagcgccgccttcgcccagctggtgctggtgagcaccatgagcttccagggcacctggagaaagagattcagcagcaccgacacccagatcctgcccttcacctgcgcctacggcctggtgctgcaggtgcccatgatgcaccagaccaccgaggtgaactacggccagttccaggacaccgccggccaccaggtgggcgtgctggagctgccctacctgggcagcgccgtgagcctgttcctggtgctgcccagagacaaggacacccccctgagccacatcgagccccacctgaccgccagcaccatccacctgtggaccaccagcctgagaagagccagaatggacgtgttcctgcccagattcagaatccagaaccagttcaacctgaagagcatcctgaacagctggggcgtgaccgacctgttcgaccccctgaaggccaacctgaagggcatcagcggccaggacggcttctacgtgagcgaggccatccacaaggccaagatcgaggtgctggaggagggcaccaaggccagcggcgccaccgccctgctgctgctgaagagaagcagaatccccatcttcaaggccgacagacccttcatctacttcctgagagagcccaacaccggcatcaccgtgttcttcgacagaatccagatcatctaccagtgcctgagcagcaacaagggcagcttcgtgcactaccccctgaagaacaagcacagcttctag

SEQ ID NO: 40733 - DNA, 1215 bp, Artificial Sequence
  derived and/or modified sequence
atgccccccttcttgatcactctgttcttatttcacagttgttgcctcagagccaatggccacctgagggagggcatgaccttgctaaaaaccgagtttgcgctacacttgtaccagtcggtagccgcatgccggaatgaaacaaacttcgtgatcagcccagccggagtctccctgccgcttgagatcctccagtttggggcagagggctccaccggtcagcagttggccgatgctctcggatacacggtccatgataagagagtgaaagactttcttcatgccgtgtacgccacactgccaacctcaagtcaaggtactgagatggaactggcatgctcgctctttgtccaagttggcacacccctgtctccctgttttgtggaacacgtttcatggtgggccaactcctctcttgagcctgctgacctgtccgagcctaactcaactgcaatccagaccagtgagggcgcctctcgtgaaacagcagggggcgggccctccgagggtccagggggttggccttgggaacaggtgtcagctgcctttgcccagctggtgttagttagcaccatgtcattccaaggcacatggcgaaagcgcttttcctcaacagacactcaaatccttccattcacctgcgcatatggccttgttttgcaggtccccatgatgcaccagacaactgaggttaattatggacagttccaggacacagccgggcaccaggttggtgtgctggaattaccctatctgggctcagccgtctccctgtttctcgtgctaccccgggacaaggacaccccattgtcccacattgagcctcacctgacagcctccacaatccacctttggactacttccctgcgcagagcccgcatggacgtttttcttccacggttcaggattcagaaccagttcaacctgaaaagtatcctgaactcttggggtgtgactgacctcttcgaccccctgaaggcaaacttgaaaggaattagtgggcaagacggattctacgtgagtgaagcaatacataaggcaaagatcgaggtgttggaagagggcactaaagcctcaggtgccacagccctgctgctgcttaagcgctcaagaattcccatttttaaggccgaccgtccctttatatactttctgcgcgagcccaatactggattcgtcttttctattggacgcgtgagcaacccgctagattag

SEQ ID NO: 40734 - DNA, 147 bp, Artificial Sequence
  derived and/or modified sequence
atgccgcctttcctaataactctgttcctcttccattcatgttgcctgagagcaaacgggcatctccgcgaaggtatgaccttgctcaaaacagaattcgccctgcatctttatcagagcgtggctgcctgcaggaatgagacatag

SEQ ID NO: 40735 - DNA, 1275 bp, Artificial Sequence
  derived and/or modified sequence
atgcctccctttctcattactctgtttctgttccattcgtgttgtttgagagctaatggccacttgagggaaggcatgactttattgaaaactgagtttgccctgcacttataccagtcagtagccgcctgtaggaacgaaacaaactttgtcatttcgccagctggtgtatcactgcccttggaaatcttacagtttggtgccgaaggcagtaccggccagcaactggctgacgccttgggatataccgtccacgataagagagtaaaggacttcctgcatgctgtgtatgcaacacttcccacctccagtcagggtacggagatggaattggcatgtagcctatttgtgcaggtgggtacaccactgtctccctgcttcgtggagcacgtgtcatggtgggcaaattcttccctcgagcctgcggatctcagcgaacctaattcgactgcaattcagactagtgagggcgcgtcaagggagacggccggcggaggcccctcggagggcccgggcggatggccttgggaacaggtttccgcagctttcgcccagctggttctggtgtccactatgtctttccagggtacctggaggaaaagattttctagcaccgatacacaaatcctcccttttacatgtgcctacgggctggtgctgcaagtgcccatgatgcaccaaaccacagaagtgaattacggacagttccaagatacagcagggcaccaagttggcgtactggagctcccctatctcgggtctgctgtttccctttttcttgtgttgcctcgggacaaggacacgcccctgtctcacatcgagccccatctgactgcatctactattcacctgtggacaacttccctgcgacgagcccgtatggacgtatttctgcccagatttcgtattcaaaatcagttcaatctgaagtcaatactcaattcttggggagttaccgacctgtttgatccactgaaagccaacttgaaagggatcagtgggcaggacgggttttacgtgtctgaagccatacataaggctaagatagaagtgctcgaggagggtaccaaggcctccggcgccacagctcttctattactgaagcgctccagaatccccattttcaaggcggatagacccttcatttactttctcagggaacccaacaccgggatcacagtgttcttcgatcgaattcagatcatctaccagtgcctttcaagtaataaagggagcttcgtacattacccgctgaagaacaagcacagtttttag

SEQ ID NO: 40736 - DNA, 1215 bp, Artificial Sequence
  derived and/or modified sequence
atgccaccgtttttgatcactctctttctgtttcacagttgctgcctgagagccaacggtcatttgagagaaggaatgactctgctaaaaactgagttcgccctacatctctatcagtccgtagcagcctgtcgcaacgaaaccaactttgttatctccccagcgggcgtgagcctcccactcgagatccttcagtttggcgcagaggggagcaccggacaacagttggctgacgcgctcgggtatacggttcacgataagagagtgaaggacttcttgcacgccgtgtatgctaccctcccaactagcagccagggcacagagatggagctggcttgctccctgttcgtgcaggttggcactcccctcagcccttgcttcgtcgagcatgtgagttggtgggcgaatagtagtttggagcccgcggatctgtcggagcccaactctactgccattcagaccagcgagggcgcctccagagagacggcaggcgggggaccatcagaagggccaggagggtggccctgggagcaagtgtctgccgcttttgcgcagttggtattggtaagtacaatgtcatttcagggtacttggcgcaaaagatttagttcaacagatacacaaattttgccttttacctgtgcctacggattggttctccaggtgcctatgatgcaccaaaccacagaggtgaattacggccaatttcaggacaccgcgggacaccaagttggcgtgttggaactgccttacctgggttccgcagtaagcctgttcctggtgctgccacgggacaaagatactccgctcagccatatcgagccccatttgaccgcatctactatccacctgtggacaaccagtctgcgccgggcaaggatggacgtctttctgccacggtttaggatccaaaatcagttcaatttaaagagcatattaaactcatggggggtgacggacttgttcgacccactgaaggcaaacctgaagggcattagcggtcaggatggattctacgtttctgaagcaattcataaggccaaaattgaagtactagaggagggcactaaggcctcaggcgcgaccgctctccttcttctcaaaagatctaggattcctattttcaaagctgaccggccgtttatctacttcctgcgggagccgaacacggggttcgtctttagcattggacgtgtgagcaacccactagattag

SEQ ID NO: 40737 - DNA, 1215 bp, Artificial Sequence
  derived and/or modified sequence
atgccacccttcctgatcaccctcttcctgttccacagctgctgcctgcgggccaacggccacctgcgggagggcatgaccctgctgaagacagaatttgccctgcacctgtaccagagcgtggccgcctgcagaaatgagaccaacttcgtcatcagccctgctggggtgtccctgcccctggagatcctgcagtttggagctgagggcagcacaggccagcagctggctgatgccctgggctacacagtgcatgacaagagggtgaaggacttcctgcatgctgtgtatgccaccctgcccaccagcagccagggcacagagatggagctggcctgcagcctgtttgtgcaggtgggcacccccctgagcccctgctttgtggagcacgtgtcctggtgggccaacagcagcctggagcctgctgacctgtctgagcccaacagcacagccatccagaccagcgagggcgccagccgggagacagctgggggcggccccagcgagggccctgggggctggccctgggagcaggtgtctgctgcctttgcccagctggtgctggtgtccaccatgtccttccagggcacctggaggaagcgcttcagcagcacagacacccagatcctgcccttcacctgtgcctacggcctggtgctgcaggtgcccatgatgcaccagaccacagaggtgaactacggccagttccaggacacagctggccaccaggtgggcgtgctggagctgccctacctgggcagcgctgtgtccctcttcctggtgctgccccgggacaaggacacccccctgagccacatcgagccccacctgacagccagcaccatccacctgtggaccaccagcctgcggcgggccaggatggatgtgttcctgccccgcttccgcatccagaaccagttcaacctgaagagcatcctgaacagctggggcgtgacagacctgtttgaccccctgaaggccaacctgaagggcatcagcggccaggacggcttctacgtgtctgaggccatccacaaggccaagattgaggtgctggaggagggcaccaaggccagcggggccacagccctgctgctgctgaagaggagccgcatccccatcttcaaggctgaccggcccttcatctacttcctgcgggagcccaacacaggctttgtgttcagcatcggccgggtgagcaaccccctggactag

SEQ ID NO: 40738 - DNA, 147 bp, Artificial Sequence
  derived and/or modified sequence
atgccacccttcctgatcaccctcttcctgttccacagctgctgcctgcgggccaacggccacctgcgggagggcatgaccctgctgaagacagaatttgccctgcacctgtaccagagcgtggccgcctgcagaaatgagacctag

SEQ ID NO: 40739 - DNA, 1275 bp, Artificial Sequence
  derived and/or modified sequence
atgccacccttcctgatcaccctcttcctgttccacagctgctgcctgcgggccaacggccacctgcgggagggcatgaccctgctgaagacagaatttgccctgcacctgtaccagagcgtggccgcctgcagaaatgagaccaacttcgtcatcagccctgctggggtgtccctgcccctggagatcctgcagtttggagctgagggcagcacaggccagcagctggctgatgccctgggctacacagtgcatgacaagagggtgaaggacttcctgcatgctgtgtatgccaccctgcccaccagcagccagggcacagagatggagctggcctgcagcctgtttgtgcaggtgggcacccccctgagcccctgctttgtggagcacgtgtcctggtgggccaacagcagcctggagcctgctgacctgtctgagcccaacagcacagccatccagaccagcgagggcgccagccgggagacagctgggggcggccccagcgagggccctgggggctggccctgggagcaggtgtctgctgcctttgcccagctggtgctggtgtccaccatgtccttccagggcacctggaggaagcgcttcagcagcacagacacccagatcctgcccttcacctgtgcctacggcctggtgctgcaggtgcccatgatgcaccagaccacagaggtgaactacggccagttccaggacacagctggccaccaggtgggcgtgctggagctgccctacctgggcagcgctgtgtccctcttcctggtgctgccccgggacaaggacacccccctgagccacatcgagccccacctgacagccagcaccatccacctgtggaccaccagcctgcggcgggccaggatggatgtgttcctgccccgcttccgcatccagaaccagttcaacctgaagagcatcctgaacagctggggcgtgacagacctgtttgaccccctgaaggccaacctgaagggcatcagcggccaggacggcttctacgtgtctgaggccatccacaaggccaagattgaggtgctggaggagggcaccaaggccagcggggccacagccctgctgctgctgaagaggagccgcatccccatcttcaaggctgaccggcccttcatctacttcctgcgggagcccaacacaggcatcaccgtcttctttgaccgcatccagatcatctaccagtgcctgagcagcaacaagggcagctttgtgcactaccccctgaagaacaagcacagcttctag

SEQ ID NO: 40740 - DNA, 1215 bp, Artificial Sequence
  derived and/or modified sequence
atgccccccttcctgatcaccctgttcctgttccacagctgctgcctccgggcaaacggccatcttagggaagggatgaccctattaaagacagaattcgcccttcatttgtatcagagcgtggccgcctgtcggaacgagaccaactttgtgatttctccagcaggcgtctctttaccgctcgaaatcctgcagttcggcgctgagggatctacaggacagcagctcgcagacgcattgggttacacggtgcatgataagcgcgtgaaagatttcctccatgctgtatacgccaccctgcctacatcctcacagggaactgagatggaactcgcttgtagcttgttcgtccaggtggggacacctctgtcgccttgttttgtggaacacgtcagttggtgggctaattcatcgttagagccagccgatctctctgagccgaattcaaccgccattcagaccagtgaaggggccagccgagagacagccggcggcggaccgtcagaaggacctggcgggtggccctgggaacaggtgtcagccgccttcgcacagctcgtgctcgtgtcgacaatgagctttcagggcacatggcgcaagagattctcaagcaccgacacacaaattctccccttcacttgcgcttatgggcttgttctgcaggtgccaatgatgcatcagacgacagaggttaactacggtcagtttcaagatacggctggacatcaggtcggagtccttgagctgccctacttgggatccgccgtgagcctgtttctcgtgttaccaagagataaagacaccccactttcacatatcgaacctcatctgacagctagcaccattcacctgtggactacgagcctgaggcgggcacgcatggacgtcttcctccctagatttaggatccagaatcagttcaatctgaagtccattctgaattcttggggagttaccgatttgtttgaccccctgaaggcgaatctgaagggcatcagcggacaggatggcttctacgttagcgaggccatccataaggcaaaaattgaggttttggaagaaggaaccaaagccagcggcgcaacggccctactcctgctcaagagaagccgcatccctatttttaaggcggacagaccgttcatctactttttacgggaacccaatacagggtttgtcttctcaatcggccgagtatcaaacccacttgactag

SEQ ID NO: 40741 - DNA, 147 bp, Artificial Sequence
  derived and/or modified sequence
atgccccccttcctgatcaccctgttcctgttccacagctgctgcctccgcgccaacggacatctgcgggaaggaatgactttgctgaaaacagaattcgctctccacctttaccagagcgtggccgcttgtagaaacgagacctag

SEQ ID NO: 40742 - DNA, 1275 bp, Artificial Sequence
  derived and/or modified sequence
atgccccccttcctgatcaccctgttcctgttccacagctgctgcctccgggcaaatggccacctcagggaaggcatgaccctgctgaagaccgaatttgccctgcatctgtatcagtctgtggctgcctgccggaacgagaccaactttgtgatttcacctgctggggtcagtttgcctctcgaaattttgcagtttggggcagaagggagcacaggtcaacagctggccgacgctttagggtacacagtacatgataagagggtgaaagatttcctccacgccgtgtatgccactctgcccaccagctctcaaggtaccgagatggagttggcttgttcactattcgttcaagtgggtactcctctgagcccttgcttcgtggagcacgtctcctggtgggccaactcctcattagagcccgccgacctgtctgaaccaaactccactgcaattcagacttcagagggagcctcccgggagacagcaggcggcgggccctctgaggggcctggaggctggccctgggaacaggtgtcggctgccttcgcccagcttgttctagtgagcaccatgtcgttccagggtacctggagaaagaggttcagtagcaccgacactcagatcctccctttcacctgtgcgtatggcctcgttctgcaggtgccaatgatgcaccagaccaccgaggtgaattacggtcagttccaggatactgccgggcaccaggtgggtgtactggagctgccctacctcggatctgcagtgtccctcttcctcgtcctgcctcgagacaaagatactccactctcacatattgaacctcatctcaccgcaagtaccattcacctgtggacaacctcactgcggagagcccggatggacgtctttctgccacggtttcggatacagaaccaattcaaccttaagagcattctgaactcatggggcgtgactgatctctttgatcccctgaaggctaacctgaagggcatctctggtcaggatggtttttacgtgtcagaagccatccacaaagccaagatagaggttctggaggaaggcactaaagccagcggagcaacagcactgctgctccttaaacggagtcgcatcccaatattcaaggccgatcgcccgttcatctatttcctcagggaaccgaacaccggtattacagtcttttttgacaggatccagataatttatcagtgcctgtctagtaacaaaggatcattcgtccattaccctctgaagaataagcacagtttttag

SEQ ID NO: 40743 - DNA, 1215 bp, Artificial Sequence
  derived and/or modified sequence
atgccccccttcctgatcaccctgttcctgttccacagctgctgcttacgcgcgaacggtcacctgagggaaggcatgactctgctgaagacagagtttgccctgcatttatatcagagcgtggccgcatgtcgaaacgaaaccaactttgtgatatcaccagcaggggtctcccttcccttggaaatcctgcagtttggtgcagagggcagtacgggccaacaattagccgatgcgctgggatatacggtgcacgataagagagtgaaagactttcttcatgctgtatacgcaacactacctacttcaagtcaggggaccgagatggaactggcctgctccctgttcgtgcaagtgggaactcctctctctccatgttttgtggagcacgttagctggtgggccaactctagtctggagcctgcagacctcagcgaacccaattccacagccatccagacaagcgagggagcttcccgcgaaaccgctggcggaggccctagtgaaggcccaggagggtggccttgggaacaggtgagtgccgctttcgcccaattggttctggtgtctactatgagctttcaggggacgtggagaaaaaggttctccagtaccgacacacagatcttaccttttacctgcgcctacggactggtgctacaagtccccatgatgcatcagactacggaagtgaattatggccagtttcaggacacagcgggacaccaggtaggcgtcctggaattgccatatctgggttccgccgtcagcctctttctggttctgcccagggacaaggacacgcccctgtcccatattgagcctcatctgaccgcctcaaccattcacctgtggacaacaagtctgcggcgcgctcggatggacgtgttcttgcccagattcagaattcagaatcagttcaacctcaagagtatcttgaattcttggggggtaacggaccttttcgaccccctgaaagccaatctcaaggggatctccggacaggacgggttctatgtgtcggaggctattcacaaggctaagatcgaagtgctcgaggaaggcacaaaggcctccggggcgaccgctctgctgctcttgaaaagatctagaatccccatctttaaggccgatagaccgttcatttactttttgagagaacccaacaccgggttcgtgttcagtatcggacgcgtgagcaatcccctggactag

SEQ ID NO: 40744 - RNA, 1215 nt, Artificial Sequence
  derived and/or modified sequence
augccuccauuccugauaacauuauuccuguuucacuccugcugucugcgcgccaauggacacuugagagaaggcaugacguugcucaagaccgaguucgcauuacaucuuuaucagagcguggccgcauguagaaacgagaccaauuucgugaucagucccgccggaguaucccuuccacucgagauacuucaguuuggagcagaggggagcaccggccagcagcucgcggaugcucugggauacacgguucacgacaaacgcgucaaggauuuccugcacgccguuuaugcuacccugccgaccucuucgcaggggaccgagauggaguuggccugcagccuguuugugcaagucgggacaccauuguccccuugcuucguugaacacguguccuggugggcgaacuccucucucgaacccgcggaucuaucugaaccuaauuccacagccauucagacuagcgaaggugcaucucgggaaacagccggaggaggaccaucugagggaccgggcggcuggccaugggagcagguauccgcugcguucgcccagcugguuuuaguguccacaaugaguuuccaaggaaccuggcgcaagagauucuccagcacugauacacaaaucuugccauuuaccugcgcauacggccugguucuccaggucccgaugaugcaucagacaacagaggugaacuacggccaauuccaagacacagccgggcaccagguuggcgugcuugaacucccuuaccugggaagcgcggugagccuuuuucucguguugccgcgcgauaaagauacuccacucagucauaucgagccucaucugacugcuagcaccauccaccucuggaccacaagucuccgaagagcgcgaauggaugucuuccugccccgcuuccguauucagaaccaguuuaauuugaaaagcauucuuaauuccuggggggugaccgauuuauuugacccucugaaagcaaacuugaagggaauaagcggccaagacggauuuuacguaucagaggcuauucacaaggcgaagauagaaguccuugaggaagggaccaaagcaagcggcgccacagcuuuacuucugcucaagagaucucgaauucccaucuuuaaggccgaucgccccuuuaucuacuucuugcgcgaaccuaauacgggauuuguuuucagcauugguagagucuccaauccacucgacuag

SEQ ID NO: 40745 - RNA, 147 nt, Artificial Sequence
  derived and/or modified sequence
augccuccuuuccugauuacccuguuucuuuuccauucauguugccugcgagcuaacggccaucuacgcgagggaaugacauuauugaagaccgaauuugcuuuacaucuguaccaaagcguggccgcgugcagaaaugaaaccuag

SEQ ID NO: 40746 - RNA, 1275 nt, Artificial Sequence
  derived and/or modified sequence
augccgcccuuucugaucacauuauuuuuguuccauucaugcugucugagggcuaauggacaucuccgugaaggaaugaccuuacuaaagacagaguucgcccugcauuuguaucagucugucgccgcaugucgcaacgaaacuaacuucguaauuucuccagcaggcgucuccuugcccuuagaaauccugcaauuuggugccgaaggcucuacuggccagcaacuggcugaugcccucggguauacagugcacgauaaacgaguaaaagacuucuugcacgccguguaugcaacuuuaccuacaucaucccagggcacagaaauggagcuggcuugcagcuuauuugugcagguuggcaccccacugagcccguguuuuguggagcaugugucauggugggcaaacagcucuuuagaaccugccgauuuaagugagccuaauucuaccgcaauacagacuuccgaaggggcuucacgggaaacggcgggggggggcccaucugagggaccagguggauggccuugggagcagguguccgccgccuucgcgcagcucguucuggucucuacuaugucuuuccaaggcacauggagaaaacgcuuuagcucaacggacacgcagauccuaccuuucacuugugccuacggccucguguuacaagugccuaugaugcaucagacaacugaaguuaacuauggccaguuccaggacaccgcaggccaccaggucggaguccuugaauugcccuaucucggcucugcuguaucccuuuuccuuguuuugccccgcgauaaagacacuccuuugagucacauagagccccaucugacugcuaguaccauucaccucuggacgacaucccugcgacgcgcccggauggacguguuccugcccagguuucggauccaaaaucaguucaaucucaagagcauccugaacagcugggggguuaccgaucuauuugacccacugaaagcuaaucugaagggaauuucgggccaggauggguuuuacgugucagaggcaauccacaaagccaagaucgagguguuggaggaagggacgaaagccucaggcgccacggcgcugcuucugcucaagagaucccgaauuccaauauuuaaggcggaucggccauucauuuauuuccugcgggaaccaaacaccgggauuacugucuucuuugaccguauacagaucaucuaccaaugccuauccagcaauaaaggcuccuuuguucacuauccccugaagaacaaacauucuuuuuag

SEQ ID NO: 40747 - RNA, 1215 nt, Artificial Sequence
  derived and/or modified sequence
augccacccuuccucauuacacuauuucuguuucauucuuguugccuacgagcaaacgggcaucugagagaggggaugacacucuuaaagacugaguucgcacugcaccuguaucaaaguguagccgcuugccgcaacgagaccaacuuuguuauaucaccugcgggggucagccugccucuggaaauccugcaguuuggggcagagggcaguaccggucaacaguuggcggaugcacugggauauaccguucaugacaaaaggguuaaggacuuucugcacgccgucuaugccacucuucccacguccucccagggaaccgagauggagcuggcuuguucucuguucgugcagguugguaccccccuauccccauguuuuguggaacaugucaguuggugggcuaacucgucccucgaaccugcugacuugagugaaccuaacucaacugcgauccagacaagugaaggagccagccgugagaccgccggcggcggcccuucagaagggccugggggcuggcccugggagcaggucucagccgccuuugcucagcucgugcucgucucuaccaugucauuccaaggaacuuggcgaaagagauuuuccucaacugacacacagauucucccauuuacgugcgcguauggccuaguacugcaggugccuaugaugcaucagaccacagagguuaauuauggccaguuccaggauacugcagggcaucaggucggcguucucgaacugcccuaccuggguagcgccgugucacuguuucuugugcucccucgggacaaggauaccccucugagccacauagagccgcaccuaacugccuccaccauucaucuguggacuaccagccugcggcgcgcaagaauggauguguuucugccaagguuccgaauucagaaucaauucaaccugaagucaauccuaaauucuuggggggugacugacuuauucgauccgcugaaagccaaccucaaaggaaucucaggccaagauggcuucuaugugucggaagcgauucacaaagcaaaaauagagguucuagaggagggaacaaaagcuucaggcgccacagccuuacuccugcuuaaaagaucucgcauuccuauuuucaaagccgacagaccauuuauuuacuuccugcgugagccuaacaccgguuuuguguuuaguauuggacggguuucgaacccucuggacuag

SEQ ID NO: 40748 - RNA, 1215 nt, Artificial Sequence
  derived and/or modified sequence
augccaccuuuccuuauaacucuauuucuuuuucauuccugcugcuuacgcgccaauggccaccugagggaggguaugacgcuucugaagacugaguucgcccugcaucuguaucagucgguugccgcuugucguaacgaaaccaacuucgucauuagcccagccggaguaagccuaccucucgagauccuccaguucggcgccgaagggucaaccggacagcaauuagccgaugcacucggauauacugugcacgacaaaagagugaaagauuucuuacaugcaguguacgccacacugccuaccagcucacagggaaccgaaauggaauuggccuguagucuguuugugcagguggguacaccacugucuccauguuuugucgagcauguaucuuggugggcuaauucuucccuggaaccggcugauuuguccgaaccuaauuccacagcaauacagacuucugagggugccucucgagaaacugcugggggcgggccuagugagggaccugguggcuggccaugggagcaagucuccgcagcuuucgcccagcugguguuggucagcacaaugucauuccagggcacguggagaaagagauucucuucuacugacacacagauucucccauuuacuugugcuuacggccuugugcugcaaguuccaaugaugcaccagacgaccgaagugaacuacggccaguuucaagacacugcaggacaccaggugggggugcuggaacugcccuaucuuggauccgcuguuucucucuuccugguccuaccucgggacaaagacacgccucuuucacacaucgagccccaccucacugcgagcaccauucaccuuuggacuacaucccuucgccgcgcuaggauggauguuuuccuaccacgguuccguauucagaaccaguuuaauuugaaaagcauucuuaauuccuggggggugaccgauuuauuugacccucugaaagcaaacuugaagggaauaagcggccaagacggauuuuacguaucagaggcuauucacaaggcgaagauagaaguccuugaggaagggaccaaagcaagcggcgccacagcuuuacuucugcucaagagaucucgaauucccaucuuuaaggccgaucgccccuuuaucuacuucuugcgcgaaccuaauacgggauuuguuuucagcauugguagagucuccaauccauuagacuag

SEQ ID NO: 40749 - RNA, 1275 nt, Artificial Sequence
  derived and/or modified sequence
augcccccauuucugauuacguuauuuuuguuucacaguugcugucucagggcaaauggacaucuccgagaaggcaugaccuugcugaagaccgaauucgcccugcaucuuuaucagucuguagcugccugcagaaaugagacuaacuuuguuaucuccccagccggugugucacucccucucgaaaucuugcaauuuggagccgaaggauccaccgggcaacagcucgccgacgcauuggguuacacaguccacgacaaacgagucaaagauuuccugcacgccguguacgccacucugccaaccuccagucaggguacagagauggaauuagcaugcagccuauuuguacagguaggcacuccucugucaccuugcuuuguggagcacguuucauggugggcgaacuccucccuggagccugcggaucucucugagccaaacucaacagcaauacagacaucagaaggugcaagccgggagacagcaggcggggggccgucugaaggacccggggguuggccuugggagcaggugagcgcugcauuugcacaauugguucuggugucuacaaugucuuuccaggggacuuggcguaaaagauuuuccuccacugauacucaaauccuucccuuuacuugugccuacggacuggugcuccagguuccuaugaugcaccagacaacagaggugaacuacggacaguuucaagauacagccggacaucaaguaggagugcuugagcuuccuuauuugggcucagccgugucauuauuccugguccucccucgcgacaaagacaccccccucucccacaucgaaccacaccucacagccagcaccauccaucucuggacuaccucacugcgaagagcacgcauggauguauuccuuccacgauuccggauucagaaccaauuuaaucucaaauccauucugaacagcuggggagugaccgacuuauucgauccauugaaagccaaucucaaaggaaucagcggucaagacggcuuuuaugucagcgaagcuauccauaaggcaaagaucgagguccuggaggaagguaccaaggccuccggugcaaccgcccuacugcuucugaagaggucacgcauuccaauauucaaggcugaccgcccuuucaucuacuuucugagggagcccaacacaggcaucacaguguuuuuugaucggauacagauuaucuaccagugccugucuucaaauaaagguucauucguccauuacccacuuaaaaauaaacauagcuucuag

SEQ ID NO: 40750 - RNA, 1215 nt, Artificial Sequence
  derived and/or modified sequence
augcccccauuccugauaacacuguuucuguuucacucuuguugucuuagggcaaauggucaucugcgcgaaggaaugacacugcucaaaacugaauuugccuuacaccuguaccagucugucgccgcaugucggaaugagaccaauuucguuauuagcccugccggggucucccugccucuugaaauucugcaauucggggccgaggggagcacaggccaacagcuagccgacgcccucggcuauacgguccaugacaagagggucaaagauuuucugcacgccguuuacgccacccugccuacaagcagucagggaacagagauggaacuggcguguucucuguuuguccagguggguaccccacugucacccuguuucguggagcauguaucuuggugggcuaauucuagccuagagcccgcugaccucucagagccgaacaguacagccauccaaacgucugaaggcgccagccgugaaacagcaggaggugggccaagcgaggggccuggcgguuggccuugggaacaagugagcgccgcauucgcgcaacugguucuugugagcacuaugucuuuucaaggaaccuggagaaagagauuuagcucaaccgacacucaaauucucccauuuacuugcgccuaugggcuuguacuccaggucccaaugaugcaccagaccacugaggugaauuacggucaauuucaggacaccgcagggcaccaagucggagugcuggaauuaccauauuuggggagcgcuguuagucucuuuuugguucucccccgcgacaaagauacuccucuuucccacaucgaaccacaccugaccgcuucuaccauacaccuguggacuaccucacuuagacgggcccggauggacguguuccucccuagauuuagaauccagaaucaguucaaucugaaauccauucucaacucuuggggcguaacagauuuguuugauccccucaaagcgaaccugaaagguaucucaggacaggacggguuuuacgucucugaagcuauacacaaagccaagaucgaaguucucgaggaagguacuaaagccucaggcgcaaccgcccuuuuacuccucaaaagaagucgcauccccaucuuuaaggccgacagaccauucauuuauuucuugagagagccuaauaccggauuugucuuuaguaucggccgugugucuaauccgcuugauuag

SEQ ID NO: 40751 - protein, 100 aa, Artificial Sequence
  derived and/or modified sequence
MHVCDLQKLVRIQLAFTTFPWMFSCHLLPTPELSSKRNQCLLYKTSGCLTQMPILYGHPATLLKDYILQAILQPGKKIQGGTEIQRGSFANQYQTDASHL

SEQ ID NO: 40752 - DNA, 580 bp, Artificial Sequence
  derived and/or modified sequence
aaaggactgtggaacatctcagagcctctcagtaggagcagaaaagttactggggagtacagatgcatgtatgtgatctgcagaagctggtcaggatccaacttgcatttactacatttccatggatgttcagttgccatcttctgcctactcctgagctttcatccaagagaaatcagtgtttgctttacaagacttccggttgtctaacccaaatgccaattttatatgggcaccctgccactcttctaaaagactacattttgcaggcaattttgcaaccaggaaagaagattcaaggaggaactgaaatacagagaggctcctttgcaaaccagtatcaaacagatgccagtcacttgtaacatctgccctaccattggaataacataatgagaggcctgggcaacccagagagaagtgtaaatgacatcagttactaataagaacactgctgaattttgaaaaacttttgcatgctttaatttctccatattttaagtaattatactaattatgagagtgctgtgtattattagttgtttggtcacaaataaaaacaaaattcatttcaaatata

SEQ ID NO: 40753 - DNA, 303 bp, Artificial Sequence
  derived and/or modified sequence
atgcacgtgtgcgacctgcagaagctggtgagaatccagctggccttcaccaccttcccctggatgttcagctgccacctgctgcccacccccgagctgagcagcaagagaaaccagtgcctgctgtacaagaccagcggctgcctgacccagatgcccatcctgtacggccaccccgccaccctgctgaaggactacatcctgcaggccatcctgcagcccggcaagaagatccagggcggcaccgagatccagagaggcagcttcgccaaccagtaccagaccgacgccagccacctgtag

SEQ ID NO: 40754 - DNA, 303 bp, Artificial Sequence
  derived and/or modified sequence
atgcatgtttgcgaccttcagaaactcgtgcgcatccaactcgcttttacaacatttccatggatgttcagttgtcacttgctacccacacccgaactgtcctctaagaggaatcagtgtttgctctacaaaacatcaggctgtttgactcaaatgcctattctttacgggcatcccgccacactattgaaggattacatcctccaagcgatactccagccgggtaagaaaatacagggtggcactgaaatacagcgtggctccttcgctaatcagtatcagaccgatgcaagccatctgtag

SEQ ID NO: 40755 - DNA, 303 bp, Artificial Sequence
  derived and/or modified sequence
atgcacgtgtgtgacctgcagaagctggtgcgcatccagctggccttcaccaccttcccctggatgttcagctgccacctgctgcccaccccagagctgagcagcaagaggaaccagtgcctgctgtacaagaccagcggctgcctgacccagatgcccatcctgtatggccacccagccaccctgctgaaggactacatcctgcaggccatcctgcagcccgggaagaagatccagggcggcacagagatccagaggggcagctttgccaaccagtaccagacagatgccagccacctgtag

SEQ ID NO: 40756 - DNA, 303 bp, Artificial Sequence
  derived and/or modified sequence
atgcacgtgtgcgacctgcagaagctggtgcggatccagctggcctttaccacttttccctggatgttttcctgtcacctcctgcctacccctgagcttagctcaaagcgtaaccagtgccttctttacaagaccagcgggtgtttaacccaaatgcctatcctttacggtcaccctgctacactgcttaaggattacatcctgcaggccattttgcaacctggcaagaagatccaggggggaaccgagatccagcggggatcctttgccaaccaatatcagacagacgcaagtcacctctag

SEQ ID NO: 40757 - DNA, 303 bp, Artificial Sequence
  derived and/or modified sequence
atgcacgtttgtgatctgcagaagctggtccgaatccaactggcttttacaaccttcccctggatgttttcgtgtcatctgttgcctactcccgagctaagcagcaaaaggaatcaatgcctgctctacaagacatctgggtgtttgacacagatgcctatcttgtacggtcatcctgcgaccctactaaaagattatatcttgcaggccatactgcagcctggtaaaaaaattcaggggggaaccgaaattcagagaggcagctttgcgaaccagtaccagaccgacgccagccatttgtag

SEQ ID NO: 40758 - protein, 145 aa, Artificial Sequence
  derived and/or modified sequence
MIPKLATPRDISLLVIKEASSRARNNIQILDPLDHIARLTNYTLTSCFSSNKVPTMPGSLPTGSKQGNVQTLDSIRWMPATPVPAPECHQKYAISTETAFPTLSTFMNTEKSVKGSNADFTKRNPRWRFLLGIYCSLHHAMTIFI

SEQ ID NO: 40759 - DNA, 1516 bp, Artificial Sequence
  derived and/or modified sequence
gttaaggtactaatcacagcagcagtgctgggaaagatgcctaggaaggatgaggatgacaggcactattttggtgtgctccccaccacagcaataacagaaagatagtccaggtgcagtgtctttcacctgtaatcccagcactttgggaggctgaggtgggaggatcgcttgagcccaggagttcaagaccagcctgggcaacatgataccgaaactggcaacacccagagacatttccctcctagtcataaaggaagccagcagcagagccagaaataatattcaaattctggatccactagaccatattgcccgtctgacaaattatacgcttacatcctgcttcagttctaataaggtacccacaatgccgggttctctacccactgggagcaaacaagggaacgtgcagacgctggacagcatacgatggatgcctgcaactcctgtacctgcccccgaatgccaccagaaatatgccatctctactgaaacagcttttccaaccctgagcacgtttatgaacacggaaaagagtgtaaaggggtcaaatgcagactttacaaaaagaaacccaagatggagattcctgttggggatatactgcagcctacatcatgctatgacaattttcatataaagatgctgtctcggaaagaaaaggattgggagtttgaatgatctatggcttccattccaaaaaggattactacagaagtaattactttgaaagaaaagtgataatatgtttttggagaaaggtggaaatgaagcaaggccctgaatatattaccaagatgcatattacactgaatgaaatcatccgttgcccttccggatctatcccgtggatgcagagcaagagcaacccatctttgttcagcatcccaggagacaggcctctattgacagcatcagtctggctcctttgccctctgatttcccattgaatgtggccagtgggagggcccagcagatggagggccaggaggaggaagagtctgcagcatttgttctcctggctcccaccctgccaggtctctgtctgacagtggctcacgcttttccacagcccctgtcaggtggcctctcccaaagtgacagtgttcacttggttctgtaagtgttttctccattgcctcttgccagggagggtaatggcttcctagagccagatgccagcacctgaggttgcccaccaccccatgctgtttcccttaaccctgcctacactttcaagaattgaaactctttgcagcctccttttttttttttttaaaaaaaggtactatcgatttcctaaaggaccgtgagtgatatacactcagagattcttttgtcatgttactttccgtagctcaatatggctgttatccacattatacaaagaacataatacctaccttaaatttttaatattttgtctttattcttcaactctgtgtagcatttccttctggttaagaacatgcagataatccaaataaacagatttgactaaaagaaaaaaaaa

SEQ ID NO: 40760 - DNA, 438 bp, Artificial Sequence
  derived and/or modified sequence
atgatccccaagctggccacccccagagacatcagcctgctggtgatcaaggaggccagcagcagagccagaaacaacatccagatcctggaccccctggaccacatcgccagactgaccaactacaccctgaccagctgcttcagcagcaacaaggtgcccaccatgcccggcagcctgcccaccggcagcaagcagggcaacgtgcagaccctggacagcatcagatggatgcccgccacccccgtgcccgcccccgagtgccaccagaagtacgccatcagcaccgagaccgccttccccaccctgagcaccttcatgaacaccgagaagagcgtgaagggcagcaacgccgacttcaccaagagaaaccccagatggagattcctgctgggcatctactgcagcctgcaccacgccatgaccatcttcatctag

SEQ ID NO: 40761 - DNA, 438 bp, Artificial Sequence
  derived and/or modified sequence
atgatccccaaacttgcaactccgagggatatcagtctattagttatcaaggaggcctcctctagagcgcggaacaatatccagatcctcgatccgctcgatcatatagcgagactcacgaattatactctgacatcgtgcttcagttcgaataaagtgcctaccatgcctggctcacttcctacaggatcgaaacagggaaatgtacagacattggattcaatccgctggatgcccgccactcccgtgcctgcccccgaatgccaccagaaatatgccatcagcacagagactgcctttcctactctctccacttttatgaataccgagaagagcgtgaagggatccaatgctgacttcaccaaaaggaacccgcgctggcgcttcctcctgggcatctattgctccctgcatcacgctatgactattttcatctag

SEQ ID NO: 40762 - DNA, 438 bp, Artificial Sequence
  derived and/or modified sequence
atgatccccaagctggccaccccccgggacatcagcctgctggtgatcaaggaggccagcagccgggccaggaacaacatccagatcctggaccccctggaccacatcgcccggctgaccaactacaccctgaccagctgcttcagcagcaacaaggtgcccaccatgcctggcagcctgcccaccggcagcaagcagggcaatgtgcagaccctggacagcatccgctggatgcctgccacccctgtgcctgcccctgagtgccaccagaagtatgccatcagcacagaaacagccttccccaccctgagcaccttcatgaacacagagaagtctgtgaagggcagcaatgctgacttcaccaagaggaacccccgctggaggttcctgctgggcatctactgcagcctgcaccacgccatgaccatcttcatctag

SEQ ID NO: 40763 - DNA, 438 bp, Artificial Sequence
  derived and/or modified sequence
atgatccccaagctggccaccccccgggacatcagcctgctggtgattaaagaggcttcatccagggcccggaacaatatccagatcttggaccctctcgaccacattgcacgcctcaccaactacaccttgacttcttgtttttctagcaataaagtacctaccatgcctggctccctgcccactggcagcaagcagggaaacgtgcagacactcgactccatcaggtggatgcccgcaactcctgtgcccgcccccgagtgccatcaaaagtatgctatttccaccgagaccgcttttccaacacttagtaccttcatgaacaccgagaagtctgtgaagggcagcaacgccgattttaccaagcgcaacccgcggtggcgctttctgctgggaatctactgtagcttacaccacgccatgaccatcttcatctag

SEQ ID NO: 40764 - DNA, 438 bp, Artificial Sequence
  derived and/or modified sequence
atgattcctaagctagcaaccccaagggacatcagtctgctagtgattaaggaggcttctagccgggcacgcaacaatatccaaatcctggaccccttggaccacatcgcacgcctgacaaactacacgctgactagctgcttttcttccaacaaggtcccgaccatgccgggaagcctccctaccggttcaaagcaaggcaatgtacagacgctggactccattagatggatgccagcaacacccgtgccggctcccgaatgccaccagaaatatgccattagcactgagacagcctttccgacccttagcacctttatgaacaccgagaaatccgtcaaaggttctaacgcagattttacaaaacggaatcctaggtggcgattcttattggggatctattgttctctgcatcatgccatgactatttttatatag

SEQ ID NO: 40765 - protein, 94 aa, Artificial Sequence
  derived and/or modified sequence
MRAGFSDFQLIRDQVLFLQDQAQRLTEWLQLSGFENPVSESTTLCLREREKRIPTCVAVCVPSPGTVHTALLHPTTLSQSRSSSEAKMLIIHTA

SEQ ID NO: 40766 - DNA, 285 bp, Artificial Sequence
  derived and/or modified sequence
atgagagccggcttcagcgacttccagctgatcagagaccaggtgctgttcctgcaggaccaggcccagagactgaccgagtggctgcagctgagcggcttcgagaaccccgtgagcgagagcaccaccctgtgcctgagagagagagagaagagaatccccacctgcgtggccgtgtgcgtgcccagccccggcaccgtgcacaccgccctgctgcaccccaccaccctgagccagagcagaagcagcagcgaggccaagatgctgatcatccacaccgcctag

SEQ ID NO: 40767 - DNA, 285 bp, Artificial Sequence
  derived and/or modified sequence
atgcgagcaggtttctccgattttcagcttatcagggaccaggtcctgttcctccaagatcaggctcaaagactaactgagtggctacagctctctggcttcgaaaatccagtaagcgaatccaccaccctctgtttgagagagcgagaaaagcgcataccaacgtgcgtcgctgtctgtgttccatctcctggaacagtgcacactgccctgctgcatcccacaacattgtctcaaagccgcagttcgagcgaggctaagatgctgataatacacacagcctag

SEQ ID NO: 40768 - DNA, 285 bp, Artificial Sequence
  derived and/or modified sequence
atgagagctggcttcagtgacttccagctgatccgggaccaggtgctcttcctgcaggaccaggcccagaggctgacagagtggctgcagctgagcggctttgaaaatcctgtgtctgagagcaccaccctgtgcctgcgggagcgggagaagaggatccccacctgtgtggccgtgtgtgtgcccagccctggcaccgtgcacacagccctgctgcaccccaccaccctgagccagagccgcagcagcagcgaggccaagatgctgatcatccacacagcctag

SEQ ID NO: 40769 - DNA, 285 bp, Artificial Sequence
  derived and/or modified sequence
atgcgggccggcttcagcgacttccagctgatccgggaccaggtgctctttctgcaggatcaggcacagaggctgaccgagtggctgcaattatctggatttgagaacccagtgtcagaatccacaacgctatgtctcagagaacgcgaaaagagaatacccacgtgcgtcgctgtgtgcgtcccaagtcccgggacggtgcatacggcgctgctgcatcccactacattgtctcagagccgatcgtcgtccgaggctaagatgctcattatccataccgcttag

SEQ ID NO: 40770 - DNA, 285 bp, Artificial Sequence
  derived and/or modified sequence
atgcgagctggattcagtgattttcagctgatcagagatcaagtattgttcctgcaggatcaagcgcagaggctcactgaatggctgcagctgtcagggttcgagaatccagtgtctgagagtacaactctgtgtctgagggagagggagaaacggattcccacctgtgtggccgtttgtgtgccttcaccaggcacagtccacactgccctgttgcatcccacaaccctctcccagtctcgcagttcctccgaagctaagatgctcatcatccataccgcatag

SEQ ID NO: 40771 - DNA, 1531 bp, Artificial Sequence
  derived and/or modified sequence
gggagctgtgggcaggagaggaaggaaagcagctctctcagctagcgagggggtcagggactgggccaagctcagaagcggggagaagagcgagacagagatgctctgagcaggggagacagggatcccgggctgctgccgctaccaacaagggtacacactgcggtcctcaaggccaggaggggggtgggggcagggaatgcctcagccaacagggcagcggctcggccctgctgctggcccggtgggaagtagcctggggccccgcgactgaaatccgagccaggcctgggcagtctccgctagaaacgctctgggcgcgcactcctggagacgcggaggcccgggcgctccagaccagtgtccttgtaggaggcttcttcacgaagcttagagtttggcctttcatagggaaagacttgctcgggagcaagtctaagggattttaagggattttaaatcttcctgggccagggctagggagctctagtgacagtgtcttggtctggaatccaactctccaattttgaggccgcagggaggaattctgagactttagaggccgcacagccttcagcgcgctcaccgcgtccaggcgtcagtgaggggctatctcgaggcgcgagtgcacaaaaggtagcgcgagtctcttctcaggcgatccagataagaggaaatgagagccgggttttctgacttccaactcattagggaccaggttctttttcttcaggatcaggcacagagactgactgaatggctccaattatcaggatttgaaaacccagtatcagaatctaccactttgtgcctgagggagagggaaaagcggatacccacctgtgtcgctgtttgcgtgccaagtccaggaacagtccatacagccctgctgcatcccacgacgctgtcacaaagcaggagttcatccgaggccaagatgttaattattcatactgcatgactgaggattttggaggcagagagagattcatctgcaatatttggaacaccaatggaggtctacgtcaacacagaatttatacagcagctggtgctagtcagagctaatgacagaatttcagtttaataaaaagacccccaactgagcacaccatcttgaaaaaagtatacttatcaaacagctttcaatcagttcaagagagacaccttaattggggagaggaagaattgcagagtagtttgtaatcatgccaattccagatcaataactgcatgtctgttctttggtagaaatagcttttgctttatattaagtaatcacatatatattctctctatttggataaggaaaccttcgctttatttgacaatgtataatgatatactcttctaattcacctctgtgtcttcacaataaacatgagtaaaatttagacaagtgatggtaaaggtcaatataattatttatttttaaaataaattttgtatctaacaggaaagcagttcttatgaaatttttatattttcaaaaattgttttgttcaaataaaattttatgagtaaagttaaa

SEQ ID NO: 40772 - protein, 458 aa, Artificial Sequence
  derived and/or modified sequence
MARGPQTLVQVWVGGQLFQADRALLVEHCGFFRGLFRSGMRETRAAEVRLGVLSAGGFRATLQVLRGDRPALAAEDELLQAVECAAFLQAPALARFLEHNLTSDNCALLCDAAAAFGLRDVFHSAALFICDGERELAAELALPEARAYVAALRPSSYAAVSTHTPAPGFLEDASRTLCYLDEEEDAWRTLAALPLEASTLLAGVATLGNKLYIVGGVRGASKEVVELGFCYDPDGGTWHEFPSPHQPRYDTALAGFDGRLYAIGGEFQRTPISSVERYDPAAGCWSFVADLPQPAAGVPCAQACGRLFVCLWRPADTTAVVEYAVRTDAWLPVAELRRPQSYGHCMVAHRDSLYVVRNGPSDDFLHCAIDCLNLATGQWTALPGQFVNSKGALFTAVVRGDTVYTVNRMFTLLYAIEGGTWRLLREKAGFPRPGSLQTFLLRLPPGAPGPVTSTTAEL

SEQ ID NO: 40773 - DNA, 1377 bp, Artificial Sequence
  derived and/or modified sequence
atggcccgagggccccagacactggtgcaggtgtgggtgggggggcagctttttcaggccgatcgcgcattgctggtggagcactgcgggttcttccggggtctcttcaggagcggcatgagggagaccagagcagccgaggtccgcctgggggtcctgtctgccggaggcttcagggccacacttcaagtactcaggggcgacaggccggcgcttgcagccgaagacgagctcctccaggcagtggagtgcgcggcttttctgcaagcaccggcccttgcgaggtttctggagcataatctcacctctgacaattgcgccctgctgtgtgacgctgcagccgcatttggcctaagagatgttttccactctgccgcactgtttatctgcgacggggagcgagaactcgcagccgagctggctctgcccgaagctcgcgcctatgttgccgctttgcggccaagctcttacgcggcagtcagcacccacacccctgcacctggttttctagaggacgcaagtcggacactgtgctacctggacgaggaggaagatgcatggcggacactggcagccctgcccctcgaagcctcaacattactcgcaggcgtggcaaccctgggcaacaaattgtacattgtcggaggcgttagaggggcgagcaaagaagtagtggagctcggattttgctatgacccagacgggggcacctggcacgagttcccatctccacaccagcctaggtatgacacggcactggccgggtttgatgggagactgtacgcaataggaggcgagtttcagagaactcccatttcgtccgttgaacgctatgaccctgccgccggttgttggtcatttgtggctgaccttccccagcctgcagccggggtgccttgtgcacaggcatgcggacgccttttcgtctgtctgtggcgcccagccgacacaactgctgttgtcgagtatgccgtgagaaccgatgcctggctgccagtggccgaactacggcgcccccaaagttatggacactgtatggtagctcaccgcgatagcctatatgtcgtacgcaacggtccttcagacgactttctgcactgcgcgattgattgcctcaacttagccaccggacagtggacggcgctcccaggccagttcgtgaactctaaaggcgcactcttcaccgccgttgttaggggtgataccgtctacaccgtaaaccgaatgttcactctgctctatgcaatcgaagggggcacctggcggctgctacgagagaaggcggggtttcccagacccggttctctccagactttcctcctgagactgccccctggtgcaccagggcccgtgacctctaccacagcggaactttag

SEQ ID NO: 40774 - DNA, 3123 bp, Artificial Sequence
  derived and/or modified sequence
atggcacggggtccacagaccctggtgcaggtgtgggtgggcggccagctcttccaagccgaccgcgccctgctggtggagcactgtggcttcttccgaggcctcttccgctccggcatgcgggagacccgcgcagcagaggtgcgcctgggcgttctgagcgcgggaggtttccgcgccacgctgcaggtgctgcgcggcgaccggccggcgctggcggcggaggacgagctgctgcaggccgtggagtgcgccgccttcctccaggcgccggcgctggctcgctttctggagcacaacctcacgtcggacaactgcgcattgctgtgcgacgcggccgccgccttcggcctgcgcgacgtgttccacagtgccgcgctcttcatctgcgacggcgagcgcgagctggcggccgaactggcgctgcctgaggcccgcgcctacgtggcggccctgcggcccagcagctacgcggccgtgagcacgcacacgcccgcgcccggcttcctggaggacgcctcgcgcacgctgtgttacctggacgaggaagaggacgcgtggcgcacgctggctgcgctgcccctggaggccagcacgttgctggccggggtggccacgctgggcaacaagctttacatcgtggggggcgtgcgcggcgccagcaaggaggtggtagagctgggcttctgctacgaccccgacggcggcacgtggcacgagttccccagcccgcaccagccgcgctatgacacagcgctggccggcttcgacggccgcctctacgccatcggcggcgaattccagaggacgcccatcagctccgtggagcgctacgacccagccgcgggctgctggagtttcgtggccgacctgccgcagccggccgccggcgtgccctgcgcccaggcttgtggccgtctcttcgtgtgcctgtggcggccggccgacaccaccgccgtggtggagtacgcagtgcggaccgacgcgtggctgccagtggccgagctgcggcgtccgcagagctatggccactgcatggtggcccaccgcgacagcctctatgtggtgcgcaacggaccttccgacgacttcctgcactgcgccatcgactgtctcaacctggccacgggccagtggacggcgctgcccggccagttcgtcaacagcaagggagcgctcttcacggccgtggtgcgcggtgacaccgtctatacggtcaaccgcatgttcacgctgctctacgccatcgagggcggcacctggcggctgctcagggagaaagccggcttcccgcggcccggctccttgcagacctttctcctaaggctgcctcctggcgctcctgggcctgtgacttcgacaacggcagaactgtgacctctgggctggctttaggagggaggagacgccgcgactcctccctgagctatggctgagtgtgtgaggccggccttagaagtagctggcaacttccctctttctactgagacacccaggtttggtgccttctggtggtgtggacatgttcaagaagctcagggagcagtgatgatgccctcaaattacttgggctctgctgagagctggtgggtcacaatgtcagtgaacagggtagggggagttgggatttgaataatccgggcttatatgtaatgggctagtgattgagcatcgctgggagcgacttaaatgatgttaatcaaactgcaagtagtaggcaagaattaggcacctactgtatgcccaatacagtgttatgcgtaatgagagccgtagttgccacacagggatccaggaagcttaaaggataacccagaaaacaatcttaacagttacaggacaacaaaaaggtttacacacaacttgatccacagagttgaaggcaacatgcaaaaaaatttaaaaccgcatacaatataataaaataaagtgctgaagaaatcagggcaaagggaaaataggaagagaaaaaatatataactccagaaaagaagagagtgtgcaaactctatggaggagatgagcaggataccattagctgctgaaaggggaggcttagaccatggaggctgagagctcagaagagaagcagggttggggaaggctggagcagatggggagggtctctgcaagtccagccataccagcagagcagcagtagttggggcatctagagaggggatgagactgggccagcttgcagcagataatgactgagctgagcctggagtgagacctgtgggggcgagaggattcttcacgttcctttttggaacccttaggggagcacccaggtgtaagcccttgcccaccctgtttttgccatcaccacggggcagtggactgttaacccacatgacttcaggtcagttgaggtatgagccaaatcctgcctcatcttcctcagttgtagcccctcctccacattctacaggtttgttctcttcctgtcctattctgccctttgcaattccctgggctggaatgcctagtctcctcctctctccctgtcagtgctctaccatcctctgtgcagcattggctcacccagctcttcgttttcctgacctgggctgcctgcattgctcattggacccctggctgtaacatcattgtgtgtgcacaaccacgtgtgtggattgtaagggcagagatcctgttaagtgagctgggggacttccctgtcccagattaaaatgatgatgccttgaaagaacccaggctacagaggccactagttaggaacctagtgctgacctctgttgttggatgaggactctcgttccttcatcaaaatccccagctctggcttctgggcagatgcctgtcccagccctttccagcctctccatggccttgggaagacttctctgggtggttctcattggtctccatcccccaggacctgaggcccatggggaatcttggcctcgtcagaagtggagaatgcagtgtcagcatgacacctccggggcatggaggctcgcgccagggctgcacctagctgcctcttctcctggcctatgtcccaaccctggagaatgctgccctcagaagcctgggaccttccagccctggagtagcctagtctgataagtctcaacaataaaccctgacttttgc

SEQ ID NO: 40775 - DNA, 1377 bp, Artificial Sequence
  derived and/or modified sequence
atggcccggggcccccagaccctggtgcaggtgtgggtgggcggccagctgttccaggccgaccgggccctgctggtggagcactgcggcttcttccggggcctcttccgcagcggcatgagggagaccagggctgctgaggtgcggctgggcgtgctgtctgctgggggcttccgggccaccctgcaggtgctgcggggggacaggcctgccctggccgcagaagatgagctgctgcaggccgtggagtgtgccgccttcctgcaggccccagccctggcccgcttcctggagcacaacctgaccagtgacaactgtgccctgctgtgtgatgctgctgctgccttcggcctgagagatgtgttccacagcgctgccctcttcatctgtgatggagagcgggagctggccgctgagctggccctgcctgaggcccgggcctacgtggccgccctgcggcccagcagctatgctgctgtgtccacccacaccccagcccctggcttcctggaggatgccagcaggaccctgtgctacctggatgaggaggaggatgcctggaggaccctggccgccctgcccctggaggccagcaccctgctggccggcgtggccaccctgggcaacaagctgtacatcgtgggcggcgtgcggggggccagcaaggaggtggtggagctgggcttctgctatgaccctgatggcggcacctggcatgagttccccagcccccaccagcccaggtatgacacagccctggccggctttgatggccgcctgtatgccatcggcggggagttccagaggacccccatcagctctgtggagagatatgaccctgctgctggctgctggagctttgtggccgacctgccccagcctgctgctggggtgccctgtgcccaggcctgtggccgcctgtttgtgtgcctgtggaggcctgctgacaccacagctgtggtggagtatgctgtgaggacagatgcctggctgcctgtggccgagctgcggcggccccagagctatggccactgcatggtggcccaccgggacagcctgtatgtggtgagaaatggccccagtgatgacttcctgcactgtgccatcgactgcctgaacctggccaccggccagtggacagccctgcccggccagtttgtgaacagcaagggggccctcttcaccgctgtggtgcggggggacacagtgtacacagtgaacaggatgttcaccctgctgtatgccatcgagggcggcacctggaggctgctgcgggagaaggccggcttccccaggcctggcagcctgcagaccttcctgctgcggctgcccccaggggcccctggccctgtgaccagcaccacagctgagctgtag

SEQ ID NO: 40776 - DNA, 1377 bp, Artificial Sequence
  derived and/or modified sequence
atggcccggggcccccagaccctggtgcaggtgtgggtgggcggccagttgtttcaggcagaccgggcactgctggtcgaacactgcgggttcttccgcggtcttttcagatctggcatgagagaaacccgggcagctgaggtgcgcctgggagtgttgagcgcaggcggattcagagccacactgcaggtcctgcgaggagaccgccccgcgctagctgccgaagatgagcttcttcaggccgtggaatgcgcagcgtttctacaggcgccggccctggccaggtttctcgagcacaatctcacatccgataactgcgcccttctctgtgacgctgcagcagcgttcgggctcagggacgtgtttcatagcgccgccttgtttatatgcgatggcgaacgcgagctggccgcagagctggccttaccagaggcacgtgcctatgttgccgccctcaggccgagtagttatgcagccgtctccacccataccccagctcccggattcctggaagatgctagtcggactctgtgttatctggatgaggaagaggatgcttggcggactctggccgccttacctctggaagctagtacactgttagccggtgtagctacactgggcaataagctgtatattgtgggtggcgtgcgtggggctagtaaggaagtcgtagaactggggttttgctacgaccctgatggcggcacctggcacgagttcccatcgccccaccagccgaggtacgatacggccctcgctggcttcgatggtcgactttacgcaattggcggcgagttccagaggactcccatcagttctgtcgaacgctacgaccctgccgcagggtgttggagctttgttgcagatctgccacaacccgcagccggagtgccctgtgcacaagcctgcggccgcctttttgtatgcttgtggcgacctgcagacaccacagctgtggtggaatacgccgtaagaaccgatgcttggctgcccgtggcggagctccgaaggccacagtcgtatggacactgcatggtggcacaccgggattcattgtacgtggtaagaaacggtccaagcgatgattttctgcattgcgccattgattgtctcaacctcgccactggtcagtggaccgctctgcctggccaattcgtgaacagtaaaggcgcacttttcaccgctgtggtacgaggcgacacggtgtacaccgtaaacaggatgtttacccttctatacgctattgagggcgggacttggcggttactgcgagagaaagcgggctttcccagacccggctctcttcagacctttctgctccgattaccccccggtgcgcctggccccgtcacctccaccactgctgaattgtag

SEQ ID NO: 40777 - DNA, 1377 bp, Artificial Sequence
  derived and/or modified sequence
atggcgagaggaccacagaccttggtgcaagtgtgggtcggcggacagttgttccaggccgacagagccttgctggttgaacattgcggctttttcagaggattgttcaggtctgggatgcgcgagacccgggcagccgaggtccggttaggagtgctgtccgctggcggtttccgcgcaactctacaggtgctgagaggggatcgtccagcactggccgctgaagatgaactcctgcaggccgtggagtgtgccgcattcctccaggctcccgctttggctaggtttcttgagcataacctgacgtccgataactgtgcactactgtgtgatgccgctgccgcttttggcttacgagatgttttccactccgccgctctgttcatttgcgacggggaacgggaactggcagccgagctggcacttccggaggcccgagcatacgttgcggctctcaggcctagtagttatgccgcagtgagtacacatactcccgctcctggtttcctggaagatgccagtagaactctgtgttatttagatgaagaagaggatgcctggagaacgctcgctgccctgccattggaagcatcgaccctattagctggggtggcaaccctggggaataagctgtacattgttggcggagtgcgaggagcatcaaaagaagtggtggaactggggttctgttacgatccggacggaggcacctggcacgagttccccagtcctcatcagccccgatatgataccgctttagccggtttcgatggtagactctacgctataggcggagaattccaacgtactcccatttctagtgtggagcgttatgaccctgcagcaggttgctggtccttcgtagcggatctgcctcaacccgctgcaggtgtcccctgtgcacaggcttgcggcagattattcgtttgtctctggagacccgcagataccactgccgtggtggaatacgcagtccgaaccgacgcctggcttccagtcgccgagctccgaagacctcagtcatacggacattgcatggtggcccatagagactccctttatgtagtgcggaatgggccatcagatgattttctgcactgcgctatagactgccttaacctggctactggacagtggacagcacttccaggacagtttgtgaatagtaagggagctctgttcaccgctgtggtgcgaggggatacagtgtataccgtgaaccggatgttcactcttttgtatgctatcgaaggcggaacgtggagactgttaagggagaaggcagggttccctaggcctggtagcttacagacctttctgctcagactgcccccaggtgcgcctggtccagtgacctcaacaactgcggaattatag

SEQ ID NO: 40778 - DNA, 1377 bp, Artificial Sequence
  derived and/or modified sequence
atggccagaggcccccagaccctggtgcaggtgtgggtgggcggccagctgttccaggccgacagagccctgctggtggagcactgcggcttcttcagaggcctgttcagaagcggcatgagagagaccagagccgccgaggtgagactgggcgtgctgagcgccggcggcttcagagccaccctgcaggtgctgagaggcgacagacccgccctggccgccgaggacgagctgctgcaggccgtggagtgcgccgccttcctgcaggcccccgccctggccagattcctggagcacaacctgaccagcgacaactgcgccctgctgtgcgacgccgccgccgccttcggcctgagagacgtgttccacagcgccgccctgttcatctgcgacggcgagagagagctggccgccgagctggccctgcccgaggccagagcctacgtggccgccctgagacccagcagctacgccgccgtgagcacccacacccccgcccccggcttcctggaggacgccagcagaaccctgtgctacctggacgaggaggaggacgcctggagaaccctggccgccctgcccctggaggccagcaccctgctggccggcgtggccaccctgggcaacaagctgtacatcgtgggcggcgtgagaggcgccagcaaggaggtggtggagctgggcttctgctacgaccccgacggcggcacctggcacgagttccccagcccccaccagcccagatacgacaccgccctggccggcttcgacggcagactgtacgccatcggcggcgagttccagagaacccccatcagcagcgtggagagatacgaccccgccgccggctgctggagcttcgtggccgacctgccccagcccgccgccggcgtgccctgcgcccaggcctgcggcagactgttcgtgtgcctgtggagacccgccgacaccaccgccgtggtggagtacgccgtgagaaccgacgcctggctgcccgtggccgagctgagaagaccccagagctacggccactgcatggtggcccacagagacagcctgtacgtggtgagaaacggccccagcgacgacttcctgcactgcgccatcgactgcctgaacctggccaccggccagtggaccgccctgcccggccagttcgtgaacagcaagggcgccctgttcaccgccgtggtgagaggcgacaccgtgtacaccgtgaacagaatgttcaccctgctgtacgccatcgagggcggcacctggagactgctgagagagaaggccggcttccccagacccggcagcctgcagaccttcctgctgagactgccccccggcgcccccggccccgtgaccagcaccaccgccgagctgtag

SEQ ID NO: 40779 - protein, 451 aa, Artificial Sequence
  derived and/or modified sequence
MEAGPPGSARPAEPGPCLSGQRGADHTASASLQSVAGTEPGRHPQAVAAVLPAGGCGERMGVPTPKQFCPILERPLISYTLQALERVCWIKDIVVAVTGENMEVMKSIIQKYQHKRISLVEAGVTRHRSIFNGLKALAEDQINSKLSKPEVVIIHDAVRPFVEEGVLLKVVTAAKEHGAAGAIRPLVSTVVSPSADGCLDYSLERARHRASEMPQAFLFDVIYEAYQQCSDYDLEFGTECLQLALKYCCTKAKLVEGSPDLWKVTYKRDLYAAESIIKERISQEICVVMDTEEDNKHVGHLLEEVLKSELNHVKVTSEALGHAGRHLQQIILDQCYNFVCVNVTTSDFQETQKLLSMLEESSLCILYPVVVVSVHFLDFKLVPPSQKMENLMQIREFAKEVKERNILLYGLLISYPQDDQKLQESLRQGAIIIASLIKERNSGLIGQLLIA

SEQ ID NO: 40780 - DNA, 1356 bp, Artificial Sequence
  derived and/or modified sequence
atggaggccggcccccccggcagcgccagacccgccgagcccggcccctgcctgagcggccagagaggcgccgaccacaccgccagcgccagcctgcagagcgtggccggcaccgagcccggcagacacccccaggccgtggccgccgtgctgcccgccggcggctgcggcgagagaatgggcgtgcccacccccaagcagttctgccccatcctggagagacccctgatcagctacaccctgcaggccctggagagagtgtgctggatcaaggacatcgtggtggccgtgaccggcgagaacatggaggtgatgaagagcatcatccagaagtaccagcacaagagaatcagcctggtggaggccggcgtgaccagacacagaagcatcttcaacggcctgaaggccctggccgaggaccagatcaacagcaagctgagcaagcccgaggtggtgatcatccacgacgccgtgagacccttcgtggaggagggcgtgctgctgaaggtggtgaccgccgccaaggagcacggcgccgccggcgccatcagacccctggtgagcaccgtggtgagccccagcgccgacggctgcctggactacagcctggagagagccagacacagagccagcgagatgccccaggccttcctgttcgacgtgatctacgaggcctaccagcagtgcagcgactacgacctggagttcggcaccgagtgcctgcagctggccctgaagtactgctgcaccaaggccaagctggtggagggcagccccgacctgtggaaggtgacctacaagagagacctgtacgccgccgagagcatcatcaaggagagaatcagccaggagatctgcgtggtgatggacaccgaggaggacaacaagcacgtgggccacctgctggaggaggtgctgaagagcgagctgaaccacgtgaaggtgaccagcgaggccctgggccacgccggcagacacctgcagcagatcatcctggaccagtgctacaacttcgtgtgcgtgaacgtgaccaccagcgacttccaggagacccagaagctgctgagcatgctggaggagagcagcctgtgcatcctgtaccccgtggtggtggtgagcgtgcacttcctggacttcaagctggtgccccccagccagaagatggagaacctgatgcagatcagagagttcgccaaggaggtgaaggagagaaacatcctgctgtacggcctgctgatcagctacccccaggacgaccagaagctgcaggagagcctgagacagggcgccatcatcatcgccagcctgatcaaggagagaaacagcggcctgatcggccagctgctgatcgcctag

SEQ ID NO: 40781 - DNA, 1356 bp, Artificial Sequence
  derived and/or modified sequence
atggaagccggccctccagggtcagcccgccccgccgagcctggcccgtgtctctcaggacagcgcggcgctgaccataccgcaagcgcatcactgcagtctgttgccggtactgaacccggccggcatccacaggcagtggcggccgttctccccgcaggtgggtgcggagagcggatgggtgtccctacaccaaaacagttttgtcccatattggaaaggcctctgatctcgtatactctgcaggccctcgaaagagtttgctggatcaaggatattgtcgtggctgtgacaggtgagaatatggaagttatgaagtccatcatccaaaagtaccagcacaagaggatatccctcgtggaggctggcgtcaccagacatcggtccattttcaacggtcttaaggccctcgccgaagatcagatcaattctaagctgtctaagcctgaggtggtaattattcacgatgccgtgagaccttttgttgaggaaggcgtgctcctcaaggtggtgacagcagctaaagaacacggcgcggcaggtgccatcagaccgctggtcagtactgtagtctctccttcagcggacgggtgcctggactattccctggagcgggccaggcacagagcctctgagatgccacaggcctttctgttcgacgtgatttatgaggcttaccagcagtgtagcgactacgaccttgagtttggtacagaatgcttgcagcttgccttaaaatactgctgcacaaaggccaaactggtggagggttcacccgacctgtggaaggtgacatacaaacgcgacttgtatgcggctgagtcaatcattaaagagagaattagtcaggaaatctgcgtggtaatggatactgaagaggacaacaaacatgttggtcatctgctcgaagaagtgctgaaaagtgagttgaaccatgtgaaggtcacttccgaagcattagggcatgccggcaggcacttgcagcagatcatcctggaccagtgctataatttcgtgtgcgtaaatgtgaccacctccgattttcaagaaacgcaaaagctcttgtcaatgctggaggagtcctctttatgtatcttgtaccccgtagtggtggtgtcggtgcatttcctggacttcaaactcgtacccccctcccaaaagatggagaatctgatgcagatacgggaatttgccaaagaagtgaaggaacgaaacattctgctctacggacttctcatcagctacccgcaggacgaccagaaacttcaggaatctctcaggcaaggtgcaataatcattgccagcctcatcaaggaaaggaacagcgggttgattggccagctcttaatagcatag

SEQ ID NO: 40782 - DNA, 1356 bp, Artificial Sequence
  derived and/or modified sequence
atggaggccggccccccaggcagcgcccggcctgctgagcccggcccctgcctgagcggccagagaggagctgaccacacagccagcgccagcctgcagagcgtggccggcacagagcccggccgccacccccaggccgtggccgctgtgctgcctgctgggggctgtggggagaggatgggcgtgcccacccccaagcagttctgccccatcctggagcggcccctcatctcctacaccctgcaggccctggagcgggtgtgctggatcaaggacatcgtggtggccgtgactggagagaacatggaggtgatgaagagcatcatccagaagtaccagcacaagaggatcagcctggtggaggccggcgtgaccaggcacaggagcatcttcaacggcctgaaggccctggccgaggaccagatcaacagcaagctgagcaagccagaggtggtgatcatccatgatgctgtgcggccctttgtggaggagggcgtgctgctgaaggtggtgacagctgccaaggagcacggggccgccggggccatccggcccctggtgtccacagtggtgagccccagcgcagatggctgcctggactacagcctggagcgggcccggcaccgggccagcgagatgccccaggccttcctgtttgatgtgatctatgaggcctaccagcagtgcagcgactatgacctggagtttggaacagaatgtctgcagctggccctgaagtactgctgcaccaaggccaagctggtggagggcagcccagacctgtggaaggtgacctacaagagggacctgtatgctgctgagagcatcatcaaggagcgcatcagccaggagatctgtgtggtgatggacacagaggaggacaacaagcacgtgggccacctgctggaggaggtgctgaagtctgagctgaaccacgtgaaggtgaccagcgaggccctgggccatgctggccgccacctgcagcagatcatcctggaccagtgctacaactttgtgtgtgtgaatgtgaccaccagtgacttccaggagacccagaagctgctgtccatgctggaggagagcagcctgtgcatcctgtaccctgtggtggtggtgtctgtgcacttcctggacttcaagctggtgccccccagccagaagatggagaacctgatgcagatccgggagtttgccaaggaggtgaaggagaggaacatcctgctgtatggcctgctgatctcctacccccaggatgaccagaagctgcaggagagcctgcggcagggcgccatcatcatcgccagcctcatcaaggagaggaacagcggcctgattggccagctgctgattgcctag

SEQ ID NO: 40783 - DNA, 1859 bp, Artificial Sequence
  derived and/or modified sequence
atggaggccgggccgccgggcagcgccaggccggcggagccgggtccttgcctgagtggtcagcgcggcgcggaccacacggcttccgcctccctgcagagcgtggccgggaccgagcccgggcgccacccgcaagccgtggcagctgtgttgcctgccggggggtgcggggagaggatgggggtccccaccccgaagcaattctgccccatcctggagaggccgctcatcagctacaccctacaggccctggagagagtatgttggataaaggacattgttgtggcagtaactggagagaacatggaagtaatgaaaagtattattcagaagtatcagcataaacgcatctcactggtcgaagctggagtgacccgccacaggtcaattttcaatggactaaaagcactggcagaagatcagatcaactctaaactctctaagccagaagtagtgattatccatgatgctgtgagaccatttgttgaggaaggtgtccttcttaaagttgtcacagctgctaaggaacacggggcagcaggagccattcgacctcttgtatctactgtcgtcagtccatctgctgatggttgcttagactactcgctagaacgtgccagacacagagcaagtgaaatgccccaagcttttctatttgatgtgatttatgaagcatatcagcagtgtagtgactatgacttggaatttggaactgagtgtttgcaattggccctaaaatactgttgcactaaagccaaacttgtagaaggatcacctgacctctggaaggtgacctacaaacgagatctctatgcggctgaatcgattattaaggagagaatttcccaagagatttgtgtagttatggatacagaagaagataacaaacatgtaggtcatcttcttgaagaagtgctgaaaagtgaattaaatcatgtaaaagtcacatctgaggctctgggtcatgctggcagacatcttcagcaaatcatcttagatcaatgctacaattttgtttgtgtgaatgttacaacctctgattttcaagaaacccagaagttactgagcatgcttgaagagagtagtctttgcattttatatcctgttgttgttgtttcagttcattttcttgattttaaattagtacctcccagtcagaaaatggaaaacctaatgcagattagagaatttgcaaaggaagtaaaagaaagaaatattttgttatatgggcttctcatatcttacccacaggatgatcagaagctacaggagagtttaaggcaaggtgctatcattattgcttcattaatcaaggaaagaaattctggactcattggtcagcttctgatagcatgaagaacacaaaaaattacctattttctaaaacatctatttgcgtatcttaattgtgctttgtgcccccgctgctgtgtgtggtagaatgtttcagttgtcttttatatcttctctataatttgtaggatgtgatgcttagattataaagcagattaatgtttatatctgtgaaataaagaatacttttgtgtatgacaaatattaattgcctgaaccagaaaaaaatagtagataagtggaaaataatagccttcaaatgaatctttccacagagacatgaacggtcaaatagaaataatgatggggtgagctattctttcaaggaatgagaatttagaaaacttcagttattatcctaactgttaattaataatttacactattatgaagctaatggataaacttcagaattattctcacttctataattgtcctgtcaccaggtgatattttgtctttttgtcttgtgttaaaaatgtctacactttaataaaaaagggtga

SEQ ID NO: 40784 - DNA, 1356 bp, Artificial Sequence
  derived and/or modified sequence
atggaggccggcccccccggcagcgcccggcccgccgagcccggcccttgcctttctggccagaggggtgccgatcacaccgcctccgcctccctgcagtctgtcgccggaacggaacccggtcggcacccccaggccgtggccgcagtgttgcctgctggaggatgcggagaaaggatgggagtgcctacccccaaacaattttgtccaatcttagagcggcccctaatttcttatacactgcaggccttggagcgagtgtgctggatcaaggatatagtagtggcggtcacaggggaaaatatggaggtgatgaaaagtatcatccagaagtatcagcataaaaggatctcattggtcgaggctggggtgacacggcatcggagtatatttaatggccttaaagccttagctgaagatcagataaactccaaactctctaaacctgaggtcgtgattatccacgatgctgtgcggccattcgtggaggagggggtgctcttgaaggtcgtgacagcggctaaggagcatggagccgcgggtgccatacggcccctcgtgtcaaccgtggtttcccctagcgcggatggatgtcttgattactcactcgaaagagcccgccaccgggctagtgaaatgccccaggccttcctcttcgacgtgatttatgaagcataccaacagtgttcagactacgacctggagttcggcaccgaatgcctgcagctcgccctaaaatattgctgcactaaggccaaactggtcgaaggttcccctgacctgtggaaggtgacatataagcgtgatctgtacgctgccgagtccatcatcaaggaaagaatctctcaggagatttgtgtagtgatggacaccgaagaggataataaacacgtcggccacttgctcgaggaggtgctgaagagcgagttaaatcacgtgaaggtgacgagcgaagccttaggtcatgcaggcaggcacctccagcagatcattctggatcagtgctataactttgtttgcgtgaatgtcactacaagcgatttccaggagacgcaaaaactcctctccatgctggaggagtcttcactgtgtatcctgtaccctgttgtagtggtttcggtccattttctagattttaagctggtgccaccatcgcagaaaatggaaaacttgatgcaaataagggagttcgccaaggaggtaaaagagcgcaatatcctgctgtatggcctgctgatcagctaccctcaggacgatcagaaactccaagagagcctccggcagggagctatcataatcgcgtcactcatcaaagagcgcaattcaggcctgattgggcaactcctgattgcctag

SEQ ID NO: 40785 - DNA, 1356 bp, Artificial Sequence
  derived and/or modified sequence
atggaggcgggtccacctggctcggccaggcctgccgaacccggaccttgcctgtccggacaaaggggcgctgaccatacagctagcgcaagcctgcaatccgtggctggtactgaacctggcagacaccctcaggccgtagctgcagtgttgcccgctggtgggtgcggagagcgaatgggggtgccgacacccaagcaattctgccccatcctcgagaggccgctgatatcctacaccctccaggcgctggagcgggtctgttggattaaagatatagtcgtcgctgtcactggagaaaacatggaggtaatgaagtcaatcatccagaagtatcagcacaaacgtatttccctggtggaggcaggcgtcaccagacacaggagcatctttaatggactaaaggcactggcggaagaccaaattaactcgaagctttcaaagcccgaggttgtgataattcatgatgcagtgaggccgtttgtcgaggagggtgtgctgttaaaggtggtcacagccgcaaaagagcatggcgctgccggagccatacggccattggtgtctactgtggtaagtccaagcgccgacggatgtcttgattactccttggaaagggcacggcaccgggcaagcgagatgccccaggcttttctgtttgacgtcatttacgaagcctatcagcagtgttccgactacgatctcgaattcggcaccgagtgtcttcagttggccctcaagtattgttgtacgaaagccaaactggtggaggggagccccgacctctggaaggtcacatacaagagagatttgtatgctgctgaaagcattattaaggaacgcatctctcaagagatatgcgtggtgatggacaccgaggaagataacaagcacgtgggccatctgctagaagaagtgttaaaaagcgagctgaaccatgtgaaagtgacttctgaagcactgggacacgcgggtagacatctgcagcagattatcttggatcagtgttataatttcgtctgcgtaaatgtgactacatccgacttccaagagacacagaaactgttgtcaatgctggaggaaagcagcctatgtattctctatccagttgtggtggtgtcggttcactttctggattttaaactggtcccccctagccagaaaatggagaacttaatgcaaatacgcgaattcgcaaaagaagtgaaagagcgcaacatccttctttacgggcttctcatctcgtacccacaggatgatcagaagctgcaggagtctctgcgccaaggagctattataatcgcctctctgatcaaggagaggaacagtggactgattgggcaactgctgattgcctag

SEQ ID NO: 40786 - protein, 894 aa, Artificial Sequence
  derived and/or modified sequence
MNQIEPGVQYNYVYDEDEYMIQEEEWDRDLLLDPAWEKQQRKTFTAWCNSHLRKAGTQIENIEEDFRNGLKLMLLLEVISGERLPKPDRGKMRFHKIANVNKALDYIASKGVKLVSIGAEEIVDGNVKMTLGMIWTIILRFAIQDISVEETSAKEGLLLWCQRKTAPYRNVNIQNFHTSWKDGLGLCALIHRHRPDLIDYSKLNKDDPIGNINLAMEIAEKHLDIPKMLDAEDIVNTPKPDERAIMTYVSCFYHAFAGAEQAETAANRICKVLAVNQENERLMEEYERLASELLEWIRRTIPWLENRTPEKTMQAMQKKLEDFRDYRRKHKPPKVQEKCQLEINFNTLQTKLRISNRPAFMPSEGKMVSDIAGAWQRLEQAEKGYEEWLLNEIRRLERLEHLAEKFRQKASTHETWAYGKEQILLQKDYESASLTEVRALLRKHEAFESDLAAHQDRVEQIAAIAQELNELDYHDAVNVNDRCQKICDQWDRLGTLTQKRREALERMEKLLETIDQLHLEFAKRAAPFNNWMEGAMEDLQDMFIVHSIEEIQSLITAHEQFKATLPEADGERQSIMAIQNEVEKVIQSYNIRISSSNPYSTVTMDELRTKWDKVKQLVPIRDQSLQEELARQHANERLRRQFAAQANAIGPWIQNKMEEIARSSIQITGALEDQMNQLKQYEHNIINYKNNIDKLEGDHQLIQEALVFDNKHTNYTMEHIRVGWELLLTTIARTINEVETQILTRDAKGITQEQMNEFRASFNHFDRRKNGLMDHEDFRACLISMGYDLGEAEFARIMTLVDPNGQGTVTFQSFIDFMTRETADTDTAEQVIASFRILASDKPYILAEELRRELPPDQAQYCIKRMPAYSGPGSVPGALDYAAFSSALYGESDL

SEQ ID NO: 40787 - protein, 1332 aa, Artificial Sequence
  derived and/or modified sequence
MAEAGLRGWLLWALLLRLAQSEPYTTIHQPGYCAFYDECGKNPELSGSLMTLSNVSCLSNTPARKITGDHLILLQKICPRLYTGPNTQACCSAKQLVSLEASLSITKALLTRCPACSDNFVNLHCHNTCSPNQSLFINVTRVAQLGAGQLPAVVAYEAFYQHSFAEQSYDSCSRVRVPAAATLAVGTMCGVYGSALCNAQRWLNFQGDTGNGLAPLDITFHLLEPGQAVGSGIQPLNEGVARCNESQGDDVATCSCQDCAASCPAIARPQALDSTFYLGQMPGSLVLIIILCSVFAVVTILLVGFRVAPARDKSKMVDPKKGTSLSDKLSFSTHTLLGQFFQGWGTWVASWPLTILVLSVIPVVALAAGLVFTELTTDPVELWSAPNSQARSEKAFHDQHFGPFFRTNQVILTAPNRSSYRYDSLLLGPKNFSGILDLDLLLELLELQERLRHLQVWSPEAQRNISLQDICYAPLNPDNTSLYDCCINSLLQYFQNNRTLLLLTANQTLMGQTSQVDWKDHFLYCANAPLTFKDGTALALSCMADYGAPVFPFLAIGGYKGKDYSEAEALIMTFSLNNYPAGDPRLAQAKLWEEAFLEEMRAFQRRMAGMFQVTFMAERSLEDEINRTTAEDLPIFATSYIVIFLYISLALGSYSSWSRVMVDSKATLGLGGVAVVLGAVMAAMGFFSYLGIRSSLVILQVVPFLVLSVGADNIFIFVLEYQRLPRRPGEPREVHIGRALGRVAPSMLLCSLSEAICFFLGALTPMPAVRTFALTSGLAVILDFLLQMSAFVALLSLDSKRQEASRLDVCCCVKPQELPPPGQGEGLLLGFFQKAYAPFLLHWITRGVVLLLFLALFGVSLYSMCHISVGLDQELALPKDSYLLDYFLFLNRYFEVGAPVYFVTTLGYNFSSEAGMNAICSSAGCNNFSFTQKIQYATEFPEQSYLAIPASSWVDDFIDWLTPSSCCRLYISGPNKDKFCPSTVNSLNCLKNCMSITMGSVRPSVEQFHKYLPWFLNDRPNIKCPKGGLAAYSTSVNLTSDGQVLASRFMAYHKPLKNSQDYTEALRAARELAANITADLRKVPGTDPAFEVFPYTITNVFYEQYLTILPEGLFMLSLCLVPTFAVSCLLLGLDLRSGLLNLLSIVMILVDTVGFMALWGISYNAVSLINLVSAVGMSVEFVSHITRSFAISTKPTWLERAKEATISMGSAVFAGVAMTNLPGILVLGLAKAQLIQIFFFRLNLLITLLGLLHGLVFLPVILSYVGPDVNPALALEQKRAEEAVAAVMVASCPNHPSRVSTADNIYVNHSFEGSIKGAGAISNFLPNNGRQF

SEQ ID NO: 40788 - protein, 1286 aa, Artificial Sequence
  derived and/or modified sequence
MAEAGLRGWLLWALLLRLAQSEPYTTIHQPGYCAFYDECGKNPELSGSLMTLSNVSCLSNTPARKITGDHLILLQKICPRLYTGPNTQACCSAKQLVSLEASLSITKALLTRCPACSDNFVNLHCHNTCSPNQSLFINVTRVAQLGAGQLPAVVAYEAFYQHSFAEQSYDSCSRVRVPAAATLAVGTMCGVYGSALCNAQRWLNFQGDTGNGLAPLDITFHLLEPGQAVGSGIQPLNEGVARCNESQGDDVATCSCQDCAASCPAIARPQALDSTFYLGQMPGSLVLIIILCSVFAVVTILLVGFRVAPARDKSKMVDPKKGTSLSDKLSFSTHTLLGQFFQGWGTWVASWPLTILVLSVIPVVALAAGLVFTELTTDPVELWSAPNSQARSEKAFHDQHFGPFFRTNQVILTAPNRSSYRYDSLLLGPKNFSGILDLDLLLELLELQERLRHLQVWSPEAQRNISLQDICYAPLNPDNTSLYDCCINSLLQYFQNNRTLLLLTANQTLMGQTSQVDWKDHFLYCANAPLTFKDGTALALSCMADYGAPVFPFLAIGGYKGKDYSEAEALIMTFSLNNYPAGDPRLAQAKLWEEAFLEEMRAFQRRMAGMFQVTFMAERSLEDEINRTTAEDLPIFATSYIVIFLYISLALGSYSSWSRVMVDSKATLGLGGVAVVLGAVMAAMGFFSYLGIRSSLVILQVVPFLVLSVGADNIFIFVLEYQRLPRRPGEPREVHIGRALGRVAPSMLLCSLSEAICFFLGALTPMPAVRTFALTSGLAVILDFLLQMSAFVALLSLDSKRQEASRLDVCCCVKPQELPPPGQGEGLLLGFFQKAYAPFLLHWITRGVVVGAPVYFVTTLGYNFSSEAGMNAICSSAGCNNFSFTQKIQYATEFPEQSYLAIPASSWVDDFIDWLTPSSCCRLYISGPNKDKFCPSTVNSLNCLKNCMSITMGSVRPSVEQFHKYLPWFLNDRPNIKCPKGGLAAYSTSVNLTSDGQVLASRFMAYHKPLKNSQDYTEALRAARELAANITADLRKVPGTDPAFEVFPYTITNVFYEQYLTILPEGLFMLSLCLVPTFAVSCLLLGLDLRSGLLNLLSIVMILVDTVGFMALWGISYNAVSLINLVSAVGMSVEFVSHITRSFAISTKPTWLERAKEATISMGSAVFAGVAMTNLPGILVLGLAKAQLIQIFFFRLNLLITLLGLLHGLVFLPVILSYVGPDVNPALALEQKRAEEAVAAVMVASCPNHPSRVSTADNIYVNHSFEGSIKGAGAISNFLPNNGRQF

SEQ ID NO: 40789 - DNA, 3999 bp, Artificial Sequence
  derived and/or modified sequence
atggctgaggccgggctaagaggctggttactttgggctctattgctgaggctggcgcaatccgagccatacaccaccattcatcaacctggatactgcgctttttatgacgaatgcggaaaaaatcctgagttatctggtagcttaatgactctgtcaaatgtgagttgtctctctaacaccccagcccgcaaaataactggcgatcacctgatcctgctacagaagatctgtccccgtctatataccggcccaaacacccaggcctgttgctctgctaagcagctggtctctttagaggcctccctgtctataaccaaggccctgctcacccggtgtcccgcgtgttccgacaacttcgtcaatttgcattgccataacacttgttctcctaatcagtccctgttcatcaacgttactcgggtggctcagttgggcgctggtcaactcccagctgtcgtagcatacgaagccttttatcagcacagcttcgccgagcaatcttacgacagttgctccagagttagagttccggctgcagctaccttagccgtcggaacaatgtgtggcgtttacggctccgcgctctgcaatgctcagagatggctcaattttcagggtgatacaggcaacggtctggctcccctggatataacctttcatctgctggagcccggccaggctgtaggctcgggaatacagcctctcaatgaaggcgtggcacggtgtaacgaaagtcagggcgatgacgtagccacttgttcgtgtcaggattgtgctgcgtcatgtccggctatcgcccgcccccaggctcttgactcgactttctatctgggccagatgcccgggtccctcgtcctaattataatcctgtgcagtgtttttgccgtggtgacaatattgctcgttggatttcgagtcgctcctgcgagagacaagtcaaagatggtagacccgaaaaagggaaccagtcttagtgataaactaagcttcagtactcataccctgctcgggcagttttttcaggggtggggcacttgggtggctagctggccacttaccatccttgtgcttagcgtgattcccgtggtagctctggcagcaggactggtgttcacagaactgaccaccgatccggttgagctgtggtctgctccaaattcccaggcgaggtccgagaaggcgttccacgaccagcattttggccctttctttagaactaaccaggtcattctgaccgctcccaatcggtcaagttatcgctatgattctctgctcctggggcctaagaacttttccggaattttggatctcgacctcctccttgaactgctcgagctgcaggagcggctgcggcacttacaggtctggtcaccagaggcccaacgaaatatatccctgcaggatatttgctatgcaccactaaatccagataatacatcactgtacgactgctgtatcaattccctgctccaatattttcaaaataacagaaccctgctgcttctgaccgccaaccaaacccttatgggccagacttctcaagtggactggaaggaccattttctgtactgcgccaacgcccctctaacctttaaagatggcacagcattggccctgtcctgcatggccgattacggcgcacccgtatttccatttcttgccataggaggctacaaaggtaaggattactctgaggcggaggccctgataatgacttttagcctcaataattaccccgccggggatccacggctggcgcaggccaagctgtgggaggaggcatttcttgaagaaatgagagcctttcagcggcgcatggccggaatgtttcaggtgactttcatggcagagcgctccctggaagacgagatcaataggactaccgccgaggacctgccgatcttcgcaacctcatacatcgttatcttcctgtacataagcctggcccttggatcatattcctcttggtcgagggtcatggttgattctaaagccaccctggggctgggcggggtggcagtcgtgctcggcgctgtcatggccgccatgggctttttctcttatttaggaattcggagttcattggtgatcttacaggtggtcccatttctcgtgctgagtgtaggggctgacaacattttcatttttgtgcttgagtatcagaggctgccccgacgcccaggagaaccccgagaagttcacattgggcgggctttgggtcgggtagcaccctctatgctgttgtgctcgctctcagaggccatttgcttctttctcggggccttgactcccatgcctgctgtgaggacttttgctctcacgtccggtcttgccgtgatcctggattttctgctgcagatgtctgcctttgtggcccttcttagtttagatagcaagagacaagaggctagcagactggatgtgtgttgctgtgtgaagccgcaggagctcccgcctcccggccaaggcgaaggactgctactgggcttctttcagaaagcatatgccccttttctgctgcattggattactcgcggggttgtgttgctgctgtttcttgctctgttcggcgtctcattatatagcatgtgccacatttctgtgggtctcgaccaagaactggcccttcccaaagattcctacttacttgactacttcctgttcctcaaccggtactttgaagtaggggccccagtttacttcgtgacgacactaggatataacttctcctctgaggcaggaatgaacgccatatgttcaagtgccggatgcaacaatttcagctttacccaaaaaattcagtacgccacggaattcccagaacagtcttacctggccatccccgccagttcctgggtggatgactttattgattggctgacacccagcagctgttgtcgcttgtacatttccggacctaacaaagacaagttttgtccctctactgtaaattcgttgaattgcctgaaaaactgtatgtcgattaccatgggcagtgtgcgtccatccgtggagcagtttcataagtatctgccttggttccttaatgatcggcccaacatcaagtgtcctaaggggggccttgccgcctactccacatctgtaaatttgacaagcgacggacaagtgctggcttcacgcttcatggcctaccataaacctctgaaaaacagtcaggactataccgaggcactcagagcagctcgggagctcgccgctaacatcaccgccgatctgcggaaggtgcctgggactgatccagccttcgaagtatttccatatacaatcacaaatgtcttctatgaacaatatctgactatcttgccagaaggactgtttatgcttagcttgtgcctggtgccaacctttgccgttagctgcctactgctcggactggaccttcgttccgggctgttaaacctgctcagcattgtgatgatcctcgtcgatacggtggggttcatggccttgtggggcatctcctacaacgctgtcagccttattaatttggtcagtgctgtcggtatgtctgtggagttcgtttcccacatcaccagaagcttcgccattagcaccaagccaacctggctggaaagagcgaaggaagctactatcagcatgggctctgccgtgtttgccggagtcgcgatgacgaatttgcctggaatcctggtcctggggttggcaaaggcacagctgattcagatcttctttttcaggcttaatctcttaatcaccctgctcgggctgctgcatgggttagtttttctcccagtgatcctttcctacgtggggcctgacgtcaatcctgccctcgccttagagcaaaagcgcgcggaggaggctgtggcagcagtgatggtcgcctcctgcccaaaccaccctagtagagtttccaccgctgacaacatctatgtgaatcactcattcgaggggtccattaagggcgcaggggctatctcgaattttctgcccaataatggacgccaattctag

SEQ ID NO: 40790 - DNA, 3861 bp, Artificial Sequence
  derived and/or modified sequence
atggcagaagccggcctgcggggatggctcttatgggccctcctgctgcgcttagctcagagtgagccctataccaccattcatcaaccggggtactgtgcattttatgacgagtgtggcaaaaaccccgagctgtcgggctccctgatgaccctgtccaacgtcagttgcttatcaaatacacccgcccgtaagattacaggagatcatttgattttgttgcagaagatatgcccaagactttacaccgggcccaacacccaggcatgctgctctgccaaacaattggtgagtctggaggcgagcctctcgattacaaaagccttgctgactcggtgtccggcctgctccgacaactttgttaatctgcactgccataacacatgtagtcccaaccaaagcctcttcatcaatgtcacccgcgttgctcaactgggagcagggcagcttcctgcagtggtggcctatgaagcattttaccagcactccttcgccgagcaaagctacgactcctgcagcagagtgagggtacctgctgcggctacactggccgttgggacgatgtgcggcgtatacggaagcgcactgtgtaacgctcagagatggctgaattttcaaggagataccggtaacggcttggcgcctcttgacattacattccacctgctcgagcctggccaggccgtaggttccggcattcagccactgaacgaaggcgtcgcccgatgcaatgagagtcagggggacgacgtggctacttgctcatgtcaggattgcgctgcatcttgccccgcaatagcaaggccccaggcactcgacagtacattttatctgggccagatgcccgggtcactggtgctgataatcatcctgtgctctgttttcgccgtggttaccatactcctggtcgggtttcgagtcgcaccagcccgggataaaagcaaaatggtggatccaaagaaagggacctccctgtctgacaaattatcattttccacccacacactgctcgggcagtttttccaaggatggggcacttgggtcgctagctggccactcactatcctagtcttaagcgtcattccagtggtcgctttggccgctgggctggtgtttacagaactcacgaccgaccccgttgagctctggtctgccccaaacagccaggcccgctcagagaaagcttttcacgatcaacatttcggcccttttttcaggaccaatcaagtgatcctcaccgcgcctaacaggtcttcttacaggtatgacagtctcctgctgggtcctaagaatttcagtggtattctcgacctggatctcttactcgagcttttggaactgcaggagagattaagacacctgcaggtgtggagtccagaagcccagcgcaatatttctcttcaggacatttgttacgcgccgttgaatccggataatacatccctgtatgattgttgtattaactccctgttgcagtattttcagaacaatcgaacactcctcctcctcaccgctaaccagaccctgatgggccaaacatcgcaggtggactggaaggaccacttcctgtactgtgcaaacgcaccactcacattcaaggacggcacagctttagcgcttagttgcatggcggactatggagcgccagtgttcccatttctggccataggagggtacaaggggaaagattactcagaggccgaggcccttattatgaccttttcacttaacaactatccggcaggtgacccccgtttagcgcaagcaaaactatgggaagaagcctttttagaggaaatgcgtgcattccagcgaaggatggctggaatgttccaggtcacttttatggcagagcgcagcctagaggacgagatcaaccgaaccactgccgaggaccttccgattttcgctacaagctacatcgtcatttttctctacatttccctggccttgggatcatacagctcctggagtcgggtcatggtggactctaaagctacccttggactgggcggcgttgctgtggtgctaggtgcagtcatggccgccatggggtttttctcttacctgggcatccgaagttcactagtgattttacaggttgttccctttctggttctttctgtgggtgccgacaacatctttatcttcgtccttgagtaccaacgtctcccccgacggcctggtgagcctcgagaggtccatatcggcagggctctgggccgggttgcaccatctatgctattgtgcagccttagcgaagccatctgcttttttctgggagcgctgactcctatgcccgccgtcagaacattcgccttgacctcaggacttgccgtgatcctagactttctattgcagatgtcagcttttgtggctctgctgtctcttgattcaaagcgccaggaagcttcacgattagatgtgtgctgctgcgttaagcctcaggagttgcccccgcccgggcagggcgagggtctgctgttgggattcttccagaaagcctatgccccgtttctcctgcattggattacaaggggagtggtggtgggggcgcctgtttactttgtgacaacgctggggtataacttcagcagtgaagccggcatgaacgccatctgttccagcgctggttgtaacaatttttcctttactcaaaagatccagtatgctacggagtttcctgagcagagctacctcgcaatcccagccagctcctgggtggacgatttcattgactggctcacacctagctcttgttgtagactgtatattagcggtcctaacaaggataagttctgccccagcactgttaatagtctgaactgtctgaagaactgcatgtcaattacaatggggagtgtgaggccctccgtagaacagttccacaaatacttgccatggttcctgaacgataggccaaatattaagtgtccaaagggtggactggctgcttacagcacaagtgtgaatctcacctccgacggacaggtgctggcaagccgcttcatggcgtaccataaacccctgaagaactcacaggattatacagaagccttaagagctgcgcgggaactggccgcaaacatcactgcagatttacgtaaggtgcctgggactgaccctgcctttgaagttttcccctatacgatcaccaacgtgttttacgagcagtatcttaccattctgccagagggcctttttatgctctctctctgcctggtaccaacattcgcggtttcatgcctcctgctcggtctagatctcagatctgggctgctgaacctgctgtctatcgtcatgattctggtggacacagttggcttcatggccctgtggggtattagctataacgccgtcagcctgattaacctcgtcagtgccgttgggatgtcagtggaatttgtgtcacacatcactcgaagcttcgcgatctctaccaagcctacctggctggaacgtgcgaaggaggccactatctcaatgggaagcgcggttttcgccggcgtagctatgaccaatctacccgggatcctggtgctcggactggctaaagcacaactaattcagatattcttttttagactcaatctcttgatcactctcctcggccttctgcatggcctggtgtttctgcctgtgattctgagttacgttggccccgatgttaacccagccctggccctggagcagaagagagccgaggaagcagtggccgccgtgatggtggcttcctgccctaaccaccctagcagagtcagcaccgccgataatatctacgtcaaccacagctttgagggtagcatcaagggagctggcgccatctctaactttctgccaaataatggacgccagttctag

SEQ ID NO: 40791 - DNA, 3999 bp, Artificial Sequence
  derived and/or modified sequence
atggccgaggccggcctgcggggctggctgctgtgggccctgctgctgcggctggcccagagcgagccctacaccaccatccaccagcccggctactgtgccttctatgatgaatgtgggaagaaccctgagctgagcggcagcctgatgaccctgagcaatgtgtcctgcctgagcaacaccccagccaggaagatcactggagaccacctgatcctgctgcagaagatctgcccccggctgtacacaggccccaacacccaggcctgctgcagcgccaagcagctggtgtccctggaggccagcctgagcatcaccaaggccctgctgacccgctgcccagcctgcagcgacaactttgtgaacctgcactgccacaacacctgcagccccaaccagagcctcttcatcaacgtgaccagggtggcccagctgggcgccggccagctgcctgctgtggtggcctatgaggccttctaccagcacagctttgctgagcagagctatgacagctgcagccgggtgcgggtgcctgctgctgccaccctggccgtgggcaccatgtgtggggtgtatggcagcgccctgtgcaatgcccagcgctggctgaacttccagggcgacacaggaaatggcctggcccccctggacatcaccttccacctgctggagcccggccaggccgtgggcagcggcatccagcccctgaatgaaggagtggcccgctgcaatgaaagccagggagatgatgtggccacctgcagctgccaggactgtgccgccagctgcccagccatcgcccggccccaggccctggacagcaccttctacctgggccagatgcctggcagcctggtgctgatcatcatcctgtgcagcgtgtttgctgtggtgaccatcctgctggtgggcttccgggtggccccagcccgggacaagagcaagatggtggaccccaagaagggcaccagcctgagtgacaagctgtccttcagcacccacaccctgctgggccagttcttccagggctggggcacctgggtggcctcctggcccctgaccatcctggtgctgagcgtcatccctgtggtggccctggccgccggcctggtgttcacagagctgaccacagatcctgtggagctgtggagcgcccccaacagccaggcccggtctgagaaggccttccatgaccagcacttcggccccttcttccgcaccaaccaggtgatcctgacagcccccaacagaagcagctaccgctatgacagcctgctgctgggccccaagaacttcagcggcatcctggacctggacctgctgctggagctgctggagctgcaggagcggctgcggcacctgcaggtgtggagccctgaggcccagaggaacatcagcctgcaggacatctgctacgcccccctgaacccagacaacaccagcctgtatgactgctgcatcaacagcctgctgcagtacttccagaacaacagaaccctgctgctgctgacagccaaccagaccctgatgggccagaccagccaggtggactggaaggaccacttcctgtactgtgccaatgcccccctgaccttcaaggatggaacagccctggccctgagctgcatggctgactatggagcccctgtgttccccttcctggccatcggcggctacaagggcaaggactacagcgaggccgaggccctgatcatgaccttcagcctgaacaactacccagctggggacccccggctggcccaggccaagctgtgggaggaggccttcctggaggagatgagggccttccagaggaggatggccggcatgttccaggtgaccttcatggccgagaggagcctggaggatgagatcaacagaaccacagctgaggacctgcccatctttgccaccagctacatcgtcatcttcctgtacatcagcctggccctgggcagctacagctcctggagccgggtgatggtggacagcaaggccaccctgggcctgggcggcgtggccgtggtgctgggcgctgtgatggccgccatgggcttcttctcctacctgggcatccgcagcagcctggtgatcctgcaggtggtgcccttcctggtgctgtctgtgggcgctgacaacatcttcatctttgtgctggagtaccagaggctgccccggcggcctggagagccccgggaggtgcacatcggccgggccctgggccgggtggcccccagcatgctgctgtgcagcctgtctgaggccatctgcttcttcctgggcgccctgacccccatgcctgctgtgaggacctttgccctgaccagcggcctggccgtcatcctggacttcctgctgcagatgtctgcctttgtggccctgctgagcctggacagcaagaggcaggaggccagccggctggatgtgtgctgctgcgtgaagccccaggagctgcccccacctggccagggcgagggcctgctgctgggcttcttccagaaggcctatgcccccttcctgctgcactggatcacccggggcgtggtgctgctgctcttcctggccctgtttggagtgtccctgtacagcatgtgccacatctctgtgggcctggaccaggagctggccctgcccaaggacagctacctgctggactacttcctgttcctgaaccgctactttgaggtgggcgcccctgtgtactttgtgaccaccctgggctacaacttcagcagcgaggccggcatgaatgccatctgcagcagcgctggctgcaacaacttctccttcacccagaagatccagtatgccacagagttccctgagcagagctacctggccatcccagccagctcctgggtggatgacttcatcgactggctgacccccagcagctgctgccgcctgtacatcagcggccccaacaaggacaagttctgccccagcacagtgaacagcctgaactgcctgaagaactgcatgagcatcaccatgggctctgtgcggcccagcgtggagcagttccacaagtacctgccctggttcctgaatgaccggcccaacatcaagtgccccaagggcggcctggccgcctacagcacctctgtgaacctgaccagtgatggccaggtgctggccagccgcttcatggcctaccacaagcccctgaagaacagccaggactacacagaggccctgcgggccgcccgggagctggccgccaacatcacagctgacctgaggaaggtgcccggcacagatcctgcctttgaggtgttcccctacaccatcaccaacgtgttctatgagcagtacctgaccatcctgcctgagggcctcttcatgctgagcctgtgcctggtgcccacctttgctgtgtcctgcctgctgctgggcctggacctgcggagcggcctgctgaacctgctgagcatcgtgatgatcctggtggacacagtgggcttcatggccctgtggggcatctcctacaatgctgtgtccctcatcaacctggtgtctgctgtgggcatgtctgtggagtttgtgagccacatcaccaggagctttgccatcagcaccaagcccacctggctggagcgggccaaggaggccaccatctccatgggcagcgctgtgtttgctggggtggccatgaccaacctgcccggcatcctggtgctgggcctggccaaggcccagctgatccagatcttcttcttccggctgaacctgctgatcaccctgctgggcctgctgcacggcctggtgttcctgcctgtgatcctgtcctatgtgggcccagatgtgaacccagccctggccctggagcagaagagagctgaggaggccgtggccgctgtgatggtggccagctgccccaaccaccccagccgggtgtccacagctgacaacatctacgtgaaccacagctttgagggcagcatcaagggggccggggccatcagcaacttcctgcccaacaacggccggcagttctag

SEQ ID NO: 40792 - DNA, 3861 bp, Artificial Sequence
  derived and/or modified sequence
atggccgaggccggcctgcggggctggctgctgtgggccctgctgctgcggctggcccagagcgagccctacaccaccatccaccagcccggctactgtgccttctatgatgaatgtgggaagaaccctgagctgagcggcagcctgatgaccctgagcaatgtgtcctgcctgagcaacaccccagccaggaagatcactggagaccacctgatcctgctgcagaagatctgcccccggctgtacacaggccccaacacccaggcctgctgcagcgccaagcagctggtgtccctggaggccagcctgagcatcaccaaggccctgctgacccgctgcccagcctgcagcgacaactttgtgaacctgcactgccacaacacctgcagccccaaccagagcctcttcatcaacgtgaccagggtggcccagctgggcgccggccagctgcctgctgtggtggcctatgaggccttctaccagcacagctttgctgagcagagctatgacagctgcagccgggtgcgggtgcctgctgctgccaccctggccgtgggcaccatgtgtggggtgtatggcagcgccctgtgcaatgcccagcgctggctgaacttccagggcgacacaggaaatggcctggcccccctggacatcaccttccacctgctggagcccggccaggccgtgggcagcggcatccagcccctgaatgaaggagtggcccgctgcaatgaaagccagggagatgatgtggccacctgcagctgccaggactgtgccgccagctgcccagccatcgcccggccccaggccctggacagcaccttctacctgggccagatgcctggcagcctggtgctgatcatcatcctgtgcagcgtgtttgctgtggtgaccatcctgctggtgggcttccgggtggccccagcccgggacaagagcaagatggtggaccccaagaagggcaccagcctgagtgacaagctgtccttcagcacccacaccctgctgggccagttcttccagggctggggcacctgggtggcctcctggcccctgaccatcctggtgctgagcgtcatccctgtggtggccctggccgccggcctggtgttcacagagctgaccacagatcctgtggagctgtggagcgcccccaacagccaggcccggtctgagaaggccttccatgaccagcacttcggccccttcttccgcaccaaccaggtgatcctgacagcccccaacagaagcagctaccgctatgacagcctgctgctgggccccaagaacttcagcggcatcctggacctggacctgctgctggagctgctggagctgcaggagcggctgcggcacctgcaggtgtggagccctgaggcccagaggaacatcagcctgcaggacatctgctacgcccccctgaacccagacaacaccagcctgtatgactgctgcatcaacagcctgctgcagtacttccagaacaacagaaccctgctgctgctgacagccaaccagaccctgatgggccagaccagccaggtggactggaaggaccacttcctgtactgtgccaatgcccccctgaccttcaaggatggaacagccctggccctgagctgcatggctgactatggagcccctgtgttccccttcctggccatcggcggctacaagggcaaggactacagcgaggccgaggccctgatcatgaccttcagcctgaacaactacccagctggggacccccggctggcccaggccaagctgtgggaggaggccttcctggaggagatgagggccttccagaggaggatggccggcatgttccaggtgaccttcatggccgagaggagcctggaggatgagatcaacagaaccacagctgaggacctgcccatctttgccaccagctacatcgtcatcttcctgtacatcagcctggccctgggcagctacagctcctggagccgggtgatggtggacagcaaggccaccctgggcctgggcggcgtggccgtggtgctgggcgctgtgatggccgccatgggcttcttctcctacctgggcatccgcagcagcctggtgatcctgcaggtggtgcccttcctggtgctgtctgtgggcgctgacaacatcttcatctttgtgctggagtaccagaggctgccccggcggcctggagagccccgggaggtgcacatcggccgggccctgggccgggtggcccccagcatgctgctgtgcagcctgtctgaggccatctgcttcttcctgggcgccctgacccccatgcctgctgtgaggacctttgccctgaccagcggcctggccgtcatcctggacttcctgctgcagatgtctgcctttgtggccctgctgagcctggacagcaagaggcaggaggccagccggctggatgtgtgctgctgcgtgaagccccaggagctgcccccacctggccagggcgagggcctgctgctgggcttcttccagaaggcctatgcccccttcctgctgcactggatcacccggggcgtggtggtgggcgcccctgtgtactttgtgaccaccctgggctacaacttcagcagcgaggccggcatgaatgccatctgcagcagcgctggctgcaacaacttctccttcacccagaagatccagtatgccacagagttccctgagcagagctacctggccatcccagccagctcctgggtggatgacttcatcgactggctgacccccagcagctgctgccgcctgtacatcagcggccccaacaaggacaagttctgccccagcacagtgaacagcctgaactgcctgaagaactgcatgagcatcaccatgggctctgtgcggcccagcgtggagcagttccacaagtacctgccctggttcctgaatgaccggcccaacatcaagtgccccaagggcggcctggccgcctacagcacctctgtgaacctgaccagtgatggccaggtgctggccagccgcttcatggcctaccacaagcccctgaagaacagccaggactacacagaggccctgcgggccgcccgggagctggccgccaacatcacagctgacctgaggaaggtgcccggcacagatcctgcctttgaggtgttcccctacaccatcaccaacgtgttctatgagcagtacctgaccatcctgcctgagggcctcttcatgctgagcctgtgcctggtgcccacctttgctgtgtcctgcctgctgctgggcctggacctgcggagcggcctgctgaacctgctgagcatcgtgatgatcctggtggacacagtgggcttcatggccctgtggggcatctcctacaatgctgtgtccctcatcaacctggtgtctgctgtgggcatgtctgtggagtttgtgagccacatcaccaggagctttgccatcagcaccaagcccacctggctggagcgggccaaggaggccaccatctccatgggcagcgctgtgtttgctggggtggccatgaccaacctgcccggcatcctggtgctgggcctggccaaggcccagctgatccagatcttcttcttccggctgaacctgctgatcaccctgctgggcctgctgcacggcctggtgttcctgcctgtgatcctgtcctatgtgggcccagatgtgaacccagccctggccctggagcagaagagagctgaggaggccgtggccgctgtgatggtggccagctgccccaaccaccccagccgggtgtccacagctgacaacatctacgtgaaccacagctttgagggcagcatcaagggggccggggccatcagcaacttcctgcccaacaacggccggcagttctag

SEQ ID NO: 40793 - DNA, 3999 bp, Artificial Sequence
  derived and/or modified sequence
atggccgaggccggcctgcggggctggctgctgtgggccctgctgttgcgcctcgcccagagtgagccatacactacaattcatcagcccgggtattgcgccttttacgacgaatgcggtaaaaacccagaactcagcggcagcttgatgaccttgagcaacgtaagttgtctgagtaacacgcctgcacgaaaaatcaccggtgaccatctcatcttactccagaagatttgcccccggctgtatactggcccgaacacacaagcttgctgctcagccaagcagctggtctccttagaagcctcactttctattacgaaggcgttgctgactcgctgccccgcatgcagcgacaacttcgtaaacttacactgtcacaatacatgcagtcctaaccagtccctgtttatcaatgtgacccgcgttgcacagttaggggctggccagttaccagcggtggttgcatacgaggcattttatcaacactcatttgctgagcaatcatacgactcatgctcgcgggtgcgggtacccgctgctgccacactcgccgtcggcactatgtgcggggtctatgggtccgctctctgcaacgctcagaggtggctgaacttccagggggacacagggaacgggctggcccctctcgatatcaccttccacctgctggagcccggccaagccgtgggatccgggatccagccgctgaacgaaggagttgccagatgtaacgagtcccagggggacgacgtagccacttgcagctgccaagactgcgccgcatcatgtccggccattgcccgaccccaggctctcgactcaactttctatttggggcagatgcccggctccttggtgctcatcattatcctgtgttctgtttttgctgttgttacaattcttctcgttggattccgcgttgcacccgcccgtgacaaaagtaagatggtcgatccaaaaaagggtactagcctgtcagataagttgagcttctcaacccataccctgttgggacagttctttcagggttggggtacgtgggtcgctagctggcccctgaccatccttgttctcagcgttatccccgtcgtcgcgctggccgcagggctcgtgttcaccgagctgactacagatccggtcgaactctggtcagcaccaaatagccaagcgcgcagcgaaaaggccttccacgatcagcatttcgggcccttttttcgaactaatcaggtgatccttacagcccctaatcgatcatcctatcgatatgactcccttctgttgggtcctaagaactttagcgggatcctggatctggatttactcctagagctactggaactgcaggaaaggctccgacatctccaggtgtggtctccggaggcgcagcggaacatatctttacaggatatttgttacgctcctctgaatccagataacacatctctctatgattgttgtatcaactccctgctgcagtacttccagaacaaccgcactctgctgcttctcacggccaatcaaacgcttatggggcaaaccagtcaggtcgattggaaggatcatttcctgtattgtgctaatgcacccctgactttcaaggacggaacagccttggccctttcttgcatggctgactacggagcacccgtgtttccgttccttgccataggcggctacaagggtaaggactattccgaagcagaagcattgatcatgacgttcagcctcaataactatccagcaggcgatccccgcctggctcaggccaagctctgggaagaggctttcctggaggaaatgcgtgcgtttcaacgccggatggccggaatgtttcaggtcaccttcatggctgaacggtcactggaagatgagattaatcgaacaacagcagaggacctgcccattttcgccacttcctacattgtgatttttctatatatcagcctggcattggggagctattcttcatggagtcgcgtgatggtggactccaaagcaactcttggcttgggtggcgtggcagtggtcctcggtgccgtcatggccgccatgggcttcttttcctatctgggcataaggagctcgctggttatactgcaggttgttccgttcctggtgctgtcagtaggggctgataacatcttcatcttcgtcctcgagtaccagaggctgccacgcaggcccggcgagcctcgagaagttcacattggaagagcattaggacgcgtcgcccctagtatgctgttgtgttcacttagtgaggccatttgctttttcttgggagcactgaccccaatgcctgcggtgcgcacattcgcgctgacgtctgggctcgcagtgatactggatttcctgctgcaaatgagcgctttcgtcgctctgctgagcttggactctaagcgtcaggaagcgagccgtctcgatgtctgttgctgcgtgaagcctcaggagttacccccacccgggcagggtgaaggcctcctgcttgggttctttcagaaagcatacgctcctttcttactccactggattactagaggcgtcgtccttctgctgttcctcgccctcttcggagtctcactctactctatgtgccacataagcgtgggactggatcaggaactggcgctcccaaaagattcctacttgcttgattatttcctgttcctgaaccgatatttcgaggtcggtgcgcctgtgtattttgtaactacactgggatataactttagctctgaagcaggcatgaacgcaatttgctcatcagccggctgtaacaattttagtttcacccagaaaatccaatatgcaacagagtttcctgaacagtcctatctagccatccccgctagttcttgggtggacgattttatagactggctcacccccagttcctgctgcaggctatacatttccgggccgaataaggataagttctgtccttccacggttaattcacttaactgcttgaaaaactgcatgtccataaccatggggagtgtcagacccagcgtcgagcagtttcataagtacctgccgtggttcctcaatgatcgacccaacattaagtgcccgaaggggggtctggccgcctactctaccagtgtgaacctgacatctgacggccaggtgctggccagtagattcatggcgtaccacaaaccgcttaaaaattctcaggactacacggaagctctacgagccgcacgcgagttagcagcaaatataaccgccgatttgagaaaggtgcccggaacagacccagctttcgaagtctttccctatacgatcactaatgttttctacgagcaatatcttactatactacccgagggcctgtttatgctttccctctgtctcgttccaactttcgccgtcagttgcttgctgttgggtctcgatctgcgctcagggctgctgaacctgctcagtatagttatgatactcgtggataccgtggggttcatggctctttggggcattagttacaacgccgtatctttgattaaccttgttagcgctgtcggcatgagcgtcgagtttgtgtcccacataacccgtagctttgctatctcaacgaaacctacatggcttgagagggctaaagaagccacaatctccatgggatcagcggtgttcgctggagtagcgatgacaaatctcccgggcatattagttctcggtctcgctaaagcacagctgatccagatcttcttcttcagattgaacctgttaattacactccttggcctattacacgggttggttttcttaccagtgatactcagttatgttgggccagacgtgaacccagccttggctttagagcagaaaagggccgaggaggcagtggcagcagtgatggtggcctcatgtcccaatcatccaagccgcgttagcactgctgataacatctacgtgaatcacagttttgagggatccatcaagggggccggagccattagcaactttcttcccaacaatggaagacagttctag

SEQ ID NO: 40794 - DNA, 3861 bp, Artificial Sequence
  derived and/or modified sequence
atggccgaggccggcctgcggggctggctgctgtgggccctgctgttgagacttgcacaatcagagccatacactacgatccatcaacctggctactgcgccttttacgacgagtgtggcaagaacccagaattgtcagggtccttaatgactctgtctaacgtgagttgcctcagcaacactcccgcccggaaaatcaccggagatcacctgattctgttgcaaaagatctgtccacggctgtacacaggaccaaacacccaggcatgctgcagcgcgaagcaactcgtgtctcttgaggcgtccctttcaattacaaaggcactgttgacccgatgtcctgcttgctcagataactttgtgaatctacattgccataatacgtgtagcccaaatcaatcactgttcattaacgttacacgagtcgctcagctaggtgccggccagctcccggctgttgttgcttatgaggccttttaccagcatagctttgcagagcagtcttacgattcatgctcccgggttcgcgtaccggctgcagccacgctggccgtcggcactatgtgcggggtctatggcagtgccctctgtaatgctcaacgctggctcaacttccagggagatacagggaatgggttagcgccattggacatcacctttcatttattggagcctggacaagctgtgggctcagggatacagcctctcaatgaaggagtcgcccgttgcaatgagagccaaggcgacgatgtggccacctgttcatgtcaggattgtgccgctagctgccccgctattgcccggccacaggcgctcgactccacgttttacctaggacagatgcccggatcattggtgttgataatcatcctctgttccgtttttgctgtcgttaccattctcctggtaggatttcgggtcgcccccgcaagggacaagagcaagatggtggacccgaagaaaggcacttctctgagcgataaactttctttctccacccatactctgttaggtcaattttttcaggggtggggcacttgggtcgcctcctggccacttactatcctggtgctcagtgttattcccgtagtggcgttggccgcaggtctggttttcactgaactgactaccgatcccgtggaactctggagcgccccaaactcccaagccagatccgaaaaggcctttcacgatcagcatttcggaccttttttcaggacaaaccaagttatcctcaccgccccgaatagaagcagctacaggtatgactcactcttgttggggcccaagaatttttctgggatattagaccttgacctgctgctggagttgctggagctccaggagagactgcggcacctccaggtgtggtcgcctgaagcgcagaggaatatctctctgcaagacatctgttacgcccccttaaatccagacaatacttctttatatgattgttgtatcaactcactcctgcaatactttcagaacaaccgaactttactgctcttgacagccaaccaaacgctcatgggacagacatctcaggttgattggaaagaccactttctgtattgtgcaaatgccccgctgacatttaaagacggcactgctctcgccctgtcttgtatggcagactatggcgcccccgttttcccctttttagctatcgggggatacaaaggcaaggactacagcgaggcggaagctcttattatgaccttttccctcaacaactacccagctggggaccccagactggcacaggccaaactttgggaagaggcatttctggaggaaatgcgagcttttcagagaagaatggcgggaatgttccaggtgacattcatggcggaaaggtctctggaggacgaaataaacaggactactgccgaagatctgccaatttttgccaccagctacatcgtcatttttctctatatctcacttgcgctcggcagttattccagctggagccgcgttatggttgatagtaaggccactcttgggctaggaggcgtcgcagtagtgctaggcgctgtaatggccgccatgggtttcttttcttacctaggcatccgctccagtctagtcatcctccaggttgtgcctttcctcgtcctgtccgtgggagctgataatatcttcattttcgtgctcgaataccagcgtctgccacgtcggcccggtgagccacgggaagttcacatcgggagggccctgggacgggtggccccatcaatgcttctctgctccctgtccgaggccatatgtttctttctgggtgcattaacccccatgcccgctgttcgaacgttcgccctgacttcaggcctggccgttatattggacttcctccttcagatgtccgcttttgtggcattgctgtccctggacagtaaacggcaggaggcgtcaaggctggatgtatgctgctgtgtcaaacctcaggagctaccccctccgggccagggggaaggactgttattgggcttcttccagaaagcgtatgctcccttcctgctgcactggatcacacgcggggttgtggtcggggccccagtctacttcgttacaacattggggtacaatttttcgtctgaggcagggatgaatgctatttgctcaagcgccggatgtaacaatttcagtttcacgcagaagattcagtatgccaccgagtttcccgagcaaagttaccttgccataccagcttcttcgtgggtggacgatttcatcgattggttgacccctagctcctgttgtaggctctacatatccggcccaaacaaggacaaattctgcccctctactgtcaattccttgaactgtctgaagaactgtatgagcatcaccatgggtagtgtacgcccatccgtggagcagtttcataagtacttaccctggttcctgaacgaccgccctaacataaagtgcccaaaggggggactggctgcctattctactagtgtgaatttaacatctgacgggcaggtcctcgcgagccgatttatggcctaccacaagccccttaagaatagccaggattatacggaggctttgcgcgccgcccgagagctggccgccaatattacagcagacctgcggaaagttccaggaaccgacccggcctttgaggtgttcccttacactattactaatgtgttttatgaacaatacctcacaattctgcctgaagggctttttatgctgagcttatgtctagttccaactttcgcagtgagctgtctccttctgggactggacttaagaagtggcttgctgaacttacttagtattgttatgatcctggtggataccgtgggcttcatggccctgtgggggatcagctacaacgcagtgtccctcatcaacctggtgtctgctgttggcatgtcagtggaattcgtaagtcacattacaagatctttcgctattagcacaaagccaacatggctcgagcgggcgaaggaggcaacaatatcgatgggctccgccgtctttgctggagtggccatgacaaatctccccggtatcctggtcctgggcctggcgaaggctcaactgattcagatcttctttttccgcctgaacctcctgattactctactggggcttctccacgggttagtgttcctgcctgtgatacttagctatgtggggccagacgtaaaccccgctcttgcgctcgaacagaagcgagcagaggaagctgtcgcagctgtgatggtcgcctcatgtccgaaccatccctctagagtctctaccgccgataacatctatgtgaaccactccttcgaggggagtatcaaaggtgcaggagctatttccaacttcttgcctaacaacgggcggcagttctag

SEQ ID NO: 40795 - DNA, 4141 bp, Artificial Sequence
  derived and/or modified sequence
cttggctgttcctgaggcctggcctggctccccgctgaccccttcccagacctgggatggcggaggccggcctgaggggctggctgctgtgggccctgctcctgcgcttggcccagagtgagccttacacaaccatccaccagcctggctactgcgccttctatgacgaatgtgggaagaacccagagctgtctggaagcctcatgacactctccaacgtgtcctgcctgtccaacacgccggcccgcaagatcacaggtgatcacctgatcctattacagaagatctgcccccgcctctacaccggccccaacacccaagcctgctgctccgccaagcagctggtatcactggaagcgagtctgtcgatcaccaaggccctcctcacccgctgcccagcctgctctgacaattttgtgaacctgcactgccacaacacgtgcagccccaatcagagcctcttcatcaatgtgacccgcgtggcccagctaggggctggacaactcccagctgtggtggcctatgaggccttctaccagcatagctttgccgagcagagctatgactcctgcagccgtgtgcgcgtccctgcagctgccacgctggctgtgggcaccatgtgtggcgtgtatggctctgccctttgcaatgcccagcgctggctcaacttccagggagacacaggcaatggtctggccccactggacatcaccttccacctcttggagcctggccaggccgtggggagtgggattcagcctctgaatgagggggttgcacgttgcaatgagtcccaaggtgacgacgtggcgacctgctcctgccaagactgtgctgcatcctgtcctgccatagcccgcccccaggccctcgactccaccttctacctgggccagatgccgggcagtctggtcctcatcatcatcctctgctctgtcttcgctgtggtcaccatcctgcttgtgggattccgtgtggcccccgccagggacaaaagcaagatggtggaccccaagaagggcaccagcctctctgacaagctcagcttctccacccacaccctccttggccagttcttccagggctggggcacgtgggtggcttcgtggcctctgaccatcttggtgctatctgtcatcccggtggtggccttggcagcgggcctggtctttacagaactcactacggaccccgtggagctgtggtcggcccccaacagccaagcccggagtgagaaagctttccatgaccagcatttcggccccttcttccgaaccaaccaggtgatcctgacggctcctaaccggtccagctacaggtatgactctctgctgctggggcccaagaacttcagcggaatcctggacctggacttgctgctggagctgctagagctgcaggagaggctgcggcacctccaggtatggtcgcccgaagcacagcgcaacatctccctgcaggacatctgctacgcccccctcaatccggacaataccagtctctacgactgctgcatcaacagcctcctgcagtatttccagaacaaccgcacgctcctgctgctcacagccaaccagacactgatggggcagacctcccaagtcgactggaaggaccattttctgtactgtgccaatgccccgctcaccttcaaggatggcacagccctggccctgagctgcatggctgactacggggcccctgtcttccccttccttgccattggggggtacaaaggaaaggactattctgaggcagaggccctgatcatgacgttctccctcaacaattaccctgccggggacccccgtctggcccaggccaagctgtgggaggaggccttcttagaggaaatgcgagccttccagcgtcggatggctggcatgttccaggtcacgttcatggctgagcgctctctggaagacgagatcaatcgcaccacagctgaagacctgcccatctttgccaccagctacattgtcatattcctgtacatctctctggccctgggcagctattccagctggagccgagtgatggtggactccaaggccacgctgggcctcggcggggtggccgtggtcctgggagcagtcatggctgccatgggcttcttctcctacttgggtatccgctcctccctggtcatcctgcaagtggttcctttcctggtgctgtccgtgggggctgataacatcttcatctttgttctcgagtaccagaggctgccccggaggcctggggagccacgagaggtccacattgggcgagccctaggcagggtggctcccagcatgctgttgtgcagcctctctgaggccatctgcttcttcctaggggccctgacccccatgccagctgtgcggacctttgccctgacctctggccttgcagtgatccttgacttcctcctgcagatgtcagcctttgtggccctgctctccctggacagcaagaggcaggaggcctcccggttggacgtctgctgctgtgtcaagccccaggagctgcccccgcctggccagggagaggggctcctgcttggcttcttccaaaaggcttatgcccccttcctgctgcactggatcactcgaggtgttgtgctgctgctgtttctcgccctgttcggagtgagcctctactccatgtgccacatcagcgtgggactggaccaggagctggccctgcccaaggactcgtacctgcttgactatttcctctttctgaaccgctacttcgaggtgggggccccggtgtactttgttaccaccttgggctacaacttctccagcgaggctgggatgaatgccatctgctccagtgcaggctgcaacaacttctccttcacccagaagatccagtatgccacagagttccctgagcagtcttacctggccatccctgcctcctcctgggtggatgacttcattgactggctgaccccgtcctcctgctgccgcctttatatatctggccccaataaggacaagttctgcccctcgaccgtcaactctctgaactgcctaaagaactgcatgagcatcacgatgggctctgtgaggccctcggtggagcagttccataagtatcttccctggttcctgaacgaccggcccaacatcaaatgtcccaaaggcggcctggcagcatacagcacctctgtgaacttgacttcagatggccaggttttagcctccaggttcatggcctatcacaagcccctgaaaaactcacaggattacacagaagctctgcgggcagctcgagagctggcagccaacatcactgctgacctgcggaaagtgcctggaacagacccggcttttgaggtcttcccctacacgatcaccaatgtgttttatgagcagtacctgaccatcctccctgaggggctcttcatgctcagcctctgccttgtgcccaccttcgctgtctcctgcctcctgctgggcctggacctgcgctccggcctcctcaacctgctctccattgtcatgatcctcgtggacactgtcggcttcatggccctgtggggcatcagttacaatgctgtgtccctcatcaacctggtctcggcggtgggcatgtctgtggagtttgtgtcccacattacccgctcctttgccatcagcaccaagcccacctggctggagagggccaaagaggccaccatctctatgggaagtgcggtgtttgcaggtgtggccatgaccaacctgcctggcatccttgtcctgggcctcgccaaggcccagctcattcagatcttcttcttccgcctcaacctcctgatcactctgctgggcctgctgcatggcttggtcttcctgcccgtcatcctcagctacgtggggcctgacgttaacccggctctggcactggagcagaagcgggctgaggaggcggtggcagcagtcatggtggcctcttgcccaaatcacccctcccgagtctccacagctgacaacatctatgtcaaccacagctttgaaggttctatcaaaggtgctggtgccatcagcaacttcttgcccaacaatgggcggcagttctgatacagccagaggccctgtctaggctctatggccctgaaccaaagggttatggggatcttccttgtgactgccccttgacacacgcc

SEQ ID NO: 40796 - DNA, 4001 bp, Artificial Sequence
  derived and/or modified sequence
tggctgttcctgaggcctggcctggctccccgctgaccccttcccagacctgggatggcggaggccggcctgaggggctggctgctgtgggccctgctcctgcgcttggcccagagtgagccttacacaaccatccaccagcctggctactgcgccttctatgacgaatgtgggaagaacccagagctgtctggaagcctcatgacactctccaacgtgtcctgcctgtccaacacgccggcccgcaagatcacaggtgatcacctgatcctattacagaagatctgcccccgcctctacaccggccccaacacccaagcctgctgctccgccaagcagctggtatcactggaagcgagtctgtcgatcaccaaggccctcctcacccgctgcccagcctgctctgacaattttgtgaacctgcactgccacaacacgtgcagccccaatcagagcctcttcatcaatgtgacccgcgtggcccagctaggggctggacaactcccagctgtggtggcctatgaggccttctaccagcatagctttgccgagcagagctatgactcctgcagccgtgtgcgcgtccctgcagctgccacgctggctgtgggcaccatgtgtggcgtgtatggctctgccctttgcaatgcccagcgctggctcaacttccagggagacacaggcaatggtctggccccactggacatcaccttccacctcttggagcctggccaggccgtggggagtgggattcagcctctgaatgagggggttgcacgttgcaatgagtcccaaggtgacgacgtggcgacctgctcctgccaagactgtgctgcatcctgtcctgccatagcccgcccccaggccctcgactccaccttctacctgggccagatgccgggcagtctggtcctcatcatcatcctctgctctgtcttcgctgtggtcaccatcctgcttgtgggattccgtgtggcccccgccagggacaaaagcaagatggtggaccccaagaagggcaccagcctctctgacaagctcagcttctccacccacaccctccttggccagttcttccagggctggggcacgtgggtggcttcgtggcctctgaccatcttggtgctatctgtcatcccggtggtggccttggcagcgggcctggtctttacagaactcactacggaccccgtggagctgtggtcggcccccaacagccaagcccggagtgagaaagctttccatgaccagcatttcggccccttcttccgaaccaaccaggtgatcctgacggctcctaaccggtccagctacaggtatgactctctgctgctggggcccaagaacttcagcggaatcctggacctggacttgctgctggagctgctagagctgcaggagaggctgcggcacctccaggtatggtcgcccgaagcacagcgcaacatctccctgcaggacatctgctacgcccccctcaatccggacaataccagtctctacgactgctgcatcaacagcctcctgcagtatttccagaacaaccgcacgctcctgctgctcacagccaaccagacactgatggggcagacctcccaagtcgactggaaggaccattttctgtactgtgccaatgccccgctcaccttcaaggatggcacagccctggccctgagctgcatggctgactacggggcccctgtcttccccttccttgccattggggggtacaaaggaaaggactattctgaggcagaggccctgatcatgacgttctccctcaacaattaccctgccggggacccccgtctggcccaggccaagctgtgggaggaggccttcttagaggaaatgcgagccttccagcgtcggatggctggcatgttccaggtcacgttcatggctgagcgctctctggaagacgagatcaatcgcaccacagctgaagacctgcccatctttgccaccagctacattgtcatattcctgtacatctctctggccctgggcagctattccagctggagccgagtgatggtggactccaaggccacgctgggcctcggcggggtggccgtggtcctgggagcagtcatggctgccatgggcttcttctcctacttgggtatccgctcctccctggtcatcctgcaagtggttcctttcctggtgctgtccgtgggggctgataacatcttcatctttgttctcgagtaccagaggctgccccggaggcctggggagccacgagaggtccacattgggcgagccctaggcagggtggctcccagcatgctgttgtgcagcctctctgaggccatctgcttcttcctaggggccctgacccccatgccagctgtgcggacctttgccctgacctctggccttgcagtgatccttgacttcctcctgcagatgtcagcctttgtggccctgctctccctggacagcaagaggcaggaggcctcccggttggacgtctgctgctgtgtcaagccccaggagctgcccccgcctggccagggagaggggctcctgcttggcttcttccaaaaggcttatgcccccttcctgctgcactggatcactcgaggtgttgtggtgggggccccggtgtactttgttaccaccttgggctacaacttctccagcgaggctgggatgaatgccatctgctccagtgcaggctgcaacaacttctccttcacccagaagatccagtatgccacagagttccctgagcagtcttacctggccatccctgcctcctcctgggtggatgacttcattgactggctgaccccgtcctcctgctgccgcctttatatatctggccccaataaggacaagttctgcccctcgaccgtcaactctctgaactgcctaaagaactgcatgagcatcacgatgggctctgtgaggccctcggtggagcagttccataagtatcttccctggttcctgaacgaccggcccaacatcaaatgtcccaaaggcggcctggcagcatacagcacctctgtgaacttgacttcagatggccaggttttagcctccaggttcatggcctatcacaagcccctgaaaaactcacaggattacacagaagctctgcgggcagctcgagagctggcagccaacatcactgctgacctgcggaaagtgcctggaacagacccggcttttgaggtcttcccctacacgatcaccaatgtgttttatgagcagtacctgaccatcctccctgaggggctcttcatgctcagcctctgccttgtgcccaccttcgctgtctcctgcctcctgctgggcctggacctgcgctccggcctcctcaacctgctctccattgtcatgatcctcgtggacactgtcggcttcatggccctgtggggcatcagttacaatgctgtgtccctcatcaacctggtctcggcggtgggcatgtctgtggagtttgtgtcccacattacccgctcctttgccatcagcaccaagcccacctggctggagagggccaaagaggccaccatctctatgggaagtgcggtgtttgcaggtgtggccatgaccaacctgcctggcatccttgtcctgggcctcgccaaggcccagctcattcagatcttcttcttccgcctcaacctcctgatcactctgctgggcctgctgcatggcttggtcttcctgcccgtcatcctcagctacgtggggcctgacgttaacccggctctggcactggagcagaagcgggctgaggaggcggtggcagcagtcatggtggcctcttgcccaaatcacccctcccgagtctccacagctgacaacatctatgtcaaccacagctttgaaggttctatcaaaggtgctggtgccatcagcaacttcttgcccaacaatgggcggcagttctgatacagccagaggccctgtctaggctctatggccctgaaccaaagggttatggggatcttccttgtgactgccccttgacacacgcc

SEQ ID NO: 40797 - DNA, 3999 bp, Artificial Sequence
  derived and/or modified sequence
atggcagaagcgggtctgaggggatggctcctgtgggccttgctgctgcgccttgcccagtctgagccatataccactatccatcagcccggatattgcgccttctatgacgagtgtggtaaaaatccagaactcagcggcagccttatgaccctttccaacgttagctgcttgagtaacaccccagctcgcaaaatcaccggcgaccacctgatactgctgcaaaagatttgccctcgcctgtacacagggccaaatacccaggcttgctgtagcgccaagcaattagttagtctagaagcctctctgtccatcactaaggctctgttaacacgctgcccagcctgttcggacaattttgttaacctgcactgccataatacctgttcaccaaaccaaagtttgtttattaatgtgactcgagtcgcccagctgggtgccggacagctacctgctgttgttgcctatgaggctttttatcagcactcatttgcagaacagtcatatgattcttgttccagagtacgggtgccagccgcagccaccctcgcagtgggcacaatgtgcggcgtatatgggtcagccctttgcaatgcccaacgctggctgaatttccagggtgataccggcaacggattggcaccactggatataacttttcacctcctggagccaggtcaggctgtcggaagcggcatccagcccctgaatgagggcgtggcccgatgcaatgaatcccagggagacgatgtggcgacctgtagttgtcaagattgcgccgcttcatgccctgctattgccagaccccaggccttggacagcaccttttatctaggacagatgcccggaagcctggtcctgatcattattctgtgcagcgtgtttgcagtggtgactatcctcctggttgggttccgcgtggcgcctgccagggacaaatccaaaatggtggatcctaagaagggcacatcactgagtgataaactgtccttcagtacacatacacttctggggcagttcttccaggggtggggcacttgggtcgcctcatggccattaaccatcctagttctttccgttatccccgtggtggctctcgcagctggtctggtgtttactgaattgactaccgatcctgtggagctctggtctgctcctaactcacaggcccgaagtgaaaaggctttccatgaccagcatttcggacccttttttcgcacaaaccaggtcatacttaccgcccctaaccgaagctcgtaccgttacgacagtctgctgttgggtccgaagaacttcagtgggattctagacctggatctcctgctggagctgctggagttacaggagcgcttgcgacatttacaggtctggagcccagaggcccagcgaaatatctctcttcaggatatttgttacgccccactgaacccggacaacacctcactgtacgactgttgcatcaacagtttgctccaatatttccagaacaacagaaccctgctcctgctgaccgctaatcagactttgatgggccagacgtctcaagtcgattggaaggatcatttcctgtactgcgctaacgcccctcttactttcaaggacggcaccgcgctcgcgctaagctgtatggctgactatggcgctccagtgttcccctttctggccatcggcggttataaaggcaaggattacagcgaggccgaggcactgatcatgacgttcagcttaaacaattatccagccggtgatccgagactggcccaggcaaaactgtgggaagaggcttttttagaggagatgagagccttccagcgtcggatggccggaatgttccaggtcacattcatggctgagagaagcctggaggacgagatcaaccgaactaccgctgaagaccttccaatttttgcgactagttacattgtgatattcttgtatatcagcctcgctctagggagctactcttcctggtcccgagttatggtcgatagtaaggccaccctcggtctcggcggtgtggccgtggtcttgggcgcagtcatggctgccatgggattctttagttacctgggcatccgaagttctctggtgattctgcaagtggtcccattcctggtgctatctgtgggagctgacaacatctttatatttgtcttggaatatcagcgcctgccaagaagacctggggagcccagagaggtccacattgggcgagctctgggtcgcgtcgccccatccatgctgctctgcagcctcagcgaagcaatctgttttttccttggagcactcactcctatgccggctgtgcggacatttgctctgacttcaggcctggccgtcattcttgattttctcctccaaatgagcgcgtttgtggcccttctctctctggacagtaagaggcaggaggcatctcgattagatgtgtgttgttgcgttaaaccacaggagttgcctcccccaggacaaggagaaggcttgctgcttggtttcttccaaaaggcttacgcgccattcctgttgcactggataacccgcggagtggtgcttttgttgtttttggctctctttggagtttccctttactctatgtgccacattagtgtcggactggaccaggagctcgcactgcccaaagattcgtatctgctcgattatttcctctttcttaaccgttactttgaggttggcgctcctgtttacttcgtcactaccctcggctataattttagctcagaggcagggatgaacgcaatctgcagcagcgctgggtgtaacaacttctccttcacgcagaagatccaatatgccacggagtttccagagcagtcttaccttgctatcccagcgagctcgtgggtcgatgatttcattgactggctgaccccgtccagttgctgtaggttgtacatttctgggcctaataaagacaaattctgtccctccacggttaatagtcttaactgcctaaagaattgtatgagtatcaccatgggttcagtgcgaccctctgtcgagcagtttcataaatacttgccttggtttttgaacgatcgaccaaatatcaaatgcccgaagggcggtttggccgcatattctacaagtgtgaacctaacctcagatggtcaggtgctcgcttcccggtttatggcttatcataagccattaaaaaatagccaggactataccgaggcccttcgagccgctagagaactggcagcaaacattacagccgatctgagaaaggtgccaggcaccgaccctgcattcgaagtctttccttatacaatcactaacgtgttctacgagcaatatctgactatattgccggagggactgtttatgctgagtctttgtctcgtccctacctttgcagtgtcttgtctgcttcttggactcgatctgcggtcaggcctgctaaatctcctgtcaatcgtgatgatcctggttgacacagtcggattcatggccctgtggggaattagttacaacgccgtcagcctgatcaatctggtgtccgctgttggtatgtctgtggaattcgtctcccacatcactcgaagtttcgccatttcgactaagccaacgtggttggaacgtgctaaagaggcaacgatcagcatgggctctgctgtgtttgctggggttgccatgaccaacctgcccggaattttggtattgggtctagccaaggctcaattgatacaaattttcttctttagacttaatctcttaattaccctgctcgggctgctgcacggtctcgtttttctcccggtgattttgtcctacgttgggcctgacgtgaacccagctctcgctctcgaacagaagcgggctgaggaggctgtggcagcggtgatggtggccagttgtcctaaccacccaagccgagttagcacggcagacaatatctacgtgaatcactccttcgaggggtctattaagggggctggcgctatctcaaactttttgccaaacaacggtcgccagttttag

SEQ ID NO: 40798 - DNA, 3861 bp, Artificial Sequence
  derived and/or modified sequence
atggcggaggctggtctcagaggttggctgctgtgggcactcctgctccggctcgcccagagcgagccctacaccacaattcaccagccagggtattgcgctttttacgatgaatgtggcaaaaacccagaactgagtggcagcctgatgaccctgtcaaacgtgagctgcctatccaacactccagctcgcaaaatcactggcgaccatctgattctgctgcagaaaatctgtcccagactgtataccggccctaacacgcaggcttgctgctcggctaaacagctggtgagtttggaagctagtcttagcatcacaaaggccctccttacccgatgcccggcttgtagtgacaacttcgtaaacctccactgccacaacacgtgtagcccaaaccaatcccttttcatcaacgtgaccagggtcgcccagctgggcgcaggccagctgcctgcagtggtggcgtatgaagccttttatcagcatagctttgcagaacaatcatatgactcttgttccagagtcagggtgcctgcagctgccacactggctgtgggcactatgtgcggcgtgtatggttctgccctttgcaacgcacaacgttggctcaactttcagggcgatactggcaacggcttggccccactggatataacattccacctactggaacccggtcaggctgtcggaagcggcatccagccgctaaatgaaggcgtggcccgttgcaatgagagtcagggtgatgacgtggcaacatgctcatgtcaggactgtgccgcatcctgtccagctatcgctcgaccccaggcactcgactctactttctatttgggacagatgccgggatctctggttctaatcatcattctatgtagcgtgttcgccgtcgtcacaattctgttggtcggattccgtgtggcccctgccagagacaaaagcaagatggtggaccctaaaaaaggcaccagcttaagcgacaagctgtcattcagcacccatacacttctgggtcagttcttccagggctgggggacctgggtggcctcgtggcctttaaccatcttggttctctcagtcattcctgtggtggctctggctgcgggattagtgtttaccgaacttacgacagaccctgtagagctgtggtcagccccaaacagccaggccaggtctgagaaagcattccacgatcagcattttgggccttttttcaggaccaaccaggtaatattgaccgcccctaaccgctcctcctataggtatgactctctgttattagggccaaagaactttagcggtattctggacctggatctcctgctggagctcttggagctccaggaacggctccgacatctgcaggtctggtctcctgaggcccaaaggaacatctccctccaggatatttgctacgcgccactcaacccagataacacatcactttacgattgttgtatcaacagtttgctgcagtactttcagaataaccggactctactcctactgacggcaaatcagaccttgatggggcagacgagccaggtggactggaaagaccactttctatattgtgccaacgcaccactcacttttaaagacggtactgccctagctctgagctgtatggcagactacggcgcaccagtgtttccctttctcgcaatcggaggttacaagggaaaagattactctgaggcagaggccctgatcatgacgttttccctcaataattatcccgctggggaccctcgattagctcaggccaaactttgggaagaggcctttcttgaggaaatgcgggcttttcagagaaggatggcagggatgtttcaagtaacattcatggccgagagaagcctagaggacgaaataaatcgaacaaccgctgaagatctgcctatctttgctacctcatacatagtgatcttcctttacattagtctggctctgggcagctattcttcttggtcccgcgtgatggtggatagcaaggcaacactggggttgggcggtgtcgctgtcgtgctgggagccgtcatggccgcaatggggttcttcagttatcttggcatcagaagctcactggtcatcctgcaagtcgtcccctttctggtgctcagtgtgggggcagataacattttcatcttcgtactggaataccagcggctgcccagaagacctggcgagccccgagaggttcacatagggagggccctcggtcgagtcgcaccgagtatgctgctctgttctctgagcgaggcaatatgcttctttttgggcgcactgacgccgatgcccgctgtcaggacgttcgccttgacctcaggcctggccgtgatcctcgattttctgctgcagatgtcggcatttgtggcgctgctcagccttgactctaagagacaggaggcatctcggctcgacgtatgctgttgcgtcaaaccgcaggagctgccacctcctggacaaggcgaggggttgcttcttggctttttccagaaggcgtatgcaccgtttctgcttcactggattacccggggtgtggtggtgggagccccagtgtatttcgtcacaacattggggtacaacttcagtagtgaagcagggatgaatgcaatctgcagttcagccggatgtaacaacttctcatttactcagaagatacagtatgcaactgagtttcctgaacagtcttatctcgccataccagcttcctcgtgggtggatgactttattgactggttgacaccttcaagttgctgcagattgtacattagcggccctaataaggacaaattttgcccgagcacagtgaatagcctgaattgcctaaagaactgtatgagtatcaccatgggatcagttagacccagtgtggagcagtttcataagtatctgccctggtttctgaacgaccgaccaaatatcaagtgcccgaaaggcggtctggccgcttatagtacttcagtcaatcttacatccgacggtcaggtgttggcgtccagatttatggcgtatcataagccgctgaagaactctcaggactacaccgaggcgttacgcgcagctcgcgaactggcagctaacatcactgctgatctgcgcaaagttcccggtaccgatcccgcattcgaggtttttccctacaccattaccaatgtcttctacgaacagtacctcaccattctcccggaaggtctattcatgctgagtctatgtctcgtaccaacattcgcggtgtcttgtttgctcctagggctggatcttcggagtggactgctgaatcttttatccatcgtcatgattttggtcgacactgtcggattcatggcactctgggggatctcatacaatgccgtgagcttgatcaaccttgtcagtgctgtcgggatgagcgtagagttcgtgtctcacattaccagatcattcgccatctctaccaaaccgacatggctagaaagggcaaaagaagcaaccatctccatggggtctgcagtgtttgcaggagtcgctatgacaaatctgcccggtattctggttttgggtctggcaaaggcccagctgatccagatcttcttctttaggctcaaccttcttatcaccctgctcggcctgctccatggtctggtttttctccctgtgattctgagctatgtgggaccagatgttaaccccgctctcgctctggagcagaagagggctgaagaggccgttgccgctgtgatggttgctagttgccctaatcaccccagccgtgtgagcacagctgacaacatctatgtgaaccactcttttgagggatctattaaaggggctggggctatatccaatttcctgccgaacaatgggaggcagttttag

SEQ ID NO: 40799 - DNA, 3999 bp, Artificial Sequence
  derived and/or modified sequence
atggccgaggccggcctgagaggctggctgctgtgggccctgctgctgagactggcccagagcgagccctacaccaccatccaccagcccggctactgcgccttctacgacgagtgcggcaagaaccccgagctgagcggcagcctgatgaccctgagcaacgtgagctgcctgagcaacacccccgccagaaagatcaccggcgaccacctgatcctgctgcagaagatctgccccagactgtacaccggccccaacacccaggcctgctgcagcgccaagcagctggtgagcctggaggccagcctgagcatcaccaaggccctgctgaccagatgccccgcctgcagcgacaacttcgtgaacctgcactgccacaacacctgcagccccaaccagagcctgttcatcaacgtgaccagagtggcccagctgggcgccggccagctgcccgccgtggtggcctacgaggccttctaccagcacagcttcgccgagcagagctacgacagctgcagcagagtgagagtgcccgccgccgccaccctggccgtgggcaccatgtgcggcgtgtacggcagcgccctgtgcaacgcccagagatggctgaacttccagggcgacaccggcaacggcctggcccccctggacatcaccttccacctgctggagcccggccaggccgtgggcagcggcatccagcccctgaacgagggcgtggccagatgcaacgagagccagggcgacgacgtggccacctgcagctgccaggactgcgccgccagctgccccgccatcgccagaccccaggccctggacagcaccttctacctgggccagatgcccggcagcctggtgctgatcatcatcctgtgcagcgtgttcgccgtggtgaccatcctgctggtgggcttcagagtggcccccgccagagacaagagcaagatggtggaccccaagaagggcaccagcctgagcgacaagctgagcttcagcacccacaccctgctgggccagttcttccagggctggggcacctgggtggccagctggcccctgaccatcctggtgctgagcgtgatccccgtggtggccctggccgccggcctggtgttcaccgagctgaccaccgaccccgtggagctgtggagcgcccccaacagccaggccagaagcgagaaggccttccacgaccagcacttcggccccttcttcagaaccaaccaggtgatcctgaccgcccccaacagaagcagctacagatacgacagcctgctgctgggccccaagaacttcagcggcatcctggacctggacctgctgctggagctgctggagctgcaggagagactgagacacctgcaggtgtggagccccgaggcccagagaaacatcagcctgcaggacatctgctacgcccccctgaaccccgacaacaccagcctgtacgactgctgcatcaacagcctgctgcagtacttccagaacaacagaaccctgctgctgctgaccgccaaccagaccctgatgggccagaccagccaggtggactggaaggaccacttcctgtactgcgccaacgcccccctgaccttcaaggacggcaccgccctggccctgagctgcatggccgactacggcgcccccgtgttccccttcctggccatcggcggctacaagggcaaggactacagcgaggccgaggccctgatcatgaccttcagcctgaacaactaccccgccggcgaccccagactggcccaggccaagctgtgggaggaggccttcctggaggagatgagagccttccagagaagaatggccggcatgttccaggtgaccttcatggccgagagaagcctggaggacgagatcaacagaaccaccgccgaggacctgcccatcttcgccaccagctacatcgtgatcttcctgtacatcagcctggccctgggcagctacagcagctggagcagagtgatggtggacagcaaggccaccctgggcctgggcggcgtggccgtggtgctgggcgccgtgatggccgccatgggcttcttcagctacctgggcatcagaagcagcctggtgatcctgcaggtggtgcccttcctggtgctgagcgtgggcgccgacaacatcttcatcttcgtgctggagtaccagagactgcccagaagacccggcgagcccagagaggtgcacatcggcagagccctgggcagagtggcccccagcatgctgctgtgcagcctgagcgaggccatctgcttcttcctgggcgccctgacccccatgcccgccgtgagaaccttcgccctgaccagcggcctggccgtgatcctggacttcctgctgcagatgagcgccttcgtggccctgctgagcctggacagcaagagacaggaggccagcagactggacgtgtgctgctgcgtgaagccccaggagctgcccccccccggccagggcgagggcctgctgctgggcttcttccagaaggcctacgcccccttcctgctgcactggatcaccagaggcgtggtgctgctgctgttcctggccctgttcggcgtgagcctgtacagcatgtgccacatcagcgtgggcctggaccaggagctggccctgcccaaggacagctacctgctggactacttcctgttcctgaacagatacttcgaggtgggcgcccccgtgtacttcgtgaccaccctgggctacaacttcagcagcgaggccggcatgaacgccatctgcagcagcgccggctgcaacaacttcagcttcacccagaagatccagtacgccaccgagttccccgagcagagctacctggccatccccgccagcagctgggtggacgacttcatcgactggctgacccccagcagctgctgcagactgtacatcagcggccccaacaaggacaagttctgccccagcaccgtgaacagcctgaactgcctgaagaactgcatgagcatcaccatgggcagcgtgagacccagcgtggagcagttccacaagtacctgccctggttcctgaacgacagacccaacatcaagtgccccaagggcggcctggccgcctacagcaccagcgtgaacctgaccagcgacggccaggtgctggccagcagattcatggcctaccacaagcccctgaagaacagccaggactacaccgaggccctgagagccgccagagagctggccgccaacatcaccgccgacctgagaaaggtgcccggcaccgaccccgccttcgaggtgttcccctacaccatcaccaacgtgttctacgagcagtacctgaccatcctgcccgagggcctgttcatgctgagcctgtgcctggtgcccaccttcgccgtgagctgcctgctgctgggcctggacctgagaagcggcctgctgaacctgctgagcatcgtgatgatcctggtggacaccgtgggcttcatggccctgtggggcatcagctacaacgccgtgagcctgatcaacctggtgagcgccgtgggcatgagcgtggagttcgtgagccacatcaccagaagcttcgccatcagcaccaagcccacctggctggagagagccaaggaggccaccatcagcatgggcagcgccgtgttcgccggcgtggccatgaccaacctgcccggcatcctggtgctgggcctggccaaggcccagctgatccagatcttcttcttcagactgaacctgctgatcaccctgctgggcctgctgcacggcctggtgttcctgcccgtgatcctgagctacgtgggccccgacgtgaaccccgccctggccctggagcagaagagagccgaggaggccgtggccgccgtgatggtggccagctgccccaaccaccccagcagagtgagcaccgccgacaacatctacgtgaaccacagcttcgagggcagcatcaagggcgccggcgccatcagcaacttcctgcccaacaacggcagacagttctag

SEQ ID NO: 40800 - DNA, 3861 bp, Artificial Sequence
  derived and/or modified sequence
atggccgaggccggcctgagaggctggctgctgtgggccctgctgctgagactggcccagagcgagccctacaccaccatccaccagcccggctactgcgccttctacgacgagtgcggcaagaaccccgagctgagcggcagcctgatgaccctgagcaacgtgagctgcctgagcaacacccccgccagaaagatcaccggcgaccacctgatcctgctgcagaagatctgccccagactgtacaccggccccaacacccaggcctgctgcagcgccaagcagctggtgagcctggaggccagcctgagcatcaccaaggccctgctgaccagatgccccgcctgcagcgacaacttcgtgaacctgcactgccacaacacctgcagccccaaccagagcctgttcatcaacgtgaccagagtggcccagctgggcgccggccagctgcccgccgtggtggcctacgaggccttctaccagcacagcttcgccgagcagagctacgacagctgcagcagagtgagagtgcccgccgccgccaccctggccgtgggcaccatgtgcggcgtgtacggcagcgccctgtgcaacgcccagagatggctgaacttccagggcgacaccggcaacggcctggcccccctggacatcaccttccacctgctggagcccggccaggccgtgggcagcggcatccagcccctgaacgagggcgtggccagatgcaacgagagccagggcgacgacgtggccacctgcagctgccaggactgcgccgccagctgccccgccatcgccagaccccaggccctggacagcaccttctacctgggccagatgcccggcagcctggtgctgatcatcatcctgtgcagcgtgttcgccgtggtgaccatcctgctggtgggcttcagagtggcccccgccagagacaagagcaagatggtggaccccaagaagggcaccagcctgagcgacaagctgagcttcagcacccacaccctgctgggccagttcttccagggctggggcacctgggtggccagctggcccctgaccatcctggtgctgagcgtgatccccgtggtggccctggccgccggcctggtgttcaccgagctgaccaccgaccccgtggagctgtggagcgcccccaacagccaggccagaagcgagaaggccttccacgaccagcacttcggccccttcttcagaaccaaccaggtgatcctgaccgcccccaacagaagcagctacagatacgacagcctgctgctgggccccaagaacttcagcggcatcctggacctggacctgctgctggagctgctggagctgcaggagagactgagacacctgcaggtgtggagccccgaggcccagagaaacatcagcctgcaggacatctgctacgcccccctgaaccccgacaacaccagcctgtacgactgctgcatcaacagcctgctgcagtacttccagaacaacagaaccctgctgctgctgaccgccaaccagaccctgatgggccagaccagccaggtggactggaaggaccacttcctgtactgcgccaacgcccccctgaccttcaaggacggcaccgccctggccctgagctgcatggccgactacggcgcccccgtgttccccttcctggccatcggcggctacaagggcaaggactacagcgaggccgaggccctgatcatgaccttcagcctgaacaactaccccgccggcgaccccagactggcccaggccaagctgtgggaggaggccttcctggaggagatgagagccttccagagaagaatggccggcatgttccaggtgaccttcatggccgagagaagcctggaggacgagatcaacagaaccaccgccgaggacctgcccatcttcgccaccagctacatcgtgatcttcctgtacatcagcctggccctgggcagctacagcagctggagcagagtgatggtggacagcaaggccaccctgggcctgggcggcgtggccgtggtgctgggcgccgtgatggccgccatgggcttcttcagctacctgggcatcagaagcagcctggtgatcctgcaggtggtgcccttcctggtgctgagcgtgggcgccgacaacatcttcatcttcgtgctggagtaccagagactgcccagaagacccggcgagcccagagaggtgcacatcggcagagccctgggcagagtggcccccagcatgctgctgtgcagcctgagcgaggccatctgcttcttcctgggcgccctgacccccatgcccgccgtgagaaccttcgccctgaccagcggcctggccgtgatcctggacttcctgctgcagatgagcgccttcgtggccctgctgagcctggacagcaagagacaggaggccagcagactggacgtgtgctgctgcgtgaagccccaggagctgcccccccccggccagggcgagggcctgctgctgggcttcttccagaaggcctacgcccccttcctgctgcactggatcaccagaggcgtggtggtgggcgcccccgtgtacttcgtgaccaccctgggctacaacttcagcagcgaggccggcatgaacgccatctgcagcagcgccggctgcaacaacttcagcttcacccagaagatccagtacgccaccgagttccccgagcagagctacctggccatccccgccagcagctgggtggacgacttcatcgactggctgacccccagcagctgctgcagactgtacatcagcggccccaacaaggacaagttctgccccagcaccgtgaacagcctgaactgcctgaagaactgcatgagcatcaccatgggcagcgtgagacccagcgtggagcagttccacaagtacctgccctggttcctgaacgacagacccaacatcaagtgccccaagggcggcctggccgcctacagcaccagcgtgaacctgaccagcgacggccaggtgctggccagcagattcatggcctaccacaagcccctgaagaacagccaggactacaccgaggccctgagagccgccagagagctggccgccaacatcaccgccgacctgagaaaggtgcccggcaccgaccccgccttcgaggtgttcccctacaccatcaccaacgtgttctacgagcagtacctgaccatcctgcccgagggcctgttcatgctgagcctgtgcctggtgcccaccttcgccgtgagctgcctgctgctgggcctggacctgagaagcggcctgctgaacctgctgagcatcgtgatgatcctggtggacaccgtgggcttcatggccctgtggggcatcagctacaacgccgtgagcctgatcaacctggtgagcgccgtgggcatgagcgtggagttcgtgagccacatcaccagaagcttcgccatcagcaccaagcccacctggctggagagagccaaggaggccaccatcagcatgggcagcgccgtgttcgccggcgtggccatgaccaacctgcccggcatcctggtgctgggcctggccaaggcccagctgatccagatcttcttcttcagactgaacctgctgatcaccctgctgggcctgctgcacggcctggtgttcctgcccgtgatcctgagctacgtgggccccgacgtgaaccccgccctggccctggagcagaagagagccgaggaggccgtggccgccgtgatggtggccagctgccccaaccaccccagcagagtgagcaccgccgacaacatctacgtgaaccacagcttcgagggcagcatcaagggcgccggcgccatcagcaacttcctgcccaacaacggcagacagttctag

SEQ ID NO: 40801 - protein, 660 aa, Artificial Sequence
  derived and/or modified sequence
MEGDGSDPEPPDAGEDSKSENGENAPIYCICRKPDINCFMIGCDNCNEWFHGDCIRITEKMAKAIREWYCRECREKDPKLEIRYRHKKSRERDGNERDSSEPRDEGGGRKRPVPDPDLQRRAGSGTGVGAMLARGSASPHKSSPQPLVATPSQHHQQQQQQIKRSARMCGECEACRRTEDCGHCDFCRDMKKFGGPNKIRQKCRLRQCQLRARESYKYFPSSLSPVTPSESLPRPRRPLPTQQQPQPSQKLGRIREDEGAVASSTVKEPPEATATPEPLSDEDLPLDPDLYQDFCAGAFDDHGLPWMSDTEESPFLDPALRKRAVKVKHVKRREKKSEKKVMERKEERYKRHRQKQKHKDKWKHPERADAKDPASLPQCLGPGCVRPAQPSSKYCSDDCGMKLAANRIYEILPQRIQQWQQSPCIAEEHGKKLLERIRREQQSARTRLQEMERRFHELEAIILRAKQQAVREDEESNEGDSDDTDLQIFCVSCGHPINPRVALRHMERCYAKYESQTSFGSMYPTRIEGATRLFCDVYNPQSKTYCKRLQVLCPEHSRDPKVPADEVCGCPLVRDVFELTGDFCRLPKRQCNRHYCWEKLRRAEVDLERVRVWYKLDELFEQERNVRTAMTNRAGLLALMLHQTIQHDPLTTDLRSSADR

SEQ ID NO: 40802 - DNA, 1983 bp, Artificial Sequence
  derived and/or modified sequence
atggaaggagatggctcagatccagaaccccctgacgctggggaggactctaaaagcgagaatggagagaatgcccctatttactgtatatgccgtaagcccgacatcaattgttttatgatcggctgcgataattgcaacgaatggtttcatggtgattgcatcagaattactgagaagatggctaaggcgatccgggaatggtactgccgagagtgtagagagaaggacccaaagttggagattcgctaccgtcataaaaagtccagagagcgcgacggaaacgagcgggacagcagtgaacctagagacgaaggtggcggccgcaagcgccccgtgcccgatcccgacttacagcggcgcgccggctccgggacgggagttggagccatgctggctagagggagcgcttctccacacaagagtagccctcagccactcgttgcaaccccctctcagcatcaccagcagcagcagcagcagattaagagatcagcgaggatgtgtggcgaatgtgaagcgtgccggcgcaccgaggattgcgggcactgcgacttctgtcgtgacatgaagaaattcggtggaccaaataagatccgccagaagtgccggctgagacagtgccaactgagagcaagagagtcttacaaatattttccgtcaagcttgtctcccgtcaccccttccgaatccctccctcggccccgcagaccactgccaacccagcagcagccccagccgtctcagaaactgggccgcattagagaagatgagggagcggtagctagtagcacggtgaaagagccgccagaagctacggctactccagaacccctcagcgacgaagatttgcccctggaccctgacctgtaccaggatttttgcgccggtgccttcgatgatcacggcttgccctggatgtctgacaccgaagagagtcccttccttgatcccgctctgcgaaaacgcgcggtgaaagtaaaacatgtcaaaaggcgggaaaaaaaaagtgagaaaaaggtcatggaaagaaaagaagaacgttacaaaaggcataggcagaaacaaaaacacaaggataaatggaagcatccagagcgggccgatgcaaaagaccccgccagcttaccacagtgtctcggaccggggtgtgtcagacccgctcagccttcctccaaatactgctcagatgactgtgggatgaagctggcagcaaaccgcatctatgagattttaccacagcgcatccaacagtggcagcagagcccatgcatagcggaagaacatgggaaaaagttactcgagcgaatcagacgggaacagcaaagcgcacggacccgcctccaggaaatggaacgtaggttccacgaacttgaggcgatcatactgagagctaagcagcaggccgtgagagaagatgaagagtctaacgaaggggatagtgacgacacggatctgcagatcttctgcgtttcctgcggccatccaattaatccgcgggtcgcgttaaggcatatggagaggtgctacgctaaatacgaatcccagactagttttggaagcatgtatccgaccaggatcgaaggcgcaacccgcctcttctgtgatgtctacaaccctcaatccaaaacgtactgcaagcggcttcaggtcctgtgccccgagcattcacgcgatcctaaggtgccagccgatgaggtgtgtggctgtcctctggtgcgggacgtatttgagctgactggagatttttgccggctgccaaaacgacaatgtaacaggcattattgttgggagaaattgcggagagcagaggtggacctggaacgggtgagggtctggtacaagttggatgagctgtttgaacaggagcgcaatgtgcggaccgccatgacgaatagggcgggtcttctggcgttgatgctgcatcagacaattcaacacgatccgttgaccactgatttgagaagctcggccgatcgctag

SEQ ID NO: 40803 - DNA, 1983 bp, Artificial Sequence
  derived and/or modified sequence
atggagggagatggcagtgaccctgagcccccagatgctggggaggacagcaagtcagaaaatggagaaaatgcccccatctactgcatctgcaggaagccagacatcaactgcttcatgattggctgtgacaactgcaatgagtggttccatggagactgcatccgcatcacagagaagatggccaaggccatccgggagtggtactgccgggagtgccgggagaaggaccccaagctggagatccgctaccgccacaagaagagccgggagagagatggaaatgaaagagacagcagcgagcccagagatgagggcggcggcaggaagaggcctgtgcctgaccctgacctgcagaggcgggccggcagcggcaccggggtgggcgccatgctggcccggggcagcgccagcccccacaagagcagcccccagcccctggtggccacccccagccagcaccaccagcagcagcagcagcagatcaagaggtctgccaggatgtgtggagaatgtgaggcctgcagaagaacagaggactgtggccactgtgacttctgccgggacatgaagaagtttggaggccccaacaagatccggcagaagtgccgcctgcggcagtgccagctgcgggcccgggagagctacaagtacttccccagcagcctgagccctgtgaccccatctgagagcctgccccggccccggcggcccctgcccacccagcagcagccccagcccagccagaagctgggccgcatccgggaggatgaaggagctgtggccagcagcacagtgaaggagcccccagaggccacagccaccccagagcccctgagtgatgaggacctgcccctggaccctgacctgtaccaggacttctgtgccggggcctttgatgaccacggcctgccctggatgtctgacacagaggagagccccttcctggaccctgccctgaggaagagagctgtgaaggtgaagcacgtgaagaggcgggagaagaagtctgagaagaaggtgatggagaggaaggaggagcgctacaagaggcaccggcagaagcagaagcacaaggacaagtggaagcaccctgagcgggcagatgccaaggaccctgccagcctgccccagtgcctgggccctggctgtgtgcggcctgcccagcccagcagcaagtactgcagtgatgactgtggcatgaagctggccgccaaccgcatctatgagatcctgccccagaggatccagcagtggcagcagagcccctgcatcgccgaggagcacggcaagaagctgctggagcgcatccggcgggagcagcagagcgcccggacccggctgcaggagatggagcggcgcttccacgagctggaggccatcatcctgcgggccaagcagcaggccgtgcgggaggatgaggagagcaatgaaggagacagtgatgacacagacctgcagatcttctgtgtgtcctgtggccaccccatcaacccccgggtggccctgcggcacatggagcgctgctacgccaagtatgagagccagaccagctttggctccatgtaccccaccagaattgaaggagccaccaggctcttctgtgatgtgtacaacccccagagcaagacctactgcaagaggctgcaggtgctgtgcccagagcacagccgggaccccaaggtgcctgcagatgaggtgtgtggctgccccctggtgagagatgtgtttgagctgaccggggacttctgccgcctgcccaagaggcagtgcaacagacactactgctgggagaagctgcggcgggcagaggtggacctggagcgggtgcgggtgtggtacaagctggatgagctgtttgagcaggagagaaatgtgaggacagccatgaccaacagagctggcctgctggccctgatgctgcaccagaccatccagcacgaccccctgaccacagacctgcggagcagcgctgacagatag

SEQ ID NO: 40804 - DNA, 1983 bp, Artificial Sequence
  derived and/or modified sequence
atggagggcgacggcagcgaccccgagccccccgacgccggcgaggattccaaaagcgagaacggcgaaaacgccccgatatactgtatttgtcgcaagccggacataaattgctttatgatcggatgtgacaattgcaatgagtggtttcacggggattgtataaggattactgagaaaatggccaaggcgatcagagaatggtattgtcgggaatgtcgagagaaagaccctaagttggaaattagatacaggcataagaagtctagagaacgagatggtaatgagcgggactcttccgagcctcgtgacgaaggtggaggccggaaaagaccagtccccgacccagacttacagaggcgggccggaagtgggaccggcgtgggggcaatgttggcacgcggaagcgcgtcgccacacaaaagcagtccccaacctcttgtcgccacacctagtcaacaccatcagcagcagcagcaacaaatcaaacgttctgcccgcatgtgcggcgagtgcgaagcctgtagaaggaccgaagactgtggccactgtgacttttgccgggacatgaaaaagttcggggggcctaataagatccggcagaaatgtcgcctccggcagtgccagctcagggcacgcgaatcttacaaatactttccaagttccctgtctcctgtgacaccttccgagtcactgccccgcccacgccggcctctgcctacacagcaacagcctcagccatcacagaaattagggcgcattcgggaagatgagggagccgttgccagctccaccgtgaaggagcctcctgaggcaacggctaccccagagcccctaagcgacgaggatctcccactggaccctgacctttatcaggacttttgtgcaggagctttcgacgaccacggacttccatggatgagcgacacggaggaatctccattcctcgacccagcgctgcggaaacgagctgtgaaggtgaaacacgtgaagaggcgcgagaagaagtctgagaagaaggttatggagaggaaagaggagcggtacaaaagacacaggcaaaagcagaagcataaggacaagtggaaacaccccgaaagagcggacgccaaagaccccgcatctctgccacagtgtctcggtccgggttgtgtcaggcctgcgcagccttcttcaaagtattgttccgacgattgtggaatgaaattggctgcaaatcgcatctatgagatactaccccagagaatccagcagtggcaacagtccccctgcattgccgaagagcatggcaagaagttactggagagaatccgcagagagcaacagtccgccaggacgcgtttgcaggagatggaacggaggtttcacgagctggaagctataattttgagggctaagcaacaggccgtgagagaggacgaggagagcaacgaaggagattcggatgatacagacctgcagatcttttgcgtgtcgtgcggtcaccctatcaatccacgggtggcactgcgacatatggagaggtgctacgcgaagtacgagtctcagacctccttcggtagtatgtatcctacacggatcgaaggagctacccggcttttctgtgacgtgtacaatccgcagagcaagacatactgtaagagacttcaggtgctctgtcccgaacacagccgagacccaaaagtgcctgctgacgaggtctgtggttgccccctcgtgcgcgacgttttcgagctgaccggggacttttgccgactgcctaagagacagtgtaaccgacactactgctgggaaaagcttagacgggcggaagtagatctcgaacgtgtccgcgtgtggtacaagttggacgaacttttcgagcaggagcgcaacgtgcggaccgcaatgacaaacagagccggcctcttggccctcatgttgcatcagaccatacagcacgaccccctgacgacagatttgcgctctagcgcagaccggtag

SEQ ID NO: 40805 - DNA, 1983 bp, Artificial Sequence
  derived and/or modified sequence
atggaaggcgacgggagtgacccagagcctcctgatgccggagaagactctaagagtgagaacggcgagaatgctcccatatactgtatttgccgcaagcccgacattaactgctttatgatcggatgcgacaattgtaacgagtggttccacggcgattgtatcagaatcacagagaaaatggctaaggccattcgcgagtggtattgtcgcgagtgccgtgaaaaggaccccaagctggaaatacgctaccgacataagaaaagccgcgaaagagatggcaacgaacgggacagcagcgaaccgagggatgaaggcggtggaagaaagaggcccgtgcccgaccctgatcttcagaggcgcgcaggtagcgggaccggcgtcggcgctatgctggctcggggatctgcaagcccgcacaaaagctccccgcaacccctcgttgcaactcccagtcagcaccaccagcaacagcagcagcagataaagcgcagcgccagaatgtgtggggagtgcgaggcatgtcggagaacagaggactgcggacattgtgatttttgcagagacatgaagaaattcggaggcccaaataagattagacagaagtgccggctgagacagtgtcagctaagagccagggaatcctacaaatattttccatctagccttagccccgtcacgccgtcagaaagtcttccacggcctcggaggcctctacccacacagcagcagccccagccttcccaaaagctgggcaggattcgggaggacgaaggggctgtagcctcatctactgtaaaagagccacccgaagcaacagctacacctgaaccgctgtcagatgaggacctgccgttagatccagatctgtatcaggatttctgtgccggtgcctttgacgatcatggcctgccctggatgtctgacaccgaggagtccccattcctcgatcctgctttgagaaagcgagcagtcaaggtcaagcatgtaaagagaagggagaaaaagagtgaaaaaaaagtgatggaaagaaaagaggaacggtacaagcggcaccggcagaaacagaaacacaaggacaagtggaaacatcccgagcgggctgatgctaaagatcccgcaagcctgcctcagtgcctcggccctggatgcgtgcgcccagcccagcctagttctaagtattgtagtgacgactgtggtatgaagctggctgcgaaccgaatctacgagatactgccccagagaatccagcagtggcagcagtctccttgtattgcagaggagcatggcaaaaagctgttagaacgcattcggagagaacagcagtccgcaaggactcggctgcaggaaatggagagaagattccacgaactggaagccattatccttagggcaaaacagcaagcggtaagggaggacgaggaatctaacgagggggacagcgatgatacagatttacagatattttgcgtgtcctgtggtcatcccatcaaccctcgtgtggccttgcggcacatggaacgctgttacgcaaaatatgagtctcaaacatctttcggctccatgtatccaacccggattgagggggctacacgccttttctgtgacgtgtacaatcctcagagcaagacatactgcaagcgactgcaggtgctgtgccccgaacatagccgcgacccaaaagtgcccgctgacgaggtgtgtgggtgtccgctggtgagagacgtgttcgagcttactggagatttttgccgcctgcctaagcggcaatgcaatcgccactactgctgggaaaagctcagacgagctgaggtggacttagaaagggtgcgggtgtggtataagttggacgaactcttcgagcaggaaagaaacgtcagaacggcaatgaccaacagggccggactgcttgctctgatgctgcatcagacaattcagcatgatcctctcaccaccgacctgcggagtagtgccgaccggtag

SEQ ID NO: 40806 - DNA, 2964 bp, Artificial Sequence
  derived and/or modified sequence
ggaaagagtggtggcaggtgaagtcggagacgacagaggaactggtttcctccgccccgcaaggcacacagcctgccgacgccccattaatacatgtggaaggggaaagagactgaatggaggaatgaatacaacttgatccaggtcgtgcttcggaagcggtcactttacctgtgaacctctctgcctgacaaacgggcaatgtacggaatcaaccaccaagatggcggcgcccgtgaagaatccgcaattaggtcgccgtcatatgtcgcctaggaacgtacggaattcgacccacgtacggaatcggattccaagatgacggcatctatgaggaagtcacgcagtaggtgcagccatgttgcctgtacgtcgaggccgtacaagcagccgccgtacggactctactgacaaggtggcggcgccctcgggaaagccacattagagcgcggccatgttcccggcgaacatatggattcggccaccatacggatacgataagcaagatggcggcgcctgaggggtcttgggggctctaggccggccacctactggtttgcagcggagacgacgcatggggcctgcgcaataggagtacgctgcctgggaggcgtgactagaagcggaagtagttgtgggcgcctttgcaaccgcctgggacgccgccgagtggtctgtgcaggttcgcgggtcgctggcgggggtcgtgagggagtgcgccgggagcggagatatggagggagatggttcagacccagagcctccagatgccggggaggacagcaagtccgagaatggggagaatgcgcccatctactgcatctgccgcaaaccggacatcaactgcttcatgatcgggtgtgacaactgcaatgagtggttccatggggactgcatccggatcactgagaagatggccaaggccatccgggagtggtactgtcgggagtgcagagagaaagaccccaagctagagattcgctatcggcacaagaagtcacgggagcgggatggcaatgagcgggacagcagtgagccccgggatgagggtggagggcgcaagaggcctgtccctgatccagacctgcagcgccgggcagggtcagggacaggggttggggccatgcttgctcggggctctgcttcgccccacaaatcctctccgcagcccttggtggccacacccagccagcatcaccagcagcagcagcagcagatcaaacggtcagcccgcatgtgtggtgagtgtgaggcatgtcggcgcactgaggactgtggtcactgtgatttctgtcgggacatgaagaagttcgggggccccaacaagatccggcagaagtgccggctgcgccagtgccagctgcgggcccgggaatcgtacaagtacttcccttcctcgctctcaccagtgacgccctcagagtccctgccaaggccccgccggccactgcccacccaacagcagccacagccatcacagaagttagggcgcatccgtgaagatgagggggcagtggcgtcatcaacagtcaaggagcctcctgaggctacagccacacctgagccactctcagatgaggacctacctctggatcctgacctgtatcaggacttctgtgcaggggcctttgatgaccatggcctgccctggatgagcgacacagaagagtccccattcctggaccccgcgctgcggaagagggcagtgaaagtgaagcatgtgaagcgtcgggagaagaagtctgagaagaaggtgatggagaggaaggaggagcgatacaagcggcatcggcagaagcagaagcacaaggataaatggaaacacccagagagggctgatgccaaggaccctgcgtcactgccccagtgcctggggcccggctgtgtgcgccccgcccagcccagctccaagtattgctcagatgactgtggcatgaagctggcagccaaccgcatctacgagatcctcccccagcgcatccagcagtggcagcagagcccttgcattgctgaagagcacggcaagaagctgctcgaacgcattcgccgagagcagcagagtgcccgcactcgccttcaggaaatggaacgccgattccatgagcttgaggccatcattctacgtgccaagcagcaggctgtgcgcgaggatgaggagagcaacgagggtgacagtgatgacacagacctgcagatcttctgtgtttcctgtgggcaccccatcaacccacgtgttgccttgcgccacatggagcgctgctacgccaagtatgagagccagacgtcctttgggtccatgtaccccacacgcattgaaggggccacacgactcttctgtgatgtgtataatcctcagagcaaaacatactgtaagcggctccaggtgctgtgccccgagcactcacgggaccccaaagtgccagctgacgaggtatgcgggtgcccccttgtacgtgatgtctttgagctcacgggtgacttctgccgcctgcccaagcgccagtgcaatcgccattactgctgggagaagctgcggcgtgcggaagtggacttggagcgcgtgcgtgtgtggtacaagctggacgagctgtttgagcaggagcgcaatgtgcgcacagccatgacaaaccgcgcgggattgctggccctgatgctgcaccagacgatccagcacgatcccctcactaccgacctgcgctccagtgccgaccgctgagcctcctggcccggaccccttacaccctgcattccagatgggggagccgcccggtgcccgtgtgtccgttcctccactcatctgtttctccggttctccctgtgcccatccaccggttgaccgcccatctgcctttatcagagggactgtccccgtcgacatgttcagtgcctggtggggctgcggagtccactcatccttgcctcctctccctgggttttgttaataaaattttgaagaaaccaagg

SEQ ID NO: 40807 - DNA, 1983 bp, Artificial Sequence
  derived and/or modified sequence
atggagggcgacggcagcgaccccgagccccccgacgccggcgaggacagcaagagcgagaacggcgagaacgcccccatctactgcatctgcagaaagcccgacatcaactgcttcatgatcggctgcgacaactgcaacgagtggttccacggcgactgcatcagaatcaccgagaagatggccaaggccatcagagagtggtactgcagagagtgcagagagaaggaccccaagctggagatcagatacagacacaagaagagcagagagagagacggcaacgagagagacagcagcgagcccagagacgagggcggcggcagaaagagacccgtgcccgaccccgacctgcagagaagagccggcagcggcaccggcgtgggcgccatgctggccagaggcagcgccagcccccacaagagcagcccccagcccctggtggccacccccagccagcaccaccagcagcagcagcagcagatcaagagaagcgccagaatgtgcggcgagtgcgaggcctgcagaagaaccgaggactgcggccactgcgacttctgcagagacatgaagaagttcggcggccccaacaagatcagacagaagtgcagactgagacagtgccagctgagagccagagagagctacaagtacttccccagcagcctgagccccgtgacccccagcgagagcctgcccagacccagaagacccctgcccacccagcagcagccccagcccagccagaagctgggcagaatcagagaggacgagggcgccgtggccagcagcaccgtgaaggagccccccgaggccaccgccacccccgagcccctgagcgacgaggacctgcccctggaccccgacctgtaccaggacttctgcgccggcgccttcgacgaccacggcctgccctggatgagcgacaccgaggagagccccttcctggaccccgccctgagaaagagagccgtgaaggtgaagcacgtgaagagaagagagaagaagagcgagaagaaggtgatggagagaaaggaggagagatacaagagacacagacagaagcagaagcacaaggacaagtggaagcaccccgagagagccgacgccaaggaccccgccagcctgccccagtgcctgggccccggctgcgtgagacccgcccagcccagcagcaagtactgcagcgacgactgcggcatgaagctggccgccaacagaatctacgagatcctgccccagagaatccagcagtggcagcagagcccctgcatcgccgaggagcacggcaagaagctgctggagagaatcagaagagagcagcagagcgccagaaccagactgcaggagatggagagaagattccacgagctggaggccatcatcctgagagccaagcagcaggccgtgagagaggacgaggagagcaacgagggcgacagcgacgacaccgacctgcagatcttctgcgtgagctgcggccaccccatcaaccccagagtggccctgagacacatggagagatgctacgccaagtacgagagccagaccagcttcggcagcatgtaccccaccagaatcgagggcgccaccagactgttctgcgacgtgtacaacccccagagcaagacctactgcaagagactgcaggtgctgtgccccgagcacagcagagaccccaaggtgcccgccgacgaggtgtgcggctgccccctggtgagagacgtgttcgagctgaccggcgacttctgcagactgcccaagagacagtgcaacagacactactgctgggagaagctgagaagagccgaggtggacctggagagagtgagagtgtggtacaagctggacgagctgttcgagcaggagagaaacgtgagaaccgccatgaccaacagagccggcctgctggccctgatgctgcaccagaccatccagcacgaccccctgaccaccgacctgagaagcagcgccgacagatag

SEQ ID NO: 40808 - protein, 624 aa, Artificial Sequence
  derived and/or modified sequence
MASTVEGGDTALLPEFPRGPLDAYRARASFSWKELALFTEGEGMLRFKKTIFSALENDPLFARSPGADLSLEKYRELNFLRCKRIFEYDFLSVEDMFKSPLKVPALIQCLGMYDSSLAAKYLLHSLVFGSAVYSSGSERHLTYIQKIFRMEIFGCFALTELSHGSNTKAIRTTAHYDPATEEFIIHSPDFEAAKFWVGNMGKTATHAVVFAKLCVPGDQCHGLHPFIVQIRDPKTLLPMPGVMVGDIGKKLGQNGLDNGFAMFHKVRVPRQSLLNRMGDVTPEGTYVSPFKDVRQRFGASLGSLSSGRVSIVSLAILNLKLAVAIALRFSATRRQFGPTEEEEIPVLEYPMQQWRLLPYLAAVYALDHFSKSLFLDLVELQRGLASGDRSARQAELGREIHALASASKPLASWTTQQGIQECREACGGHGYLAMNRLGVLRDDNDPNCTYEGDNNILLQQTSNYLLGLLAHQVHDGACFRSPLKSVDFLDAYPGILDQKFEVSSVADCLDSAVALAAYKWLVCYLLRETYQKLNQEKRSGSSDFEARNKCQVSHGRPLALAFVELTVVQRFHEHVHQPSVPPSLRAVLGRLSALYALWSLSRHAALLYRAERRCSCPGRRDRSS

SEQ ID NO: 40809 - DNA, 1875 bp, Artificial Sequence
  derived and/or modified sequence
atggcctctactgtcgagggcggtgacaccgccctccttcctgagttccctcgaggccccctagacgcataccgggccagagccagcttttcctggaaagaactggccctgttcaccgaaggagagggaatgctgcgattcaagaaaacaatctttagtgcacttgagaacgaccccctcttcgcacgcagccctggggccgacctttcactggagaagtatcgggagctgaacttcctccgctgcaaacggatcttcgaatatgactttctgtctgttgaggacatgtttaagtcaccactgaaggtaccagctcttatccaatgtttgggcatgtacgactcttccctggctgcgaaatacctcctgcacagcctggtgtttggctccgcggtatattcctccggaagtgaacgccacctcacatatatccagaaaatttttaggatggagattttcggatgctttgccctgacggagttgtctcatggatccaacacaaaggctattcgtacgaccgcacattatgaccccgccacagaggaattcatcatacatagcccagacttcgaggctgcgaaattctgggttggtaacatgggaaaaacagctacccacgccgtggtgttcgccaagctctgtgtaccaggcgaccagtgtcacggtctacacccgttcatcgtgcagatccgggatcctaagaccctccttcctatgccaggggttatggttggagatatcggcaagaagctaggacagaacgggttagacaatgggttcgctatgtttcacaaggtgagagtgcccaggcagtctctgctgaataggatgggtgacgtcacgcccgaggggacctacgtttcaccttttaaggatgtccggcagaggtttggagcatctctcggaagtttatcctcaggtcgagtgtccattgtctccctggccatcctgaatttgaagctcgcagtcgccatagctctgcgcttctcagcaaccagaagacagttcggccctacagaggaggaagaaatccctgtgctggagtatcctatgcagcagtggcggctcctaccatatctcgccgctgtctacgcactagatcacttcagtaagagtttattcctggatctcgtggaactgcagcgtggtctggcttctggagatcggtccgccaggcaggccgagctcggtcgggagatccacgccctggcaagcgctagcaaacctctggcctcgtggaccactcagcagggcatccaggagtgccgggaagcttgcgggggacacggctatttggcgatgaaccgtctcggggtccttcgcgacgataacgaccctaattgtacctatgagggagataataatatcctgttgcagcagacaagcaattaccttttggggcttctggctcatcaagtgcacgatggtgcctgcttcaggtcccccttgaagtctgtggacttcttggacgcctaccccggaatactggaccagaaattcgaggtgagctccgttgcagactgtctagattccgcggtcgccctggccgcgtacaagtggctcgtgtgctacttgttgagggaaacctatcagaaattaaaccaggagaagaggtccgggtcctcggactttgaagcccggaataaatgccaggtgtcgcacggacggccgctcgccctcgcattcgtggagcttaccgtagtgcaacgatttcatgagcacgttcatcagccctctgtgccaccttcactacgggcggtgctgggtaggctgtcagccctctacgctctatggtccctgagcagacacgccgcgctcctatatcgggccgaaagacgctgttcctgtcccggcagacgggacaggtcatcttag

SEQ ID NO: 40810 - DNA, 1875 bp, Artificial Sequence
  derived and/or modified sequence
atggccagcacagtggagggcggggacacagccctgctgcctgagttcccccggggccccctggatgcctaccgggcccgggccagcttctcctggaaggagctggccctcttcacagaaggagagggcatgctgcgcttcaagaagaccatcttcagcgccctggagaatgaccccctgtttgcccggagccctggagctgacctgagcctggagaagtaccgggagctgaacttcctgcgctgcaagaggatctttgaatatgacttcctgtctgtggaggacatgttcaagagccccctgaaggtgcctgccctgatccagtgcctgggcatgtatgacagcagcctggccgccaagtacctgctgcacagcctggtgtttggcagcgctgtgtacagcagcggcagcgagcggcacctgacctacatccagaagatcttcaggatggagatcttcggctgctttgccctgacagagctgagccacggcagcaacaccaaggccatccgcaccacagcccactatgaccctgccacagaggagttcatcatccacagcccagactttgaggccgccaagttctgggtgggcaacatgggcaagacagccacccatgctgtggtgtttgccaagctgtgtgtgcctggggaccagtgccacggcctgcaccccttcatcgtgcagatccgggaccccaagaccctgctgcccatgcctggggtgatggtgggggacatcggcaagaagctgggccagaatggcctggacaatggatttgccatgttccacaaggtgcgggtgccccggcagagcctgctgaacaggatgggagatgtgaccccagagggcacctacgtgagccccttcaaggatgtgcggcagagatttggagccagcctgggcagcctgagcagcggccgggtgtccatcgtgtccctggccatcctgaacctgaagctggccgtggccatcgccctgcgcttcagcgccacccggcggcagtttggccccacagaggaggaggagatccctgtgctggagtaccccatgcagcagtggaggctgctgccctacctggccgctgtgtatgccctggaccacttcagcaagagcctcttcctggacctggtggagctgcagaggggcctggccagcggggacagaagtgcccggcaggccgagctgggccgggagatccacgccctggccagcgccagcaagcccctggcctcctggaccacccagcagggcatccaggagtgccgggaggcctgtggcggccacggctacctggccatgaaccggctgggcgtgctgagagatgacaatgaccccaactgcacctatgaaggagacaacaacatcctgctgcagcagaccagcaactacctgctgggcctgctggcccaccaggtgcatgatggagcctgcttccgcagccccctgaagtctgtggacttcctggatgcctacccaggcatcctggaccagaagtttgaggtgtcctctgtggccgactgcctggacagcgctgtggccctggccgcctacaagtggctggtgtgctacctgctgcgggagacctaccagaagctgaaccaggagaagaggagcggcagcagtgactttgaggccaggaacaagtgccaggtgagccacggccggcccctggccctggcctttgtggagctgactgtggtgcagcgcttccacgagcacgtgcaccagcccagcgtgccccccagcctgcgggctgtgctgggccgcctgagcgccctgtatgccctgtggagcctgagcagacatgctgccctgctgtacagagctgagcggcgctgcagctgccctggaagaagagacaggagcagctag

SEQ ID NO: 40811 - DNA, 1875 bp, Artificial Sequence
  derived and/or modified sequence
atggccagcaccgtggagggcggcgacaccgccctgctgcccgagttcccgaggggtcctctggacgcttaccgcgcaagggcctcatttagttggaaggaattggccctgtttacggaaggtgaaggtatgctccgtttcaaaaagacaattttttcagcactcgagaacgacccactcttcgctagaagtcccggggcagacctcagcctggaaaagtatcgcgagctgaacttcctccggtgtaagagaatctttgagtatgacttccttagcgtggaggatatgttcaagagcccattgaaagtgccagccctgattcagtgtttagggatgtacgattcctcccttgccgcaaaataccttcttcactctttggtgttcggctccgcagtttatagcagcggctcagaacgccatcttacatatattcagaagatcttccggatggaaattttcgggtgctttgcactcaccgaattgtcccatggttcaaacaccaaggctatcagaacgactgcccactacgatcccgcaaccgaggagtttatcatccactctcctgacttcgaggccgcgaagttttgggtgggcaatatggggaagacggccactcatgctgtggtgtttgccaagctgtgcgtcccaggtgaccagtgtcatgggctacacccatttatcgtgcaaatccgggatccaaagaccctgcttcccatgcctggtgtgatggttggagatataggaaagaagctgggccaaaacggtcttgacaacggctttgctatgttccataaggtgagggtccctaggcagagtcttctgaaccgaatgggcgacgtgacacctgaaggaacatatgtttcaccctttaaagatgtgagacagcgattcggagcatccctgggaagcttgagctccgggcgcgtgagcatcgtgtcgctggctattttgaacctgaagctcgctgtcgcaattgcgctgcggttctctgctacacgccggcagttcgggccaacagaagaggaagaaataccagtgctggaatacccaatgcagcagtggaggctcttaccttatctagccgccgtgtacgccctggatcacttctctaagtctctgtttttggatctggtggaactccagaggggcctggccagcggggaccgaagcgcacgccaggctgaactgggccgcgagatccatgccctggcatccgcctctaaacctctggccagttggacgacgcagcagggaattcaggagtgcagggaagcctgcggcggccatggctatctagccatgaataggctgggcgtcctcagagatgacaatgatcccaactgcacatatgagggggacaataacatacttttgcagcagacatctaactacctcctgggactgctggcccaccaggtacatgatggggcgtgtttccgtagtcccctcaagtctgtcgacttcctggacgcctacccaggaatcttagaccagaaattcgaagtgtcatcggtcgctgattgtttagattcagcagttgccctagccgcctataaatggctggtgtgctatctgctgcgtgaaacctatcagaaattaaatcaagaaaagcggtctggtagcagcgactttgaagcccggaataagtgtcaagtgagccacggccggcctctggcattggcattcgtggagttgaccgtggtgcagcgtttccacgagcatgttcatcaaccatcagtcccccccagcctgcgcgccgtgctgggtcggttatctgctctgtacgcattgtggagcctgagccgtcacgccgctctgctttaccgagccgagagaagatgctcttgtccggggcgcagagacagaagcagttag

SEQ ID NO: 40812 - DNA, 1875 bp, Artificial Sequence
  derived and/or modified sequence
atggccagcacggttgaaggtggggataccgcgctgttaccagagttccctagggggccactggatgcataccgcgcaagagcctcattcagctggaaagaactggcacttttcactgagggagaaggaatgttgagattcaaaaagaccatcttttctgcactggaaaatgatcctttgtttgcaagatctccaggagccgatctttccctggagaaatacagagagctcaattttctccgctgcaagcgaattttcgaatacgattttctttccgtggaagacatgttcaaaagccctcttaaggtgcctgcccttatccagtgcctcggcatgtatgactcctctctggcagcgaagtatctgctccactcgctcgtgtttggaagtgctgtttacagtagcggctccgagaggcacttgacctacattcagaagatattccggatggaaatcttcggctgttttgcccttactgaactgtcgcacggaagcaataccaaagctattcggaccacagcccactatgatcccgctaccgaggaattcatcattcattcaccagatttcgaggccgcaaagttttgggtggggaacatgggaaaaactgccacacacgctgttgtgtttgctaagctctgtgtgcccggtgaccaatgccacgggcttcaccctttcatcgtgcagatccgcgatccaaagaccctcctgcctatgccaggcgtgatggtcggtgacatcggaaaaaaactaggacaaaacggactggataatgggttcgctatgtttcacaaagtgcgggttcctcgccagtcattgctgaatcgtatgggcgatgtaactccggagggaacatacgtctctccctttaaggatgttcgccagagatttggcgcttctcttggaagtttatcctctggacgagtaagtatagtgagcctggcgatcctcaacctgaagctggctgttgccatcgcactccggttctcagccacacggagacagttcggacccaccgaagaagaagagattccagtcctggagtatcccatgcagcagtggaggctcctgccctatctggcagccgtgtacgccctggatcacttttctaagagtctatttttggacctggtggagcttcagcggggtttagccagtggcgatcgttctgctcggcaagccgagctgggtcgagagatccacgccctggcctctgctagcaaacctttggcaagctggaccacgcaacagggaatacaagagtgtagggaagcctgcggcggacacgggtatttggctatgaaccgattaggcgtgttacgagatgataatgatcccaactgcacatatgaaggtgacaataatatcctgctacagcagacctcaaattatcttctgggacttctcgctcatcaggtacatgatggcgcttgcttcagatcacctttaaagtccgttgatttcttggatgcttaccccggaatcctggatcagaaattcgaggtcagctctgtcgctgattgcttagacagcgcagttgccctggcagcttataaatggttagtctgctacctgttacgggagacttatcaaaagctgaaccaagaaaaaaggtccgggtcttcagacttcgaagctagaaataagtgccaggttagtcacggcaggcctcttgccctggccttcgttgagttaactgtcgtccaacggttccacgaacatgttcaccaaccctccgtaccgcctagcctgcgagccgttctgggcaggctgtctgccctttacgccctgtggagtctatcccgccacgcagcccttttgtacagagctgaaaggaggtgtagctgccctggaaggcgggacagaagcagctag

SEQ ID NO: 40813 - DNA, 1875 bp, Artificial Sequence
  derived and/or modified sequence
atggccagcaccgtggagggcggcgacaccgccctgctgcccgagttccccagaggccccctggacgcctacagagccagagccagcttcagctggaaggagctggccctgttcaccgagggcgagggcatgctgagattcaagaagaccatcttcagcgccctggagaacgaccccctgttcgccagaagccccggcgccgacctgagcctggagaagtacagagagctgaacttcctgagatgcaagagaatcttcgagtacgacttcctgagcgtggaggacatgttcaagagccccctgaaggtgcccgccctgatccagtgcctgggcatgtacgacagcagcctggccgccaagtacctgctgcacagcctggtgttcggcagcgccgtgtacagcagcggcagcgagagacacctgacctacatccagaagatcttcagaatggagatcttcggctgcttcgccctgaccgagctgagccacggcagcaacaccaaggccatcagaaccaccgcccactacgaccccgccaccgaggagttcatcatccacagccccgacttcgaggccgccaagttctgggtgggcaacatgggcaagaccgccacccacgccgtggtgttcgccaagctgtgcgtgcccggcgaccagtgccacggcctgcaccccttcatcgtgcagatcagagaccccaagaccctgctgcccatgcccggcgtgatggtgggcgacatcggcaagaagctgggccagaacggcctggacaacggcttcgccatgttccacaaggtgagagtgcccagacagagcctgctgaacagaatgggcgacgtgacccccgagggcacctacgtgagccccttcaaggacgtgagacagagattcggcgccagcctgggcagcctgagcagcggcagagtgagcatcgtgagcctggccatcctgaacctgaagctggccgtggccatcgccctgagattcagcgccaccagaagacagttcggccccaccgaggaggaggagatccccgtgctggagtaccccatgcagcagtggagactgctgccctacctggccgccgtgtacgccctggaccacttcagcaagagcctgttcctggacctggtggagctgcagagaggcctggccagcggcgacagaagcgccagacaggccgagctgggcagagagatccacgccctggccagcgccagcaagcccctggccagctggaccacccagcagggcatccaggagtgcagagaggcctgcggcggccacggctacctggccatgaacagactgggcgtgctgagagacgacaacgaccccaactgcacctacgagggcgacaacaacatcctgctgcagcagaccagcaactacctgctgggcctgctggcccaccaggtgcacgacggcgcctgcttcagaagccccctgaagagcgtggacttcctggacgcctaccccggcatcctggaccagaagttcgaggtgagcagcgtggccgactgcctggacagcgccgtggccctggccgcctacaagtggctggtgtgctacctgctgagagagacctaccagaagctgaaccaggagaagagaagcggcagcagcgacttcgaggccagaaacaagtgccaggtgagccacggcagacccctggccctggccttcgtggagctgaccgtggtgcagagattccacgagcacgtgcaccagcccagcgtgccccccagcctgagagccgtgctgggcagactgagcgccctgtacgccctgtggagcctgagcagacacgccgccctgctgtacagagccgagagaagatgcagctgccccggcagaagagacagaagcagctag

SEQ ID NO: 40814 - DNA, 2374 bp, Artificial Sequence
  derived and/or modified sequence
aaatgagaatggcgccgctggagatcctttcctgcttttggtttccctggcaggggttgaactgtggagtgtgtgggctcttatcacgcgatggcatccactgtggaaggaggcgacacagctctgctcccagaattccccagggggcccctcgatgcctaccgagcaagagcgtccttcagctggaaggagctggcgctgttcacggaaggggagggcatgctccgctttaagaaaaccatcttctcagctcttgagaatgaccctcttttcgctcgttcccctggagccgatctgtccttggagaagtatcgcgagctgaacttccttcgatgcaagcggatcttcgagtatgacttcctcagtgtcgaagacatgttcaagagccctctgaaggtccccgccttgattcagtgcctgggcatgtatgactcttctctggctgccaagtacctcctccatagcttggtttttggatcagcagtttacagttctggttctgaaagacatctcacatatattcaaaagatcttcaggatggagatttttggatgttttgctctgaccgaattaagccacggcagtaataccaaggccattcgcacaactgcccactacgatcctgccactgaggaattcatcatacattcccctgatttcgaagctgccaagttttgggttggcaacatgggcaagacagccactcacgcggtggtgtttgctaagctgtgtgtgccaggggaccagtgccatgggctgcatccctttatcgtgcagatccgggacccgaagacccttcttcccatgcctggagtgatggttggcgacataggaaaaaaactcgggcagaacggtctggataatggtttcgccatgttccacaaggtcagagttcctcgccagagccttctgaaccggatgggagacgtcacccccgagggcacctatgtcagcccctttaaggacgtcaggcagcgctttggagcgtccctggggagcctgtcctcgggccgggtctccatcgtgagcctggccatccttaacctaaagctggccgtggccatcgctcttcgcttctcagccactcggcgtcagtttggacccacagaggaggaggaaataccagtgcttgagtatccaatgcagcaatggcgcttgcttccatatctggcagctgtctacgccttagaccatttctccaagtcgctcttcctggacctggtggagctccagcgaggacttgcatcgggagaccgcagcgccagacaggcagagcttggacgtgagatccacgccctggcatcggccagcaagcccctggcctcgtggaccacccagcaaggaattcaggaatgccgggaggcgtgtggaggacacggctatctggccatgaaccggttgggtgtccttagagatgacaacgatcccaactgcacatacgaaggtgacaacaacatcctgctgcagcagacaagcaactatttgctgggtctcctggcacaccaggtccacgatggagcttgcttccgcagtccgctgaagtcagtggactttctggacgcctatcccggcatccttgaccagaagtttgaggtctccagtgttgccgactgcttggactctgcagtcgccctggcagcatacaagtggctggtttgctacctgctccgagagacttatcaaaaattaaaccaagagaaaagatcaggaagcagtgactttgaagcaaggaacaaatgccaggtgtcccacggccgtccgttggcgctggccttcgtggagctcacggtggtccagaggttccacgagcacgtgcaccagccttccgtgccgccctcgctgcgggccgtgctggggcggctcagtgctctgtacgccctgtggtccctgagccgccacgcggccctgctctaccgagctgaaagacgatgcagttgccctggtagacgtgatcgctcctcctgactttgttctggactcaccgattggcagagccgacggcgagctctacaaaaacctctggggcgctgtcctgcaggaaagcaaggtgttggagcgggcatcctggtggccagagttttctgtgaacaaacctgtcataggaagtctgaaatcgaagctctagtgggactggcacacattcagccaagtctaatgaaacgaagggaactaatcagacgtggacctcaacttctgattccagaacacgccggagattgctgctgctttctgagcccgcacctgtgcgcctaaactgctgattggcctcaactgcccaggcggacgggagggaggcacccggccggctggactaatctgggatcgcggtgatttgcagcgtggaaaagaaatgcagatgatcatgtctacctga

SEQ ID NO: 40815 - protein, 924 aa, Artificial Sequence
  derived and/or modified sequence
MEIKEEGASEEGQHFLPTAQANDPGDCQFTSIQKTPNEPQLEFILACKDLVAPVRDRKLNTLVQISVIHPVEQSLTRYSSTEIVEGTRDPLFLTGVTFPSEYPIYEETKIKLTVYDVKDKSHDTVRTSVLPEHKDPPPEVGRSFLGYASFKVGELLKSKEQLLVLSLRTSDGGKVVGTIEVSVVKMGEIEDGEADHITTDVQGQKCALVCECTAPESVSGKDNLPFLNSVLKNPVCKLYRFPTSDNKWMRIREQMSESILSFHIPKELISLHIKEDLCRNQEIKELGELSPHWDNLRKNVLTHCDQMVNMYQDILTELSKETGSSFKSSSSKGEKTLEFVPINLHLQRMQVHSPHLKDALYDVITVGAPAAHFQGFKNGGLRKLLHRFETERRNTGYQFIYYSPENTAKAKEVLSNINQLQPLIATHADLLLNSASQHSPDSLKNSLKMLSEKTELFVHAFKDQLVRSALLALYTARPGGILKKPPSPKSSTEESSPQDQPPVMRGQDSIPHHSDYDEEEWDRVWANVGKSLNCIIAMVDKLIERDGGSEGSGGNNDGEKEPSLTDAIPSHPREDWYEQLYPLILTLKDCMGEVVNRAKQSLTFVLLQELAYSLPQCLMLTLRRDIVFSQALAGLVCGFIIKLQTSLYDPGFLQQLHTVGLIVQYEGLLSTYSDEIGMLEDMAVGISDLKKVAFKIIEAKSNDVLPVITGRREHYVVEVKLPARMFESLPLQIKEGQLLHVYPVLFNVGINEQQTLAERFGDVSLQESINQENFELLQEYYKIFMEKMPPDYISHFQEQNDLKALLENLLQNIQSKKRKNVEIMWLAATICRKLNGIRFTCCKSAKDRTSMSVTLEQCSILRDEHQLHKDFFIRALDCMRREGCRIENVLKNIKCRKYAFNMLQLMAFPKYYRPPEGTYGKADT

SEQ ID NO: 40816 - DNA, 2775 bp, Artificial Sequence
  derived and/or modified sequence
atggagatcaaggaggagggcgccagcgaggagggccagcacttcctgcccaccgcccaggccaacgaccccggcgactgccagttcaccagcatccagaagacccccaacgagccccagctggagttcatcctggcctgcaaggacctggtggcccccgtgagagacagaaagctgaacaccctggtgcagatcagcgtgatccaccccgtggagcagagcctgaccagatacagcagcaccgagatcgtggagggcaccagagaccccctgttcctgaccggcgtgaccttccccagcgagtaccccatctacgaggagaccaagatcaagctgaccgtgtacgacgtgaaggacaagagccacgacaccgtgagaaccagcgtgctgcccgagcacaaggaccccccccccgaggtgggcagaagcttcctgggctacgccagcttcaaggtgggcgagctgctgaagagcaaggagcagctgctggtgctgagcctgagaaccagcgacggcggcaaggtggtgggcaccatcgaggtgagcgtggtgaagatgggcgagatcgaggacggcgaggccgaccacatcaccaccgacgtgcagggccagaagtgcgccctggtgtgcgagtgcaccgcccccgagagcgtgagcggcaaggacaacctgcccttcctgaacagcgtgctgaagaaccccgtgtgcaagctgtacagattccccaccagcgacaacaagtggatgagaatcagagagcagatgagcgagagcatcctgagcttccacatccccaaggagctgatcagcctgcacatcaaggaggacctgtgcagaaaccaggagatcaaggagctgggcgagctgagcccccactgggacaacctgagaaagaacgtgctgacccactgcgaccagatggtgaacatgtaccaggacatcctgaccgagctgagcaaggagaccggcagcagcttcaagagcagcagcagcaagggcgagaagaccctggagttcgtgcccatcaacctgcacctgcagagaatgcaggtgcacagcccccacctgaaggacgccctgtacgacgtgatcaccgtgggcgcccccgccgcccacttccagggcttcaagaacggcggcctgagaaagctgctgcacagattcgagaccgagagaagaaacaccggctaccagttcatctactacagccccgagaacaccgccaaggccaaggaggtgctgagcaacatcaaccagctgcagcccctgatcgccacccacgccgacctgctgctgaacagcgccagccagcacagccccgacagcctgaagaacagcctgaagatgctgagcgagaagaccgagctgttcgtgcacgccttcaaggaccagctggtgagaagcgccctgctggccctgtacaccgccagacccggcggcatcctgaagaagccccccagccccaagagcagcaccgaggagagcagcccccaggaccagccccccgtgatgagaggccaggacagcatcccccaccacagcgactacgacgaggaggagtgggacagagtgtgggccaacgtgggcaagagcctgaactgcatcatcgccatggtggacaagctgatcgagagagacggcggcagcgagggcagcggcggcaacaacgacggcgagaaggagcccagcctgaccgacgccatccccagccaccccagagaggactggtacgagcagctgtaccccctgatcctgaccctgaaggactgcatgggcgaggtggtgaacagagccaagcagagcctgaccttcgtgctgctgcaggagctggcctacagcctgccccagtgcctgatgctgaccctgagaagagacatcgtgttcagccaggccctggccggcctggtgtgcggcttcatcatcaagctgcagaccagcctgtacgaccccggcttcctgcagcagctgcacaccgtgggcctgatcgtgcagtacgagggcctgctgagcacctacagcgacgagatcggcatgctggaggacatggccgtgggcatcagcgacctgaagaaggtggccttcaagatcatcgaggccaagagcaacgacgtgctgcccgtgatcaccggcagaagagagcactacgtggtggaggtgaagctgcccgccagaatgttcgagagcctgcccctgcagatcaaggagggccagctgctgcacgtgtaccccgtgctgttcaacgtgggcatcaacgagcagcagaccctggccgagagattcggcgacgtgagcctgcaggagagcatcaaccaggagaacttcgagctgctgcaggagtactacaagatcttcatggagaagatgccccccgactacatcagccacttccaggagcagaacgacctgaaggccctgctggagaacctgctgcagaacatccagagcaagaagagaaagaacgtggagatcatgtggctggccgccaccatctgcagaaagctgaacggcatcagattcacctgctgcaagagcgccaaggacagaaccagcatgagcgtgaccctggagcagtgcagcatcctgagagacgagcaccagctgcacaaggacttcttcatcagagccctggactgcatgagaagagagggctgcagaatcgagaacgtgctgaagaacatcaagtgcagaaagtacgccttcaacatgctgcagctgatggccttccccaagtactacagaccccccgagggcacctacggcaaggccgacacctag

SEQ ID NO: 40817 - DNA, 2454 bp, Artificial Sequence
  derived and/or modified sequence
atggagatcaaggaggagggcgccagcgaggagggccagcacttcctgcccaccgcccaggccaacgaccccggcgactgccagttcaccagcatccagaagacccccaacgagccccagctggagttcatcctggcctgcaaggacctggtggcccccgtgagagacagaaagctgaacaccctggtgcagatcagcgtgatccaccccgtggagcagagcctgaccagatacagcagcaccgagatcgtggagggcaccagagaccccctgttcctgaccggcgtgaccttccccagcgagtaccccatctacgaggagaccaagatcaagctgaccgtgtacgacgtgaaggacaagagccacgacaccgtgagaaccagcgtgctgcccgagcacaaggaccccccccccgaggtgggcagaagcttcctgggctacgccagcttcaaggtgggcgagctgctgaagagcaaggagcagctgctggtgctgagcctgagaaccagcgacggcggcaaggtggtgggcaccatcgaggtgagcgtggtgaagatgggcgagatcgaggacggcgaggccgaccacatcaccaccgacgtgcagggccagaagtgcgccctggtgtgcgagtgcaccgcccccgagagcgtgagcggcaaggacaacctgcccttcctgaacagcgtgctgaagaaccccgtgtgcaagctgtacagattccccaccagcgacaacaagtggatgagaatcagagagcagatgagcgagagcatcctgagcttccacatccccaaggagctgatcagcctgcacatcaaggaggacctgtgcagaaaccaggagatcaaggagctgggcgagctgagcccccactgggacaacctgagaaagaacgtgctgacccactgcgaccagatggtgaacatgtaccaggacatcctgaccgagctgagcaaggagaccggcagcagcttcaagagcagcagcagcaagggcgagaagaccctggagttcgtgcccatcaacctgcacctgcagagaatgcaggtgcacagcccccacctgaaggacgccctgtacgacgtgatcaccgtgggcgcccccgccgcccacttccagggcttcaagaacggcggcctgagaaagctgctgcacagattcgagaccgagagaagaaacaccggctaccagttcatctactacagccccgagaacaccgccaaggccaaggaggtgctgagcaacatcaaccagctgcagcccctgatcgccacccacgccgacctgctgctgaacagcgccagccagcacagccccgacagcctgaagaacagcctgaagatgctgagcgagaagaccgagctgttcgtgcacgccttcaaggaccagctggtgagaagcgccctgctggccctgtacaccgccagacccggcggcatcctgaagaagccccccagccccaagagcagcaccgaggagagcagcccccaggaccagccccccgtgatgagaggccaggacagcatcccccaccacagcgactacgacgaggaggagtgggacagagtgtgggccaacgtgggcaagagcctgaactgcatcatcgccatggtggacaagctgatcgagagagacggcggcagcgagggcagcggcggcaacaacgacggcgagaaggagcccagcctgaccgacgccatccccagccaccccagagaggactggtacgagcagctgtaccccctgatcctgaccctgaaggactgcatgggcgaggtggtgaacagagccaagcagagcctgaccttcgtgctgctgcaggagctggcctacagcctgccccagtgcctgatgctgaccctgagaagagacatcgtgttcagccaggccctggccggcctggtgtgcggcttcatcatcaagctgcagaccagcctgtacgaccccggcttcctgcagcagctgcacaccgtgggcctgatcgtgcagtacgagggcctgctgagcacctacagcgacgagatcggcatgctggaggacatggccgtgggcatcagcgacctgaagaaggtggccttcaagatcatcgaggccaagagcaacgacgtgctgcccgtgatcaccggcagaagagagcactacgtggtggaggtgaagctgcccgccagaatgttcgagagcctgcccctgcagatcaaggagggccagctgctgcacgtgtaccccgtgctgttcaacgtgggcatcaacgagcagcagaccctggccgagagattcggcgacgtgagcctgcaggagagcatcaaccaggagaacttcgagctgctgcaggagtactacaagatcttcatggagaagatgccccccgactacatcagccacttccaggagcagaacgacctgaaggccctgctggagaacctgctgcagaacatccagagcaagaagtag

SEQ ID NO: 40818 - DNA, 1971 bp, Artificial Sequence
  derived and/or modified sequence
atgggcgagatcgaggacggcgaggccgaccacatcaccaccgacgtgcagggccagaagtgcgccctggtgtgcgagtgcaccgcccccgagagcgtgagcggcaaggacaacctgcccttcctgaacagcgtgctgaagaaccccgtgtgcaagctgtacagattccccaccagcgacaacaagtggatgagaatcagagagcagatgagcgagagcatcctgagcttccacatccccaaggagctgatcagcctgcacatcaaggaggacctgtgcagaaaccaggagatcaaggagctgggcgagctgagcccccactgggacaacctgagaaagaacgtgctgacccactgcgaccagatggtgaacatgtaccaggacatcctgaccgagctgagcaaggagaccggcagcagcttcaagagcagcagcagcaagggcgagaagaccctggagttcgtgcccatcaacctgcacctgcagagaatgcaggtgcacagcccccacctgaaggacgccctgtacgacgtgatcaccgtgggcgcccccgccgcccacttccagggcttcaagaacggcggcctgagaaagctgctgcacagattcgagaccgagagaagaaacaccggctaccagttcatctactacagccccgagaacaccgccaaggccaaggaggtgctgagcaacatcaaccagctgcagcccctgatcgccacccacgccgacctgctgctgaacagcgccagccagcacagccccgacagcctgaagaacagcctgaagatgctgagcgagaagaccgagctgttcgtgcacgccttcaaggaccagctggtgagaagcgccctgctggccctgtacaccgccagacccggcggcatcctgaagaagccccccagccccaagagcagcaccgaggagagcagcccccaggaccagccccccgtgatgagaggccaggacagcatcccccaccacagcgactacgacgaggaggagtgggacagagtgtgggccaacgtgggcaagagcctgaactgcatcatcgccatggtggacaagctgatcgagagagacggcggcagcgagggcagcggcggcaacaacgacggcgagaaggagcccagcctgaccgacgccatccccagccaccccagagaggactggtacgagcagctgtaccccctgatcctgaccctgaaggactgcatgggcgaggtggtgaacagagccaagcagagcctgaccttcgtgctgctgcaggagctggcctacagcctgccccagtgcctgatgctgaccctgagaagagacatcgtgttcagccaggccctggccggcctggtgtgcggcttcatcatcaagctgcagaccagcctgtacgaccccggcttcctgcagcagctgcacaccgtgggcctgatcgtgcagtacgagggcctgctgagcacctacagcgacgagatcggcatgctggaggacatggccgtgggcatcagcgacctgaagaaggtggccttcaagatcatcgaggccaagagcaacgacgtgctgcccgtgatcaccggcagaagagagcactacgtggtggaggtgaagctgcccgccagaatgttcgagagcctgcccctgcagatcaaggagggccagctgctgcacgtgtaccccgtgctgttcaacgtgggcatcaacgagcagcagaccctggccgagagattcggcgacgtgagcctgcaggagagcatcaaccaggagaacttcgagctgctgcaggagtactacaagatcttcatggagaagatgccccccgactacatcagccacttccaggagcagaacgacctgaaggccctgctggagaacctgctgcagaacatccagagcaagaagaaggagtgcagaaactacgtggccggctgcaacgacctgccccagaccgagtggtacagcttccacctgctgtag

SEQ ID NO: 40819 - DNA, 2775 bp, Artificial Sequence
  derived and/or modified sequence
atggagataaaggaggagggtgcgagcgaggagggacagcacttcctgccaactgcacaggctaacgatcccggggactgccagttcacaagcatccagaagacacctaacgaaccacagctggaattcatattggcttgcaaagacctggtggctccagtcagggaccggaaactgaataccctcgtgcagatctcagtgatccatccagtcgagcagagtctgactcgctactctagcacggagattgtggagggaacgagggaccccctctttctgaccggggttaccttcccctctgaatacccaatctacgaggagaccaagatcaagctgaccgtgtacgacgttaaggataaaagtcatgataccgttagaacctcagtgctgcctgagcataaggatccacctccagaagtgggtcgctctttcctgggctacgcctccttcaaggtcggagagctgctcaagtccaaggagcaactactggtgttgagcctgcgaacaagcgatggaggcaaggtcgtggggacaatcgaagtgtccgtggtgaaaatgggcgagatcgaagatggagaagcggatcacatcaccaccgacgtccagggccagaaatgtgcactggtgtgtgagtgtacagccccagaaagtgtatccgggaaggataatctgccattcctgaattctgtgcttaaaaacccagtatgcaagctctatcgctttccaaccagcgataataaatggatgcggatccgtgagcaaatgtccgaaagcatccttagttttcacatccctaaggagcttattagtttgcacatcaaagaggacctctgccggaaccaggagattaaggagctgggcgaactcagccctcactgggataacctccggaaaaacgttctgacgcattgcgaccagatggtgaatatgtatcaggacatcttaactgaactttctaaggagaccggctcttcctttaaatctagtagtagcaaaggcgaaaagactctggaatttgtccccataaatcttcacctgcagcggatgcaagttcattccccacacttaaaggatgccctttacgacgtgatcactgtcggagctcccgcggcccattttcaaggattcaaaaatggtgggctcaggaaactcttgcatcggttcgaaacggaacgcagaaacactgggtaccagtttatctactatagtcccgagaacaccgcaaaagcaaaggaagtgctgagcaatatcaatcaactccagcccctgatcgcaactcacgccgaccttttgctgaattctgcatctcaacactctccagattctttaaaaaatagtttaaagatgctatcggaaaagacagagttgtttgtacacgcatttaaagatcagctggtaaggagtgccctacttgccctctacactgcccgacctggcggcatcctgaaaaagcctccctctcccaagtcaagtacagaagaaagtagcccccaggatcaacccccagtgatgaggggccaagattccatcccgcaccatagtgactatgacgaggaggaatgggatagagtgtgggctaacgtgggcaaatctcttaattgtataatcgcaatggtggacaagttaatcgagagggatggcgggagcgagggctctggtgggaataacgatggcgaaaaggaaccttccctgactgatgctattccctctcacccacgcgaggattggtatgaacaactgtaccctttgatcctcacgcttaaggactgcatgggtgaggtggttaatcgcgccaagcagagcctgaccttcgtgctgctgcaggagctcgcctactcattacctcagtgccttatgctcacgctgcgaagggacatcgtcttctcccaggcactagccgggctcgtctgtgggttcataatcaaactgcagacatctctgtacgatccgggattcctgcagcagttgcatacagtagggctgatcgtgcagtatgaaggcctcttgtctacatattccgacgagatcgggatgctcgaggatatggctgttggaatttccgacctgaaaaaggtggcatttaagattattgaggccaaatctaacgatgttctgccagtaatcaccggccgccgcgaacactatgtcgtggaagttaaattacctgcaaggatgttcgaaagtctgccgctccagataaaggaggggcagctgctgcacgtatatcctgtcctcttcaacgtgggtatcaatgagcagcaaaccctggccgagcgctttggagatgtgtccctccaggagtctataaatcaggagaactttgagctgcttcaagagtactataaaatctttatggagaagatgccacccgattacatctcgcacttccaagagcagaacgacctgaaagccttattggagaacctgttgcagaacatccaaagcaaaaagagaaaaaatgttgagatcatgtggctcgcagccactatctgcagaaaactgaatggaatccggtttacttgttgtaaatcagcaaaggacaggacctccatgtctgtgaccctggaacagtgttctatcctacgtgacgaacaccagctccataaagattttttcatccgggccttggattgcatgagaagagagggatgtcggatcgagaacgtcttgaaaaacatcaagtgtcgaaagtatgcttttaacatgctgcaactgatggcgtttccaaagtactataggccacccgagggtacgtatggaaaggcggacacctag

SEQ ID NO: 40820 - DNA, 2775 bp, Artificial Sequence
  derived and/or modified sequence
atggagatcaaggaagagggcgcctccgaagaaggacagcatttcctgcccactgcacaggccaatgatccaggggactgccagtttacatccatacagaagactcccaacgaaccacagctcgagttcatactagcatgtaaggatctagtcgccccggtcagagatcgtaaattgaacaccctggtgcagatatccgtcatacacccggtcgagcagtctctcacaagatattcttctacagagattgtcgaagggactcgggatccactctttctcactggagtgacctttccctccgaatacccaatttatgaggagacaaagattaagttgacagtttacgatgtgaaagataaaagccacgacaccgtgcgtacctcagttctgccagagcataaggatcctccgcccgaggtcgggaggtcattcctgggatacgctagttttaaagtcggcgagttactcaagtcgaaggaacagctgttggtcctgagtttgaggacatctgatggcgggaaagtggttgggaccattgaggtctcagttgttaagatgggagaaatcgaggatggcgaggcagatcacattacaaccgacgtccagggccaaaaatgtgcgctggtgtgcgaatgtaccgctcccgagagtgtcagcggaaaggacaatctcccattcttaaatagtgttctcaagaacccagtgtgcaagctgtatcggtttcccacatcagataacaagtggatgaggattagggaacaaatgagcgaatccatcctatcatttcacattcctaaggagcttatttctttgcacatcaaggaagatctctgccgtaaccaggagattaaggagctgggggaactgtctccacattgggataaccttagaaagaacgtgctgacacattgcgatcagatggtcaatatgtatcaggatatactgaccgagctgagcaaggaaacaggctccagtttcaaaagctcatcctcgaagggggaaaaaacactggaattcgttcctattaatctgcatctgcagagaatgcaggttcatagtccccatctcaaggatgccttgtatgatgttattaccgtcggggcccccgctgctcattttcaaggtttcaaaaacggcggtctgcggaagcttcttcacagattcgagactgagcgccggaatacaggatatcagttcatatattacagccctgaaaacacggctaaagctaaagaagtgctctctaatatcaatcagctccagcccctgatcgcaacccatgcggacctactactgaacagtgctagccagcattctccggatagtctaaagaatagtctgaaaatgctctccgaaaaaactgagcttttcgtccatgccttcaaggatcagttggtgcgctccgctctattggccctctatacagcaaggcctggcgggattctgaagaaacctcccagcccgaaatcttctaccgaggaaagcagcccccaggatcagcctcctgtaatgagaggacaggatagtattcctcaccattccgactatgatgaagaagaatgggaccgggtttgggccaacgtcggaaagagtttaaactgcatcatcgctatggttgacaagctaattgagcgtgacggtggctctgagggcagcggagggaacaacgacggcgagaaggagcctagcctaaccgacgctatacctagccaccccagggaagattggtacgagcagctctaccctctaatattgaccctgaaggattgcatgggtgaggtggtcaatcgcgctaaacaaagcctaacatttgtgctgctccaggagcttgcatactctttaccccagtgcctgatgctgacacttagacgcgatatcgtcttttcacaagcccttgcaggccttgtgtgtggatttattatcaagctgcaaacttctctctacgacccagggttcctgcagcagctacacaccgtgggactcatagtacagtatgaaggcttgctttccacttatagcgatgaaatcggcatgttggaggacatggctgtcgggatctccgatttaaagaaagtggcgttcaagatcattgaggcaaagagcaacgacgtgcttccagtaattaccggccggcgcgagcattatgtagtggaggtgaaactgcctgctcggatgtttgagtccctgccacttcagatcaaggaaggacagttgttgcatgtataccctgtgctattcaacgtgggtataaacgagcaacaaaccctcgctgagagattcggtgatgtatcactgcaggagtccatcaatcaggaaaattttgagctgctccaggagtactataagatatttatggaaaaaatgccccctgactatattagtcactttcaagaacagaacgatctgaaagccctcctggagaatcttctgcaaaatatacagagtaagaagcgtaaaaacgtcgagattatgtggctcgctgctacaatatgtaggaaattgaacggcatcaggtttacttgctgcaaatcagccaaagacaggaccagcatgtctgtgaccttggaacagtgttctatcttgagggatgagcaccagcttcataaggatttttttatccgtgctctcgattgcatgcgcagggaggggtgtcgaattgagaacgtgctgaaaaatatcaaatgccggaaatatgccttcaatatgctccagttgatggcgttccctaagtactatcgcccaccggaggggacctatggtaaagccgacacgtag

SEQ ID NO: 40821 - DNA, 2775 bp, Artificial Sequence
  derived and/or modified sequence
atggagattaaagaggagggcgcttccgaggagggccaacatttcctccccaccgcccaggctaacgacccaggggactgccagttcacttccattcaaaaaactcccaatgagccccagctggagtttattctggcgtgcaaggaccttgtagcccctgttagagataggaagctgaacaccctggttcaaatctctgttattcaccctgtggagcagagcctcaccagatatagcagtactgagattgtagagggaacccgtgatcccctgttcctgactggggttacattcccctccgagtaccctatctacgaggagactaaaattaaactgactgtgtatgacgtgaaggataagagtcatgacactgtgaggacaagtgtgctgccagagcacaaggatccaccaccagaagttggcagatcttttctggggtacgcatcctttaaggtgggggaactcctgaagagcaaggagcaactgctggttctcagtctgcgcacttctgacggtggcaaagtggtcggtacgattgaagtcagcgttgtgaagatgggagagattgaggatggcgaagccgaccacatcactacggatgttcaggggcagaagtgcgccctggtgtgtgagtgcactgcccctgaatccgtgagtggcaaggataatctcccctttctgaacagcgtcctgaaaaaccccgtttgtaagctgtaccggtttccaacctctgacaacaagtggatgcggattcgagagcaaatgtcggaatctattctaagctttcacattcccaaggagctgatcagcttacatatcaaagaggacctgtgtaggaaccaagagattaaagagctgggagagctgtcgccccactgggacaaccttcgtaagaatgtactgacacattgcgaccaaatggtaaatatgtaccaggacatccttactgaactttcaaaggaaaccggttcaagctttaaatcctcatcgagcaagggggagaagactttggaatttgtgcctatcaatctgcacctgcagcggatgcaggtgcattcaccacatttaaaagacgctctctacgatgtaatcacggtgggagcaccggccgctcacttccaaggtttcaagaatggcggcttgcgtaagctgctacatcggttcgagaccgagaggcgtaatacaggctaccagttcatctactatagccctgagaacacagccaaggccaaggaagtcctgtcaaatattaatcagctccaaccacttattgctacacacgccgacctcctgctgaacagcgcgtctcagcactcacccgattcccttaagaacagcttaaagatgttgagtgagaagaccgaactgtttgtacacgccttcaaagaccagctggtacgttccgccttgctggctctgtacacagctagaccaggtggcatactcaaaaagcctccgagtcccaagtctagtactgaggaaagcagtccccaggaccagccccctgtgatgaggggccaagattccatccctcaccactctgattacgacgaggaagaatgggacagagtctgggcaaatgtcggtaagtcactcaactgcatcattgctatggtggataaacttattgaaagggacggcgggtccgagggttcagggggcaataacgatggcgagaaggagcccagcctgacggatgccattccatcacaccccagggaggattggtatgagcaactataccctctgattctgaccctgaaagattgtatgggagaagtcgtaaacagggccaaacaaagcctgaccttcgtcctgcttcaggagctggcctattcactgcctcagtgcctgatgctgacacttcgtcgggatattgtgttcagccaggctctagccggcttggtctgcggcttcatcataaaactgcagacttcactctacgaccctggctttctgcagcaactgcatacagtaggcctgattgtgcaatatgaaggactcttgtcaacatacagcgacgagatcgggatgctcgaggacatggctgttggcatctctgacctcaagaaggtggcctttaagatcatcgaagccaagtccaatgatgttctgcccgtcatcactggccggagggaacactatgtggtggaggtgaagctacccgctagaatgttcgagtctctgcctctgcagattaaggagggccagctcctgcatgtgtatcctgtgctgtttaacgtcgggatcaatgaacagcagacgctcgctgagaggttcggcgatgtatccctgcaggaaagcattaaccaggaaaattttgagttattacaggagtattacaagatctttatggagaaaatgccccccgattatatctcacacttccaggagcagaacgatctcaaagcgctgctcgagaatctgctccagaatatccaatccaagaagcgtaagaatgtggaaattatgtggctggcggctacgatttgcagaaaactgaacgggatacgctttacatgttgcaagagcgccaaggataggacgtctatgtccgtcacgctcgagcagtgctcaatcttgcgggatgaacaccagctgcataaagatttcttcattcgcgccctggactgcatgcgccgtgaggggtgtagaatagagaacgtgctgaaaaacatcaaatgtcgcaagtatgcatttaatatgcttcagctgatggcattccccaagtactaccggcctcctgaagggacctacggtaaagcagacacctag

SEQ ID NO: 40822 - DNA, 2454 bp, Artificial Sequence
  derived and/or modified sequence
atggagattaaggaagagggagcttctgaggaggggcaacacttccttcctactgcccaggcgaatgaccccggggattgtcagtttactagcatccagaaaactcccaacgaaccccagctggagtttatactggcatgcaaagacctggtggcgcctgtgcgggacagaaagctgaacacacttgttcagatatccgtgattcacccagtggaacagagtttgacccgttacagttctacggagatcgtcgagggaacacgggaccctttgttccttacgggggtcacttttccaagcgaataccctatttatgaggaaactaagattaagctgactgtttacgatgttaaggacaaatctcatgataccgtgaggacatccgtgttgcccgaacacaaagatccaccccccgaagtagggcggagcttccttggatatgcaagcttcaaggtgggcgaactgctgaagtccaaggagcaattgctcgtcctgtcactcagaacatctgatggaggaaaagtagtgggcacgatcgaggtgagcgtggtgaaaatgggcgagatcgaggatggagaagccgaccatataactacagacgtgcaggggcagaaatgcgccctggtttgtgagtgtacagctcctgagagcgtttcaggtaaagataatctgccatttctgaatagtgttctcaaaaatcctgtgtgtaaactctacagattcccaacctcagataataagtggatgcggataagggagcagatgagcgagtcaattcttagcttccatatcccaaaggagcttatctctttacatatcaaagaggatctctgtcggaatcaggagatcaaagagcttggcgagctgagcccccactgggacaatttacggaaaaatgtacttacccactgtgaccagatggtgaatatgtaccaggatatactgactgaattaagtaaagagactggatcctcctttaagtcatcaagctctaaaggagaaaagaccttggaatttgttcccatcaatctgcatcttcagagaatgcaggtccacagcccacacctcaaggacgctttgtatgacgttatcaccgtcggtgcccccgccgctcattttcagggctttaaaaatgggggcttaagaaagttattacatagattcgaaaccgagagacgaaacaccggctatcagtttatctattattcccctgagaatactgcaaaagcgaaggaagttctgtcaaacattaatcagctccagccccttatcgcgacacacgcagacctccttcttaacagcgcctcacagcacagcccagattctctgaaaaactccttaaagatgctcagtgagaaaaccgagctcttcgtgcacgccttcaaggaccaattggtcaggtccgccctgctggcgctctacacggcacgtccaggtggcatcttgaaaaagccaccttctcccaaaagttccacggaggagtcatccccccaagatcagcccccagtgatgcgggggcaggatagtataccgcatcacagcgactatgatgaggaggaatgggatagagtctgggcaaacgtcggcaaatctctgaattgtattatcgccatggtggacaaactgatcgagcgggacggcgggtcggagggctctgggggaaataatgacggtgagaaggaaccatcgctcactgacgctattccgtcccatccacgagaggactggtacgagcagctgtatcctttgatcctgaccctcaaggattgtatgggagaggttgtgaacagagcaaaacagagtctgacattcgtccttcttcaggagctcgcttacagcttgccacagtgcctgatgttgactctgaggcgggatatcgtgttcagccaggccctggccggcctggtgtgcggctttattatcaaactccaaacatcactgtatgatcctggattcctccaacagctgcacactgtgggcttaatcgtccagtacgagggcctgctatccacctattcggatgaaattgggatgcttgaggatatggccgtgggaatttccgacctgaagaaggtggcatttaaaataatcgaagcaaagtcaaacgatgtactcccggtgattactggtaggcgtgagcactatgttgtggaggtaaagctgcccgctaggatgttcgagagcttaccgcttcagataaaggagggccaactgttgcacgtgtacccagtgctctttaacgtgggtattaacgaacagcagaccctggccgaaaggtttggagatgtttcactccaggaaagtattaatcaggaaaacttcgaattacttcaggagtattacaaaatctttatggagaagatgccccctgactacattagtcattttcaggaacaaaatgacctcaaggccctcctggagaatctgctacagaatatccaaagtaaaaagtag

SEQ ID NO: 40823 - DNA, 2775 bp, Artificial Sequence
  derived and/or modified sequence
atggagattaaggaagaaggagcctctgaggagggacagcacttcctgccgacggcacaggctaacgaccccggtgactgccagtttactagtatccagaaaaccccaaatgagcctcaactagagttcattctcgcctgcaaggacctggtcgcccccgtaagagacaggaaacttaacacactcgtccagatttccgttatccaccctgtggagcagtcattaactcgctacagctccacagagattgttgagggtaccagggatccgctgtttctgaccggcgtgacgttcccatccgaatatcccatttatgaggagacaaaaatcaagcttacggtatacgatgtaaaggataagtcccatgacacagttcgaaccagcgttctgcccgaacataaagacccaccccctgaagtgggccgcagttttttgggatatgcctcctttaaagtcggggagctcctgaagtccaaggaacaacttctggttctgagccttagaacaagtgacggtggaaaggtggttggaactatcgaggtcagcgtcgtgaagatgggggaaatcgaggacggggaagctgaccacatcactaccgacgttcagggacagaagtgcgcactggtgtgcgaatgtactgctccagaatccgtgtccggtaaggataacctgcctttcctcaatagtgtgctgaagaatcctgtgtgcaaactgtacagatttcccaccagcgataataaatggatgaggatccgcgagcagatgtccgaatctatattatctttccatattccaaaggagctgatttcattgcatatcaaagaggacctgtgtaggaaccaagaaatcaaagaattgggggaattaagcccccactgggataatctccgtaagaatgttctgacgcactgcgaccaaatggtgaatatgtaccaggatatcctcaccgagttaagcaaagaaaccggaagctcctttaagtcaagtagtagcaagggtgagaagacactggaattcgtgccaattaatctccatttgcagagaatgcaagtgcattctcctcacctgaaggatgccctctatgacgttatcaccgttggagcccctgctgcccattttcaggggttcaagaacgggggattgaggaaattgctccatcgcttcgaaactgaacggagaaatactgggtatcagttcatctattactccccggagaataccgctaaggcaaaggaagtgctgtcaaacatcaaccagctccagccactgatagcgacacatgcggatctcctgctcaattccgcaagtcagcatagccctgacagtcttaagaactcactgaagatgttgtcagaaaaaactgaattgttcgtccacgcattcaaagaccagctagtgagatccgctttactggccttgtacaccgcaaggccaggaggaattctaaagaagcctccatcccccaaatctagcacggaggagagttccccacaggaccagccaccagttatgagaggtcaggattctatcccccaccacagcgattatgacgaagaagagtgggatagagtgtgggcaaatgttggaaagtcactgaattgtatcatcgccatggtcgataaactgattgaaagggatggggggagtgagggaagcggcgggaataatgatggcgaaaaagagccatcgctgactgacgcgatcccatcccatccacgggaagattggtacgagcagctgtacccactcatcctcaccttgaaagattgcatgggggaagtcgttaatcgagccaagcagagtctgactttcgtgctgttgcaggagctggcatattccctccctcagtgcctcatgctgacgctacgaagggatattgtgttcagtcaagctctggccggactggtgtgtggtttcatcatcaagttgcagacttctttgtatgaccctgggttcctgcagcagctgcatactgttggcttaatcgttcaatacgaaggactcctaagcacctatagcgacgagattggaatgctcgaggacatggcggttggtattagtgacttgaagaaggttgcgtttaagataatcgaagcaaaaagcaatgatgtgctacctgttattaccgggcgccgcgaacattatgtggtggaagttaagctccccgcgagaatgttcgaatccctgcctcttcagattaaagaaggacagctattgcatgtttatccggttctatttaatgtcggcattaatgagcagcagactcttgcagagagatttggcgacgtctccctccaggaaagtatcaaccaggagaacttcgagctgctgcaggaatattataagatttttatggagaaaatgccacccgattacatttctcattttcaagaacaaaacgacctgaaggcgcttctggaaaatctcttacagaatatacagagtaagaaacggaagaacgtagaaatcatgtggttggcagcaaccatatgccgcaaactaaatggaattcggtttacgtgctgtaagagtgcaaaagatcgtacaagcatgtcagtgacactggagcagtgtagcatcctgcgggatgagcaccagctacataaggacttcttcattcgcgccctggactgtatgcgacgcgagggatgtcgcatcgagaatgttcttaaaaacatcaaatgcaggaagtacgccttcaacatgctccagctcatggcgtttccaaaatattatagaccacccgagggaacctacggcaaggctgacacgtag

SEQ ID NO: 40824 - DNA, 1971 bp, Artificial Sequence
  derived and/or modified sequence
atgggtgaaatcgaggacggagaggcagaccatataaccactgatgtgcaaggtcagaagtgcgccctggtttgcgagtgcacggctccagagagcgtgtcaggcaaagataatctcccattcctgaattccgttctgaagaaccctgtgtgcaaactatacaggtttccgacttccgacaacaagtggatgagaatacgggaacagatgtctgagtctatcctctcttttcatattcccaaggagttaatttccctccacataaaagaggatctgtgcagaaaccaggagataaaagaactgggggagttatcaccgcattgggataaccttcgaaagaacgtgttaacccattgtgatcaaatggtgaatatgtaccaggatattttgaccgaactcagtaaagaaactgggagctcttttaaatcatctagttccaagggcgagaagaccttggagtttgtgcctataaatctgcacctgcaaagaatgcaggtgcatagtcctcacctgaaggacgccctgtacgatgtaatcacagtgggcgctcctgctgcacactttcaaggatttaaaaacgggggtctgaggaaactactgcacaggttcgaaacagaacgcagaaataccggttaccagttcatttattattcccctgaaaatacagcgaaggccaaagaagtgctgagtaatatcaaccagctacagcctctaatcgccacccatgcagacttactgctcaattccgcctcacaacactcacccgatagtctaaagaactctctgaaaatgctgtctgagaaaaccgagctttttgtgcacgccttcaaagatcagctggtgcgttccgcgctgctcgcactctacactgctcgacctgggggaattctgaagaaacccccatctcccaagtcttctactgaagagtcctccccgcaggaccagccgccagtgatgagaggacaggacagcataccacaccactctgactatgatgaagaggagtgggaccgggtatgggctaatgtcggcaagtccctcaattgtattatcgctatggtggacaaattgattgagcgcgacggtgggagcgagggaagcgggggaaacaatgacggcgagaaggaaccgtcgctaaccgacgcgattccttcacatcccagggaggactggtacgaacagttatatccactgatcctgaccttgaaagattgtatgggagaggtcgtcaaccgtgcaaaacagagcctcactttcgttcttctgcaagagctcgcctattccctacctcaatgcttgatgcttactctacgaagagatatagttttctcccaggccttggctggactggtgtgcgggttcataataaagttacaaacgtctttgtatgaccctgggttcctccagcagcttcacactgtgggtctaatcgtgcagtacgaagggttgttgtctacgtactctgacgagatcgggatgctggaggatatggcagttggaatttccgatctgaaaaaagtcgcctttaaaattatcgaggcaaaatctaatgacgtcttaccagtgattaccggccggcgagagcactacgttgttgaggtgaaattgcctgcaaggatgttcgaaagtctccctcttcagattaaggaaggccaattactccacgtgtacccggtcctcttcaacgtgggcattaacgagcagcagactttggccgagaggttcggggatgtgagtttgcaggaatcaataaaccaggaaaacttcgaacttctccaagagtactataagattttcatggagaaaatgccacccgactacatctctcactttcaggagcagaatgatcttaaggccctgctggagaacctgttacagaatatccaatcaaaaaaaaaggaatgcaggaactatgtggccggatgcaacgacctaccccagacggaatggtacagttttcatcttttgtag

SEQ ID NO: 40825 - DNA, 2775 bp, Artificial Sequence
  derived and/or modified sequence
atggagatcaaggaggagggcgccagcgaggagggccagcacttcctgcccacagcccaggccaatgaccccggggactgccagttcaccagcatccagaagaccccaaatgagccccagctggagttcatcctggcctgcaaggacctggtggcccctgtgcgggacaggaagctgaacaccctggtgcagatcagcgtcatccaccctgtggagcagagcctgacccgctacagcagcacagaaattgtggagggcacccgggaccccctcttcctgactggagtgaccttccccagcgagtaccccatctatgaggagaccaagatcaagctgactgtgtatgatgtgaaggacaagagccatgacacagtgaggacctctgtgctgcctgagcacaaggaccccccacctgaggtgggccgctccttcctgggctacgccagcttcaaggtgggggagctgctgaagagcaaggagcagctgctggtgctgagcctgcggaccagtgatggcggcaaggtggtgggcaccatcgaggtgtctgtggtgaagatgggagaaattgaagatggagaggccgaccacatcaccacagatgtgcagggccagaagtgtgccctggtgtgtgaatgtacagcccctgagagcgtgtctgggaaggacaacctgcccttcctgaacagcgtgctgaagaaccctgtgtgcaagctgtaccgcttccccaccagtgacaacaagtggatgaggatccgggagcagatgtctgagagcatcctgtccttccacatccccaaggagctgatcagcctgcacatcaaggaggacctgtgcaggaaccaggagatcaaggagctgggggagctgagcccccactgggacaacctgaggaagaatgtgctgacccactgtgaccagatggtgaacatgtaccaggacatcctgacagagctgagcaaggagaccggcagcagcttcaagagcagcagcagcaagggggagaagaccctggagtttgtgcccatcaacctgcacctgcagaggatgcaggtgcacagcccccacctgaaggatgccctgtatgatgtgatcaccgtgggcgccccagctgcccacttccagggcttcaagaatggaggcctgaggaagctgctgcacagatttgaaacagagaggaggaacacaggctaccagttcatctactacagcccagaaaatacagccaaggccaaggaggtgctgagcaacatcaaccagctgcagcccctcatcgccacccacgccgacctgctgctgaacagcgccagccagcacagcccagacagcctgaagaacagcctgaagatgctgtctgagaagacagagctgtttgtgcacgccttcaaggaccagctggtgcgcagcgccctgctggccctgtacacagcccggcctgggggcatcctgaagaagccacccagccccaagagcagcacagaggagagcagcccccaggaccagccccctgtgatgaggggccaggacagcatcccccaccacagcgactatgatgaggaggagtgggacagagtgtgggccaacgtgggcaagagcctgaactgcatcatcgccatggtggacaagctgattgaaagagatggcggcagcgagggcagcggcggcaacaatgatggagagaaggagcccagcctgacagatgccatccccagccacccccgggaggactggtatgagcagctgtaccccctcatcctgaccctgaaggactgcatgggagaggtggtgaacagagccaagcagagcctgacctttgtgctgctgcaggagctggcctacagcctgccccagtgcctgatgctgaccctgcggcgggacatcgtgttcagccaggccctggccggcctggtgtgtggcttcatcatcaagctgcagaccagcctgtatgaccccggcttcctgcagcagctgcacacagtgggcctcatcgtgcagtatgagggcctgctgagcacctacagtgatgagatcggcatgctggaggacatggctgtgggcatcagtgacctgaagaaggtggccttcaagatcatcgaggccaagagcaatgatgtgctgcccgtcatcactggaagaagagagcactacgtggtggaggtgaagctgcctgccaggatgtttgagagcctgcccctgcagatcaaggagggccagctgctgcacgtgtaccctgtgctcttcaacgtgggcatcaatgagcagcagaccctggccgagagatttggagatgtgtccctgcaggagagcatcaaccaggagaactttgagctgctgcaggagtactacaagatcttcatggagaagatgcccccagactacatcagccacttccaggagcagaatgacctgaaggccctgctggagaacctgctgcagaacatccagagcaagaagaggaagaatgtggagatcatgtggctggccgccaccatctgcaggaagctgaatggcatccgcttcacctgctgcaagagcgccaaggacaggacctccatgtctgtgaccctggagcagtgcagcatcctgagagatgagcaccagctgcacaaggacttcttcatccgggccctggactgcatgaggcgggagggctgcagaattgaaaatgtgctgaagaacatcaagtgcaggaaatatgccttcaacatgctgcagctgatggccttccccaagtactaccggcccccagagggcacctacggcaaggctgacacctag

SEQ ID NO: 40826 - DNA, 2454 bp, Artificial Sequence
  derived and/or modified sequence
atggagatcaaggaggagggcgccagcgaggagggccagcacttcctgcccacagcccaggccaatgaccccggggactgccagttcaccagcatccagaagaccccaaatgagccccagctggagttcatcctggcctgcaaggacctggtggcccctgtgcgggacaggaagctgaacaccctggtgcagatcagcgtcatccaccctgtggagcagagcctgacccgctacagcagcacagaaattgtggagggcacccgggaccccctcttcctgactggagtgaccttccccagcgagtaccccatctatgaggagaccaagatcaagctgactgtgtatgatgtgaaggacaagagccatgacacagtgaggacctctgtgctgcctgagcacaaggaccccccacctgaggtgggccgctccttcctgggctacgccagcttcaaggtgggggagctgctgaagagcaaggagcagctgctggtgctgagcctgcggaccagtgatggcggcaaggtggtgggcaccatcgaggtgtctgtggtgaagatgggagaaattgaagatggagaggccgaccacatcaccacagatgtgcagggccagaagtgtgccctggtgtgtgaatgtacagcccctgagagcgtgtctgggaaggacaacctgcccttcctgaacagcgtgctgaagaaccctgtgtgcaagctgtaccgcttccccaccagtgacaacaagtggatgaggatccgggagcagatgtctgagagcatcctgtccttccacatccccaaggagctgatcagcctgcacatcaaggaggacctgtgcaggaaccaggagatcaaggagctgggggagctgagcccccactgggacaacctgaggaagaatgtgctgacccactgtgaccagatggtgaacatgtaccaggacatcctgacagagctgagcaaggagaccggcagcagcttcaagagcagcagcagcaagggggagaagaccctggagtttgtgcccatcaacctgcacctgcagaggatgcaggtgcacagcccccacctgaaggatgccctgtatgatgtgatcaccgtgggcgccccagctgcccacttccagggcttcaagaatggaggcctgaggaagctgctgcacagatttgaaacagagaggaggaacacaggctaccagttcatctactacagcccagaaaatacagccaaggccaaggaggtgctgagcaacatcaaccagctgcagcccctcatcgccacccacgccgacctgctgctgaacagcgccagccagcacagcccagacagcctgaagaacagcctgaagatgctgtctgagaagacagagctgtttgtgcacgccttcaaggaccagctggtgcgcagcgccctgctggccctgtacacagcccggcctgggggcatcctgaagaagccacccagccccaagagcagcacagaggagagcagcccccaggaccagccccctgtgatgaggggccaggacagcatcccccaccacagcgactatgatgaggaggagtgggacagagtgtgggccaacgtgggcaagagcctgaactgcatcatcgccatggtggacaagctgattgaaagagatggcggcagcgagggcagcggcggcaacaatgatggagagaaggagcccagcctgacagatgccatccccagccacccccgggaggactggtatgagcagctgtaccccctcatcctgaccctgaaggactgcatgggagaggtggtgaacagagccaagcagagcctgacctttgtgctgctgcaggagctggcctacagcctgccccagtgcctgatgctgaccctgcggcgggacatcgtgttcagccaggccctggccggcctggtgtgtggcttcatcatcaagctgcagaccagcctgtatgaccccggcttcctgcagcagctgcacacagtgggcctcatcgtgcagtatgagggcctgctgagcacctacagtgatgagatcggcatgctggaggacatggctgtgggcatcagtgacctgaagaaggtggccttcaagatcatcgaggccaagagcaatgatgtgctgcccgtcatcactggaagaagagagcactacgtggtggaggtgaagctgcctgccaggatgtttgagagcctgcccctgcagatcaaggagggccagctgctgcacgtgtaccctgtgctcttcaacgtgggcatcaatgagcagcagaccctggccgagagatttggagatgtgtccctgcaggagagcatcaaccaggagaactttgagctgctgcaggagtactacaagatcttcatggagaagatgcccccagactacatcagccacttccaggagcagaatgacctgaaggccctgctggagaacctgctgcagaacatccagagcaagaagtag

SEQ ID NO: 40827 - DNA, 1971 bp, Artificial Sequence
  derived and/or modified sequence
atgggagaaattgaagatggagaggccgaccacatcaccacagatgtgcagggccagaagtgtgccctggtgtgtgagtgcacagcccctgagagcgtgtctgggaaggacaacctgcccttcctgaacagcgtgctgaagaaccctgtgtgcaagctgtaccgcttccccaccagtgacaacaagtggatgaggatccgggagcagatgtctgagagcatcctgtccttccacatccccaaggagctgatcagcctgcacatcaaggaggacctgtgcaggaaccaggagatcaaggagctgggggagctgagcccccactgggacaacctgaggaagaatgtgctgacccactgtgaccagatggtgaacatgtaccaggacatcctgacagagctgagcaaggagaccggcagcagcttcaagagcagcagcagcaaaggagagaagaccctggagtttgtgcccatcaacctgcacctgcagaggatgcaggtgcacagcccccacctgaaggatgccctgtatgatgtgatcaccgtgggcgccccagctgcccacttccagggcttcaagaatggaggcctgaggaagctgctgcacagatttgaaacagaaagaagaaacacaggctaccagttcatctactacagccctgagaacacagccaaggccaaggaggtgctgagcaacatcaaccagctgcagcccctgattgccacccatgctgacctgctgctgaacagcgccagccagcacagcccagacagcctgaagaacagcctgaagatgctgtctgagaagacagagctgtttgtgcacgccttcaaggaccagctggtgcgcagcgccctgctggccctgtacacagcccggcctgggggcatcctgaagaagccacccagccccaagagcagcacagaggagagcagcccccaggaccagccccctgtgatgaggggccaggacagcatcccccaccacagcgactatgatgaggaggagtgggacagagtgtgggccaacgtgggcaagagcctgaactgcatcatcgccatggtggacaagctgattgaaagagatggcggcagcgagggcagcggcggcaacaatgatggagagaaggagcccagcctgacagatgccatccccagccacccccgggaggactggtatgagcagctgtaccccctcatcctgaccctgaaggactgcatgggagaggtggtgaacagagccaagcagagcctgacctttgtgctgctgcaggagctggcctacagcctgccccagtgcctgatgctgaccctgcggcgggacatcgtgttcagccaggccctggccggcctggtgtgtggcttcatcatcaagctgcagaccagcctgtatgaccccggcttcctgcagcagctgcacacagtgggcctgattgtgcagtatgagggcctgctgagcacctacagtgatgaaattggcatgctggaggacatggctgtgggcatcagtgacctgaagaaggtggccttcaagatcatcgaggccaagagcaatgatgtgctgcctgtgatcaccggccggcgggagcactacgtggtggaggtgaagctgcctgccaggatgtttgagagcctgcccctgcagatcaaggagggccagctgctgcacgtgtaccctgtgctcttcaacgtgggcatcaatgagcagcagaccctggccgagagatttggagatgtgtccctgcaggagagcatcaaccaggagaactttgagctgctgcaggagtactacaagatcttcatggagaagatgcccccagactacatcagccacttccaggagcagaatgacctgaaggccctgctggagaacctgctgcagaacatccagagcaagaagaaggagtgcaggaactacgtggccggctgcaatgacctgccccagacagagtggtacagcttccacctgctgtag

SEQ ID NO: 40828 - DNA, 3741 bp, Artificial Sequence
  derived and/or modified sequence
gacttctttccattttgttttttgcagagccttgaaaccagcgaaacaataatcaaagagcagttctgtcaaagaaaacaacataaatcaggtacagaatttcagagtgggatatcagatctttagtgtgaagatacatctacattaaaccaggaatcactagaactgacatttggacaagaaaatttggaaaattttaaaactgtgaaggttgatcatggaaattaaagaggaaggggcatcagaagaagggcagcactttcttcctacagcccaggccaatgatcccggggactgtcagttcacaagtatccagaagactccaaatgaaccgcagttggaattcatccttgcatgcaaggatctcgtggctcctgtccgtgatcgtaaactgaatacactggtgcagatctccgtaatccaccccgtggagcagagtctgacaagatactccagcaccgaaattgtggagggaacaagggacccactgtttttgactggtgtcacattcccatctgagtatcccatctatgaggagaccaaaataaaactaacagtctatgatgtcaaggataagtctcatgacaccgttcgaaccagtgtcctaccagaacataaggatcccccgccagaagttgggcgaagtttcttgggctatgccagttttaaagtgggagagctgctgaagtcaaaggagcaattgctggtcctgagcctgagaacttcagatggtggcaaagtggttggcaccatagaagtcagtgtcgtgaagatgggggagattgaggatggggaagccgaccacatcaccacagatgtacagggacaaaagtgtgccctggtatgtgaatgtacagccccggaaagtgtgagcggaaaagataacttaccttttttgaattcagtgttaaagaacccagtatgtaaattatatagatttcccacatctgacaataagtggatgcgaattcgagagcagatgtcagagagcattctttcctttcatattcctaaggaattgatttcccttcacattaaagaagatttgtgcagaaaccaggagataaaagaacttggtgagctttctccacattgggacaatctgcgaaaaaatgtccttactcactgtgatcaaatggtgaatatgtaccaagacattctgacagaacttagcaaggaaacagggtcctctttcaaatcaagcagcagcaaaggagagaaaacattagaatttgttccaataaatctacatctgcaaagaatgcaggtacacagccctcacttgaaagatgctctctacgatgtcatcactgtgggagccccagctgcccattttcagggatttaagaatggtggtcttcggaagctactccatagatttgaaacagaaagaagaaataccggataccagtttatttactattcacctgaaaacacagccaaagcaaaggaagttctcagcaacatcaatcaactacaacctcttatagcaacccatgcagacctactgcttaattctgcaagccagcattctccagacagcttgaagaattctttaaagatgctttcagaaaaaacagagctttttgtacatgccttcaaggatcaacttgtcaggagtgctcttttagcactctacactgcaaggccaggaggcattcttaagaagccaccctctcctaagagcagcacagaggagagcagtccccaagaccaacccccagtgatgagagggcaggactccataccacatcattcagactatgatgaggaagagtgggacagggtgtgggccaatgtggggaagagcctgaactgcattattgctatggtggacaaactgattgaaagagatggtggcagtgaaggcagtggcggcaacaatgatggagaaaaggaaccttcattaacagatgccattccctctcacccaagagaggactggtatgaacagttgtatcccctcatccttaccctgaaggactgcatgggagaagtggtgaaccgagccaagcagtccctgacatttgtgctccttcaggaacttgcgtacagcttgccccagtgtctgatgctgacgctaagaagagacatcgtcttcagccaagcacttgctggattggtttgtggttttatcatcaaattacagacaagtctgtatgacccaggcttcctacagcagcttcacacagtggggttgatagtacaatatgaaggactgctaagtacatacagcgatgaaattggaatgctagaggacatggccgttggcatttccgatttaaagaaagttgcatttaaaataattgaagccaaatccaatgatgtgttgccagttataacaggaagacgagaacattacgtggtagaggtcaagcttccagccagaatgtttgagtcactacctctacagattaaagaaggacagttgcttcatgtgtatccagtactttttaatgttggaatcaatgaacagcaaactctggctgaaaggtttggagatgtctctttgcaagaaagtattaatcaggaaaacttcgaacttctacaagaatattacaagatatttatggaaaagatgcctcctgattatatttcacattttcaggaacaaaatgatttaaaagcattgctagaaaatctccttcaaaatatccaatccaaaaaaagaaagaatgtagaaattatgtggctggctgcaacgatttgccgcaaactgaatggtattcgtttcacctgttgtaaaagtgccaaagacaggacatcgatgtcagtgacacttgaacaatgctcaatcttgagagatgagcaccagttacacaaggacttctttatccgagcgctggattgcatgagaagagaaggatgccgcatagagaatgtactgaagaatatcaaatgcagaaagtatgctttcaacatgctacagctgatggctttccccaagtactacagacctccagaggggacttatggaaaagctgacacctaagtttaccaacatgttaataaacaggaacacaaatacatttcagttggataatcttcaccttggtcttttttgtttgtttttattgtcatgaatttgtggtgggggagatgatcacagatgtttcccaaaatctaggaactacttcaattcatcatcagcatattgctctgaaagaaatccattttaaaaaatcttacatgattcagtactgtcatttctagttctaagcttctatgtgttgagcctagctgattgagattggttcacaaagtgtaaatttcattcatgagtatttaaatgtttctgaggaaacatggatcatttcaataggactaggggtgattcacagagcaccactctccaaccaaatggaagagaggagagggggaaaaggaacatattttttttgtgatacaacttaatagcctatgagaacacagtcaacctgagaatcaatgtaagggatttaaaaaaaatgtgtagccactcaattaggtagagttaactcatgatctggaatactgaggcagtttgcaggtatgttccacaatgatctctatcatccagtcaaggtgtgactcctcccttgcaacaggcatatgcatggagtgagtaaagtggtcaacagacctttcaaaaccatggcatcttttcagaactctgacttgggttgtgtgatctagctgtgaatgtagcaatatagaacgtttaatagaatgataagcaaaacactgcaatgatctaaaatt

SEQ ID NO: 40829 - DNA, 2936 bp, Artificial Sequence
  derived and/or modified sequence
aatttcagagtgggatatcagatctttagtgtgaagatacatctacattaaaccaggaatcactagaactgacatttggacaagaaaatttggaaaattttaaaactgtgaaggttgatcatggaaattaaagaggaaggggcatcagaagaagggcagcactttcttcctacagcccaggccaatgatcccggggactgtcagttcacaagtatccagaagactccaaatgaaccgcagttggaattcatccttgcatgcaaggatctcgtggctcctgtccgtgatcgtaaactgaatacactggtgcagatctccgtaatccaccccgtggagcagagtctgacaagatactccagcaccgaaattgtggagggaacaagggacccactgtttttgactggtgtcacattcccatctgagtatcccatctatgaggagaccaaaataaaactaacagtctatgatgtcaaggataagtctcatgacaccgttcgaaccagtgtcctaccagaacataaggatcccccgccagaagttgggcgaagtttcttgggctatgccagttttaaagtgggagagctgctgaagtcaaaggagcaattgctggtcctgagcctgagaacttcagatggtggcaaagtggttggcaccatagaagtcagtgtcgtgaagatgggggagattgaggatggggaagccgaccacatcaccacagatgtacagggacaaaagtgtgccctggtatgtgaatgtacagccccggaaagtgtgagcggaaaagataacttaccttttttgaattcagtgttaaagaacccagtatgtaaattatatagatttcccacatctgacaataagtggatgcgaattcgagagcagatgtcagagagcattctttcctttcatattcctaaggaattgatttcccttcacattaaagaagatttgtgcagaaaccaggagataaaagaacttggtgagctttctccacattgggacaatctgcgaaaaaatgtccttactcactgtgatcaaatggtgaatatgtaccaagacattctgacagaacttagcaaggaaacagggtcctctttcaaatcaagcagcagcaaaggagagaaaacattagaatttgttccaataaatctacatctgcaaagaatgcaggtacacagccctcacttgaaagatgctctctacgatgtcatcactgtgggagccccagctgcccattttcagggatttaagaatggtggtcttcggaagctactccatagatttgaaacagaaagaagaaataccggataccagtttatttactattcacctgaaaacacagccaaagcaaaggaagttctcagcaacatcaatcaactacaacctcttatagcaacccatgcagacctactgcttaattctgcaagccagcattctccagacagcttgaagaattctttaaagatgctttcagaaaaaacagagctttttgtacatgccttcaaggatcaacttgtcaggagtgctcttttagcactctacactgcaaggccaggaggcattcttaagaagccaccctctcctaagagcagcacagaggagagcagtccccaagaccaacccccagtgatgagagggcaggactccataccacatcattcagactatgatgaggaagagtgggacagggtgtgggccaatgtggggaagagcctgaactgcattattgctatggtggacaaactgattgaaagagatggtggcagtgaaggcagtggcggcaacaatgatggagaaaaggaaccttcattaacagatgccattccctctcacccaagagaggactggtatgaacagttgtatcccctcatccttaccctgaaggactgcatgggagaagtggtgaaccgagccaagcagtccctgacatttgtgctccttcaggaacttgcgtacagcttgccccagtgtctgatgctgacgctaagaagagacatcgtcttcagccaagcacttgctggattggtttgtggttttatcatcaaattacagacaagtctgtatgacccaggcttcctacagcagcttcacacagtggggttgatagtacaatatgaaggactgctaagtacatacagcgatgaaattggaatgctagaggacatggccgttggcatttccgatttaaagaaagttgcatttaaaataattgaagccaaatccaatgatgtgttgccagttataacaggaagacgagaacattacgtggtagaggtcaagcttccagccagaatgtttgagtcactacctctacagattaaagaaggacagttgcttcatgtgtatccagtactttttaatgttggaatcaatgaacagcaaactctggctgaaaggtttggagatgtctctttgcaagaaagtattaatcaggaaaacttcgaacttctacaagaatattacaagatatttatggaaaagatgcctcctgattatatttcacattttcaggaacaaaatgatttaaaagcattgctagaaaatctccttcaaaatatccaatccaaaaaaagaaagaatgtagaaattatgtggctggctgcaacgatttgccgcaaactgaatggtattcgtttcacctgttgtaaaagtgccaaagacaggacatcgatgtcagtgacacttgaacaatgctcaatcttgagagatgagcaccagttacacaaggacttctttatccgagcgctggattgcatgagaagagaaggatgccgcatagagaatgtactgaagaatatcaaatgcagaaagtatgctttcaacatgctacagctgatggctttccccaagtactacagacctccagaggggacttatggaaaagctgacacctaagtttaccaacatgttaataaacaggaacacaaatacatttc

SEQ ID NO: 40830 - DNA, 3165 bp, Artificial Sequence
  derived and/or modified sequence
cccaagaggggtcttactcatccttttccattttggagaggttctgctgactctacattaagcccagacagggtggtgtcctgctttgctcctttctgctctctgcgttcctctgctgccttgatggattctgatgtggttgctcagatgatcagcctgcaggagccttgaaaccagcgaaacaataatcaaagagcagttctgtcaaagaaaacaacataaatcaggtacagaatttcagagtgggatatcagatctttagtgtgaagatacatctacattaaaccaggaatcactagaactgacatttggacaagaaaatttggaaaattttaaaactgtgaaggttgatcatggaaattaaagaggaaggggcatcagaagaagggcagcactttcttcctacagcccaggccaatgatcccggggactgtcagttcacaagtatccagaagactccaaatgaaccgcagttggaattcatccttgcatgcaaggatctcgtggctcctgtccgtgatcgtaaactgaatacactggtgcagatctccgtaatccaccccgtggagcagagtctgacaagatactccagcaccgaaattgtggagggaacaagggacccactgtttttgactggtgtcacattcccatctgagtatcccatctatgaggagaccaaaataaaactaacagtctatgatgtcaaggataagtctcatgacaccgttcgaaccagtgtcctaccagaacataaggatcccccgccagaagttgggcgaagtttcttgggctatgccagttttaaagtgggagagctgctgaagtcaaaggagcaattgctggtcctgagcctgagaacttcagatggtggcaaagtggttggcaccatagaagtcagtgtcgtgaagatgggggagattgaggatggggaagccgaccacatcaccacagatgtacagggacaaaagtgtgccctggtatgtgaatgtacagccccggaaagtgtgagcggaaaagataacttaccttttttgaattcagtgttaaagaacccagtatgtaaattatatagatttcccacatctgacaataagtggatgcgaattcgagagcagatgtcagagagcattctttcctttcatattcctaaggaattgatttcccttcacattaaagaagatttgtgcagaaaccaggagataaaagaacttggtgagctttctccacattgggacaatctgcgaaaaaatgtccttactcactgtgatcaaatggtgaatatgtaccaagacattctgacagaacttagcaaggaaacagggtcctctttcaaatcaagcagcagcaaaggagagaaaacattagaatttgttccaataaatctacatctgcaaagaatgcaggtacacagccctcacttgaaagatgctctctacgatgtcatcactgtgggagccccagctgcccattttcagggatttaagaatggtggtcttcggaagctactccatagatttgaaacagaaagaagaaataccggataccagtttatttactattcacctgaaaacacagccaaagcaaaggaagttctcagcaacatcaatcaactacaacctcttatagcaacccatgcagacctactgcttaattctgcaagccagcattctccagacagcttgaagaattctttaaagatgctttcagaaaaaacagagctttttgtacatgccttcaaggatcaacttgtcaggagtgctcttttagcactctacactgcaaggccaggaggcattcttaagaagccaccctctcctaagagcagcacagaggagagcagtccccaagaccaacccccagtgatgagagggcaggactccataccacatcattcagactatgatgaggaagagtgggacagggtgtgggccaatgtggggaagagcctgaactgcattattgctatggtggacaaactgattgaaagagatggtggcagtgaaggcagtggcggcaacaatgatggagaaaaggaaccttcattaacagatgccattccctctcacccaagagaggactggtatgaacagttgtatcccctcatccttaccctgaaggactgcatgggagaagtggtgaaccgagccaagcagtccctgacatttgtgctccttcaggaacttgcgtacagcttgccccagtgtctgatgctgacgctaagaagagacatcgtcttcagccaagcacttgctggattggtttgtggttttatcatcaaattacagacaagtctgtatgacccaggcttcctacagcagcttcacacagtggggttgatagtacaatatgaaggactgctaagtacatacagcgatgaaattggaatgctagaggacatggccgttggcatttccgatttaaagaaagttgcatttaaaataattgaagccaaatccaatgatgtgttgccagttataacaggaagacgagaacattacgtggtagaggtcaagcttccagccagaatgtttgagtcactacctctacagattaaagaaggacagttgcttcatgtgtatccagtactttttaatgttggaatcaatgaacagcaaactctggctgaaaggtttggagatgtctctttgcaagaaagtattaatcaggaaaacttcgaacttctacaagaatattacaagatatttatggaaaagatgcctcctgattatatttcacattttcaggaacaaaatgatttaaaagcattgctagaaaatctccttcaaaatatccaatccaaaaaaagaaagaatgtagaaattatgtggctggctgcaacgatttgccgcaaactgaatggtattcgtttcacctgttgtaaaagtgccaaagacaggacatcgatgtcagtgacacttgaacaatgctcaatcttgagagatgagcaccagttacacaaggacttctttatccgagcgctggattgcatgagaagagaaggatgccgcatagagaatgtactgaagaatatcaaatgcagaaagtatgctttcaacatgctacagctgatggctttccccaagtactacagacctccagaggggacttatggaaaagctgacacctaagtttaccaacatgttaataaacaggaacacaaataca

SEQ ID NO: 40831 - DNA, 2855 bp, Artificial Sequence
  derived and/or modified sequence
ggatgtttcctgccctcgaacatcagaatccatgtttttcagcttttgggctcttggacttacaccagtggtttgccagggccccccagccttcgaccacagattgaaggctacactgttggcctccctacttttgaggttttggaacttggactggcttccttgctcctcagtttgcagacagcctattgtggaacttcaccttgtgatcgtagccttgaaaccagcgaaacaataatcaaagagcagttctgtcaaagaaaacaacataaatcaggtacagaatttcagagtgggatatcagatctttagtgtgaagatacatctacattaaaccaggaatcactagaactgacatttggacaagaaaatttggaaaattttaaaactgtgaaggttgatcatggaaattaaagaggaaggggcatcagaagaagggcagcactttcttcctacagcccaggccaatgatcccggggactgtcagttcacaagtatccagaagactccaaatgaaccgcagttggaattcatccttgcatgcaaggatctcgtggctcctgtccgtgatcgtaaactgaatacactggtgcagatctccgtaatccaccccgtggagcagagtctgacaagatactccagcaccgaaattgtggagggaacaagggacccactgtttttgactggtgtcacattcccatctgagtatcccatctatgaggagaccaaaataaaactaacagtctatgatgtcaaggataagtctcatgacaccgttcgaaccagtgtcctaccagaacataaggatcccccgccagaagttgggcgaagtttcttgggctatgccagttttaaagtgggagagctgctgaagtcaaaggagcaattgctggtcctgagcctgagaacttcagatggtggcaaagtggttggcaccatagaagtcagtgtcgtgaagatgggggagattgaggatggggaagccgaccacatcaccacagatgtacagggacaaaagtgtgccctggtatgtgaatgtacagccccggaaagtgtgagcggaaaagataacttaccttttttgaattcagtgttaaagaacccagtatgtaaattatatagatttcccacatctgacaataagtggatgcgaattcgagagcagatgtcagagagcattctttcctttcatattcctaaggaattgatttcccttcacattaaagaagatttgtgcagaaaccaggagataaaagaacttggtgagctttctccacattgggacaatctgcgaaaaaatgtccttactcactgtgatcaaatggtgaatatgtaccaagacattctgacagaacttagcaaggaaacagggtcctctttcaaatcaagcagcagcaaaggagagaaaacattagaatttgttccaataaatctacatctgcaaagaatgcaggtacacagccctcacttgaaagatgctctctacgatgtcatcactgtgggagccccagctgcccattttcagggatttaagaatggtggtcttcggaagctactccatagatttgaaacagaaagaagaaataccggataccagtttatttactattcacctgaaaacacagccaaagcaaaggaagttctcagcaacatcaatcaactacaacctcttatagcaacccatgcagacctactgcttaattctgcaagccagcattctccagacagcttgaagaattctttaaagatgctttcagaaaaaacagagctttttgtacatgccttcaaggatcaacttgtcaggagtgctcttttagcactctacactgcaaggccaggaggcattcttaagaagccaccctctcctaagagcagcacagaggagagcagtccccaagaccaacccccagtgatgagagggcaggactccataccacatcattcagactatgatgaggaagagtgggacagggtgtgggccaatgtggggaagagcctgaactgcattattgctatggtggacaaactgattgaaagagatggtggcagtgaaggcagtggcggcaacaatgatggagaaaaggaaccttcattaacagatgccattccctctcacccaagagaggactggtatgaacagttgtatcccctcatccttaccctgaaggactgcatgggagaagtggtgaaccgagccaagcagtccctgacatttgtgctccttcaggaacttgcgtacagcttgccccagtgtctgatgctgacgctaagaagagacatcgtcttcagccaagcacttgctggattggtttgtggttttatcatcaaattacagacaagtctgtatgacccaggcttcctacagcagcttcacacagtggggttgatagtacaatatgaaggactgctaagtacatacagcgatgaaattggaatgctagaggacatggccgttggcatttccgatttaaagaaagttgcatttaaaataattgaagccaaatccaatgatgtgttgccagttataacaggaagacgagaacattacgtggtagaggtcaagcttccagccagaatgtttgagtcactacctctacagattaaagaaggacagttgcttcatgtgtatccagtactttttaatgttggaatcaatgaacagcaaactctggctgaaaggtttggagatgtctctttgcaagaaagtattaatcaggaaaacttcgaacttctacaagaatattacaagatatttatggaaaagatgcctcctgattatatttcacattttcaggaacaaaatgatttaaaagcattgctagaaaatctccttcaaaatatccaatccaaaaaaa

SEQ ID NO: 40832 - DNA, 8831 bp, Artificial Sequence
  derived and/or modified sequence
cacacgctcgcaagcgaacgcaggaaagtcaggctaaaagtgtctgctgctgctgccgccccccactccgcctccgggagagaatacaaagaaatggtgttacctggcaagaggtcttctgtcttttatgaaaaattagacaaaggctttacaggaggcatagtactggaaatctgctcctgatgaggtctcagaaagcttccactcgtggtggaaggcaaaggaggagcaggcacatcacatgagccttgaaaccagcgaaacaataatcaaagagcagttctgtcaaagaaaacaacataaatcaggtacagaatttcagagtgggatatcagatctttagtgtgaagatacatctacattaaaccaggaatcactagaactgacatttggacaagaaaatttggaaaattttaaaactgtgaaggttgatcatggaaattaaagaggaaggggcatcagaagaagggcagcactttcttcctacagcccaggccaatgatcccggggactgtcagttcacaagtatccagaagactccaaatgaaccgcagttggaattcatccttgcatgcaaggatctcgtggctcctgtccgtgatcgtaaactgaatacactggtgcagatctccgtaatccaccccgtggagcagagtctgacaagatactccagcaccgaaattgtggagggaacaagggacccactgtttttgactggtgtcacattcccatctgagtatcccatctatgaggagaccaaaataaaactaacagtctatgatgtcaaggataagtctcatgacaccgttcgaaccagtgtcctaccagaacataaggatcccccgccagaagttgggcgaagtttcttgggctatgccagttttaaagtgggagagctgctgaagtcaaaggagcaattgctggtcctgagcctgagaacttcagatggtggcaaagtggttggcaccatagaagtcagtgtcgtgaagatgggggagattgaggatggggaagccgaccacatcaccacagatgtacagggacaaaagtgtgccctggtatgtgaatgtacagccccggaaagtgtgagcggaaaagataacttaccttttttgaattcagtgttaaagaacccagtatgtaaattatatagatttcccacatctgacaataagtggatgcgaattcgagagcagatgtcagagagcattctttcctttcatattcctaaggaattgatttcccttcacattaaagaagatttgtgcagaaaccaggagataaaagaacttggtgagctttctccacattgggacaatctgcgaaaaaatgtccttactcactgtgatcaaatggtgaatatgtaccaagacattctgacagaacttagcaaggaaacagggtcctctttcaaatcaagcagcagcaaaggagagaaaacattagaatttgttccaataaatctacatctgcaaagaatgcaggtacacagccctcacttgaaagatgctctctacgatgtcatcactgtgggagccccagctgcccattttcagggatttaagaatggtggtcttcggaagctactccatagatttgaaacagaaagaagaaataccggataccagtttatttactattcacctgaaaacacagccaaagcaaaggaagttctcagcaacatcaatcaactacaacctcttatagcaacccatgcagacctactgcttaattctgcaagccagcattctccagacagcttgaagaattctttaaagatgctttcagaaaaaacagagctttttgtacatgccttcaaggatcaacttgtcaggagtgctcttttagcactctacactgcaaggccaggaggcattcttaagaagccaccctctcctaagagcagcacagaggagagcagtccccaagaccaacccccagtgatgagagggcaggactccataccacatcattcagactatgatgaggaagagtgggacagggtgtgggccaatgtggggaagagcctgaactgcattattgctatggtggacaaactgattgaaagagatggtggcagtgaaggcagtggcggcaacaatgatggagaaaaggaaccttcattaacagatgccattccctctcacccaagagaggactggtatgaacagttgtatcccctcatccttaccctgaaggactgcatgggagaagtggtgaaccgagccaagcagtccctgacatttgtgctccttcaggaacttgcgtacagcttgccccagtgtctgatgctgacgctaagaagagacatcgtcttcagccaagcacttgctggattggtttgtggttttatcatcaaattacagacaagtctgtatgacccaggcttcctacagcagcttcacacagtggggttgatagtacaatatgaaggactgctaagtacatacagcgatgaaattggaatgctagaggacatggccgttggcatttccgatttaaagaaagttgcatttaaaataattgaagccaaatccaatgatgtgttgccagttataacaggaagacgagaacattacgtggtagaggtcaagcttccagccagaatgtttgagtcactacctctacagattaaagaaggacagttgcttcatgtgtatccagtactttttaatgttggaatcaatgaacagcaaactctggctgaaaggtttggagatgtctctttgcaagaaagtattaatcaggaaaacttcgaacttctacaagaatattacaagatatttatggaaaagatgcctcctgattatatttcacattttcaggaacaaaatgatttaaaagcattgctagaaaatctccttcaaaatatccaatccaaaaaaagaaagaatgtagaaattatgtggctggctgcaacgatttgccgcaaactgaatggtattcgtttcacctgttgtaaaagtgccaaagacaggacatcgatgtcagtgacacttgaacaatgctcaatcttgagagatgagcaccagttacacaaggacttctttatccgagcgctggattgcatgagaagagaaggatgccgcatagagaatgtactgaagaatatcaaatgcagaaagtatgctttcaacatgctacagctgatggctttccccaagtactacagacctccagaggggacttatggaaaagctgacacctaagtttaccaacatgttaataaacaggaacacaaatacatttcagttggataatcttcaccttggtcttttttgtttgtttttattgtcatgaatttgtggtgggggagatgatcacagatgtttcccaaaatctaggaactacttcaattcatcatcagcatattgctctgaaagaaatccattttaaaaaatcttacatgattcagtactgtcatttctagttctaagcttctatgtgttgagcctagctgattgagattggttcacaaagtgtaaatttcattcatgagtatttaaatgtttctgaggaaacatggatcatttcaataggactaggggtgattcacagagcaccactctccaaccaaatggaagagaggagagggggaaaaggaacatattttttttgtgatacaacttaatagcctatgagaacacagtcaacctgagaatcaatgtaagggatttaaaaaaaatgtgtagccactcaattaggtagagttaactcatgatctggaatactgaggcagtttgcaggtatgttccacaatgatctctatcatccagtcaaggtgtgactcctcccttgcaacaggcatatgcatggagtgagtaaagtggtcaacagacctttcaaaaccatggcatcttttcagaactctgacttgggttgtgtgatctagctgtgaatgtagcaatatagaacgtttaatagaatgataagcaaaacactgcaatgatctaaaattacaaataaaataaaaatgaacaacattttgatacccaaaatgaaaattcccatcagcctgaactttatgttgtgaagttcatgaatgtcagtgaggtatctctgagatgtttcttagcagtcatcctggtgtaagcatgcagttatggcataggtttgtgtgtgttaataagcctttaaaacatatgcaaccacaacaaatgataaagtaaaacaattattttctgttgccctgaatatcaaacttgcccttgcccttactcagcaaaataacatttataagttttccaaaatcccaaagtagaagtttccttaaaaaaatcatcttgtataataccagtattcaaacatgggtaaggttaatcacccccaatcactcaggagatagttgcagaatttgaattacaatctcttcttactttcctagcctgtggcttgtcacttctccaaattgccatgctaaatatgcatgaaaattgagggagaatgctagttaaaaagaaattaggatttatcactggaattgaaactaagagtacaaaagtctgaacgaatgaaacttttctccaaattttacaaattcttgttcctttctcattagaagagcatgctatccaaagcataaatctcccttgaaaataacagaggcttcttaagccctctcttagctatgatcaatggatgatattatgcttcccatagctaatgtgatagctccttgcctaggattcctgttgaaataaggattctagccccatgttaagtttttcaaattactacaaattttagataagcatttggagctttttatactagaattatcaattttttattttagctaattacctgtgggcattatacttgaggcaggtaccaaactacttacagcctttttaatgaaaatgtgctgtgtactttgaatccattcatagacaaaattaccttgatgttctcttaactcattctttattttagtgattaaatacaacctttgagttgttcaatatcatttgaaaatggtaggatttgtggttattttcattaccctattagatttaagataggctgggatgacagaggcctccttgaatagctatgaagcctcattcagcatatcaaatggtagtctgagttctaagaaaccttaagtaatttatcattctgtaaatactcttataagcaataatttttatttgtatttttgaaaacaaactacttaaatatggaaaaatattaactggaaagccagcagtagggttttctatttttaaaagacatttcaaggatttcctgtaatcccagcactttgggagccaaggtggatagatcacctgaggtcaggaattggagatcagcctggccaacatggtgaaaccccatctctactaaagatacaaaaattagctggatgtggtggcacacacgtgtaatcccagctacttgggaggctgaggcaagagaatcgcttgaaccccggaggcggaggttgcagtgagctgagatcatgccattgcactccagcctgggtgaaaagagcgaaactccatctttaaataagtaaataaatgaataatatagaagtctcaaattatagtgcttactgtaatacaaatgcttatgaattttcattcattaccatagtcatctgcatttccttatagaaagcctgtactggtgcaaacttctaaaagtggatttcatcaagaaaatgtgtttcatagagacaacaatattgcttttttcctgagaggcagttcattcttaaacaaccacttcactatttcttaagttattaaggctaaatcaaagagcaaatgttaaagtgtttaaatctctcttgaacaaacacagccacagtcatgctattctatctatattttcacttaaaagatacaccagcagacctattttaggaggtcatattgagccaaaaaatgaactgagcaaatgacatttccaaactctttttttgctcaaaaataatatgttcccctttgatattaaatgcagatatcaattctggattagctatttactgagccctaggaaaaacatatttaaagacaaggaaaccattcatttacatctcatatcattgctttttgcttttaaatatcgccttgaggtttgtctacactctgccaaaacaatccctgaacataagtttggtcagcctcataattcagtgagtcgagcaaccatttgttccaagtgataaattgtactaaatgacaaactgcccaatcagggcagagctccatggacccagcctccagcccttattttataagactaacccctcttctgaaaaactctgaaggcttaaaagctagcatttggatggaggatacttcctttttatccttcagctatgtatggcactttacataaaataagaggtaaaaaaggagagaaactgatgtgtataaagtaatgcctttcttcccaagcaaatcaaacctctccctatgtaaaagttgatagtgtaccaagagacacaataccactggtgggctggaactagctcgttctgatgcataaaagttgataattaaagtaccagaaattttgtaagctagttgttaaacattaccattattaaatatgaaattataaaacacagtggaatacattaaaaaccaatgtaataatcaaaacataccacttcccaattattttactaccttatactatttattagtactcttgagtctatttaggtctattacatctttacagtgaaaacaggatacaatattgtgctactgtgggtctcttcctgactgcagattcagtaacatggtgttcgtagcttgaaactgtccacagtgggagtatttaacaccatagaaactggctggcaaatgctacaaactagcaattttaattcctggaaaggcaattgttgagcatttaccagcacacaatgaatgccatattcttttttttttattaggaaataaattattggaggcagtataaaattatttaaaaagtatcaaatgcaatcccttatcttcagatggctataattttggttatataaatgttttggtttttaccttctttaaagactcctattaggttaaaagtcatatttgatgactatattttattcataattaaattattaaatcaccttttctcctgataatgctttgccagagaattcttagcaattcaactgtagtctaagcaataactcagggctaaattcagggaactgttagcccaatcagatatcactaaaaatgtacttcaccatctattttggagtttataattttggcatttgctaaaagtaggaaaaacagtaacatattactgtgcccagattctaataaatatagctcaattgaaaccaaaactgttacattaaacaaattacactctggcactatgctaaatcaccacagatgttttaggtgtttgatttccaagcaggatggtatatcatttgtttggttcaatatatgaggcaccatttgtagtcttttaggaaataaattagcttttatcacagatttaggaaacttgtctaaaaaaactgtgatcatcagttacagagggaaggaaacatattgaacacaaggcatcatagtagctggaggccttaaaaattatgcacgaccaaaaagaatgatttggtgagagatgtgtagctgattgacaattttagtgtgaattcatattcatttaacccagcagcaatctacataagctatgctttttcccacctgtatttatgtttcttagcttataaagtcccaatatattatatcttttgttgctttggcagttttaatttagagctctgcgttcacagagatgccacctatagcaaaaactatctttaagaattggaaaataaaatgaatgttttagataaaatattgcaagccattatgtgtagagttaatgtatggaaatttgcatttgtttttctgaatcatggtgtacattaatcactcattgaattctatttctaagcaaataagagaatcaaacatttctaaaaggaacatatgtcttgctattaataacaaggagacaggaaaaatagtaaggtaatataagcaaaaaaaaaaatgtaatgaatttagctatcctaaattggaatttttacagattgcatgcatacttagaattttaaatttttaaaagatttacaattgagtatggtacccacagagagtgagtaccaagggaaggaagacctaatacaagtgatgttgcctgataaatcacatcttgccaaaaaaaatatattttagtaaatacagttctttaggaagaaaaatgttgccctttcacactcacagtgtaaatacattcataatattccttcaatcatctaaattaccgccaggtcatgaaaggacgcgatcaatgatgacctattgcactcacaggtaacattgactcaaattttggcaatattgctatattatctagataattcttgtgatgtttttatgtcactatcaacattaaaaatattttgttaaacaactatgaaactttcaaaagtttgcatataactgtatgggcactctcatttcactgcatacatacaatactttgtatacacatacttctcgtgtggatattttataattttatttaatctaacatttaacttttaggtttttgtggtactcatctgaaaggttggcatttgttttctttttatgttatatatgtattttagatgaatcaataatgtgtattcctagaaattttttctaggcataaatagatcattttatgttggcatttaagagatatcatttttgttttattgttctgtgtaaaccatattcattgtacactgtgtgtatatttttgtttaaataaatgatttttatttttta

SEQ ID NO: 40833 - DNA, 2263 bp, Artificial Sequence
  derived and/or modified sequence
atatctggaatacaaagttgttgctgccagtgatttgaggaattctaataagaggaacaacagcattgcgaagtttcttgggctatgccagttttaaagtgggagagctgctgaagtcaaaggagcaattgctggtcctgagcctgagaacttcagatggtggcaaagtggttggcaccatagaagtcagtgtcgtgaagatgggggagattgaggatggggaagccgaccacatcaccacagatgtacagggacaaaagtgtgccctggtatgtgaatgtacagccccggaaagtgtgagcggaaaagataacttaccttttttgaattcagtgttaaagaacccagtatgtaaattatatagatttcccacatctgacaataagtggatgcgaattcgagagcagatgtcagagagcattctttcctttcatattcctaaggaattgatttcccttcacattaaagaagatttgtgcagaaaccaggagataaaagaacttggtgagctttctccacattgggacaatctgcgaaaaaatgtccttactcactgtgatcaaatggtgaatatgtaccaagacattctgacagaacttagcaaggaaacagggtcctctttcaaatcaagcagcagcaaaggagagaaaacattagaatttgttccaataaatctacatctgcaaagaatgcaggtacacagccctcacttgaaagatgctctctacgatgtcatcactgtgggagccccagctgcccattttcagggatttaagaatggtggtcttcggaagctactccatagatttgaaacagaaagaagaaataccggataccagtttatttactattcacctgaaaacacagccaaagcaaaggaagttctcagcaacatcaatcaactacaacctcttatagcaacccatgcagacctactgcttaattctgcaagccagcattctccagacagcttgaagaattctttaaagatgctttcagaaaaaacagagctttttgtacatgccttcaaggatcaacttgtcaggagtgctcttttagcactctacactgcaaggccaggaggcattcttaagaagccaccctctcctaagagcagcacagaggagagcagtccccaagaccaacccccagtgatgagagggcaggactccataccacatcattcagactatgatgaggaagagtgggacagggtgtgggccaatgtggggaagagcctgaactgcattattgctatggtggacaaactgattgaaagagatggtggcagtgaaggcagtggcggcaacaatgatggagaaaaggaaccttcattaacagatgccattccctctcacccaagagaggactggtatgaacagttgtatcccctcatccttaccctgaaggactgcatgggagaagtggtgaaccgagccaagcagtccctgacatttgtgctccttcaggaacttgcgtacagcttgccccagtgtctgatgctgacgctaagaagagacatcgtcttcagccaagcacttgctggattggtttgtggttttatcatcaaattacagacaagtctgtatgacccaggcttcctacagcagcttcacacagtggggttgatagtacaatatgaaggactgctaagtacatacagcgatgaaattggaatgctagaggacatggccgttggcatttccgatttaaagaaagttgcatttaaaataattgaagccaaatccaatgatgtgttgccagttataacaggaagacgagaacattacgtggtagaggtcaagcttccagccagaatgtttgagtcactacctctacagattaaagaaggacagttgcttcatgtgtatccagtactttttaatgttggaatcaatgaacagcaaactctggctgaaaggtttggagatgtctctttgcaagaaagtattaatcaggaaaacttcgaacttctacaagaatattacaagatatttatggaaaagatgcctcctgattatatttcacattttcaggaacaaaatgatttaaaagcattgctagaaaatctccttcaaaatatccaatccaaaaagaaagaatgtagaaattatgtggctggctgcaacgatttgccgcaaactgaatggtattcgtttcacctgttgtaaaagtgccaaagacaggacatcgatgtcagtgacacttgaacaatgctcaatcttgagagatgagcaccagttacacaaggacttctttatcc

SEQ ID NO: 40834 - DNA, 2429 bp, Artificial Sequence
  derived and/or modified sequence
atgatacattttcaccctttaatcctaccccatgagcgaagtttcttgggctatgccagttttaaagtgggagagctgctgaagtcaaaggagcaattgctggtcctgagcctgagaacttcagatggtggcaaagtggttggcaccatagaagtcagtgtcgtgaagatgggggagattgaggatggggaagccgaccacatcaccacagatgtacagggacaaaagtgtgccctggtatgtgaatgtacagccccggaaagtgtgagcggaaaagataacttaccttttttgaattcagtgttaaagaacccagtatgtaaattatatagatttcccacatctgacaataagtggatgcgaattcgagagcagatgtcagagagcattctttcctttcatattcctaaggaattgatttcccttcacattaaagaagatttgtgcagaaaccaggagataaaagaacttggtgagctttctccacattgggacaatctgcgaaaaaatgtccttactcactgtgatcaaatggtgaatatgtaccaagacattctgacagaacttagcaaggaaacagggtcctctttcaaatcaagcagcagcaaaggagagaaaacattagaatttgttccaataaatctacatctgcaaagaatgcaggtacacagccctcacttgaaagatgctctctacgatgtcatcactgtgggagccccagctgcccattttcagggatttaagaatggtggtcttcggaagctactccatagatttgaaacagaaagaagaaataccggataccagtttatttactattcacctgaaaacacagccaaagcaaaggaagttctcagcaacatcaatcaactacaacctcttatagcaacccatgcagacctactgcttaattctgcaagccagcattctccagacagcttgaagaattctttaaagatgctttcagaaaaaacagagctttttgtacatgccttcaaggatcaacttgtcaggagtgctcttttagcactctacactgcaaggccaggaggcattcttaagaagccaccctctcctaagagcagcacagaggagagcagtccccaagaccaacccccagtgatgagagggcaggactccataccacatcattcagactatgatgaggaagagtgggacagggtgtgggccaatgtggggaagagcctgaactgcattattgctatggtggacaaactgattgaaagagatggtggcagtgaaggcagtggcggcaacaatgatggagaaaaggaaccttcattaacagatgccattccctctcacccaagagaggactggtatgaacagttgtatcccctcatccttaccctgaaggactgcatgggagaagtggtgaaccgagccaagcagtccctgacatttgtgctccttcaggaacttgcgtacagcttgccccagtgtctgatgctgacgctaagaagagacatcgtcttcagccaagcacttgctggattggtttgtggttttatcatcaaattacagacaagtctgtatgacccaggcttcctacagcagcttcacacagtggggttgatagtacaatatgaaggactgctaagtacatacagcgatgaaattggaatgctagaggacatggccgttggcatttccgatttaaagaaagttgcatttaaaataattgaagccaaatccaatgatgtgttgccagttataacaggaagacgagaacattacgtggtagaggtcaagcttccagccagaatgtttgagtcactacctctacagattaaagaaggacagttgcttcatgtgtatccagtactttttaatgttggaatcaatgaacagcaaactctggctgaaaggtttggagatgtctctttgcaagaaagtattaatcaggaaaacttcgaacttctacaagaatattacaagatatttatggaaaagatgcctcctgattatatttcacattttcaggaacaaaatgatttaaaagcattgctagaaaatctccttcaaaatatccaatccaaaaaaagaaagaatgtagaaattatgtggctggctgcaacgatttgccgcaaactgaatggtattcgtttcacctgttgtaaaagtgccaaagacaggacatcgatgtcagtgacacttgaacaatgctcaatcttgagagatgagcaccagttacacaaggacttctttatccgagcgctggattgcatgagaagagaaggatgccgcatagagaatgtactgaagaatatcaaatgcagaaagtatgctttcaacatgctacagctgatggctttccccaagtactacagacctccagaggggacttatggaaaagctgacacctaagtttaccaacatgttaataaacaggaacacaaatacatttc

SEQ ID NO: 40835 - DNA, 2775 bp, Artificial Sequence
  derived and/or modified sequence
atggagatcaaggaggagggcgccagcgaggagggccagcacttcctgccaaccgcacaggcgaatgatcccggtgactgccaattcacctctatccagaaaacacccaacgaaccgcaactggaattcatcttagcctgcaaggaccttgtggcgcccgtgagagatagaaagttgaatactctggtgcagattagtgtgattcatcccgttgaacagtcgcttacccggtactctagcacagagatcgtggaaggaacccgcgatcctctgttcctcaccggggtgacctttcctagtgaatacccaatatacgaggagacaaaaatcaagctaacagtgtacgatgtcaaagacaaaagccacgataccgtccgtacatccgtgctgcccgagcacaaggatcctccccccgaggttgggaggagctttcttggctacgcctccttcaaagtcggggagctcttgaagagcaaagaacagctactcgtgctgtctctgcggacctcggatggcggcaaggtggtgggtaccatagaagtgagcgttgtgaagatgggtgagatcgaggatggagaagcggaccacattaccacagacgtgcaaggccagaagtgtgccctcgtttgtgaatgcaccgcccctgaatcagtaagcggaaaagataatttgccttttctcaactccgtgctcaagaatccggtctgtaagctgtatcggttccctacatctgacaacaaatggatgcggattcgggaacagatgtccgagtcaattctaagctttcatattcccaaggaactcatcagtctccacattaaggaggatctgtgccggaatcaggaaatcaaagagcttggggaactgtcacctcactgggataatctccgcaagaacgtgctgacccattgcgaccaaatggttaatatgtaccaggatattttgaccgaactgtctaaggagacagggagctcgtttaagagctcttcttctaaaggtgagaaaacactcgagtttgttcccatcaacctgcatctgcagcgaatgcaagtgcatagcccccatctcaaggacgccttgtacgacgtcatcacagtcggggcgcctgccgcacacttccaaggctttaaaaatggcggactgcggaaattactacaccgctttgaaaccgaacgcaggaacactgggtaccagttcatctactattccccagaaaacacagcgaaggctaaggaggtgctttcaaatataaatcagctgcagcctttaatcgctacccatgccgacttactgctcaactcagctagccagcatagtccagattcattaaaaaactcattgaaaatgttgtccgagaagaccgagctgttcgttcatgcattcaaggaccagttggtgagatcagctctgctggccctgtacactgcccgtcccggaggaatcctcaagaaacctccaagtccaaaatcttcaacagaggaatccagtccccaagaccagcctcctgtcatgaggggccaggattcaattccacaccactccgattatgatgaagaagagtgggaccgtgtgtgggcaaacgtaggcaagtcactaaactgcatcattgcaatggttgataagcttatcgaaagggacggcgggtccgaagggagcggcggcaataacgatggtgaaaaagagccgtctctgactgatgctataccgagccatccccgcgaggactggtacgagcagctgtatccgctgatcctgacccttaaagattgcatgggcgaagtggtaaatcgcgcaaagcagtccctgacatttgtgctgctccaggaactggcatatagccttccgcagtgtttgatgctcacactcaggcgtgacatcgtgttttcccaggcgcttgctgggctggtgtgtggtttcattatcaagcttcagacctctctctacgaccctggatttctgcagcagcttcatacggtgggcctcatagttcagtacgaggggctcctttctacctactccgatgaaatcggcatgttggaggatatggctgtggggatctcggacctcaagaaggtggcatttaaaattattgaggccaagtctaacgatgttctaccagttatcactggccgtcgcgaacactacgtggtggaggtgaagctgcctgcgcgcatgttcgagagcctgcccctgcagatcaaggaggggcagctgctgcacgtctacccagtcctgtttaatgtcggaataaacgaacagcagacgttggctgaaaggttcggcgatgtgagtctgcaagagagcatcaatcaggaaaattttgaacttctgcaggagtattacaaaatcttcatggaaaagatgccgcctgattacatttcacacttccaggaacaaaacgacttaaaggcgctgctagagaacctgctacagaatatccagtctaaaaaaagaaagaacgtggagattatgtggttggccgcgactatctgtcgtaaactcaacgggattcgctttacatgctgcaaaagtgcgaaagatagaaccagtatgtcagttaccttggaacagtgttcaatccttagggatgagcatcaactccacaaggacttctttatcagggctttagattgtatgaggagggagggctgcagaattgagaacgtactgaaaaatatcaaatgtagaaagtacgcgtttaatatgctacagcttatggcctttcctaaatactatcgccctcctgagggtacatatgggaaagccgatacgtag

SEQ ID NO: 40836 - DNA, 2775 bp, Artificial Sequence
  derived and/or modified sequence
atggagatcaaggaggagggcgccagcgaggagggccagcacttcctgcctaccgcccaagccaacgaccctggtgactgtcagtttacctcaatccagaaaacccccaacgagccccagctggagtttatcttagcctgcaaggacctggtggcgcctgttcgcgaccgcaaactgaacacattggtgcaaatctctgttatccatccggttgaacagagtttgacccgctacagcagcactgagatcgttgagggcaccagggaccccctttttctgactggcgttactttccctagcgaatatcccatttacgaagaaaccaaaatcaagctgacagtgtacgatgtgaaagacaagtcccacgataccgtgagaacctccgtgctgccggagcacaaggatccccctcctgaagtggggcggtcttttctcggatatgcctccttcaaagtgggcgaattgttaaagtccaaggaacagcttttggtgctgtctctgaggacgagcgacggaggaaaagtggtcggcacgattgaggtatccgtcgttaagatgggggagattgaagacggagaagctgaccatattaccactgatgtacaaggtcagaagtgtgctttagtctgcgagtgcaccgcgcccgaatccgtaagcgggaaagacaatctgccgtttctgaacagcgtgttgaaaaacccagtctgtaagctgtaccgctttccgacaagtgacaacaaatggatgagaataagggagcagatgagcgagtcgatcctgagcttccatatccccaaagagttgatctcactgcacattaaggaagatctgtgccggaaccaggaaattaaagagttgggcgaactgtcccctcattgggataacttacgcaagaacgtactcacacactgcgaccagatggtgaatatgtaccaggatattctcacagaactcagtaaagagaccggcagcagctttaaatcctcctctagcaagggggagaaaaccctggaattcgtccccatcaacttgcaccttcagcgcatgcaagttcacagtccacacctgaaagacgccttgtacgatgttataaccgtgggagctccggcggcacacttccaggggttcaaaaatggtggtctgcgtaagcttctacaccgcttcgaaactgaacgccggaacacgggttatcagtttatttattactcgcctgagaacactgctaaggccaaggaggtgctgtctaatatcaatcagctgcagccccttattgcaacccacgctgatcttttgctgaactctgcctctcagcattcaccagactccctcaaaaactccttaaagatgcttagcgagaagaccgagcttttcgtgcatgcatttaaagaccagctcgtcagatccgccctcctcgccttatacacagcacgcccaggagggatcttaaaaaagccgccatcacctaaatcttctacagaggagtcgtctccgcaagaccagccaccagttatgaggggacaggacagtatcccgcatcattcagactatgatgaagaggaatgggaccgtgtgtgggctaacgtgggcaagtctctcaattgcattatcgctatggtggacaagttgattgagagagatggcggctcagaggggtcgggcggaaacaatgatggagagaaagagccctcactcacagacgccattccaagccacccccgggaagattggtatgagcagctgtatcctctcatcctcactttaaaggactgcatgggcgaagtggtcaacagagcgaagcagtcactgacattcgttctgttgcaggagctggcctactctttacctcagtgcctgatgctgacactgaggagagatattgtattctcacaggccttggccggtcttgtctgcggctttatcattaaactgcagacatctctgtacgaccccggctttttacagcaactccacaccgtggggttgattgtccagtacgaggggctcctgagcacatattcagacgaaattggaatgctcgaagacatggctgtcgggatttccgatttgaagaaagttgcctttaagatcatagaggccaagtctaatgatgtgttgccagtgataacagggcgcagggaacactacgttgtggaggttaagctgcccgcccgtatgttcgagtctctccctctccagattaaggaggggcagctgctgcatgtgtacccagttttattcaatgtcggaattaatgaacagcagaccttagctgaacgcttcggcgatgtcagtctgcaggagtccatcaaccaagagaacttcgaattactccaggagtactacaagatcttcatggagaagatgcctcctgattatatatcacatttccaggagcagaatgatctcaaagcgctgctcgagaatttgctccagaacatccagtcaaaaaagcggaagaatgtggaaatcatgtggctggctgcaacaatttgcaggaaactgaatggaattagatttacctgctgcaagagtgcgaaggacaggaccagcatgtccgtgactctggaacagtgttcaatcctccgggacgagcatcagctccataaggacttttttattcgggctttagattgtatgagacgggaaggctgccggatcgaaaatgttctgaagaacattaaatgtcgaaaatacgcattcaatatgttgcagctcatggcgttcccaaagtactaccggccccctgagggaacttatgggaaggcagatacttag

SEQ ID NO: 40837 - DNA, 2775 bp, Artificial Sequence
  derived and/or modified sequence
atggagatcaaggaggagggcgccagcgaggagggccagcacttcttgcctacggcccaggctaatgatccaggggactgccaattcactagtatccagaagacccccaacgagccccagttggaattcattcttgcttgtaaggacctggtggcccctgtccgcgatcgtaagctgaacacgttagtacaaatcagtgtaatccaccctgtcgagcagagtctgaccagatactcttctaccgagatcgtagaggggactcgcgaccctctgttcctgaccggggttactttccctagtgagtaccccatttacgaggagaccaagattaagctcacagtttacgatgtgaaagataagtcacatgatacagtccgcactagcgtcttgcctgagcacaaagatcccccacccgaggtgggtcgatccttccttggatacgcgtcgttcaaagtaggcgagcttctcaaatcaaaagagcagttgctggttctgagcctacggacatctgacggaggaaaagtcgtcggcactattgaagtatctgtagtcaaaatgggcgagattgaagacggggaagccgatcatatcaccacagacgtgcagggacaaaaatgtgccctcgtgtgcgagtgcaccgctccggagtctgtcagcggcaaagataatcttccattcttgaatagcgtgttgaagaaccctgtgtgcaaactgtacaggttccctacaagtgacaataaatggatgcggattcgggagcaaatgagcgaaagcatcctgagttttcacattcccaaggagctaatctccttgcatataaaagaggatctctgccggaaccaggagattaaagaactcggagagctgtctccacattgggacaacctaagaaaaaacgtgctgacccactgtgatcagatggtgaatatgtaccaagacatcttgaccgaactttccaaggaaaccgggagctcgtttaaaagctcgtcctccaagggagagaagactttggagttcgtaccaatcaacttacaccttcaaaggatgcaggtgcattcaccccacctgaaggatgccctctatgacgtcatcactgtaggagccccggccgcccactttcagggtttcaaaaatggcggactgaggaagctgctgcaccgcttcgaaactgaacggcggaacaccggataccagttcatttactacagcccagaaaatactgccaaggccaaagaggtgctgtccaatatcaatcagttgcagcccttaatagcgactcatgcagacttacttttaaactccgcgagccaacattctccggattcactgaagaacagtcttaagatgttaagcgagaagactgaactgttcgtccacgcattcaaggatcaactcgtaaggagcgctctgcttgccctgtataccgcccggccaggcggcatcctgaaaaagcccccttctccgaaatcttcaactgaagagtcctctccacaggatcagcctcccgtcatgcgcggtcaggactccattccccatcacagcgattatgacgaagaagagtgggatagagtttgggccaacgtcggtaagtccctgaattgcatcatcgccatggtcgacaagttgatcgagcgcgatggaggcagtgaggggtctgggggcaataatgacggagaaaaggagccgagcctgactgacgccataccatcgcacccaagggaggactggtacgagcagctctacccacttatcctgaccctgaaagattgtatgggcgaagtggtgaaccgagccaagcagtcactgaccttcgttcttctgcaggagctggcttatagtctcccccaatgcctgatgctgacacttcgccgtgacatagtctttagtcaggctttagcaggattggtgtgtgggtttattattaaactccagacaagtctctatgaccccgggttcctccagcaactgcacaccgtcggccttatcgtccagtatgagggccttctttccacatactccgacgagatcggcatgctcgaggacatggccgttggcatcagcgatcttaagaaagtggcgttcaagattattgaggctaaaagtaacgacgtgctccccgtgatcactggccgtagggaacactatgtggtcgaggttaaattgccagcacgcatgttcgagtcattgccactacagatcaaggagggtcagctcctgcacgtgtatccggtgctttttaatgtaggtataaatgagcagcaaaccctggccgagcgcttcggcgatgtgagcctgcaggagagtattaatcaagaaaattttgagctcctccaggaatactataagatcttcatggaaaagatgcccccagattacatttcccatttccaagaacagaacgacctgaaggcacttctggaaaatctgctccagaacatccagtccaaaaaacggaaaaacgtcgaaataatgtggttggcagccacaatctgcaggaagctgaatggaatccggttcacttgttgcaagagtgctaaggaccgcacttctatgtcagtcacactggaacagtgcagtatccttcgcgacgagcaccaattgcacaaagattttttcattcgggcgctcgactgtatgcgccgggaaggttgtagaattgagaatgtgctgaaaaatattaagtgccgtaagtacgcttttaatatgttgcagttaatggcatttccaaagtattaccggcctccagagggcacctacggcaaagccgacacgtag

SEQ ID NO: 40838 - DNA, 2454 bp, Artificial Sequence
  derived and/or modified sequence
atggagatcaaggaggagggcgccagcgaggagggccagcacttcttgcctacagcccaggccaacgaccccggagattgccagtttactagcatccagaagacgccgaacgagccccagctggagtttatcctggcttgtaaggatctggtcgctccagtgagagatcgcaagttgaacactctcgtccagatctccgtcatccacccagtggagcagtcactaacgcggtattctagtaccgaaatcgtcgaaggaactagggacccgctgtttctgacaggcgtgacttttccttctgagtaccccatctatgaagagacgaaaatcaaactgacagtctacgacgtgaaagataaatcgcatgacacggtgaggacctcagttctccctgagcataaggatccgccacccgaggtgggccggagcttcctggggtatgcctcattcaaggtgggtgagttgctgaagtccaaggagcagctactggtcttaagccttcggacaagtgacggtgggaaagtagtcggtacaatcgaagtttcagtggtcaagatgggggagattgaggacggcgaggccgatcacataactacagatgtccagggccagaaatgcgcactggtttgcgagtgtaccgcacctgagtccgtgtcaggtaaggacaatcttcctttcctgaactctgtcctgaagaacccagtttgcaagctgtatcgcttccctacctctgataacaaatggatgcgtatcagagaacaaatgtccgagtctatcctgtcatttcacattccaaaggagttgatcagcctccacatcaaagaagacctttgtcggaatcaagagatcaaggaactgggagaactcagcccccactgggataacctccgcaaaaacgtactgacacactgcgatcagatggtaaacatgtaccaggacatcctgaccgagttaagtaaagagacaggctcatccttcaagtctagtagttctaagggcgagaaaacactggagtttgtaccaattaacctacatctgcagagaatgcaggtgcattcgcctcacctcaaggacgccctctacgatgtgattactgtaggcgcacctgcggcccactttcagggatttaagaacggtgggcttcggaagctcctacacaggtttgaaacagagcgccgcaacactggctaccaattcatctactactcgcccgaaaatacagccaaggcgaaagaggtcttatccaatattaaccagctgcaacctctcatcgctacccatgccgatctccttttaaattctgcttcacagcactctccagactctctgaagaactccctaaagatgctctcagaaaagacagaactgtttgtgcatgcgttcaaagatcagctcgtgagaagcgcattgctcgccctgtatacagctagaccaggggggatcctgaagaagccaccctctccaaaatccagcacggaagagagtagcccacaggatcagcctccggtgatgcgtggccaggattcaatcccgcaccactcggactacgacgaagaagaatgggaccgcgtgtgggccaacgtggggaaatcgctgaattgcatcattgctatggtggataagctgatcgaaagagacggaggatcagaggggagtgggggtaataacgacggggaaaaggaacccagtctcacagacgctataccaagccacccccgggaagactggtatgagcagctttatccactgattctgaccttaaaggactgtatgggcgaggttgtcaatagggctaagcagtcactgaccttcgtgttactccaggagctcgcatactctctgcctcagtgtctaatgttgacccttaggagagacatcgtgttctcccaagctttggccgggctggtatgtggctttatcatcaagttgcaaacatcattgtacgatccaggcttcttgcagcagctgcacaccgttggactgattgtccagtacgaggggctgctgagcacatatagcgatgaaatcgggatgttagaagatatggccgtcgggatatcagatctgaagaaagtggccttcaaaatcatcgaagctaagagtaacgatgttctcccggttattacggggagacgcgagcactatgtggtggaagttaagttgcccgcaagaatgtttgaatccctcccactgcagatcaaagaaggtcaactgcttcatgtgtatcctgtccttttcaatgtgggtattaacgagcagcaaacactcgccgaacggtttggggatgtgagtctacaggagagtatcaatcaggagaatttcgaactactgcaagagtactacaagatctttatggaaaaaatgcccccagactatattagccactttcaggaacagaacgacctgaaagcactgttggagaatctcctccagaatatacagtcaaaaaagtag

SEQ ID NO: 40839 - DNA, 2775 bp, Artificial Sequence
  derived and/or modified sequence
atggagatcaaggaggagggcgccagcgaggagggccagcacttcctaccgacggcccaggccaatgatcctggcgattgccagtttactagcattcaaaagactccaaacgagcctcagctggaatttatattggcatgcaaggacctggttgcccccgtgcgggatcgcaagctcaacaccttggtgcagatttccgtgattcacccggtcgaacagtctttgactaggtacagttcaaccgaaatcgtggagggtactcgcgaccccctgtttctgactggcgtgaccttccccagcgaatatcctatctatgaggagacaaagatcaaactcacagtctacgatgtcaaggacaagagtcacgacacagttcgcacatccgtgctgcccgagcacaaagaccccccccctgaggtgggcaggtcatttctgggctatgcctcttttaaagtaggcgaactgttgaaaagtaaggagcagttgctggtgctgagcttacgaacttccgatggggggaaggtcgtgggaacaatcgaagtgtccgtcgtgaagatgggggaaatcgaagacggtgaggccgaccacataaccaccgacgtccagggccagaaatgtgctctggtgtgcgaatgcaccgctcccgagtccgtcagcggaaaagacaacctgcctttcctgaattccgtactcaagaaccccgtctgtaagctataccggttccctacgtctgacaataagtggatgcgcatccgggaacagatgtcagaatccatcttatctttccacatccccaaggagctgatttcacttcatataaaggaggacctctgccggaatcaggaaataaaagagttgggggagttaagcccccactgggataatttgcgcaaaaatgtccttacacattgcgatcaaatggtgaacatgtaccaggatatattaaccgaactgagcaaggaaaccggaagcagcttcaagtcttcatcttctaaaggagagaagaccctcgagttcgtaccaataaatcttcacctgcagcggatgcaggttcacagtcctcatttgaaggacgcgctgtatgatgtgatcaccgtaggtgctcctgcggcgcactttcagggcttcaaaaacggaggcctcagaaagctgctgcaccgttttgaaacggagcgacgtaataccgggtatcagttcatttattactctccagagaatacagccaaggctaaagaagtgctctctaatattaaccaactgcaaccactcatagcaactcatgcagatctgctgctgaactctgcctcgcaacactcacctgactccctcaagaacagcctgaaaatgttgtcagagaagacagagcttttcgtccacgccttcaaggaccagttagtgcgatcagccctgctggccctgtacacggcccggcctggtggtattctcaagaagccgccctcccccaagtcctccactgaggagtcctcacctcaagatcagcctccagtcatgcggggacaggatagcatccctcaccactccgattacgacgaagaggaatgggatagagtctgggcaaacgtcggcaagagtctcaactgtatcatcgccatggttgacaagctcatcgaacgagatggaggatcagaggggtcagggggcaataatgatggagagaaagaaccttctcttactgacgcaatcccgagccacccacgcgaggattggtacgaacaactgtaccctttaatattgaccttaaaagactgtatgggtgaggtcgttaacagagccaagcagtcactgacatttgtgttgttacaggagctcgcgtattccctcccccagtgtcttatgctgacgttaagacgtgacatcgttttctcacaggcacttgccggccttgtgtgcggttttatcattaagcttcaaacaagtttgtacgaccccggattcctgcaacagttgcatacagtcggtttaatagtgcaatacgaaggcctgctcagcacctactcagatgagatcggcatgttggaggacatggctgtgggcatctccgatctgaaaaaggtcgcttttaaaattatcgaagcaaagagcaatgatgtcctgccagttatcaccggccggcgcgaacactatgttgtggaggtgaagctgccagccagaatgtttgaaagtttgcccctgcagatcaaagaggggcaactgctgcatgtctaccctgtgttgtttaacgttggcatcaacgagcagcagacactggctgagcgctttggcgacgtgtccctgcaggaaagcattaaccaggagaatttcgaactactgcaggagtactacaaaatattcatggaaaagatgccccctgattacatcagccacttccaggagcagaatgacctgaaagcgctactagaaaacctgttacagaacatacagtcaaaaaagcggaagaacgtggagattatgtggcttgccgccactatttgtcgcaagctaaatggcattaggttcacctgttgcaaatccgcaaaagacagaactagcatgtccgtgactctggaacaatgctcaattctgcgagatgagcaccagctgcataaagattttttcatccgcgctctcgattgcatgagaagggagggatgcaggattgaaaatgtgttgaagaacattaagtgccgcaagtacgccttcaatatgcttcagctcatggcctttccaaagtactatcgacccccagagggtacatacggaaaggccgatacatag

SEQ ID NO: 40840 - DNA, 1971 bp, Artificial Sequence
  derived and/or modified sequence
atgggcgagatcgaggacggcgaggccgaccacatcaccaccgacgtacaagggcaaaagtgtgccttggtgtgtgagtgcactgcaccggaaagcgtctctggcaaggacaaccttccttttctcaacagtgtactgaagaaccctgtctgcaaattatatcgcttcccaacctctgacaacaagtggatgagaattcgggagcagatgagtgaatcaatcctgagtttccatatacccaaggaacttataagcctgcacatcaaggaggacctctgtcggaatcaggagatcaaagaactcggagagctgtcaccacattgggataacctgcgtaagaacgtcctgacacattgcgaccagatggtgaacatgtaccaggatattttaactgaactgtccaaggaaacgggttcatcttttaagagctcttctagcaagggagagaagaccttggaattcgtgcccattaacctgcatcttcagcggatgcaggttcactcgccccatctgaaggatgcattgtacgatgtaatcacagtcggggctcccgcagcacacttccagggttttaagaatggcggcctgcgtaagctgctccatagattcgagacagaaagacggaataccggctatcagtttatttattacagtcccgagaacacggccaaggctaaggaagtgttatcaaacatcaatcaactgcagcccttgattgccacgcacgccgacctgttactgaattccgcgagtcagcactctcctgattcgctcaaaaattctctgaagatgttgtctgaaaaaacggaactgttcgtgcacgcctttaaagaccagctggtacgatccgccctgctcgcactgtacaccgcccgtccaggtggtatcctgaaaaaacccccttctccaaaatcaagcactgaggagtcctcacctcaggaccagccgccagtgatgcggggacaggactccataccacatcattccgactacgatgaggaagaatgggacagggtgtgggcgaacgtgggtaagagtttaaactgtatcatcgcaatggtcgataagctgatagaaagggatggagggtccgagggctcgggcggcaataacgacggtgagaaggaaccctcccttaccgacgctattcctagtcatccaagagaagactggtatgagcagttgtaccccctgattctcaccctaaaggactgtatgggagaagtggtgaatcgggctaagcagagcctcacattcgtgttgctgcaggagttggcatactccctgcctcaatgcttaatgctcactttgcgcagggatatcgttttcagccaagccttggccggtctcgtgtgtggattcatcatcaagttgcagacttccctctatgatcctggattcctgcagcagcttcacacggtagggttaatcgttcagtacgaaggcctcctgtctacttacagcgacgaaattggcatgctggaggacatggctgtgggaatcagtgacctgaagaaagttgctttcaaaataatcgaagctaagtcaaacgatgtattgcccgtgataacgggccgcagagaacattacgtagtagaagtcaaactgccagcccgaatgttcgaaagcttaccactccagatcaaagagggccagctgctacacgtatacccggtcctgttcaatgtgggcatcaatgaacagcaaaccctcgccgagcggtttggtgacgtaagcttgcaggagagcattaatcaggagaacttcgagctactgcaagaatattacaagattttcatggagaaaatgccgcccgattacatatcccacttccaggagcagaacgatttgaaggcactgctagagaacctgcttcagaacatacagtccaagaagaaagagtgcagaaattacgtggctggttgtaatgacctgccgcaaacagagtggtattcgtttcaccttctgtag

SEQ ID NO: 40841 - DNA, 2775 bp, Artificial Sequence
  derived and/or modified sequence
atggagatcaaagaggagggggctagtgaggagggacaacacttccttcccacggcccaggctaacgatccaggggactgtcagtttacctcaatccaaaaaacgccaaacgagccccaactcgaatttatattagcgtgtaaagatctggtggctccagtaagggacaggaagttaaacacgttggtgcaaatatccgtcatccacccagtggagcagagcctgacccggtactcatccacagaaatcgtggagggcaccagggatccactgtttctcacgggcgtaacatttccgagcgagtaccctatttacgaggagaccaaaattaagttgactgtgtatgacgtcaaagataagtcccacgacaccgtccgcacaagcgtgttgcccgaacataaagatccccctcccgaggttgggaggtctttcctcggctatgcatcattcaaggtgggggaacttctcaagtctaaggaacagttgctagttctgtccctgaggacatccgacggcggaaaagtcgtgggcacaatcgaagtcagtgtggtgaaaatgggagaaatagaagacggcgaggccgaccatattaccaccgacgtgcagggacagaagtgcgcgctggtgtgtgagtgcactgcaccagaatcagtgtcggggaaggacaatttgcctttcttgaacagtgtgctgaagaaccccgtgtgcaagctgtatagattcccaacctctgataataagtggatgcgaatccgggagcaaatgtctgagtcaattctctccttccatatcccaaaagaattgatatcgctgcacattaaggaggacctttgtcggaaccaggaaattaaggaactcggagagttatctcctcattgggataatctgagaaaaaacgttttaacccactgtgaccagatggtgaacatgtatcaggatattctgacagagttaagcaaggaaaccggatcttccttcaaaagtagcagttctaagggcgaaaaaactctcgaatttgttcctatcaacctgcacctgcagagaatgcaggtgcactcccctcacctcaaggatgcattatacgatgtgataactgttggtgcccctgcagcccacttccaaggcttcaagaatggcggactgagaaagcttctacacagattcgaaacggagagaagaaataccggctaccaatttatttactactctcctgagaacactgccaaagctaaggaggtattgtctaatatcaaccaactccaaccactcatcgctacgcatgccgaccttctcctgaacagcgccagtcagcacagtcccgactcactgaaaaattctctcaagatgctcagcgagaaaactgagctgtttgtccatgcatttaaagatcaacttgttcggagtgctcttctggctttatacaccgctagaccaggaggaatcttgaagaagccccctagcccaaagtcttccaccgaggaaagctctccacaagatcagcccccagtcatgaggggccaggacagcatcccacatcactccgactacgatgaagaagaatgggatagagtttgggctaatgtaggtaagtccctcaactgtatcatagcaatggtcgataaacttatcgagcgtgatggtggtagcgagggctcaggtggaaacaacgacggggaaaaggagccctcgcttacggatgccattccgtctcacccccgagaagactggtatgaacagctgtaccccctaatcctgacccttaaggactgcatgggggaggtcgttaacagagccaagcagtcactcacttttgtactgttgcaagaactggcgtattccctgcctcagtgcctcatgctcaccctgcggagggacatcgtcttctctcaggccttggcgggactggtgtgtggctttattattaagctgcaaacgtctctgtacgacccaggttttctgcaacagctgcacaccgtcggattgatcgtccagtatgaaggcctcctgtctacttacagtgacgaaatcggcatgctggaagacatggctgttggaataagcgacctcaagaaggtggctttcaagattatcgaggccaaaagcaacgatgtgctgcctgtgatcactgggcgaagagaacattacgttgttgaggtcaagttgccagcacgcatgtttgaatcactacccctccagatcaaggaaggacaacttctccacgtttaccctgtgctgtttaatgtgggcattaatgagcaacaaaccctcgccgagagattcggggacgtctccttacaggagtctataaaccaggaaaattttgagctgctccaagagtactataagattttcatggaaaaaatgccacctgactacatcagtcacttccaagagcaaaacgacttaaaggccttgttagagaatctgttgcagaacatccaatctaaaaagcggaaaaatgttgagatcatgtggttagcggctaccatttgcagaaaactgaatgggatccgctttacttgctgcaagagcgcaaaggatcggacttccatgtccgtgaccctcgaacagtgttctatacttagggacgaacatcagcttcacaaagacttttttatccgagctttagactgcatgaggagggaggggtgccgcattgagaacgtgttgaaaaatattaagtgtaggaaatacgccttcaacatgctgcaattgatggcatttcccaagtattacagaccaccggaggggacttacggtaaagcagatacttag

SEQ ID NO: 40842 - DNA, 2775 bp, Artificial Sequence
  derived and/or modified sequence
atggaaataaaggaggagggtgcgtctgaggaggggcaacatttcttgccaacggcccaggccaacgatcctggagactgccagttcaccagcattcagaaaacccctaatgagccccagctggaattcatactggcgtgcaaagacctggtcgccccagttagggacaggaaactgaatacactcgtacaaatctccgtgatccatccagtggagcagtctctgacccgctattcaagcactgaaattgtggagggaaccagagaccctctgttcttgacaggggtcactttcccctccgagtacccgatttatgaggagaccaaaatcaagctgaccgtgtatgatgtgaaggataagtcccacgacacagttcgtacctctgtcctgccagaacacaaggacccaccccctgaagttgggaggtccttcttagggtacgccagtttcaaggtgggagagctcctgaagtcaaaagagcaattactggtgttgagtctgcggacctcagatggcggaaaagtagttggcactatcgaggtatccgtcgttaaaatgggtgaaatcgaggacggcgaggctgaccacatcactacagacgtccaagggcaaaagtgcgcacttgtgtgcgagtgtactgcccctgaaagtgtgtcaggcaaggataacctcccatttctcaactccgtgctgaagaatccagtttgtaaattgtatcgattccctaccagtgacaataaatggatgagaatacgggaacagatgagcgaatctatattatcgtttcacatcccaaaggaactgatttcactacatataaaggaggatctgtgccgcaaccaagagattaaagaactgggagagctgtcccctcactgggataatctccgcaaaaatgtgcttactcactgtgatcagatggttaatatgtatcaagatatcctgacggagctgtcaaaggagacagggagcagcttcaaaagttcttccagcaaaggagaaaagacgctagagttcgttccaattaatcttcaccttcagcgaatgcaggtgcatagccctcatctgaaggacgctctgtacgacgtcatcactgtcggtgccccagcagcacactttcaagggttcaagaacggcggtctgcgaaagctgctccacaggtttgaaactgaacggcgtaacaccgggtaccaattcatctactattcacctgagaatactgcaaaagcaaaggaagttctgagcaatattaatcagctccaaccactgattgccacacatgctgacttactacttaactcggcttctcagcatagccccgattcgctgaagaattcactgaagatgctgagtgagaaaactgagttattcgttcacgcatttaaggatcagttagtaagatctgcacttctcgcactatacacagctcgacccggagggattctgaaaaagccgcctagccccaagagttctacagaagaaagtagcccgcaggaccagccaccagtgatgagaggtcaggatagtatcccccatcactctgattacgacgaggaggaatgggaccgcgtctgggcaaatgtgggaaaaagcctgaattgtattattgcaatggttgacaagcttattgaacgggacggcggttctgaggggagcgggggaaataacgatggggagaaagagcccagtctcaccgacgcaatcccttcccatcctcgtgaggattggtacgagcagctgtatcctctcatattgacgcttaaagactgtatgggagaggtggtgaaccgagccaagcagtccctgacattcgtgcttctccaggagctcgcttactccctgccacagtgccttatgctgaccctccggagagatatcgtgttttcccaggcattggccggtttggtgtgtggatttataattaaactccagacttctctgtacgatccgggattcctacaacagctgcacacggtgggcctgattgtgcagtatgaagggctgcttagcacctatagcgatgaaattggaatgcttgaggatatggctgtgggaatatccgacctgaagaaggtagccttcaagattatcgaagcaaaaagcaatgacgtgctcccagttatcaccgggaggcgggagcattatgttgttgaggtcaaactgcccgctagaatgttcgaatcccttccgcttcagattaaggagggtcaactgctgcacgtgtaccccgtgctgtttaatgtggggattaatgagcagcagactctcgccgaacgctttggcgatgtatccttgcaagagtccataaatcaagagaactttgaattactgcaggaatactacaagatctttatggaaaagatgcccccagactacatctcacactttcaggaacagaacgatctcaaggctctgctggaaaatttacttcagaacatacagtccaagaagcgaaagaatgtggagattatgtggctggctgcaacaatctgccggaaactcaacggcataaggtttacctgttgtaagagcgctaaggaccgcactagcatgagtgtgactctggagcagtgtagtattctacgagacgaacatcagttgcacaaggacttcttcattagagccctcgactgtatgcgcagagagggctgccggatcgaaaatgtgttgaagaacattaaatgcaggaagtatgccttcaacatgctccaactcatggccttccctaaatattaccggccaccagaagggacgtacgggaaagccgacacatag

SEQ ID NO: 40843 - DNA, 2775 bp, Artificial Sequence
  derived and/or modified sequence
atggaaatcaaggaagaaggcgctagcgaagaagggcaacattttctgcccaccgcgcaggcaaacgatccgggtgactgtcagtttacctctatacaaaagacaccaaatgagcctcagttggagttcatcttggcttgcaaggatcttgtggctccagtgcgtgacaggaagctcaacacgttagtgcagatttcagtgatccatccagtggaacagagtctgactcgctattcctccacagaaatcgtggaaggcaccagggatcccctgttccttaccggcgtgacgttccctagcgaatatcctatttacgaagagacaaagataaaactgactgtctatgatgtgaaggacaagtcccatgacacagtcaggaccagtgttctgcccgagcacaaagaccccccaccggaggtcggcagatcctttctggggtatgcctcttttaaggtgggcgagctgcttaagtctaaggaacaactgctggtactgtctttacggaccagtgatggcggaaaggttgtcgggaccattgaagtcagtgtagtaaaaatgggtgagatcgaggacggcgaggctgaccacatcacaacagacgtgcagggccagaaatgcgccttagtctgcgagtgtaccgcgcctgagtccgtctctggcaaggataacttgcctttcctcaactctgtgctgaaaaacccagtgtgcaaactttaccgctttcctaccagtgacaacaaatggatgcggatccgtgagcaaatgtccgagtctattctgtcctttcatattccaaaagaactgatttccttgcatatcaaggaggatctgtgcaggaaccaagaaataaaagaactgggagagttatctccacattgggacaatttgagaaagaatgtcttaacacattgcgaccagatggttaatatgtatcaggacatcctcaccgagttatccaaagagacagggagttccttcaagtccagctccagtaagggcgaaaaaaccctggaattcgttcccatcaacctccacctgcagcgaatgcaggtacattcgcctcacctgaaagatgctctttacgatgtgatcacagtcggcgcacccgctgcacacttccagggattcaaaaatgggggtcttcggaaactacttcatcgcttcgaaactgaacgcagaaataccggctaccaatttatttactactccccggaaaatacagctaaagcaaaagaggttctcagcaatatcaatcagctccaaccccttatcgccacccacgccgacctgctgcttaacagcgcttcgcaacactctcccgacagcctcaagaacagcctcaagatgttgtccgagaaaacggaactatttgttcacgcctttaaagatcagcttgtgcggagtgctctcctggctctatataccgctcgcccaggcggtatcttgaaaaaaccaccgtcgcctaagtccagcaccgaggagagcagccctcaagaccaaccacctgtgatgcgcggacaggatagcataccccatcattcagactacgatgaagaggagtgggaccgtgtgtgggctaatgtcggcaaatctctcaactgtatcatagccatggtggacaagctgatagaacgcgatggaggaagcgaaggcagtgggggaaacaatgacggcgagaaagagccctctctcaccgacgccataccttctcacccaagagaggactggtatgagcagttgtaccccctgatactgactctgaaggactgcatgggtgaggtggtgaatcgagccaagcagagcttgaccttcgttctcctgcaggaattggcttatagcttgcctcagtgccttatgctaactctgcgtagagatattgttttttcacaagcacttgccggacttgtatgcggattcatcattaagctgcagacaagcctttacgaccctggatttctgcagcagttgcatacggtggggcttatcgttcaatacgaaggactcctaagcacgtatagtgacgagatcggaatgcttgaagacatggcagtcgggatatctgaccttaagaaagtggcatttaaaatcatcgaagctaagagtaacgatgtgctgcccgtaattacagggaggcgcgagcattatgtggtagaggtcaaactccccgctcggatgttcgagtctctaccgctgcagatcaaagaaggccagctgctgcacgtatacccagtcctgttcaatgtggggatcaacgagcagcagacactggcagagagattcggagatgtatcattacaggagtccataaaccaagagaactttgaacttctgcaggagtactacaagatttttatggagaaaatgcccccagactacatctctcattttcaggaacagaacgatctgaaggccctgttggagaacctgctgcagaacatccaatccaagaaaaggaagaatgtggagattatgtggcttgccgctacgatttgtaggaagttgaacggcatcagattcacttgttgcaagtcagccaaagacagaacctccatgtccgtgacactggaacagtgttccatcctacgcgacgagcatcagctacataaagacttttttattcgggcactggactgcatgaggagagagggatgccgcatcgagaacgttcttaagaacattaagtgtaggaaatacgcattcaacatgcttcagcttatggcctttcctaaatactatcggccacccgagggaacgtacggtaaagcagatacttag

SEQ ID NO: 40844 - DNA, 2454 bp, Artificial Sequence
  derived and/or modified sequence
atggagattaaagaggaaggagcatccgaagaagggcagcatttcctccctactgctcaggctaatgacccgggtgattgccagttcacaagtatacagaagacaccaaatgagcctcagttggagttcatcctggcctgtaaagaccttgtggctccagtcagagacagaaagctgaacactctggttcaaatctccgtgatccacccggttgagcagtcccttacgagatactcttccaccgagatcgtggaagggacgcgcgatcccctctttctgaccggtgtcacattcccatccgagtatccgatctatgaggaaactaaaattaagctgacggtatatgatgtgaaggataagagccatgatactgtgaggactagcgtgttaccggagcataaagacccaccccctgaggtaggacggtcgttcctgggatatgcctcgtttaaagttggggagctgctcaaaagcaaggaacagctgcttgtgttatctctgcgtaccagcgacggtggaaaggttgtcggcaccattgaggtcagcgtcgtgaagatgggcgaaatagaggacggagaagccgaccatattacgacggacgtgcagggtcaaaagtgcgctctggtttgtgagtgtactgccccagaaagtgtatccgggaaggacaacctaccattcttgaactccgtacttaagaacccggtgtgcaagctgtacagatttccaaccagcgataataagtggatgcggattcgcgaacagatgagcgaatccattctgagctttcatatcccgaaggaattaattagcctccacatcaaggaggatttgtgtcgtaaccaggagatcaaagagttaggggagctgtctccgcactgggataatcttaggaaaaatgtcctgacccactgtgaccaaatggttaacatgtaccaagacatactgacagagctgagcaaggaaacaggcagctcttttaaatcctcatctagtaagggggaaaaaacactagagttcgttccaatcaatctgcacctccagagaatgcaggtccattccccacacctgaaggacgccctgtacgacgtgattaccgtgggagctccagccgcacatttccagggattcaaaaatggcggtcttcgaaaactgctccatcgtttcgaaaccgagcggaggaataccggataccagtttatctactacagtcctgaaaacaccgccaaagctaaggaagtgttatccaatataaatcagcttcagcctctgatcgcaacccacgctgacttactgttaaacagcgccagccagcattccccagacagcctcaagaatagcctgaagatgctgagcgaaaaaacggaacttttcgtccacgcctttaaggaccagctcgtcaggtcagccctgcttgcactctacacagccagacctggcggtatcctgaagaaacctccttcccccaagagttcaaccgaagaaagttctcctcaggatcagcccccagtaatgcggggacaggacagtattccgcatcactctgattatgatgaggaagaatgggacagggtatgggccaatgtggggaaatccctcaattgcatcatcgcaatggtagacaaattgatcgagcgagacggaggctccgagggctcaggcggtaataatgatggagaaaaagaaccgtctttaaccgacgcaatcccatcacatcccagggaggactggtacgagcaactctatccgctgattctgaccctgaaggattgtatgggcgaggttgtgaatcgagctaagcagagtctgacattcgtgctcctgcaggagcttgcctactcacttccacaatgcctgatgttgactctgcgacgggacattgtgttttcgcaggcacttgctgggctggtatgcggttttattatcaaattgcagaccagcctgtatgaccctggattcttacaacagctccacacagtcgggctgatcgtgcaatacgaaggcttattgagtacatacagcgacgagatagggatgctcgaggacatggctgttggaatctcggaccttaaaaaagtcgcctttaaaatcatcgaggcaaaaagcaacgatgttctcccggtcattaccgggaggcgtgagcactacgttgtagaggtgaagctcccggcacgtatgtttgagtccctgcccttacagataaaggagggccaactgttgcacgtttaccccgtgctattcaacgtaggcattaacgaacagcagacactcgcagagcgctttggcgatgtctctctccaggaaagtatcaatcaagagaacttcgaactgcttcaggagtattataagatctttatggaaaagatgcctcccgactacatcagtcactttcaggagcaaaacgatctgaaagccctgctggagaacctgctccaaaatatacagtccaagaagtag

SEQ ID NO: 40845 - DNA, 2775 bp, Artificial Sequence
  derived and/or modified sequence
atggagataaaggaggagggcgctagtgaagaggggcaacattttcttcctaccgctcaggccaacgatcctggcgactgtcagttcacatctatacagaaaaccccaaatgaaccacagctggagttcattttggcctgcaaggacttggtggcacctgtgagggacagaaaactgaacactctggtacagatcagtgtgatacacccagtcgaacagagtctgactcgatactcctcaacggagattgtagagggaaccagagacccactgtttttgaccggcgttactttcccatcggaatacccgatctacgaagagactaagatcaagcttacggtgtatgatgtgaaggacaagagccacgataccgtgcggacatcggtgttacccgagcataaggacccaccccctgaggtcggtagaagctttttaggctacgcctcatttaaggtcggggagctcctgaagtcaaaggaacaactgttggtcctgagtttgcgcacctcggatggcggaaaagtggtgggaaccatcgaggtgagcgttgtaaaaatgggggaaatcgaggacggggaagcagaccacattaccactgatgttcaggggcagaagtgcgcgctagtatgcgagtgtacggcccctgagagcgtttccggcaaggataacctgccatttttgaattctgtcttgaagaacccagtctgtaagttgtatcgattccccacctccgacaacaaatggatgcgaatcagagagcagatgtcagaatctatactatcctttcacattcctaaagaactgatctctctgcacattaaggaagacctgtgtaggaaccaggagattaaggagctgggcgaattaagccctcactgggacaatctgcggaagaatgttctcacccattgtgaccagatggtgaatatgtaccaggacattctgacggagctgtcgaaggaaacaggatccagcttcaaaagctcctcgagcaaaggggagaaaacgctggaattcgtcccgatcaacctccacctgcaacggatgcaagtccactcacctcacctaaaagacgccttgtacgatgtgataaccgtgggggctcccgctgcacatttccagggctttaagaacggcggtctacgcaagctgctgcatcggtttgagaccgagcgcaggaacacagggtaccagttcatctactattctcctgagaatacagcaaaggccaaagaggttttgtcaaacataaatcagctgcagccgctcatcgcgacccacgctgatttgcttctcaactcggcctcccagcattcccctgactccttgaaaaatagtctgaaaatgctctccgagaaaacagaactgttcgtgcatgcattcaaggaccagctcgtgaggagcgctctgctggccctttacaccgcaagacctggagggatcctgaagaagccaccttcccccaagtcttcaactgaagaaagctctcctcaggaccagccccctgttatgaggggtcaggactccattcctcaccacagcgactacgacgaggaagagtgggaccgcgtatgggcaaatgtcgggaaaagtctgaactgtatcatagccatggtggacaagctgattgagagggacggtgggtctgaggggtcaggtggaaacaatgacggagagaaggaacctagtcttaccgacgccataccctcgcaccccagagaggactggtatgagcaactttatccgctgattctgaccctgaaggattgcatgggggaagtagtcaaccgcgctaaacaatccctgacattcgtgctactgcaggagctagcctacagcctgccgcagtgccttatgctgacgttgagacgcgatatcgttttctctcaggcactcgcgggtctggtttgcggttttataatcaagttgcaaactagtctgtatgaccccggattcctgcagcagctccacactgtggggctgattgtgcagtacgaaggcctgctgagtacgtactctgatgagatcgggatgttggaggatatggccgtcggaatttcagacctcaagaaagtggccttcaagataatcgaggcgaaatctaacgacgtgctccccgtgattactggcagacgagagcactacgtcgttgaagtaaagttgcccgcacgcatgttcgaaagtctacccctgcaaataaaggaagggcagctcttacatgtctatcccgtgttgtttaatgtgggaataaacgaacagcagacactcgctgaacgattcggcgatgtgtctctccaggagtctattaaccaggagaatttcgagttgttacaagagtactacaaaatctttatggaaaagatgccaccagattacattagccattttcaagagcaaaatgacctaaaggcactgttagaaaatttgctgcaaaatatccagtcaaagaaacgcaaaaatgttgagattatgtggctggctgcgaccatttgtcggaaacttaacgggattagatttacatgctgtaaaagcgctaaggatcggacctcaatgagcgtcaccttggagcagtgttcgatcctgagagacgaacaccagctgcacaaggactttttcatccgggcactcgattgcatgagacgagagggttgcaggatagaaaatgtcctgaagaatattaagtgccgaaagtatgccttcaacatgctgcagctcatggcctttccgaaatattatagacccccagagggcacctacggcaaagctgatacgtag

SEQ ID NO: 40846 - DNA, 1971 bp, Artificial Sequence
  derived and/or modified sequence
atgggggagattgaagatggtgaggctgaccacatcactaccgatgttcaaggacagaagtgcgccctggtgtgtgaatgcaccgccccagaatccgtctccggaaaagacaatctgcccttcctaaattccgttctgaaaaatcctgtttgtaagctttatcgtttcccaactagtgataacaaatggatgagaatccgggagcaaatgtccgaatctatcctgtcgtttcatattccaaaggaactgatctcactgcacattaaagaagatttgtgtcgcaatcaggagatcaaagagctgggggagttatctccacattgggacaacctgagaaagaatgtactcactcactgcgaccagatggtgaatatgtaccaggacatcttaaccgaactatcgaaagagactggaagcagttttaagtcttcttcttctaaaggtgagaagacactagagttcgtccctataaacctccacttgcagcggatgcaggtgcacagtcctcacttaaaggacgccctgtatgacgttatcacagtgggagctcccgctgctcattttcaaggctttaagaatggcggactccggaaactgctacaccgttttgagaccgagagacgcaatacaggataccagttcatttactactcacctgaaaacaccgccaaagcaaaggaagtgctctctaatatcaaccaactccagccactgatcgcgacccatgcagacctgctgctcaacagcgctagtcagcattcccctgacagcctgaagaactcgttgaagatgctgagcgaaaagactgagcttttcgtccacgcttttaaggatcagctcgtacgcagcgctctgttggccctgtacactgcgcgtccaggtggcattctgaaaaagcccccaagtccgaaatcttcaaccgaagagtcaagccctcaggaccagccacccgtgatgcgaggtcaagacagtatcccccaccactcagattacgatgaggaggagtgggaccgagtttgggcgaacgtcggcaaatctttgaattgtatcatcgctatggtagacaagctgatcgagcgggatggaggttccgagggatccggcggaaacaatgacggagagaaggaaccatccctgactgacgctatccccagccacccacgcgaagactggtacgaacagctttatcccctgattctgacactgaaggactgcatgggcgaggtggtgaatcgagcaaaacagtctctaacgttcgttctgctccaggagctggcctactctctgccgcagtgtctcatgttaacactccgtagagacatcgtgttttcccaggctttggcaggactagtctgtggtttcatcatcaaattacagactagcctgtacgacccaggattcctgcagcaattgcatacagtggggctgattgtgcagtacgagggcctcctgagcacgtactcggacgaaatcgggatgctagaggatatggccgttggtattagcgacctgaagaaggtggctttcaagattattgaggccaaaagcaatgacgtgctgccggtcatcaccgggagaagggaacattatgtggtggaggtaaagctgcctgccagaatgtttgagtctctcccccttcaaatcaaagaagggcaattattgcacgtctatcctgtgctgttcaacgtaggtattaacgagcaacaaaccctggctgagaggttcggggacgtgtcactgcaggagtctatcaaccaggagaacttcgaactgctgcaggaatactacaagattttcatggagaaaatgccgccagattacattagccattttcaagaacagaacgatctcaaggccctgctcgaaaatctcctccaaaacatccagagtaagaaaaaagagtgccgcaactatgtcgctgggtgcaacgacctcccccaaaccgagtggtattctttccatttactgtag

SEQ ID NO: 40847 - protein, 387 aa, Artificial Sequence
  derived and/or modified sequence
MASRCSEPYPEVSRIPTVRGCNGSLSGALSCCEDSARGSGPPKAPTVAEGPSSCLRRNVISERERRKRMSLSCERLRALLPQFDGRREDMASVLEMSVQFLRLASALGPSQEQHAILASSKEMWHSLQEDVLQLTLSSQIQAGVPDPGTGASSGTRTPDVKAFLESPWSLDPASASPEPVPHILASSRQWDPASCTSLGTDKCEALLGLCQVRGGLPPFSEPSSLVPWPPGRSLPKAVRPPLSWPPFSQQQTLPVMSGEALGWLGQAGPLAMGAAPLGEPAKEDPMLAQEAGSALGSDVDDGTSFLLTAGPSSWPGSLEGRGGSGPAWAPAESSPLDVGEPGFLGDPELGSQELQDSPLEPWGLDVDCAGLALKDEVESIFPDFFAC

SEQ ID NO: 40848 - DNA, 1164 bp, Artificial Sequence
  derived and/or modified sequence
atggccagcagatgcagcgagccctaccccgaggtgagcagaatccccaccgtgagaggctgcaacggcagcctgagcggcgccctgagctgctgcgaggacagcgccagaggcagcggcccccccaaggcccccaccgtggccgagggccccagcagctgcctgagaagaaacgtgatcagcgagagagagagaagaaagagaatgagcctgagctgcgagagactgagagccctgctgccccagttcgacggcagaagagaggacatggccagcgtgctggagatgagcgtgcagttcctgagactggccagcgccctgggccccagccaggagcagcacgccatcctggccagcagcaaggagatgtggcacagcctgcaggaggacgtgctgcagctgaccctgagcagccagatccaggccggcgtgcccgaccccggcaccggcgccagcagcggcaccagaacccccgacgtgaaggccttcctggagagcccctggagcctggaccccgccagcgccagccccgagcccgtgccccacatcctggccagcagcagacagtgggaccccgccagctgcaccagcctgggcaccgacaagtgcgaggccctgctgggcctgtgccaggtgagaggcggcctgccccccttcagcgagcccagcagcctggtgccctggccccccggcagaagcctgcccaaggccgtgagaccccccctgagctggccccccttcagccagcagcagaccctgcccgtgatgagcggcgaggccctgggctggctgggccaggccggccccctggccatgggcgccgcccccctgggcgagcccgccaaggaggaccccatgctggcccaggaggccggcagcgccctgggcagcgacgtggacgacggcaccagcttcctgctgaccgccggccccagcagctggcccggcagcctggagggcagaggcggcagcggccccgcctgggcccccgccgagagcagccccctggacgtgggcgagcccggcttcctgggcgaccccgagctgggcagccaggagctgcaggacagccccctggagccctggggcctggacgtggactgcgccggcctggccctgaaggacgaggtggagagcatcttccccgacttcttcgcctgctag

SEQ ID NO: 40849 - DNA, 1164 bp, Artificial Sequence
  derived and/or modified sequence
atggcttcccgatgtagcgaaccgtatccagaagtgtcacgcattccgactgtccgcggatgtaacggctcactgtccggggctctgtcttgctgcgaagacagcgcccgaggaagtggccctcccaaggcaccgaccgtcgccgaaggcccctcctcgtgccttcgtagaaacgtgatttcagaacgagagcgcagaaaacgcatgtcattaagttgtgagcggttgcgggctctgttgcctcagtttgatgggaggcgcgaagacatggcctctgtgcttgaaatgtccgtccaattcctgaggcttgcctcagctttgggaccctcacaagagcagcacgccatcctggcaagcagtaaagagatgtggcacagtctgcaagaggacgttctgcagctgaccctgtctagccagattcaggcaggcgttccagacccgggcacaggggccagttcaggtacacgaactcctgacgtcaaggcattcctggaaagtccatggtctctggatcccgcctctgcctcgcctgagcctgtcccacatatactggcgtcttctcgtcagtgggaccctgcaagctgcacaagtttaggtactgataaatgcgaggcacttctcggtctgtgccaggtcaggggcgggctcccccctttcagcgaaccatcttccctcgtcccatggccaccaggacgcagtctgcccaaagctgtcagaccgccattatcttggccacccttttcccagcagcagacactgcctgttatgtccggcgaagcactgggatggctgggccaggcaggccctcttgcaatgggggccgcccctttgggggagccagctaaagaagacccgatgctcgctcaggaggccggctccgctctaggcagtgatgttgacgatggcacctcattccttctcacagcagggcccagttcgtggccaggttctcttgagggccgcggaggaagcggcccagcttgggccccagctgaatccagccccctcgatgtgggagagcctggatttctgggggaccccgaattggggtctcaagaactgcaagatagccctctcgaaccctggggtttggacgtggattgcgccggactggcactgaaggatgaggtcgagtccatttttccggacttctttgcctgttag

SEQ ID NO: 40850 - DNA, 1164 bp, Artificial Sequence
  derived and/or modified sequence
atggccagccgctgcagcgagccctacccagaggtgagccgcatccccaccgtgcggggctgcaatggcagcctgagcggggccctgagctgctgtgaagattctgcccggggcagcggcccccccaaggcccccaccgtggccgagggccccagcagctgcctgcggagaaatgtcatcagcgagcgggagaggaggaagaggatgagcctgagctgtgagcggctgcgggccctgctgccccagtttgatggccggcgggaggacatggcctctgtgctggagatgtctgtgcagttcctgcggctggccagcgccctgggccccagccaggagcagcacgccatcctggccagcagcaaggagatgtggcacagcctgcaggaggatgtgctgcagctgaccctgagcagccagatccaggccggcgtgcctgaccccggcactggagccagcagcggcaccaggaccccagatgtgaaggccttcctggagagcccctggagcctggaccctgccagcgccagccctgagcctgtgccccacatcctggccagcagccggcagtgggaccctgccagctgcaccagcctgggcacagacaagtgtgaggccctgctgggcctgtgccaggtgcggggcggcctgccccccttcagcgagcccagcagcctggtgccctggcccccaggccgcagcctgcccaaggctgtgcggccccccctgtcctggccacccttcagccagcagcagaccctgcctgtgatgtctggagaggccctgggctggctgggccaggccggccccctggccatgggcgccgcccccctgggggagcccgccaaggaggaccccatgctggcccaggaggccggcagcgccctgggcagtgatgtggatgatggcaccagcttcctgctgacagctggccccagctcctggccaggcagcctggagggccggggcggcagcggccctgcctgggccccagctgagagcagccccctggatgtgggggagcccggcttcctgggggaccctgagctgggcagccaggagctgcaggacagccccctggagccctggggcctggatgtggactgtgccggcctggccctgaaggatgaggtggagagcatcttcccagacttctttgcctgctag

SEQ ID NO: 40851 - DNA, 1164 bp, Artificial Sequence
  derived and/or modified sequence
atggccagccggtgcagcgagccctaccccgaggtgagccggatccccaccgttcgaggatgtaacgggtctctgtccggagcattgtcatgctgcgaggactctgcacgcggcagcgggccccccaaagctcccacggtggcagaaggcccaagctcttgcctgcgccggaacgtgatatccgagcgtgaaaggcggaaacgcatgtccctttcctgcgagagactgcgcgctttgttaccccagtttgacggccggcgggaggatatggccagtgtactggaaatgagtgtgcagtttttgcggctggcttcagctttgggcccatcgcaggagcagcacgctattctggcctcaagtaaggagatgtggcactccctgcaggaggatgtgctgcagctgacactctctagccaaattcaagccggagtgccagacccaggcacgggtgccagctctgggacaagaacaccagatgtcaaggcgtttctcgaaagcccctggtctctggaccctgcatccgcttcccctgaacctgtaccccacatcctggccagttctcggcagtgggatcctgctagttgcacgagtttgggcaccgataaatgtgaggcactcctgggactttgccaggttagggggggtctgccccccttttcagagccctccagtcttgtaccttggccgcctggccggagcctgcctaaagccgtgcgccctccactaagttggccccccttctctcagcagcagacccttccggttatgtctggtgaggccctcggctggctcggacaggcgggtccacttgccatgggggctgcccctctcggagaaccggcgaaggaagaccctatgctggcccaggaagctggatcagctctggggagcgatgtagacgacggcacctcgttcttgttaacagccggaccgagcagttggcccggctctctggaaggccgcggcggtagtggccccgcatgggcacctgcagagtctagccctcttgatgtgggagaacccggtttcctgggggatcctgagctgggcagtcaagagctccaggatagccctctggagccctgggggctggatgttgattgtgccggcctcgccctgaaagacgaggtggagtcgatctttccggacttcttcgcgtgttag

SEQ ID NO: 40852 - DNA, 1164 bp, Artificial Sequence
  derived and/or modified sequence
atggcttcacgttgcagtgagccctaccctgaggtgagccgaatacctaccgtcagaggctgtaacggttccctcagcggggctctgtcttgctgcgaagactcagctaggggcagcggtccccctaaagctccgacagtagcggaaggtccctcatcctgtctgcgccgtaacgttatttccgagcgggagcgccgaaagaggatgtccctctcttgcgagcgactgagagctctgctaccccagttcgatgggcgaagggaggatatggctagcgtcttggaaatgagcgtgcagtttctcagactggcctccgcactgggcccttcccaggaacagcacgccatccttgcatcatccaaggaaatgtggcacagccttcaggaggacgtgctgcagctgacgctcagtagccagattcaggctggcgttcctgacccagggaccggagcctcatcagggactaggacccctgatgtgaaggctttcctggagagtccatggtctctcgatcccgcttcagccagtccagaacccgtgcctcacatccttgcatcaagcaggcagtgggatcccgcttcctgcacgtccctcggcacagataaatgtgaggccttattggggctgtgccaggtaaggggaggacttccacctttctcagagcccagcagcctggtgccctggccccctggcaggagcctgcccaaagcagtccgcccaccgctttcctggcctcctttctcccaacagcaaaccctccctgttatgtctggagaggcgctcggttggctcgggcaggcgggtccactagctatgggcgctgcccctctgggcgagcctgcaaaggaggaccccatgctcgcccaagaggctggaagtgcactagggtctgatgtggacgacggcacttccttcctgctaacagctggaccttcatcctggcccggaagcttggaaggaagaggaggaagtggcccagcctgggctcccgcagagagttcgcctttggacgtgggggaaccaggattcttgggcgacccagaacttggcagccaggagcttcaggactcgcctttggagccttggggcttggacgtcgactgcgcgggactagccctgaaggatgaagtggaaagcatattcccggattttttcgcctgttag

SEQ ID NO: 40853 - DNA, 1411 bp, Artificial Sequence
  derived and/or modified sequence
gggggcggggctgcctgcggaaggggccgtgcgcgtggggtcgctccgcagctgcgagttcatggcgtcccggtgctccgagccctacccggaggtctccagaatccctaccgtcaggggatgcaacggctccctgtctggtgccctctcctgctgcgaggactcggcccggggctcgggcccgcccaaggcccctacggtggccgagggtcccagctcctgccttcggcggaacgtgatcagcgagagggagcgcaggaagcggatgtcgttgagctgtgagcgtctgcgggccctgctgccccagttcgatggccggcgggaggacatggcctcggtcctggagatgtctgtgcagttcctgcggcttgccagcgccctggggcccagtcaggagcagcacgctattcttgcttcctccaaggaaatgtggcactcgttgcaggaggatgttttacagttgacgttgtcgagtcagattcaagcaggtgtgccagaccctgggacgggagcgtccagcgggactcgaaccccagatgtgaaggcgtttctggaaagtccttggtccctggatccagcgtcggccagcccagagcccgtgccgcacatccttgcgtcctccaggcagtgggaccccgcgagctgcacgtccctgggcacggacaagtgtgaggcactgttggggctgtgccaggtgcggggtgggctgccccctttctcagaaccttccagcctggtgccgtggcccccaggccggagtcttcctaaggctgtgaggccacccctgtcctggcctccgttctcgcagcagcagaccttgcccgtgatgagcggggaggcccttggctggctgggccaggctgggcccctggccatgggggctgcacctctgggggagccagccaaggaggaccccatgctggcgcaggaggccgggtctgcgttggggtctgatgtggacgatgggacgtccttcctgctgactgctggtcccagctcgtggccggggtctctggagggtcgaggaggcagtggccctgcatgggccccagctgagagcagtccactggatgttggagagccaggcttcctaggggaccctgagcttggctcccaggagctccaggacagccctctggagccgtggggcctggatgtggactgtgcaggcctggccctgaaggacgaggtggagagcatcttccctgacttctttgcctgctagcagccaggctgtggagaggaggcgggcggggccggtggatctggagccgtgtgtgtccctgtcgcgtgcttgggcattttattttgggtttgggttgcagctgcaccctaatttgagcgaggcttacaggctgtgagaagaggatagtgaatattaaagagggaaagcagttttcctggaggaagc

SEQ ID NO: 40854 - protein, 680 aa, Artificial Sequence
  derived and/or modified sequence
MELQTLQEALKVEIQVHQKLVAQMKQDPQNADLKKQLHELQAKITALSEKQKRVVEQLRKNLIVKQEQPDKFQIQPLPQSENKLQTAQQQPLQQLQQQQQYHHHHAQQSAAASPNLTASQKTVTTASMITTKTLPLVLKAATATMPASVVGQRPTIAMVTAINSQKAVLSTDVQNTPVNLQTSSKVTGPGAEAVQIVAKNTVTLVQATPPQPIKVPQFIPPPRLTPRPNFLPQVRPKPVAQNNIPIAPAPPPMLAAPQLIQRPVMLTKFTPTTLPTSQNSIHPVRVVNGQTATIAKTFPMAQLTSIVIATPGTRLAGPQTVQLSKPSLEKQTVKSHTETDEKQTESRTITPPAAPKPKREENPQKLAFMVSLGLVTHDHLEEIQSKRQERKRRTTANPVYSGAVFEPERKKSAVTYLNSTMHPGTRKRGRPPKYNAVLGFGALTPTSPQSSHPDSPENEKTETTFTFPAPVQPVSLPSPTSTDGDIHEDFCSVCRKSGQLLMCDTCSRVYHLDCLDPPLKTIPKGMWICPRCQDQMLKKEEAIPWPGTLAIVHSYIAYKAAKEEEKQKLLKWSSDLKQEREQLEQKVKQLSNSISKCMEMKNTILARQKEMHSSLEKVKQLIRLIHGIDLSKPVDSEATVGAISNGPDCTPPANAATSTPAPSPSSQSCTANCNQGEETK

SEQ ID NO: 40855 - protein, 101 aa, Artificial Sequence
  derived and/or modified sequence
MELQTLQEALKVEIQVHQKLVAQMKQDPQNADLKKQLHELQAKITALSEKQKRVVEQLRKNLIVKQEQPDKFQIQPLPQSENKLQTAQQQPLQQLQQQQQY

SEQ ID NO: 40856 - protein, 51 aa, Artificial Sequence
  derived and/or modified sequence
MELQTLQEALKVEIQVHQKLVAQMKQDPQNADLKKQLHELQAKITALSEKQ

SEQ ID NO: 40857 - DNA, 2043 bp, Artificial Sequence
  derived and/or modified sequence
atggagctgcagactctccaggaggctctcaaagtggagatccaggtccatcaaaagctcgtcgctcagatgaaacaggaccctcagaacgccgatcttaaaaaacaacttcatgaacttcaggctaagatcaccgctttgagcgaaaaacaaaaacgagtggtggagcaattgcggaagaaccttattgtgaagcaggagcagcccgataaatttcaaattcaacccttgccccagagtgagaataagctccagacagcgcagcagcagcctctccagcaactgcagcagcaacaacagtaccaccatcaccacgcccaacagtccgcggccgcttctccgaaccttacagcatctcagaagacagtaaccactgccagtatgataacaacgaagacccttcctctcgttctgaaggccgccacagcaactatgcctgctagtgtggttgggcaacggcctaccattgccatggtgacggccattaacagtcaaaaggccgtgctgagtactgatgtgcagaacaccccagtgaacctgcagacaagttctaaggtcacggggccaggagcggaggccgtgcagatcgttgcaaagaatactgtgactctagtgcaggccactcccccccagcctataaaggttcctcaatttatccccccacctaggctgacacctcgacccaattttctgccccaagtgcggcctaaacctgtggcacagaataacatacctatagccccagccccacccccaatgctggccgccccacagctaattcagagacctgttatgctcaccaaatttacacctaccactctgccgacatcacagaactctatacacccagtgagagtggtgaacgggcagaccgcgaccatcgctaagaccttccctatggcccagttaacatctattgtgattgccacccccggaaccaggttggccggcccccagacagtgcagttgtcaaagccctccctggaaaaacagacagtcaagagtcatacggaaaccgatgagaagcagactgagagtaggactatcacccctcctgcggctcccaagcctaagagggaagagaacccacaaaagctagccttcatggtttcgctcggtcttgttacacacgaccacttagaggagatacagtcaaagaggcaggagcgcaagcgtcgaactaccgccaatccggtctattccggggcagtgttcgagcctgagagaaagaagtccgcagtgacctacctgaattccactatgcaccctgggacccgtaagcggggaaggcccccaaaatacaatgcagttctcggatttggcgctctgacccctacttcacctcagagcagccatccagacagcccagagaacgaaaaaactgagacaaccttcacttttcctgcccctgtgcagccagtgagcctgccctctcctacaagcacagacggcgacatccacgaggatttctgtagcgtgtgccgcaagagcggccaactactgatgtgtgacacctgcagtagagtgtaccacctggactgcctggaccctcctctcaagacaattcctaagggaatgtggatctgcccaaggtgtcaggaccagatgcttaagaaggaggaggcgattccgtggcctgggactcttgcaatcgtccacagctacattgcctataaggccgccaaagaggaggaaaagcagaaactattaaaatggtcatccgatctcaagcaagagagagaacagctggaacagaaagtgaaacagctgtcaaattccatatctaagtgcatggagatgaagaataccattctggcgcggcaaaaggagatgcacagttcattggagaaggtcaagcagctgatacgcctgattcatgggattgacctcagtaaacctgtggactctgaagccaccgtcggcgccattagcaacggtcccgactgcacgccccccgccaatgcagccacctcaactcccgcgccaagcccttcctcccagtcttgcacagctaattgtaaccagggcgaggaaactaagtag

SEQ ID NO: 40858 - DNA, 2043 bp, Artificial Sequence
  derived and/or modified sequence
atggagctgcagaccctgcaggaggccctgaaggtggagatccaggtgcaccagaagctggtggcccagatgaagcaggacccccagaatgctgacctgaagaagcagctgcacgagctgcaggccaagatcacagccctgtctgagaagcagaagagggtggtggagcagctgaggaagaacctgattgtgaagcaggagcagcctgacaagttccagatccagcccctgccccagagcgagaacaagctgcagacagcccagcagcagcccctgcagcagctgcagcagcagcagcagtaccaccaccaccacgcccagcagagcgctgctgccagccccaacctgacagccagccagaagacagtgaccacagcctccatgatcaccaccaagaccctgcccctggtgctgaaggccgccacagccaccatgcctgcctctgtggtgggccagaggcccaccatcgccatggtgacagccatcaacagccagaaggctgtgctgagcacagatgtgcagaacacccctgtgaacctgcagaccagcagcaaggtgactggacctggagctgaggccgtgcagatcgtggccaagaacacagtgaccctggtgcaggccaccccaccccagcccatcaaggtgccccagttcatccccccaccccggctgaccccccggcccaacttcctgccccaggtgcggcccaagcctgtggcccagaacaacatccccatcgccccagcccccccacccatgctggccgccccccagctgatccagaggcctgtgatgctgaccaagttcacccccaccaccctgcccaccagccagaacagcatccaccctgtgcgggtggtgaatggccagacagccaccatcgccaagaccttccccatggcccagctgaccagcatcgtcatcgccaccccaggcacccggctggccggcccccagacagtgcagctgagcaagcccagcctggagaagcagacagtgaagagccacacagaaacagatgagaagcagacagagagcaggaccatcaccccacctgctgcccccaagcccaagcgggaggagaacccccagaagctggccttcatggtgtccctgggcctggtgacccatgaccacctggaggagatccagagcaagaggcaggagaggaagaggaggaccacagccaaccctgtgtacagcggggctgtgtttgagcctgagaggaagaagtctgctgtgacctacctgaacagcaccatgcaccctggcaccaggaagaggggccggccccccaagtacaatgctgtgctgggctttggagccctgacccccaccagcccccagagcagccacccagacagcccagaaaatgagaagacagagaccaccttcaccttccctgcccctgtgcagcctgtgtccctgcccagccccaccagcacagatggagacatccacgaggacttctgcagcgtgtgcaggaagagcggccagctgctgatgtgtgacacctgcagccgggtgtaccacctggactgcctggacccccccctgaagaccatccccaagggcatgtggatctgcccccgctgccaggaccagatgctgaagaaggaggaggccatcccctggccaggcaccctggccatcgtgcacagctacatcgcctacaaggccgccaaggaggaggagaagcagaagctgctgaagtggagcagtgacctgaagcaggagcgggagcagctggagcagaaggtgaagcagctgagcaacagcatcagcaagtgcatggagatgaagaacaccatcctggcccggcagaaggagatgcacagcagcctggagaaggtgaagcagctgatccgcctcatccacggcatcgacctgagcaagcctgtggacagcgaggccaccgtgggcgccatcagcaatggaccagactgcaccccaccagccaatgctgccaccagcaccccagcccccagccccagcagccagagctgcacagccaactgcaaccagggcgaggagaccaagtag

SEQ ID NO: 40859 - DNA, 2043 bp, Artificial Sequence
  derived and/or modified sequence
atggagctgcagaccctgcaggaggccctgaaggtggagatccaggtacaccagaagctagtggcacagatgaagcaggacccacagaacgccgatttgaagaagcagttgcacgaactccaggccaagattacagcgctcagtgagaagcagaaacgcgtcgttgaacaactgcggaaaaacctgatcgtgaagcaggagcagcccgacaaatttcagatccagccactacctcagtctgagaacaaactgcagacagcgcaacagcagcctctacagcagcttcagcaacagcagcagtatcaccatcaccacgcccagcaaagcgctgcagcgagcccaaatctgactgcaagccaaaaaacagtgacgacggcaagcatgataacgacgaagaccctcccattggtcctgaaggccgctaccgcaaccatgccagcttcagtggtgggacagcgaccaactatcgctatggtgaccgcaatcaacagtcaaaaggcggtgctgtctaccgacgtccagaatactccagtgaatctgcaaacctcaagcaaagttaccggacctggtgccgaggccgtgcaaatagtggcaaagaacactgtgactctggttcaggcaaccccccctcagcccattaaggtcccccagttcatcccccccccacggctaaccccaagacccaattttctgccccaagtccgcccgaagccggttgcacagaataacatccccatagctcccgcgcctcctccgatgcttgccgctccacaactgattcagcgccccgttatgttaacaaagttcacccctaccacgctccctacctcgcaaaattcaattcacccagtgcgcgtggtgaacgggcagacggctaccatcgcgaaaacttttccgatggctcaactgacctctattgtcatcgctactcctggtacaaggctagctggtcctcagactgtccagttgtctaagccttcacttgagaaacagactgtgaaatcccacacggagaccgatgagaaacaaacagagtcccgcaccataacaccccctgccgctcccaaacctaagagggaggagaacccccagaagctggcctttatggtgtctctagggctggtgacccatgatcacctggaggaaatccagtccaagcgccaggagagaaagaggcgaacaacagctaacccagtctactccggagctgtgttcgagcccgaacggaagaaatcagctgtcacctacctgaatagcacgatgcaccccgggacccgtaagaggggaagacctccaaagtacaatgcagtgctggggttcggggcactcacaccaacgtcgccacagtcctcgcacccagacagccccgagaatgaaaaaaccgagactacttttaccttccctgctccagtccagcccgtctctttgccatcacctacaagtaccgacggagatattcatgaggatttctgttccgtgtgcagaaaaagcgggcagctgctgatgtgtgatacgtgtagccgtgtataccatctggactgcctggaccctcctctaaagaccattcctaagggtatgtggatctgcccccggtgccaggatcagatgctgaagaaggaggaggctattccatggcccggaacactcgccattgtgcatagctacatcgcttacaaagcagccaaagaggaagaaaagcagaagctcctgaaatggtcttctgacttgaaacaggagcgcgaacagctcgaacagaaagtgaagcaactctcaaatagtatcagtaagtgtatggagatgaaaaacacgattttggcaagacagaaagagatgcacagcagcctcgagaaagtcaagcaactgatcagactgattcatgggattgatttaagcaagcctgttgactcagaagctacagtaggcgcaatcagcaatggaccagactgcacacctccggcaaatgcagccacgtccactccagcccctagcccatccagtcagagttgtaccgccaattgcaaccagggcgaagagacaaagtag

SEQ ID NO: 40860 - DNA, 2730 bp, Artificial Sequence
  derived and/or modified sequence
cctcctcctcctgcttctcctgctcagagttcctgcctccagctgccaggggggacagccagccagcagcaggaggggggctagagagctgaaggagagccagtttccccaaaattgctgcagtgagaagaggagtttgttactttaaacagaggctgaagaaactatagaattagcagagaaagtggagaaggtagaggatggagttgcagactctacaggaggctcttaaagtggaaattcaggttcaccagaaactggttgctcaaatgaagcaggatccacagaatgctgacttaaagaaacagcttcatgaactccaagccaaaatcacagctttgagtgagaaacagaaaagagtagttgaacagctacggaagaacctgatagtaaagcaagaacaaccggacaagttccaaatacagccattgccacaatctgaaaacaaactacaaacagcacagcagcaaccactacagcaactacaacaacagcagcagtaccaccaccaccacgcccagcagtcagctgcagcctctcccaacctgactgcttcacagaagactgtaactacagcttctatgattaccacaaagacactacctctcgtcttgaaagcagcaactgcgaccatgcctgcctctgtggtgggccagagacctaccattgctatggtgaccgccatcaacagtcagaaggctgtgctcagcactgatgtgcagaacacaccagtcaacctccagacgtctagtaaggtcactgggcctggggcagaggctgtccaaattgtggcaaaaaacacagtcactctggttcaggcaacacctcctcagcccatcaaagtaccacagtttatcccccctcctagactcactccacgtccaaactttcttccacaggttcgacccaagcctgtggcccagaataacattcctattgccccagcaccacctcccatgctcgcagctcctcagcttatccagaggcccgtcatgctgaccaagttcacccccacaacccttcccacatcccagaattccatccaccccgtccgtgtcgtcaatgggcagactgcaaccatagccaaaacgttccccatggcccagctcaccagcattgtgatagctactccagggaccagactcgctggacctcaaactgtacagcttagcaagccaagtcttgaaaaacagacagttaaatctcacacagaaacagatgagaaacaaacagagagccgcaccatcaccccacctgctgcacccaaaccaaaacgggaggagaaccctcagaaacttgccttcatggtgtctctagggttggtaacacatgaccatctagaagaaatccaaagcaagaggcaagagcgaaaaagaagaacaacagcaaatccggtctacagtggagcagtctttgagccagagcgtaagaagagtgcagtgacatacctaaacagcacaatgcaccctgggacccggaagagaggtcgtcctccaaaatacaatgcagtgctggggtttggagcccttaccccaacatccccccaatccagtcatcctgactcccctgaaaatgaaaagacagagaccacattcactttccctgcacctgttcagcctgtgtccctgcccagccccacctccacagacggtgatattcatgaggatttttgcagcgtttgcagaaaaagtggccagttactgatgtgcgacacatgttcccgtgtatatcatttggactgcttagacccccctctgaaaacaattcccaagggcatgtggatctgtcccagatgtcaggaccagatgctgaagaaggaagaagcaattccatggcctggaactttagcaattgttcattcctatattgcctacaaagcagcaaaagaagaagagaaacagaagttacttaaatggagttcagatttaaaacaagaacgagaacaactagagcaaaaggtgaaacagctcagcaattccataagtaaatgcatggaaatgaagaacaccatcctggcccggcagaaggagatgcacagctccctggagaaggtaaaacagctgattcgcctcatccacggcatcgacctctccaaacctgtagactctgaggccactgtgggggccatctccaatggcccggactgcaccccccctgccaatgccgccacctccacgccggccccttccccctcctcccagagctgcacagcgaactgtaaccagggggaagagactaaataacagagcccctctaggagaagccacgggatcccggcggcaaggagaacagaacactgaagactctagaaaagcaaagccggatttctggaaagtgcagaattcttttggttctttggttccagagagagagaagatgcttgtgccaggtggcaccagagtttgccaattgatccttcttattctgtgtgtacatgcaaagattggaccatgttacatgaaatagtgccagctggaggttctttgccagcaccatgccaagtgaaataatatatttactctctctattatacaccagtgtgtgcctgcagcagcctccacagccacgatgggtttgtttctgttttcttgggtggggagcagggacgggcggagggaggagagcaggtttcagatccttacttgccgagccgtttgtttaggtagagaagacaagtccaaagagtgtgtgggctttcctgtttctaaactttcgctactataaaaccaa

SEQ ID NO: 40861 - DNA, 2043 bp, Artificial Sequence
  derived and/or modified sequence
atggagctgcagacgctccaggaagcgctgaaggtggagatacaagtgcaccagaagttggttgcccagatgaagcaagatccgcagaatgccgacctgaagaagcagttgcatgagctgcaggccaaaatcactgcactatcggagaaacagaagcgggtcgtggagcaactacgtaagaacctcattgtaaagcaggaacagcccgataaattccagatccagccattgccccagtccgagaataaactgcagaccgcgcagcagcagccattacagcagctgcagcagcagcagcagtatcaccaccaccatgcccagcagtccgcagccgcttctccgaaccttacagccagtcagaagacagtcacaacagcatcgatgattaccactaaaaccttgcctctggtgttgaaagccgctacagccaccatgccggctagcgtagtcgggcagcgacctacaattgccatggtcactgccattaacagtcaaaaggctgtcctcagcactgacgtgcagaatacccctgtcaacttgcagaccagttcaaaagtgacaggcccaggggctgaagccgtgcagatcgtcgccaagaacactgtcaccctagtgcaggccacgccgccacagcccattaaggtaccacagttcatcccccctccgcgtcttacacctcgacctaattttctgccccaagttaggccaaaacccgtggcacagaacaatattccgatagcaccagccccaccaccaatgttagccgcaccacaacttattcagcgccctgtgatgttaacaaaattcacccctacgactctgccaaccagtcagaactctattcaccccgttcgggtcgttaacggtcagacagccactatcgccaagacttttcctatggcgcagctgaccagcatcgtgattgccacacccggaacacggctcgcaggcccacaaactgtgcagttgtcaaagccctcacttgaaaaacaaacagtaaaatctcatacggagacggatgagaaacagaccgaaagccgcacaatcacacctcccgcagcgcctaagccgaaacgggaggagaacccccagaagttagccttcatggtgtcccttggtctggtgacccatgaccatttggaggaaatccagtctaaaaggcaagaaaggaagaggcgtaccacggccaatccggtctatagcggggctgtgttcgaacccgaaagaaaaaagtctgctgttacttacttgaattccactatgcatccgggaacccggaagaggggcaggcctcctaaatataacgccgtgttgggtttcggagccctgacaccgaccagcccccaatcatctcatcctgattcacccgaaaatgagaagactgaaacaaccttcactttccctgctcccgtacaacccgtgagcttaccatccccaaccagcacagacggggacattcatgaggacttctgttcagtgtgtcgaaaatccggacagctgctgatgtgcgacacatgcagccgcgtgtatcatctggattgccttgacccaccgttaaagactatccctaagggtatgtggatctgccccaggtgccaggatcaaatgttgaagaaggaggaggccattccgtggccaggcaccctcgcaatagtgcattcttacatcgcttacaaggccgcaaaggaggaggaaaagcagaagctgctcaaatggtcctccgacctcaagcaggaaagggagcagctcgaacagaaggtgaaacagctatctaacagcatatctaagtgcatggaaatgaagaacactatactcgcaagacagaaagagatgcattcatctctggaaaaggtgaaacaactgataagacttattcatggcatcgatctgtctaaaccagttgatagtgaggccacagtcggagccatatcgaacggacccgactgtacgcctcccgctaacgctgctacgtccacacctgccccatccccctcctcccagagttgcaccgcaaattgcaaccagggtgaggagacgaagtag

SEQ ID NO: 40862 - DNA, 2043 bp, Artificial Sequence
  derived and/or modified sequence
atggagctgcagaccctgcaggaggccctgaaggtggagatccaggtgcaccagaagctggtggcccagatgaagcaggacccccagaacgccgacctgaagaagcagctgcacgagctgcaggccaagatcaccgccctgagcgagaagcagaagagagtggtggagcagctgagaaagaacctgatcgtgaagcaggagcagcccgacaagttccagatccagcccctgccccagagcgagaacaagctgcagaccgcccagcagcagcccctgcagcagctgcagcagcagcagcagtaccaccaccaccacgcccagcagagcgccgccgccagccccaacctgaccgccagccagaagaccgtgaccaccgccagcatgatcaccaccaagaccctgcccctggtgctgaaggccgccaccgccaccatgcccgccagcgtggtgggccagagacccaccatcgccatggtgaccgccatcaacagccagaaggccgtgctgagcaccgacgtgcagaacacccccgtgaacctgcagaccagcagcaaggtgaccggccccggcgccgaggccgtgcagatcgtggccaagaacaccgtgaccctggtgcaggccacccccccccagcccatcaaggtgccccagttcatccccccccccagactgacccccagacccaacttcctgccccaggtgagacccaagcccgtggcccagaacaacatccccatcgcccccgcccccccccccatgctggccgccccccagctgatccagagacccgtgatgctgaccaagttcacccccaccaccctgcccaccagccagaacagcatccaccccgtgagagtggtgaacggccagaccgccaccatcgccaagaccttccccatggcccagctgaccagcatcgtgatcgccacccccggcaccagactggccggcccccagaccgtgcagctgagcaagcccagcctggagaagcagaccgtgaagagccacaccgagaccgacgagaagcagaccgagagcagaaccatcaccccccccgccgcccccaagcccaagagagaggagaacccccagaagctggccttcatggtgagcctgggcctggtgacccacgaccacctggaggagatccagagcaagagacaggagagaaagagaagaaccaccgccaaccccgtgtacagcggcgccgtgttcgagcccgagagaaagaagagcgccgtgacctacctgaacagcaccatgcaccccggcaccagaaagagaggcagaccccccaagtacaacgccgtgctgggcttcggcgccctgacccccaccagcccccagagcagccaccccgacagccccgagaacgagaagaccgagaccaccttcaccttccccgcccccgtgcagcccgtgagcctgcccagccccaccagcaccgacggcgacatccacgaggacttctgcagcgtgtgcagaaagagcggccagctgctgatgtgcgacacctgcagcagagtgtaccacctggactgcctggacccccccctgaagaccatccccaagggcatgtggatctgccccagatgccaggaccagatgctgaagaaggaggaggccatcccctggcccggcaccctggccatcgtgcacagctacatcgcctacaaggccgccaaggaggaggagaagcagaagctgctgaagtggagcagcgacctgaagcaggagagagagcagctggagcagaaggtgaagcagctgagcaacagcatcagcaagtgcatggagatgaagaacaccatcctggccagacagaaggagatgcacagcagcctggagaaggtgaagcagctgatcagactgatccacggcatcgacctgagcaagcccgtggacagcgaggccaccgtgggcgccatcagcaacggccccgactgcaccccccccgccaacgccgccaccagcacccccgcccccagccccagcagccagagctgcaccgccaactgcaaccagggcgaggagaccaagtag

SEQ ID NO: 40863 - protein, 354 aa, Artificial Sequence
  derived and/or modified sequence
MGSGISSESKESAKRSKELEKKLQEDAERDARTVKLLLLGAGESGKSTIVKQMKIIHKNGYSEQECMEFKAVIYSNTLQSILAIVKAMTTLGIDYVNPRSAEDQRQLYAMANTLEDGGMTPQLAEVIKRLWRDPGIQACFERASEYQLNDSAAYYLNDLDRITASGYVPNEQDVLHSRVKTTGIIETQFSFKDLHFRMFDVGGQRSERKKWIHCFEGVTCIIFCAALSAYDMVLVEDEEVNRMHESLHLFNSICNHKYFSTTSIVLFLNKKDIFQEKVTKVHLSICFPEYTGPNTFEDAGNYIKNQFLDLNLKKEDKEIYSHMTCATDTQNVKFVFDAVTDIIIKENLKDCGLF

SEQ ID NO: 40864 - DNA, 1065 bp, Artificial Sequence
  derived and/or modified sequence
atgggcagcggcatcagcagcgagagcaaggagagcgccaagagaagcaaggagctggagaagaagctgcaggaggacgccgagagagacgccagaaccgtgaagctgctgctgctgggcgccggcgagagcggcaagagcaccatcgtgaagcagatgaagatcatccacaagaacggctacagcgagcaggagtgcatggagttcaaggccgtgatctacagcaacaccctgcagagcatcctggccatcgtgaaggccatgaccaccctgggcatcgactacgtgaaccccagaagcgccgaggaccagagacagctgtacgccatggccaacaccctggaggacggcggcatgaccccccagctggccgaggtgatcaagagactgtggagagaccccggcatccaggcctgcttcgagagagccagcgagtaccagctgaacgacagcgccgcctactacctgaacgacctggacagaatcaccgccagcggctacgtgcccaacgagcaggacgtgctgcacagcagagtgaagaccaccggcatcatcgagacccagttcagcttcaaggacctgcacttcagaatgttcgacgtgggcggccagagaagcgagagaaagaagtggatccactgcttcgagggcgtgacctgcatcatcttctgcgccgccctgagcgcctacgacatggtgctggtggaggacgaggaggtgaacagaatgcacgagagcctgcacctgttcaacagcatctgcaaccacaagtacttcagcaccaccagcatcgtgctgttcctgaacaagaaggacatcttccaggagaaggtgaccaaggtgcacctgagcatctgcttccccgagtacaccggccccaacaccttcgaggacgccggcaactacatcaagaaccagttcctggacctgaacctgaagaaggaggacaaggagatctacagccacatgacctgcgccaccgacacccagaacgtgaagttcgtgttcgacgccgtgaccgacatcatcatcaaggagaacctgaaggactgcggcctgttctag

SEQ ID NO: 40865 - DNA, 1065 bp, Artificial Sequence
  derived and/or modified sequence
atggggtctgggatttcttctgaaagcaaagaaagtgccaaacgcagcaaggagttggagaagaagctgcaggaggacgcagagcgggatgcccgcaccgtgaagttgctacttctaggcgccggcgagtcaggtaaatccaccatcgtaaagcaaatgaagataatacataaaaatgggtacagtgaacaggagtgtatggagttcaaggccgtgatttactccaataccctgcagtccatcctggcaatagtgaaagccatgactacactcgggatcgactatgtgaatccccgtagtgccgaggatcagagacaactctacgcaatggctaacaccctcgaggatgggggcatgaccccacagctcgccgaggtaatcaagagactgtggcgagatcccggcatccaggcatgttttgagagagcgtctgagtatcagctgaatgattccgcagcttattatctcaacgatttagaccgcataactgcgagcggctatgttcctaatgaacaggatgtgctgcactcccgcgtgaaaaccaccgggattatagaaactcaattcagtttcaaggacttgcacttccggatgtttgatgttggtggccagcgatctgaaaggaaaaaatggattcactgttttgagggagttacctgtattatcttctgcgctgcgctgtcagcatacgacatggtcctggtggaagatgaggaagtgaatcgcatgcacgagagcctccatctgttcaacagcatttgtaatcacaagtactttagtactacatccattgtgctattcctcaacaagaaggacattttccaggagaaggtgactaaggtccatctgtcgatttgctttccggagtatacaggcccaaatacgtttgaagatgccgggaactatataaaaaaccagtttctggatcttaacctgaagaaagaggacaaagagatctactcacatatgacctgtgctaccgacacacagaacgtcaagttcgttttcgatgccgtgaccgacataataatcaaagaaaatctgaaagattgtgggctgttttag

SEQ ID NO: 40866 - DNA, 1159 bp, Artificial Sequence
  derived and/or modified sequence
gagcattactcttgcctcctatgtccaaaccacagctgtgctcaacatttgaaaaatctgaacatataaactgacaagtatctaccaccacaagatgggaagtggaattagttcagagagcaaggagtcagccaaaagatcaaaagaactggagaaaaagcttcaggaggatgctgagcgagatgcaagaaccgtaaagctgctactattaggagcaggagaatctgggaaaagtactattgttaaacaaatgaagatcatccataagaatggttacagtgagcaagaatgcatggagttcaaagcagtaatttacagtaatacattgcaatccatcctagctattgtgaaagccatgactacccttggaattgattatgtaaatcccagaagtgcagaggaccaacgacaactttatgcaatggcaaataccctggaagatggtggcatgacacctcaactggctgaggtaataaaacggctgtggagagatccaggaattcaggcctgctttgaaagggcatctgaatatcagctcaatgactcagcagcttactaccttaatgatttagatagaataacagcatctgggtatgtgccaaatgaacaagatgttctccattctcgagtgaaaacgactggaatcattgaaactcaattctcctttaaagacttgcacttcaggatgtttgatgtaggtggacagagatctgagagaaagaagtggattcactgctttgaaggagttacatgcattatattttgtgctgcacttagtgcctatgacatggtcctcgtggaagacgaagaagtgaatagaatgcatgaaagccttcacctgttcaacagtatctgtaatcacaagtatttttcaacaacctccattgtcctgttcctcaacaaaaaagatatctttcaagaaaaggtaaccaaggtgcatcttagtatctgctttccagaatacactgggccaaatacatttgaagatgcaggaaactacatcaagaaccagtttctagacctgaatttaaaaaaagaagataaggaaatttattcccacatgacctgtgctactgacacccaaaatgtcaagtttgtgtttgacgcagttacagatataataatcaaagagaatctaaaagactgtgggcttttctaa

SEQ ID NO: 40867 - DNA, 1065 bp, Artificial Sequence
  derived and/or modified sequence
atgggcagcggcatcagcagcgagagcaaggagagcgccaagaggagcaaggagctggagaagaagctgcaggaggatgctgagagagatgccaggacagtgaagctgctgctgctgggcgctggggagagcggcaagagcaccatcgtgaagcagatgaagatcatccacaagaatggctacagcgagcaggagtgcatggagttcaaggctgtgatctacagcaacaccctgcagagcatcctggccatcgtgaaggccatgaccaccctgggcattgattatgtgaaccccaggtctgctgaggaccagaggcagctgtatgccatggccaacaccctggaggatggcggcatgaccccccagctggccgaggtgatcaagaggctgtggagggaccccggcatccaggcctgctttgagcgggccagcgagtaccagctgaatgattctgctgcctactacctgaatgacctggaccgcatcacagccagcggctacgtgcccaatgagcaggatgtgctgcacagccgggtgaagaccaccggcatcatcgagacccagttctccttcaaggacctgcacttcaggatgtttgatgtgggcggccagaggtctgagaggaagaagtggatccactgctttgaaggagtgacctgcatcatcttctgtgccgccctgagcgcctatgacatggtgctggtggaggatgaggaggtgaacaggatgcatgagagcctgcacctgttcaacagcatctgcaaccacaagtacttcagcaccaccagcatcgtgctcttcctgaacaagaaggacatcttccaggagaaggtgaccaaggtgcacctgagcatctgcttccctgagtacacaggccccaacacctttgaagatgctggcaactacatcaagaaccagttcctggacctgaacctgaagaaggaggacaaggagatctacagccacatgacctgtgccacagacacccagaatgtgaagtttgtgtttgatgctgtgacagacatcatcatcaaggagaacctgaaggactgtggcctcttctag

SEQ ID NO: 40868 - DNA, 1065 bp, Artificial Sequence
  derived and/or modified sequence
atgggcagcggcatcagcagcgagagcaaggagagcgccaagcggtctaaggagctagaaaaaaagctgcaagaggacgcggagagggatgcacgcaccgtcaaactactgttacttggggctggggaatctggcaaaagcacaattgtaaagcagatgaagattatccacaaaaacggatacagcgagcaggaatgcatggagtttaaagccgttatctacagtaatacactgcaatctatcttggctatcgtaaaagcaatgaccaccttgggaattgattacgttaacccccgcagcgccgaggatcagagacagttgtatgccatggctaacacactggaggacggcggaatgacccctcagctggcagaggtgattaagcggttgtggcgagatcccggcatccaggcctgcttcgagcgggccagcgagtatcagttaaacgacagcgccgcctattacctcaacgatctggaccgaatcacagcaagcgggtacgtgccgaacgaacaggacgtacttcattcacgggtaaagaccaccggtatcatcgagacgcagtttagctttaaagacctccatttcaggatgttcgacgtggggggacagcgcagcgagcgaaagaagtggattcactgttttgaaggtgtcacgtgtatcatcttttgtgcggcgctttctgcctacgatatggtgcttgtggaggacgaagaagtgaatcggatgcatgaatcccttcatttatttaatagcatctgtaaccacaaatacttctccactacttcaatcgtactgttcttgaacaagaaagacatctttcaagaaaaggttaccaaggtgcatctcagtatctgctttcctgagtatacaggtcctaatacctttgaggatgccggaaactacattaagaaccaatttctcgatttaaacctgaaaaaagaagacaaagaaatctattctcacatgacttgcgccacagacacccagaacgtgaagtttgtcttcgacgctgtcacggacataattatcaaggagaatctgaaggattgcggcctgttctag

SEQ ID NO: 40869 - DNA, 1065 bp, Artificial Sequence
  derived and/or modified sequence
atgggttcaggcatcagttcagagtccaaggaatctgccaagcggtctaaggagcttgaaaaaaagctgcaagaagacgccgaaagagatgcaagaactgtcaagctgttattgctcggcgctggtgagagcggcaaatccaccatcgtaaaacagatgaaaatcattcataaaaatggatactcagaacaggaatgtatggagtttaaggccgtgatctactcgaatactctacaatctattttggcaattgttaaagcgatgacaaccctgggaatcgattacgtaaacccaagaagcgctgaagatcagagacagctctacgcgatggccaacacccttgaggatggaggaatgacccctcagctagcagaggttatcaagagactgtggagggaccccggtatacaggcgtgcttcgaacgcgcttctgagtatcagctaaatgattccgcggcttattacctgaacgacttagataggatcaccgcgagtggctacgttcctaacgagcaggacgttctgcattctagagtgaaaacaactggaattatagagacgcagttcagcttcaaggatctgcactttcgaatgtttgacgtcggcggacagcgctcggaacggaagaaatggatccactgtttcgaaggagtgacttgtattatcttctgtgccgcactttcggcatacgatatggtcttggtggaggatgaggaggtgaatagaatgcatgagtccttgcatctctttaattcaatctgtaaccacaagtacttctctactacctccatagtcctgttcttaaataaaaaagacatctttcaagagaaagttacgaaagtgcatctgtccatatgtttccccgagtatactggcccaaacactttcgaggacgctggaaactatatcaaaaaccaatttctcgacttgaatctaaaaaaagaagacaaggagatttatagccatatgacttgtgccacagacacgcagaatgtgaaattcgttttcgacgctgtaaccgatattattatcaaagaaaatcttaaggactgcgggcttttttag

SEQ ID NO: 40870 - DNA, 429 bp, Artificial Sequence
  derived and/or modified sequence
atggattctgactataggaaacagtgggatcagtatgtcaaggagctttacgagcaggaatgcaatggagagacagtggtctactgggaggtcaaataccccttcccaatgtctaaccgagattatgtttacttgaggcaaagacgggatctggacatggagggacgtaaaatccacgttattctggccagaagcacctcgatgcctcagctgggggagcgtagtggcgtcatacgagttaagcaatacaagcagagtcttgccatcgaaagcgacggtaaaaaaggctctaaggtctttatgtactattttgataaccctggagggcagatccccagctggctaatcaactgggcggctaaaaacggcgtgccaaactttcttaaggacatggcgcgcgcttgtcagaactatctcaagaaaacttag

SEQ ID NO: 40871 - DNA, 429 bp, Artificial Sequence
  derived and/or modified sequence
atggacagcgactacaggaagcagtgggaccagtatgtgaaggagctgtatgagcaggagtgcaatggagaaacagtggtgtactgggaggtgaagtaccccttccccatgagcaacagagattatgtgtacctgcggcagaggcgggacctggacatggagggcaggaagatccacgtgatcctggcccggagcacctccatgccccagctgggggagaggtctggagtcatccgggtgaagcagtacaagcagagcctggccattgaaagtgatggcaagaagggcagcaaggtgttcatgtactactttgacaaccctgggggccagatccccagctggctgatcaactgggccgccaagaatggagtgcccaacttcctgaaggacatggcccgggcctgccagaactacctgaagaagacctag

SEQ ID NO: 40872 - DNA, 429 bp, Artificial Sequence
  derived and/or modified sequence
atggacagcgactaccggaagcagtgggaccagtacgtgaaggagttatatgagcaggaatgcaatggagaaactgttgtgtactgggaagtgaaatatccttttcccatgagtaacagagactatgtgtatctccgtcagcgaagggatctcgacatggagggcaggaaaatccatgtgattttggcaaggtccacatctatgccacaacttggtgaacgcagtggtgtaatcagagtgaaacaatacaagcaatccctcgctatcgagtcggatggcaagaagggcagtaaagtctttatgtattactttgataatcccgggggtcaaatcccttcatggctcatcaattgggccgccaaaaatggcgtccccaacttcctgaaggatatggccagagcctgtcagaactatctcaagaagacttag

SEQ ID NO: 40873 - DNA, 429 bp, Artificial Sequence
  derived and/or modified sequence
atggactcagactacagaaagcagtgggatcagtacgtgaaggagctctacgaacaggagtgtaatggcgaaactgtggtgtactgggaggttaagtaccccttccccatgtctaacagggactatgtgtaccttagacagcgaagagatctggacatggagggcagaaagattcacgtgatactggcccgtagtactagcatgccacaattaggggagcgctctggcgtgatccgcgtcaagcagtataaacagtctctcgcgatagagtctgacggtaaaaagggcagcaaggtattcatgtattatttcgacaatcccggaggacagatcccaagctggcttattaactgggcggctaagaatggggtgccaaattttcttaaggatatggctcgggcatgtcagaattacttaaaaaaaacctag

SEQ ID NO: 40874 - DNA, 429 bp, Artificial Sequence
  derived and/or modified sequence
atggacagcgactacagaaagcagtgggaccagtacgtgaaggagctgtacgagcaggagtgcaacggcgagaccgtggtgtactgggaggtgaagtaccccttccccatgagcaacagagactacgtgtacctgagacagagaagagacctggacatggagggcagaaagatccacgtgatcctggccagaagcaccagcatgccccagctgggcgagagaagcggcgtgatcagagtgaagcagtacaagcagagcctggccatcgagagcgacggcaagaagggcagcaaggtgttcatgtactacttcgacaaccccggcggccagatccccagctggctgatcaactgggccgccaagaacggcgtgcccaacttcctgaaggacatggccagagcctgccagaactacctgaagaagacctag

SEQ ID NO: 40875 - protein, 1244 aa, Artificial Sequence
  derived and/or modified sequence
MNNQKVVAVLLQECKQVLDQLLLEAPDVSEEDKSEDQRCRALLPSELRTLIQEAKEMKWPFVPEKWQYKQAVGPEDKTNLKDVIGAGLQQLLASLRASILARDCAAAAAIVFLVDRFLYGLDVSGKLLQVAKGLHKLQPATPIAPQVVIRQARISVNSGKLLKAEYILSSLISNNGATGTWLYRNESDKVLVQSVCIQIRGQILQKLGMWYEAAELIWASIVGYLALPQPDKKGLSTSLGILADIFVSMSKNDYEKFKNNPQINLSLLKEFDHHLLSAAEACKLAAAFSAYTPLFVLTAVNIRGTCLLSYSSSNDCPPELKNLHLCEAKEAFEIGLLTKRDDEPVTGKQELHSFVKAAFGLTTVHRRLHGETGTVHAASQLCKEAMGKLYNFSTSSRSQDREALSQEVMSVIAQVKEHLQVQSFSNVDDRSYVPESFECRLDKLILHGQGDFQKILDTYSQHHTSVCEVFESDCGNNKNEQKDAKTGVCITALKTEIKNIDTVSTTQEKPHCQRDTGISSSLMGKNVQRELRRGGRRNWTHSDAFRVSLDQDVETETEPSDYSNGEGAVFNKSLSGSQTSSAWSNLSGFSSSASWEEVNYHVDDRSARKEPGKEHLVDTQCSTALSEELENDREGRAMHSLHSQLHDLSLQEPNNDNLEPSQNQPQQQMPLTPFSPHNTPGIFLAPGAGLLEGAPEGIQEVRNMGPRNTSAHSRPSYRSASWSSDSGRPKNMGTHPSVQKEEAFEIIVEFPETNCDVKDRQGKEQGEEISERGAGPTFKASPSWVDPEGETAESTEDAPLDFHRVLHNSLGNISMLPCSSFTPNWPVQNPDSRKSGGPVAEQGIDPDASTVDEEGQLLDSMDVPCTNGHGSHRLCILRQPPGQRAETPNSSVSGNILFPVLSEDCTTTEEGNQPGNMLNCSQNSSSSSVWWLKSPAFSSGSSEGDSPWSYLNSSGSSWVSLPGKMRKEILEARTLQPDDFEKLLAGVRHDWLFQRLENTGVFKPSQLHRAHSALLLKYSKKSELWTAQETIVYLGDYLTVKKKGRQRNAFWVHHLHQEEILGRYVGKDYKEQKGLWHHFTDVERQMTAQHYVTEFNKRLYEQNIPTQIFYIPSTILLILEDKTIKGCISVEPYILGEFVKLSNNTKVVKTEYKATEYGLAYGHFSYEFSNHRDVVVDLQGWVTGNGKGLIYLTDPQIHSVDQKVFTTNFGKRGIFYFFNNQHVECNEICHRLSLTRPSMEKPCT

SEQ ID NO: 40876 - DNA, 3735 bp, Artificial Sequence
  derived and/or modified sequence
atgaacaatcaaaaggtcgttgctgtgcttctgcaggagtgcaaacaagtgttggatcagttgctcctggaagcacctgacgtgtcggaagaggacaagagcgaggaccagcggtgtcgtgcactactgccgagtgagttgaggactctaattcaggaagccaaggaaatgaagtggccctttgtgcccgagaaatggcagtataaacaggctgtcggccccgaagacaaaacgaaccttaaagatgtgatcggagccggcctgcagcagctgctggcctcacttagagcttcaatcctggcccgagactgcgcagctgcagctgcaatagttttccttgtcgatcggtttctgtatgggttggacgtgtccggcaaattgctgcaggtagccaaggggctacataagctgcaacccgctacacctattgcaccccaggttgtcatccggcaggcacgaatctctgtgaattctggaaagttacttaaggcagagtatatcctgagcagcctaatcagtaataacggcgctacaggcacctggctgtaccgaaatgaatctgacaaggtgctggtccaaagcgtgtgcatacagattcgcggtcagattctgcagaaactgggtatgtggtatgaggccgcagagctgatttgggcttccattgtgggctacctggctctgccgcaacccgataaaaaaggattaagtacgtccctggggattctcgcagatatctttgtgtcaatgagcaagaatgattatgaaaagtttaagaacaatccacaaataaacctttccttactgaaagagttcgaccatcacctactctccgcagccgaagcatgtaagttagccgctgctttctcggcctatactcctctttttgtgctgactgcagtgaacattcgagggacgtgcctgctcagctactcctcttccaacgactgcccccccgaactgaagaatctgcacctatgtgaagccaaagaagcctttgagatcggcctcctcacaaagagggatgatgagccagtgacaggcaaacaggagctgcacagctttgttaaggcagcattcggactgaccaccgttcacagacggctccatggcgagacaggcacagtgcacgccgcgtcacagctgtgcaaagaagcaatgggaaagctctacaatttttctacctccagtcggtcacaagacagggaagctctttcccaggaagtgatgagcgtgattgcccaggtgaaggagcaccttcaggtgcaatccttttccaatgtggatgatcggtcgtacgtacctgaatcattcgagtgtaggctggacaagctcatattgcatggacagggggattttcagaagatcctggatacatactcacagcatcataccagcgtttgtgaagtgtttgaaagtgactgcggtaacaacaagaacgagcagaaggacgccaaaaccggggtgtgcatcacagcccttaagaccgaaatcaaaaatattgacactgtgtccaccactcaggagaagccccactgtcagcgtgacacgggaatcagttcctcactgatgggcaaaaacgtccagagagagcttcggagggggggcagaaggaactggactcatagcgatgctttcagggtgtctttagaccaggatgtggagacagagactgagccgagcgattactcaaacggcgagggcgccgttttcaataagagtctgagtggctctcagacttcttcagcttggagtaatctcagcggtttcagtagctccgctagctgggaggaggtcaattaccatgttgatgataggtctgcccggaaagagccgggcaaggagcatctcgtcgatacacaatgtagcaccgctctgtccgaggaactagagaatgatcgtgagggacgagctatgcatagtttgcatagtcagctgcacgacctcagtctgcaggagccaaataacgataacttagaacctagccagaaccagccccaacagcagatgccccttacccccttttccccccacaatacccctgggatctttctggcaccgggggccggcctacttgagggcgcgcctgagggcatacaagaggttcggaatatggggcccagaaacacgtccgcccattctcggccaagctatcggtctgcctcctggtcctcagactcaggcagaccaaagaacatgggaacccatccttctgttcagaaagaggaagccttcgaaattattgtggagttccccgagacaaactgtgacgtaaaggaccggcagggtaaggagcagggcgaggagatatccgagcgcggagctggacctactttcaaagcctccccctcgtgggtagatcccgagggcgaaacagctgagtccactgaagatgcaccactggatttccaccgtgttctgcataactcactcggtaatattagtatgctgccttgtagcagcttcactcccaactggcccgttcagaatcccgactctagaaagtctgggggcccagtcgcggagcagggtatcgatcccgatgcatcgactgtggacgaggaagggcagctcctcgattcaatggatgtgccatgtacaaacggccacggttctcacagactttgtattctcagacagccacctggccaacgagctgagacccccaattccagtgtatccggaaatattctgttcccagtgttgagcgaggattgcactaccaccgaggagggtaaccagcctgggaatatgcttaactgttcacaaaactcctcatcaagttcggtatggtggttgaaatcaccggcattttcctccggctcctcagaaggagacagcccatggagctatcttaatagttctggaagttcatgggtcagcctgccagggaagatgcgcaaggagatacttgaagcgcgaacccttcaaccagacgactttgagaaactactggcaggtgtccggcacgactggctgtttcagaggctcgagaacacaggagtgttcaagccatcccagctgcatcgtgctcactcggccttgcttctcaaatactccaaaaagtccgagctttggacagcacaggaaactatagtctatctcggagactacttgacagtcaagaagaaggggaggcagagaaatgctttttgggtccaccacttgcaccaggaagaaattctagggcggtatgtagggaaagactataaagagcagaagggactctggcaccactttacagatgtggaaaggcagatgaccgcgcagcattatgtaactgaatttaacaaacggctgtatgagcagaatattccgacacagattttttacataccctccactattctcctgatcctcgaagataagacgatcaagggatgtatatccgttgagccatacattttaggggaattcgtgaagctcagcaataacaccaaggtggttaagacggaatataaggcaacagaatacgggctggcctacgggcatttcagttacgagttctcgaaccaccgggatgttgtggtggatctacagggatgggtaacaggcaacggtaaaggattaatttatctaactgaccctcaaattcactccgtggatcagaaggtgttcacaactaactttgggaagcggggcatattctactttttcaataatcagcatgtcgaatgcaacgaaatatgtcaccgattaagcctcacacgcccctctatggagaagccgtgtacgtag

SEQ ID NO: 40877 - DNA, 3735 bp, Artificial Sequence
  derived and/or modified sequence
atgaataatcagaaagttgtggcagttctgctgcaggaatgcaagcaggtgctggaccaacttctgctggaggctcctgatgtgtctgaagaggataagtcggaagaccagagatgccgggccctgctcccaagcgaactccgtacactgattcaagaagcaaaggaaatgaagtggccttttgtcccagagaagtggcagtataaacaagctgtaggccccgaggataaaaccaatctgaaggacgtcataggagccggactgcagcaattgctggcatctctgcgggcctccatactggcgagggactgtgccgctgcggcggcaatcgtgtttttagtcgatcgtttcctctatggtcttgatgtgtccgggaagctgcttcaagtggcaaaaggattacacaaactgcagccggccactcctattgctcctcaggttgtgatccgccaagctcggatctcagttaatagcggaaaactgctcaaagcagagtatatcctgagttccctcatttccaataatggcgccaccgggacatggttgtatcgtaacgaaagcgataaagtgctggtgcagtcagtttgcatccagattcgaggacagattctgcagaagctggggatgtggtatgaagcagccgaactcatctgggccagcatagtggggtacttggcactaccacaacccgataaaaagggcctgtcaacatctcttggtattctggcagatatctttgtctcaatgagcaagaacgactacgagaagtttaaaaacaacccccagatcaacctgtctctgttgaaggaatttgaccatcacctgctgtccgcagctgaagcatgtaaactggccgctgccttctccgcctatactccactattcgtgctgactgcggtgaatataagaggtacatgtctgctgtcttactcctcatccaatgattgcccccccgaactgaagaacctgcatctctgcgaggccaaggaagccttcgagatcggtctgctaactaagagagatgacgagcccgtgaccgggaagcaggagttgcactctttcgttaaagccgcattcggacttactacagttcaccgccggctacacggcgagaccgggacggtgcatgcagcgtcccagttatgcaaggaagcaatgggaaaactgtacaactttagcacaagctcccggtctcaggaccgggaggcgctgtcccaggaggtgatgtctgtgatagcccaggtgaaagaacatctacaggtacagtctttttctaacgtggatgatcgttcctacgtgccggaaagcttcgagtgccgcctggacaagcttatactgcacggccaaggagatttccagaaaattctggatacgtactctcagcaccacacatcagtgtgtgaagtcttcgagtctgattgtggcaataacaagaacgagcagaaagacgctaaaacgggagtgtgcattactgcactgaaaaccgaaatcaagaacatcgacactgtgtctaccacacaggagaagccccattgccaacgcgacaccggaatatcttcaagcttgatgggcaagaatgtgcaacgcgaacttagaaggggaggacggaggaactggacccactcagacgcctttagagtatctctggaccaggatgtggaaaccgaaaccgagccatcggattacagcaatggagagggcgccgtctttaataagtccctgagtggatcacagacttcgagtgcctggtcaaatcttagcggattcagctctagcgctagctgggaggaagttaattaccatgtagacgacagaagtgcccggaaagagcctggcaaagaacacctggtggatactcaatgctcgacagccttgtcagaggaactggagaatgatagagagggcagagctatgcactctctacattcacagctccacgatctaagcttgcaggaacctaataatgataacctggaaccctctcaaaatcaaccgcagcaacaaatgccgctcacccccttttcaccacacaacactccgggaattttcttagctccaggtgccggtctgctggagggcgccccagaaggcattcaagaggtgagaaacatgggaccgcgaaatacctccgcccattcacgtccctcttataggagcgccagctggtcatccgacagcggtaggcctaagaacatggggacacacccgtcggtccagaaagaagaggctttcgagatcattgtggaatttccggagaccaattgcgacgttaaagaccggcagggcaaggagcagggcgaagaaatttccgaaaggggagccggtccgaccttcaaggcctccccatcttgggttgaccccgagggcgaaacagccgagtctaccgaagatgcccccctcgactttcatagggttttgcacaacagcctgggtaacatttctatgctcccctgctctagctttaccccgaattggcccgttcaaaatccggactcgaggaagtccggagggcctgttgcagaacagggaatcgaccccgatgctagcacagtggacgaagagggacagttattagattcgatggacgtgccttgtacaaatggacatggtagccaccgcctgtgcatcctcagacagcccccaggccaaagagccgagacaccaaactcctcagtgtccgggaacatcctgttccccgtcctgtcggaagactgtactaccacagaggagggcaatcagcccggcaacatgcttaactgttcccagaacagcagttctagtagtgtatggtggctgaagtcccccgcctttagttccggttcatccgagggcgattccccttggagttacctgaactcttcaggttcttcatgggtaagcttacccgggaagatgcggaaggaaattttggaggcgcgtacgctgcaaccagatgactttgagaagttgctggcaggagtgcggcacgactggttgttccagcggctcgaaaataccggagtttttaaaccttcccagttgcatcgagctcacagtgcgttactgctgaagtattcaaaaaaaagtgaattatggactgcccaagaaacaattgtgtacctgggagactatttgaccgtgaagaagaaggggcggcaacggaatgccttttgggtccaccatctgcatcaggaggagattttgggccgctacgtcgggaaagattataaagaacaaaagggtctgtggcaccattttacagatgtagaacgacagatgaccgcccaacactacgtgacggaattcaacaagaggctctatgagcagaacatccccacccagatcttttatatcccctcgactatcctattgattctcgaggacaagaccatcaagggctgcatcagcgtagaaccatacattctgggcgagttcgttaagttgtctaacaacaccaaggtcgtcaaaaccgagtacaaggccacagagtatggtttagcctatggccatttttcttacgagttctccaatcaccgagacgtggtggtggatttacagggatgggttacaggcaatggaaaaggtctgatctaccttacggacccccagatccattctgtggatcagaaggtgttcacgaccaactttggaaagcgagggattttctatttctttaataaccagcatgtcgagtgcaatgaaatctgtcatcgtcttagtctcaccagacctagtatggaaaaaccctgcacttag

SEQ ID NO: 40878 - DNA, 3501 bp, Artificial Sequence
  derived and/or modified sequence
atgtgcagaaagcgaaccagggcccggacatcggctgcggaagccagcttacgggcctcaattttggcaagagactgtgcagctgctgctgccatagttttcctggtcgatcgatttctgtatggcctggatgtctcaggcaagctgctgcaggttgcaaaaggattgcacaagctccagccagctactccgattgccccgcaagttgtgattcggcaggcacgaattagcgtgaatagcggaaagctgctgaaggccgagtacattttgagtagtctgataagcaacaatggcgctacgggcacttggctctatcgcaacgaaagcgataaagtactggtccagagcgtgtgcattcagatcagagggcaaatcctgcagaagctcgggatgtggtacgaggctgcggaattgatatgggcctccatagtcggttacctggcactgcctcagcctgacaaaaaaggtctgtctacatctctgggaatcctcgccgacattttcgtatccatgagcaagaacgattatgaaaaatttaaaaacaaccctcagattaacctgagtctgttgaaggagtttgaccaccacctgctatccgcggctgaggcctgcaagctcgctgctgctttcagcgcctacacacctttgttcgtgctcacagccgtaaatatcaggggcacctgcttgctgtcatattcatcatctaatgattgtccaccagagcttaagaatcttcacctatgcgaggccaaagaggctttcgagattggacttttgacaaagagagacgacgagcctgtcaccgggaagcaagaattgcatagtttcgtgaaggctgcttttggactgactaccgtccatcgccgccttcatggcgagaccggtaccgtccatgctgcctctcagctgtgcaaagaggcaatgggcaaactctacaattttagcacatccagccggagtcaggatagggaagcactctcacaggaggttatgagtgttatcgcacaggtcaaggaacacttgcaagttcagtcgttctcgaatgtagacgatcgttcttatgtaccagaatctttcgagtgccgcctcgacaagcttattctgcatggccagggggatttccagaaaatacttgatacgtattctcagcaccatacgagcgtgtgcgaagtgttcgaatctgactgcggcaacaacaagaacgaacaaaaggatgccaaaacaggggtttgtatcacagccctcaaaacagagattaagaatatagacacggttagtacaacacaggaaaaaccgcactgccagcgggataccgggatcagttcatctctgatgggcaaaaacgtgcaacgggagctccggaggggggggcggcgaaattggactcactccgacgccttccgggtgtcactcgaccaggacgtggaaaccgagactgaaccgagtgattactctaatggcgagggcgcagtcttcaacaagtcccttagcgggtcacagacgtcttccgcttggagcaatttatctggattctccagcagtgcatcatgggaagaagtcaattaccacgttgacgaccggtccgctaggaaggagccaggcaaagagcacctggtcgacacgcagtgttctacggccctcagcgaagaactcgagaacgatcgggaggggagggcaatgcattccctgcactcgcagctgcacgacctctccttacaggagccaaataacgacaatttggagccttcacagaatcagcctcaacagcagatgccacttaccccattctccccgcacaacaccccaggtatcttcttggcaccaggggcgggcctgcttgagggtgcacccgagggaatccaggaggtgaggaatatgggccctcgcaatactagcgcccactccagaccatcctatagatccgcatcctggagtagtgattctggcaggccaaagaacatgggaacgcaccccagcgtgcaaaaggaggaggcatttgaaatcattgtggagtttccagagacaaattgcgatgtgaaggataggcaagggaaggagcagggcgaagaaataagcgaacgcggggccgggcccaccttcaaagccagcccgtcttgggttgatccagagggagagaccgcagaaagcacggaagacgctcccctggattttcatagagttctgcacaattctcttggaaatatcagtatgctgccgtgcagtagctttacgccaaattggcccgtgcagaatccagattctcgaaagtccggcggaccagtagccgagcagggcatcgaccccgatgcaagcacagtggacgaagagggccagctgctcgattctatggacgtgccctgtaccaacggccatggatcccatcgactgtgcatcttgcggcagcccccaggccaaagagcggaaacacctaactctagcgtgagtggaaacatattgtttcccgtcctgtccgaagactgtactaccacagaagaagggaaccagcctggtaacatgcttaactgcagccagaactcatcctctagtagcgtgtggtggctgaagagtccagctttttcaagtggcagttccgaaggtgactccccatggtcttacttaaacagttcagggtccagttgggtttcccttccaggcaaaatgcgcaaggaaatccttgaagcccggacgcttcaacccgacgactttgaaaagctgctggcaggagtgaggcacgactggctttttcagcggcttgaaaatacgggcgtttttaagccgtcgcagctgcaccgcgctcacagtgccctgctactgaaatactctaagaagtccgagctttggacggcccaggaaacgatcgtctacctgggcgactacttgacagtgaagaaaaaaggaaggcagagaaacgccttctgggttcatcaccttcatcaggaagagatcctcggcagatacgtggggaaggactacaaagaacagaaggggctctggcatcactttactgatgtggagcggcagatgaccgcacagcactatgtgactgaattcaacaaaagattatacgagcagaacatccccacacagatattttacatacccagcacaatcttactgatcttggaagacaaaaccataaaaggatgtatctctgtcgagccctacattctcggcgagtttgtcaaattgagcaataacacaaaagtcgtgaagaccgagtacaaagcaaccgagtacgggttggcctatggccacttttcttacgaattctccaaccacagagacgtcgttgttgatctgcaggggtgggtgaccggcaatggtaagggacttatttacctcactgatccacaaattcactctgtcgaccagaaggtgttcacaactaacttcggaaaacgaggaatcttctatttcttcaacaatcagcacgttgaatgcaacgaaatctgccaccggctaagtcttacaaggccctctatggagaaaccctgcacatag

SEQ ID NO: 40879 - DNA, 3735 bp, Artificial Sequence
  derived and/or modified sequence
atgaacaaccagaaggtggtggccgtgctgctgcaggagtgcaagcaggtgctggaccagctgctgctggaggccccagatgtgtctgaggaggacaagtctgaggaccagcgctgccgggccctgctgcccagcgagctgcggaccctcatccaggaggccaaggagatgaagtggccctttgtgcctgagaagtggcagtacaagcaggccgtgggccctgaggacaagaccaacctgaaggatgtgattggagctggcctgcagcagctgctggccagcctgcgggccagcatcctggcccgggactgtgccgctgctgctgccatcgtgttcctggtggaccgcttcctgtatggcctggatgtgtctgggaagctgctgcaggtggccaagggcctgcacaagctgcagcctgccacccccatcgccccccaggtggtgatccggcaggcccgcatctctgtgaacagcggcaagctgctgaaggccgagtacatcctgagcagcctcatcagcaacaatggagccaccggcacctggctgtacagaaatgaaagtgacaaggtgctggtgcagagcgtgtgcatccagatccggggccagatcctgcagaagctgggcatgtggtatgaagctgctgagctgatctgggccagcatcgtgggctacctggccctgccccagcctgacaagaagggcctgagcaccagcctgggcatcctggccgacatctttgtgtccatgagcaagaatgactatgagaagttcaagaacaacccccagatcaacctgagcctgctgaaggagtttgaccaccacctgctgtctgctgctgaggcctgcaagctggccgccgccttcagcgcctacacccccctgtttgtgctgacagctgtgaacatccggggcacctgcctgctgagctacagcagcagcaatgactgccccccagagctgaagaacctgcacctgtgtgaggccaaggaggcctttgagatcggcctgctgaccaagagagatgatgagcctgtgacaggcaagcaggagctgcacagctttgtgaaggccgccttcggcctgaccaccgtgcaccggcggctgcatggagagaccggcaccgtgcatgctgccagccagctgtgcaaggaggccatgggcaagctgtacaacttcagcaccagcagccgcagccaggaccgggaggccctgagccaggaggtgatgtctgtcatcgcccaggtgaaggagcacctgcaggtgcagagcttcagcaatgtggatgacaggagctatgtgcctgagagctttgagtgccgcctggacaagctgatcctgcacggccagggcgacttccagaagatcctggacacctacagccagcaccacacctctgtgtgtgaggtgtttgaaagtgactgtggcaacaacaagaatgagcagaaggatgccaagacaggagtgtgcatcacagccctgaagacagagatcaagaacatcgacacagtgtccaccacccaggagaagccccactgccagagggacaccggcatcagcagcagcctgatgggcaagaatgtgcagcgggagctgcggcggggcggcagaagaaactggacccacagtgatgccttccgggtgtccctggaccaggatgtggagacagaaacagagcccagcgactacagcaatggagagggcgctgtgttcaacaagagcctgagcggcagccagaccagcagcgcctggagcaacctgagcggcttcagcagcagcgcctcctgggaggaggtgaactaccacgtggatgacagaagtgccaggaaggagcccgggaaggagcacctggtggacacccagtgcagcacagccctgtctgaggagctggagaatgaccgggagggccgggccatgcacagcctgcacagccagctgcatgacctgagcctgcaggagcccaacaatgacaacctggagcccagccagaaccagccccagcagcagatgcccctgacccccttcagcccccacaacaccccaggcatcttcctggcccctggggccggcctgctggagggcgcccctgagggcatccaggaggtgaggaacatgggccccaggaacaccagcgcccacagccggcccagctacagaagtgcctcctggagcagtgacagcggccggcccaagaacatgggcacccaccccagcgtgcagaaggaggaggcctttgagatcatcgtggagttccctgagaccaactgtgatgtgaaggaccggcagggcaaggagcagggcgaggagatcagcgagcggggggccggccccaccttcaaggccagccccagctgggtggaccctgagggggagacagctgagagcacagaagatgcccccctggacttccaccgggtgctgcacaacagcctgggcaacatctccatgctgccctgcagcagcttcacccccaactggcctgtgcagaacccagacagcaggaagagcggcggccctgtggccgagcagggcatcgaccctgatgccagcacagtggatgaggagggccagctgctggacagcatggatgtgccctgcaccaatggacatggcagccaccggctgtgcatcctgcggcagcccccaggccagagagctgagacccccaacagctctgtgtctggcaacatcctcttccctgtgctgtctgaggactgcaccaccacagaggagggcaaccagcccggcaacatgctgaactgcagccagaacagcagcagcagctctgtgtggtggctgaagagccctgccttcagcagcggcagcagcgagggggacagcccctggagctacctgaacagcagcggcagctcctgggtgtccctgcccgggaagatgaggaaggagatcctggaggcccggaccctgcagccagatgactttgagaagctgctggccggcgtgagacatgactggctgttccagaggctggagaacacaggagtcttcaagcccagccagctgcaccgggcccacagcgccctgctgctgaagtacagcaagaagtctgagctgtggacagcccaggagaccatcgtgtacctgggggactacctgactgtgaagaagaagggccggcagagaaatgccttctgggtgcaccacctgcaccaggaggagatcctgggccgctacgtgggcaaggactacaaggagcagaagggcctgtggcaccacttcacagatgtggagcggcagatgacagcccagcactacgtgacagagttcaacaagaggctgtatgagcagaacatccccacccagatcttctacatccccagcaccatcctgctgatcctggaggacaagaccatcaagggctgcatctctgtggagccctacatcctgggggagtttgtgaagctgagcaacaacaccaaggtggtgaagacagagtacaaggccacagaatatggcctggcctacggccacttctcctatgagttcagcaaccacagagatgtggtggtggacctgcagggctgggtgactggaaatggcaagggcctcatctacctgacagacccccagatccacagcgtggaccagaaggtgttcaccaccaactttgggaagaggggcatcttctacttcttcaacaaccagcacgtggagtgcaatgagatctgccaccggctgagcctgacccggcccagcatggagaagccctgcacctag

SEQ ID NO: 40880 - DNA, 3501 bp, Artificial Sequence
  derived and/or modified sequence
atgtgcaggaagaggacccgggcccggaccagcgctgctgaggccagcctgcgggccagcatcctggcccgggactgtgccgctgctgctgccatcgtgttcctggtggaccgcttcctgtatggcctggatgtgtctgggaagctgctgcaggtggccaagggcctgcacaagctgcagcctgccacccccatcgccccccaggtggtgatccggcaggcccgcatctctgtgaacagcggcaagctgctgaaggccgagtacatcctgagcagcctcatcagcaacaatggagccaccggcacctggctgtacagaaatgaaagtgacaaggtgctggtgcagagcgtgtgcatccagatccggggccagatcctgcagaagctgggcatgtggtatgaagctgctgagctgatctgggccagcatcgtgggctacctggccctgccccagcctgacaagaagggcctgagcaccagcctgggcatcctggccgacatctttgtgtccatgagcaagaatgactatgagaagttcaagaacaacccccagatcaacctgagcctgctgaaggagtttgaccaccacctgctgtctgctgctgaggcctgcaagctggccgccgccttcagcgcctacacccccctgtttgtgctgacagctgtgaacatccggggcacctgcctgctgagctacagcagcagcaatgactgccccccagagctgaagaacctgcacctgtgtgaggccaaggaggcctttgagatcggcctgctgaccaagagagatgatgagcctgtgacaggcaagcaggagctgcacagctttgtgaaggccgccttcggcctgaccaccgtgcaccggcggctgcatggagagaccggcaccgtgcatgctgccagccagctgtgcaaggaggccatgggcaagctgtacaacttcagcaccagcagccgcagccaggaccgggaggccctgagccaggaggtgatgtctgtcatcgcccaggtgaaggagcacctgcaggtgcagagcttcagcaatgtggatgacaggagctatgtgcctgagagctttgagtgccgcctggacaagctgatcctgcacggccagggcgacttccagaagatcctggacacctacagccagcaccacacctctgtgtgtgaggtgtttgaaagtgactgtggcaacaacaagaatgagcagaaggatgccaagacaggagtgtgcatcacagccctgaagacagagatcaagaacatcgacacagtgtccaccacccaggagaagccccactgccagagggacaccggcatcagcagcagcctgatgggcaagaatgtgcagcgggagctgcggcggggcggcagaagaaactggacccacagtgatgccttccgggtgtccctggaccaggatgtggagacagaaacagagcccagcgactacagcaatggagagggcgctgtgttcaacaagagcctgagcggcagccagaccagcagcgcctggagcaacctgagcggcttcagcagcagcgcctcctgggaggaggtgaactaccacgtggatgacagaagtgccaggaaggagcccgggaaggagcacctggtggacacccagtgcagcacagccctgtctgaggagctggagaatgaccgggagggccgggccatgcacagcctgcacagccagctgcatgacctgagcctgcaggagcccaacaatgacaacctggagcccagccagaaccagccccagcagcagatgcccctgacccccttcagcccccacaacaccccaggcatcttcctggcccctggggccggcctgctggagggcgcccctgagggcatccaggaggtgaggaacatgggccccaggaacaccagcgcccacagccggcccagctacagaagtgcctcctggagcagtgacagcggccggcccaagaacatgggcacccaccccagcgtgcagaaggaggaggcctttgagatcatcgtggagttccctgagaccaactgtgatgtgaaggaccggcagggcaaggagcagggcgaggagatcagcgagcggggggccggccccaccttcaaggccagccccagctgggtggaccctgagggggagacagctgagagcacagaagatgcccccctggacttccaccgggtgctgcacaacagcctgggcaacatctccatgctgccctgcagcagcttcacccccaactggcctgtgcagaacccagacagcaggaagagcggcggccctgtggccgagcagggcatcgaccctgatgccagcacagtggatgaggagggccagctgctggacagcatggatgtgccctgcaccaatggacatggcagccaccggctgtgcatcctgcggcagcccccaggccagagagctgagacccccaacagctctgtgtctggcaacatcctcttccctgtgctgtctgaggactgcaccaccacagaggagggcaaccagcccggcaacatgctgaactgcagccagaacagcagcagcagctctgtgtggtggctgaagagccctgccttcagcagcggcagcagcgagggggacagcccctggagctacctgaacagcagcggcagctcctgggtgtccctgcccgggaagatgaggaaggagatcctggaggcccggaccctgcagccagatgactttgagaagctgctggccggcgtgagacatgactggctgttccagaggctggagaacacaggagtcttcaagcccagccagctgcaccgggcccacagcgccctgctgctgaagtacagcaagaagtctgagctgtggacagcccaggagaccatcgtgtacctgggggactacctgactgtgaagaagaagggccggcagagaaatgccttctgggtgcaccacctgcaccaggaggagatcctgggccgctacgtgggcaaggactacaaggagcagaagggcctgtggcaccacttcacagatgtggagcggcagatgacagcccagcactacgtgacagagttcaacaagaggctgtatgagcagaacatccccacccagatcttctacatccccagcaccatcctgctgatcctggaggacaagaccatcaagggctgcatctctgtggagccctacatcctgggggagtttgtgaagctgagcaacaacaccaaggtggtgaagacagagtacaaggccacagaatatggcctggcctacggccacttctcctatgagttcagcaaccacagagatgtggtggtggacctgcagggctgggtgactggaaatggcaagggcctcatctacctgacagacccccagatccacagcgtggaccagaaggtgttcaccaccaactttgggaagaggggcatcttctacttcttcaacaaccagcacgtggagtgcaatgagatctgccaccggctgagcctgacccggcccagcatggagaagccctgcacctag

SEQ ID NO: 40881 - DNA, 4537 bp, Artificial Sequence
  derived and/or modified sequence
tttatgagaaacagtgtgtttcagagaggctgtaccagaattaactctgctcagagttagatttgctggtcttaaagtacttttcctctttaagataaaagaagttcttctaaatcaggaatggattgaaatctaatgaaccgaaactttgggtaattgatcaccctagacccagggacacccaattcatcgtaatcatcatgaataatcaaaaagtggtagctgtgctactgcaagagtgcaagcaagtgctggatcagctcttgttggaagcgccagatgtgtcggaagaggacaagagcgaggaccagcgctgcagagctttactccccagcgagttaaggaccctgatccaggaggcaaaggaaatgaagtggcccttcgtgcctgaaaagtggcagtacaaacaagccgtgggcccagaggacaaaacaaacctgaaggatgtgattggcgccgggttgcagcagttactggcgtccctgagggcctccatcctcgctcgggactgtgcggctgcggcggctattgtgttcttggtggaccggttcctgtatgggctcgacgtctctggaaaacttctgcaggtcgccaaaggtctccacaagttgcagccagccacgccaattgccccgcaggtggttattcgccaagcccgaatctccgtgaactcaggaaaacttttaaaagcagagtatattctgagcagtctaataagcaacaatggagcaacgggtacctggctgtacagaaatgaaagtgacaaggtcctggtgcagtcggtctgtatacagatcagagggcagattctgcaaaagctggggatgtggtacgaagcagcagagttaatatgggcctccattgtaggatatttggcacttcctcagccggataaaaagggcctctccacgtcgctaggtatactggcagacatctttgtttccatgagcaagaacgattatgaaaagtttaaaaacaatccacaaattaatttgagcctgctgaaggagtttgaccaccatttgctgtccgctgcagaagcctgcaagctggcagctgccttcagtgcctatacgccgctcttcgtgctcacagctgtgaatatccgtggcacgtgtttattgtcctacagtagttcaaatgactgtcctccagaattgaaaaacttacatctgtgtgaagccaaagaggcctttgagattggcctcctcaccaagagagatgatgagcctgttactggaaaacaggagcttcacagctttgtcaaagctgctttcggtctcaccacagtgcacagaaggctccatggggagacagggacggtccatgcagcaagtcagctctgtaaggaagcaatggggaagctgtacaatttcagcacttcctccagaagtcaggacagagaagctctgtctcaagaagttatgtctgtgattgcccaggtgaaggaacatttacaagttcaaagcttctcaaatgtagatgacagatcttatgttcccgagagtttcgagtgcaggttggataaacttatcttgcatgggcaaggggatttccaaaaaatccttgacacctattcacagcaccatacttcggtgtgtgaagtatttgaaagtgattgtggaaacaacaaaaatgaacagaaagatgcaaaaacaggagtctgcatcactgctctaaaaacagaaataaaaaacatagatactgtgagtactactcaagaaaagccacattgtcaaagagacacaggaatatcttcctccctaatgggtaagaatgttcagagggaactcagaaggggaggaaggagaaactggacccattctgatgcatttcgagtctccttggatcaagatgtggagactgagactgagccatcggactacagcaatggtgagggagctgttttcaacaagtctctgagtggcagccagacttccagtgcttggagcaacttatcagggtttagttcctctgcaagctgggaggaagtgaattatcacgttgacgacaggtcagccagaaaagagcctggcaaagaacatctggtggacactcagtgttccactgccttgtctgaggagctagagaatgacagggaaggcagagctatgcattcattgcattcacagcttcatgatctctctcttcaggaacccaacaatgacaatttggagccttctcaaaatcagccacagcaacagatgcccttgacacccttctcgcctcataataccccaggcattttcttggcccctggtgcagggcttctagaaggagctccagaaggtatccaggaagtcagaaatatgggacccagaaatacttctgctcactccagaccctcatatcgttctgcttcttggtcttctgattctggtaggcccaagaatatgggcacacatccttcagtccaaaaagaagaagcctttgaaataattgttgagtttccagaaaccaactgcgatgtcaaagacaggcaggggaaagagcagggagaagaaattagtgaaagaggcgcaggccctacatttaaagctagtccctcctgggttgacccagaaggagaaacagcagaaagcactgaagatgcacccttagactttcacagggtcctgcacaattctctgggaaacatttccatgctgccatgtagctccttcacccctaattggcctgttcaaaatcctgactccagaaaaagtggtggcccagtcgcagagcagggcatcgaccctgatgcctccacagtggatgaggaggggcaactgctcgacagcatggatgttccctgcacaaatgggcacggctctcatagactgtgcattctgagacagccgcctggtcagagggcggagacccccaattcctctgtaagcggtaacatcctcttccctgtcctcagcgaggactgcactaccacagaggaaggaaatcagcctggaaacatgctaaactgcagccagaactccagctcatcctcagtgtggtggctgaaatcacctgcattttccagtggttcttctgagggggacagcccttggtcctatctgaattccagtgggagttcttgggtttcattgccgggaaagatgaggaaagagatccttgaggctcgcaccttgcaacctgatgactttgaaaagctgttggcaggagtgaggcatgattggctgtttcagagactagagaatacgggggtttttaagcccagtcaactccaccgagcacatagtgctcttttgttaaaatattcaaaaaaatctgaactgtggacggcccaggaaactattgtctatttgggggactacttgactgtgaagaaaaaaggcagacaaagaaatgctttttgggttcatcatcttcatcaagaagaaattctggggaggtatgttgggaaagactataaggagcagaaggggctctggcaccacttcactgatgtggagcgacagatgaccgcacagcactatgtgacagaatttaacaagagactctatgaacaaaacattcccacccagatattctacatcccatccacaatactactgattttagaggacaagacaataaagggatgtatcagtgtggagccttacatactgggagaatttgtaaaattgtcaaataacacgaaagtggtgaaaacagaatacaaagccacagaatatggcttggcctatggccatttttcttatgagttttctaatcatagagatgttgtggtcgatttacaaggttgggtaaccggtaatggaaaaggactcatctacctcacagatccccagattcactccgttgatcagaaagttttcactaccaattttggaaagagaggaattttttacttctttaataaccagcatgtggaatgtaatgaaatctgccatcgtctttctttgactagaccttcaatggagaaaccatgcacatagaatacggcacagtctggtcctttggggcttgggcagggccgtgacacaggttctggccaatgatttgcaagaggaattgatcagtatcactttaagtcctgcatttaattggcagcacaagatcctgcagagcctctttccctctgccacagttatcaagaatgggtcaggagaccgctgcttctgggcataagtcctgcaaggaaagcaacatggaaaacagccccaactcacccatgagggatgaaaagcactcttgagaaaggcatgtgttgtttaagccattgagattttagagctttttgtcactatctgtcaagactgatactactggggcttttcctattgatttgggagttctttacatattaaaaaaatgtgagcctttgtgatacgaattcaatttgttttcctgtcttttgacatttgactttgcataaaagtttatctgtgcataattttatatgtagttgaattcatcaatcttttattttgtatggctttttggttatgtataatacttagatcctccttatactctgagtttctttctttttaattctcctgtatttccttctagtataattaaatctgtaaaaagt

SEQ ID NO: 40882 - DNA, 5410 bp, Artificial Sequence
  derived and/or modified sequence
aattcctacttcctgaaactgaagccgtttatgagaaacagtgtgtttcagagaggctgtaccagaattaactctgctcagagttagatttgctggtcttaaagtacttttcctctttaagataaaagaagttcttctaaatcaggaatggattgaaatctaatgaaccgaaactttgggtacttcggccttcaaggggctcctttattgagaatcaatgtcttctcctaggtaattgatcaccctagacccagggacacccaattcatcgtaatcatcatgaataatcaaaaagtggtagctgtgctactgcaagagtgcaagcaagtgctggatcagctcttgttggaagcgccagatgtgtcggaagaggacaagagcgaggaccagcgctgcagagctttactccccagcgagttaaggaccctgatccaggaggcaaaggaaatgaagtggcccttcgtgcctgaaaagtggcagtacaaacaagccgtgggcccagaggacaaaacaaacctgaaggatgtgattggcgccgggttgcagcagttactggcgtccctgagggcctccatcctcgctcgggactgtgcggctgcggcggctattgtgttcttggtggaccggttcctgtatgggctcgacgtctctggaaaacttctgcaggtcgccaaaggtctccacaagttgcagccagccacgccaattgccccgcaggtggttattcgccaagcccgaatctccgtgaactcaggaaaacttttaaaagcagagtatattctgagcagtctaataagcaacaatggagcaacgggtacctggctgtacagaaatgaaagtgacaaggtcctggtgcagtcggtctgtatacagatcagagggcagattctgcaaaagctggggatgtggtacgaagcagcagagttaatatgggcctccattgtaggatatttggcacttcctcagccggataaaaagggcctctccacgtcgctaggtatactggcagacatctttgtttccatgagcaagaacgattatgaaaagtttaaaaacaatccacaaattaatttgagcctgctgaaggagtttgaccaccatttgctgtccgctgcagaagcctgcaagctggcagctgccttcagtgcctatacgccgctcttcgtgctcacagctgtgaatatccgtggcacgtgtttattgtcctacagtagttcaaatgactgtcctccagaattgaaaaacttacatctgtgtgaagccaaagaggcctttgagattggcctcctcaccaagagagatgatgagcctgttactggaaaacaggagcttcacagctttgtcaaagctgctttcggtctcaccacagtgcacagaaggctccatggggagacagggacggtccatgcagcaagtcagctctgtaaggaagcaatggggaagctgtacaatttcagcacttcctccagaagtcaggacagagaagctctgtctcaagaagttatgtctgtgattgcccaggtgaaggaacatttacaagttcaaagcttctcaaatgtagatgacagatcttatgttcccgagagtttcgagtgcaggttggataaacttatcttgcatgggcaaggggatttccaaaaaatccttgacacctattcacagcaccatacttcggtgtgtgaagtatttgaaagtgattgtggaaacaacaaaaatgaacagaaagatgcaaaaacaggagtctgcatcactgctctaaaaacagaaataaaaaacatagatactgtgagtactactcaagaaaagccacattgtcaaagagacacaggaatatcttcctccctaatgggtaagaatgttcagagggaactcagaaggggaggaaggagaaactggacccattctgatgcatttcgagtctccttggatcaagatgtggagactgagactgagccatcggactacagcaatggtgagggagctgttttcaacaagtctctgagtggcagccagacttccagtgcttggagcaacttatcagggtttagttcctctgcaagctgggaggaagtgaattatcacgttgacgacaggtcagccagaaaagagcctggcaaagaacatctggtggacactcagtgttccactgccttgtctgaggagctagagaatgacagggaaggcagagctatgcattcattgcattcacagcttcatgatctctctcttcaggaacccaacaatgacaatttggagccttctcaaaatcagccacagcaacagatgcccttgacacccttctcgcctcataataccccaggcattttcttggcccctggtgcagggcttctagaaggagctccagaaggtatccaggaagtcagaaatatgggacccagaaatacttctgctcactccagaccctcatatcgttctgcttcttggtcttctgattctggtaggcccaagaatatgggcacacatccttcagtccaaaaagaagaagcctttgaaataattgttgagtttccagaaaccaactgcgatgtcaaagacaggcaggggaaagagcagggagaagaaattagtgaaagaggcgcaggccctacatttaaagctagtccctcctgggttgacccagaaggagaaacagcagaaagcactgaagatgcacccttagactttcacagggtcctgcacaattctctgggaaacatttccatgctgccatgtagctccttcacccctaattggcctgttcaaaatcctgactccagaaaaagtggtggcccagtcgcagagcagggcatcgaccctgatgcctccacagtggatgaggaggggcaactgctcgacagcatggatgttccctgcacaaatgggcacggctctcatagactgtgcattctgagacagccgcctggtcagagggcggagacccccaattcctctgtaagcggtaacatcctcttccctgtcctcagcgaggactgcactaccacagaggaaggaaatcagcctggaaacatgctaaactgcagccagaactccagctcatcctcagtgtggtggctgaaatcacctgcattttccagtggttcttctgagggggacagcccttggtcctatctgaattccagtgggagttcttgggtttcattgccgggaaagatgaggaaagagatccttgaggctcgcaccttgcaacctgatgactttgaaaagctgttggcaggagtgaggcatgattggctgtttcagagactagagaatacgggggtttttaagcccagtcaactccaccgagcacatagtgctcttttgttaaaatattcaaaaaaatctgaactgtggacggcccaggaaactattgtctatttgggggactacttgactgtgaagaaaaaaggcagacaaagaaatgctttttgggttcatcatcttcatcaagaagaaattctggggaggtatgttgggaaagactataaggagcagaaggggctctggcaccacttcactgatgtggagcgacagatgaccgcacagcactatgtgacagaatttaacaagagactctatgaacaaaacattcccacccagatattctacatcccatccacaatactactgattttagaggacaagacaataaagggatgtatcagtgtggagccttacatactgggagaatttgtaaaattgtcaaataacacgaaagtggtgaaaacagaatacaaagccacagaatatggcttggcctatggccatttttcttatgagttttctaatcatagagatgttgtggtcgatttacaaggttgggtaaccggtaatggaaaaggactcatctacctcacagatccccagattcactccgttgatcagaaagttttcactaccaattttggaaagagaggaattttttacttctttaataaccagcatgtggaatgtaatgaaatctgccatcgtctttctttgactagaccttcaatggagaaaccatgcacatagaatacggcacagtctggtcctttggggcttgggcagggccgtgacacaggttctggccaatgatttgcaagaggaattgatcagtatcactttaagtcctgcatttaattggcagcacaagatcctgcagagcctctttccctctgccacagttatcaagaatgggtcaggagaccgctgcttctgggcataagtcctgcaaggaaagcaacatggaaaacagccccaactcacccatgagggatgaaaagcactcttgagaaaggcatgtgttgtttaagccattgagattttagagctttttgtcactatctgtcaagactgatactactggggcttttcctattgatttgggagttctttacatattaaaaaaatgtgagcctttgtgatacgaattcaatttgttttcctgtcttttgacatttgactttgcataaaagtttatctgtgcataattttatatgtagttgaattcatcaatcttttattttgtatggctttttggttatgtataatacttagatcctccttatactctgagtttctttctttttaattctcctgtatttccttctagtataattaaatctgtaaaaagtaagatggaagagtggtacagttttctttatccagtctgtccttgatgggcatttaggtagactggataaagaaaatgtggtacatatacaccatggaacactatgtgtattaatccactctcacactgctatgaagagatacctgagactgggtaatttagaaagaaaagaggtttaattaactcacagttccacatggctggggagacctcaggaaacttacaatcatggcagaaggcacctcttcatagggtagcaggagagagaatgagtgccagcaggggaaatgccagatgcttataaagccatcagatcttgtgagaattcattcactctcacgagaacagcatgggaaaaactgcctcaattacctcctaccaggtccttcccatgacacatgggaattatgggactacaattcgagatgagatttgggtggggacacaaagccaaaccatatcacaatgtaaccataaaaaagaatgagatcatgtcctttgcagggacatggatagagctggaggccattatttttagcaaactaatgcaagaacagaaaactaaataccacttgttctcacttataggtgagagctaagtgatgagagtaggtggacacatagagggaacaacacacaccagggcttatcagagggtggacagtgggaggagggagaggatcaggaaaaataactaatgggtactaggctgaatacctgggtgatgaagtaattcgcacaacaaacccccatgacacaaacctgcacatgtacccctgaacttaaaataaaagt

SEQ ID NO: 40883 - DNA, 3931 bp, Artificial Sequence
  derived and/or modified sequence
acagtgtgtttcagagaggctgtaccagaattaactctgctcagagttagatttgctggtcttaaagtacttttcctctttaagataaaagaagttcttctaaatcaggaatggattgaaatctaatgaaccgaaactttgggtaattgatcaccctagacccagggacacccaattcatcgtaatcatcatgaataatcaaaaagtggtagctgtgctactgcaagagtgcaagcaagtgctggatcagctcttgttggaagcgccagatgtgtcggaagaggacaagagcgaggaccagcgctgcagaggcgtccctgagggcctccatcctcgctcgggactgtgcggctgcggcggctattgtgttcttggtggaccggttcctgtatgggctcgacgtctctggaaaacttctgcaggtcgccaaaggtctccacaagttgcagccagccacgccaattgccccgcaggtggttattcgccaagcccgaatctccgtgaactcaggaaaacttttaaaagcagagtatattctgagcagtctaataagcaacaatggagcaacgggtacctggctgtacagaaatgaaagtgacaaggtcctggtgcagtcggtctgtatacagatcagagggcagattctgcaaaagctggggatgtggtacgaagcagcagagttaatatgggcctccattgtaggatatttggcacttcctcagccggataaaaagggcctctccacgtcgctaggtatactggcagacatctttgtttccatgagcaagaacgattatgaaaagtttaaaaacaatccacaaattaatttgagcctgctgaaggagtttgaccaccatttgctgtccgctgcagaagcctgcaagctggcagctgccttcagtgcctatacgccgctcttcgtgctcacagctgtgaatatccgtggcacgtgtttattgtcctacagtagttcaaatgactgtcctccagaattgaaaaacttacatctgtgtgaagccaaagaggcctttgagattggcctcctcaccaagagagatgatgagcctgttactggaaaacaggagcttcacagctttgtcaaagctgctttcggtctcaccacagtgcacagaaggctccatggggagacagggacggtccatgcagcaagtcagctctgtaaggaagcaatggggaagctgtacaatttcagcacttcctccagaagtcaggacagagaagctctgtctcaagaagttatgtctgtgattgcccaggtgaaggaacatttacaagttcaaagcttctcaaatgtagatgacagatcttatgttcccgagagtttcgagtgcaggttggataaacttatcttgcatgggcaaggggatttccaaaaaatccttgacacctattcacagcaccatacttcggtgtgtgaagtatttgaaagtgattgtggaaacaacaaaaatgaacagaaagatgcaaaaacaggagtctgcatcactgctctaaaaacagaaataaaaaacatagatactgtgagtactactcaagaaaagccacattgtcaaagagacacaggaatatcttcctccctaatgggtaagaatgttcagagggaactcagaaggggaggaaggagaaactggacccattctgatgcatttcgagtctccttggatcaagatgtggagactgagactgagccatcggactacagcaatggtgagggagctgttttcaacaagtctctgagtggcagccagacttccagtgcttggagcaacttatcagggtttagttcctctgcaagctgggaggaagtgaattatcacgttgacgacaggtcagccagaaaagagcctggcaaagaacatctggtggacactcagtgttccactgccttgtctgaggagctagagaatgacagggaaggcagagctatgcattcattgcattcacagcttcatgatctctctcttcaggaacccaacaatgacaatttggagccttctcaaaatcagccacagcaacagatgcccttgacacccttctcgcctcataataccccaggcattttcttggcccctggtgcagggcttctagaaggagctccagaaggtatccaggaagtcagaaatatgggacccagaaatacttctgctcactccagaccctcatatcgttctgcttcttggtcttctgattctggtaggcccaagaatatgggcacacatccttcagtccaaaaagaagaagcctttgaaataattgttgagtttccagaaaccaactgcgatgtcaaagacaggcaggggaaagagcagggagaagaaattagtgaaagaggcgcaggccctacatttaaagctagtccctcctgggttgacccagaaggagaaacagcagaaagcactgaagatgcacccttagactttcacagggtcctgcacaattctctgggaaacatttccatgctgccatgtagctccttcacccctaattggcctgttcaaaatcctgactccagaaaaagtggtggcccagtcgcagagcagggcatcgaccctgatgcctccacagtggatgaggaggggcaactgctcgacagcatggatgttccctgcacaaatgggcacggctctcatagactgtgcattctgagacagccgcctggtcagagggcggagacccccaattcctctgtaagcggtaacatcctcttccctgtcctcagcgaggactgcactaccacagaggaaggaaatcagcctggaaacatgctaaactgcagccagaactccagctcatcctcagtgtggtggctgaaatcacctgcattttccagtggttcttctgagggggacagcccttggtcctatctgaattccagtgggagttcttgggtttcattgccgggaaagatgaggaaagagatccttgaggctcgcaccttgcaacctgatgactttgaaaagctgttggcaggagtgaggcatgattggctgtttcagagactagagaatacgggggtttttaagcccagtcaactccaccgagcacatagtgctcttttgttaaaatattcaaaaaaatctgaactgtggacggcccaggaaactattgtctatttgggggactacttgactgtgaagaaaaaaggcagacaaagaaatgctttttgggttcatcatcttcatcaagaagaaattctggggaggtatgttgggaaagactataaggagcagaaggggctctggcaccacttcactgatgtggagcgacagatgaccgcacagcactatgtgacagaatttaacaagagactctatgaacaaaacattcccacccagatattctacatcccatccacaatactactgattttagaggacaagacaataaagggatgtatcagtgtggagccttacatactgggagaatttgtaaaattgtcaaataacacgaaagtggtgaaaacagaatacaaagccacagaatatggcttggcctatggccatttttcttatgagttttctaatcatagagatgttgtggtcgatttacaaggttgggtaaccggtaatggaaaaggactcatctacctcacagatccccagattcactccgttgatcagaaagttttcactaccaattttggaaagagaggaattttttacttctttaataaccagcatgtggaatgtaatgaaatctgccatcgtctttctttgactagaccttcaatggagaaaccatgcacatagaatacggcacagtctggtcctttggggcttgggcagggccgtgacacaggttctggccaatgatttgcaagaggaattgatcagtatcactttaagtcctgcatttaattggcagcacaagatcctgcagagcctctttccctctgccacagttatcaaga

SEQ ID NO: 40884 - DNA, 3735 bp, Artificial Sequence
  derived and/or modified sequence
atgaacaaccagaaggtggtggccgtgctgctgcaggagtgcaagcaggtcctggatcagctgctacttgaagcccccgacgtcagcgaagaagacaagtctgaagaccagcggtgtcgagccctcctcccctcggagctcaggacgctcatccaagaggccaaagaaatgaaatggccattcgtgcctgagaaatggcagtataagcaggcggtgggtcctgaagataagacaaacttgaaggacgtgatcggggccggcctacaacagcttctcgcctccctgagggcttctattctggcacgggactgcgcagcagctgcggcaatagtatttctagtcgatcgctttttgtacggactggacgtatcaggcaaactgttgcaggtggctaaagggcttcacaagctccagcccgctactcccatcgcacctcaagtggtgatccggcaggcaagaatcagcgtcaactcgggcaaacttctcaaggctgagtatatactttcaagtttaatctcaaataacggcgcgacagggacctggctctacagaaacgagtccgacaaggtgctcgtgcaaagtgtgtgcattcagatcaggggacaaatactccaaaagctcggcatgtggtacgaggcagccgagttaatttgggcctctatagtagggtatctagcgctgcctcagcctgataagaagggactgtctaccagtcttggaatcctggcagatatctttgttagcatgagcaagaatgattacgagaagttcaaaaacaatccccagattaatctttctctgctcaaggaatttgatcaccacctgctctccgccgcagaagcctgcaagctggccgcagcctttagcgcctacaccccattgtttgtgctgaccgccgtcaatatccggggaacttgcctcttgagctattcttccagtaatgactgccctcccgagttaaagaatctccatttatgcgaggctaaggaagcattcgagataggcctgctcacaaaacgtgatgatgagccagtgacaggaaaacaggagctgcactcctttgtaaaggccgcctttggcttgacaacagtacacaggagattacacggcgagacaggaacagtgcatgccgcgagccaactgtgcaaggaggccatgggaaaactatacaatttttctacttctagccgatcgcaagacagggaggcgctgagccaggaagttatgagcgttattgctcaagtcaaggagcatctgcaggtccagtctttctcaaatgtggacgatagatcttacgttccagagtcattcgaatgcaggctggataaactgatcctccacgggcaaggcgatttccagaagattctggatacgtactcccagcaccatacttcagtctgtgaggtattcgagtccgactgtggtaacaataagaatgagcagaaagacgcaaaaactggggtttgtattaccgcgctgaagactgaaattaaaaacatcgacaccgtctctacaacgcaggaaaagcctcattgccagcgtgatacaggcatctcatccagtttgatgggaaagaacgtccagcgtgagctgagacgcgggggaaggagaaactggacacattccgacgcttttagagtgagcctggatcaagacgtcgagaccgagacggagccgtctgactactccaatggcgaaggagctgtgttcaataaatctctgagtggttcacagacaagctccgcctggtccaacctgagtggcttctctagttccgcctcttgggaggaggtgaactaccacgtggatgacagatcagcgcggaaggagcccgggaaggaacatctcgtggacacccagtgtagcacggccctgtctgaggagttggaaaacgaccgcgagggcagggccatgcatagcctgcactcacagttgcatgacctgtcgctgcaggaacctaacaacgataacctggaaccctctcagaaccagccacagcagcagatgcccctgactccgttttctccccacaatacgccaggcattttcctagctcctggtgctggactgctcgaaggggctcccgagggtattcaggaggtccgaaacatgggacctaggaacacctccgcacacagcagacctagctaccggtcagctagctggtcatccgatagtggccggcctaagaacatggggacccacccttccgttcagaaggaagaagcttttgagattatcgtcgaattccccgagacaaactgcgatgtaaaagaccggcaagggaaagagcagggcgaagaaatatcagagaggggggctggcccaacatttaaagcctctccttcttgggtcgatccagaaggcgaaaccgcagaatctacagaggatgcacccctagatttccacagggtgttgcataattccttgggaaatatctctatgctgccatgttcttcctttaccccaaattggcctgttcaaaaccctgactctaggaaaagcggcggccccgtggctgagcaggggattgatcccgacgcatctaccgtggatgaggaggggcagctccttgatagtatggacgtgccgtgcacgaacgggcatggatcccacagactgtgtatcctccgacaacctccaggtcagagagccgagacgccaaattcatccgtctcaggcaacattctgtttcctgtcctgagcgaggactgcaccactaccgaggaaggaaatcagcctggcaacatgctgaactgctcgcaaaacagtagctcctccagtgtctggtggctgaagtcacccgcattcagcagtgggagttcagagggagattcgccttggtcatatttgaatagcagtgggtcgtcttgggtttccttacctggaaagatgaggaaggagattcttgaagccaggacccttcagccagatgacttcgaaaagctgctcgccggggtgcgccacgattggctgttccaacgactggaaaatacgggcgtttttaagcccagccagctccatagagcccattcggcactactgctgaagtattctaaaaagtccgaactgtggactgcccaggaaactatcgtatacctaggagattacttgaccgtcaaaaaaaaaggcaggcaaagaaacgcattttgggtgcatcacctccatcaagaagagatcctgggtaggtatgtgggcaaggactacaaggagcaaaaggggctctggcatcacttcacagatgtggaaaggcagatgaccgcccaacattatgttacagaattcaacaagaggctctacgaacagaatatacctactcagatcttctacataccaagcacaatactgctgattctggaggacaaaaccattaaaggatgtatatccgtggagccgtatattcttggtgagttcgtgaagctgtccaacaatacgaaggttgtcaagaccgagtataaggctacggaatatgggctggcctacggacacttttcttacgagttttccaaccacagggatgtggttgtcgatctgcaggggtgggtaaccggcaatggtaaagggctgatctatctgactgatccccagatccactcagtggatcagaaagtgtttaccacgaatttcggcaaaaggggcatcttttactttttcaacaatcagcacgtggaatgtaacgagatttgtcataggttgtcattgactaggccctctatggaaaagccttgtacgtag

SEQ ID NO: 40885 - DNA, 3735 bp, Artificial Sequence
  derived and/or modified sequence
atgaacaaccagaaggtggtggccgtgctgctgcaggagtgcaagcaagtcctggaccaactactgctagaggctcctgacgtttccgaagaggataagtccgaggatcagcggtgtcgggcactgctgccctccgagctgagaactctaatccaggaggcaaaagagatgaagtggccctttgtgccggaaaagtggcagtacaaacaggctgttgggcccgaggataagacaaatttgaaagacgtgataggcgctggccttcagcagctgctggcatctttgcgcgcatcgatcttagcaagggattgcgccgcagcggctgctattgtgttcttagtcgataggttcctgtacgggttagatgtgtctgggaaactgctgcaggttgccaaagggcttcacaaactccagcccgctactccaattgctccccaagttgtcatcaggcaggctagaatatcagtgaattcagggaaactgcttaaggctgaatacatcctgagcagcctgatttcaaataacggcgcgacaggaacttggctttaccgaaacgagtccgacaaggtacttgtccaaagcgtgtgtattcaaatccggggtcagatcctgcagaagctgggaatgtggtacgaggctgcagaattgatttgggcgtccatagtgggctatctggctttgccccagcccgacaagaaaggactgtcaactagtctcggcattcttgcagacattttcgtgtcaatgtcaaagaatgactatgagaaattcaaaaacaatccacagattaatctgtccctgctgaaagagtttgatcaccacctgctcagcgctgcagaagcttgcaagcttgcagccgcgtttagcgcttacacccctctgttcgtgctgacggccgtcaatattagaggcacgtgcctactttcctatagtagcagcaacgattgtcctccagaactgaaaaacttgcatctttgcgaagcaaaagaggcattcgaaattggactgcttacaaagcgggacgatgaacccgttacaggcaagcaagagctgcattccttcgtgaaagcagccttcggccttactacagtgcaccggcgcttacatggagagacagggactgtgcacgctgctagtcagctgtgtaaagaggcaatggggaagctgtacaatttctcaacaagttcccggtcccaggatagggaggccctaagccaggaggttatgtccgtgatcgcccaggttaaagaacacctccaagtccaatcctttagtaacgtcgacgaccgcagctatgtgccggaaagctttgagtgccggcttgacaagctcattctgcacggtcagggggattttcagaagatactggatacctactctcagcaccacacatctgtgtgtgaggtttttgagtccgactgcggaaacaacaagaatgagcagaaagatgctaagactggagtgtgtataactgccctcaaaactgagatcaaaaatattgacaccgtgagcacaacccaggaaaagcctcactgtcagagggataccgggatcagctcttcattaatgggaaaaaacgtacagcgggaactgagacggggaggacgccggaattggacacactctgatgctttccgagtgtctctcgaccaggatgtggaaacagagactgagcctagcgattacagcaatggagagggggctgtgttcaacaagtcactttccggttcgcaaacgtctagcgcatggtctaacctttccggcttcagtagctccgcatcttgggaggaggtgaattaccacgtcgatgatcggtctgccagaaaggagcctggtaaggagcatctggtcgatacccaatgctccaccgcgctgtctgaggaactggaaaacgatagggaagggcgtgccatgcattctctgcactcccagctgcacgatctctctttacaggaaccaaataatgataacctggagcccagccagaaccagcctcagcagcaaatgcccttgacacctttctcccctcataacacccccgggatctttcttgcacctggcgctggcctgctcgagggagcccctgagggaattcaggaagttcggaatatggggccacggaacactagcgcccacagcagaccatcgtaccggtccgcgtcatggtcgagtgattctggaagacccaagaacatggggacccacccctcggtccaaaaggaagaggcgttcgaaatcatagttgaattcccggaaactaattgtgacgtgaaggatcgccagggcaaagaacagggagaagagattagcgaacggggggctggccctacatttaaggcatcaccctcctgggtcgaccctgaaggcgaaactgccgaatctacagaagacgcaccccttgacttccacagagtgctgcacaactcgttgggaaatatctccatgctgccctgctcaagcttcacacccaattggccagttcagaaccctgactccaggaagagcggcggcccagtggccgaacagggaattgaccctgatgccagcacagtggacgaggaaggtcagctacttgatagtatggatgtaccttgcactaacgggcatgggagtcaccgtctctgcatcctgcgacaaccccctgggcagagagcagaaacacctaatagttctgtgagcggcaacatattatttcccgtactgagcgaggattgtactaccacagaggagggaaatcagcccggtaatatgctcaattgcagccagaattcatctagttcaagcgtgtggtggcttaaatctcctgctttctctagtggcagctccgagggagattctccatggtcttatttaaattcatcgggctcgagctgggtctccctccccgggaaaatgagaaaggagattctagaagcccggaccctgcagcctgacgattttgaaaaactcctggccggagtgcggcacgactggctgtttcagcgcctggagaacacaggcgttttcaagccttctcagctacatcgcgctcattcagcactgcttctcaagtacagcaaaaagtctgaactatggactgcccaggagactatcgtatatctgggcgattatcttaccgtgaagaagaagggtaggcagcgcaatgccttttgggtccatcaccttcaccaggaagagattcttggacgctacgtgggtaaagattataaagaacaaaaggggttgtggcaccatttcacagacgttgaacgacagatgacagcccagcattacgtgacagagttcaacaaaagactgtatgagcagaacatcccaacccaaatcttctacatcccctccaccatcttgcttatcctggaagacaagactattaagggctgtattagcgtggaaccatacatcctaggagaatttgtgaaactgtccaataacaccaaggtcgttaagaccgaatataaggcaacggaatatggactggcttatggccatttctcctacgaattctcaaatcatcgggacgtcgtggtggacctccaggggtgggtcaccggtaatggaaagggcttaatttatctgaccgacccccagatccattctgtggatcagaaggttttcactacaaatttcggtaaaagaggcatcttttactttttcaacaaccagcacgttgagtgtaatgaaatttgtcacaggctgtcactgacccggccttcaatggaaaaaccctgcacttag

SEQ ID NO: 40886 - DNA, 3501 bp, Artificial Sequence
  derived and/or modified sequence
atgtgccggaagcggacccgggcccggaccagcgccgccgaggcctcccttagggcatctatcttggctcgtgactgcgcggctgccgcagcgattgtgttcctcgtggataggtttctctatgggctggatgtgagtggaaagttactccaggtcgcaaaaggcctacataaactgcagccagcaactccaatagctcctcaggtcgtaattagacaggccaggatctcagtgaactcaggtaaactgctcaaagccgagtacattctttcctctcttatatctaacaatggcgcaaccggtacatggctgtaccgcaacgaaagcgataaggtgctggtccaatccgtttgtattcagattagaggacaaatactacagaaattggggatgtggtatgaagccgccgagctaatatgggcgagtattgtgggctatttggctctccctcagcctgacaaaaaggggctctcgacttcattgggcatcctggccgatattttcgtgagcatgtctaagaacgactatgagaaattcaagaacaacccccagattaatcttagcctcctgaaagagttcgaccaccatctgctgtctgccgcagaagcttgcaaacttgccgccgcctttagcgcttatactccactctttgtgctcaccgccgtaaacattagaggaacatgcctgctatcctattcctcttccaatgactgcccacctgagttaaagaacctccacctctgtgaagctaaagaggcattcgaaatagggctgctgactaagagagatgacgagcctgttaccggcaaacaggagttgcactctttcgtgaaggctgcatttgggcttaccaccgtgcaccggaggctgcacggtgagaccgggacggtgcacgccgcttctcagctgtgcaaagaggctatgggaaagctgtacaatttctccacctcctcaagatcccaggacagagaggccctgagccaggaagtcatgtccgttatcgctcaggtgaaagagcaccttcaggtccagtcattttccaatgtggacgataggtcttacgtacctgagtctttcgaatgtaggctggataagctgattttgcacggccagggcgatttccaaaagatacttgacacctactcccaacatcacaccagtgtttgtgaggtttttgagtctgattgcgggaataacaagaatgaacaaaaggacgccaagacaggtgtttgcataacagcccttaagacagaaatcaagaatattgacaccgttagcacaacacaggaaaagccccattgccagagggataccggcatctcaagttctctaatggggaagaacgtgcagcgcgagctgcgaaggggcgggaggcgcaactggacccattctgacgcatttcgagtcagcctggatcaggatgtcgaaactgagactgagccatcggattacagcaacggagagggagcagttttcaataaatcccttagcgggagtcagacgtcaagtgcttggtctaacctttctggcttcagcagttcagcaagctgggaggaggtgaattaccatgtcgatgaccgtagcgcccgcaaggaaccgggaaaggagcatctggttgacacccagtgcagtactgcgctttctgaggaattggagaacgatcgggaaggtagagcaatgcactctcttcattcacagctgcacgatctgagtctgcaggagccaaacaacgacaatttggaacccagtcagaaccagccacagcagcaaatgcctctgactccattctcccctcacaacactccagggatctttctggcacctggtgcaggactcctcgagggtgcccctgaaggcatccaggaagttagaaatatgggcccaagaaatacgagcgctcactctcgtccatcttacagaagtgcatcgtggtcctctgacagcgggcggcctaagaacatgggaacgcatccctccgtgcaaaaggaggaagccttcgaaatcatagttgaatttccggaaacaaattgcgacgttaaggataggcaaggcaaggagcaaggggaagagatttcagagcgcggggcaggacctaccttcaaggcaagcccttcatgggtggaccctgaaggagagacagctgagagtacggaagatgctcccctggattttcatagagtgctgcataacagcctgggtaatatcagcatgctgccctgtagttcattcacaccaaattggcctgtgcagaaccccgactcaaggaagagcgggggccccgtggcagagcaaggtattgaccctgatgcttcgaccgttgatgaagaagggcagcttctagacagcatggatgtcccctgtacaaacgggcacggctcccataggctgtgcatcctcaggcaacctcccgggcaacgggctgagaccccaaattcctcggtctccggcaacatcctctttcctgtcttaagcgaggactgcactaccaccgaggagggaaaccagcctgggaatatgttgaattgctcccaaaatagcagctcttcaagcgtttggtggctgaaatccccagcttttagttctggatcaagcgaaggggactcgccatggagttatctcaatagctccggaagttcctgggtatccctacctggaaagatgcggaaggagatccttgaggcccggacacttcagcccgacgatttcgagaagttgctggccggtgttcgacatgactggttatttcaaaggcttgaaaacaccggagtcttcaaacctagccagcttcaccgggcacactcagccctattgctcaaatactctaaaaaaagcgagctctggactgctcaagagactatcgtttacctaggcgattatttgactgtgaaaaagaagggcagacagcgtaatgctttttgggttcatcaccttcaccaggaggaaatcttgggtcgctacgtgggcaaggactataaggaacaaaaaggactctggcaccactttaccgatgtcgagaggcagatgactgcccagcactacgtgacggagttcaacaaacgactgtatgaacagaacatccctacccagatcttctacattccgtccacaatcctgctcatcctagaggataaaaccattaaaggctgcatttcggtggagccgtatatactgggcgagttcgtgaaattaagtaataatacaaaagttgttaaaacagaatacaaagcgaccgagtatggacttgcatacggacacttttcctatgagttctccaaccacagagatgtagttgtcgacctgcagggatgggtaacaggcaacggaaagggccttatctacctgactgacccccagatccattcagtggaccagaaggtgttcaccacaaacttcggaaaacgtgggattttttatttcttcaacaaccagcacgtggagtgtaatgaaatttgccatcgtctttccctgacccggcccagcatggagaagccatgcacatag

SEQ ID NO: 40887 - DNA, 3735 bp, Artificial Sequence
  derived and/or modified sequence
atgaataatcagaaggtggttgccgtgctcctgcaagaatgcaagcaggttcttgatcaactcctcctagaggctcccgatgtcagcgaagaagacaaaagcgaggatcaacgctgcagggcgctgctgccatctgaattgaggacccttatccaggaagcaaaggagatgaaatggccctttgtacctgagaagtggcagtataagcaggccgtcggtccggaggataaaacaaacttgaaggacgttattggagccggtctccaacaactgctggcctccctgagggccagtattttggcgagggactgtgccgcagccgctgcaatcgtctttctcgtggaccgatttctgtacggactagatgtttcgggcaagctcctccaagtcgccaagggcttacacaaactgcagcctgctacccccatagcccctcaggtagtgattaggcaggccagaatttccgtgaacagtggcaaacttttgaaagccgagtacatcctctccagtctgataagtaacaacggagctacaggcacctggctgtacagaaatgaatcagataaggttctggttcagtctgtttgtattcaaattcgaggccagattttgcagaaactcggtatgtggtatgaagcagcagagctaatctgggcaagcattgtgggataccttgcgctcccccagccagacaaaaaaggactgagcacgagcttgggcattctggccgacattttcgtatctatgtctaagaatgattacgagaagtttaagaataacccacaaattaacctgtctctgttgaaggaattcgaccaccatcttctgagtgccgcagaagcttgcaagctggccgctgccttcagcgcctacaccccattgttcgtcctgaccgccgtgaatataagggggacatgtctactatcatacagttcctcgaacgactgtcctcctgagttgaaaaatttacacctgtgcgaggccaaagaagccttcgagataggactgttaactaagcgcgatgacgaacctgtgacaggcaagcaggagctgcacagttttgtgaaggcggcttttggtctgacgaccgtacaccgaagacttcacggtgagaccggtacagtgcacgcggcatcacagctgtgcaaggaggccatggggaaattgtacaacttttcaactagctcccgttcccaggatcgagaagccctcagccaggaggtcatgagtgtgattgctcaggtcaaggaacatttgcaagtccagtcgtttagcaacgtggacgacaggtcctatgttccggagtcatttgaatgccgcctggataagctaattctccatgggcagggggacttccagaaaattctggacacatacagtcaacaccacacgtcagtgtgcgaggtcttcgaatcagattgtggaaataataaaaatgagcagaaggatgccaagacgggggtctgtattacagccctgaaaactgaaatcaaaaacattgataccgtcagcacgactcaggagaagccacactgtcagcgagatactggcatatcatctagcctgatgggtaagaatgttcagcgggaactgcgcagaggtggtcgccgtaattggactcactccgacgcattcagagtgagcttggaccaggacgtggaaacggaaacagagcccagtgactattccaacggcgaaggcgcagtgtttaacaagtctctgtctggaagtcaaacttcctcagcttggagtaatctgagcggattcagctcttcagcatcatgggaggaggtgaattaccacgtggacgatcgaagtgcacgaaaagaacctggcaaggaacatctggtcgatacgcagtgctctactgctctatccgaagagttagagaatgatagggaaggccgtgctatgcactcactccattcccaactgcacgatctctcactccaggaaccaaacaacgataacctggagcctagccaaaatcagcctcagcaacagatgccattgaccccattcagtccccacaatactccaggcattttcctggcacctggggctgggttactggagggtgcccctgagggaatccaggaagtgcgcaacatggggccaagaaataccagcgctcactcccggccttcctacagaagtgccagctggtcttccgattcaggacgtcctaagaatatgggaactcacccttctgtgcagaaggaggaggcttttgaaataatcgtggagttccctgagaccaactgtgatgttaaggataggcaaggaaaggagcaaggtgaagagatcagcgaacggggagctggcccaacattcaaagcgtccccatcttgggttgaccccgagggcgagaccgcagaaagcactgaggatgccccactcgatttccacagggtattacacaacagcttaggcaatatatctatgctgccttgctcatcgttcacaccgaattggccagtgcagaaccccgacagccgcaagtccggtggcccagtcgccgagcagggcatcgacccagatgcgagcacagttgatgaggaaggccagcttctggatagcatggatgtgccctgcacgaacggccacggtagccacaggctgtgtatcctgcggcagccgcctggacagagggcagagacacccaactcatcagttagtggcaacattcttttccccgtgctgtcggaggactgcaccactacggaagaaggtaaccagcctggcaatatgcttaactgttctcagaattctagcagcagttcggtctggtggttaaagtctcccgctttcagctcagggtcctcggagggagactcaccatggagttatctgaactcatcaggctccagctgggtgtccctgccaggaaagatgcgtaaggaaatactggaggccagaacccttcagcccgatgatttcgagaaactcctggcaggggtaaggcatgactggttgttccagaggctagagaacaccggtgtctttaagcccagccaattgcatagagcccatagtgcccttctgctgaaatattcaaaaaaaagcgaactctggacagcccaggaaacgattgtatacctcggggactacctcacggtgaaaaagaaagggagacagcgcaacgccttctgggtgcatcatttacatcaggaggaaattttaggcagatacgtgggaaaagattacaaggaacaaaaaggattgtggcaccattttacagatgtcgagcgccagatgacagcccaacactacgtcaccgagtttaacaaaaggctgtacgagcaaaacattcccacgcagattttctatatcccctccaccattctgcttatattagaagacaaaactatcaagggatgtatctcggtggagccttacatactgggagaattcgtcaagctaagtaacaatactaaggtggtaaagacagagtacaaagccaccgagtacggcctggcctacgggcatttttcttatgagtttagcaaccacagggatgttgtcgtggaccttcaaggctgggtcactggaaatggcaagggtctgatctatctaaccgatcctcagattcacagtgtagaccagaaggtgttcactactaactttggtaagagaggaatattttacttttttaataaccaacatgtagagtgtaacgagatctgccatcggctgtctctgacccggccatctatggaaaagccttgtacttag

SEQ ID NO: 40888 - DNA, 3735 bp, Artificial Sequence
  derived and/or modified sequence
atgaacaaccagaaagttgtcgccgtgctgctgcaagaatgcaagcaggttctcgatcagctcctgcttgaagctccggacgtctcagaggaggataagtctgaggatcagcggtgccgagccctgctacccagcgaactgaggaccctcatccaggaggccaaggaaatgaagtggccattcgtgccagaaaaatggcagtacaagcaagctgtgggacctgaagataaaactaatctgaaagatgtgatcggagccggtctgcaacaactgctggcctccttgcgcgcaagtatcctggccagagactgcgctgccgcagccgctatcgtgtttctggtcgataggtttctgtacgggcttgacgtttctggtaagctgttgcaggtcgccaagggcctccacaagctacaacccgctacgcctatcgcccctcaggtcgtgataagacaggcccgaatcagcgtgaatagtggcaagctactaaaagcagagtatattttaagcagtcttataagtaacaacggagctactggcacttggttgtatcggaacgaatcggataaggtgctggtccagtcagtctgcatccagatccgtgggcagatccttcaaaagctgggcatgtggtacgaggccgcagagctaatttgggcctctatcgtcggctatctcgctctaccccagcctgataaaaaaggcctgagtacatcccttggaattttagccgacatttttgtttcaatgtccaaaaatgactacgaaaaatttaagaacaatccccagatcaatttgagcctcctgaaggagttcgaccatcaccttctgtccgctgctgaggcgtgtaagcttgcagccgctttctctgcttatactccgttgttcgttcttaccgcagtaaatatccgaggcacttgcctactttcgtattcctcgtctaacgattgccctcctgaactgaagaaccttcacctgtgtgaggccaaagaagccttcgaaattggtttgctaacgaagcgggacgatgaacctgtgactggaaagcaggaactgcattctttcgtgaaagcagcctttggactcactaccgtccaccgcagactgcacggggaaacaggtacggtgcatgccgcatcccagctgtgtaaggaggccatgggaaagctttacaactttagtaccagctcccggagccaagaccgggaagctctgagccaggaggtaatgtccgtcattgcacaagtgaaggagcacctgcaggtgcagtccttctccaacgtggacgatagatcttacgtgcctgagtcttttgagtgccgactagacaagctgattttgcacggacagggagacttccagaaaatcctggatacttatagccagcatcacacatctgtgtgcgaagtcttcgagagcgactgtggaaacaacaaaaatgaacagaaagatgccaaaaccggggtgtgcatcactgccctgaagaccgaaatcaagaacattgatactgtcagtaccacacaggaaaaaccacactgtcagagggatacagggatttcaagctctttgatgggcaagaacgttcagcgggagctgaggcgcggtgggagaagaaactggacacactctgacgcattcagggtatcactggatcaggacgtggaaacagagaccgaaccttccgattatagcaatggcgagggagctgtctttaataagtcccttagtggtagtcagacaagcagcgcctggagcaatttgtctggattctcctcttcagcctcctgggaagaggtcaattatcacgtggacgaccggtccgcccgtaaggagcccggtaaggaacacctggtggatacgcagtgttccacagccctttccgaggaattggaaaatgatagagaaggtcgagctatgcactcacttcacagtcagctccacgatttatcacttcaggaacctaataacgataaccttgaacccagccaaaatcagccacaacagcagatgcccttgacccccttcagcccacataacacacctgggatatttctagcacctggtgcaggccttctcgagggagcgccagaagggatccaggaggtgaggaatatgggtccgaggaacacgtcagcacactcccgcccttcatacaggagcgcctcctggtcttccgactccggaagaccaaagaatatgggtacgcaccctagcgtgcagaaagaagaagcattcgagattatcgtggagtttccggagacaaactgcgatgtaaaagaccggcagggcaaggagcagggggaggagattagtgagcgtggcgctggccctacatttaaggcatccccatcatgggtggaccccgagggtgaaaccgctgagtctacagaagacgccccactggacttccatcgcgtcctgcacaattccttaggaaacatcagcatgttgccctgttccagctttacacccaactggcctgtgcagaatccggactctcgcaagagcggcggacctgtcgccgagcaggggatcgaccccgacgcctctaccgtcgatgaggagggccagctgttggattcgatggatgtgccgtgcacaaatggccacggtagtcacaggctctgcatcctgcgccaaccccctggccaaagggccgagacacccaattcttccgtctcagggaacattctattcccagtgttgagtgaggactgcactaccacggaggaaggcaaccagcccggaaatatgctgaattgctcacagaatagttcgagcagcagtgtatggtggctgaaaagtccagccttctcttccggcagctccgagggcgacagcccctggtcctatcttaatagttccggttcctcctgggtttctctccccggaaaaatgcgaaaagagattttggaagccagaaccctccagcctgatgacttcgagaaattactggctggtgtgcgacacgattggttattccagcggcttgaaaataccggggtctttaaaccctcacagttgcacagggcccactcagccctgcttctgaagtatagtaagaagtccgagctctggacagcccaagaaactatcgtgtatctaggagattatctcacagtgaaaaagaaaggtcggcagaggaatgcattctgggtgcaccacttgcatcaggaggaaatcctcggacggtacgtcggaaaggactataaagaacagaagggtctctggcatcacttcacagatgtcgaaaggcagatgaccgcacagcactatgtaactgaattcaataagcgcctgtatgagcagaacatcccaactcagattttctatatcccttccactattcttctaattctggaggacaagacaataaaggggtgcatttctgtggagccctacattctaggggagtttgttaagctgagtaacaacacgaaggtagtcaaaaccgaatacaaagcgacagaatacgggctcgcttatggtcacttcagctacgaattcagcaatcacagagacgtcgtggtcgatcttcagggttgggtaactggaaacggtaagggattaatctacttaaccgatccacagatccattcagtggaccagaaggtcttcaccaccaattttggcaagcgaggcatcttctactttttcaacaaccagcacgtggagtgtaacgaaatttgccacagactgagcctaacaaggccgagcatggagaaaccctgcacgtag

SEQ ID NO: 40889 - DNA, 3501 bp, Artificial Sequence
  derived and/or modified sequence
atgtgcaggaagaggacacgggctagaaccagcgcagcagaagctagcctgagggcgagcatcctagcacgcgattgtgctgccgcagctgccatagtgtttctcgttgatcgcttcctgtatggcctcgatgtctcaggaaaactcctacaggtagctaagggacttcacaagcttcagcccgcaactccaatcgccccacaggtcgtcatccgccaagctaggatttcagtgaattccggcaagctgttgaaagcagaatacatcctctcgtcccttatctcgaataacggggcaacaggcacatggctttataggaatgaaagtgataaagtgctggtgcaaagcgtgtgcatacagattaggggtcagatcctgcagaagttgggaatgtggtacgaggcagctgaactgatctgggcctccattgtggggtacctggctctgcctcagccagacaagaagggattaagcacctcattaggaatcttggccgacatcttcgtaagtatgagcaagaacgactacgaaaagttcaaaaataatccccagatcaacctgtctcttctgaaggaattcgatcaccatctactgagcgccgctgaggcttgtaaactggccgctgccttcagtgcttacactcccctcttcgttctgacagctgttaacataagaggcacatgcctgctctcatactctagcagtaacgattgtccaccagagctgaagaatctccatctgtgtgaagctaaagaggcatttgaaataggcctgctcacaaagcgcgatgatgagcctgtgaccggtaagcaggaactgcatagcttcgtcaaggcggcttttggactgacaacagtgcatcgccgactgcatggggagacaggtacagtgcacgctgcaagccagctttgcaaagaggccatgggaaaactctacaacttcagcacatcatctcgaagccaggaccgggaggccctctcacaagaggtgatgtcagtgatagcccaggtcaaggagcacctgcaagtgcaatccttcagcaatgtggatgatcggtcctacgtccccgagagctttgaatgccgtttagacaagctaatccttcatgggcagggcgactttcagaagatcctggatacatattcccagcatcatacctcagtttgcgaagtgttcgagagtgactgtgggaacaataaaaatgaacagaaggatgcgaaaacaggcgtgtgtatcaccgcgctcaagaccgaaattaagaatatagacaccgtatccaccactcaggagaagccacattgccagcgagacaccgggatcagcagtagcttgatgggaaaaaatgtccaaagagaactgaggagaggtgggcgaaggaattggactcattccgacgcctttcgcgttagtttggatcaggacgtcgaaaccgaaactgagccctcagactacagcaatggtgaaggggcagtgttcaataaatctctgagcggttctcagaccagctcagcctggtcaaatctatctggcttcagttccagcgctagctgggaggaagtgaattaccatgtggatgatcggagtgcaagaaaagagccaggtaaggagcacctggtcgatacccagtgttccaccgccctgagcgaggaactagagaacgaccgggagggaagggccatgcactcactccattctcagttgcatgacctctctctgcaggaaccgaacaatgataatctcgagccctctcaaaatcagccgcagcaacaaatgcctctgacccctttttcccctcacaacacgcccggtattttcttggcgccaggtgccggactccttgaaggcgctcctgagggcattcaagaagtgcgaaatatgggccctaggaacacttctgcccattctcgccctagctaccgctctgctagttggagctctgatagcggtagaccaaagaacatggggacccatccatccgtacagaaggaagaggcgttcgaaatcatcgtagagtttcccgaaacgaattgcgacgttaaggatagacagggaaaagaacagggtgaggagatctcagagcgtggcgcaggacccaccttcaaagcttccccttcctgggttgacccggaaggagaaaccgctgagtcaactgaggatgcccctctcgacttccaccgggtgctacataattctctggggaacatctcaatgctcccttgttcctcattcaccccaaattggccggtacagaatcccgattccaggaaaagcgggggtcctgtggctgaacaaggtatcgacccagatgcatctactgtagacgaggaaggccagctgttagatagtatggatgttccatgtacgaacggtcacggatctcataggctgtgcattctgcggcagccaccaggccagagagccgagaccccgaacagctctgtctccggtaatattctatttccagttctatccgaagattgtactaccactgaggagggcaatcagcctgggaacatgctgaattgcagccagaattcctcatctagctcagtgtggtggcttaaatctccggctttctcttccggctcaagcgaaggagatagtccctggtcctaccttaacagctccggctcttcatgggtaagcctgccaggaaagatgagaaaggagatcctcgaagcaaggaccctgcagcctgacgacttcgagaaactcctggccggtgtgagacacgactggctgtttcagagactggagaacactggggtgttcaaaccatcccaactgcatagggcacatagcgcgctgttgcttaaatactcaaagaaatccgaattgtggacagcacaggaaaccatcgtttatctgggagactacctgactgttaaaaaaaagggacggcagaggaacgccttctgggtgcaccacctgcaccaggaggaaatcctgggtagatacgtgggcaaggactataaagagcagaaggggctctggcatcactttactgatgtggagcgccaaatgacagcccagcattacgtgacggaatttaacaagagactttacgagcagaatatccctacccagattttttacataccgagtacaatcctgctgattctagaagataagactataaagggctgtatttctgtcgaaccttatatcctgggcgagttcgtgaaactctctaataatacaaaggttgttaaaacggagtataaggccacggagtatggactggcgtacgggcacttctcctacgagttctcaaaccacagggatgtggtggttgatcttcagggctgggtcaccggcaatggaaaaggcttaatttatctgacggacccccagatacattccgtggatcagaaggtcttcaccaccaactttgggaaaaggggcatcttctacttctttaacaatcaacatgtggagtgcaacgagatatgccacaggttgtcattgaccagacccagtatggagaagccctgtacttag

SEQ ID NO: 40890 - DNA, 3735 bp, Artificial Sequence
  derived and/or modified sequence
atgaacaaccagaaggtggtggccgtgctgctgcaggagtgcaagcaggtgctggaccagctgctgctggaggcccccgacgtgagcgaggaggacaagagcgaggaccagagatgcagagccctgctgcccagcgagctgagaaccctgatccaggaggccaaggagatgaagtggcccttcgtgcccgagaagtggcagtacaagcaggccgtgggccccgaggacaagaccaacctgaaggacgtgatcggcgccggcctgcagcagctgctggccagcctgagagccagcatcctggccagagactgcgccgccgccgccgccatcgtgttcctggtggacagattcctgtacggcctggacgtgagcggcaagctgctgcaggtggccaagggcctgcacaagctgcagcccgccacccccatcgccccccaggtggtgatcagacaggccagaatcagcgtgaacagcggcaagctgctgaaggccgagtacatcctgagcagcctgatcagcaacaacggcgccaccggcacctggctgtacagaaacgagagcgacaaggtgctggtgcagagcgtgtgcatccagatcagaggccagatcctgcagaagctgggcatgtggtacgaggccgccgagctgatctgggccagcatcgtgggctacctggccctgccccagcccgacaagaagggcctgagcaccagcctgggcatcctggccgacatcttcgtgagcatgagcaagaacgactacgagaagttcaagaacaacccccagatcaacctgagcctgctgaaggagttcgaccaccacctgctgagcgccgccgaggcctgcaagctggccgccgccttcagcgcctacacccccctgttcgtgctgaccgccgtgaacatcagaggcacctgcctgctgagctacagcagcagcaacgactgcccccccgagctgaagaacctgcacctgtgcgaggccaaggaggccttcgagatcggcctgctgaccaagagagacgacgagcccgtgaccggcaagcaggagctgcacagcttcgtgaaggccgccttcggcctgaccaccgtgcacagaagactgcacggcgagaccggcaccgtgcacgccgccagccagctgtgcaaggaggccatgggcaagctgtacaacttcagcaccagcagcagaagccaggacagagaggccctgagccaggaggtgatgagcgtgatcgcccaggtgaaggagcacctgcaggtgcagagcttcagcaacgtggacgacagaagctacgtgcccgagagcttcgagtgcagactggacaagctgatcctgcacggccagggcgacttccagaagatcctggacacctacagccagcaccacaccagcgtgtgcgaggtgttcgagagcgactgcggcaacaacaagaacgagcagaaggacgccaagaccggcgtgtgcatcaccgccctgaagaccgagatcaagaacatcgacaccgtgagcaccacccaggagaagccccactgccagagagacaccggcatcagcagcagcctgatgggcaagaacgtgcagagagagctgagaagaggcggcagaagaaactggacccacagcgacgccttcagagtgagcctggaccaggacgtggagaccgagaccgagcccagcgactacagcaacggcgagggcgccgtgttcaacaagagcctgagcggcagccagaccagcagcgcctggagcaacctgagcggcttcagcagcagcgccagctgggaggaggtgaactaccacgtggacgacagaagcgccagaaaggagcccggcaaggagcacctggtggacacccagtgcagcaccgccctgagcgaggagctggagaacgacagagagggcagagccatgcacagcctgcacagccagctgcacgacctgagcctgcaggagcccaacaacgacaacctggagcccagccagaaccagccccagcagcagatgcccctgacccccttcagcccccacaacacccccggcatcttcctggcccccggcgccggcctgctggagggcgcccccgagggcatccaggaggtgagaaacatgggccccagaaacaccagcgcccacagcagacccagctacagaagcgccagctggagcagcgacagcggcagacccaagaacatgggcacccaccccagcgtgcagaaggaggaggccttcgagatcatcgtggagttccccgagaccaactgcgacgtgaaggacagacagggcaaggagcagggcgaggagatcagcgagagaggcgccggccccaccttcaaggccagccccagctgggtggaccccgagggcgagaccgccgagagcaccgaggacgcccccctggacttccacagagtgctgcacaacagcctgggcaacatcagcatgctgccctgcagcagcttcacccccaactggcccgtgcagaaccccgacagcagaaagagcggcggccccgtggccgagcagggcatcgaccccgacgccagcaccgtggacgaggagggccagctgctggacagcatggacgtgccctgcaccaacggccacggcagccacagactgtgcatcctgagacagccccccggccagagagccgagacccccaacagcagcgtgagcggcaacatcctgttccccgtgctgagcgaggactgcaccaccaccgaggagggcaaccagcccggcaacatgctgaactgcagccagaacagcagcagcagcagcgtgtggtggctgaagagccccgccttcagcagcggcagcagcgagggcgacagcccctggagctacctgaacagcagcggcagcagctgggtgagcctgcccggcaagatgagaaaggagatcctggaggccagaaccctgcagcccgacgacttcgagaagctgctggccggcgtgagacacgactggctgttccagagactggagaacaccggcgtgttcaagcccagccagctgcacagagcccacagcgccctgctgctgaagtacagcaagaagagcgagctgtggaccgcccaggagaccatcgtgtacctgggcgactacctgaccgtgaagaagaagggcagacagagaaacgccttctgggtgcaccacctgcaccaggaggagatcctgggcagatacgtgggcaaggactacaaggagcagaagggcctgtggcaccacttcaccgacgtggagagacagatgaccgcccagcactacgtgaccgagttcaacaagagactgtacgagcagaacatccccacccagatcttctacatccccagcaccatcctgctgatcctggaggacaagaccatcaagggctgcatcagcgtggagccctacatcctgggcgagttcgtgaagctgagcaacaacaccaaggtggtgaagaccgagtacaaggccaccgagtacggcctggcctacggccacttcagctacgagttcagcaaccacagagacgtggtggtggacctgcagggctgggtgaccggcaacggcaagggcctgatctacctgaccgacccccagatccacagcgtggaccagaaggtgttcaccaccaacttcggcaagagaggcatcttctacttcttcaacaaccagcacgtggagtgcaacgagatctgccacagactgagcctgaccagacccagcatggagaagccctgcacctag

SEQ ID NO: 40891 - DNA, 3501 bp, Artificial Sequence
  derived and/or modified sequence
atgtgcagaaagagaaccagagccagaaccagcgccgccgaggccagcctgagagccagcatcctggccagagactgcgccgccgccgccgccatcgtgttcctggtggacagattcctgtacggcctggacgtgagcggcaagctgctgcaggtggccaagggcctgcacaagctgcagcccgccacccccatcgccccccaggtggtgatcagacaggccagaatcagcgtgaacagcggcaagctgctgaaggccgagtacatcctgagcagcctgatcagcaacaacggcgccaccggcacctggctgtacagaaacgagagcgacaaggtgctggtgcagagcgtgtgcatccagatcagaggccagatcctgcagaagctgggcatgtggtacgaggccgccgagctgatctgggccagcatcgtgggctacctggccctgccccagcccgacaagaagggcctgagcaccagcctgggcatcctggccgacatcttcgtgagcatgagcaagaacgactacgagaagttcaagaacaacccccagatcaacctgagcctgctgaaggagttcgaccaccacctgctgagcgccgccgaggcctgcaagctggccgccgccttcagcgcctacacccccctgttcgtgctgaccgccgtgaacatcagaggcacctgcctgctgagctacagcagcagcaacgactgcccccccgagctgaagaacctgcacctgtgcgaggccaaggaggccttcgagatcggcctgctgaccaagagagacgacgagcccgtgaccggcaagcaggagctgcacagcttcgtgaaggccgccttcggcctgaccaccgtgcacagaagactgcacggcgagaccggcaccgtgcacgccgccagccagctgtgcaaggaggccatgggcaagctgtacaacttcagcaccagcagcagaagccaggacagagaggccctgagccaggaggtgatgagcgtgatcgcccaggtgaaggagcacctgcaggtgcagagcttcagcaacgtggacgacagaagctacgtgcccgagagcttcgagtgcagactggacaagctgatcctgcacggccagggcgacttccagaagatcctggacacctacagccagcaccacaccagcgtgtgcgaggtgttcgagagcgactgcggcaacaacaagaacgagcagaaggacgccaagaccggcgtgtgcatcaccgccctgaagaccgagatcaagaacatcgacaccgtgagcaccacccaggagaagccccactgccagagagacaccggcatcagcagcagcctgatgggcaagaacgtgcagagagagctgagaagaggcggcagaagaaactggacccacagcgacgccttcagagtgagcctggaccaggacgtggagaccgagaccgagcccagcgactacagcaacggcgagggcgccgtgttcaacaagagcctgagcggcagccagaccagcagcgcctggagcaacctgagcggcttcagcagcagcgccagctgggaggaggtgaactaccacgtggacgacagaagcgccagaaaggagcccggcaaggagcacctggtggacacccagtgcagcaccgccctgagcgaggagctggagaacgacagagagggcagagccatgcacagcctgcacagccagctgcacgacctgagcctgcaggagcccaacaacgacaacctggagcccagccagaaccagccccagcagcagatgcccctgacccccttcagcccccacaacacccccggcatcttcctggcccccggcgccggcctgctggagggcgcccccgagggcatccaggaggtgagaaacatgggccccagaaacaccagcgcccacagcagacccagctacagaagcgccagctggagcagcgacagcggcagacccaagaacatgggcacccaccccagcgtgcagaaggaggaggccttcgagatcatcgtggagttccccgagaccaactgcgacgtgaaggacagacagggcaaggagcagggcgaggagatcagcgagagaggcgccggccccaccttcaaggccagccccagctgggtggaccccgagggcgagaccgccgagagcaccgaggacgcccccctggacttccacagagtgctgcacaacagcctgggcaacatcagcatgctgccctgcagcagcttcacccccaactggcccgtgcagaaccccgacagcagaaagagcggcggccccgtggccgagcagggcatcgaccccgacgccagcaccgtggacgaggagggccagctgctggacagcatggacgtgccctgcaccaacggccacggcagccacagactgtgcatcctgagacagccccccggccagagagccgagacccccaacagcagcgtgagcggcaacatcctgttccccgtgctgagcgaggactgcaccaccaccgaggagggcaaccagcccggcaacatgctgaactgcagccagaacagcagcagcagcagcgtgtggtggctgaagagccccgccttcagcagcggcagcagcgagggcgacagcccctggagctacctgaacagcagcggcagcagctgggtgagcctgcccggcaagatgagaaaggagatcctggaggccagaaccctgcagcccgacgacttcgagaagctgctggccggcgtgagacacgactggctgttccagagactggagaacaccggcgtgttcaagcccagccagctgcacagagcccacagcgccctgctgctgaagtacagcaagaagagcgagctgtggaccgcccaggagaccatcgtgtacctgggcgactacctgaccgtgaagaagaagggcagacagagaaacgccttctgggtgcaccacctgcaccaggaggagatcctgggcagatacgtgggcaaggactacaaggagcagaagggcctgtggcaccacttcaccgacgtggagagacagatgaccgcccagcactacgtgaccgagttcaacaagagactgtacgagcagaacatccccacccagatcttctacatccccagcaccatcctgctgatcctggaggacaagaccatcaagggctgcatcagcgtggagccctacatcctgggcgagttcgtgaagctgagcaacaacaccaaggtggtgaagaccgagtacaaggccaccgagtacggcctggcctacggccacttcagctacgagttcagcaaccacagagacgtggtggtggacctgcagggctgggtgaccggcaacggcaagggcctgatctacctgaccgacccccagatccacagcgtggaccagaaggtgttcaccaccaacttcggcaagagaggcatcttctacttcttcaacaaccagcacgtggagtgcaacgagatctgccacagactgagcctgaccagacccagcatggagaagccctgcacctag

SEQ ID NO: 40892 - protein, 644 aa, Artificial Sequence
  derived and/or modified sequence
MKLITILFLCSRLLLSLTQESQSEEIDCNDKDLFKAVDAALKKYNSQNQSNNQFVLYRITEATKTVGSDTFYSFKYEIKEGDCPVQSGKTWQDCEYKDAAKAATGECTATVGKRSSTKFSVATQTCQITPAEGPVVTAQYDCLGCVHPISTQSPDLEPILRHGIQYFNNNTQHSSLFMLNEVKRAQRQVVAGLNFRITYSIVQTNCSKENFLFLTPDCKSLWNGDTGECTDNAYIDIQLRIASFSQNCDIYPGKDFVQPPTKICVGCPRDIPTNSPELEETLTHTITKLNAENNATFYFKIDNVKKARVQVVAGKKYFIDFVARETTCSKESNEELTESCETKKLGQSLDCNAEVYVVPWEKKIYPTVNCQPLGMISLMKRPPGFSPFRSSRIGEIKEETTVSPPHTSMAPAQDEERDSGKEQGHTRRHDWGHEKQRKHNLGHGHKHERDQGHGHQRGHGLGHGHEQQHGLGHGHKFKLDDDLEHQGGHVLDHGHKHKHGHGHGKHKNKGKKNGKHNGWKTEHLASSSEDSTTPSAQTQEKTEGPTPIPSLAKPGVTVTFSDFQDSDLIATMMPPISPAPIQSDDDWIPDIQIDPNGLSFNPISDFPDTTSPKCPGRPWKSVSEINPTTQMKESYYFDLTDGLS

SEQ ID NO: 40893 - DNA, 1935 bp, Artificial Sequence
  derived and/or modified sequence
atgaagttaataactatcctgttcctgtgttcaaggctcctgctgtctttaacacaggagtctcagtcagaggaaatcgactgtaacgataaggacttgttcaaagctgttgacgcagcgctcaagaagtacaactcacaaaatcagtcaaataaccagtttgtgctgtaccggattaccgaggccactaaaactgtaggatccgacacattttactccttcaaatatgagataaaggaaggcgactgtcctgtgcaatcaggaaaaacttggcaggattgtgaatacaaggatgccgcaaaggccgctaccggcgagtgcacagccactgtcggaaaacgatcctcaaccaaattctcagttgctacacagacatgccagatcacccctgccgagggccctgttgttaccgcacagtatgattgcttgggatgcgtgcaccccatcagtactcagtccccagacctggagcccattctccgtcatggaatccaatattttaacaataacacccagcacagctctctttttatgttgaacgaagtcaagcgtgctcagcgtcaggttgttgcaggcctgaacttcaggattacgtattctatagttcagaccaattgtagtaaggagaatttcctctttctcaccccagactgcaagtccctgtggaatggggacactggcgaatgcactgacaacgcctacattgatattcagctcaggatcgcaagcttctctcagaattgtgacatttaccccggaaaagatttcgtccagccacccacaaaaatctgcgtgggttgtccgcgggacatacccaccaacagtccagaactcgaggaaacgctgacccacaccattacgaagctaaacgctgaaaacaatgctaccttttattttaagatagacaacgtaaaaaaggcccgggtccaggtggtggctggtaagaaatatttcattgacttcgtggcccgcgagactacctgttcaaaggaatcaaacgaagagcttaccgaaagctgcgaaacaaaaaagctcggtcagagcctggattgcaatgctgaagtgtacgtagtcccctgggagaagaaaatctatccaaccgtcaactgccagccgctgggcatgatctcgttaatgaagaggcccccgggtttcagcccatttcggtcctctcgtatcggggagataaaagaagagacaactgtatccccaccccatacttccatggctccagcccaagatgaggagagagactctggtaaggaacagggtcataccaggcggcacgattggggtcacgagaagcagcggaaacacaacctagggcacggccacaaacacgaacgcgaccagggacatggacatcagagagggcacggtcttgggcacggtcacgaacagcaacacggcttgggccacggacacaaattcaagcttgatgatgatctggagcatcagggtggacatgttctcgaccatggccataagcacaagcatggtcatggacatggcaagcataaaaataaaggtaaaaaaaacggtaagcataacggatggaagaccgagcacttggcgtctagctccgaggattctactacaccatccgctcaaacccaggaaaagactgagggtcccacacctatcccttctctggcgaagcctggtgtcaccgtaacattcagtgattttcaggacagtgacctgattgcgacaatgatgcccccaatatcacccgccccaattcagtctgatgatgactggattccggacatacagattgacccgaacgggctctccttcaacccaattagcgactttcctgatacgacgtcccccaaatgccctggtcgtccatggaaatcagtcagcgagattaaccccactactcagatgaaagagagctactattttgatctcacagacggattgtcctag

SEQ ID NO: 40894 - DNA, 3435 bp, Artificial Sequence
  derived and/or modified sequence
aaatatgtttggataacccagcagagccatttaacctttgggaacaaggcaactagcgtctggcagcaggaatccaaccagtgccctgagttctgaggcagagaggaggacagaagaaacaagaggctggagattgtcaaattcagtatcccagttggctcttgattcttggtgaaaccatccctcagctcctagagggagattgttagatcatgaaactaattaccatccttttcctctgctccaggctgctactaagtttaacccaggaatcacagtccgaggaaattgactgcaatgacaaggatttatttaaagctgtggatgctgctctgaagaaatataacagtcaaaaccaaagtaacaaccagtttgtattgtaccgcataactgaagccactaagacggttggctctgacacgttttattccttcaagtacgaaatcaaggagggggattgtcctgttcaaagtggcaaaacctggcaggactgtgagtacaaggatgctgcaaaagcagccactggagaatgcacggcaaccgtggggaagaggagcagtacgaaattctccgtggctacccagacctgccagattactccagccgagggccctgtggtgacagcccagtacgactgcctcggctgtgtgcatcctatatcaacgcagagcccagacctggagcccattctgagacacggcattcagtactttaacaacaacactcaacattcctccctcttcatgcttaatgaagtaaaacgggcccaaagacaggtggtggctggattgaactttcgaattacctactcaattgtgcaaacgaattgttccaaagagaattttctgttcttaactccagactgcaagtccctttggaatggtgataccggtgaatgtacagataatgcatacatcgatattcagctacgaattgcttccttctcacagaactgtgacatttatccagggaaggattttgtacaaccacctaccaagatttgcgtgggctgccccagagatatacccaccaacagcccagagctggaggagacactgactcacaccatcacaaagcttaatgcagagaataacgcaactttctatttcaagattgacaatgtgaaaaaagcaagagtacaggtggtggctggcaagaaatattttattgacttcgtggccagggaaaccacatgttccaaggaaagtaatgaagagttgaccgaaagctgtgagaccaaaaaacttggccaaagcctagattgcaacgctgaagtttatgtggtaccctgggagaaaaaaatttaccctactgtcaactgtcaaccactgggaatgatctcactgatgaaaaggcctccaggtttttcacctttccgatcatcacgaataggggaaataaaagaagaaacaactgtaagtccaccccacacttccatggcacctgcacaagatgaagagcgggattcaggaaaagaacaagggcatactcgtagacatgactggggccatgaaaaacaaagaaaacataatcttggccatggccataaacatgaacgtgaccaagggcatgggcaccaaagaggacatggccttggccatggacacgaacaacagcatggtcttggtcatggacataagttcaaacttgatgatgatcttgaacaccaagggggccatgtccttgaccatggacataagcataagcatggtcatggccacggaaaacataaaaataaaggcaaaaagaatggaaagcacaatggttggaaaacagagcatttggcaagctcttctgaagacagtactacaccttctgcacagacacaagagaagacagaagggccaacacccatcccttccctagccaagccaggtgtaacagttaccttttctgactttcaggactctgatctcattgcaactatgatgcctcctatatcaccagctcccatacagagtgatgacgattggatccctgatatccagatagacccaaatggcctttcatttaacccaatatcagattttccagacacgacctccccaaaatgtcctggacgcccctggaagtcagttagtgaaattaatccaaccacacaaatgaaagaatcttattatttcgatctcactgatggcctttcttaatttaagtggctatgggtatttctttcatactttattaaagtatcaatatccctctctccattgtccagatgaaaatatcctgatataatgcaccaaaaaccatgcagcttcggaacagtctaaagagaagtggtgagactcccagtggagacaccatcagtctccacggactgcataaaattgtgtgccacaattctaactcttttctgaatcttcttcccaagttttctaaactagcacagtaaacagacaaactaatgtgccgtatggcctgctgcaattggcttctctgataacaaatatgtaccttacaacatatgtcatgaatttgcatacaaagattcttgtcattcttaataaactgtggcacttggtatttgaatgtgtgtgaaaataagggaagtcaagagattaaatgctgaacttattaatggaatagaaataataaggaggctgaggctggagaattgcttgaacccgggaggcggaggttgcagtgagccgagatcgtgccactgcgctccagcctgggcatcagagcaagattctgtctcagaaaaaaagaaaaaaaaagaaataataagaaaaacttccagatttcaaagtaacaagaaagaagacaggttggccaaagggaggaaaggggggacataaattaattgactttctattcccaaaatgggctagttatatcaaataaatactcccactgccctttctgagtgagagtgtttctcataagtcaaaaatttctgtttactcattaactactctttgcaacaggctttcatatagaagtattctgtttatttttgctgagcctagattgagtaattcttagtttacagaagctccgagcttaatgataaggatgaaaagcagagggagcaatatagaagcaggcttgctaataaaactttttaaataattgacaagggaatattatggaatgtgatgcaaagtttgttccgaaattttatgaggaaattactctctagtctcactttatagtctttttgctatgactttgaagaccattgatttttgagaagcagaataataggattgcctttcattgccctatagtgcaaagaaggtatatgctttataaccaatgttgtacttttgcctagaaaaacaagatatggctttaaatagctacaatcatctttggatgtatatgtcactgctgcttcaagttattggatgcatttgaacctctgagtttgtctttcattttaaatattgtctgttcttttaaataaacaaccacagatgtcaggaaaaa

SEQ ID NO: 40895 - DNA, 1935 bp, Artificial Sequence
  derived and/or modified sequence
atgaagctgatcaccatcctcttcctgtgcagccggctgctgctgagcctgacccaggagagccagagcgaggagattgactgcaatgacaaggacctcttcaaggctgtggatgctgccctgaagaagtacaacagccagaaccagagcaacaaccagtttgtgctgtaccgcatcacagaggccaccaagacagtgggcagtgacaccttctacagcttcaagtatgagatcaaggagggggactgccctgtgcagagcggcaagacctggcaggactgtgagtacaaggatgctgccaaggccgccaccggggagtgcacagccaccgtgggcaagaggagcagcaccaagttctctgtggccacccagacctgccagatcaccccagctgagggccctgtggtgacagcccagtatgactgcctgggctgtgtgcaccccatcagcacccagagcccagacctggagcccatcctgcggcacggcatccagtacttcaacaacaacacccagcacagcagcctcttcatgctgaatgaggtgaagagggcccagaggcaggtggtggccggcctgaacttccgcatcacctacagcatcgtgcagaccaactgcagcaaagaaaacttcctgttcctgaccccagactgcaagagcctgtggaatggagacaccggggagtgcacagacaatgcctacatcgacatccagctgagaattgccagcttcagccagaactgtgacatctacccaggcaaggactttgtgcagccccccaccaagatctgtgtgggctgcccccgggacatccccaccaacagccctgagctggaggagaccctgacccacaccatcaccaagctgaatgctgagaacaatgccaccttctacttcaagattgacaacgtgaagaaggcccgggtgcaggtggtggccggcaagaagtacttcatcgactttgtggcccgggagaccacctgcagcaaggagagcaatgaggagctgacagagagctgtgagaccaagaagctgggccagagcctggactgcaatgctgaggtgtatgtggtgccctgggagaagaagatctaccccaccgtgaactgccagcccctgggcatgatcagcctgatgaagaggcctcctggcttcagccccttccgcagcagcagaattggagagatcaaggaggagaccaccgtgagccccccccacacctccatggccccagcccaggatgaggagcgggacagcggcaaggagcagggccacaccaggagacatgactggggccacgagaagcagaggaagcacaacctgggccacggccacaagcatgagcgggaccagggccacggccaccagaggggccacggcctgggccacggccacgagcagcagcacggcctgggccacggccacaagttcaagctggatgatgacctggagcaccagggcggccacgtgctggaccacggccacaagcacaagcacggccacggccacggcaagcacaagaacaagggcaagaagaatggcaagcacaacggctggaagacagagcacctggccagcagcagcgaggacagcaccaccccatctgcccagacccaggagaagacagagggccccacccccatccccagcctggccaagccaggagtgacagtgaccttcagtgacttccaggacagcgacctgattgccaccatgatgccacccatcagccctgcccccatccagagtgatgatgactggatcccagacatccagattgaccccaacggcctgtccttcaaccccatcagtgacttcccagacaccaccagccccaagtgccccggccggccctggaagtctgtgtctgagatcaaccccaccacccagatgaaggagagctactactttgacctgacagatggcctgtcctag

SEQ ID NO: 40896 - DNA, 1935 bp, Artificial Sequence
  derived and/or modified sequence
atgaagctgatcaccatcctgttcctgtgcagccggctgctgctgtcccttacacaggaatcacagagcgaggagatcgattgcaatgacaaagacctgtttaaagctgtagatgccgcattaaaaaagtataactcgcagaaccagtccaataaccagttcgtgctgtacagaatcaccgaagccactaagacagtgggttcggacacgttctattccttcaaatacgagatcaaggaaggagattgtcctgtgcaatctggaaagacatggcaggattgtgagtacaaggatgcagcaaaggcagcgacgggcgagtgtaccgccacagtgggcaagaggtcatccaccaaattcagcgtggctacccaaacgtgccaaatcacaccagctgaggggcccgtagtgacagcacaatacgactgcttaggctgcgtccaccctatttcgacacagagccccgacctcgaaccaatactgcggcacgggatccaatacttcaataacaatacccagcatagcagcctgtttatgctcaatgaggtgaagagagcacagcgccaagtggtcgctggtttaaacttccgtataacctacagcatcgttcagactaattgcagcaaggaaaacttcctctttctcacgcctgattgcaaatcactctggaacggggacacaggtgagtgtactgacaacgcctatatagatatacagctgcgcattgctagcttttcccaaaattgcgacatataccctggcaaagacttcgtgcagcccccaactaagatttgtgtgggctgtccacgggatatacccaccaattccccagagctggaggaaacgctgacccacaccattaccaagctgaatgcggagaacaacgctaccttttactttaagatcgacaacgtgaaaaaggccagggtgcaggttgtcgcaggcaaaaaatacttcatcgattttgtggcccgagagactacttgctctaaggaatcaaacgaggaactcaccgaatcctgtgagactaagaaactgggtcagagcctggactgtaacgctgaggtttacgtggttccttgggagaaaaaaatctacccaaccgttaattgccagcccctcggaatgatctccttgatgaagcgcccccccggatttagcccttttaggagcagtagaataggggagattaaggaagagacaaccgtaagtcccccacacacatccatggctccggctcaagacgaggaacgggactctgggaaagaacaagggcatactagacggcacgactggggtcatgaaaagcagcgtaagcacaacctgggacacggtcataagcacgagcgcgatcagggccacggccaccaaagaggtcacggactcgggcacgggcacgagcagcaacacggactgggacatgggcacaaattcaaactggacgatgatctagagcaccagggcggtcatgtcctggatcacggtcacaaacacaagcacggccacggacacggcaaacacaagaataagggaaagaaaaacggaaagcataacggatggaagactgaacatctagcctcatcatctgaagattcgacaaccccctcagctcagactcaggagaagaccgaaggccccactccaatcccaagcctcgccaaacctggcgtcacagtgacattcagcgatttccaggacagcgacctgatcgccaccatgatgcccccgatctcccctgcaccgatccagtctgacgacgattggattcccgacattcagattgaccctaatggtctctcttttaacccgatcagcgactttcctgatacaaccagccctaagtgtcctgggcggccatggaaatcagtttccgaaatcaatcccacaacccaaatgaaagagtcatactattttgacctcacggacggcttatcatag

SEQ ID NO: 40897 - DNA, 1935 bp, Artificial Sequence
  derived and/or modified sequence
atgaagctgatcaccatactctttctgtgcagtcgcctgctgcttagcctcacgcaggagagccaatctgaagaaattgactgcaacgataaggacctttttaaggcagtcgatgccgctcttaaaaagtataattcgcagaatcagtccaataaccagtttgtcctatatagaattaccgaggccacaaagacggtcggatcagatacgttttactcattcaagtatgagattaaggaaggtgactgccctgtgcagtctggcaagacttggcaggactgcgagtacaaggacgccgcaaaggccgcaactggggaatgtaccgccaccgtggggaaacgatcctctacaaagtttagtgtggctactcagacctgtcagatcactccagccgagggacccgtggtgacagcccagtatgactgtcttggttgtgttcaccccatatccacccaaagcccagacctggaacccattctccgccacgggatacagtacttcaataataacactcaacattcctcactgtttatgttaaatgaagtcaagcgcgctcagagacaggtagttgctggattaaacttcagaatcacctattcaattgtgcagacaaattgctccaaagagaactttcttttcctcacgccagattgcaaatctctgtggaacggtgacaccggggagtgtactgataatgcatatatagatatccaactgcgaatcgccagcttcagccagaattgtgacatctaccccggaaaagacttcgttcagcctcctacgaaaatatgtgtgggctgtcctagagatattccaaccaactcccccgaactggaggaaacactgacccatacgattaccaagctcaacgctgaaaataacgccaccttctactttaagatcgataacgttaaaaaggctagagtgcaggtggttgccggtaagaaatactttatagattttgttgcaagagaaacaacttgctctaaagagtcaaatgaggagctgacagagagctgtgagaccaagaaactggggcagagccttgattgtaatgctgaagtgtacgtggtgccttgggagaagaaaatttacccaaccgtcaactgccagcctctgggaatgatttctctgatgaaaagaccaccaggtttctctccctttaggagctctcggataggggaaataaaagaagagaccaccgtcagtccacctcatacctcaatggcgccagcacaggacgaggaaagggactcaggcaaagagcagggccatacgcgaagacatgactgggggcacgaaaagcaacgtaaacacaatctggggcacgggcacaagcacgagcgggatcagggtcatggccaccagcgtgggcacggactgggacatggccatgaacagcagcatggtttgggacacggccacaagtttaagctagacgacgacctggagcatcaaggtggacatgtgctggatcatggtcacaagcacaagcatggtcatgggcatggtaagcacaagaataaggggaagaagaacggaaagcacaatgggtggaagaccgagcacctggcatcgtcctctgaagatagcacaactccttctgcacagacccaagaaaagaccgagggccctactcctatcccttcactcgcaaaaccgggtgttaccgtgacatttagcgatttccaggattccgacctgatcgccaccatgatgccgccaataagccctgctcccatccaatccgacgacgactggattcctgatatccaaattgaccccaatggtctgtcatttaatccaattagtgacttcccagatacgacgtcccccaagtgcccagggagaccatggaaatccgtgagcgaaatcaatcccactacacaaatgaaggagagctactattttgaccttaccgacggtctctcatag

SEQ ID NO: 40898 - DNA, 1935 bp, Artificial Sequence
  derived and/or modified sequence
atgaagctgatcaccatcctgttcctgtgcagcagactgctgctgagcctgacccaggagagccagagcgaggagatcgactgcaacgacaaggacctgttcaaggccgtggacgccgccctgaagaagtacaacagccagaaccagagcaacaaccagttcgtgctgtacagaatcaccgaggccaccaagaccgtgggcagcgacaccttctacagcttcaagtacgagatcaaggagggcgactgccccgtgcagagcggcaagacctggcaggactgcgagtacaaggacgccgccaaggccgccaccggcgagtgcaccgccaccgtgggcaagagaagcagcaccaagttcagcgtggccacccagacctgccagatcacccccgccgagggccccgtggtgaccgcccagtacgactgcctgggctgcgtgcaccccatcagcacccagagccccgacctggagcccatcctgagacacggcatccagtacttcaacaacaacacccagcacagcagcctgttcatgctgaacgaggtgaagagagcccagagacaggtggtggccggcctgaacttcagaatcacctacagcatcgtgcagaccaactgcagcaaggagaacttcctgttcctgacccccgactgcaagagcctgtggaacggcgacaccggcgagtgcaccgacaacgcctacatcgacatccagctgagaatcgccagcttcagccagaactgcgacatctaccccggcaaggacttcgtgcagccccccaccaagatctgcgtgggctgccccagagacatccccaccaacagccccgagctggaggagaccctgacccacaccatcaccaagctgaacgccgagaacaacgccaccttctacttcaagatcgacaacgtgaagaaggccagagtgcaggtggtggccggcaagaagtacttcatcgacttcgtggccagagagaccacctgcagcaaggagagcaacgaggagctgaccgagagctgcgagaccaagaagctgggccagagcctggactgcaacgccgaggtgtacgtggtgccctgggagaagaagatctaccccaccgtgaactgccagcccctgggcatgatcagcctgatgaagagaccccccggcttcagccccttcagaagcagcagaatcggcgagatcaaggaggagaccaccgtgagccccccccacaccagcatggcccccgcccaggacgaggagagagacagcggcaaggagcagggccacaccagaagacacgactggggccacgagaagcagagaaagcacaacctgggccacggccacaagcacgagagagaccagggccacggccaccagagaggccacggcctgggccacggccacgagcagcagcacggcctgggccacggccacaagttcaagctggacgacgacctggagcaccagggcggccacgtgctggaccacggccacaagcacaagcacggccacggccacggcaagcacaagaacaagggcaagaagaacggcaagcacaacggctggaagaccgagcacctggccagcagcagcgaggacagcaccacccccagcgcccagacccaggagaagaccgagggccccacccccatccccagcctggccaagcccggcgtgaccgtgaccttcagcgacttccaggacagcgacctgatcgccaccatgatgccccccatcagccccgcccccatccagagcgacgacgactggatccccgacatccagatcgaccccaacggcctgagcttcaaccccatcagcgacttccccgacaccaccagccccaagtgccccggcagaccctggaagagcgtgagcgagatcaaccccaccacccagatgaaggagagctactacttcgacctgaccgacggcctgagctag

SEQ ID NO: 40899 - protein, 213 aa, Artificial Sequence
  derived and/or modified sequence
MAQETNQTPGPMLCSTGCGFYGNPRTNGMCSVCYKEHLQRQQNSGRMSPMGTASGSNSPTSDSASVQRADTSLNNCEGAAGSTSEKSRNVPVAALPVTQQMTEMSISREDKITTPKTEVSEPVVTQPSPSVSQPSTSQSEEKAPELPKPKKNRCFMCRKKVGLTGFDCRCGNLFCGLHRYSDKHNCPYDYKAEAAAKIRKENPVVVAEKIQRI

SEQ ID NO: 40900 - protein, 211 aa, Artificial Sequence
  derived and/or modified sequence
MAKPEQAADGGVRGRGARPPAQEAQRRRRHPVVVARDLAPGVPGSLHSTQKNMAQETNQTPGPMLCSTGCGFYGNPRTNGMCSVCYKEHLQRQQNSGRMSPMGTASGSNSPTSDSASVQRADTSLNNCEGAAGSTSEKSRNVPVAALPVTQQMTEMSISREDKITTPKTEVSEPVVTQPSPSVSQPSTSQSEEKAPELPKPKKNRCFMCRK

SEQ ID NO: 40901 - DNA, 5747 bp, Artificial Sequence
  derived and/or modified sequence
ctcttttccctcacagcccgggcgccgggcggcgagtgcgttagtcggccgggacgcggagctgtgtgcatctcctacgcgggctcgctcgctcccgggagccgcgcagcttccccggcggtggcaggagcggcgaagagcgccatcagcgggcccttacggccccaggcctcgcggcgcgcggtccgctcgccctcctcgtccgcccaacctgcggcctgtggaggcgtgaggcgacgacaggcgagcgcctcgagcagcgttagccgctgcggccgccggtcctccctccacctcctcctcggccccccctcgcttccctcctcccacttcccgagctccggcgtgtcccggccacgctcgacgctgctgcaggaacaaaggaagaccccgcggcggcggcggcgccacctccgcctgctgctccgacccgctcccggcccgcggcggcggcaccagggcgcccggctcagccttcccggaggcctcggcccggcctcatcgtgccggcttcgcgcgcgaacccggctttcgcatttgggaccctgcaggaaaaatatggctcaggagactaaccagaccccggggcccatgctgtgtagcacaggatgtggcttttatggaaatcctaggacaaatggaatgtgttcagtttgctacaaagaacatcttcagaggcagcaaaatagtggcagaatgagcccaatgggaacagctagtggttccaacagtcctacctcagattctgcatctgtacagagagcagacactagcttaaacaactgtgaaggtgctgctggcagcacatctgaaaaatcaagaaatgtgcctgtggctgccttgcctgtaactcagcaaatgacagaaatgagcatttcaagagaggacaaaataactaccccgaaaacagaggtgtcagagccagttgtcactcagcccagtccatcagtttctcagcccagtacttctcagagtgaagaaaaagctcctgaattgcccaaaccaaagaaaaacagatgtttcatgtgcagaaagaaagttggtcttacagggtttgactgccgatgtggaaatttgttttgtggacttcaccgttactctgacaagcacaactgtccgtatgattacaaagcagaagctgcagcaaaaatcagaaaagagaatccagttgttgtggctgaaaaaattcagagaatataaattacttcttgtgaagagactgaaactttgtttttattttaatatatcgtaggaaaacattaaagagcagatgcatggccatttttctttgatgttctccagagttttacattacacttgtctgtcttataattgatattttaggatgtttgggtgtttgttacaggcagaattggatagatacagccctacaaatgtatatgccctcccctgaaaaaaattggatgaaaatctgcacagcaaagtgaaacacacagataataggaacaaaatgtagttcccatgtgccaaacaaaataaatgaaatctctgcatgtttgcagcatatctgccttttgggaatgtaatcaaggtataatctttggctagtgttatgtgcctgtatttttttaaaatggtacaccagaaaaggactggcagtctacttctaccatagttaaacttcaccctctttaatttcacaacatattctttggaagcaggaagaaatgctcataaagaggatcagaccttctttcccgtgaaaccagtatttggcgccatatataagcctggttaaattggtcatctaaagctgtcaaataagacattctgtgaaaggtaaacatcgaaactggttataagtaaaaccatcaagccaacaacagggtcttgagataacctttgaagcttattgtactggcctgcaccagaagatgtctgcattactcattgctaaaaatgtgtagcacagaactgcactaggattaatttgtttacaagaagaaatttaaactctacgtttggttttcacatacagcagctctattgaataacatgcatctgaattttaagttgcaaaggtatctgaataatttttcatgtgcatcttttgtcgaatgttttggttcaagaaagaatgtttaaagctttttaaaagacttcagttcttaatgtaactgtacccttctgcatggaaaatcataaccaacatggctgcagtagacttcttagtggtatccagcaccacttgcagagggctgctttatcatattgtacttgggtgtaggactctagtgttcttgggtgtattgcatgggctgcattatctacagcattgtacaataacaactagaaaaggcagtatacttcactgatgcttgtctggtaataatcacttctgtgttataatggaaggttttttgtgatgtatgaaacttgtgttttttatatataaatgagtatagttagtgttgtggtaatgcctgttttcatctgtaaatagttaagtatgtacacgaggcactacttctgatttattgcaatgttcagtcctagtttttacttttattcttaaagcattcagttttgctttcaattttatgtaccttagttctgagttagacctgcagatgtgtacagatagttcatatttatgtattgcacataatcatgctattcagcattgatgctatattgtattatgtaaataataaaagccatgtacagagggaaacttcacttgttcattgggtttttaagccatagttggagtcctaaagggggaaaattagaaaatgttactttacatggctatataattttttttcctttgccatcgctgaacttgttcaagtgataatcaagagatattagaagcatttgcaggtatgatacctgataggcagtttatttttgaagaattcaataggcacctttgggattaaaacaattttaaaatttgagaaagatgaaatttgaacaattatggcctacctcgcttctccatgttgtaaaagatgatgttttatgacaattctgaagaagaaagtaggtatgacttagtttacaaaaagagttctgttttatttctgttttgggtttggctctaatacagagattcacccatggacttggtctctgtagcgtttatgccagatcataaagaacaaggggtgacaggtacatgttgactttacctggggtaaatgattaccagagtgcaactgttgcttctctgtgatggagtttggggtggaaataccctagttttatctgtcagttctttgcatgctgctacttttgcttcaagttagggaggtacatatgtatgtcaaagttcctatactgacatagggtagtatttctctgaatatgaaaagtcacaattgagttgaaaatttagaagttgaagatttagaagggcaacttaatttttcaagttaaaaatggaagtaagagtggtatagagaaggtaagatgagccctcggactccatcactctgaaggtctgagtagtagcaagagatagatttttgtttggccaggctgcagtgcaatggcgtaatcttggctcactgcaacctctgcctcctgggttcaagtgattctcctgcctctgcctcctaagtagctgggatcacaggcaccagccaccacgcccagctaatttttgtatttttaatagagacagtttctccatgttggtcaggctggtcttgaactcctgacctcaggtgagctgcccgcctcggcctcccaaagtgctgggattacaggcgtgaggcaccgcacccggccaatcagttttttttgttttttttttgtttgtttgttttacaagaaacattaaaccagatcagaacaaagatttgtcagggttgtccattgactggggagaaagggaatcagtgtgtaaggcacctgagaggactcagttctacccaaattcttgcattcaaacctgaatgcaaggccatgaagtcctttgaaatgtacagatattaagcaatttaataatataccatgtttcccttacataagcagacaaatatttacacccccatgacctgaagttttgttaggctgtgaccacatgaattcgcagtataaatgggtgagtcctttttgaaaacctcatcttcagtgtgcctgatctgtaaaactagagcctcaggtttgatcctaggtaggcttcccacaacgtggggaaaattagtttgtgagggaaagctgtttctgagcattatggcatagtgattaagatgagggaccctggaaccagcccgtgattttgggcaagttattttaggtccactttggactgcttcatctcttaaatgaagacagcaaccaccttcaggagtgtgaaggtgacaacacttaaaactgtgcctggcacattgtatttgctattgtcttaatgttctggaataatggtttccataacttgggaagaaaactttgagaacaggattggttacatcaagttgtatagtgaaaagataaagatttgttatttaaacttgcagtttaaagtcattagaatcattcttttccgtaaggctttctttgcaagagatctgcattaaataaagttgctaggaaataactaaaattggggaaataatctaataatagcaagatgttaagcatactattattgtattttgggggttggtaataacattcacatggatttatcaatacacactgagaagcaaagcctctcaagctgtcccatatcctccatttcaaaggcacacatacattttaggtaactcataatttagaaaggttatttaatcttttccacatgtaaatatttgaatatgtacaaagacttgatttgactcttgtctgtttttgttttgttttgtttgtttgagacagaggctccgtcgcccaggctggagtaaaatggcatggtctcagctcactgcaagttccgcctcccgggttcacgccattctcctggctcagcctccggagtagttgggactacaggcacccgtcaccacacctggctaatgttttttgttttttgggtttttttgtatttttagtagagagagggtttcaccgtgttagccagggtggtctcgatctcctgacctcatgatccgcccaccccggcctcccaaaatgctgggattacaggtgtgagccactgcgcctggccgactcttgtctgtttgaatgcaaagttctcaatagtggtttttgtccataagtattaacttataattttggagagtgataggtatggttgctggttgattagcaataagattatgtagccttaaactagctagaagagtttgcatgggtgaggcaacaggctgttaacaaaaagaaactggaaatacagtttcccctgtttgtttctcctgtttgtacaatctgctttaaaaacaagtgaacatgcaccatgtcagtcatggtgaatcggccaacagccagcccttgccagttgacatcacagtctaagatgggaaactggtacagatagacatgaagagagcttagcagtggttgaggtggtgactaaatatacagtcattgaataaataccgtgtagcaaatgtaaaaaaaaaaaaaaaagtacaacagaatacaaaagtgccatttaatattttatagctatttctatgcacaagtgctggttttaaatttatataaaagcaaagactgtttctgtgttttcttccagagtatttctgttacagccatagaagtaaagttaataaatgtaagactttttttgtttaaaaaaaaaaaaaaaaaaa

SEQ ID NO: 40902 - DNA, 642 bp, Artificial Sequence
  derived and/or modified sequence
atggcccaggagaccaaccagacccccggccccatgctgtgcagcaccggctgcggcttctacggcaaccccagaaccaacggcatgtgcagcgtgtgctacaaggagcacctgcagagacagcagaacagcggcagaatgagccccatgggcaccgccagcggcagcaacagccccaccagcgacagcgccagcgtgcagagagccgacaccagcctgaacaactgcgagggcgccgccggcagcaccagcgagaagagcagaaacgtgcccgtggccgccctgcccgtgacccagcagatgaccgagatgagcatcagcagagaggacaagatcaccacccccaagaccgaggtgagcgagcccgtggtgacccagcccagccccagcgtgagccagcccagcaccagccagagcgaggagaaggcccccgagctgcccaagcccaagaagaacagatgcttcatgtgcagaaagaaggtgggcctgaccggcttcgactgcagatgcggcaacctgttctgcggcctgcacagatacagcgacaagcacaactgcccctacgactacaaggccgaggccgccgccaagatcagaaaggagaaccccgtggtggtggccgagaagatccagagaatctag

SEQ ID NO: 40903 - DNA, 636 bp, Artificial Sequence
  derived and/or modified sequence
atggccaagcccgagcaggccgccgacggcggcgtgagaggcagaggcgccagaccccccgcccaggaggcccagagaagaagaagacaccccgtggtggtggccagagacctggcccccggcgtgcccggcagcctgcacagcacccagaagaacatggcccaggagaccaaccagacccccggccccatgctgtgcagcaccggctgcggcttctacggcaaccccagaaccaacggcatgtgcagcgtgtgctacaaggagcacctgcagagacagcagaacagcggcagaatgagccccatgggcaccgccagcggcagcaacagccccaccagcgacagcgccagcgtgcagagagccgacaccagcctgaacaactgcgagggcgccgccggcagcaccagcgagaagagcagaaacgtgcccgtggccgccctgcccgtgacccagcagatgaccgagatgagcatcagcagagaggacaagatcaccacccccaagaccgaggtgagcgagcccgtggtgacccagcccagccccagcgtgagccagcccagcaccagccagagcgaggagaaggcccccgagctgcccaagcccaagaagaacagatgcttcatgtgcagaaagtag

SEQ ID NO: 40904 - DNA, 642 bp, Artificial Sequence
  derived and/or modified sequence
atggcacaggaaaccaatcagacaccaggaccgatgctctgctcgacagggtgtggattctatggcaacccccgtacgaatgggatgtgctctgtatgttacaaggaacatcttcagagacaacagaatagcgggcgcatgagccctatggggacggctagtggatccaacagccctacttctgatagcgcgtcagtgcagagggcagacacaagtttaaataattgtgagggcgccgctgggagcaccagtgagaagagtagaaacgtgccagttgcggcacttccagtgactcagcagatgaccgaaatgagtataagtcgggaagataagatcacaactcctaagactgaagtctcggaacctgtggttactcaaccatcaccatccgtaagccaaccatcaaccagccagagcgaggaaaaggccccggaattacctaagccgaaaaaaaaccgctgcttcatgtgtcgcaaaaaagtgggcctgacagggtttgactgcaggtgtggcaacctgttctgtggccttcatcgttactcggacaaacataattgtccatatgattacaaagcagaagccgctgccaagattaggaaggagaatcctgtggtggtcgccgaaaagattcaacgcatatag

SEQ ID NO: 40905 - DNA, 642 bp, Artificial Sequence
  derived and/or modified sequence
atggcccaggagactaatcagacccctggtcctatgctttgcagtacaggctgtggcttttacggcaatccccgcactaacggaatgtgcagtgtgtgttacaaggaacatctgcagagacagcagaattcagggagaatgagtccaatgggcactgcgagcggttcaaacagccctacttcagactcagcctccgtgcagagagccgatacttcgcttaacaattgcgaaggagctgccggcagcacctccgaaaaaagccggaacgtaccagtggccgctctccctgtgactcagcaaatgacagagatgtctatctctcgtgaggataagattactacacctaagacagaggtgtcagaaccggtggtaactcaacctagtcctagcgtgtctcaaccctccactagtcagtccgaagagaaagctcccgagctccctaaaccaaagaaaaatagatgttttatgtgccgaaaaaaggtcggcctgaccggatttgactgcagatgcggaaaccttttttgcggcctacatcggtattctgataaacacaactgcccatacgattataaagcggaggcagctgcaaagatcaggaaagaaaaccctgtagtcgtggccgaaaagatccagagaatctag

SEQ ID NO: 40906 - DNA, 636 bp, Artificial Sequence
  derived and/or modified sequence
atggcaaaacccgagcaggcagcagacggtggtgttcgcggtcgcggagcccgcccccctgcgcaagaggcccaacgaaggcgccggcacccggtcgtcgtagctcgtgatctagcaccgggcgtgccaggatctttgcactcgacccagaagaatatggcccaagagactaaccagactcctggaccgatgctgtgctccactggctgtggattttacgggaatcctcgaaccaacggaatgtgctctgtatgctacaaggagcatcttcaacggcagcagaactctggacgtatgagccccatgggaacagcctctggatcgaatagtcctacatctgattcagcctcagtgcagagagccgatacttcactcaataactgtgagggggctgccggtagtacatcggaaaagtcaaggaatgtcccagttgccgctctgccagtgacacagcaaatgacagagatgagcatatctcgggaggacaaaattaccactcctaagactgaggtatccgagcctgtggtgacccagccgagccccagcgtctctcagcctagtacctctcaatcagaagaaaaagcgccagagctgcccaagcccaagaaaaacagatgcttcatgtgccggaaatag

SEQ ID NO: 40907 - DNA, 642 bp, Artificial Sequence
  derived and/or modified sequence
atggcccaggaaacaaaccaaacacccggccccatgctgtgttcaaccgggtgtgggttctatgggaacccgagaactaacggcatgtgttcagtctgctacaaagaacatttacagaggcaacagaattcaggccggatgtctcctatgggcactgcctcaggcagtaattcccccaccagcgactccgcgagcgtccagagggcagatacttccttgaataactgtgagggggccgccgggtccacaagcgagaagtcacgcaacgtcccagtggccgccctgcctgtcacacagcagatgactgaaatgagcatcagtcgtgaagacaaaatcacgacacccaagactgaggtgtccgagccagtggtgacccagcccagcccctcagtgagtcagccaagcaccagccagtcagaagagaaggctcctgagcttcctaagcccaaaaaaaacaggtgtttcatgtgcagaaagaaggtgggactgaccggctttgactgtagatgcgggaaccttttttgtggactgcacagatattcagacaagcacaactgtccttacgattacaaggcagaggctgcagctaagataagaaaagagaatcccgtggtggtcgctgagaagatccagcgcatttag

SEQ ID NO: 40908 - DNA, 642 bp, Artificial Sequence
  derived and/or modified sequence
atggcccaggagaccaatcagactcccggtcctatgctatgttccactggatgtgggttctacggaaacccccggacaaatggaatgtgttcggtgtgttacaaggagcacctacagaggcaacaaaattccggccgaatgtctcccatggggactgcctctggctctaactcccctacgagcgactctgccagcgttcagagggccgacaccagtttgaataattgcgagggcgcagctgggagtacctctgagaagtcacgtaacgtcccggtagctgcgttgccagtgactcaacagatgaccgaaatgtctatctctagagaagacaaaataaccacccccaaaacagaggtctccgagccagtggtaacacagccaagcccaagcgtcagccagccatccacttcccagagcgaagaaaaggcacccgagcttccaaaaccaaagaagaataggtgctttatgtgtaggaaaaaggtgggactcactggttttgactgtagatgcggcaacctgttctgtgggctccaccggtatagcgataagcacaattgcccctatgactacaaggcggaggccgccgccaaaattagaaaagaaaacccagtggttgttgcggagaaaatacagcggatttag

SEQ ID NO: 40909 - DNA, 642 bp, Artificial Sequence
  derived and/or modified sequence
atggcccaggagaccaaccagaccccaggccccatgctgtgcagcacaggctgcggcttctacggcaaccccaggaccaacggcatgtgcagcgtgtgctacaaggagcacctgcagaggcagcagaacagcggccgcatgagccccatgggcacagccagcggcagcaacagccccaccagtgacagcgcctctgtgcagagagctgacaccagcctgaacaactgtgagggcgccgccggcagcaccagcgagaagagcagaaatgtgcctgtggccgccctgcctgtgacccagcagatgacagagatgagcatcagccgggaggacaagatcaccacccccaagacagaggtgtctgagcctgtggtgacccagcccagccccagcgtgtcccagcccagcaccagccagagcgaggagaaggcccctgagctgcccaagcccaagaagaaccgctgcttcatgtgcaggaagaaggtgggcctgaccggctttgactgccgctgtggcaacctcttctgtggcctgcaccgctacagcgacaagcacaactgcccctatgactacaaggccgaggccgccgccaagatcagaaaagaaaatcctgtggtggtggccgagaagatccagaggatctag

SEQ ID NO: 40910 - DNA, 636 bp, Artificial Sequence
  derived and/or modified sequence
atggccaagccagagcaggccgcagatggaggagtgcggggccgcggggcccggcccccagcccaggaggcccagaggagaagaagacaccctgtggtggtggcccgggacctggcccctggggtgcccggcagcctgcacagcacccagaagaacatggcccaggagaccaaccagaccccaggccccatgctgtgcagcacaggctgcggcttctacggcaaccccaggaccaacggcatgtgcagcgtgtgctacaaggagcacctgcagaggcagcagaacagcggccgcatgagccccatgggcacagccagcggcagcaacagccccaccagtgacagcgcctctgtgcagagagctgacaccagcctgaacaactgtgagggcgccgccggcagcaccagcgagaagagcagaaatgtgcctgtggccgccctgcctgtgacccagcagatgacagagatgagcatcagccgggaggacaagatcaccacccccaagacagaggtgtctgagcctgtggtgacccagcccagccccagcgtgtcccagcccagcaccagccagagcgaggagaaggcccctgagctgcccaagcccaagaagaaccgctgcttcatgtgcaggaagtag

SEQ ID NO: 40911 - DNA, 642 bp, Artificial Sequence
  derived and/or modified sequence
atggcccaggagaccaaccagacccccggccccatgctgtgcagcaccggctgcggattttacgggaatccgcgcacaaacggaatgtgctccgtgtgctataaggagcatctgcagcgccaacagaactccggccggatgagccctatgggcaccgctagcggaagcaattcccccacttctgattccgcctccgtgcagcgagcagataccagtctgaacaactgcgagggggctgcgggcagcacaagcgagaagtccagaaatgtccccgtggccgccctgccggtgacccagcagatgacggagatgagcataagtagggaagataaaataactactccgaagactgaggtgtccgaacctgtcgtcactcagcctagtcctagcgtttctcagccctccacgagtcagagtgaggagaaagcaccagagttgccaaagcctaaaaagaaccggtgttttatgtgtcggaaaaaagtaggtctaactggcttcgactgtaggtgcggcaacctgttctgcggactgcaccggtacagcgataaacacaattgcccatacgactataaagcagaagccgctgccaaaataaggaaagagaaccctgtcgtggtcgctgaaaaaatacagcgaatctag

SEQ ID NO: 40912 - DNA, 642 bp, Artificial Sequence
  derived and/or modified sequence
atggcccaggagaccaaccagacccccggccccatgctgtgcagcacggggtgcggcttctatggcaacccccgaaccaatggcatgtgctccgtctgctacaaagaacatctgcagcgccagcagaactctggaagaatgagccctatgggcacggcttccggtagtaattctcccaccagcgattccgctagcgtacagcgggctgatacaagcctgaataactgtgagggagctgcgggttccacatccgagaaaagcaggaatgtccccgtggccgccctgccggtgactcagcaaatgaccgagatgagcatctcccgcgaagataagatcaccactccaaagaccgaagtgtctgaaccagtggttactcaaccctcgcctagcgtgtcacagccaagtacttcacagtctgaagaaaaagcccctgagctgcctaaacctaagaagaaccgctgctttatgtgccgaaaaaaggtgggactcacgggattcgactgtcgctgcgggaaccttttttgcggactacacagatactcggataaacacaattgcccttacgactataaggcagaagctgccgcgaagattcgcaaagagaaccctgtcgtggtcgccgaaaagattcagagaatctag

SEQ ID NO: 40913 - DNA, 636 bp, Artificial Sequence
  derived and/or modified sequence
atggccaagcccgagcaggccgccgacggcggcgtgcggggccggggtgcgaggccccccgcacaagaggctcaacgaagacgaaggcaccccgtggtcgtggcacgagatctggcacccggcgttccaggcagcttgcactccacacaaaagaatatggctcaagaaacgaaccagacacctggtcctatgctctgttccaccggttgtgggttttacggcaaccccaggacaaacggaatgtgctccgtgtgctataaagaacacctgcagagacagcagaactcaggacgcatgtcacctatgggaactgcaagcggaagcaacagccctacaagcgactcggccagcgttcagcgagctgacactagcctgaataattgcgagggagcagcggggagtacttcagaaaaatcaaggaatgtcccggtggctgcgctgccagttacccaacagatgactgagatgagcatcagtagggaggacaagatcactactcctaaaactgaggtgagtgagcccgtggtgacccagccaagcccaagtgtatctcagccaagtacttcgcagagcgaggagaaagctcctgaattaccaaagcccaagaagaaccggtgttttatgtgtaggaaatag

SEQ ID NO: 40914 - DNA, 642 bp, Artificial Sequence
  derived and/or modified sequence
atggcccaggagaccaaccagacccccggccccatgctgtgcagcacaggttgtgggttttatggaaatcctcgaactaatgggatgtgctcagtgtgttataaagaacacctccaacggcaacagaactctggtcgcatgtcacccatggggacagcaagcggctccaactctccaacatccgacagcgcgagtgtccagagagccgataccagcttgaacaattgcgagggtgcggccggtagcacttcggagaaatccaggaatgtgcccgttgctgctctccccgtgactcaacagatgaccgaaatgtctatctcccgggaagataaaatcaccactccgaaaaccgaagtgagcgaacccgtcgtgactcaacccagtccttctgtgtcccagccttccaccagtcaaagcgaagagaaagctccagagctacccaaaccgaagaaaaaccgctgcttcatgtgcagaaagaaggtggggctgactggctttgactgcagatgtggaaacctcttctgcggtctgcaccggtacagtgacaagcacaattgtccatacgattacaaggctgaggccgcagctaagattcgcaaagagaatcctgtcgttgtggccgaaaaaattcaacgcatctag

SEQ ID NO: 40915 - DNA, 642 bp, Artificial Sequence
  derived and/or modified sequence
atggcccaggagaccaaccagacccccggccccatgctgtgcagcacagggtgcggtttttatggtaaccctaggacgaacggaatgtgctctgtttgctataaggagcatctccagcgccagcaaaatagcggccggatgtcccccatggggacagcctctgggagcaattcccccactagtgattcagcatctgtgcagcgggccgataccagtctgaataactgtgaaggcgctgctggaagtacgagtgagaagagtaggaatgttccggttgcagctttgccggtgactcagcagatgacagagatgtcaatttcacgggaggacaaaataacgactcctaagacggaagtctctgagcccgtcgttacacagccatccccttccgtgtctcagcctagcacatctcagagcgaggagaaggcacccgagcttcccaagccgaagaagaatcggtgcttcatgtgccgaaagaaggtgggtctgacaggctttgattgccggtgtggaaatcttttctgtggcttacacagatacagcgacaaacacaattgcccatatgactacaaggccgaggcagctgcaaaaatcaggaaggagaaccctgtggtggtggctgagaagattcagagaatctag

SEQ ID NO: 40916 - DNA, 642 bp, Artificial Sequence
  derived and/or modified sequence
atggcacaggagactaaccagacaccagggcctatgttatgcagtaccgggtgcggcttctacggcaatccccgtaccaatggtatgtgcagcgtatgttacaaagagcacctgcagaggcagcagaactcaggtcggatgtcccctatggggactgccagtggatctaactcacctactagtgacagcgcctccgtgcagagggctgacacatctttgaacaattgcgaaggcgcagctggcagcacctccgagaagtctaggaatgtacccgttgccgcactacccgttacacagcaaatgacagagatgagcatttcacgtgaggacaagattacaacccccaagaccgaagtatccgagcccgtggttacacagccctcccctagtgtgagccagccgtccacttctcagtccgaggagaaagcccctgagctcccaaaaccaaaaaagaatcgttgtttcatgtgcaggaagaaggtcgggctgacgggcttcgattgtagatgtggaaatctcttctgcgggttgcatcggtactccgataaacacaactgcccctatgattacaaggcggaagcagcagccaaaatcagaaaggaaaatcctgtggtggtagcagaaaagatccaacgaatctag

SEQ ID NO: 40917 - DNA, 642 bp, Artificial Sequence
  derived and/or modified sequence
atggcccaggagacaaaccagacccctggccctatgctctgttcaactggatgtggcttctatgggaatccccgtactaacggaatgtgcagcgtctgttataaggagcacttacaaaggcagcaaaactccggccgtatgagccccatggggacggcctccggctcgaactcgccaacgtccgacagtgccagcgtgcagagggcagacacctcattgaacaattgcgagggcgctgccggatcaaccagcgaaaaaagtagaaacgtacccgtggcggcactacctgttactcagcagatgaccgagatgtcgatctcccgcgaagacaagatcactacaccaaaaactgaggtgagtgagcccgtcgtgacccagccctcccctagcgtttctcaaccatcaacatctcagagcgaggaaaaagccccagagctccctaagcccaagaagaatcgttgtttcatgtgccggaagaaggtgggcctaactggctttgattgcagatgcgggaacctcttctgtggcctacaccgatactccgataagcacaattgcccatatgattataaggctgaagccgcagcaaaaatacgcaaggagaatccagtcgtcgtggcggaaaagatccagcgaatctag

SEQ ID NO: 40918 - DNA, 636 bp, Artificial Sequence
  derived and/or modified sequence
atggctaagcctgagcaagctgcagacggaggcgttcggggacgcggagccaggccgcctgcccaagaggcccagaggcgacgaaggcacccagtggtcgtggcccgagatctggcccctggtgtgccaggaagcctgcatagtacccagaagaacatggcccaagaaactaatcagacccccggaccaatgctctgctctaccgggtgtgggttttatggaaacccccgaacgaatggaatgtgttccgtctgctataaggaacacctgcagagacagcagaactcaggccgaatgagccctatgggcaccgcaagtggatctaattcccctacttccgattctgcttctgtacaacgcgcagacactagcctgaacaactgtgaaggcgctgcaggatccaccagcgaaaaatcaagaaatgttcctgtcgcagcgcttcctgtcactcagcagatgacggaaatgtccattagcagggaggataaaatcacaacacccaaaacggaagtgagcgagcctgtcgtcacccaaccgagtccttcagtctctcaaccatctacttctcagtcagaagaaaaagccccagagctgcctaagcccaagaagaatcggtgtttcatgtgcaggaagtag

SEQ ID NO: 40919 - DNA, 642 bp, Artificial Sequence
  derived and/or modified sequence
atggcccaggaaactaaccagacccccggacccatgctgtgtagtactgggtgtggcttctatgggaatcccaggacaaacgggatgtgtagcgtgtgctataaggagcacttgcagagacagcagaactcggggagaatgtcccccatgggaacggcttctggatctaattcacctacaagtgattccgccagcgttcagagggccgacacgtcccttaataactgcgaaggggctgcagggagcaccagtgaaaaatccaggaacgtaccggtggccgctctgccagtgacccaacagatgacagagatgagtatcagccgcgaagacaagattacgactcctaagaccgaggtttctgagccagtggtgactcagccttccccttccgtctctcagccaagcacctcccagtcagaagagaaggcacccgaactccccaaaccaaaaaagaatagatgttttatgtgccggaagaaggtcggtctgaccggatttgactgtcgatgcgggaatctgttctgtgggctgcacagatacagtgataaacacaattgtccatacgactacaaggctgaagctgccgcaaagattagaaaggagaatcctgtagtggtggcggagaaaatacaaaggatctag

SEQ ID NO: 40920 - DNA, 642 bp, Artificial Sequence
  derived and/or modified sequence
atggcgcaggaaaccaatcagacacctgggcctatgctgtgcagcaccggctgtggcttttacggtaaccctaggactaacggcatgtgttccgtgtgctataaggaacatctgcagaggcagcaaaacagtgggcgaatgtcccccatgggtacagcatccggctccaacagtcctacatcagattccgccagcgtacagcgggctgatacctccctgaataattgtgaaggagcagctggcagcacgagtgaaaagagccgaaatgttcctgtggccgcacttcctgtcacccagcagatgacagagatgtcaatcagtagagaggataaaatcacaacaccgaaaaccgaggttagtgagcccgttgtgacccagccctccccctcggtcagccagccctcaacttctcagtctgaggaaaaggctccagaattaccaaaacccaaaaagaaccgctgtttcatgtgccgcaagaaggtgggactgaccggctttgattgtcggtgcggcaacctcttctgtggcctgcatcgctatagcgacaaacataactgcccctacgattacaaggctgaggccgctgcgaagatccgcaaggagaaccccgtggtggtcgccgagaaaatccagcgcatttag

SEQ ID NO: 40921 - DNA, 5728 bp, Artificial Sequence
  derived and/or modified sequence
ctcttttccctcacagcccgggcgccgggcggcgagtgcgttagtcggccgggacgcggagctgtgtgcatctcctacgcgggctcgctcgctcccgggagccgcgcagcttccccggcggtggcaggagcggcgaagagcgccatcagcgggcccttacggccccaggcctcgcggcgcgcggtccgctcgccctcctcgtccgcccaacctgcggcctgtggaggcgtgaggcgacgacaggcgagcgcctcgagcagcgttagccgctgcggccgccggtcctccctccacctcctcctcggccccccctcgcttccctcctcccacttcccgagctccggcgtgtcccggccacgctcgacgctgctgcaggaacaaaggaagaccccgcggcggcggcggcgccacctccgcctgctgctccgacccgctcccggcccgcggcggcggcaccagggcgcccggctcagccttcccggaggcctcggcccggcctcatcgtgccggcttcgcgcgcgaacccggctttcgcatttgggaccctgcaggaaaaatatggctcaggagactaaccagaccccggggcccatgctgtgtagcacaggatgtggcttttatggaaatcctaggacaaatggaatgtgttcagtttgctacaaagaacatcttcagaggcagcaaaatagtggcagaatgagcccaatgggaacagctagtggttccaacagtcctacctcagattctgcatctgtacagagagcagacactagcttaaacaactgtgaaggtgctgctggcagcacatctgaaaaatcaagaaatgtgcctgtggctgccttgcctgtaactcagcaaatgacagaaatgagcatttcaagagaggacaaaataactaccccgaaaacagaggtgtcagagccagttgtcactcagcccagtccatcagtttctcagcccagtacttctcagagtgaagaaaaagctcctgaattgcccaaaccaaagaaaaacagatgtttcatgtgcagaaagaaagttggtcttacagggtttgactgccgatgtggaaatttgttttgtggacttcaccgttactctgacaagcacaactgtccgtatgattacaaagcagaagctgcagcaaaaatcagaaaagagaatccagttgttgtggctgaaaaaattcagagaatataaattacttcttgtgaagagactgaaactttgtttttattttaatatatcgtaggaaaacattaaagagcagatgcatggccatttttctttgatgttctccagagttttacattacacttgtctgtcttataattgatattttaggatgtttgggtgtttgttacaggcagaattggatagatacagccctacaaatgtatatgccctcccctgaaaaaaattggatgaaaatctgcacagcaaagtgaaacacacagataataggaacaaaatgtagttcccatgtgccaaacaaaataaatgaaatctctgcatgtttgcagcatatctgccttttgggaatgtaatcaaggtataatctttggctagtgttatgtgcctgtatttttttaaaatggtacaccagaaaaggactggcagtctacttctaccatagttaaacttcaccctctttaatttcacaacatattctttggaagcaggaagaaatgctcataaagaggatcagaccttctttcccgtgaaaccagtatttggcgccatatataagcctggttaaattggtcatctaaagctgtcaaataagacattctgtgaaaggtaaacatcgaaactggttataagtaaaaccatcaagccaacaacagggtcttgagataacctttgaagcttattgtactggcctgcaccagaagatgtctgcattactcattgctaaaaatgtgtagcacagaactgcactaggattaatttgtttacaagaagaaatttaaactctacgtttggttttcacatacagcagctctattgaataacatgcatctgaattttaagttgcaaaggtatctgaataatttttcatgtgcatcttttgtcgaatgttttggttcaagaaagaatgtttaaagctttttaaaagacttcagttcttaatgtaactgtacccttctgcatggaaaatcataaccaacatggctgcagtagacttcttagtggtatccagcaccacttgcagagggctgctttatcatattgtacttgggtgtaggactctagtgttcttgggtgtattgcatgggctgcattatctacagcattgtacaataacaactagaaaaggcagtatacttcactgatgcttgtctggtaataatcacttctgtgttataatggaaggttttttgtgatgtatgaaacttgtgttttttatatataaatgagtatagttagtgttgtggtaatgcctgttttcatctgtaaatagttaagtatgtacacgaggcactacttctgatttattgcaatgttcagtcctagtttttacttttattcttaaagcattcagttttgctttcaattttatgtaccttagttctgagttagacctgcagatgtgtacagatagttcatatttatgtattgcacataatcatgctattcagcattgatgctatattgtattatgtaaataataaaagccatgtacagagggaaacttcacttgttcattgggtttttaagccatagttggagtcctaaagggggaaaattagaaaatgttactttacatggctatataattttttttcctttgccatcgctgaacttgttcaagtgataatcaagagatattagaagcatttgcaggtatgatacctgataggcagtttatttttgaagaattcaataggcacctttgggattaaaacaattttaaaatttgagaaagatgaaatttgaacaattatggcctacctcgcttctccatgttgtaaaagatgatgttttatgacaattctgaagaagaaagtaggtatgacttagtttacaaaaagagttctgttttatttctgttttgggtttggctctaatacagagattcacccatggacttggtctctgtagcgtttatgccagatcataaagaacaaggggtgacaggtacatgttgactttacctggggtaaatgattaccagagtgcaactgttgcttctctgtgatggagtttggggtggaaataccctagttttatctgtcagttctttgcatgctgctacttttgcttcaagttagggaggtacatatgtatgtcaaagttcctatactgacatagggtagtatttctctgaatatgaaaagtcacaattgagttgaaaatttagaagttgaagatttagaagggcaacttaatttttcaagttaaaaatggaagtaagagtggtatagagaaggtaagatgagccctcggactccatcactctgaaggtctgagtagtagcaagagatagatttttgtttggccaggctgcagtgcaatggcgtaatcttggctcactgcaacctctgcctcctgggttcaagtgattctcctgcctctgcctcctaagtagctgggatcacaggcaccagccaccacgcccagctaatttttgtatttttaatagagacagtttctccatgttggtcaggctggtcttgaactcctgacctcaggtgagctgcccgcctcggcctcccaaagtgctgggattacaggcgtgaggcaccgcacccggccaatcagttttttttgttttttttttgtttgtttgttttacaagaaacattaaaccagatcagaacaaagatttgtcagggttgtccattgactggggagaaagggaatcagtgtgtaaggcacctgagaggactcagttctacccaaattcttgcattcaaacctgaatgcaaggccatgaagtcctttgaaatgtacagatattaagcaatttaataatataccatgtttcccttacataagcagacaaatatttacacccccatgacctgaagttttgttaggctgtgaccacatgaattcgcagtataaatgggtgagtcctttttgaaaacctcatcttcagtgtgcctgatctgtaaaactagagcctcaggtttgatcctaggtaggcttcccacaacgtggggaaaattagtttgtgagggaaagctgtttctgagcattatggcatagtgattaagatgagggaccctggaaccagcccgtgattttgggcaagttattttaggtccactttggactgcttcatctcttaaatgaagacagcaaccaccttcaggagtgtgaaggtgacaacacttaaaactgtgcctggcacattgtatttgctattgtcttaatgttctggaataatggtttccataacttgggaagaaaactttgagaacaggattggttacatcaagttgtatagtgaaaagataaagatttgttatttaaacttgcagtttaaagtcattagaatcattcttttccgtaaggctttctttgcaagagatctgcattaaataaagttgctaggaaataactaaaattggggaaataatctaataatagcaagatgttaagcatactattattgtattttgggggttggtaataacattcacatggatttatcaatacacactgagaagcaaagcctctcaagctgtcccatatcctccatttcaaaggcacacatacattttaggtaactcataatttagaaaggttatttaatcttttccacatgtaaatatttgaatatgtacaaagacttgatttgactcttgtctgtttttgttttgttttgtttgtttgagacagaggctccgtcgcccaggctggagtaaaatggcatggtctcagctcactgcaagttccgcctcccgggttcacgccattctcctggctcagcctccggagtagttgggactacaggcacccgtcaccacacctggctaatgttttttgttttttgggtttttttgtatttttagtagagagagggtttcaccgtgttagccagggtggtctcgatctcctgacctcatgatccgcccaccccggcctcccaaaatgctgggattacaggtgtgagccactgcgcctggccgactcttgtctgtttgaatgcaaagttctcaatagtggtttttgtccataagtattaacttataattttggagagtgataggtatggttgctggttgattagcaataagattatgtagccttaaactagctagaagagtttgcatgggtgaggcaacaggctgttaacaaaaagaaactggaaatacagtttcccctgtttgtttctcctgtttgtacaatctgctttaaaaacaagtgaacatgcaccatgtcagtcatggtgaatcggccaacagccagcccttgccagttgacatcacagtctaagatgggaaactggtacagatagacatgaagagagcttagcagtggttgaggtggtgactaaatatacagtcattgaataaataccgtgtagcaaatgtaaaaaaaaaaaaaaaagtacaacagaatacaaaagtgccatttaatattttatagctatttctatgcacaagtgctggttttaaatttatataaaagcaaagactgtttctgtgttttcttccagagtatttctgttacagccatagaagtaaagttaataaatgtaagactttttttgttt

SEQ ID NO: 40922 - DNA, 1073 bp, Artificial Sequence
  derived and/or modified sequence
ccggggcgccgcgggccaatggcgaagccggagcaggccgcggatggcggcgtccgggggaggggagcccgcccgccagcccaggaagcacaaagacggaggcgtcatcctgtcgtcgtggcccgagacctggctcccggcgtccctggctcgctccacagcacggccctgaaaaggagcctttaaaagtcaattctactccatttggcaaagagggaactgaaatctggaaagtaaggacttgcccaaggtcactgacttagtggcagactagagacttgaactcaggtctccattcccagcagaaaaatatggctcaggagactaaccagaccccggggcccatgctgtgtagcacaggatgtggcttttatggaaatcctaggacaaatggaatgtgttcagtttgctacaaagaacatcttcagaggcagcaaaatagtggcagaatgagcccaatgggaacagctagtggttccaacagtcctacctcagattctgcatctgtacagagagcagacactagcttaaacaactgtgaaggtgctgctggcagcacatctgaaaaatcaagaaatgtgcctgtggctgccttgcctgtaactcagcaaatgacagaaatgagcatttcaagagaggacaaaataactaccccgaaaacagaggtgtcagagccagttgtcactcagcccagtccatcagtttctcagcccagtacttctcagagtgaagaaaaagctcctgaattgcccaaaccaaagaaaaacagatgtttcatgtgcagaaagaaagttggtcttacagggtttgactgccgatgtggaaatttgttttgtggacttcaccgttactctgacaagcacaactgtccgtatgattacaaagcagaagctgcagcaaaaatcagaaaagagaatccagttgttgtggctgaaaaaattcagagaatataaattacttcttgtgaagagactgaaactttgtttttattttaatatatcgtaggaaaacattaaagagcagatgcatggccatttttctttgatgttctccagagttttacattacacttg

SEQ ID NO: 40923 - DNA, 690 bp, Artificial Sequence
  derived and/or modified sequence
ggctccttgttgccgggccgggggcgggagtgaagggaccggggcgccgcgggccaatggcgaagccggagcaggccgcggatggcggcgtccgggggaggggagcccgcccgccagcccaggaagcacaaagacggaggcgtcatcctgtcgtcgtggcccgagacctggctcccggcgtccctggctcgctccacagcacgcagaaaaatatggctcaggagactaaccagaccccggggcccatgctgtgtagcacaggatgtggcttttatggaaatcctaggacaaatggaatgtgttcagtttgctacaaagaacatcttcagaggcagcaaaatagtggcagaatgagcccaatgggaacagctagtggttccaacagtcctacctcagattctgcatctgtacagagagcagacactagcttaaacaactgtgaaggtgctgctggcagcacatctgaaaaatcaagaaatgtgcctgtggctgccttgcctgtaactcagcaaatgacagaaatgagcatttcaagagaggacaaaataactaccccgaaaacagaggtgtcagagccagttgtcactcagcccagtccatcagtttctcagcccagtacttctcagagtgaagaaaaagctcctgaattgcccaaaccaaagaaaaacagatgtttcatgtgcagaaaga

SEQ ID NO: 40924 - DNA, 2686 bp, Artificial Sequence
  derived and/or modified sequence
acagcccgggcgccgggcggcgagtgcgttagtcggccgggacgcggagctgtgtgcatctcctacgcgggctcgctcgctcccgggagccgcgcagcttccccggcggtggcaggagcggcgaagagcgccatcagcgggcccttacggccccaggcctcgcggcgcgcggtccgctcgccctcctcgtccgcccaacctgcggcctgtggaggcgtgaggcgacgacaggcgagcgcctcgagcagcgttagccgctgcggccgccggtcctccctccacctcctcctcggccccccctcgcttccctcctcccacttcccgagctccggcgtgtcccggccacgctcgacgctgctgcaggaacaaaggaagaccccgcggcggcggcggcgccacctccgcctgctgctccgacccgctcccggcccgcggcggcggcaccagggcgcccggctcagccttcccggaggcctcggcccggcctcatcgtgccggcttcgcgcgcgaacccggctttcgcatttgggaccctgcaggcagaaaaatatggctcaggagactaaccagaccccggggcccatgctgtgtagcacaggatgtggcttttatggaaatcctaggacaaatggaatgtgttcagtttgctacaaagaacatcttcagaggcagcaaaatagtggcagaatgagcccaatgggaacagctagtggttccaacagtcctacctcagattctgcatctgtacagagagcagacactagcttaaacaactgtgaaggtgctgctggcagcacatctgaaaaatcaagaaatgtgcctgtggctgccttgcctgtaactcagcaaatgacagaaatgagcatttcaagagaggacaaaataactaccccgaaaacagaggtgtcagagccagttgtcactcagcccagtccatcagtttctcagcccagtacttctcagagtgaagaaaaagctcctgaattgcccaaaccaaagaaaaacagatgtttcatgtgcagaaagaaagttggtcttacagggtttgactgccgatgtggaaatttgttttgtggacttcaccgttactctgacaagcacaactgtccgtatgattacaaagcagaagctgcagcaaaaatcagaaaagagaatccagttgttgtggctgaaaaaattcagagaatataaattacttcttgtgaagagactgaaactttgtttttattttaatatatcgtaggaaaacattaaagagcagatgcatggccatttttctttgatgttctccagagttttacattacacttgtctgtcttataattgatattttaggatgtttgggtgtttgttacaggcagaattggatagatacagccctacaaatgtatatgccctcccctgaaaaaaattggatgaaaatctgcacagcaaagtgaaacacacagataataggaacaaaatgtagttcccatgtgccaaacaaaataaatgaaatctctgcatgtttgcagcatatctgccttttgggaatgtaatcaaggtataatctttggctagtgttatgtgcctgtatttttttaaaatggtacaccagaaaaggactggcagtctacttctaccatagttaaacttcaccctctttaatttcacaacatattctttggaagcaggaagaaatgctcataaagaggatcagaccttctttcccgtgaaaccagtatttggcgccatatataagcctggttaaattggtcatctaaagctgtcaaataagacattctgtgaaaggtaaacatcgaaactggttataagtaaaaccatcaagccaacaacagggtcttgagataacctttgaagcttattgtactggcctgcaccagaagatgtctgcattactcattgctaaaaatgtgtagcacagaactgcactaggattaatttgtttacaagaagaaatttaaactctacgtttggttttcacatacagcagctctattgaataacatgcatctgaattttaagttgcaaaggtatctgaataatttttcatgtgcatcttttgtcgaatgttttggttcaagaaagaatgtttaaagctttttaaaagacttcagttcttaatgtaactgtacccttctgcatggaaaatcataaccaacatggctgcagtagacttcttagtggtatccagcaccacttgcagagggctgctttatcatattgtacttgggtgtaggactctagtgttcttgggtgtattgcatgggctgcattatctacagcattgtacaataacaactagaaaaggcagtatacttcactgatgcttgtctggtaataatcacttctgtgttataatggaaggttttttgtgatgtatgaaacttgtgttttttatatataaatgagtatagttagtgttgtggtaatgcctgttttcatctgtaaatagttaagtatgtacacgaggcactacttctgatttattgcaatgttcagtcctagtttttacttttattcttaaagcattcagttttgctttcaattttatgtaccttagttctgagttagacctgcagatgtgtacagatagttcatatttatgtattgcacataatcatgctattcagcattgatgctatattgtattatgtaaataataaaagccatgtacagagggaaa

SEQ ID NO: 40925 - DNA, 2785 bp, Artificial Sequence
  derived and/or modified sequence
gggacgcggagctgtgtgcatctcctacgcgggctcgctcgctcccgggagccgcgcagcttccccggcggtggcaggagcggcgaagagcgccatcagcgggcccttacggccccaggcctcgcggcgcgcggtccgctcgccctcctcgtccgcccaacctgcggcctgtggaggcgtgaggcgacgacaggcgagcgcctcgagcagcgttagccgctgcggccgccggtcctccctccacctcctcctcggccccccctcgcttccctcctcccacttcccgagctccggcgtgtcccggccacgctcgacgctgctgcaggaacaaaggaagaccccgcggcggcggcggcgccacctccgcctgctgctccgacccgctcccggcccgcggcggcggcaccagggcgcccggctcagccttcccggaggcctcggcccggcctcatcgtgccggcttcgcgcgcgaacccggctttcgcatttgggaccctgcagggccctgaaaaggagcctttaaaagtcaattctactccatttggcaaagagggaactgaaatctggaaagtaaggacttgcccaaggtcactgacttagtggcagactagagacttgaactcaggtctccattcccagcagaaaaatatggctcaggagactaaccagaccccggggcccatgctgtgtagcacaggatgtggcttttatggaaatcctaggacaaatggaatgtgttcagtttgctacaaagaacatcttcagaggcagcaaaatagtggcagaatgagcccaatgggaacagctagtggttccaacagtcctacctcagattctgcatctgtacagagagcagacactagcttaaacaactgtgaaggtgctgctggcagcacatctgaaaaatcaagaaatgtgcctgtggctgccttgcctgtaactcagcaaatgacagaaatgagcatttcaagagaggacaaaataactaccccgaaaacagaggtgtcagagccagttgtcactcagcccagtccatcagtttctcagcccagtacttctcagagtgaagaaaaagctcctgaattgcccaaaccaaagaaaaacagatgtttcatgtgcagaaagaaagttggtcttacagggtttgactgccgatgtggaaatttgttttgtggacttcaccgttactctgacaagcacaactgtccgtatgattacaaagcagaagctgcagcaaaaatcagaaaagagaatccagttgttgtggctgaaaaaattcagagaatataaattacttcttgtgaagagactgaaactttgtttttattttaatatatcgtaggaaaacattaaagagcagatgcatggccatttttctttgatgttctccagagttttacattacacttgtctgtcttataattgatattttaggatgtttgggtgtttgttacaggcagaattggatagatacagccctacaaatgtatatgccctcccctgaaaaaaattggatgaaaatctgcacagcaaagtgaaacacacagataataggaacaaaatgtagttcccatgtgccaaacaaaataaatgaaatctctgcatgtttgcagcatatctgccttttgggaatgtaatcaaggtataatctttggctagtgttatgtgcctgtatttttttaaaatggtacaccagaaaaggactggcagtctacttctaccatagttaaacttcaccctctttaatttcacaacatattctttggaagcaggaagaaatgctcataaagaggatcagaccttctttcccgtgaaaccagtatttggcgccatatataagcctggttaaattggtcatctaaagctgtcaaataagacattctgtgaaaggtaaacatcgaaactggttataagtaaaaccatcaagccaacaacagggtcttgagataacctttgaagcttattgtactggcctgcaccagaagatgtctgcattactcattgctaaaaatgtgtagcacagaactgcactaggattaatttgtttacaagaagaaatttaaactctacgtttggttttcacatacagcagctctattgaataacatgcatctgaattttaagttgcaaaggtatctgaataatttttcatgtgcatcttttgtcgaatgttttggttcaagaaagaatgtttaaagctttttaaaagacttcagttcttaatgtaactgtacccttctgcatggaaaatcataaccaacatggctgcagtagacttcttagtggtatccagcaccacttgcagagggctgctttatcatattgtacttgggtgtaggactctagtgttcttgggtgtattgcatgggctgcattatctacagcattgtacaataacaactagaaaaggcagtatacttcactgatgcttgtctggtaataatcacttctgtgttataatggaaggttttttgtgatgtatgaaacttgtgttttttatatataaatgagtatagttagtgttgtggtaatgcctgttttcatctgtaaatagttaagtatgtacacgaggcactacttctgatttattgcaatgttcagtcctagtttttacttttattcttaaagcattcagttttgctttcaattttatgtaccttagttctgagttagacctgcagatgtgtacagatagttcatatttatgtattgcacataatcatgctattcagcattgatgctatattgtattatgtaaataataaaagccatgtacagagggaaa

SEQ ID NO: 40926 - protein, 1140 aa, Artificial Sequence
  derived and/or modified sequence
MWLKPEEVLLKNALKLWVTQKSSCYFILQRRRGHGEGGGRLTGRLVGALDAVLDSNARVAPFRILLQVPGSQVYSPIACGATLEEINQHWDWLEQNLLHTLSVFDNKDDIASFVKGKVKALIAEETSSRLAEQEEEPEKFREALVKFEARFNFPEAEKLVTYYSCCCWKGRVPRQGWLYLSINHLCFYSFFLGKELKLVVPWVDIQKLERTSNVFLTDTIRITTQNKERDFSMFLNLDEVFKVMEQLADVTLRRLLDNEVFDLDPDLQEPSQITKRDLEARAQNEFFRAFFRLPRKEKLHAVVDCSLWTPFSRCHTTGRMFASDSYICFASREDGCCKIILPLREVVSIEKMEDTSLLPHPIIVSIRSKVAFQFIELRDRDSLVEALLARLKQVHANHPVHYDTSADDDMASLVFHSTSMCSDHRFGDLEMMSSQNSEESEKEKSPLMHPDALVTAFQQSGSQSPDSRMSREQIKISLWNDHFVEYGRTVCMFRTEKIRKLVAMGIPESLRGRLWLLFSDAVTDLASHPGYYGNLVEESLGKCCLVTEEIERDLHRSLPEHPAFQNETGIAALRRVLTAYAHRNPKIGYCQSMNILTSVLLLYTKEEEAFWLLVAVCERMLPDYFNHRVIGAQVDQSVFEELIKGHLPELAEHMNDLSALASVSLSWFLTLFLSIMPLESAVNVVDCFFYDGIKAIFQLGLAVLEANAEDLCSSKDDGQALMILSRFLDHIKNEDSPGPPVGSHHAFFSDDQEPYPVTDISDLIRDSYEKFGDQSVEQIEHLRYKHRIRVLQGHEDTTKQNVLRVVIPEVSILPEDLEELYDLFKREHMMSCYWEQPRPMASRHDPSRPYAEQYRIDARQFAHLFQLVSPWTCGAHTEILAERTFRLLDDNMDQLIEFKAFVSCLDIMYNGEMNEKIKLLYRLHIPPALTENDRDSQSPLRNPLLSTSRPLVFGKPNGDAVDYQKQLKQMIKDLAKEKDKTEKELPKMSQREFIQFCKTLYSMFHEDPEENDLYQAIATVTTLLLQIGEVGQRGSSSGSCSQECGEELRASAPSPEDSVFADTGKTPQDSQAFPEAAERDWTVSLEHILASLLTEQSLVNFFEKPLDMKSKLENAKINQYNLKTFEMSHQSQSELKLSNL

SEQ ID NO: 40927 - DNA, 3423 bp, Artificial Sequence
  derived and/or modified sequence
atgtggctgaagcccgaggaggtgctgctgaagaacgccctgaagctgtgggtgacccagaagagcagctgctacttcatcctgcagagaagaagaggccacggcgagggcggcggcagactgaccggcagactggtgggcgccctggacgccgtgctggacagcaacgccagagtggcccccttcagaatcctgctgcaggtgcccggcagccaggtgtacagccccatcgcctgcggcgccaccctggaggagatcaaccagcactgggactggctggagcagaacctgctgcacaccctgagcgtgttcgacaacaaggacgacatcgccagcttcgtgaagggcaaggtgaaggccctgatcgccgaggagaccagcagcagactggccgagcaggaggaggagcccgagaagttcagagaggccctggtgaagttcgaggccagattcaacttccccgaggccgagaagctggtgacctactacagctgctgctgctggaagggcagagtgcccagacagggctggctgtacctgagcatcaaccacctgtgcttctacagcttcttcctgggcaaggagctgaagctggtggtgccctgggtggacatccagaagctggagagaaccagcaacgtgttcctgaccgacaccatcagaatcaccacccagaacaaggagagagacttcagcatgttcctgaacctggacgaggtgttcaaggtgatggagcagctggccgacgtgaccctgagaagactgctggacaacgaggtgttcgacctggaccccgacctgcaggagcccagccagatcaccaagagagacctggaggccagagcccagaacgagttcttcagagccttcttcagactgcccagaaaggagaagctgcacgccgtggtggactgcagcctgtggacccccttcagcagatgccacaccaccggcagaatgttcgccagcgacagctacatctgcttcgccagcagagaggacggctgctgcaagatcatcctgcccctgagagaggtggtgagcatcgagaagatggaggacaccagcctgctgccccaccccatcatcgtgagcatcagaagcaaggtggccttccagttcatcgagctgagagacagagacagcctggtggaggccctgctggccagactgaagcaggtgcacgccaaccaccccgtgcactacgacaccagcgccgacgacgacatggccagcctggtgttccacagcaccagcatgtgcagcgaccacagattcggcgacctggagatgatgagcagccagaacagcgaggagagcgagaaggagaagagccccctgatgcaccccgacgccctggtgaccgccttccagcagagcggcagccagagccccgacagcagaatgagcagagagcagatcaagatcagcctgtggaacgaccacttcgtggagtacggcagaaccgtgtgcatgttcagaaccgagaagatcagaaagctggtggccatgggcatccccgagagcctgagaggcagactgtggctgctgttcagcgacgccgtgaccgacctggccagccaccccggctactacggcaacctggtggaggagagcctgggcaagtgctgcctggtgaccgaggagatcgagagagacctgcacagaagcctgcccgagcaccccgccttccagaacgagaccggcatcgccgccctgagaagagtgctgaccgcctacgcccacagaaaccccaagatcggctactgccagagcatgaacatcctgaccagcgtgctgctgctgtacaccaaggaggaggaggccttctggctgctggtggccgtgtgcgagagaatgctgcccgactacttcaaccacagagtgatcggcgcccaggtggaccagagcgtgttcgaggagctgatcaagggccacctgcccgagctggccgagcacatgaacgacctgagcgccctggccagcgtgagcctgagctggttcctgaccctgttcctgagcatcatgcccctggagagcgccgtgaacgtggtggactgcttcttctacgacggcatcaaggccatcttccagctgggcctggccgtgctggaggccaacgccgaggacctgtgcagcagcaaggacgacggccaggccctgatgatcctgagcagattcctggaccacatcaagaacgaggacagccccggcccccccgtgggcagccaccacgccttcttcagcgacgaccaggagccctaccccgtgaccgacatcagcgacctgatcagagacagctacgagaagttcggcgaccagagcgtggagcagatcgagcacctgagatacaagcacagaatcagagtgctgcagggccacgaggacaccaccaagcagaacgtgctgagagtggtgatccccgaggtgagcatcctgcccgaggacctggaggagctgtacgacctgttcaagagagagcacatgatgagctgctactgggagcagcccagacccatggccagcagacacgaccccagcagaccctacgccgagcagtacagaatcgacgccagacagttcgcccacctgttccagctggtgagcccctggacctgcggcgcccacaccgagatcctggccgagagaaccttcagactgctggacgacaacatggaccagctgatcgagttcaaggccttcgtgagctgcctggacatcatgtacaacggcgagatgaacgagaagatcaagctgctgtacagactgcacatcccccccgccctgaccgagaacgacagagacagccagagccccctgagaaaccccctgctgagcaccagcagacccctggtgttcggcaagcccaacggcgacgccgtggactaccagaagcagctgaagcagatgatcaaggacctggccaaggagaaggacaagaccgagaaggagctgcccaagatgagccagagagagttcatccagttctgcaagaccctgtacagcatgttccacgaggaccccgaggagaacgacctgtaccaggccatcgccaccgtgaccaccctgctgctgcagatcggcgaggtgggccagagaggcagcagcagcggcagctgcagccaggagtgcggcgaggagctgagagccagcgcccccagccccgaggacagcgtgttcgccgacaccggcaagaccccccaggacagccaggccttccccgaggccgccgagagagactggaccgtgagcctggagcacatcctggccagcctgctgaccgagcagagcctggtgaacttcttcgagaagcccctggacatgaagagcaagctggagaacgccaagatcaaccagtacaacctgaagaccttcgagatgagccaccagagccagagcgagctgaagctgagcaacctgtag

SEQ ID NO: 40928 - DNA, 3423 bp, Artificial Sequence
  derived and/or modified sequence
atgtggctgaagcctgaagaggtactgctgaagaatgccttgaaactgtgggttacacagaaatcatcctgttacttcatcctccagcgccgaagagggcacggcgagggcggcggacgcctgacaggtagacttgttggcgccttggacgccgtgctggacagcaatgctagagtcgctcccttccggatactcctgcaagtaccgggctctcaggtgtactccccaatcgcctgcggcgccacactggaggaaataaatcagcattgggactggctcgaacagaatttgttacatacactttccgtattcgacaacaaggatgatattgcttccttcgtcaaagggaaggtcaaagcactgattgctgaggagactagcagtcggctggctgagcaggaagaagaaccagagaagtttcgggaggccctggtcaaatttgaagcccgcttcaactttcccgaggccgagaagctggtcacttactacagttgctgttgctggaagggccgcgtcccccgacaaggctggctttatctctcaattaaccacttgtgcttttactcctttttcttgggcaaagagttgaagctggtggtgccatgggtggatatccagaaactcgagcgaacatccaacgtctttttgaccgacactattaggataaccacccagaacaaggagagggacttttccatgtttttaaatctagacgaggtatttaaggtaatggaacagctcgcggacgtcaccttgcgacgcctgctcgacaacgaggtgtttgacctggatccagatctgcaggagccttctcagatcaccaagcgagatcttgaagctcgggctcagaacgaattttttcgggctttcttcagactgcccagaaaggaaaaattgcacgccgtggtcgactgctctttgtggactccgttctccagatgccacactactggacgcatgttcgcctctgattcctacatttgctttgcttcgagagaggacgggtgctgtaagatcatcctgcctctcagggaagtcgtgagcattgagaagatggaggatacaagcctcctgccccaccccatcattgttagcattcggtccaaggtagcgtttcagtttatagagctgagagatagggacagcttagtcgaggcattgttggcccgtctcaaacaggttcatgccaatcatccagtgcattacgacacaagcgctgacgacgacatggcatctctcgtgtttcatagcacttccatgtgttccgaccatcggttcggagatctggaaatgatgtcgagccaaaattcagaagaatctgagaaagagaagtcccccctgatgcaccccgatgctttggtcactgcctttcaacaaagcggatcacagtcacctgattcccgcatgagtcgagagcagattaagattagcctctggaacgatcactttgtcgaatatggcaggaccgtgtgtatgttcagaaccgagaagattaggaagctggtcgcaatggggatcccagagtccttgcgggggcggctctggctgctgtttagtgatgctgtcactgatcttgccagccatccaggttactacgggaacttagtggaggaatccctgggaaagtgttgcctggtgactgaagaaatcgagcgggatctgcacagatctctgcctgaacaccctgcctttcagaacgaaacgggtatagccgctctgcgtcgagtgttgacagcctacgcacatcggaaccccaaaatcgggtattgccagagtatgaacatactcacaagtgtgttactgctgtatacaaaggaagaggaggcgttttggctgctggttgccgtctgcgagcggatgctgcctgactatttcaaccacagagtgattggcgcacaggtggaccagagcgtttttgaggagctcattaagggccatctcccagagttggctgagcatatgaatgatctgtctgccctggcgtctgtgagcttgtcctggttcctcaccctgtttctgagcatcatgccactcgaatctgcggtcaacgtggtcgactgcttcttttatgatggcattaaagcaatttttcaactgggactcgccgttctagaggctaatgccgaggacttatgttcaagcaaagatgatggacaggcccttatgatcttgtccaggttcctggatcatatcaagaacgaggattcaccaggacctcctgttggctctcaccatgccttcttctcggatgaccaggagccatatccagtaactgacatttccgacctcatcagagacagctacgagaaattcggggaccaatccgtcgagcagatcgaacatctccgctataaacatcgaatacgcgtactgcagggacacgaagacaccactaagcagaacgtgttgagagtggtgatcccagaagtgtcgatactccctgaagaccttgaggagttgtatgatctgtttaagagagagcatatgatgagttgctattgggaacagccgaggccaatggcttctcggcacgacccctcaagaccatacgcagaacagtatcggatagacgctcggcagtttgctcacctctttcagcttgtctccccatggacatgtggcgcccacaccgagattttggcagagcgcactttcaggttattagacgacaacatggaccagctaattgagtttaaggcctttgtgtcttgtttggatattatgtataatggagagatgaatgagaaaatcaagttgctgtacagactgcacattccccccgccctgactgaaaatgatagggactctcaatctcccctgaggaaccccctcttgtctacctcccgccccctcgtattcggaaagccaaatggagatgccgtggactatcagaagcaactcaagcaaatgattaaggatctagcgaaagagaaagataagaccgagaaggagttaccgaaaatgagtcaaagggagtttatccagttttgtaaaaccctgtactctatgtttcatgaggaccccgaagagaatgacctgtaccaggctatcgctacagtaacaacacttctcctgcagatcggtgaggtagggcaaaggggctccagcagcgggagctgctcccaggagtgtggcgaggaactgcgggcgagcgctccttcccccgaagactctgtgttcgctgacaccgggaaaactccccaggattctcaagcatttcccgaggcagcagaacgcgactggacagtgtccctcgaacatatacttgcttctctattgaccgagcagagcctggtcaatttctttgaaaaacccctggacatgaagagcaaattggagaatgccaagatcaaccaatacaatttgaagaccttcgagatgtcgcatcagagtcagtccgagctgaaactctctaacctgtag

SEQ ID NO: 40929 - DNA, 3423 bp, Artificial Sequence
  derived and/or modified sequence
atgtggctgaagccagaggaggtgctgctgaagaatgccctgaagctgtgggtgacccagaagagcagctgctacttcatcctgcagaggagaagaggccacggggagggcggcggccgcctgaccggccgcctggtgggcgccctggatgctgtgctggacagcaatgcccgggtggcccccttccgcatcctgctgcaggtgcccggcagccaggtgtacagccccatcgcctgtggggccaccctggaggagatcaaccagcactgggactggctggagcagaacctgctgcacaccctgtctgtgtttgacaacaaggatgacatcgccagctttgtgaagggcaaggtgaaggccctgattgctgaggagaccagcagccggctggccgagcaggaggaggagcctgagaagttccgggaggccctggtgaagtttgaggcccgcttcaacttccctgaggccgagaagctggtgacctactacagctgctgctgctggaagggccgggtgccccggcagggctggctgtacctgagcatcaaccacctgtgcttctacagcttcttcctgggcaaggagctgaagctggtggtgccctgggtggacatccagaagctggagaggaccagcaatgtgttcctgacagacaccatccgcatcaccacccagaacaaggagcgggacttctccatgttcctgaacctggatgaggtgttcaaggtgatggagcagctggctgatgtgaccctgcggcggctgctggacaatgaggtgtttgacctggaccctgacctgcaggagcccagccagatcaccaagagggacctggaggcccgggcccagaatgagttcttccgggccttcttccggctgcccaggaaggagaagctgcatgctgtggtggactgcagcctgtggacccccttcagccgctgccacaccactggaaggatgtttgccagtgacagctacatctgctttgccagcagagaagatggctgctgcaagatcatcctgcccctgcgggaggtggtgtccattgagaagatggaggacaccagcctgctgccccaccccatcatcgtgtccatccgcagcaaggtggccttccagttcatcgagctgcgggaccgggacagcctggtggaggccctgctggcccggctgaagcaggtgcacgccaaccaccctgtgcactatgacaccagcgcagatgatgacatggccagcctggtgttccacagcacctccatgtgcagcgaccacagatttggagacctggagatgatgagcagccagaacagcgaggagagcgagaaggagaagagccccctgatgcacccagatgccctggtgacagccttccagcagagcggcagccagagcccagacagcaggatgagccgggagcagatcaagatcagcctgtggaatgaccactttgtggagtatggccgcacagtgtgcatgttcagaacagagaagatcaggaagctggtggccatgggcatccctgagagcctgcggggccgcctgtggctgctcttcagtgatgctgtgacagacctggccagccaccctggctactacggcaacctggtggaggagagcctgggcaagtgctgcctggtgacagaggagattgaaagagacctgcacaggagcctgcctgagcacccagccttccagaatgagaccggcattgctgccctgcggcgggtgctgacagcctatgcccacaggaaccccaagattggctactgccagagcatgaacatcctgacctctgtgctgctgctgtacaccaaggaggaggaggccttctggctgctggtggccgtgtgtgagaggatgctgcctgactacttcaaccacagggtcatcggggcccaggtggaccagagcgtgtttgaggagctgatcaagggccacctgcctgagctggccgagcacatgaatgacctgagcgccctggcctctgtgtccctgtcctggttcctgaccctcttcctgagcatcatgcccctggagagcgctgtgaatgtggtggactgcttcttctatgatggcatcaaggccatcttccagctgggcctggccgtgctggaggccaatgctgaggacctgtgcagcagcaaggatgatggccaggccctgatgatcctgagccgcttcctggaccacatcaagaatgaagacagccctggcccccctgtgggcagccaccacgccttcttcagtgatgaccaggagccctaccctgtgacagacatcagtgacctgatccgggacagctatgagaagtttggagaccagagcgtggagcagatcgagcacctgcgctacaagcaccgcatccgggtgctgcagggccacgaggacaccaccaagcagaatgtgctgcgggtggtgattcctgaggtgtccatcctgcctgaggacctggaggagctgtatgacctcttcaagcgggagcacatgatgagctgctactgggagcagccccggcccatggccagcagacatgaccccagccggccctatgcagagcagtacagaattgatgcccggcagtttgcccacctgttccagctggtgagcccctggacctgtggggcccacacagagatcctggccgagaggaccttccggctgctggatgacaacatggaccagctgattgagttcaaggcctttgtgtcctgcctggacatcatgtacaacggggagatgaatgagaagatcaagctgctgtaccgcctgcacatccccccagccctgacagaaaatgaccgggacagccagagccccctgaggaaccccctgctgagcaccagccggcccctggtgtttgggaagcccaatggagatgctgtggactaccagaagcagctgaagcagatgatcaaggacctggccaaggagaaggacaagacagagaaggagctgcccaagatgagccagcgggagttcatccagttctgcaagaccctgtacagcatgtttcatgaggaccctgaggagaatgacctgtaccaggccatcgccaccgtgaccaccctgctgctgcagattggagaggtgggccagaggggcagcagcagcggcagctgcagccaggagtgtggggaggagctgcgggccagcgcccccagccctgaggacagcgtgtttgctgacaccgggaagaccccccaggacagccaggccttccctgaggccgctgagcgggactggacagtgtccctggagcacatcctggccagcctgctgacagagcagagcctggtgaacttctttgagaagcccctggacatgaagagcaagctggagaatgccaagatcaaccagtacaacctgaagacctttgagatgagccaccagagccagagcgagctgaagctgagcaacctgtag

SEQ ID NO: 40930 - DNA, 3423 bp, Artificial Sequence
  derived and/or modified sequence
atgtggctgaagcccgaggaggtgctgctgaagaacgccctgaagttgtgggtgactcagaaaagcagctgttattttatactccaacgccggagggggcacggagaaggcggtggacggcttaccggccgtctcgtgggcgcgctggacgccgtgctggacagcaacgcaagggtcgccccattcaggattttgttgcaggtgcctgggagccaggtatatagcccaatcgcttgcggggccaccctagaggagattaatcagcattgggactggctcgaacagaacctcctccacaccctcagtgtgttcgataataaagacgatatcgcaagctttgtcaaggggaaggtgaaggctctgattgcagaagaaacgtcctcacgtcttgcagaacaggaggaggaacctgagaaattccgcgaagcgctcgtgaaatttgaggctcggttcaacttccctgaagccgaaaaactggtaacttactattcatgctgctgttggaagggtagagtcccacgtcaggggtggctgtacctctccatcaaccacctttgcttttactctttctttcttggcaaggagctaaagctagttgtcccctgggtagacatccaaaagttagaacggacctcgaacgtctttctgactgatactattcgaattacaacacagaacaaggagcgcgatttttccatgttcttgaacttagatgaggtgttcaaggttatggagcagctggctgacgttaccctccgcaggctgctggacaatgaagtgttcgatctggatccggaccttcaggagccaagtcaaatcacaaagagggatttggaggctagggcgcagaatgaatttttccgcgccttcttcagactgccccgcaaggagaagctgcacgctgtggtggactgcagtctgtggactcccttcagcagatgccacacgaccgggagaatgttcgctagtgactcctatatatgctttgccagccgggaagacggctgctgtaagatcatactccccttgcgggaggtggtgagcattgagaagatggaggatacctctcttttacctcacccaatcattgtgtccattcgctctaaggtggcttttcagttcattgagctgagagatcgagactccctggtcgaagcactgttagcaagattgaagcaggttcatgcgaaccaccctgtccattatgatacttctgcagatgacgatatggccagcttggtatttcatagtacaagtatgtgtagtgatcataggttcggtgacttggagatgatgtcttctcagaattccgaggagtctgaaaaagaaaagtccccactgatgcaccccgatgctctggtgacggccttccagcagtccggatcccagagccctgatagcagaatgtcaagagagcagatcaaaattagcctgtggaatgatcatttcgtggagtacggaagaacagtttgtatgttcagaactgagaaaattcgcaaactggtggctatgggcatcccggagtccctgagggggaggctctggctgcttttcagcgacgccgtcacagatttggcatcccaccctggctactatgggaacctcgtggaagagtcactcggcaaatgctgccttgttactgaggaaattgaaagagacctccatcgcagtctcccagaacaccccgcattccaaaatgagaccggcatcgccgctctgagaagagtcctcacagcctatgcccatcggaatccgaaaataggatattgccaatctatgaacatcttgacttccgttctcctgctgtatactaaagaagaagaagccttctggttgctagtcgctgtatgtgaacggatgctccccgactacttcaaccatcgtgttattggtgctcaagtagaccagtcggtgtttgaggagcttatcaagggacacctccccgagttggcagaacatatgaatgatctttctgcactcgcctccgtgtctctaagttggttcctgaccctgttcctgagcatcatgcctctcgagtccgcagttaatgtggtggactgcttcttctatgatgggattaaggcgatattccaattagggctggcagtacttgaggccaatgcagaggatctttgctccagtaaggacgacggtcaggctcttatgattctgtctcgtttccttgaccacattaagaacgaagattcaccggggcctccggtaggcagccatcacgccttcttcagcgacgatcaggagccttatcccgttaccgatatctctgatctaattcgagacagttatgaaaagtttggcgatcaaagcgtcgaacagatcgagcatctaaggtataagcaccggatcagagtactacaggggcacgaagatactaccaaacaaaatgtgctgcgcgttgtgatccctgaggtctccatcttgcctgaggatctggaagagctgtatgacttattcaagagggaacacatgatgagttgctactgggagcagcctcgacctatggccagccgacatgacccctcccgcccttatgctgaacagtatcgcattgatgcccggcagttcgcccatctgtttcagctagtcagcccatggacatgcggtgctcacacagaaatcctcgcagagaggaccttcaggctgctcgacgataacatggaccagctcatcgagtttaaggccttcgtctcttgtctggatataatgtataatggcgaaatgaacgagaaaatcaaactgctgtatagactgcacattccgcccgcactgacagagaatgatcgtgattcccagagtcccttgcgtaacccactgctttcgacatcccgtccacttgtgtttgggaaacccaatggcgacgccgtggattaccagaagcaactaaaacaaatgatcaaggacctggcaaaagagaaagacaagacggagaaggaattgcctaaaatgtctcagcgagaatttatccagttctgcaagaccctctattcaatgtttcacgaggatccagaggaaaatgacctgtatcaggccattgccaccgtgacgacgttgttgctgcagataggcgaggtgggacagcggggaagctcctcaggctcttgctctcaggagtgcggcgaagaactcagagcctctgccccgagcccggaagactctgtgtttgcagacacaggaaagacacctcaggattcgcaggcatttcctgaggccgcagagcgcgactggactgtgagcctggagcacattcttgcaagcttgctgaccgagcagagtctcgtgaatttctttgagaagccactggacatgaagagtaagttagagaacgcaaaaatcaaccagtacaaccttaaaaccttcgaaatgagtcaccagtcgcagagcgaactcaaactgtctaatctctag

SEQ ID NO: 40931 - DNA, 3423 bp, Artificial Sequence
  derived and/or modified sequence
atgtggttgaaacctgaggaagttttattaaagaatgcacttaagctgtgggtgacacagaaatctagctgttattttatcctgcaacgtagaagaggccatggtgagggcggaggacggttaaccggcaggctggtcggtgctctggatgctgtcttagattcaaacgcacgagtggctcctttccgaatcttattgcaggtaccgggttcccaagtttactctcccattgcttgcggagcaactttagaggagattaaccagcattgggattggctggagcaaaaccttttgcacacgctgtcagtctttgataacaaggacgatatagcctcttttgtgaagggcaaggtcaaagctctgattgccgaagaaacctcctcccgccttgccgagcaagaggaggaaccggagaagtttcgtgaggccttggtgaagttcgaggctcgcttcaacttccccgaggccgagaaattggttacatattacagctgttgttgctggaaggggcgtgtaccgaggcagggatggctatacctgtcaataaaccatttgtgtttttactcattcttcttaggcaaggaattaaagctggttgttccctgggtggacatacagaagcttgagcgtactagcaatgtgttcttaacggacacaattagaataaccacccagaacaaggaacgggatttttcaatgttcttaaacctggacgaagtgttcaaagttatggagcagctggccgacgttacactccggcgacttctcgataacgaagtgttcgatctggacccggacctccaggagccaagccagattaccaagcgcgacttggaggccagggcccaaaacgagttcttccgggcttttttccgcttgccacgaaaggaaaaattacatgcggtcgtggattgcagtctgtggaccccattctccagatgtcatacaaccgggagaatgtttgcttccgactcgtacatctgcttcgcctcccgtgaagacggatgctgcaaaatcattctgccactgcgcgaggtcgtgagtatcgaaaaaatggaagacacgagtcttctgcctcaccccatcatcgtctccataaggtctaaggtggcatttcaatttatcgaactgagagatcgcgactcattagtggaggctttactcgccagactaaagcaggtgcatgccaaccatcccgtccactacgataccagtgctgatgatgatatggcgtccttagtctttcattcgactagtatgtgttcagaccatcggtttggcgatctcgagatgatgtcaagccagaattcagaggaatcagaaaaggagaaatcccccctaatgcatcctgacgccctggtgaccgcatttcagcaatctggatctcagagtcctgattcccgcatgtcaagagaacaaattaagattagtctttggaacgatcatttcgtcgaatacgggagaacagtatgcatgttccggacggagaagattcgtaagttggtggccatgggaatacccgagtccctacgagggagattgtggctccttttctccgacgctgtcacagatctggctagtcacccaggatattatggtaatcttgtggaggaatccctgggtaagtgctgtcttgttacagaggagatagagcgggacctgcaccgtagcctgcccgagcaccccgcattccaaaatgaaaccggcatcgccgcactcaggcgtgtgttaactgcctatgcgcaccgtaatccaaagatcgggtactgccagagcatgaacatcctgacctccgtgttattgctctacacgaaggaggaagaggctttttggctgcttgtcgcagtgtgcgagagaatgctgccagattatttcaatcaccgggtgattggggctcaggtcgaccaaagtgtttttgaggagctaattaagggacaccttcctgaactggctgagcatatgaatgatttaagcgctctagcatctgtctccctatcctggtttcttactctgtttctttccataatgccactggagtccgctgtcaacgtggtggactgcttcttctatgacggaatcaaagccatcttccagctgggacttgcagtcctagaggctaatgctgaagatctgtgctcctccaaagacgacggacaggctctgatgatcctatcccgttttctcgaccatattaagaatgaggatagccccggacctcctgtggggtcccatcatgccttcttcagcgacgaccaagagccgtatccagtaacggacatttctgatttgattagagactcttatgagaaattcggagatcagagcgtcgaacagatcgagcaccttcggtacaagcaccggatcagagtgctgcaaggccacgaggacaccactaagcaaaatgtgctgagagtggtgatcccagaggtctctattctacctgaggacctggaagaactgtacgatctgttcaagcgggaacacatgatgtcatgttactgggagcagccaagaccaatggcttcaagacacgacccttccaggccttatgcagaacagtaccggattgatgctcgccagttcgcccatctgttccagctagtgagcccctggacctgcggcgcacacaccgagattctggctgagcgcaccttcagactgcttgacgataacatggaccaactcattgagtttaaagcgtttgtaagttgtcttgacattatgtacaatggcgaaatgaacgagaagattaagctactttaccgcctgcacattccaccggcactgaccgagaacgatagagacagccaatcacccctcaggaatcccctcttatctacctcccggccactggtgtttggcaagccgaacggggacgctgtcgattaccaaaagcagctcaagcaaatgattaaggacctggccaaagaaaaggataagaccgagaaggaattacccaaaatgagccagcgggagttcatacaattttgcaaaaccctgtattcaatgttccacgaagaccccgaagaaaacgatctgtatcaggcaatagcaacggtgacaactctactgctccagattggtgaggtcggccagcggggttcgtctagcggaagttgcagccaggagtgtggagaagaactgagagcctcggccccatcccctgaggattcagttttcgctgatactgggaaaacaccccaggattctcaggcattccctgaagctgctgaacgggactggaccgtctcgctggaacatatccttgccagcctgcttactgagcaatctttggttaattttttcgaaaagcctctcgacatgaaatcaaaacttgagaacgccaagatcaatcagtacaacttaaagacatttgaaatgtctcatcaaagccagtctgagctcaagctgtccaacctctag

SEQ ID NO: 40932 - DNA, 3627 bp, Artificial Sequence
  derived and/or modified sequence
atgtggctcaagcccgaggaggtgctgctgaagaacgcgctgaagctctgggtgacccagaagagcagctgctacttcatcctgcagcggcgccgcgggcacggcgaggggggcggccgcctcaccggtcgcctggtcggcgctctggatgcagtgttggattccaatgcacgggtcgctccatttcgaattctgcttcaagttcccggctcccaggtttattctcccatagcatgtggtgcaacattagaggaaatcaatcagcactgggactggctggaacaaaatctcctccacaccttgtctgtctttgataataaagatgacattgccagttttgtcaaagggaaggtaaaggctctgatagccgaggagaccagcagcaggctcgccgagcaggaggaggaacccgagaaattccgagaagccctggtgaagttcgaggccaggttcaacttccccgaggcggagaagctggtcacctactactcctgctgctgttggaagggcagggtgccccgccagggctggctgtacctcagcatcaaccacctctgcttctactccttcttcctgggcaaggaacttaaacttgtggttccgtgggttgatatccagaaattagaaagaacgtccaatgtctttctgacggataccatccgaatcaccacgcagaataaggagcgtgacttctccatgttcctgaacctggatgaggtgtttaaggtcatggagcagctggccgacgtgacgctgcgaaggctgctggataatgaggtctttgacctcgaccccgatctgcaggagccgagccagatcaccaagagggacctggaagccagagcacagaatgagttcttccgggctttcttcaggttgccgaggaaggagaagctgcacgcggttgtggactgttcgctctggacgccgttcagtcgctgtcacaccacggggcggatgttcgcctctgacagctacatctgctttgccagcagagaagatggctgctgtaagatcatcctgccactcagagaggtggtgagcatcgagaagatggaggacacgagcctgctgccgcatcccatcattgtcagtatcagaagcaaggtggccttccagttcattgagctccgggaccgagacagcctggtggaggcgctgcttgcgaggttgaagcaggtccacgccaaccaccccgtgcactacgacacctctgcggatgatgacatggcttcactcgtgtttcattcaacaagcatgtgcagtgaccacagatttggggatcttgaaatgatgtcttctcaaaatagcgaggagagtgagaaagagaagagcccgctgatgcaccccgatgccctggtcaccgccttccagcagtcaggcagccagagccctgactcccgaatgtccagagaacagataaaaataagcctgtggaatgaccactttgtggaatacggcagaaccgtgtgtatgtttcgcacagagaagattcggaagctcgtagccatgggcatccctgaatctttgcgagggagactctggcttctcttctcagatgcggtgacggatcttgcctcacaccctggttactacgggaatctggtggaggagtccctggggaaatgctgcctggtaaccgaggagatagaacgagacctgcaccgctccctgccagagcaccccgccttccagaacgaaacgggaattgctgctttgaggagagtcttgacggcctatgcccaccggaaccccaagattggatactgccagtccatgaacatcctgacctccgtgctgctgctgtacaccaaggaggaggaagccttctggctgttggttgctgtgtgtgagcggatgctgcccgattacttcaaccaccgagtgatcggggcacaagttgaccagtctgtcttcgaggagctcatcaagggtcatctcccagagctggcagagcacatgaacgacctctcagccctggcgtccgtctctctctcgtggttcctgaccctgttcctcagcatcatgcctctagagagtgcggtgaatgtggtagactgcttcttctatgatggcatcaaagccatcttccagctgggactggctgtgcttgaggccaatgctgaggacctgtgcagcagcaaggatgatggccaggccttgatgatcctcagcaggtttctagatcacattaagaatgaggacagcccagggcccccagttggcagccaccatgcctttttctccgacgaccaggagccctaccctgtgactgatatttcggacctgatccgggattcctatgagaaatttggagaccagtctgtggagcagatcgagcacctacgttacaagcacaggatcagggtcctccaaggccacgaggacaccacaaagcagaacgtgcttcgagtcgttatcccggaagtctcaattcttcctgaagacctagaggagctctacgacttattcaagagagaacatatgatgagctgttactgggagcagcccaggcccatggcctcacgccacgaccccagccggccctatgctgagcagtaccgcatagatgcccggcagtttgcacacctgtttcagctagtctcgccctggacctgcggggcccacacggagatcctcgccgaaaggacgttcaggctcttggatgacaacatggaccagctcatcgagttcaaagcgtttgtgagctgcctcgatattatgtataatggagaaatgaatgagaagattaaactattatacaggcttcatatccctccagcactcactgaaaatgaccgagacagccagtcgccgttgaggaatcctctgttgtcaacatcgagacccctggttttcgggaaacccaatggtgatgcagttgattatcagaaacagctgaagcagatgattaaggatttagccaaagaaaaagataaaactgagaaagaattgcccaaaatgagccagagagaatttatccagttctgtaaaactctgtacagtatgttccatgaagatccagaagaaaatgatttgtatcaagccatcgccacagtcaccacactgctgctgcagatcggggaggtggggcagcgaggcagcagctctggaagctgctcccaggagtgtggggaggagctgcgggcttcagctccttctcctgaggactcggtttttgcagacactgggaagacgccccaggactcccaggcatttccagaggcggcagaaagggactggactgtctcccttgaacatattttagcttcacttctgactgaacagtcattagtcaacttttttgaaaagccactggacatgaaatccaaacttgaaaatgccaagatcaatcagtacaatctcaaaacttttgaaatgagccaccaatcacaatctgaacttaagctgagtaacttgtagcaagacagcagctgctatgcacactggagtccaccataccaaagcacgaaccagactgtttcttggggtcagccctaaaccgagatttcagtctaccttaccaatggggcatctggctaaacaacctgacaaactgtggccaggggaaccgacacaaccctcaagcatttctatgtattgagaattgtcagtgccctaaggtat

SEQ ID NO: 40933 - protein, 187 aa, Artificial Sequence
  derived and/or modified sequence
MKHRLGFLLQKSDSCEHNSSHNKKDKVVICQRVSQEEVKKWAESLENLISHECGLAAFKAFLKSEYSEENIDFWISCEEYKKIKSPSKLSPKAKKIYNEFISVQATKEVNLDSCTREETSRNMLEPTITCFDEAQKKIFNLMEKDSYRRFLKSRFYLDLVNPSSCGAEKQKGAKSSADCASLVPQCA

SEQ ID NO: 40934 - protein, 205 aa, Artificial Sequence
  derived and/or modified sequence
MCKGLAGLPASCLRSAKDMKHRLGFLLQKSDSCEHNSSHNKKDKVVICQRVSQEEVKKWAESLENLISHECGLAAFKAFLKSEYSEENIDFWISCEEYKKIKSPSKLSPKAKKIYNEFISVQATKEVNLDSCTREETSRNMLEPTITCFDEAQKKIFNLMEKDSYRRFLKSRFYLDLVNPSSCGAEKQKGAKSSADCASLVPQCA

SEQ ID NO: 40935 - protein, 302 aa, Artificial Sequence
  derived and/or modified sequence
MYNMMLLIQKRKGIGSQLLRAGEAEGDRGAGTAERSSDWLDGRSWAIKETPTGLAGRRSEDSDNIFTGEEAKYAQSRSHSSSCRISFLLANSKLLNKMCKGLAGLPASCLRSAKDMKHRLGFLLQKSDSCEHNSSHNKKDKVVICQRVSQEEVKKWAESLENLISHECGLAAFKAFLKSEYSEENIDFWISCEEYKKIKSPSKLSPKAKKIYNEFISVQATKEVNLDSCTREETSRNMLEPTITCFDEAQKKIFNLMEKDSYRRFLKSRFYLDLVNPSSCGAEKQKGAKSSADCASLVPQCA

SEQ ID NO: 40936 - protein, 143 aa, Artificial Sequence
  derived and/or modified sequence
MKHRLGFLLQKSDSCEHNSSHNKKDKVVICQRVSQEEVKKWAESLENLISHECGLAAFKAFLKSEYSEENIDFWISCEEYKKIKSPSKLSPKAKKIYNEFISVQATKEVNLDSCTREETSRNMLEPTITCFDEAQKKIFNLME

SEQ ID NO: 40937 - DNA, 909 bp, Artificial Sequence
  derived and/or modified sequence
atgtacaatatgatgttactcattcagaagcgaaagggtatcggctctcagttattaagggccggcgaggctgagggagaccggggggcagggactgccgagaggagcagcgattggcttgatggaaggtcatgggcgattaaggaaacgccaaccggtctagcaggcaggcgcagcgaggattcggataacattttcaccggagaagaggcaaagtacgcccagagccgcagccatagttcctcttgcaggatcagtttcctgctagccaactccaagctccttaacaagatgtgcaagggtctcgctggattgccagcctcttgtttgcggtcagccaaggacatgaagcacagactgggtttcctactgcagaaatccgacagctgtgagcacaactcctctcacaacaaaaaggacaaggttgtcatctgtcaacgtgtctctcaggaagaagtgaagaaatgggccgaatcgctcgaaaacctaatttcacatgagtgtggcttagctgcattcaaggctttcctgaagtctgagtattccgaggaaaatatagatttctggatttcatgcgaagagtataaaaagatcaagtccccctcgaagctctcacccaaggctaaaaaaatatacaatgagttcatcagtgttcaggcgacaaaagaggttaacttggactcatgtacacgggaagaaacctccaggaatatgctcgagcccactatcacctgctttgatgaggcccagaagaaaatcttcaacttaatggaaaaggacagttaccgcagattcctcaaatcccgattctacctggacctggtcaatcccagctcctgcggtgctgaaaagcagaaaggtgccaaaagtagcgccgactgtgcaagcctcgtgccccagtgcgcctag

SEQ ID NO: 40938 - DNA, 909 bp, Artificial Sequence
  derived and/or modified sequence
atgtacaacatgatgctgctgatccagaagaggaagggcatcggcagccagctgctgcgggccggggaggccgagggggacagaggagctggaacagctgagaggagcagtgactggctggatggccgctcctgggccatcaaggagacccccaccggcctggccggcagaagaagtgaggacagcgacaacatcttcaccggggaggaggccaagtatgcccagagccgcagccacagcagcagctgccgcatctccttcctgctggccaacagcaagctgctgaacaagatgtgcaagggcctggccggcctgcctgccagctgcctgcggagcgccaaggacatgaagcaccggctgggcttcctgctgcagaagagtgacagctgtgagcacaacagcagccacaacaagaaggacaaggtggtgatctgccagagggtgtcccaggaggaggtgaagaagtgggccgagagcctggagaacctgatcagccatgaatgtggcctggccgccttcaaggccttcctgaagtctgagtacagcgaggagaacatcgacttctggatcagctgtgaggagtacaagaagatcaagagccccagcaagctgagccccaaggccaagaagatctacaatgagttcatctctgtgcaggccaccaaggaggtgaacctggacagctgcacccgggaggagaccagcaggaacatgctggagcccaccatcacctgctttgatgaggcccagaagaagatcttcaacctgatggagaaggacagctaccgccgcttcctgaagagccgcttctacctggacctggtgaaccccagcagctgtggggctgagaagcagaagggggccaagagcagcgctgactgtgccagcctggtgccccagtgtgcctag

SEQ ID NO: 40939 - DNA, 909 bp, Artificial Sequence
  derived and/or modified sequence
atgtacaacatgatgctgctgatccagaagcggaagggcatcggcagccagctcctgcgcgctggagaggcagaaggggaccgcggtgccggcacagccgaacgaagttctgattggcttgatggcaggtcctgggcgatcaaggaaaccccaacaggtctcgccggaagacggagtgaggactcggataatattttcactggcgaggaagctaagtacgcgcagtcacggtctcacagcagttcttgtaggatcagctttttactggccaacagtaagttgctaaataaaatgtgtaagggacttgctggactcccagctagttgcctaaggagtgccaaggatatgaagcaccgcttgggttttctgctacagaaatctgattcctgcgaacataactcaagtcacaacaagaaggacaaggtggtcatttgtcagagggtcagccaggaggaggtcaagaaatgggctgaatccctcgagaacctcatctcccacgagtgtggactcgccgctttcaaagcattccttaagagcgagtatagcgaggagaacattgatttttggattagctgcgaggagtataaaaaaataaagtccccgagcaagttgtcacccaaggccaaaaagatctacaatgagttcataagtgtgcaggcaacaaaggaggtgaacctcgactcttgcacacgggaggaaacatctaggaacatgctggagcctactatcacctgcttcgatgaggctcagaaaaagattttcaaccttatggagaaggactcttaccggaggttcctgaaaagtcgcttctaccttgatctagtgaatccatcttcttgcggtgctgaaaaacaaaagggggccaagtccagcgccgactgcgctagcctggtgccccagtgtgcgtag

SEQ ID NO: 40940 - DNA, 909 bp, Artificial Sequence
  derived and/or modified sequence
atgtacaacatgatgctgcttattcagaaaagaaaagggatcgggtcccaactcctcagggccggagaagccgagggggacagaggggcaggcacagccgagaggtcgtctgattggcttgatgggaggagctgggcgatcaaggaaactcccactgggctcgccggtaggcgcagcgaggattccgacaatatcttcacaggagaggaagccaaatacgcccagtcgagatcacattccagctcatgtcggatcagttttttgttggcaaatagcaagctcctgaacaagatgtgcaagggcctcgccggattgccggcatcatgtctgcggagtgccaaggacatgaaacatcgtttagggtttctgctgcagaaaagtgacagctgtgagcacaactcctctcataataaaaaggataaagtcgtgatctgtcaaagagttagtcaagaagaggtaaagaaatgggccgaaagtctggaaaatctgatttcacatgaatgcgggctggccgcttttaaggcattcttaaagagcgagtactctgaggagaatatcgacttctggatttcttgtgaggagtataagaagatcaagagtccaagtaaattgagtccgaaagccaaaaaaatatataatgagtttatcagtgtgcaggctactaaggaagtgaatctcgactcctgtactcgagaagaaaccagccgcaatatgcttgaaccgaccatcacatgtttcgatgaagcccagaaaaagattttcaatttgatggaaaaggatagctacagacgttttcttaaatcccgcttctacctggatcttgttaatccttctagctgtggcgcagaaaagcagaaaggagctaagtcttctgccgattgtgcctctttggtcccacagtgtgcctag

SEQ ID NO: 40941 - DNA, 3200 bp, Artificial Sequence
  derived and/or modified sequence
gacattgagtacattttttcccatatccctacttttcagaaggattttctctgctcgttcacttaacattgctgatgcgtcagtcttttcttcctcatctctttcaggggctggagaggcagagggagacagaggagctggtactgcagagcggtcgtctgattggctggacggtcgtagctgggctataaaagagacccctacaggcttagcaggaagacgctcagaggattctgacaatatctttaccggagaagaggcaaagtacgctcaaagccgaagccacagctcctcctgccgcatttctttcctgcttgcgaattccaagctgttaaataagatgtgcaaagggcttgcaggtctgccggcttcttgcttgaggagtgcaaaagatatgaaacatcggctaggtttcctgctgcaaaaatctgattcctgtgaacacaattcttcccacaacaagaaggacaaagtggttatttgccagagagtgagccaagaggaagtcaagaaatgggctgaatcactggaaaacctgattagtcatgaatgtgggctggcagctttcaaagctttcttgaagtctgaatatagtgaggagaatattgacttctggatcagctgtgaagagtacaagaaaatcaaatcaccatctaaactaagtcccaaggccaaaaagatctataatgaattcatctcagtccaggcaaccaaagaggtgaacctggattcttgcaccagggaagagacaagccggaacatgctagagcctacaataacctgctttgatgaggcccagaagaagattttcaacctgatggagaaggattcctaccgccgcttcctcaagtctcgattctatcttgatttggtcaacccgtccagctgtggggcagaaaagcagaaaggagccaagagttcagcagactgtgcttccctggtccctcagtgtgcctaattctcacctgaaggcagagggatgaaatgccaagactctatgctctggaaaacctgaggccaaatattgatctgtattaagctccagtgctttatccacattgtagcctaatattcatgctgcctgccatgtgtgagtcacttctacgcataaactagatatagcttttggtgtttgagtgttcatcagggtgggaccccattccagtccaattttcctaagtttctttgagggttccatgggagcaaatatctaaataatggcctggtaggtctggattttcaaagattgttggcagtttcctcctcccaacagttttacctcgggatggttggttagtgcatgtcacatgacatccacatgcacatgtattctgttggccagcacgttctccagactctagatgtttagatgaggttgagctatgatatgtgcttgtgtgtatgtctatgtgtatatattatatatacattagacacacatatacattatttctgtatatagatgtctgtgtatacatatgtatgtgtgagtgtatgtatacacacacacacacacacacacacacacttttgcaagagtgatgggaaagaccctaggtgctcataactagagtatgtgtatgtacttacatgggtgttttgatctctgttctttcatactacatttgaacagggcaaaatgaactaactgccatgtaggctaagaaagaaatgctaacctgtggaaagttggttttgtaaaattccatggatcttgctggagaagcatccaaggaacttcatgcttgatttgaccactgacagcctccaccttgagcactattctaaggagcaaataccttagctcccttgagctggttttctctgatggcacttttgagctcctaagctgccagccttcccttcttttcctgggtgctcagggcatgcttattagcagctgggttggtatggagttggcagacaggatgttcaacttaatgaagaaatacagctaaggccttgccagcaacacctgccgtaagttactggctgagtgagggcatagaagttaaaggttactgtttttatcctctatccttttttcctttcctgatcaaggtgctcttctcattttttcctgagaaccttagccatcagatgaggctccttagtttattgtggttggttgttttttctttataatggctctgggctatatgcctatatttataaaccagcagcaggggaaagattatattttataagagggaacaaattttcacaatttgaaaagcccacataagttttctcttttaaggtagaatcttgttaatttcattccaaacatcggggctaacagagactggaggcatttctttttaggctctgagactaaatgagaggaaaagaaaagaaaaaaaaaatgattgtctaaccaattgtgagaattactgtttgaaacttttcaaggcacattgaaatacttgaaaacttctcatttatgttatttatgatgttattttgtacgtgttattattattatattgttttataaatggaggtacaggatatcacctgaattattaatgaatgcccaggaagtaattttcttctcattcttctaaaactactgcctttcaaagtgcacacacacgcgtccacatacactgcattcgttgctccagtataaattacatgcatgagcacctttctggcttttaagccaatataatgggctgcaaaatgaagacaccagagtgtatgcatacaaatctcactgtattaaagatgcaggttttctaattgtacccttcttgtctctctggcaatcttgcccttaatatccctggagttcctcatcagtgtcattttctgttatacacagttccacaattttgtctctagttgacttcaaatgtgtaactttattggtcttgccctattataattgtcatgactttcagattgtatctgaactcacagactgctgtcttactaataggtctggaaggtcacgctgaatgagaagtaaattattttatgtaatacatttttgagtgtgtttttcagttgtatttccctgttatttcatcactatttccaatggtgagcttgcctgctcatgctccctggacagaatactccttccttttgcatgcctgtttctatcatgtgcttgataggcctcaaagctaatgcttccagtgaaacacacgcatcttaataataagggtaaataaacgctccatatgaaacta

SEQ ID NO: 40942 - DNA, 3311 bp, Artificial Sequence
  derived and/or modified sequence
agtttctgtatgctgccgggcttataactgtctgtcatccagctatttctctccaccttcttgtttgcataacaaccaaggcaacttccgcaaatcactgcgtggagacgatgatcctgccagctcccttttggaaatcgtgaggatcagatcttggaccatgtataatatgatgcttctaatccaaaagaggaaaggcattgggagtcagctcctaagggctggagaggcagagggagacagaggagctggtactgcagagcggtcgtctgattggctggacggtcgtagctgggctataaaagagacccctacaggcttagcaggaagacgctcagaggattctgacaatatctttaccggagaagaggcaaagtacgctcaaagccgaagccacagctcctcctgccgcatttctttcctgcttgcgaattccaagctgttaaataagatgtgcaaagggcttgcaggtctgccggcttcttgcttgaggagtgcaaaagatatgaaacatcggctaggtttcctgctgcaaaaatctgattcctgtgaacacaattcttcccacaacaagaaggacaaagtggttatttgccagagagtgagccaagaggaagtcaagaaatgggctgaatcactggaaaacctgattagtcatgaatgtgggctggcagctttcaaagctttcttgaagtctgaatatagtgaggagaatattgacttctggatcagctgtgaagagtacaagaaaatcaaatcaccatctaaactaagtcccaaggccaaaaagatctataatgaattcatctcagtccaggcaaccaaagaggtgaacctggattcttgcaccagggaagagacaagccggaacatgctagagcctacaataacctgctttgatgaggcccagaagaagattttcaacctgatggagaaggattcctaccgccgcttcctcaagtctcgattctatcttgatttggtcaacccgtccagctgtggggcagaaaagcagaaaggagccaagagttcagcagactgtgcttccctggtccctcagtgtgcctaattctcacctgaaggcagagggatgaaatgccaagactctatgctctggaaaacctgaggccaaatattgatctgtattaagctccagtgctttatccacattgtagcctaatattcatgctgcctgccatgtgtgagtcacttctacgcataaactagatatagcttttggtgtttgagtgttcatcagggtgggaccccattccagtccaattttcctaagtttctttgagggttccatgggagcaaatatctaaataatggcctggtaggtctggattttcaaagattgttggcagtttcctcctcccaacagttttacctcgggatggttggttagtgcatgtcacatgacatccacatgcacatgtattctgttggccagcacgttctccagactctagatgtttagatgaggttgagctatgatatgtgcttgtgtgtatgtctatgtgtatatattatatatacattagacacacatatacattatttctgtatatagatgtctgtgtatacatatgtatgtgtgagtgtatgtatacacacacacacacacacacacacacacttttgcaagagtgatgggaaagaccctaggtgctcataactagagtatgtgtatgtacttacatgggtgttttgatctctgttctttcatactacatttgaacagggcaaaatgaactaactgccatgtaggctaagaaagaaatgctaacctgtggaaagttggttttgtaaaattccatggatcttgctggagaagcatccaaggaacttcatgcttgatttgaccactgacagcctccaccttgagcactattctaaggagcaaataccttagctcccttgagctggttttctctgatggcacttttgagctcctaagctgccagccttcccttcttttcctgggtgctcagggcatgcttattagcagctgggttggtatggagttggcagacaggatgttcaacttaatgaagaaatacagctaaggccttgccagcaacacctgccgtaagttactggctgagtgagggcatagaagttaaaggttactgtttttatcctctatccttttttcctttcctgatcaaggtgctcttctcattttttcctgagaaccttagccatcagatgaggctccttagtttattgtggttggttgttttttctttataatggctctgggctatatgcctatatttataaaccagcagcaggggaaagattatattttataagagggaacaaattttcacaatttgaaaagcccacataagttttctcttttaaggtagaatcttgttaatttcattccaaacatcggggctaacagagactggaggcatttctttttaggctctgagactaaatgagaggaaaagaaaagaaaaaaaaaatgattgtctaaccaattgtgagaattactgtttgaaacttttcaaggcacattgaaatacttgaaaacttctcatttatgttatttatgatgttattttgtacgtgttattattattatattgttttataaatggaggtacaggatatcacctgaattattaatgaatgcccaggaagtaattttcttctcattcttctaaaactactgcctttcaaagtgcacacacacgcgtccacatacactgcattcgttgctccagtataaattacatgcatgagcacctttctggcttttaagccaatataatgggctgcaaaatgaagacaccagagtgtatgcatacaaatctcactgtattaaagatgcaggttttctaattgtacccttcttgtctctctggcaatcttgcccttaatatccctggagttcctcatcagtgtcattttctgttatacacagttccacaattttgtctctagttgacttcaaatgtgtaactttattggtcttgccctattataattgtcatgactttcagattgtatctgaactcacagactgctgtcttactaataggtctggaaggtcacgctgaatgagaagtaaattattttatgtaatacatttttgagtgtgtttttcagttgtatttccctgttatttcatcactatttccaatggtgagcttgcctgctcatgctccctggacagaatactccttccttttgcatgcctgtttctatcatgtgcttgataggcctcaaagctaatgcttccagtgaaacacacgcatcttaataataagggtaaataaacgctccatatgaaacta

SEQ ID NO: 40943 - DNA, 817 bp, Artificial Sequence
  derived and/or modified sequence
aagacgctcagaggattctgacaatatctttaccggagaagaggcaaatgcaaaagatatgaaacatcggctaggtttcctgctgcaaaaatctgattcctgtgaacacaattcttcccacaacaagaaggacaaagtggttatttgccagagagtgagccaagaggaagtcaagaaatgggctgaatcactggaaaacctgattagtcatgaatgtgggctggcagctttcaaagctttcttgaagtctgaatatagtgaggagaatattgacttctggatcagctgtgaagagtacaagaaaatcaaatcaccatctaaactaagtcccaaggccaaaaagatctataatgaattcatctcagtccaggcaaccaaagaggtgaacctggattcttgcaccagggaagagacaagccggaacatgctagagcctacaataacctgctttgatgaggcccagaagaagattttcaacctgatggagaaggattcctaccgccgcttcctcaagtctcgattctatcttgatttggtcaacccgtccagctgtggggcagaaaagcagaaaggagccaagagttcagcagactgtgcttccctggtccctcagtgtgcctaattctcacctgaaggcagagggatgaaatgccaagactctatgctctggaaaacctgaggccaaatattgatctgtattaagctccagtgctttatccacattgtagcctaatattcatgctgcctgccatgtgtgagtcacttctacgcataaactagatatagcttttggtgtttgagtgttcatcagggtggg

SEQ ID NO: 40944 - DNA, 909 bp, Artificial Sequence
  derived and/or modified sequence
atgtacaacatgatgctgctgatccagaagagaaagggcatcggcagccagctgctgagagccggcgaggccgagggcgacagaggcgccggcaccgccgagagaagcagcgactggctggacggcagaagctgggccatcaaggagacccccaccggcctggccggcagaagaagcgaggacagcgacaacatcttcaccggcgaggaggccaagtacgcccagagcagaagccacagcagcagctgcagaatcagcttcctgctggccaacagcaagctgctgaacaagatgtgcaagggcctggccggcctgcccgccagctgcctgagaagcgccaaggacatgaagcacagactgggcttcctgctgcagaagagcgacagctgcgagcacaacagcagccacaacaagaaggacaaggtggtgatctgccagagagtgagccaggaggaggtgaagaagtgggccgagagcctggagaacctgatcagccacgagtgcggcctggccgccttcaaggccttcctgaagagcgagtacagcgaggagaacatcgacttctggatcagctgcgaggagtacaagaagatcaagagccccagcaagctgagccccaaggccaagaagatctacaacgagttcatcagcgtgcaggccaccaaggaggtgaacctggacagctgcaccagagaggagaccagcagaaacatgctggagcccaccatcacctgcttcgacgaggcccagaagaagatcttcaacctgatggagaaggacagctacagaagattcctgaagagcagattctacctggacctggtgaaccccagcagctgcggcgccgagaagcagaagggcgccaagagcagcgccgactgcgccagcctggtgccccagtgcgcctag

SEQ ID NO: 40945 - protein, 398 aa, Artificial Sequence
  derived and/or modified sequence
MMWLLLTTTCLICGTLNAGGFLDLENEVNPEVWMNTSEIIIYNGYPSEEYEVTTEDGYILLVNRIPYGRTHARSTGPRPVVYMQHALFADNAYWLENYANGSLGFLLADAGYDVWMGNSRGNTWSRRHKTLSETDEKFWAFSFDEMAKYDLPGVIDFIVNKTGQEKLYFIGHSLGTTIGFVAFSTMPELAQRIKMNFALGPTISFKYPTGIFTRFFLLPNSIIKAVFGTKGFFLEDKKTKIASTKICNNKILWLICSEFMSLWAGSNKKNMNQSRMDVYMSHAPTGSSVHNILHIKQLYHSDEFRAYDWGNDADNMKHYNQSHPPIYDLTAMKVPTAIWAGGHDVLVTPQDVARILPQIKSLHYFKLLPDWNHFDFVWGLDAPQRMYSEIIALMKAYS

SEQ ID NO: 40946 - DNA, 1197 bp, Artificial Sequence
  derived and/or modified sequence
atgatgtggcttctgctcacaactacctgtctgatttgcgggaccctcaatgcagggggcttccttgacctggagaacgaggtgaatcctgaggtgtggatgaatacctccgagattataatctacaacggctatccctcggaagagtacgaggtaacaacggaggacgggtatatcctgcttgtaaacagaataccatatggtagaacccatgccagatcgaccggacctagaccagttgtgtatatgcagcacgcactctttgccgacaacgcttattggctggagaactacgccaacgggagcttgggttttctgttggcagatgctggctacgatgtctggatggggaactcccgcgggaatacctggtctcggcggcacaagacccttagtgagaccgatgagaaattttgggcctttagcttcgacgaaatggccaagtatgaccttcctggtgttattgactttatcgtgaataagaccggccaggaaaagctctactttatcggacatagtttgggaacgacgattgggtttgtagcctttagtacgatgccagaactggcccagcgcatcaagatgaactttgccctgggtcctaccattagctttaagtatcccacgggtattttcaccaggttcttcttgctgcccaatagcataatcaaagccgtcttcgggacgaaagggtttttcctggaggacaaaaaaacaaaaatagcaagcacaaagatttgtaacaacaagattctgtggctgatttgtagcgagttcatgagtctgtgggctggatctaacaagaaaaatatgaatcagtccaggatggacgtttatatgtctcatgcaccaaccggatcaagtgtccacaacattcttcatatcaagcagctataccactcagatgagttccgggcctatgattggggaaatgatgcagataacatgaaacattacaaccagagccatccacctatctacgacctgacagcaatgaaggtgcccacagctatctgggccggcgggcacgacgtgttggttacacctcaggacgtcgcacggattctgcctcagattaagtcccttcattacttcaagcttctccccgactggaatcacttcgattttgtgtggggcctcgatgctccccaaaggatgtacagcgagattatcgctctaatgaaggcttattcctag

SEQ ID NO: 40947 - DNA, 1197 bp, Artificial Sequence
  derived and/or modified sequence
atgatgtggctgctgctgaccaccacctgcctgatctgtggcaccctgaatgctgggggcttcctggacctggagaatgaggtgaaccctgaggtgtggatgaacaccagcgagatcatcatctacaacggctaccccagcgaggagtatgaggtgaccacagaagatggctacatcctgctggtgaaccgcatcccctacggccgcacccacgcccggagcacaggccccaggcctgtggtgtacatgcagcacgccctgtttgctgacaatgcctactggctggagaactatgccaacggcagcctgggcttcctgctggctgatgctggctatgatgtgtggatgggcaacagccggggcaacacctggagccgccgccacaagaccctgtctgaaacagatgagaagttctgggccttctcctttgatgagatggccaagtatgacctgcccggggtgattgacttcatcgtgaacaagacaggccaggagaagctgtacttcatcggccacagcctgggcaccaccatcggctttgtggccttcagcaccatgcctgagctggcccagaggatcaagatgaactttgccctgggccccaccatctccttcaagtaccccaccggcatcttcacccgcttcttcctgctgcccaacagcatcatcaaggctgtgtttggcaccaagggcttcttcctggaggacaagaagaccaagatcgccagcaccaagatctgcaacaacaagatcctgtggctgatctgcagcgagttcatgagcctgtgggccggcagcaacaagaagaacatgaaccagagcaggatggatgtgtacatgagccacgcccccaccggcagctctgtgcacaacatcctgcacatcaagcagctgtaccacagtgatgagttccgggcctatgactggggcaatgatgctgacaacatgaagcactacaaccagagccacccccccatctatgacctgacagccatgaaggtgcccacagccatctgggccggcggccatgatgtgctggtgaccccccaggatgtggcccgcatcctgccccagatcaagagcctgcactacttcaagctgctgcctgactggaaccactttgattttgtgtggggcctggatgccccccagaggatgtacagcgagatcatcgccctgatgaaggcctacagctag

SEQ ID NO: 40948 - DNA, 1197 bp, Artificial Sequence
  derived and/or modified sequence
atgatgtggctgcttttaacaacaacttgtttgatctgtggaactttaaatgctggtggattccttgatttggaaaatgaagtgaatcctgaggtgtggatgaatactagtgaaatcatcatctacaatggctaccccagtgaagagtatgaagtcaccactgaagatgggtatatactccttgtcaacagaattccttatgggcgaacacatgctaggagcacaggtccccggccagttgtgtatatgcagcatgccctgtttgcagacaatgcctactggcttgagaattatgctaatggaagccttggattccttctagcagatgcaggttatgatgtatggatgggaaacagtcggggaaacacttggtcaagaagacacaaaacactctcagagacagatgagaaattctgggcctttagttttgatgaaatggccaaatatgatctcccaggagtaatagacttcattgtaaataaaactggtcaggagaaattgtatttcattggacattcacttggcactacaatagggtttgtagccttttccaccatgcctgaactggcacaaagaatcaaaatgaattttgccttgggtcctacgatctcattcaaatatcccacgggcatttttaccaggttttttctacttccaaattccataatcaaggctgtttttggtaccaaaggtttctttttagaagataagaaaacgaagatagcttctaccaaaatctgcaacaataagatactctggttgatatgtagcgaatttatgtccttatgggctggatccaacaagaaaaatatgaatcagagtcgaatggatgtgtatatgtcacatgctcccactggttcatcagtacacaacattctgcatataaaacagctttaccactctgatgaattcagagcttatgactggggaaatgacgctgataatatgaaacattacaatcagagtcatccccctatatatgacctgactgccatgaaagtgcctactgctatttgggctggtggacatgatgtcctcgtaacaccccaggatgtggccaggatactccctcaaatcaagagtcttcattactttaagctattgccagattggaaccactttgattttgtctggggcctcgatgcccctcaacggatgtacagtgaaatcatagctttaatgaaggcatattcctaa

SEQ ID NO: 40949 - DNA, 1197 bp, Artificial Sequence
  derived and/or modified sequence
atgatgtggctgctgctgaccaccacctgcctgatctgcggcaccttgaatgccggagggtttctggatttggagaacgaggtcaatcccgaagtctggatgaacacatccgagattattatctacaacggctacccttctgaggagtatgaggtaacaactgaggatggatatatcctcctggtcaatcggattccttacggacgcacccatgcccgctccactggtccccggccagtagtctatatgcagcacgcactgtttgcggacaacgcctattggctcgaaaactatgcaaacggctcactaggcttcctcctcgccgatgccggctatgatgtttggatgggaaattcacgcggcaatacctggagccggcggcataagacactgtctgaaactgacgagaagttctgggcctttagttttgacgagatggcaaagtatgatctgccgggggtgatagacttcatcgtgaataagactggacaggagaagctttactttatcggccattctcttggtaccacgatcggatttgtggcattctcaacaatgcctgaactggcccagaggataaagatgaacttcgccttggggcctacaatctcctttaaatatcccacaggcatcttcacccggttttttctgctgccaaatagcatcattaaggccgttttcggtaccaaggggttcttcctggaggataaaaagactaaaatcgcaagcactaaaatttgcaacaacaaaatcctttggctcatctgtagcgagtttatgagtctgtgggcaggaagtaacaagaaaaatatgaatcagagcaggatggatgtctatatgtctcacgcacccactgggagttctgttcacaatatactgcacattaagcagctctaccattctgacgaattcagagcatacgattggggaaatgatgccgacaatatgaagcactataatcagagccatccaccgatttacgatttgactgcaatgaaagtccccacagcaatatgggctggaggccatgacgttctggtgactccccaggacgtggcaagaattctgccccagatcaagagcctccattactttaaacttctaccggattggaatcattttgatttcgtctgggggctggatgcccctcagaggatgtattctgagattattgccctgatgaaagcgtattcgtag

SEQ ID NO: 40950 - DNA, 1197 bp, Artificial Sequence
  derived and/or modified sequence
atgatgtggttgctcctgacaaccacatgtttgatttgtggcaccctaaacgccggtggtttcttggatctggaaaatgaagtcaatccagaggtctggatgaatacaagcgagattataatatataatgggtatcctagtgaggagtatgaggtgacaacagaagacggatatatactacttgtcaatcgaattccttacgggcgtacacacgctaggtccactggtccgcgtccagtggtgtacatgcagcacgccctgttcgctgacaatgcttactggctggaaaattacgccaacgggagtctgggatttctcctggccgacgcaggctatgacgtttggatgggcaattctcggggaaacacatggagtaggcgacataagactctatctgaaactgacgaaaaattttgggcgtttagttttgatgagatggctaagtacgatctccctggtgtaatcgactttattgtcaataagaccgggcaggagaaactctactttatcggtcactccctaggcacaaccattggattcgttgccttttcgaccatgcctgagctggctcaacggattaaaatgaacttcgccctggggcctacaattagctttaaataccccaccgggatctttactaggttcttcctcctccccaattctattattaaagcggttttcggcacaaaaggattctttctggaagataaaaagacaaaaatcgcaagtacaaaaatttgcaataataagattctctggctgatttgctcggagttcatgagcttgtgggccggtagcaacaagaaaaacatgaatcagtctcgcatggatgtgtatatgtctcacgccccaacgggctcttctgtgcataacatactccatattaaacaactgtatcactctgacgagttcagggcctatgactggggcaacgacgcagacaatatgaagcattacaaccagagccaccccccaatttatgacctgaccgccatgaaggtgcccactgccatatgggccggaggccacgacgtgttggtgacacctcaagatgttgccaggattctgccccagatcaaatccttgcactacttcaagcttcttcctgattggaatcatttcgacttcgtatggggactagacgcaccccagcgcatgtactcggaaatcattgccctgatgaaggcgtacagctag

SEQ ID NO: 40951 - DNA, 1197 bp, Artificial Sequence
  derived and/or modified sequence
atgatgtggctgctgctgaccaccacctgcctgatctgcggcaccctgaacgccggcggcttcctggacctggagaacgaggtgaaccccgaggtgtggatgaacaccagcgagatcatcatctacaacggctaccccagcgaggagtacgaggtgaccaccgaggacggctacatcctgctggtgaacagaatcccctacggcagaacccacgccagaagcaccggccccagacccgtggtgtacatgcagcacgccctgttcgccgacaacgcctactggctggagaactacgccaacggcagcctgggcttcctgctggccgacgccggctacgacgtgtggatgggcaacagcagaggcaacacctggagcagaagacacaagaccctgagcgagaccgacgagaagttctgggccttcagcttcgacgagatggccaagtacgacctgcccggcgtgatcgacttcatcgtgaacaagaccggccaggagaagctgtacttcatcggccacagcctgggcaccaccatcggcttcgtggccttcagcaccatgcccgagctggcccagagaatcaagatgaacttcgccctgggccccaccatcagcttcaagtaccccaccggcatcttcaccagattcttcctgctgcccaacagcatcatcaaggccgtgttcggcaccaagggcttcttcctggaggacaagaagaccaagatcgccagcaccaagatctgcaacaacaagatcctgtggctgatctgcagcgagttcatgagcctgtgggccggcagcaacaagaagaacatgaaccagagcagaatggacgtgtacatgagccacgcccccaccggcagcagcgtgcacaacatcctgcacatcaagcagctgtaccacagcgacgagttcagagcctacgactggggcaacgacgccgacaacatgaagcactacaaccagagccacccccccatctacgacctgaccgccatgaaggtgcccaccgccatctgggccggcggccacgacgtgctggtgaccccccaggacgtggccagaatcctgccccagatcaagagcctgcactacttcaagctgctgcccgactggaaccacttcgacttcgtgtggggcctggacgccccccagagaatgtacagcgagatcatcgccctgatgaaggcctacagctag

SEQ ID NO: 40952 - protein, 375 aa, Artificial Sequence
  derived and/or modified sequence
MCTTGQVIRCKAAILWKPGAPFSIEEVEVAPPKAKEVRIKVVATGLCGTEMKVLGSKHLDLLYPTILGHEGAGIVESIGEGVSTVKPGDKVITLFLPQCGECTSCLNSEGNFCIQFKQSKTQLMSDGTSRFTCKGKSIYHFGNTSTFCEYTVIKEISVAKIDAVAPLEKVCLISCGFSTGFGAAINTAKVTPGSTCAVFGLGGVGLSVVMGCKAAGAARIIGVDVNKEKFKKAQELGATECLNPQDLKKPIQEVLFDMTDAGIDFCFEAIGNLDVLAAALASCNESYGVCVVVGVLPASVQLKISGQLFFSGRSLKGSVFGGWKSRQHIPKLVADYMAEKLNLDPLITHTLNLDKINEAVELMKTGKCIRCILLL

SEQ ID NO: 40953 - protein, 166 aa, Artificial Sequence
  derived and/or modified sequence
MGCKAAGAARIIGVDVNKEKFKKAQELGATECLNPQDLKKPIQEVLFDMTDAGIDFCFEAIGNLDVLAAALASCNESYGVCVVVGVLPASVQLKISGQLFFSGRSLKGSVFGGWKSRQHIPKLVADYMAEKLNLDPLITHTLNLDKINEAVELMKTGKCIRCILLL

SEQ ID NO: 40954 - DNA, 1128 bp, Artificial Sequence
  derived and/or modified sequence
atgtgtactaccggacaagtgatacggtgcaaagctgctatcctgtggaaaccgggcgcccccttcagcatcgaggaggtggaagtggctccgccaaaggccaaagaggtccgcatcaaggtggtggcaactggtctctgcggtaccgaaatgaaagtccttggtagcaagcacctcgatctgctttaccctaccatcctggggcacgaaggggctgggattgtggagagcattggggagggagtgtccacggtgaagccaggcgacaaggtcattactctcttcctgccacaatgcggggagtgcaccagttgtctaaacagtgagggaaacttctgcatccagtttaagcaaagcaaaacccagctcatgtctgatggaacctcacgctttacctgcaaaggaaaaagcatctaccacttcggaaatacctcaactttctgcgaatataccgtcatcaaggagatttctgttgccaaaatcgatgccgtggcccctctggagaaagtgtgtctaattagttgcggctttagtaccggatttggcgccgcgatcaatactgctaaggtgaccccgggctccacctgtgcagtgttcggcttaggtggcgtgggactcagcgtggtaatgggttgcaaggcagccggagccgcgcgcatcataggtgtggatgtaaataaagaaaagttcaaaaaggcccaagaattgggagctaccgaatgccttaacccgcaggacctgaagaaaccaattcaggaggtgctatttgatatgaccgatgcaggaatcgacttttgctttgaggccataggtaacctggatgttctggctgctgcccttgccagctgcaacgagagctatggagtgtgtgttgtggtgggcgtcctgcctgcaagtgtgcagttgaagattagcggacagctctttttctctggtagatccttgaagggtagtgtgttcggcgggtggaagagcaggcagcacattccgaaactggttgctgattatatggcagagaaactcaaccttgaccccttaataacccacacactgaatctggacaagattaatgaggctgtggagcttatgaaaactggcaaatgtatccgctgtatcctccttctgtag

SEQ ID NO: 40955 - DNA, 501 bp, Artificial Sequence
  derived and/or modified sequence
atgggctgcaaggcggctggagctgcccggataatcggtgtggatgttaacaaagaaaaatttaaaaaagcgcaggagttgggagccaccgagtgcctgaacccgcaggatctcaagaaaccaattcaagaagttctgttcgacatgacggacgctggtatagatttctgctttgaggccattggcaacctcgacgtgcttgccgcagcactagcaagctgtaacgaatcatacggggtgtgtgtcgtagttggcgtccttcccgctagcgtgcagctgaagatcagcgggcagctgttcttctcaggacggagtcttaaaggatcagtcttcggtggctggaaaagcagacaacacataccaaaattagttgctgattacatggccgaaaagcttaaccttgatcctctgattactcatacgctgaacctagacaagataaatgaggctgtagaactgatgaagaccgggaagtgcatcagatgtattctgctgttgtag

SEQ ID NO: 40956 - DNA, 1128 bp, Artificial Sequence
  derived and/or modified sequence
atgtgcaccaccggccaggtgatccgctgcaaggccgccatcctgtggaagccaggggcccccttcagcattgaggaggtggaggtggccccacccaaggccaaggaggtgcgcatcaaggtggtggccaccggcctgtgtggcacagagatgaaggtgctgggcagcaagcacctggacctgctgtaccccaccatcctgggccatgaaggagctggcatcgtggagagcatcggggagggcgtgtccacagtgaagccaggggacaaggtgatcaccctcttcctgccccagtgtggagaatgtaccagctgcctgaacagcgagggcaacttctgcatccagttcaagcagagcaagacccagctgatgtctgatggcaccagccgcttcacctgcaagggcaagagcatctaccactttggaaacaccagcaccttctgtgagtacaccgtcatcaaggagatctctgtggccaagattgatgctgtggcccccctggagaaggtgtgcctgatcagctgtggcttcagcactggatttggagctgccatcaacacagccaaggtgaccccaggcagcacctgtgctgtgtttggcctgggcggcgtgggcctgtctgtggtgatgggctgcaaggctgctggagctgcccgcatcattggagtggatgtgaacaaggagaagttcaagaaggcccaggagctgggcgccacagagtgcctgaacccccaggacctgaagaagcccatccaggaggtgctgtttgacatgacagatgctggcatcgacttctgctttgaggccatcggcaacctggatgtgctggccgccgccctggccagctgcaatgaaagctatggagtgtgtgtggtggtgggcgtgctgcctgcctctgtgcagctgaagatcagcggccagctgttcttcagcggccgcagcctgaagggctctgtgtttggaggctggaagagccggcagcacatccccaagctggtggccgactacatggccgagaagctgaacctggaccccctcatcacccacaccctgaacctggacaagatcaatgaagctgtggagctgatgaagacaggcaagtgcatccgctgcatcctgctgctgtag

SEQ ID NO: 40957 - DNA, 501 bp, Artificial Sequence
  derived and/or modified sequence
atgggctgcaaggccgccggggccgcccgcatcatcggcgtggatgtgaacaaggagaagttcaagaaggcccaggagctgggcgccacagaatgtctgaacccccaggacctgaagaagcccatccaggaggtgctgtttgacatgacagatgctggcatcgacttctgctttgaggccatcggcaacctggatgtgctggccgccgccctggccagctgcaatgaaagctatggagtgtgtgtggtggtgggcgtgctgcctgcctctgtgcagctgaagatcagcggccagctgttcttcagcggccgcagcctgaagggctctgtgtttggaggctggaagagccggcagcacatccccaagctggtggccgactacatggccgagaagctgaacctggaccccctcatcacccacaccctgaacctggacaagatcaatgaggccgtggagctgatgaagacaggcaagtgcatccgctgcatcctgctgctgtag

SEQ ID NO: 40958 - DNA, 2802 bp, Artificial Sequence
  derived and/or modified sequence
accagtcgcctgtgtacctttgtactttctacagtgaaagttgctacaggatctccctttctcaataaattcatctgcggtggagaaaatcagcatgtgtactacaggccaagtcatcagatgcaaagcagccatactctggaagcctggtgcaccattttctattgaagaggtagaagtggccccaccaaaggcaaaggaagttcgcataaaggttgtggccaccggactgtgtggtacagagatgaaagtgttggggagtaaacacttggacctcttgtatcccaccatcttgggccatgaaggggctggaatcgttgagagtattggagaaggagtaagcacagtgaaaccaggtgacaaagttatcacactctttctgccacagtgtggagaatgtacctcttgcctgaattctgagggcaatttttgtatacaattcaaacagtcaaaaacccaactgatgtctgatggtaccagcaggtttacctgcaagggaaaatcaatatatcactttggtaataccagcaccttctgtgaatacacagtgataaaggaaatctcagttgccaagattgatgcagtcgctcctctagagaaagtatgcctaattagctgtggcttttccactgggtttggtgctgcaatcaatactgccaaggtgactccaggttctacctgtgctgtgtttggcctgggaggagtcggcttgtctgttgtcatgggttgtaaagcagcaggagcagccaggatcattggagtggatgtcaacaaggagaaatttaagaaggcacaggaattgggtgctactgagtgcctcaaccctcaggacttaaagaaacccattcaagaagttttatttgatatgacagatgctggtatagacttctgctttgaggccattggaaatctggacgttctggcagctgccctcgcctcctgcaatgagagctatggggtctgtgtggttgttggggtgttgcctgccagtgttcaactcaaaatcagtggccagttgttcttctcaggacgttctttgaagggttctgtttttggaggctggaagagcagacagcacatccctaaactggttgctgattatatggcagagaagttgaatctagatccactaattactcatactctgaatcttgataaaatcaatgaagcagttgaattaatgaaaactggaaaatgtatccgctgtatcctgttactttaagtacaatgtaatacatgcaagacccaaaggatatttcaccaactcaatggcatttgatgtaattttcatgatttagaagaattattcacccaatcccatttctatattctgacttctgattcactccgcagtggacctatatctggcttctgacctaaccatttcatcaaaattgttcttacgtaacccagtgtcaccaaggatcagcctccttttcagagctagattaaggttggcttgaatcactcaactccacatccttcagacataaaaggtcaatgcaagatgctcccattttcatagttcctctacctgtggacctttatattcttgtacactatatgtctctctcacaggcctagacatgaaactctgccattttactctaaagaaacaaaactccgcattaatgagtttattgaagattcaggttaacctgaatcaagttaacccagtctcaaatgctcacttatcctatctccttggcacaaatctctcctctcctggattgccaaagaaaattcaaattattcttcaattagtcaggatgatttgactatcagcagttcatagtacccatcttcataactaagccacctagggatccagcagaaaaaaaagggatgaggggagtcatcatacaggaggtggatcatttagcaggatccacacttcctacaaagcggttgtaatattaaataacaaaactgttttttattccaatcttcacataaaacaggaataattgtatactttcttactaatgtgttccatggagtttttcctccaagaagtggcttaggggaaaatgagccccagtaatgctttgtggcatccaatccttctaccccgaccctttgactttctgccccagcccctcttagttctcctagaattaggactaaggttaagtgccctcttgggatatgacttccttcccttcctcttgatacaaaaagagcctattaccaaccctcatacacacaagagttcccttcctagttgcagactcttctgctccagctggactcccctagctctggactcccactagatcacacaggggtccctgcatgtcagtaaactttggatgaccttgggagaccaaaaaatggaatatcattttttgatctaaacaaaatagtttcctgatttaacactggccaggaaggtgggctgcaccctcagtctctctctcccatcatggttttcacatgatatcaaaggactctcataacagtctgattcttatgagttgggcatcctgtgtttccctttaggggcctgcttccttcaaatagaggagatgggtgctatgaaacctattcactctggacttgggatggctcttctccatcttcccaagtctgagctggagcctccatgcccaactctgctctgctcttctatttcctgacagcagctaaggcatgttcctgttctgcccccaaattgaccttactaacagtgagaacttggaggagtcttcgggtcttgggaaatccaagttttcccggaaacgttttgttgtaaacagtgtccacactctttgctccaataaagctcggttccttaagcca

SEQ ID NO: 40959 - DNA, 991 bp, Artificial Sequence
  derived and/or modified sequence
atctgcggtggagaaaatcagcatgtgtactacaggccaagtcatcagatgcaaagcagccatactctggaagcctggtgcaccattttctattgaagaggtagaagtggccccaccaaaggcaaaggaagttcgcataaaggtgacaaagttatcacactctttctgccacagtgtggagaatgtacctcttgcctgaattctgagggcaatttttgtatacaattcaagtgactccaggttctacctgtgctgtgtttggcctgggaggagtcggcttgtctgttgtcatgggttgtaaagcagcaggagcagccaggatcattggagtggatgtcaacaaggagaaatttaagaaggcacaggaattgggtgctactgagtgcctcaaccctcaggacttaaagaaacccattcaagaagttttatttgatatgacagatgctggtatagacttctgctttgaggccattggaaatctggacgttctggcagctgccctcgcctcctgcaatgagagctatggggtctgtgtggttgttggggtgttgcctgccagtgttcaactcaaaatcagtggccagttgttcttctcaggacgttctttgaagggttctgtttttggaggctggaagagcagacagcacatccctaaactggttgctgattatatggcagagaagttgaatctagatccactaattactcatactctgaatcttgataaaatcaatgaagcagttgaattaatgaaaactggaaaatgtatccgctgtatcctgttactttaagtacaatgtaatacatgcaagacccaaaggatatttcaccaactcaatggcatttgatgtaattttcatgatttagaagaattattcacccaatcccatttctatattctgacttctgattcactccgcagtggacctatatctggcttctgacctaaccatttcatcaaaattgttcttacgtaacccagtgtcaccaa

SEQ ID NO: 40960 - DNA, 1128 bp, Artificial Sequence
  derived and/or modified sequence
atgtgcaccaccggccaggtgatccggtgcaaggccgccatcctgtggaaacccggggcgcctttctcaatcgaagaagtcgaggtggcccccccaaaagctaaggaagttagaataaaagtggtagctaccggcctgtgcggtacagaaatgaaagttttgggctctaaacatttggacctcctgtatccaacgatcttaggacatgagggtgccgggatcgttgaatccattggagagggcgtcagcacggtcaagccgggtgacaaggtaattactctcttcctgcctcagtgcggtgagtgtacttcctgtctgaattccgagggaaatttttgtatccagtttaaacagagtaaaacccagctgatgtctgatgggacatccaggttcacttgcaaagggaagtccatatatcattttggtaacactagcactttctgtgagtatactgtgattaaagagatctccgttgccaaaatcgacgccgtggcccctctcgaaaaagtttgccttatttcttgtggctttagtacagggtttggggcggctatcaacacagcaaaagttacccccggctctacttgtgctgtgtttggactgggcggagtgggattatctgtggtgatgggctgtaaagctgccggagctgcaaggatcataggtgttgacgtaaataaggaaaaatttaagaaggcccaggaacttggagccaccgaatgtcttaacccacaggatcttaagaaacctattcaagaggtcctttttgacatgaccgacgcagggattgacttttgttttgaggccatcggcaatttggatgtcttggccgctgccctcgcatcctgtaacgaaagctacggcgtgtgtgttgtcgtcggcgtgctacctgcctctgttcaattgaagatttcagggcaactattcttcagcgggcgctctctcaaaggttcagtgtttgggggatggaagtcgaggcagcatattcccaagctcgttgccgactacatggctgaaaagctgaacctggatcctctgatcacccatactctcaatctggacaagatcaatgaagccgtggagctgatgaagacgggcaagtgcattcgctgcattctcttgctttag

SEQ ID NO: 40961 - DNA, 501 bp, Artificial Sequence
  derived and/or modified sequence
atgggctgcaaggccgccggcgccgcccggatcatcggcgtggacgtgaataaagagaagttcaaaaaagctcaagagctgggcgctacagagtgtctaaatcctcaggatctaaagaaaccaattcaggaggtgctgttcgacatgactgacgccggtattgatttctgttttgaggccattggaaatctggatgtcctggcggcggccttggcgtcctgtaacgagtcctacggggtttgtgttgtcgtcggagtcttgcccgcctccgtacagctcaagatatcaggacagctgttctttagcgggcggtctcttaaagggtctgtgttcggaggctggaagtccaggcagcatattcctaaactcgttgccgactacatggccgaaaaacttaatctggaccccttgatcacccacacactcaacctagacaagatcaacgaggcagtcgagctgatgaagacaggaaagtgtataaggtgcattctgctgctctag

SEQ ID NO: 40962 - DNA, 1128 bp, Artificial Sequence
  derived and/or modified sequence
atgtgcaccaccggccaggtgattcgttgcaaagcagctatcttatggaagccgggagcaccttttagcattgaggaggtggaggtcgcgcctcccaaggctaaagaagttaggatcaaagtggtggcgactgggctctgcggcactgagatgaaggtgcttggttccaagcatctggatctgctttaccctaccatcctgggacatgaaggtgctgggatagtggagagtattggggagggcgtctcgacggttaagcccggagataaagtcatcacactcttccttcctcaatgcggagaatgcacttcttgccttaactccgaaggtaatttctgcatccaattcaagcagtccaaaacccagctgatgagtgacggcacctccagattcacctgtaagggcaaatctatatatcatttcggcaacacctctaccttctgcgagtatacagtgattaaagaaatcagcgtcgctaaaatcgacgccgttgcccctttagaaaaggtatgccttatatcgtgcggcttttctactggtttcggcgctgctattaataccgccaaggtgacacctggcagcacatgcgcagtgttcgggctcggcggagtgggcctcagcgttgttatggggtgcaaggcggcaggagccgcacgtatcatcggagtcgacgtgaataaggagaagttcaagaaggcccaggagctgggcgctacggaatgtctgaatcctcaggacttgaaaaagcctatacaggaagtcctttttgatatgactgatgctggaattgacttctgtttcgaggcaattggcaacctcgatgttttggcggcagccttggcttcctgtaatgaatcttatggagtttgcgtggtggtgggggtcctcccagcttccgttcagctgaaaatcagcgggcagctctttttctctgggaggtcgctcaagggatccgtgttcggtgggtggaaatctcgacagcatatcccaaaactcgtcgcagattatatggccgagaagctaaaccttgacccactgattacacacacgttaaacttggataagatcaatgaggccgtagaattaatgaaaactggcaagtgcatccgctgtattttgttgctgtag

SEQ ID NO: 40963 - DNA, 501 bp, Artificial Sequence
  derived and/or modified sequence
atgggctgtaaggcagctggagccgctcgtattataggagttgacgtgaataaagagaagtttaaaaaggcgcaagagttgggcgctaccgagtgtctgaacccccaggacctgaaaaaaccaatccaggaagtactgtttgatatgaccgacgcagggatcgatttctgtttcgaagcgattggaaatttggatgtcctggcagccgctttggcctcctgtaatgagagttacggagtgtgcgttgtggtcggtgtattgcctgccagcgtccagctcaagatatcagggcagctgttctttagcggtcgcagcctcaaggggagtgtcttcggaggctggaaaagtagacagcacatccctaagctggttgcagactacatggctgagaaactcaacttagacccactgatcacacacaccctcaatctggataagattaatgaagctgtagagctgatgaagactggaaaatgcatacgatgcattcttctactatag

SEQ ID NO: 40964 - DNA, 1128 bp, Artificial Sequence
  derived and/or modified sequence
atgtgcaccaccggccaggtgatcagatgcaaggccgccatcctgtggaagcccggcgcccccttcagcatcgaggaggtggaggtggccccccccaaggccaaggaggtgagaatcaaggtggtggccaccggcctgtgcggcaccgagatgaaggtgctgggcagcaagcacctggacctgctgtaccccaccatcctgggccacgagggcgccggcatcgtggagagcatcggcgagggcgtgagcaccgtgaagcccggcgacaaggtgatcaccctgttcctgccccagtgcggcgagtgcaccagctgcctgaacagcgagggcaacttctgcatccagttcaagcagagcaagacccagctgatgagcgacggcaccagcagattcacctgcaagggcaagagcatctaccacttcggcaacaccagcaccttctgcgagtacaccgtgatcaaggagatcagcgtggccaagatcgacgccgtggcccccctggagaaggtgtgcctgatcagctgcggcttcagcaccggcttcggcgccgccatcaacaccgccaaggtgacccccggcagcacctgcgccgtgttcggcctgggcggcgtgggcctgagcgtggtgatgggctgcaaggccgccggcgccgccagaatcatcggcgtggacgtgaacaaggagaagttcaagaaggcccaggagctgggcgccaccgagtgcctgaacccccaggacctgaagaagcccatccaggaggtgctgttcgacatgaccgacgccggcatcgacttctgcttcgaggccatcggcaacctggacgtgctggccgccgccctggccagctgcaacgagagctacggcgtgtgcgtggtggtgggcgtgctgcccgccagcgtgcagctgaagatcagcggccagctgttcttcagcggcagaagcctgaagggcagcgtgttcggcggctggaagagcagacagcacatccccaagctggtggccgactacatggccgagaagctgaacctggaccccctgatcacccacaccctgaacctggacaagatcaacgaggccgtggagctgatgaagaccggcaagtgcatcagatgcatcctgctgctgtag

SEQ ID NO: 40965 - DNA, 501 bp, Artificial Sequence
  derived and/or modified sequence
atgggctgcaaggccgccggcgccgccagaatcatcggcgtggacgtgaacaaggagaagttcaagaaggcccaggagctgggcgccaccgagtgcctgaacccccaggacctgaagaagcccatccaggaggtgctgttcgacatgaccgacgccggcatcgacttctgcttcgaggccatcggcaacctggacgtgctggccgccgccctggccagctgcaacgagagctacggcgtgtgcgtggtggtgggcgtgctgcccgccagcgtgcagctgaagatcagcggccagctgttcttcagcggcagaagcctgaagggcagcgtgttcggcggctggaagagcagacagcacatccccaagctggtggccgactacatggccgagaagctgaacctggaccccctgatcacccacaccctgaacctggacaagatcaacgaggccgtggagctgatgaagaccggcaagtgcatcagatgcatcctgctgctgtag

SEQ ID NO: 40966 - protein, 72 aa, Artificial Sequence
  derived and/or modified sequence
MMMVMQPEGLGAGEGRFAGGGGGGEYMEQEEDWDRDLLLDPAWEKQQRKENESSERERDWPRMHSKSVAELS

SEQ ID NO: 40967 - protein, 900 aa, Artificial Sequence
  derived and/or modified sequence
MMMVMQPEGLGAGEGRFAGGGGGGEYMEQEEDWDRDLLLDPAWEKQQRKTFTAWCNSHLRKAGTQIENIEEDFRNGLKLMLLLEVISGERLPRPDKGKMRFHKIANVNKALDFIASKGVKLVSIGAEEIVDGNLKMTLGMIWTIILRFAIQDISVEETSAKEGLLLWCQRKTAPYRNVNVQNFHTSWKDGLALCALIHRHRPDLIDYAKLRKDDPIGNLNTAFEVAEKYLDIPKMLDAEDIVNTPKPDEKAIMTYVSCFYHAFAGAEQAETAANRICKVLAVNQENEKLMEEYEKLASELLEWIRRTVPWLENRVGEPSMSAMQRKLEDFRDYRRLHKPPRIQEKCQLEINFNTLQTKLRLSHRPAFMPSEGKLVSDIANAWRGLEQVEKGYEDWLLSEIRRLQRLQHLAEKFRQKASLHEAWTRGKEEMLSQRDYDSALLQEVRALLRRHEAFESDLAAHQDRVEHIAALAQELNELDYHEAASVNSRCQAICDQWDNLGTLTQKRRDALERMEKLLETIDRLQLEFARRAAPFNNWLDGAVEDLQDVWLVHSVEETQSLLTAHDQFKATLPEADERGAIMGIQGEIQKICQTYGLRPCSTNPYITLSPQDINTKWDMVRKLVPSCDQTLQEELARQQVNERLRRQFAAQANAIGPWIQAKVEEVGRLAAGLAGSLEEQMAGLRQQEQNIINYKTNIDRLEGDHQLLQESLVFDNKHTVYSMEHIRVGWEQLLTSIARTINEVENQVLTRDAKGLSQEQLNEFRASFNHFDRKQNGMMEPDDFRACLISMGYDLGEVEFARIMTMVDPNAAGVVTFQAFIDFMTRETAETDTTEQVVASFKILAGDKNYITPEELRRELPAKQAEYCIRRMVPYKGSGAPAGALDYVAFSSALYGESDL

SEQ ID NO: 40968 - protein, 264 aa, Artificial Sequence [sequence omitted]

SEQ ID NO: 40969 - DNA, 795 bp, Artificial Sequence
  derived and/or modified sequence
atgggcaaggccgccgccgccgtggccttcggcgccgaggtgggcgtgagactggccctgttcgccgccttcctggtgaccgagctgctgccccccttccagagactgatccagcccgaggagatgtggctgtacagaaacccctacgtggaggccgagtacttccccaccaagcccatgttcgtgatcgccttcctgagccccctgagcctgatcttcctggccaagttcctgaagaaggccgacaccagagacagcagacaggcctgcctggccgccagcctggccctggccctgaacggcgtgttcaccaacaccatcaagctgatcgtgggcagacccagacccgacttcttctacagatgcttccccgacggcctggcccacagcgacctgatgtgcaccggcgacaaggacgtggtgaacgagggcagaaagagcttccccagcggccacagcagcttcgccttcgccggcctggccttcgccagcttctacctggccggcaagctgcactgcttcaccccccagggcagaggcaagagctggagattctgcgccttcctgagccccctgctgttcgccgccgtgatcgccctgagcagaacctgcgactacaagcaccactggcaggacgtgctggtgggcagcatgatcggcatgaccttcgcctacgtgtgctacagacagtactacccccccctgaccgacgccgagtgccacaagcccttccaggacaagctggtgctgagcaccgcccagaagcccggcgacagctactgcttcgacatctag

SEQ ID NO: 40970 - DNA, 795 bp, Artificial Sequence
  derived and/or modified sequence
atggggaaagcggccgcagctgtggcttttggggctgaggtgggcgtgaggctggctctattcgccgctttcctcgtcaccgaattactgcccccttttcaaaggctcatccagcctgaagagatgtggctatacaggaatccctacgtcgaggctgagtacttcccaaccaagcccatgtttgtaatagcattcctgagcccacttagcctgatctttctggccaagtttttaaaaaaggccgacactagagactcacgccaggcctgcctcgccgcttctcttgccctcgccctgaacggagtgttcacgaacacaatcaagcttatcgtggggcgaccacgccctgactttttctatcgatgctttcctgacggcttggcccatagcgacctaatgtgcactggcgacaaggacgtggtgaacgagggccggaagtcattcccgagtggacattcctctttcgcctttgcgggcttggcattcgcatctttctatctggctggtaagcttcactgtttcactccacagggccgcggaaaaagctggcgcttttgtgcctttctctccccactgctgtttgcggccgtaatcgccttgtccagaacttgtgattacaagcaccattggcaggacgtgttagtggggtccatgatcggcatgaccttcgcttatgtctgctatcggcaatactatccccctctgacagacgccgagtgccataaaccttttcaagataagctggtattgtccacggcccagaaaccaggcgacagctattgcttcgatatttag

SEQ ID NO: 40971 - DNA, 795 bp, Artificial Sequence
  derived and/or modified sequence
atgggcaaggctgctgctgctgtggccttcggggctgaggtgggcgtgcggctggccctgtttgctgccttcctggtgacagagctgctgccccccttccagaggctcatccagcctgaggagatgtggctgtacagaaacccctacgtggaggccgagtacttccccaccaagcccatgtttgtgattgccttcctgagccccctgagcctcatcttcctggccaagttcctgaagaaggctgacacccgggacagccggcaggcctgcctggccgccagcctggccctggccctgaatggagtcttcaccaacaccatcaagctgattgtgggccggcccaggccagacttcttctaccgctgcttcccagatggcctggcccacagcgacctgatgtgcacaggagacaaggatgtggtgaatgaaggaaggaagagcttccccagcggccacagcagctttgcctttgctggcctggcctttgccagcttctacctggccggcaagctgcactgcttcaccccccagggccggggcaagtcctggaggttctgtgccttcctgagccccctgctgtttgctgctgtgattgccctgagcaggacctgtgactacaagcaccactggcaggatgtgctggtgggctccatgattggcatgacctttgcctacgtgtgctaccggcagtactacccacccctgacagatgctgagtgccacaagcccttccaggacaagctggtgctgagcacagcccagaagccaggggacagctactgctttgacatctag

SEQ ID NO: 40972 - DNA, 795 bp, Artificial Sequence
  derived and/or modified sequence
atgggcaaggccgccgccgccgtggccttcggcgccgaggtgggcgtgagactggcactttttgcagcatttttagtgacggagctactgcccccgtttcagcgattaatacagccggaagagatgtggctgtatagaaatccatatgtggaggccgaatatttccccacaaagccaatgtttgttattgcattcctgtcacctctgtccctcatttttcttgcaaaattcctaaagaaagctgatacacgagatagcagacaggcctgcctggccgcatccctggcgctggccctgaacggggtctttactaacacaatcaaactcatcgttggccgcccccggcccgattttttctaccgctgctttcccgacggccttgcccacagtgacctgatgtgtacaggagacaaggacgtagtcaatgaaggcaggaaatctttcccgagcgggcattcctcttttgcctttgctgggctggcctttgcaagcttctacctggccggaaaattacactgctttactcctcaaggcagaggcaagagctggaggttctgtgccttcctttcccctttgcttttcgctgccgttattgccctttctaggacctgcgattacaagcaccattggcaggatgtcctcgtcggctctatgatcggaatgacttttgcatatgtatgttacagacagtattatccacccctgactgacgccgagtgccacaagccctttcaggataagctggtgctgagtacggcacaaaagccaggtgattcttactgctttgatatctag

SEQ ID NO: 40973 - DNA, 795 bp, Artificial Sequence
  derived and/or modified sequence
atgggaaaggcagctgccgcagtggccttcggagctgaggtgggcgttagactcgccctttttgccgcttttctagtcaccgaactgctccctcctttccagcgcctgatccaacccgaagaaatgtggctgtacagaaatccctacgtcgaagcagagtacttcccgactaagccaatgttcgtgatcgcgtttttgagccctttgtctctgatcttcctggcgaagtttctgaaaaaggcggacacaagagattctcgccaagcctgtttggccgcatcactagcgctggcgctgaatggggtgtttactaacaccatcaagttgatcgtggggagaccaagacctgactttttctaccggtgtttccctgatggacttgcacattctgatctgatgtgcaccggagataaggatgtcgtaaatgaggggagaaagtctttcccatcgggccatagttccttcgcctttgccggactggcttttgcaagtttctacttggctgggaaattgcattgttttactcctcagggtagaggtaagtcatggagattctgcgctttcctctcaccccttcttttcgccgcagtcatcgcgctgagcagaacatgcgattataaacaccactggcaggacgtgttggttggaagcatgattggaatgacgtttgcatatgtatgctatcggcaatactaccctcctctgaccgatgctgaatgccacaagccatttcaggataagctagtcctttctacagcccagaagccaggtgattcctactgtttcgacatttag

SEQ ID NO: 40974 - DNA, 2130 bp, Artificial Sequence
  derived and/or modified sequence
tcgctcggagctcgcggccggatggggaaggcggcggcggcggtggcctttggggccgaagtgggcgtgcggctcgcgctgttcgcggccttcctggtgacggagctgctccccccgttccagagactcatccagccggaggagatgtggctctaccggaacccctacgtggaggcggagtatttccccaccaagccgatgtttgttattgcatttctctctccactgtctctgatcttcctggccaaatttctcaagaaggcagacacaagagacagcagacaagcctgcctggctgccagccttgccctggctctgaatggcgtctttaccaacacaataaaactgatcgtagggaggccacgcccagatttcttctaccgctgcttccctgatgggctagcccattctgacttgatgtgtacaggggataaggacgtggtgaatgagggccgaaagagcttccccagtggacattcttcctttgcatttgctggtctggcctttgcgtccttctacctggcagggaagttacactgcttcacaccacaaggccgtgggaaatcttggaggttctgtgcctttctgtcacctctactttttgcagctgtgattgcactgtcccgcacatgtgactacaagcatcactggcaagatgtactagttggatccatgattggaatgacatttgcctatgtctgctatcggcagtattatcctcctctgactgatgcagaatgccataaaccatttcaagacaaacttgtactttccactgcacagaagcctggggattcttattgttttgatatttaaaaattgaatctggccgggcgtggtggctcatgcctgtaatcccaacactttgggaggctgaggagggtggatcacctgaggtcaggaccagcctggccaacatggtgaaccctgtctctactaaaaatacaaaaattagccaggagttgtgtgccgtaatcccagctacctgggaggctgaggtaggagaattgcttgaacctgggagctggaggttccagtgagccgagatcgcaccactgcactccagcctaggcaacagagtgagaccccatctcaaaaaaaaaaaaaattgaatctatctcaatagagaacaggtgaactagccctcctaaccggaccatgcacaagacaagaaattctagcctttttttccccttccaaggtgcaagtgaggacataagccacactgtattctgcctccaaatgattacacacttttgcccctgctcatctatcttgaggagttacggttcttttccactactgtatgccacatgttctagtaaaaggatctttcaaaggtgtccaacaccttatgaatctggtctatcagattaatatctgaagatctacagtgtttttacatttaatttaaatgccattcttagaaggatcttgtcacaaagaagcctttacatagccccaccttgtctcagaagctagagttcattatcaaaacttaatttccatttcatatagctcaaaatcttaaaatctagggcatggccaactaaattactttgattctgtttaccttctctgatgacaattccatcaagccttaaataggaaaatgtcgaatctagggtaatttatcacttttgtgtgcatcttatctgagtccagccatctggtactgctgtgcattttgaacaccgtgggcataaacaatttgttgaattactaagtgaaaacaataataaagaagaaaatggtcaggagtgtggtttcagcactactaacagatgactgtttctacctcatttgaccataactgtacttgtgagcttctttccttccattcatgactgaagatctgctcaaatgcaccaacactgccaagtgactaaggtagaaaagaaaaatgacaggtatcgtcatctgaaggacagatgaatctttttctgccccttcttcacaatggaatataaggaacaattatgggatgtcatcagaatggatgccataggacctacagctccctttctctttattgtgattatactttaaatatgacattgtcttttatgtgtatgttcctatattttcaatgtatctttttccttcagtaaacctgatattcaaataaaa

SEQ ID NO: 40975 - protein, 176 aa, Artificial Sequence
  derived and/or modified sequence
MGKAAAAVAFGAEVGVRLALFAAFLVTELLPPFQRLIQPEEMWLYRNPYVEAEYFPTKPMFVIAFLSPLSLIFLAKFLKKADTRDSRQACLAASLALALNGVFTNTIKLIVGRPRPDFFYRCFPDGLAHSDLMCTGDKDVVNEGRKSFPSGHSSCMNIIWTLPYACFHIIEFNLES

SEQ ID NO: 40976 - DNA, 531 bp, Artificial Sequence
  derived and/or modified sequence
atgggcaaggccgccgccgccgtggccttcggcgccgaggtgggcgtgagactggccctgttcgccgccttcctggtgaccgagctgctgccccccttccagagactgatccagcccgaggagatgtggctgtacagaaacccctacgtggaggccgagtacttccccaccaagcccatgttcgtgatcgccttcctgagccccctgagcctgatcttcctggccaagttcctgaagaaggccgacaccagagacagcagacaggcctgcctggccgccagcctggccctggccctgaacggcgtgttcaccaacaccatcaagctgatcgtgggcagacccagacccgacttcttctacagatgcttccccgacggcctggcccacagcgacctgatgtgcaccggcgacaaggacgtggtgaacgagggcagaaagagcttccccagcggccacagcagctgcatgaacatcatctggaccctgccctacgcctgcttccacatcatcgagttcaacctggagagctag

SEQ ID NO: 40977 - DNA, 531 bp, Artificial Sequence
  derived and/or modified sequence
atggggaaagctgcagccgcagttgctttcggggccgaagtgggggtacgcctggcactctttgctgccttcttggtgacggaactcctgcccccatttcagcgcctgattcaacctgaggaaatgtggctttatcgaaatccatacgttgaggccgagtactttccgacaaagcctatgttcgtcatcgcattcctcagtcccctttcattgatttttttggcaaagttcttaaagaaagctgacactcgagattcgcggcaggcatgcctcgctgcctctttggcactcgcactgaacggggtgttcaccaatacaatcaaactaattgtgggtaggccacggcctgattttttctacagatgcttccctgatggtctcgcacactctgacctgatgtgtaccggtgataaggacgtagtgaatgaggggcggaaaagtttcccctcaggtcactcttcctgtatgaatatcatttggactctgccatatgcatgcttccacatcatcgaattcaatctggaatcctag

SEQ ID NO: 40978 - DNA, 531 bp, Artificial Sequence
  derived and/or modified sequence
atgggcaaggctgctgctgctgtggccttcggggctgaggtgggcgtgcggctggccctgtttgctgccttcctggtgacagagctgctgccccccttccagaggctcatccagcctgaggagatgtggctgtacagaaacccctacgtggaggccgagtacttccccaccaagcccatgtttgtgattgccttcctgagccccctgagcctcatcttcctggccaagttcctgaagaaggctgacacccgggacagccggcaggcctgcctggccgccagcctggccctggccctgaatggagtcttcaccaacaccatcaagctgattgtgggccggcccaggccagacttcttctaccgctgcttcccagatggcctggcccacagcgacctgatgtgcacaggagacaaggatgtggtgaatgaaggaaggaagagcttccccagcggccacagcagctgcatgaacatcatctggaccctgccctatgcctgcttccacatcatcgagttcaacctggagagctag

SEQ ID NO: 40979 - DNA, 531 bp, Artificial Sequence
  derived and/or modified sequence
atgggcaaggccgccgccgccgtggccttcggcgccgaggtgggcgttcgcctcgctttgttcgcagctttcctggttactgagctgctccctccatttcagcgcctcatccagccagaggaaatgtggctctatagaaatccctacgtcgaggcagaatacttccccactaagccaatgtttgtgatagcctttctcagtcccctttctctcattttcctggccaaattccttaaaaaggcagataccagggattcacggcaagcttgtttagctgcttctttggctctcgctctcaacggggtgttcaccaataccattaaactgatcgttggtcggccccggcctgatttcttttaccgatgtttcccggatggtttggctcatagtgatctcatgtgcaccggcgacaaagatgtggttaatgaaggcagaaagagcttcccttctggccacagctcttgcatgaacattatttggaccctgccgtatgcttgtttccacataatagaattcaatctggagtcctag

SEQ ID NO: 40980 - DNA, 531 bp, Artificial Sequence
  derived and/or modified sequence
atggggaaagccgctgcagctgtggcctttggcgcagaagtcggtgtgcgcctggcactgttcgcagcatttctggtaaccgagttattgcccccatttcagaggttgatacaaccggaagaaatgtggctatacagaaatccttacgtggaggcagagtactttccaacgaagcccatgttcgttatcgcctttctctcacccctgtcactgatctttctggcaaagttcctcaagaaagcagatacacgggattctcggcaggcatgcctggctgcctccttggctctggcgctcaacggcgtgttcactaatacgatcaagctcattgtcggcagaccgagacctgacttcttttacaggtgttttcctgacgggttggctcactcagatctcatgtgcaccggagataaggacgttgttaatgagggtaggaaatcctttccgagcggacactctagctgtatgaacatcatctggacattaccatatgcctgctttcatattattgaatttaacttagaaagttag

SEQ ID NO: 40981 - DNA, 794 bp, Artificial Sequence
  derived and/or modified sequence
gaggtggccacgtcagcgcagcgtcgctcggagctcgcggccggatggggaaggcggcggcggcggtggcctttggggccgaagtgggcgtgcggctcgcgctgttcgcggccttcctggtgacggagctgctccccccgttccagagactcatccagccggaggagatgtggctctaccggaacccctacgtggaggcggagtatttccccaccaagccgatgtttgttattgcatttctctctccactgtctctgatcttcctggccaaatttctcaagaaggcagacacaagagacagcagacaagcctgcctggctgccagccttgccctggctctgaatggcgtctttaccaacacaataaaactgatcgtagggaggccacgcccagatttcttctaccgctgcttccctgatgggctagcccattctgacttgatgtgtacaggggataaggacgtggtgaatgagggccgaaagagcttccccagtggacattcttcctgtatgaatatcatatggactctaccctatgcttgttttcacatcattgaatttaacctagaaagctagtagggatgggaaaatctgactactcttgtttctacaatttggaaaatccccccttctttagtaactccacagtttaacaagtctgagccttgactatttgggtaaatattacagaacagaaaggtagtttaccttcatgagatttgcacatttaattgttatattatttgcctagatcctgcaatcttgtactagcaataaaaatacctttaacgaaga

SEQ ID NO: 40982 - protein, 208 aa, Artificial Sequence
  derived and/or modified sequence
MEDLLDLDEELRYSLATSRAKMGRRAQQESAQAENHLNGKNSSLTLTGETSSAKLPRCRQGGWAGDSVKASKFRRKASEEIEDFRLRPQSLNGSDYGGDIPIIPDLEEVQEEDFVLQVAAPPSIQIKRVMTYRDLDNDLMKYSAIQTLDGEIDLKLLTKVLAPEHEVREDDVGWDWDHLFTEVSSEVLTEWDPLQTEKEDPAGQARHT

SEQ ID NO: 40983 - DNA, 627 bp, Artificial Sequence
  derived and/or modified sequence
atggaagacttactcgacttagatgaggaactccgctattcgctggctacatcacgagcaaaaatggggcgccgagcacaacaggagtccgcccaagccgagaaccacttaaacggcaagaatagctcccttacattaacaggagagactagcagtgcaaagctgccgcgatgtcgccagggcggttgggccggcgattctgtaaaagcctcaaagttcagaagaaaggcatcggaagagatcgaggactttcgcttgaggccccagagcctgaacggcagtgactacgggggcgatattccaattatccctgatctggaagaagtgcaggaagaggacttcgtgctacaggtggccgcaccaccttctattcagatcaaacgagtgatgacctaccgtgatttggacaatgacctcatgaagtactcagctatccagactctcgatggggaaatcgacttaaagctccttaccaaagtactggcccctgaacatgaggtgagggaggacgatgtaggatgggactgggaccacctgtttactgaggtatcctccgaggtattgaccgagtgggaccctctgcagaccgaaaaagaggatcccgctggccaggcccggcacacatag

SEQ ID NO: 40984 - DNA, 833 bp, Artificial Sequence
  derived and/or modified sequence
ggtttccaggaagtgacgtcaggcggccgcggagatggaggatttgctcgacttggacgaggagcttcgctacagcttggctacctccagggccaagatgggtcgccgagctcaacaggagtcagcgcaggccgagaatcacctcaatggcaagaattcctctttgactctgactggagagacttcctctgctaaattacctcgctgccgacagggaggctgggcaggtgattccgtgaaggcttcgaagtttaggaggaaggcttctgaagaaatagaagatttccgcctcagaccacagagcctgaatggatcagattatggaggagatattcctatcattccggatctggaggaagtacaggaagaagactttgttttgcaggtggcagcccctcccagcatccagataaagcgggtgatgacctaccgtgacctggacaatgacctcatgaagtactcagccattcagacactggatggggagatcgacctgaaactcctcaccaaagtgctcgcgccggagcacgaagtccgggaggatgatgtcggctgggactgggaccatctgttcactgaggtgtcctcagaggtcctcactgagtgggacccactgcagacggagaaggaggaccctgcggggcaggccaggcacacctgagcccgtcacccatgctctagacatgaagaaatgcaatgagcttaaagctaaagaagcttgtaagcagctccgaatttttacctggaatattttgtaataaaaatatttatattcagtcaaccacattggataattcaattgcaataaattgcttattctgtgccatctcctc

SEQ ID NO: 40985 - DNA, 627 bp, Artificial Sequence
  derived and/or modified sequence
atggaggacctgctggacctggatgaggagctgcgctacagcctggccaccagccgggccaagatgggccggcgggcccagcaggagagcgcccaggccgagaaccacctgaatggcaagaacagcagcctgaccctgactggagagaccagcagcgccaagctgccccgctgccggcagggcggctgggccggggacagcgtgaaggccagcaagttccggaggaaggccagcgaggagattgaggacttccggctgcggccccagagcctgaatggaagtgactatggaggagacatccccatcatcccagacctggaggaggtgcaggaggaggactttgtgctgcaggtggccgcccctccttccatccagatcaagagggtgatgacctacagagacctggacaatgacctgatgaagtacagcgccatccagaccctggatggagaaattgacctgaagctgctgaccaaggtgctggcccctgagcacgaggtgagagaagatgatgtgggctgggactgggaccacctgttcacagaggtgtcctctgaggtgctgacagagtgggaccccctgcagacagagaaggaggaccctgctggccaggcccggcacacctag

SEQ ID NO: 40986 - DNA, 627 bp, Artificial Sequence
  derived and/or modified sequence
atggaggacctgctggacctggacgaggagctgcggtacagcctggccacatccagggcaaaaatgggccgtcgcgcccaacaggagagcgctcaggccgagaatcacttaaacggcaagaatagctcactcacactgacaggagagacatctagtgcgaagttgccccgttgccgccaaggagggtgggccggcgactccgtgaaggcctctaagtttcgacggaaggcctcagaagagatcgaggattttagactcaggccccaaagtttaaacggcagcgattacggcggtgatatcccaattatccctgatctggaagaagttcaggaggaagactttgtcctccaagtggcagcccccccatcgattcaaattaaacgagtcatgacataccgggacctggacaacgacctgatgaagtatagcgccattcagacgcttgatggggaaattgatctgaagttgctgaccaaggtgctggcgcccgagcatgaagttcgcgaagatgacgtcggctgggactgggatcacctctttactgaagtttcctccgaagtgctgaccgaatgggatccactgcagactgagaaagaggatcccgcaggacaggcacggcacacgtag

SEQ ID NO: 40987 - DNA, 627 bp, Artificial Sequence
  derived and/or modified sequence
atggaagatctgctggacctggacgaggaactcaggtatagtctggcgacttcgcgggcaaagatggggaggcgggcacagcaagagagcgcacaggcagagaatcacttgaatggcaagaactcaagcctgactctgaccggggaaactagcagcgcaaaactccctcgatgccgccaggggggatgggcgggtgattccgtgaaggcatccaagtttaggcgcaaagcgtccgaggagatcgaagacttcaggctgaggccacagagcctgaatggcagcgattacggcggtgacattcccattatcccagacttggaggaagtacaggaggaggacttcgtgctgcaggtagctgcacctcctagtatccagataaaacgtgtcatgacttaccgagacttagacaacgatctgatgaagtacagcgccattcagacactcgacggcgagatcgatctcaagctcctgaccaaggtgctcgccccagaacacgaggtgcgcgaagatgacgtgggatgggactgggatcacctctttaccgaggtgagctcagaagttttgactgaatgggacccgctacagacagagaaggaagatcccgcaggccaggcccgacatacttag

SEQ ID NO: 40988 - DNA, 627 bp, Artificial Sequence
  derived and/or modified sequence
atggaggacctgctggacctggacgaggagctgagatacagcctggccaccagcagagccaagatgggcagaagagcccagcaggagagcgcccaggccgagaaccacctgaacggcaagaacagcagcctgaccctgaccggcgagaccagcagcgccaagctgcccagatgcagacagggcggctgggccggcgacagcgtgaaggccagcaagttcagaagaaaggccagcgaggagatcgaggacttcagactgagaccccagagcctgaacggcagcgactacggcggcgacatccccatcatccccgacctggaggaggtgcaggaggaggacttcgtgctgcaggtggccgccccccccagcatccagatcaagagagtgatgacctacagagacctggacaacgacctgatgaagtacagcgccatccagaccctggacggcgagatcgacctgaagctgctgaccaaggtgctggcccccgagcacgaggtgagagaggacgacgtgggctgggactgggaccacctgttcaccgaggtgagcagcgaggtgctgaccgagtgggaccccctgcagaccgagaaggaggaccccgccggccaggccagacacacctag

SEQ ID NO: 40989 - protein, 624 aa, Artificial Sequence
  derived and/or modified sequence
MALRARALYDFRSENPGEISLREHEVLSLCSEQDIEGWLEGVNSRGDRGLFPASYVQVIRAPEPGPAGDGGPGAPARYANVPPGGFEPLPVAPPASFKPPPDAFQALLQPQQAPPPSTFQPPGAGFPYGGGALQPSPQQLYGGYQASQGSDDDWDDEWDDSSTVADEPGALGSGAYPDLDGSSSAGVGAAGRYRLSTRSDLSLGSRGGSVPPQHHPSGPKSSATVSRNLNRFSTFVKSGGEAFVLGEASGFVKDGDKLCVVLGPYGPEWQENPYPFQCTIDDPTKQTKFKGMKSYISYKLVPTHTQVPVHRRYKHFDWLYARLAEKFPVISVPHLPEKQATGRFEEDFISKRRKGLIWWMNHMASHPVLAQCDVFQHFLTCPSSTDEKAWKQGKRKAEKDEMVGANFFLTLSTPPAAALDLQEVESKIDGFKCFTKKMDDSALQLNHTANEFARKQVTGFKKEYQKVGQSFRGLSQAFELDQQAFSVGLNQAIAFTGDAYDAIGELFAEQPRQDLDPVMDLLALYQGHLANFPDIIHVQKGALTKVKESRRHVEEGKMEVQKADGIQDRCNTISFATLAEIHHFHQIRVRDFKSQMQHFLQQQIIFFQKVTQKLEEALHKYDSV

SEQ ID NO: 40990 - DNA, 1875 bp, Artificial Sequence
  derived and/or modified sequence
atggccctgagagccagagccctgtacgacttcagaagcgagaaccccggcgagatcagcctgagagagcacgaggtgctgagcctgtgcagcgagcaggacatcgagggctggctggagggcgtgaacagcagaggcgacagaggcctgttccccgccagctacgtgcaggtgatcagagcccccgagcccggccccgccggcgacggcggccccggcgcccccgccagatacgccaacgtgccccccggcggcttcgagcccctgcccgtggccccccccgccagcttcaagcccccccccgacgccttccaggccctgctgcagccccagcaggcccccccccccagcaccttccagccccccggcgccggcttcccctacggcggcggcgccctgcagcccagcccccagcagctgtacggcggctaccaggccagccagggcagcgacgacgactgggacgacgagtgggacgacagcagcaccgtggccgacgagcccggcgccctgggcagcggcgcctaccccgacctggacggcagcagcagcgccggcgtgggcgccgccggcagatacagactgagcaccagaagcgacctgagcctgggcagcagaggcggcagcgtgcccccccagcaccaccccagcggccccaagagcagcgccaccgtgagcagaaacctgaacagattcagcaccttcgtgaagagcggcggcgaggccttcgtgctgggcgaggccagcggcttcgtgaaggacggcgacaagctgtgcgtggtgctgggcccctacggccccgagtggcaggagaacccctaccccttccagtgcaccatcgacgaccccaccaagcagaccaagttcaagggcatgaagagctacatcagctacaagctggtgcccacccacacccaggtgcccgtgcacagaagatacaagcacttcgactggctgtacgccagactggccgagaagttccccgtgatcagcgtgccccacctgcccgagaagcaggccaccggcagattcgaggaggacttcatcagcaagagaagaaagggcctgatctggtggatgaaccacatggccagccaccccgtgctggcccagtgcgacgtgttccagcacttcctgacctgccccagcagcaccgacgagaaggcctggaagcagggcaagagaaaggccgagaaggacgagatggtgggcgccaacttcttcctgaccctgagcaccccccccgccgccgccctggacctgcaggaggtggagagcaagatcgacggcttcaagtgcttcaccaagaagatggacgacagcgccctgcagctgaaccacaccgccaacgagttcgccagaaagcaggtgaccggcttcaagaaggagtaccagaaggtgggccagagcttcagaggcctgagccaggccttcgagctggaccagcaggccttcagcgtgggcctgaaccaggccatcgccttcaccggcgacgcctacgacgccatcggcgagctgttcgccgagcagcccagacaggacctggaccccgtgatggacctgctggccctgtaccagggccacctggccaacttccccgacatcatccacgtgcagaagggcgccctgaccaaggtgaaggagagcagaagacacgtggaggagggcaagatggaggtgcagaaggccgacggcatccaggacagatgcaacaccatcagcttcgccaccctggccgagatccaccacttccaccagatcagagtgagagacttcaagagccagatgcagcacttcctgcagcagcagatcatcttcttccagaaggtgacccagaagctggaggaggccctgcacaagtacgacagcgtgtag

SEQ ID NO: 40991 - DNA, 1875 bp, Artificial Sequence
  derived and/or modified sequence
atggctttaagagcacgggctttgtacgactttcgaagtgagaacccaggcgagatatccctgcgggagcacgaggttctctcactttgttcagaacaggatattgaggggtggctcgagggtgtcaactcacgcggagaccgaggactgtttccagccagttacgtgcaagtgatcagggctcctgagcctggcccagccggagatggcggcccgggtgctcctgcgaggtacgcgaacgtgcctccggggggattcgagccgctgcctgttgcccccccagcctctttcaaacctcctccagacgcctttcaggcattattgcagcctcaacaggcgccccctcccagcaccttccagccacccggggctggcttcccctatgggggaggtgctctacagccttccccgcagcagctctatgggggataccaggcttctcaaggctcagacgacgattgggacgatgaatgggatgattccagtactgtcgcggatgaaccgggagccctggggtctggtgcatatcccgatctcgacgggagctcctccgccggcgtgggtgccgctggacggtaccgactgtctacacggagcgaccttagcctgggatcccggggcggcagcgtgcctccccagcatcacccctctggcccaaaatcttctgcaacagtatccaggaacctaaacagattttccacattcgtgaaaagcggaggtgaagccttcgtgcttggagaagcgtccggattcgtgaaagatggtgataagttgtgcgtggttctcgggccttatggccctgagtggcaggaaaatccttatccttttcagtgtaccatagacgacccaacaaaacagactaagttcaaagggatgaaatcatatatcagttacaagctagtgccaactcatactcaggtgcccgtgcaccggaggtataagcactttgactggctgtacgctcgtctggccgagaagttccctgtgattagcgtcccccatctccccgagaaacaggcaacaggtaggtttgaagaggattttatttcaaagagaagaaaggggctgatttggtggatgaaccatatggcctctcatcctgttctggcccagtgcgatgtttttcagcatttcctgacctgtccttcatcaactgacgaaaaagcctggaagcaaggaaagagaaaagccgagaaagacgagatggttggcgccaatttctttctgacgctgtcgacaccgccggccgcagcgctggacttgcaggaagtcgagagcaagatcgacggatttaagtgctttactaagaagatggacgatagcgccctgcagttgaatcatactgctaatgagtttgcccgcaagcaggtaaccggatttaagaaagaatatcagaaagtcggccagtcttttcgtggtttgtcacaggcctttgagctggatcagcaggcatttagcgtgggacttaatcaggccatcgctttcacgggagatgcatacgacgccattggagaactctttgccgaacagcccagacaagatctggaccccgtaatggacctccttgctctttatcaaggtcatttagcaaatttccctgatatcatccatgtgcagaaaggagccttgaccaaggttaaagagagtagaaggcacgtcgaggaggggaaaatggaggtgcagaaggccgatggcatccaagacaggtgtaacaccatttccttcgccacactcgccgagatccaccacttccaccaaatccgggtgcgagacttcaaatcgcagatgcagcacttcctgcagcagcagattatcttctttcagaaggtcacacagaagctggaagaagcgcttcacaagtatgattccgtttag

SEQ ID NO: 40992 - DNA, 1875 bp, Artificial Sequence
  derived and/or modified sequence
atggccctgcgggcccgggccctgtatgacttccgctctgagaaccctggagagatcagcctgcgggagcacgaggtgctgagcctgtgcagcgagcaggacatcgagggctggctggagggcgtgaacagcagaggagaccggggcctcttccctgccagctatgtgcaggtgatccgggcccctgagcccggccctgctggagatggcggccctggggccccagcccgctatgccaacgtgcccccaggcggctttgagcccctgcctgtggcccccccagccagcttcaagcccccaccagatgccttccaggccctgctgcagccccagcaggcccccccacccagcaccttccagcccccaggggccggcttcccctacggcggcggggccctgcagcccagcccccagcagctgtatggaggctaccaggccagccagggcagtgatgatgactgggatgatgagtgggatgacagcagcacagtggctgatgagcccggggccctgggcagcggggcctacccagacctggatggcagcagcagcgctggggtgggcgccgccggccgctaccgcctgagcaccaggagtgacctgagcctgggcagcagaggaggctctgtgcccccccagcaccaccccagcggccccaagagcagcgccaccgtgtccaggaacctgaaccgcttcagcacctttgtgaagagcggcggggaggcctttgtgctgggggaggccagcggctttgtgaaggatggagacaagctgtgtgtggtgctgggcccctacggccctgagtggcaggagaacccctaccccttccagtgcaccattgatgaccccaccaagcagaccaagttcaagggcatgaagagctacatctcctacaagctggtgcccacccacacccaggtgcctgtgcaccggcgctacaagcactttgactggctgtatgcccggctggccgagaagtttcctgtgatctctgtgccccacctgcctgagaagcaggccaccggccgctttgaggaggacttcatcagcaagaggaggaagggcctcatctggtggatgaaccacatggccagccaccctgtgctggcccagtgtgatgtgttccagcacttcctgacctgccccagcagcacagatgagaaggcctggaagcagggcaagaggaaggccgagaaggatgagatggtgggcgccaacttcttcctgaccctgagcaccccacctgctgctgccctggacctgcaggaggtggagagcaagattgatggcttcaagtgcttcaccaagaagatggatgattctgccctgcagctgaaccacacagccaatgaatttgccaggaagcaggtgacaggcttcaagaaggagtaccagaaggtgggccagagcttccggggcctgagccaggcctttgagctggaccagcaggccttctctgtgggcctgaaccaggccatcgccttcaccggagatgcctatgatgccatcggggagctgtttgctgagcagccccggcaggacctggaccctgtgatggacctgctggccctgtaccagggccacctggccaacttcccagacatcatccacgtgcagaagggggccctgaccaaggtgaaggagagccgccgccacgtggaggagggcaagatggaggtgcagaaggcagatggcatccaggaccgctgcaacaccatcagctttgccaccctggccgagatccaccacttccaccagatccgggtgcgggacttcaagagccagatgcagcacttcctgcagcagcagatcatcttcttccagaaggtgacccagaagctggaggaggccctgcacaagtatgattctgtgtag

SEQ ID NO: 40993 - DNA, 1875 bp, Artificial Sequence
  derived and/or modified sequence
atggccctgcgggcccgggccctgtacgacttccggagcgagaacccgggtgagatatccctgagggagcacgaggttctctcgctgtgctctgagcaggatatcgagggatggcttgaaggcgtgaatagcagaggcgaccgcggtctattcccggccagttacgtgcaggtcattagagcccccgaacctggcccagccggggatgggggcccaggcgcaccagctaggtatgctaatgtacccccgggcggcttcgagcctctaccggtagcgcccccagcgagctttaagcctccgccagatgcattccaggccctgcttcagccacagcaggcgcccccaccaagtaccttccaacccccgggcgccggttttccttatggaggaggggctttgcagccaagcccccaacagctgtacgggggatatcaggccagccaggggagcgatgatgactgggacgacgaatgggacgattcatcaacagtcgccgacgaacctggggctttaggctccggtgcctatcccgaccttgatggttcctcctcagcaggggtgggcgctgccggccgatataggcttagcaccaggtccgatctgtcccttggttcacgaggaggtagcgtgcctcctcagcaccacccttctggacccaaatccagcgcgacggtttctaggaacctcaacaggtttagtacttttgtcaagtcaggcggagaggcatttgtgctgggtgaggccagcggcttcgtgaaggacggcgataagctctgcgtggtgctgggcccttatggccctgagtggcaagagaatccctacccatttcagtgcacgatcgatgacccgactaagcagacaaaatttaagggaatgaagtcttatatatcttataaactggtgccaacacacactcaagtgccagttcacagacgctataagcacttcgactggttgtacgcccgactcgccgaaaagtttccagtgataagcgttccgcacctcccagagaagcaagccacaggcagattcgaggaagatttcatttcgaagaggcgcaaaggcctcatctggtggatgaaccacatggcgtcccaccctgtcctggcccagtgcgatgtgttccagcatttcctgacgtgcccatccagcaccgacgagaaagcatggaaacagggcaagcgaaaggcggaaaaggacgagatggtgggcgccaatttcttcttgactttatcaaccccacctgcggccgcattggatctgcaagaagttgagagcaagattgacggtttcaaatgttttacaaagaaaatggacgattcagccctgcagctgaatcatacagcaaatgaattcgctcggaagcaggtaaccgggttcaagaaggaataccaaaaggtgggacagagcttccgaggtctgtcacaagctttcgagctggaccagcaggctttctccgtcggcctcaaccaggcaatcgcttttacaggagatgcctacgacgctattggcgagctgttcgcggagcagccaaggcaggacctcgatccagtcatggacctgctggctttgtaccagggccaccttgccaattttccagacatcatccatgtgcagaagggagctcttaccaaggtgaaggagtctagaaggcacgtcgaagaaggtaaaatggaggtgcagaaagccgacggtatccaggacagatgtaacaccatcagttttgcaacgctcgccgagattcaccactttcaccaaatccgcgtcagagatttcaaatctcaaatgcagcattttctgcagcagcaaatcatcttctttcagaaggtcactcagaaattggaagaagcgctgcacaagtacgattcagtctag

SEQ ID NO: 40994 - DNA, 1875 bp, Artificial Sequence
  derived and/or modified sequence
atggccctacgcgcacgagcgctgtacgactttaggagtgagaaccccggagaaatctcactaagggagcatgaggtgctcagcctgtgcagtgagcaggacatcgaggggtggctggaaggcgtaaattcccggggagacagggggctgttccccgcaagttacgttcaagttatccgggctcctgaaccgggtcctgccggtgacggcggacctggcgctcccgcaaggtatgccaacgtcccaccgggaggtttcgaaccgctgcccgtagccccacccgcatcgtttaagccaccgccagacgcgttccaagctctgctccagcctcagcaggctcctcccccttcgacgtttcaaccaccaggtgctggcttcccgtatgggggtggcgcactgcagcccagcccgcaacagttgtacggcggataccaggcctcacaagggagtgatgacgactgggacgacgaatgggacgactccagtactgtggccgatgaaccgggagcactagggtctggggcttatccggatctggacgggtcgtcgtcagcaggggtgggcgcagccggtagataccggctgtccactcgatccgatcttagcctggggtctcgcggaggttccgtacctccccagcaccacccaagcggaccgaagtcatctgctaccgtgtcccggaacctgaaccgattcagcacgtttgtgaaatcaggcggtgaagcgtttgtgttaggtgaagctagtggatttgtcaaggacggcgacaagttgtgcgtggtactgggaccgtatggcccagagtggcaggaaaacccgtaccctttccagtgcacaatagatgatcccactaagcaaaccaagttcaaaggtatgaagtcctacatttcctataagctggtccctacccacacacaggtgcccgtgcaccggagatacaagcattttgactggctgtatgcacgtctggccgagaagttcccagttatcagtgttccccatcttcctgagaagcaagcaacaggacggtttgaagaggacttcatttccaagcgcaggaaaggactgatatggtggatgaatcacatggcaagtcaccctgtgctggcacagtgcgatgtgtttcagcatttcctgacctgtcccagctctaccgatgaaaaggcctggaagcagggcaaaagaaaggccgagaaggacgaaatggttggagctaatttttttctgactctcagtacccctccagctgccgctctggatctgcaggaggtggaaagcaaaatcgacggtttcaaatgttttactaagaagatggatgactcagcactccagctcaaccacaccgccaacgagttcgcacggaaacaagtgaccgggttcaagaaggaatatcagaaggtaggacagtcctttcggggactgagccaagctttcgaactggaccaacaggcttttagtgtgggcttaaaccaggccatcgcttttacaggcgatgcctatgacgcgataggtgagttgtttgccgagcaacccagacaggacctggatccggtgatggacctcttggccctgtaccaaggacacctcgccaattttcctgacatcattcacgtgcagaagggagccctgacgaaagtcaaggaatcacgaagacatgtcgaggaaggaaagatggaagttcagaaggctgatggcattcaggaccggtgcaacacaatttccttcgccactctcgccgaaattcatcattttcaccagattcgtgtaagggactttaaaagtcagatgcaacattttcttcaacagcagatcatcttcttccagaaagtgacccagaagctggaggaggctctacataaatacgattctgtgtag

SEQ ID NO: 40995 - DNA, 5375 bp, Artificial Sequence
  derived and/or modified sequence
agtcggcgctgcgaagtggaggcgctgcgagcggagccgcgcggagggcgcgaccggctggtccgggcagcgtgggtttgccgccttcggggctccagtccgcgcgccagggctcgagcagtaccgcgggcccctcaggtgggcctcggctcgggacgccgggagtcgggaccgccagtcggggcgccgggaccatggcgctgcgcgcccgggcgctgtacgacttcaggtcggagaacccaggagagatctcgctgcgagagcacgaggtgctgagcctgtgcagcgagcaggacatcgagggctggctcgagggggtcaacagccgcggcgaccgcggcctcttcccggcctcctatgtgcaggtgatccgcgcccccgagcctggcccggcgggagacggcggcccgggcgccccggcccgctacgccaatgtgccccccgggggcttcgagcccctgcctgtcgcgccccccgcctccttcaagccgccgcctgacgccttccaggcgctgctgcagccacagcaggcgccgcctccgagcaccttccagccgcccggcgcgggcttcccgtacggcgggggcgccctgcagccgtcgcctcagcagctctacggcggctaccaggccagccaaggcagcgatgatgactgggacgacgagtgggacgacagctccacggtggcggacgagccgggcgctctgggcagcggagcatacccggacctcgacggctcgtcttcggcgggtgtgggcgcagccggccgctaccgcctgtccacgcgctccgacctgtccctgggttcccgcggcggctcggtccccccgcagcaccacccgtcggggcccaagagctcggccaccgtgagccgcaacctcaatcgcttctccaccttcgtcaagtccggcggggaggccttcgtgctgggggaggcgtcaggcttcgtgaaggacggggacaagctgtgcgtggtgctggggccctatggccccgagtggcaggagaacccctacccgttccagtgcaccatcgacgaccccaccaagcagaccaagttcaagggcatgaagagctacatctcctacaagctggtgcccacgcacacgcaggtgccggtgcatcggcgctacaagcacttcgactggctgtacgcgcgcctggcggagaagttcccggtcatctccgtgccccacctgcccgagaagcaggccaccggccgcttcgaggaggacttcatctctaagcgcaggaagggcctgatctggtggatgaaccacatggccagccacccagtgctggcgcagtgcgacgtcttccagcacttcctgacgtgccccagcagcaccgacgagaaagcctggaagcagggcaagaggaaggccgagaaggacgagatggtgggcgccaacttcttcctgacccttagcacgccccccgccgctgcccttgacctgcaggaggtggagagcaagatcgacggcttcaagtgcttcaccaagaagatggacgacagcgcgctgcagctcaaccacacggccaacgagttcgcgcgcaagcaggtgaccggcttcaaaaaggagtatcagaaggtgggccagtccttccgcggcctcagccaggcctttgagctggaccagcaggccttctcggtgggcctgaaccaggctatcgccttcaccggagatgcctatgacgccattggcgagctcttcgcggagcagcccaggcaggacctggatcccgtcatggacctattagcgctgtatcaggggcatctggctaacttcccggacatcatccacgttcagaaaggtaaagcctggcccttagagcaggtgatatggagtgtattgtgcaggctgaaaggggcgactttgacagcagtaccactgtgggtttcagaatcatattctacaggtgaggaagcgagcagagacgtggacgcctgggtcttttccctagagtgagctcttaccaaagtcaaggagagtaggcgacacgtggaggaagggaagatggaggtgcagaaggctgacggcattcaggatcgctgtaacactatttcttttgccactttggctgaaattcaccacttccatcaaattcgagtgagagactttaaatcacagatgcagcatttcttacaacaacaaataatatttttccaaaaagttacccagaagttggaagaagctcttcacaaatatgatagtgtttaatgactggacgttggattatggactttttcagttcaaggataatttctacagcagaataaaaactgctgtcaaagagctattgccagctatcagtggtggtacaaggacggttttgtgttcatctgaaacccagctgaatttataattatgtaggaaataaacagttaatatggttatataatagaaacagtaccacacattgtaactaaattatactatgtatgcctacactaccattgtaacttttggaataatgattatactatttgccttattgctttttgaagtatgggtattttagtgcatactttgtagacctcaaaacccatgaagggtctcaaagaagctggctggatacaagcctgctgtggatgcctttttactctcatagattgggattacctaaattcaacctattctctgtttacaaactccaactagagcagctatgcgaccttgtgcctttagactcttggtttttcatttctccccgtcccttccccacctttttaaagtaagccacagcttttctgattgaaagagtgaaaggccagtgcatataatgacaaactgatgataaccttatattggcagtagggggtggggggggcggtggggtgggacgatcagctgtcatcaatttgcacagcaagtattatctcctgataagatgctggtgaatgcaggggagtgagattcattgctcatctttggatatgaagtctgttagggaagaaacagtgccactattcccttagatgcaacagtagcatagcctcttcacccaggcgtcccaaaagcttggcgtgaagatttcagcaaacatgtcttacaacatgaggaggaggagtctaaatcagtcaggggataaaagtatcgaatcattgacaacacacacttggctttagttcttaggagggttttgtttttgtttttgtttttaggttgaagattttcttttaatattcagttttttgaaaaaaaatggatctacactgttaactgattgagactccactgtgattcacttgtttacttaaaaacttttcagggatgtctgtaaatttcagtgttaatatgtcatgaaaagtggtgtggattgatctaaggagggaccagaaataatttttgctattccaaatactgaaggaaaaagataattgatttatactatgttttaaaaaaaaaaaaggtattgatgagccccccccccccaggacatttaaccttaaaatttattttaaatgtattcttttattattataagggaaatacagatggctgataaataccaaaaagattcaaaagcagcttaatttaaaaagcacaaagagattctggcttacagtgccccaatctcaatgtttttatagttgctgagctaactaatgtgattattgagtttacagatttaaaaattgtcactgttagagtatctactgtttttatgaagtcaaacttatgctgcctcagaaatccctgggtactgaaatggtaacatggaagtgaagaggtcactttgaaatattggtgagtcacaaagattaaagaaaaggatcagtttgcagatactcagaaaaggttattgaaataattactgaacagcacattttctctctaaaaagtagtttcatatgggttgtatttttaagatcagattatcattttgatatttggtcaaaattttgtaccttaggttacttagagccagatttaacatcatgaacattatgtggctttgtctttactacagatatgtggaactgtaaccaaatatgttgtctctaaaacttgttgattgcaaaatacagttctataaacaaaacccatatgtatatataaatgttaattttgcggaagtctggaaattataactatagcatttaagtttgagtctgtattggacaaataagcaccatgcttttcaaatgatttaaaaattacttttatttgcctctttattttgatggtggttggatttttttttttttaatagtaaaatcactaaacttgtgcaatggtagcatggaaattatctgaggtatattgtatgattgtactttagccagggtggacatagcttaaattataaaaactaaagatgaaagtacaaggaagtataagttatacttatgtaagtataaattcatgctgcctacttctaagagaaatttcattcttcataaccacataacattataatgccactgattcatacgggatttacattaattctatgggggaggacactagaattattagtgttcattttcatctaagatctttattctctaacgttcttggtcctattgaaacattgcagtatgcaaaactactgcaatgttaaacccaagagaaaagccattatcatgtgtatgctggtcatcatgatcagtgtggtacaatttttaaaaataaactatcatgcccttcatgccattatttgtctttatttctatgatttataatcctgatatgtgatgtgtttgtaacacagggtgtgcacttgagcctggttttactgtttttattagacagagttgtttatatgctgtaactgtaacgcagcgagactggttctacagccatgtgtcgtaatcttgttccccgtccaagctgttgtatctgaaggtacccagtttgcacccaggatgagggaacgcattcaaaagtgaaatgtaaagccagtgcacgaatattatagtaattgagattttcccaggcttcactgatacagttgttttgcatttattcacaataatacagcagattcttaaatgccgatttttaattgtcttaaattttgctgctgttctcataattaaggacttgaaaaatgttttagtctgtcaagtatgtaaagtttgtgtaaaaacttttaaatgtcattcttaagttcattgccatagccattttccatttatgtcttcattttccaaaaatcaaatgccatgtctgatacctttaagtccataagcattcaattttctcatttccaccttcatctttggttaacagaataagtaaaacagggtattatttatttgtagtctagaaatgttgaatattgttttatttccttcaaaatgttatgattagtgcagatcagccatgtttatctttttaaaaaataaacaggttgctttatttctt

SEQ ID NO: 40996 - DNA, 5218 bp, Artificial Sequence
  derived and/or modified sequence
ggcgctgcgaagtggaggcgctgcgagcggagccgcgcggagggcgcgaccggctggtccgggcagcgtgggtttgccgccttcggggctccagtccgcgcgccagggctcgagcagtaccgcgggcccctcaggtgggcctcggctcgggacgccgggagtcgggaccgccagtcggggcgccgggaccatggcgctgcgcgcccgggcgctgtacgacttcaggtcggagaacccaggagagatctcgctgcgagagcacgaggtgctgagcctgtgcagcgagcaggacatcgagggctggctcgagggggtcaacagccgcggcgaccgcggcctcttcccggcctcctatgtgcaggtgatccgcgcccccgagcctggcccggcgggagacggcggcccgggcgccccggcccgctacgccaatgtgccccccgggggcttcgagcccctgcctgtcgcgccccccgcctccttcaagccgccgcctgacgccttccaggcgctgctgcagccacagcaggcgccgcctccgagcaccttccagccgcccggcgcgggcttcccgtacggcgggggcgccctgcagccgtcgcctcagcagctctacggcggctaccaggccagccaaggcagcgatgatgactgggacgacgagtgggacgacagctccacggtggcggacgagccgggcgctctgggcagcggagcatacccggacctcgacggctcgtcttcggcgggtgtgggcgcagccggccgctaccgcctgtccacgcgctccgacctgtccctgggttcccgcggcggctcggtccccccgcagcaccacccgtcggggcccaagagctcggccaccgtgagccgcaacctcaatcgcttctccaccttcgtcaagtccggcggggaggccttcgtgctgggggaggcgtcaggcttcgtgaaggacggggacaagctgtgcgtggtgctggggccctatggccccgagtggcaggagaacccctacccgttccagtgcaccatcgacgaccccaccaagcagaccaagttcaagggcatgaagagctacatctcctacaagctggtgcccacgcacacgcaggtgccggtgcatcggcgctacaagcacttcgactggctgtacgcgcgcctggcggagaagttcccggtcatctccgtgccccacctgcccgagaagcaggccaccggccgcttcgaggaggacttcatctctaagcgcaggaagggcctgatctggtggatgaaccacatggccagccacccagtgctggcgcagtgcgacgtcttccagcacttcctgacgtgccccagcagcaccgacgagaaagcctggaagcagggcaagaggaaggccgagaaggacgagatggtgggcgccaacttcttcctgacccttagcacgccccccgccgctgcccttgacctgcaggaggtggagagcaagatcgacggcttcaagtgcttcaccaagaagatggacgacagcgcgctgcagctcaaccacacggccaacgagttcgcgcgcaagcaggtgaccggcttcaaaaaggagtatcagaaggtgggccagtccttccgcggcctcagccaggcctttgagctggaccagcaggccttctcggtgggcctgaaccaggctatcgccttcaccggagatgcctatgacgccattggcgagctcttcgcggagcagcccaggcaggacctggatcccgtcatggacctattagcgctgtatcaggggcatctggctaacttcccggacatcatccacgttcagaaaggagctcttaccaaagtcaaggagagtaggcgacacgtggaggaagggaagatggaggtgcagaaggctgacggcattcaggatcgctgtaacactatttcttttgccactttggctgaaattcaccacttccatcaaattcgagtgagagactttaaatcacagatgcagcatttcttacaacaacaaataatatttttccaaaaagttacccagaagttggaagaagctcttcacaaatatgatagtgtttaatgactggacgttggattatggactttttcagttcaaggataatttctacagcagaataaaaactgctgtcaaagagctattgccagctatcagtggtggtacaaggacggttttgtgttcatctgaaacccagctgaatttataattatgtaggaaataaacagttaatatggttatataatagaaacagtaccacacattgtaactaaattatactatgtatgcctacactaccattgtaacttttggaataatgattatactatttgccttattgctttttgaagtatgggtattttagtgcatactttgtagacctcaaaacccatgaagggtctcaaagaagctggctggatacaagcctgctgtggatgcctttttactctcatagattgggattacctaaattcaacctattctctgtttacaaactccaactagagcagctatgcgaccttgtgcctttagactcttggtttttcatttctccccgtcccttccccacctttttaaagtaagccacagcttttctgattgaaagagtgaaaggccagtgcatataatgacaaactgatgataaccttatattggcagtagggggtggggggggcggtggggtgggacgatcagctgtcatcaatttgcacagcaagtattatctcctgataagatgctggtgaatgcaggggagtgagattcattgctcatctttggatatgaagtctgttagggaagaaacagtgccactattcccttagatgcaacagtagcatagcctcttcacccaggcgtcccaaaagcttggcgtgaagatttcagcaaacatgtcttacaacatgaggaggaggagtctaaatcagtcaggggataaaagtatcgaatcattgacaacacacacttggctttagttcttaggagggttttgtttttgtttttgtttttaggttgaagattttcttttaatattcagttttttgaaaaaaaatggatctacactgttaactgattgagactccactgtgattcacttgtttacttaaaaacttttcagggatgtctgtaaatttcagtgttaatatgtcatgaaaagtggtgtggattgatctaaggagggaccagaaataatttttgctattccaaatactgaaggaaaaagataattgatttatactatgttttaaaaaaaaaaaaggtattgatgagccccccccccccaggacatttaaccttaaaatttattttaaatgtattcttttattattataagggaaatacagatggctgataaataccaaaaagattcaaaagcagcttaatttaaaaagcacaaagagattctggcttacagtgccccaatctcaatgtttttatagttgctgagctaactaatgtgattattgagtttacagatttaaaaattgtcactgttagagtatctactgtttttatgaagtcaaacttatgctgcctcagaaatccctgggtactgaaatggtaacatggaagtgaagaggtcactttgaaatattggtgagtcacaaagattaaagaaaaggatcagtttgcagatactcagaaaaggttattgaaataattactgaacagcacattttctctctaaaaagtagtttcatatgggttgtatttttaagatcagattatcattttgatatttggtcaaaattttgtaccttaggttacttagagccagatttaacatcatgaacattatgtggctttgtctttactacagatatgtggaactgtaaccaaatatgttgtctctaaaacttgttgattgcaaaatacagttctataaacaaaacccatatgtatatataaatgttaattttgcggaagtctggaaattataactatagcatttaagtttgagtctgtattggacaaataagcaccatgcttttcaaatgatttaaaaattacttttatttgcctctttattttgatggtggttggatttttttttttttaatagtaaaatcactaaacttgtgcaatggtagcatggaaattatctgaggtatattgtatgattgtactttagccagggtggacatagcttaaattataaaaactaaagatgaaagtacaaggaagtataagttatacttatgtaagtataaattcatgctgcctacttctaagagaaatttcattcttcataaccacataacattataatgccactgattcatacgggatttacattaattctatgggggaggacactagaattattagtgttcattttcatctaagatctttattctctaacgttcttggtcctattgaaacattgcagtatgcaaaactactgcaatgttaaacccaagagaaaagccattatcatgtgtatgctggtcatcatgatcagtgtggtacaatttttaaaaataaactatcatgcccttcatgccattatttgtctttatttctatgatttataatcctgatatgtgatgtgtttgtaacacagggtgtgcacttgagcctggttttactgtttttattagacagagttgtttatatgctgtaactgtaacgcagcgagactggttctacagccatgtgtcgtaatcttgttccccgtccaagctgttgtatctgaaggtacccagtttgcacccaggatgagggaacgcattcaaaagtgaaatgtaaagccagtgcacgaatattatagtaattgagattttcccaggcttcactgatacagttgttttgcatttattcacaataatacagcagattcttaaatgccgatttttaattgtcttaaattttgctgctgttctcataattaaggacttgaaaaatgttttagtctgtcaagtatgtaaagtttgtgtaaaaacttttaaatgtcattcttaagttcattgccatagccattttccatttatgtcttcattttccaaaaatcaaatgccatgtctgatacctttaagtccataagcattcaattttctcatttccaccttcatctttggttaacagaataagtaaaacagggtattatttatttgtagtctagaaatgttgaatattgttttatttccttcaaaatgttatgattagtgcagatcagccatgtttatctttttaaaaaataaacaggttgctttatttctt

SEQ ID NO: 40997 - protein, 622 aa, Artificial Sequence
  derived and/or modified sequence
MAMAPSPSLVQVYTSPAAVAVWEWQDGLGTWHPYSATVCSFIEQQFVQQKGQRFGLGSLAHSIPLGQADPSLAPYIIDLPSWTQFRQDTGTMRAVRRHLFPQHSAPGRGVVWEWLSDDGSWTAYEASVCDYLEQQVARGNQLVDLAPLGYNYTVNYTTHTQTNKTSSFCRSVRRQAGPPYPVTTIIAPPGHTGVACSCHQCLSGSRTGPVSGRYRHSMTNLPAYPVPQHPPHRTASVFGTHQAFAPYNKPSLSGARSAPRLNTTNAWGAAPPSLGSQPLYRSSLSHLGPQHLPPGSSTSGAVSASLPSGPSSSPGSVPATVPMQMPKPSRVQQALAGMTSVLMSAIGLPVCLSRAPQPTSPPASRLASKSHGSVKRLRKMSVKGATPKPEPEPEQVIKNYTEELKVPPDEDCIICMEKLSTASGYSDVTDSKAIGSLAVGHLTKCSHAFHLLCLLAMYCNGNKDGSLQCPSCKTIYGEKTGTQPQGKMEVLRFQMSLPGHEDCGTILIVYSIPHGIQGPEHPNPGKPFTARGFPRQCYLPDNAQGRKVLELLKVAWKRRLIFTVGTSSTTGETDTVVWNEIHHKTEMDRNITGHGYPDPNYLQNVLAELAAQGVTEDCLEQQ

SEQ ID NO: 40998 - protein, 74 aa, Artificial Sequence
  derived and/or modified sequence
MAMAPSPSLVQVYTSPAAVAVWEWQDGLGTWHPYSATVCSFIEQQFVQQKGQRFGLGSLAHSIPLGQADPSLAP

SEQ ID NO: 40999 - protein, 90 aa, Artificial Sequence
  derived and/or modified sequence
MAMAPSPSLVQVYTSPAAVAVWEWQDGLGTWHPYSATVCSFIEQQFVQQKGQRFGLGSLAHSIPLGQADPSLAPYIIDLPSWTQFRQDTG

SEQ ID NO: 41000 - protein, 28 aa, Artificial Sequence
  derived and/or modified sequence
MAMAPSPSLVQVYTSPAAVAVWEWQDGL

SEQ ID NO: 41001 - protein, 25 aa, Artificial Sequence
  derived and/or modified sequence
MAMAPSPSLVQVYTSPAAVAVWEWQ

SEQ ID NO: 41002 - protein, 62 aa, Artificial Sequence
  derived and/or modified sequence
MAMAPSPSLVQVYTSPAAVAVWEWQDGLGTWHPYSATVCSFIEQQFVQQKGQRFGLGSLAHS

SEQ ID NO: 41003 - protein, 561 aa, Artificial Sequence
  derived and/or modified sequence
MRAVRRHLFPQHSAPGRGVVWEWLSDDGSWTAYEASVCDYLEQQVARGNQLVDLAPLGYNYTVNYTTHTQTNKTSSFCRSVRRQAGPPYPVTTIIAPPGHTGVACSCHQCLSGSRTGPVSGRYRHSMTNLPAYPVPQHPPHRTASVFGTHQAFAPYNKPSLSGARSAPRLNTTNAWGAAPPSLGSQPLYRSSLSHLGPQHLPPGSSTSGAVSASLPSGPSSSPGSVPATVPMQMPKPSRVQQALAGMTSVLMSAIGLPVCLSRAPQPTSPPASRLASKSHGSVKRLRKMSVKGATPKPEPEPEQVIKNYTEELKVPPDEDCIICMEKLSTASGYSDVTDSKAIGSLAVGHLTKCSHAFHLLCLLAMYCNGNKDGSLQCPSCKTIYGEKTGTQPQGKMEVLRFQMSLPGHEDCGTILIVYSIPHGIQGPEHPNPGKPFTARGFPRQCYLPDNAQGRKVLELLKVAWKRRLIFTVGTSSTTGETDTVVWNEIHHKTEMDRNITGHGYPDPNYLQNVLAELAAQGVTEDCLEQQHARLWWPPRCPMAGWVARQEVPSPRGWEVC

SEQ ID NO: 41004 - DNA, 2614 bp, Artificial Sequence
  derived and/or modified sequence
ctgagagtcggagccacagccagagccctgcccaggccgagccggagctgcagcccgagcgcggtggtgccctcagccccgtcctcttgtcctcctcagcctcggtgccttggaatttgtgtcgctgagtcagcaagcctttcagatttgcccggtttttgttgtttgtggtttgtatcaagatgggaactcaaacaagtcattcctcctaaggagctggtgtcttcatccagaagggacagtttgtgccagctctccagagagaaaagatctgccggaggcgctgggcaatgaccccgggactccaggccagaggggtctgaagctgtttgggaaagcagcgggactccttgggaagatggccatggccccaagcccttccctggtgcaggtgtacaccagccccgcggctgtggccgtgtgggaatggcaggacgggctgggcacctggcacccctacagtgccaccgtctgcagcttcatcgagcagcagtttgtccagcagaagggccaacgttttgggcttgggagcctggcccacagcatccccttgggccaggcagacccctcgctggccccttacattattgacctccccagctggacccagttccgccaggacaccggcaccatgcgagctgtgcggagacacctgttcccccagcactcagcccctggccgaggtgtcgtctgggagtggctgagcgacgatggctcctggactgcctatgaagccagcgtctgtgactatctggagcagcaggtggccaggggcaaccagctcgtggacttggcccccctggggtacaactacactgtcaactacaccacccacacgcagaccaacaagacttccagcttttgccgcagcgtgcggcgccaagcagggccgccttacccggtgaccaccatcatcgctccgccgggccacacaggcgtcgcctgctcttgccaccagtgcctcagtggcagcagaactggccccgtgtcaggccgctaccgccactccatgaccaacctccctgcataccccgtcccccagcaccccccacacaggaccgcttctgtgtttgggacccaccaggcctttgcaccgtacaacaaaccctcactctccggggcccggtctgcgcccaggctgaacaccaccaacgcctggggcgcagctcctccttccctggggagccagcccctctaccgctccagcctctcccacctgggaccgcagcacctgcccccaggatcctccacctccggtgcagtcagtgcctccctccccagcggtccctcaagcagcccagggagtgtccctgccactgtgcccatgcagatgccaaagcccagcagagtccagcaggcgctcgcaggcatgacgagtgttctgatgtcagccattggactccctgtgtgtcttagccgcgcaccccagcccaccagccctcccgcctcccgtctggcttccaaaagtcacggctcagttaagagattgaggaaaatgtccgtgaaagaagcgaccccgaagccagagccagagccagagcaggtcataaaaaactacacggaagagctgaaagtgcccccagatgaggactgcatcatctgcatggagaagctgtccgcagcgtctggatacagcgatgtgactgacagcaaggcaatcgggtccctggctgtgggccacctcaccaagtgcagccatgccttccacctgctgtgcctcctggccatgtactgcaacggcaataaggatggaagtctgcagtgtccctcctgcaaaaccatctatggagagaagacggggacccagccccagggaaagatggaggtattacggttccagatgtcgctccccggccacgaggactgcgggaccatcctcatagtttacagcattccccatggtatccagggccctgagcaccccaatcccggaaagccgttcactgccagagggtttccccgccagtgctaccttccagacaacgcccagggccgcaaggtcctagagctcctgaaggtggcctggaagaggcggctcatcttcacagtgggcacgtccagcaccacgggtgagacggacaccgtggtatggaacgagatccaccacaagacagagatggaccgcaacattacgggccacggctatcccgaccccaactacctgcagaacgtgctggctgagctggctgcccagggggtgaccgaggactgcctggagcagcagtgacctcgcaccccagcacgcccgcctctggtggccaccccgctgccccatggctggctgggtggccaggcaggaagtgcccagcccgagaggctgggaggtttgttgagggtgtggggtgtgccccacctgaagccggggctccccctgcctgcctctctctcctcctcccctctgggaattgggcagccctgggcagttgtactcatgggggcttaggatgcagctacctcagtgcgcagggcccgtctgtcctctgggggctgcttcgggcccgcggtgctcggggcctggtgtggggcgagtagagacttccccagcctggacgggcgtgggttctgggtcagcttcttttacctcaattttgtttgcaataaatgctctatagcc

SEQ ID NO: 41005 - DNA, 45 bp, Artificial Sequence
  derived and/or modified sequence
atggccatggcccccagccccagcctggtgcaggtgtacacctag

SEQ ID NO: 41006 - DNA, 87 bp, Artificial Sequence
  derived and/or modified sequence
atggccatggcccccagccccagcctggtgcaggtgtacaccagccccgccgccgtggccgtgtgggagtggcaggacggcctgtag

SEQ ID NO: 41007 - DNA, 78 bp, Artificial Sequence
  derived and/or modified sequence
atggccatggcccccagccccagcctggtgcaggtgtacaccagccccgccgccgtggccgtgtgggagtggcagtag

SEQ ID NO: 41008 - DNA, 1686 bp, Artificial Sequence
  derived and/or modified sequence
atgagagccgtgagaagacacctgttcccccagcacagcgcccccggcagaggcgtggtgtgggagtggctgagcgacgacggcagctggaccgcctacgaggccagcgtgtgcgactacctggagcagcaggtggccagaggcaaccagctggtggacctggcccccctgggctacaactacaccgtgaactacaccacccacacccagaccaacaagaccagcagcttctgcagaagcgtgagaagacaggccggccccccctaccccgtgaccaccatcatcgccccccccggccacaccggcgtggcctgcagctgccaccagtgcctgagcggcagcagaaccggccccgtgagcggcagatacagacacagcatgaccaacctgcccgcctaccccgtgccccagcaccccccccacagaaccgccagcgtgttcggcacccaccaggccttcgccccctacaacaagcccagcctgagcggcgccagaagcgcccccagactgaacaccaccaacgcctggggcgccgccccccccagcctgggcagccagcccctgtacagaagcagcctgagccacctgggcccccagcacctgccccccggcagcagcaccagcggcgccgtgagcgccagcctgcccagcggccccagcagcagccccggcagcgtgcccgccaccgtgcccatgcagatgcccaagcccagcagagtgcagcaggccctggccggcatgaccagcgtgctgatgagcgccatcggcctgcccgtgtgcctgagcagagccccccagcccaccagcccccccgccagcagactggccagcaagagccacggcagcgtgaagagactgagaaagatgagcgtgaagggcgccacccccaagcccgagcccgagcccgagcaggtgatcaagaactacaccgaggagctgaaggtgccccccgacgaggactgcatcatctgcatggagaagctgagcaccgccagcggctacagcgacgtgaccgacagcaaggccatcggcagcctggccgtgggccacctgaccaagtgcagccacgccttccacctgctgtgcctgctggccatgtactgcaacggcaacaaggacggcagcctgcagtgccccagctgcaagaccatctacggcgagaagaccggcacccagccccagggcaagatggaggtgctgagattccagatgagcctgcccggccacgaggactgcggcaccatcctgatcgtgtacagcatcccccacggcatccagggccccgagcaccccaaccccggcaagcccttcaccgccagaggcttccccagacagtgctacctgcccgacaacgcccagggcagaaaggtgctggagctgctgaaggtggcctggaagagaagactgatcttcaccgtgggcaccagcagcaccaccggcgagaccgacaccgtggtgtggaacgagatccaccacaagaccgagatggacagaaacatcaccggccacggctaccccgaccccaactacctgcagaacgtgctggccgagctggccgcccagggcgtgaccgaggactgcctggagcagcagcacgccagactgtggtggccccccagatgccccatggccggctgggtggccagacaggaggtgcccagccccagaggctgggaggtgtgctag

SEQ ID NO: 41009 - DNA, 1869 bp, Artificial Sequence
  derived and/or modified sequence
atggccatggcgccctcaccttccctcgtgcaagtctatacctctcctgccgcggtagcagtgtgggagtggcaggacggactgggaacatggcacccatacagcgctaccgtctgtagtttcatcgagcagcagtttgtgcaacagaaaggccagcgcttcggtcttggtagcctggcccacagcatacccttggggcaggccgatccgtcgctggctccctacatcatcgacctgccaagctggacacagttccgtcaggataccggcactatgcgcgcagttagacggcatctgtttcctcagcactccgcccctggtagaggagttgtatgggagtggctcagtgacgatggcagttggacagcttacgaagcttccgtctgtgactatctggaacaacaagtcgctaggggaaaccagctggtggacctggcgccgctaggatacaactatacagtcaattacacaacacacactcagactaacaagacttccagtttctgccggagtgtgcgcagacaggccgggccaccttaccccgtgacaacaatcatagcacctccaggtcatacaggagtagcttgttcttgccaccagtgtctctcaggtagtcgaacagggcctgttagtggtcgctatcgtcactccatgacgaatctgcccgcataccccgtcccacaacatccgccccatcgtaccgcctccgtcttcggcacccaccaggccttcgcaccctacaacaagccttccctgtccggcgctagatccgccccccggttaaatacgacaaacgcctggggtgctgcccctccatctctaggcagccaaccactgtatcgcagcagtctctcacatctgggccctcagcacctgccgcctggaagttccacatctggggccgtcagtgccagtctccctagcggccccagcagcagccctggctctgttccggcaaccgtgcctatgcaaatgccaaaaccttcgcgggtccagcaagccctcgccggaatgacatctgttctcatgtcagctattgggctgcccgtttgtctgtcgagggctccgcagccaacttcaccccccgcctctagactcgcaagcaaatcccacgggagcgtgaagcgcctccggaaaatgtcagttaaaggtgcaaccccgaagcccgagccagaaccggagcaggtgattaagaattatactgaagagctaaaggtcccccctgacgaagactgcattatttgcatggagaagctgagcacagctagtggctattctgacgtcacagatagcaaggcgatcggatccctggccgtcggtcatctgaccaagtgcagccacgccttccacttactgtgcttactggccatgtattgtaatggcaacaaggacggttcactccaatgtcccagttgtaaaacaatttacggggaaaaaactggaacacaaccacagggcaaaatggaagttctgcgcttccagatgagccttccagggcacgaagactgcggcactattctgatcgtttattcaataccccacggcattcaaggcccagagcaccccaatcctggcaaacctttcaccgccaggggattcccccggcagtgttacctgcctgacaatgctcagggtaggaaagtgctggagctcctcaaagtcgcgtggaaacggcgactgatctttaccgtgggaactagttccaccacaggcgaaactgacaccgttgtgtggaacgaaattcaccacaagaccgaaatggaccggaacatcactggccacggatacccagatccaaactacctacagaatgtcctggcagaattggcagcacagggagtgactgaagattgtctggagcaacagtag

SEQ ID NO: 41010 - DNA, 1869 bp, Artificial Sequence
  derived and/or modified sequence
atggccatggcgccctcaccaagcctcgtgcaggtgtataccagcccggcggccgtcgccgtgtgggagtggcaggacggcctgggaacctggcacccctacagcgcaaccgtttgtagttttatcgaacagcagttcgtacagcaaaaggggcagaggttcgggctgggctccctggctcatagcattcctcttgggcaagctgacccatctctagctccatacatcatcgaccttcccagctggacccaatttcgccaggacactggaacaatgcgcgccgtgaggcggcacctgttcccacaacattctgcccccggcaggggggtcgtctgggagtggctgtctgacgatgggtcctggaccgcttatgaagcctccgtctgtgactacttggagcagcaagtcgcccgaggtaatcaactggtggatttggctcctctaggctacaattacacagtaaattacaccactcatacccagacaaacaaaacatcgtctttttgtaggtcggtgcgaagacaggcaggcccaccctaccccgtcaccacgattatagccccccccggacacactggggtggcctgtagctgtcatcagtgcctgagtggatcccgaacagggcctgtctccgggcgctatcgtcactcaatgactaatctgcccgcttatccagtaccccagcaccccccccacagaacagcttctgtgtttgggactcaccaggccttcgcgccttacaacaagcctagtctgtccggggccaggagcgccccacggctcaatactacgaacgcctggggtgcagctccgccttctctggggagtcagcctctgtaccgaagctccctttctcatctgggcccacagcatctaccacctgggtcgagcacatctggagcagtgagcgcctccctgcccagcggaccctcgagctcccccggctctgttcctgcaacagtccctatgcagatgcctaaaccatcccgggttcagcaggctctggctgggatgacgtccgtgctgatgtccgccatcggattaccagtctgcctttcacgagcgccgcagcccacttcccctccagcttccagactagcttccaagtctcatggatcagtgaagagacttagaaaaatgtccgtgaagggtgctactcccaaacccgagcctgaaccagaacaggtgatcaagaattataccgaggaactgaaagtgccaccagatgaagattgcattatctgcatggaaaaactcagtaccgcatccggctatagcgacgtgacagactccaaggcaataggcagcctggccgtcggccacctgacgaagtgtagccatgctttccacctgttgtgtctcctggccatgtattgtaacgggaacaaagatgggtccctccagtgcccctcgtgcaaaactatctatggagagaaaaccgggacccagccacagggcaagatggaagtgcttaggttccagatgagcctgccaggacatgaagactgcgggacgatcctgattgtatattcaattccacacggcatccaggggcctgaacatccaaatcctggcaaaccctttaccgcacgggggttccctaggcagtgctacctccccgacaatgcccagggccggaaggtgctagagcttctaaaggtggcttggaaacgccgtttgatatttaccgtgggcactagcagtactacgggggagacagacacagtggtctggaatgaaatccatcataaaactgaaatggaccgaaacatcacagggcatggctatcctgacccaaactacctgcagaacgtcctggccgaacttgccgctcagggtgtgaccgaagattgtctcgagcaacaatag

SEQ ID NO: 41011 - DNA, 1869 bp, Artificial Sequence
  derived and/or modified sequence
atggccatggcaccatctccaagcttggtgcaggtttatacatccccagcagccgtggctgtgtgggagtggcaagatggactcgggacctggcacccttattcggccacagtatgttcttttatcgagcaacaatttgtgcagcaaaaggggcaacgcttcggcctggggtctctggcacacagcataccccttggtcaggcagaccctagcctggccccctacatcattgacctaccctcgtggacacagttcagacaagataccggaactatgcgcgccgtgcgcagacatctgttcccacagcatagcgcaccggggcgcggagtcgtctgggagtggctgtctgatgacggaagttggactgcatatgaagctagcgtctgcgactacctggagcagcaagtcgcgcgaggcaaccagttggttgacttggcccctcttggttacaactataccgtcaactatacaactcacactcagaccaataaaacatcatcgttctgcaggagtgtcagacggcaggccgggcctccctaccccgtgacgactatcattgctcctccagggcacaccggcgtggcctgttcttgccaccagtgcctctcaggctcgagaacaggacctgtaagcggaagatatagacactccatgactaatctgcccgcctatcccgtgccccagcatcctcctcataggactgccagtgtattcggaacacatcaggccttcgctccctataataagccttccctgtcaggagccaggtctgctccacggctcaacacaactaatgcttggggtgcagcacctccatctctgggtagccagcccctctacagatcctctctgtcccatttgggcccccagcacctgcctcctggatccagcactagtggggcggtgagcgcaagtctgcccagcggtccctcatctagtcccggctcagttcccgctaccgtgccaatgcaaatgccaaaaccaagccgggtgcagcaagccctcgcgggcatgacaagtgtgttaatgtctgcaattggcctgcccgtatgcctctctcgtgcccctcagccaactagccccccagccagccgcctcgcatcaaagagccacggaagcgtcaaacggctcaggaaaatgagcgtgaagggcgcaactccaaagcctgagccagagcccgagcaagttattaaaaattacaccgaggagcttaaggttccgcccgacgaggattgcatcatctgcatggagaagctgtccactgctagcggttacagtgatgtgaccgacagcaaggccattgggagcctcgccgtgggccatctgaccaagtgcagccacgcgttccatctgctctgtctactcgccatgtactgcaatggcaataaagacggctcccttcaatgcccctcgtgtaagaccatttatggcgaaaagacagggacccagccccagggcaagatggaagtacttagatttcagatgtcattacctggccatgaagattgtggtaccattttgattgtctatagtatccctcatgggattcagggccccgagcatcccaaccccgggaaacctttcacagcccgcggattccctcgccagtgctacttacctgataatgcccagggcaggaaggtgctggaactgctgaaagtggcatggaagcggagattgatcttcacagtcggcacatcctccacgactggagagacggatacagtggtgtggaacgagattcaccataagacagaaatggataggaatattaccggacatggctacccggaccctaactacctgcagaatgtgctggccgaactggcggctcagggcgtgaccgaagattgtctggagcagcagtag

SEQ ID NO: 41012 - DNA, 45 bp, Artificial Sequence
  derived and/or modified sequence
atggctatggctccatccccttccctggtgcaggtctacacatag

SEQ ID NO: 41013 - DNA, 87 bp, Artificial Sequence
  derived and/or modified sequence
atggccatggccccctctccttctttagtgcaagtttatacgtcccccgccgctgtggcagtgtgggaatggcaggacggcctatag

SEQ ID NO: 41014 - DNA, 78 bp, Artificial Sequence
  derived and/or modified sequence
atggccatggctccttcacccagtctagtgcaggtgtatacttcaccagccgctgtcgccgtgtgggaatggcagtag

SEQ ID NO: 41015 - DNA, 1686 bp, Artificial Sequence
  derived and/or modified sequence
atgcgcgccgtacgacggcacttgttcccccagcatagcgccccagggcggggggttgtttgggagtggctgagcgatgacggcagttggaccgcatatgaagcatctgtgtgcgattacctggaacagcaggtggcccgcggaaaccagctggtggacctggctccactgggctacaactataccgtcaactacaccacccacactcagactaataagacgagcagcttctgtagaagcgtgcggagacaggcaggacctccatatccggtgacgaccataatagcacccccaggccatacgggggtggcctgtagttgtcaccaatgccttagtgggagcagaacggggcccgttagtggtcgctacagacactctatgaccaacctaccggcttatcccgtgccacaacatcccccccatcggaccgccagcgtcttcggaactcaccaagcctttgccccttacaacaagccctctcttagcggggctaggagtgcaccacggttgaacaccaccaacgcgtggggagccgcaccaccgtccctggggagccagccgctgtacaggtctagcctatctcacctcggaccccagcatctccccccaggttcatcaacatctggcgccgtgtccgcatccctccccagcggaccgtcctcatcacctgggtccgtgcccgcgacggtgccaatgcaaatgccaaagccatccagggtgcagcaagccttggccgggatgactagtgtgctcatgtctgctattggattgcccgtgtgcctctcccgggctcctcagccgactagtcctcccgcttcaaggctggcaagtaagagtcatggctctgtgaagaggttgaggaagatgagtgtcaagggcgcaacacccaagcctgagcctgagcctgagcaagttattaaaaattatacagaggaactcaaggtgcctccggacgaggattgcattatctgtatggaaaagcttagcacagcctcaggatactcagacgttaccgacagtaaggcaatcgggagcctggcggtgggtcatctgaccaaatgcagccatgccttccacctcctgtgcctactagctatgtactgcaacggaaacaaggacggctcactacagtgcccgagctgcaaaaccatctatggggagaaaacgggcactcagccccagggcaagatggaagtgttgaggttccagatgtctctgccgggtcatgaagattgtggcacaattctaattgtgtactcaataccccacggtatccaggggccagagcatccaaatcccgggaagcccttcactgcccgcggatttccgaggcaatgttatttgcccgacaatgcccagggacgcaaggtgctggagcttctcaaggttgcatggaaacggcgcttaattttcacagttgggacgtcctctaccacgggggaaacagatacagtcgtatggaacgagattcatcacaaaacagaaatggatcgcaacatcacagggcacggctaccccgaccccaactatttgcagaacgtacttgccgagctggcggctcagggcgtgaccgaagactgcctggaacagcagcatgcccgcctgtggtggccaccccgctgtcctatggctggctgggtggcccgtcaggaagtcccctcacctcgaggatgggaagtgtgttag

SEQ ID NO: 41016 - DNA, 1869 bp, Artificial Sequence
  derived and/or modified sequence
atggccatggcccccagccccagcctggtgcaggtgtacaccagccctgctgctgtggccgtgtgggagtggcaggacggcctgggcacctggcacccctacagcgccaccgtgtgcagcttcatcgagcagcagtttgtgcagcagaagggccagcgcttcggcctgggcagcctggcccacagcatccccctgggccaggccgaccccagcctggccccctacatcatcgacctgcccagctggacccagttccggcaggacaccggcaccatgagagctgtgcggcggcacctgttcccccagcacagcgcccctggccggggcgtggtgtgggagtggctgagtgatgatggctcctggacagcctatgaggcctctgtgtgtgactacctggagcagcaggtggcccggggcaaccagctggtggacctggcccccctgggctacaactacacagtgaactacaccacccacacccagaccaacaagaccagcagcttctgccgctctgtgcggcggcaggccggccccccctaccctgtgaccaccatcatcgcccctcctggccacactggagtggcctgcagctgccaccagtgcctgagcggcagcaggactggacctgtgtctggccgctaccgccacagcatgaccaacctgcctgcctaccctgtgccccagcaccccccccacaggacagcctctgtgtttggcacccaccaggcctttgccccctacaacaagcccagcctgagcggggcccggagcgccccccggctgaacaccaccaatgcctggggcgccgccccacccagcctgggcagccagcccctgtaccgcagcagcctgagccacctgggcccccagcacctgcccccaggcagcagcaccagcggggctgtgtctgccagcctgcccagcggccccagcagcagccctggctctgtgcctgccaccgtgcccatgcagatgcccaagcccagccgggtgcagcaggccctggccggcatgacctctgtgctgatgtctgccatcggcctgcctgtgtgcctgagccgggccccccagcccaccagccccccagccagccggctggccagcaagagccacggctctgtgaagaggctgaggaagatgtctgtgaagggggccacccccaagccagagcctgagcctgagcaggtgatcaagaactacacagaggagctgaaggtgcccccagatgaggactgcatcatctgcatggagaagctgagcacagccagcggctacagtgatgtgacagacagcaaggccatcggcagcctggccgtgggccacctgaccaagtgcagccacgccttccacctgctgtgcctgctggccatgtactgcaatggaaacaaggatggcagcctgcagtgccccagctgcaagaccatctacggggagaagacaggcacccagccccagggcaagatggaggtgctgcgcttccagatgagcctgcccggccacgaggactgtggcaccatcctgattgtgtacagcatcccccacggcatccagggccctgagcaccccaaccctgggaagcccttcaccgcccggggcttcccccggcagtgctacctgcctgacaatgcccagggcaggaaggtgctggagctgctgaaggtggcctggaagaggaggctcatcttcaccgtgggcaccagcagcaccaccggggagacagacacagtggtgtggaatgagatccaccacaagacagagatggacaggaacatcaccggccacggctacccagaccccaactacctgcagaatgtgctggccgagctggccgcccagggcgtgacagaggactgcctggagcagcagtag

SEQ ID NO: 41017 - DNA, 87 bp, Artificial Sequence
  derived and/or modified sequence
atggccatggcccccagccccagcctggtgcaggtgtacaccagccctgctgctgtggccgtgtgggagtggcaggacggcctgtag

SEQ ID NO: 41018 - DNA, 78 bp, Artificial Sequence
  derived and/or modified sequence
atggccatggcccccagccccagcctggtgcaggtgtacaccagccctgctgctgtggccgtgtgggagtggcagtag

SEQ ID NO: 41019 - DNA, 1686 bp, Artificial Sequence
  derived and/or modified sequence
atgagagctgtgagaagacacctgttcccccagcacagcgcccctggccggggcgtggtgtgggagtggctgagtgatgatggctcctggacagcctatgaggcctctgtgtgtgactacctggagcagcaggtggcccggggcaaccagctggtggacctggcccccctgggctacaactacacagtgaactacaccacccacacccagaccaacaagaccagcagcttctgccgctctgtgcggcggcaggccggccccccctaccctgtgaccaccatcatcgcccctcctggccacactggagtggcctgcagctgccaccagtgcctgagcggcagcaggacaggccctgtgtctggccgctaccgccacagcatgaccaacctgcctgcctaccctgtgccccagcaccccccccacaggacagcctctgtgtttggcacccaccaggcctttgccccctacaacaagcccagcctgagcggggcccggagcgccccccggctgaacaccaccaatgcctggggcgccgccccacccagcctgggcagccagcccctgtaccgcagcagcctgagccacctgggcccccagcacctgcccccaggcagcagcaccagcggggctgtgtctgccagcctgcccagcggccccagcagcagccctggctctgtgcctgccaccgtgcccatgcagatgcccaagcccagccgggtgcagcaggccctggccggcatgacctctgtgctgatgtctgccatcggcctgcctgtgtgcctgagccgggccccccagcccaccagccccccagccagccggctggccagcaagagccacggctctgtgaagaggctgaggaagatgtctgtgaagggggccacccccaagccagagcctgagcctgagcaggtgatcaagaactacacagaggagctgaaggtgcccccagatgaggactgcatcatctgcatggagaagctgagcacagccagcggctacagtgatgtgacagacagcaaggccatcggcagcctggccgtgggccacctgaccaagtgcagccacgccttccacctgctgtgcctgctggccatgtactgcaatggaaacaaggatggcagcctgcagtgccccagctgcaagaccatctatggagagaagacaggcacccagccccagggcaagatggaggtgctgcgcttccagatgagcctgcccggccacgaggactgtggcaccatcctgattgtgtacagcatcccccacggcatccagggccctgagcaccccaaccctgggaagcccttcaccgcccggggcttcccccggcagtgctacctgcctgacaatgcccagggcaggaaggtgctggagctgctgaaggtggcctggaagagaagactcatcttcaccgtgggcaccagcagcaccactggagaaacagacacagtggtgtggaatgagatccaccacaagacagagatggacaggaacatcactggacatggctacccagaccccaactacctgcagaatgtgctggccgagctggccgcccagggcgtgacagaggactgcctggagcagcagcacgcccggctgtggtggccaccccgctgccccatggccggctgggtggcccggcaggaggtgcccagcccccggggctgggaggtgtgctag

SEQ ID NO: 41020 - DNA, 1869 bp, Artificial Sequence
  derived and/or modified sequence
atggccatggcccccagccccagcctggtgcaggtgtacaccagccccgctgcagtggcagtatgggagtggcaagatggcctcggaacctggcacccttattctgccactgtttgctcttttattgaacagcagtttgtgcagcagaaaggtcagcggtttggacttggctccttagctcatagcatacctctgggccaggcagacccctcactcgccccctacatcatagacttgccaagctggacgcagtttcggcaggacaccgggaccatgagggcagttagacgtcatttatttccccagcactccgcccctgggaggggcgtagtgtgggaatggctcagcgatgatgggtcttggacggcctatgaagcgagcgtgtgcgactatctggaacaacaggtggcccgaggtaatcagttggtggatttggccccgctgggctacaattacactgtgaactataccacgcatacacagacaaacaaaacctcgagtttttgccgttcggtacggaggcaggccgggccaccatatccagtcaccacaatcattgccccgccagggcatactggggttgcctgctcttgtcaccaatgcctcagcggtagccgcaccggcccggtaagtggcaggtaccgtcacagtatgacaaatctccccgcctatcccgtgccacagcatccgccgcatcgaactgcgtccgtttttggtacacaccaggccttcgccccatataacaaaccttcgctgtctggcgccaggagcgcccccaggctcaataccacaaacgcttggggcgcagcaccacccagcctaggctcgcaaccactgtaccgctccagtttgtcgcatctgggtccacagcatttgccccctggctcgtcaacgagcggggccgtcagtgcgtccttgcctagtggcccctctagttccccaggctcagtaccagcaactgtgcccatgcagatgcctaaaccgtctagagtgcagcaggcgcttgccggaatgacaagcgtccttatgagcgccatcggactgccagtctgtctgagtagggccccccagccgaccagccctcctgccagtagacttgcctcaaagtcccatggctccgtgaaacgcctgcgaaagatgtccgtaaagggggcaacccccaagcctgagccagaaccggagcaggtaattaaaaattatactgaagaactgaaggtgcctcccgacgaagattgcataatctgtatggaaaagctgtctacggcttcaggctattctgatgttactgactcgaaggccataggcagcctcgccgtgggacatctgacaaaatgctcccatgcgtttcacctgctatgtctcctggccatgtactgtaacggaaacaaggatggaagcctccaatgtcccagttgcaaaaccatttatggcgaaaagactgggactcaaccccagggtaagatggaggttctccggtttcaaatgtcacttcccggccacgaggattgtggaaccatactgatcgtttatagcattccgcatggtatccagggtcctgagcatcctaaccccggtaagcccttcacagctcgcggtttccctaggcagtgctacctgcctgacaacgctcagggtcggaaggtccttgaactgcttaaagtggcctggaagagaaggctcatattcacagtcggcacttccagcactaccggtgagactgataccgtggtctggaatgagatccatcataagacggagatggaccggaatatcactggtcacgggtatcccgatcctaactatctgcaaaacgtcctggcggaactggctgcccagggagtgactgaggactgcctggagcaacagtag

SEQ ID NO: 41021 - DNA, 1869 bp, Artificial Sequence
  derived and/or modified sequence
atggccatggcccccagccccagcctggtgcaggtgtacaccagcccagccgctgtggccgtctgggagtggcaagatggactcgggacgtggcatccttattcagccacagtgtgtagttttattgagcagcagttcgtgcagcagaagggtcagaggtttgggctgggctcgctggcccacagcataccccttggccaggcagatccctctcttgccccttacattatcgatctgccaagctggactcagttcaggcaggatacaggaactatgcgcgcagtcaggcggcacctctttccccaacacagcgctccaggtaggggggtcgtgtgggagtggctgtctgacgacggatcttggacggcctacgaggcgtccgtgtgcgattatttagagcagcaagtggcgaggggcaaccagctggtcgatctggccccactgggttataattatactgtcaactatacaacccatacacaaaccaataagacatccagtttctgccggtccgttagacggcaagcaggacccccataccctgtgaccactatcattgctccccccggccacaccggggtggcctgcagttgccatcaatgcctcagcgggtctcgtaccggccccgtgtctggaagatatcggcatagcatgacgaacttacctgcctatcctgtaccacagcacccgccccacagaactgccagcgtctttggcactcaccaggctttcgctccgtacaacaagccaagtctctctggggcccggtcggcaccgcgcctgaatacaaccaacgcctggggagctgcgccacccagtctggggtcccagcccctctatagatctagcctgagccatctgggacctcaacacctcccgccaggctcatcaacaagcggggcagtgtctgcctcactgccttccggtccctcctcttctccaggctctgtgcctgctaccgtcccaatgcaaatgcccaagccatctcgagtgcaacaggcacttgcagggatgaccagcgtgctaatgagcgctatcggcctacccgtctgcctgtctcgggcaccgcaaccaacatctccacctgcatcgaggctcgcgagtaagagccacggtagcgtgaagcggctgcgcaagatgagcgtgaaaggagctactccaaaaccggaacccgaacccgagcaggtgataaagaattacacggaagagttgaaagtaccaccggatgaggactgcataatttgtatggagaagctctctacagcatcaggatactctgacgtgacagactcaaaggccatcggttccttagcagtcggccacctcaccaagtgtagccacgctttccacctgctgtgtctgctcgccatgtattgtaatgggaacaaggacggatccctgcaatgtccctcctgcaagaccatctatggtgagaagaccggcacacagccgcagggcaaaatggaggtgctcaggttccagatgagccttcctgggcacgaggattgtggaaccatcctcatcgtatactccattccacatggcatccaaggtcctgagcatcctaacccaggtaaaccttttactgctagagggtttcccagacagtgctacctcccggacaacgcacaaggtcgcaaggtgttagaactgctgaaggtggcttggaaacgccgcttgatttttaccgttggcacctcctcaactaccggcgaaactgatactgttgtctggaatgagatccatcataaaacagaaatggatagaaacatcacggggcatggctaccctgaccctaactatttgcagaacgttctggcagagctggccgcacagggtgtgactgaggactgccttgaacaacagtag

SEQ ID NO: 41022 - DNA, 1869 bp, Artificial Sequence
  derived and/or modified sequence
atggccatggcccccagccccagcctggtgcaggtgtacaccagccctgcagccgtggcagtgtgggaatggcaagatgggcttgggacctggcatccttattcagcgacagtatgctccttcatcgagcagcaattcgttcaacaaaaaggccaacgctttggacttggctccctcgctcatagtattcctctggggcaggcagatccctcactggccccttatatcattgatttaccgtcgtggacgcagttcagacaggatacggggaccatgcgcgcggttagaaggcacctatttcctcagcacagcgcccccgggcggggcgtcgtatgggagtggctgtcggacgacgggtcttggacggcatatgaggcatccgtgtgtgattacctcgaacagcaagtcgctagggggaatcagctggtcgaccttgcccccctggggtacaactataccgtgaactacaccacgcacactcagactaataaaacctctagcttttgccgctcggtgagacgccaggccggccctccataccccgtcaccaccattatcgctccaccgggccatactggcgtggcctgcagttgtcatcagtgcctctccggatctagaactggaccagtgtccggacggtatcggcatagcatgacaaatctccctgcatatcctgttccccaacatccccctcatcgaaccgcatccgtcttcggtacacatcaggcgtttgctccctataacaagccctcactgagcggcgcccgaagcgcccctcggctgaacacgacaaatgcctggggcgcggcacctcccagcttgggttcccaaccgctgtatagatcaagcctatcccacctcggacctcagcatctgccgcctgggagtagtacttcaggcgcggtgagcgcctctttgccctccggtccctcatcctcccccggcagcgtgccagcgaccgttccaatgcagatgcctaaacccagccgcgtccagcaggcacttgcagggatgacatcagtgctcatgagtgccatcggtttaccagtgtgcctgagtcgggccccacagcccactagtcctcctgcaagcagactcgcttccaagtctcatggctccgtgaaacgccttaggaaaatgtctgtcaaaggtgctaccccaaaaccagagccggagcccgagcaggtcataaagaactatacagaggaactgaaagtgccgcccgatgaagattgtataatttgcatggaaaaactgtccactgcttctggatactctgatgtaaccgattccaaggcaattgggtcactggcggtcgggcatctaactaagtgcagccacgcttttcacttgctatgtctgctggccatgtattgtaacggaaataaggacggatcgcttcagtgtcctagctgcaagacaatatatggagagaagactggaacccagccccagggcaaaatggaggtgctgagattccaaatgtcacttcctggccacgaggactgcggcacaattctgatcgtgtactctattcctcacggcatacaaggccctgaacacccaaatccaggcaagcccttcactgcacgagggtttcctcgtcagtgctacctgccagacaacgcacagggtaggaaggtgctcgaactgctcaaagttgcatggaagcggaggctgatcttcactgtggggaccagctctactaccggggaaaccgacacggtcgtgtggaacgaaatccatcataagactgagatggaccgaaacattacaggtcacgggtatccagatccgaactacctacagaacgtcctggccgaactggcagcccagggcgtgactgaggactgtttggagcaacagtag

SEQ ID NO: 41023 - DNA, 87 bp, Artificial Sequence
  derived and/or modified sequence
atggccatggcccccagccccagcctggtgcaggtgtacaccagcccggcggcagtcgctgtgtgggaatggcaggatggcctctag

SEQ ID NO: 41024 - DNA, 78 bp, Artificial Sequence
  derived and/or modified sequence
atggccatggcccccagccccagcctggtgcaggtgtacaccagcccagcggccgtggcagtgtgggaatggcagtag

SEQ ID NO: 41025 - DNA, 1686 bp, Artificial Sequence
  derived and/or modified sequence
atgcgggccgtgcggcggcacctgttcccccagcacagcgcccccgggcgaggcgtggtatgggaatggctcagtgacgatggctcatggaccgcctatgaggctagtgtttgcgactacctggaacagcaggtcgctcgcggcaatcagttagtagatctcgcccctctgggctacaactacaccgtgaactacacgacgcacactcaaactaataagacatcgtcattttgtcgatcagtacggaggcaggcagggcccccatatcctgttactaccatcatcgctccccccggtcacacgggtgtggcctgttcctgccaccaatgcttgagtggtagtcggaccgggcctgtgtccggcaggtatcgccattctatgacgaatctaccagcctatccagtgccacagcaccctcctcaccggacggccagcgtgtttgggactcaccaggccttcgccccatataataagccaagcctgtccggggcaagatctgcccccaggctcaatacaaccaacgcgtggggagccgctcctccatcactgggtagccaacccctgtatcggtcatccctgagccatctgggcccacagcatctcccccctggtagttccaccagcggggcagtctccgcgtctcttccatccgggccttcatccagtcctggttctgtgcctgctacagtccccatgcaaatgccaaaaccgagtcgggtgcagcaggctctcgcagggatgacttcggttctgatgtcagcaatcggattacccgtgtgcctgtccagagccccacagccaacttcgccacctgcctctagattggccagcaaatcccacggatctgtgaagagactgcgaaagatgtctgtgaagggggccaccccgaagccggaacctgagcctgagcaggtcataaaaaattatacagaggagcttaaggtgccacccgacgaggattgtatcatttgtatggagaaattgagtactgcctctggatatagtgacgtaaccgactcgaaggcaatcgggtctttagcggtcggtcatttgactaagtgctcccacgcttttcacctgctgtgtctgttggctatgtattgcaacggtaataaagacggatccctgcagtgtccttcttgtaaaaccatatacggcgaaaagaccggcactcaaccacaggggaaaatggaagtcttaagattccagatgtctttacccgggcacgaggattgcggaacaatcctgatcgtctattcgataccacacggcattcagggccccgaacaccccaatccaggcaaacctttcactgcccgagggttcccacgtcagtgctatctgcccgacaacgcacaggggcggaaggtactggagttgttgaaagtagcttggaaaagacgtctaatcttcacagtaggaactagctccacaaccggggagacggatacggttgtgtggaacgaaatccaccataagactgagatggacagaaacattactggccacgggtatcccgaccccaattacctgcagaatgtgcttgctgagcttgccgcccagggtgtgaccgaggactgcttagaacagcagcacgccagactctggtggcccccgaggtgtccaatggctggttgggtggctcgacaggaagtgccttctcctagaggctgggaagtatgttag

SEQ ID NO: 41026 - DNA, 2472 bp, Artificial Sequence
  derived and/or modified sequence
actctggctgccttctcctgagagtcggagccacagccagagccctgcccaggccgagccggagctgcagcccgagcgcggtggtgccctcagccccgtcctcttgtcctcctcagcctcgatctgccggaggcgctgggcaatgaccccgggactccaggccagaggggtctgaagctgtttgggaaagcagcgggactccttgggaagatggccatggccccaagcccttccctggtgcaggtgtacaccagccccgcggctgtggccgtgtgggaatggcaggacgggctgggcacctggcacccctacagtgccaccgtctgcagcttcatcgagcagcagtttgtccagcagaagggccaacgttttgggcttgggagcctggcccacagcatccccttgggccaggcagacccctcgctggccccttacattattgacctccccagctggacccagttccgccaggacaccggcaccatgcgggctgtgcggagacacctgttcccccagcactcagcccctggccgaggtgtcgtctgggagtggctgagcgacgatggctcctggactgcctatgaagccagcgtctgtgactatctggagcagcaggtggccaggggcaaccagctcgtggacttggcccccctggggtacaactacactgtcaactacaccacccacacgcagaccaacaagacttccagcttctgccgcagcgtgcggcgccaagcagggccgccttacccggtgaccaccatcatcgctccgccgggccacacaggcgtcgcctgctcttgccaccagtgcctcagtggcagcagaactggccccgtgtcaggccgctaccgccactccatgaccaacctccctgcataccccgtcccccagcaccccccacacaggaccgcttctgtgtttgggacccaccaggcctttgcaccgtacaacaaaccctcactctccggggcccggtctgcgcccaggctgaacaccaccaacgcctggggcgcagctcctccttccctggggagccagcccctctaccgctccagcctctcccacctgggaccgcagcacctgcccccaggatcctccacctccggtgcagtcagtgcctccctccccagcggtccctcaagcagcccagggagcgtccctgccactgtgcccatgcagatgccaaagcccagcagagtccagcaggcgctcgcaggcatgacgagtgttctgatgtcagccattggactccctgtgtgtcttagccgcgcaccccagcccaccagccctcccgcctcccgtctggcttccaaaagtcacggctcagttaagagattgaggaaaatgtccgtgaaaggagcgaccccgaagccagagccagagccagagcaggtcataaaaaactacacggaagagctgaaagtgcccccagatgaggactgcatcatctgcatggagaagctgtccacagcgtctggatacagcgatgtgactgacagcaaggcaatcgggtccctagctgtgggccacctcaccaagtgcagccatgccttccacctgctgtgcctcctggccatgtactgcaacggcaataaggatggaagtctgcagtgtccctcctgcaaaaccatctatggagagaagacggggacccagccccagggaaagatggaggtattacggttccagatgtcgctccccggccacgaggactgcgggaccatcctcatagtttacagcattccccatggtatccagggccctgagcaccccaatcccggaaagccgttcactgccagagggtttccccgccagtgctaccttccagacaacgcccagggccgcaaggtcctagagctcctgaaggtggcctggaagaggcggctcatcttcacagtgggcacgtccagcaccacgggtgagacggacaccgtggtatggaacgagatccaccacaagacagagatggaccgcaacattacgggccacggctatcccgaccccaactacctgcagaacgtgctggctgagctggctgcccagggggtgaccgaggactgcctggagcagcagtgacctcgcaccccagcacgcccgcctctggtggccaccccgctgccccatggctggctgggtggccaggcaggaagtgcccagcccgagaggctgggaggtttgttgagggtgtggggtgtgccccacctgaagccggggctccccctgcctgcctctctctcctcctcccctctgggaattgggcagccctgggcagttgtactcatgggggcttaggatgcagctacctcagtgcgcagggcccgtctgtcctctgggggctgcttcgggcccgcggtgctcggggcctggtgtggggcgagtagagacttccccagcctggacgggcgtgggttctgggtcagcttcttttacctcaattttgtttgcaataaatgctctatagccaaagcc

SEQ ID NO: 41027 - DNA, 1869 bp, Artificial Sequence
  derived and/or modified sequence
atggcaatggcaccgtcccccagcttggtacaggtgtacacctcgcctgccgctgtggccgtttgggagtggcaggacggactgggcacctggcacccatatagcgcgactgtgtgcagcttcatcgagcaacagttcgtgcagcagaaaggccaaaggtttggacttgggagtttggctcactctattcctctcgggcaggcggaccctagcctcgccccttatataatagaccttccaagttggactcagttccgccaggatacaggcacgatgcgggctgtcagaagacatctgtttcctcagcactcagccccaggtagaggcgtggtctgggagtggctaagtgacgacggctcctggaccgcatatgaggcctccgtctgtgattatctcgagcagcaggtcgctagaggaaatcaattggtagatctggcaccactcggttataactacactgtgaactacaccactcatactcagaccaacaagacgtcatccttttgccgttcggtgcggagacaggctggcccaccttatccagtgaccaccatcattgcaccaccgggtcataccggtgtggcatgctcttgtcaccagtgcctgagcggttctagaaccggccctgtgtccggtaggtatcgccactcaatgactaacttgcctgcatacccagtgccccagcaccctcctcatcggaccgcttccgtgtttggaacgcatcaggcttttgcgccatataataagccgagcctatcgggggctaggagcgctcccaggttgaacactacaaatgcctggggagcagctcccccttctctgggcagccagccgctgtacaggagctcactcagccacctgggtcctcagcacctgcccccaggtagctctacctctggtgcagtcagtgctagtcttccaagtgggcctagtagcagccctggctccgtgcccgcaaccgtccccatgcagatgccaaagccatctagagttcagcaggcacttgccggaatgactagcgtgctcatgtcggctatcggcctgcccgtgtgcctgtcacgagcgcctcagcccacctcaccgccagccagcaggctggctagtaagagtcacgggtcagttaaacgtctgcgcaagatgtccgtgaagggtgctactcccaaaccagagcccgaaccagagcaggttattaaaaactatacagaagaactgaaagtccccccagacgaggactgcattatctgtatggaaaaactgtccactgcctcaggatacagcgatgtgaccgatagcaaagccatcgggtccctggcggtgggccacctgacaaaatgtagccatgcattccacttattgtgcctgctggctatgtactgtaatggcaacaaagacggatctctccagtgcccatcctgcaaaactatctatggagaaaaaacgggaacccagccacagggaaagatggaagtgctacgctttcagatgtcactccctggtcacgaggattgcggcactatcttaatcgtctattcaatcccacacggcatccagggtccagagcaccccaaccccggaaagccctttacagcacgcggatttcctcgacaatgttacctcccagataacgcacagggaagaaaggtactggagctgttgaaagtcgcctggaagaggcgactgatcttcacagtgggcacctctagcacaactggggagaccgacaccgtagtatggaatgaaattcaccacaaaacagagatggaccgaaacattactggccatgggtatcctgacccgaactacctgcaaaatgtgctggcggagttggccgctcagggcgtgacagaggattgtttggagcagcaatag

SEQ ID NO: 41028 - DNA, 1869 bp, Artificial Sequence
  derived and/or modified sequence
atggccatggcaccctctcccagtctggtgcaagtatacacaagtcctgctgccgtcgcggtctgggagtggcaagacggcctgggcacttggcatccatattctgccaccgtctgtagctttatcgagcagcagtttgtccagcaaaaaggccagaggttcggtcttggatcactcgctcatagcattcctctgggtcaggccgatccttcattggccccatacattatcgacttgccctcctggacccagttccggcaggacacaggcaccatgcgagccgtgagaaggcatctattcccccagcacagcgccccagggagaggcgtagtgtgggagtggctgagcgatgacggcagttggaccgcttacgaagcaagcgtttgtgattatctggagcagcaggtggccaggggtaaccagctcgttgacctggctccccttggctacaattataccgtgaattataccacgcacacccagaccaataaaacttcatctttttgtagaagtgttcgacgacaagccggtccaccttaccctgtcacgacaattatcgctccaccgggacacactggtgtggcctgtagctgtcaccaatgtctgtcgggctctaggactggcccagtatctgggaggtatcgccactccatgacaaatttacctgcctacccagtgcctcagcacccgccacaccggacagccagtgttttcgggacccaccaggcatttgccccatataacaagccctccttatctggcgcacgatccgccccaaggctgaatactacaaatgcatggggggctgcgccaccgtctctcggcagccagcctctgtacagaagctcactctcgcacctgggtcctcagcatctgcctcccggaagctctactagtggagccgtatccgcctctctccccagcggaccctcaagctcccccggttcagtgccggctaccgtccctatgcagatgcctaagcctagcagagtgcagcaggctttggctggaatgacgtctgtcctgatgtctgccattgggctgccagtgtgcctcagccgcgcaccccagcccacgtcacctcctgcgtcccgcttagcctccaagtctcatggcagtgtcaaaagactcaggaagatgagtgttaagggggctacccccaagccagagccagagcccgaacaggtcataaagaactacacagaggaactcaaagtcccacccgatgaggattgcatcatttgcatggaaaaactctcaactgcaagtggctactccgatgtgactgacagcaaggctatcggcagcctggccgtaggtcatcttacaaaatgctcccacgcattccatttgttatgtcttttagccatgtactgtaatggaaacaaagacggcagtctccagtgcccttcctgcaaaaccatctatggcgaaaaaactggtacacaaccgcaggggaaaatggaagtattgagatttcagatgagtctgccaggccacgaagattgcggcaccattctaattgtctattccattccacacggcattcagggaccagagcaccccaaccctggcaagccttttacagccagaggcttccctcggcagtgctacctacccgacaatgcacaaggaagaaaggtgctggaactgctaaaggtcgcgtggaagcgccgtctgatcttcactgttggaactagtagcactaccggggagactgacacggtcgtttggaatgaaattcatcacaagaccgagatggaccgcaatattacgggacatggctacccagaccccaattacctgcagaatgttcttgccgagctcgcagcccaaggggtgacggaggactgcctggaacagcagtag

SEQ ID NO: 41029 - DNA, 1869 bp, Artificial Sequence
  derived and/or modified sequence
atggccatggccccaagtccttctctcgttcaagtttacactagccccgcagcagtcgcagtctgggaatggcaggatggcttagggacctggcatccttattcagctactgtctgcagctttattgaacagcagttcgtgcagcagaagggtcagagattcggccttggcagcctggcccactcaatccctctgggacaggccgatccctctctcgcaccgtatatcatcgacctcccatcctggacccagtttcggcaggatacaggcaccatgcgcgctgtgaggaggcatttgttcccccagcattccgcccctgggcgaggagtggtgtgggagtggctatccgatgatggttcctggactgcatacgaggcgagcgtttgcgactacctggaacagcaggttgcaagaggtaaccagctggtggacctggcacccttgggctacaattacacagtcaactatacaacccacacccagacaaataaaacatccagcttttgtagaagcgtgcggcgacaagcaggcccaccatacccggtcaccactattattgcgcctcccggacataccggcgtcgcgtgttcctgtcaccagtgtctgagcgggagccggacaggtccagtatccggcagatatagacactcgatgaccaacctgccagcttaccctgttcctcaacacccaccccacagaacagcttcagtgtttggaacacaccaagcgtttgcgccttacaataagccatctctgtctggcgcaagatctgcccctagactgaacaccaccaatgcctggggagccgcacccccaagcctgggatcacagcctctttaccgatcctccctgtcacacctcggcccacagcatctccctcctggatcctccacgtcaggcgctgtttcagcgagcctgccatcaggccctagctcttcaccagggagcgtacccgctaccgtccctatgcaaatgcctaaaccctcgcgtgtgcagcaagcacttgccggaatgacatccgtgctcatgagcgccattggtcttccagtgtgcctgagccgtgccccacagccaactagtcctcctgcttcacgattggccagcaagtcccacggtagcgtcaagcgtcttagaaagatgtctgttaaaggtgcaacaccgaagcctgaaccagaaccagaacaggtcatcaaaaattacaccgaggagctgaaagtgccccctgatgaagattgcatcatttgcatggaaaagctgtccaccgcctccggttattccgatgttactgacagcaaagcaattgggtcactggctgtagggcacctcactaagtgttcacacgccttccatcttctatgtctactggctatgtattgcaacggaaataaggatgggtccctgcagtgtccaagctgcaaaacaatatatggggagaagaccggaacacagcctcaggggaaaatggaggtactaagatttcagatgtcccttcccggacatgaagattgtggtacgatcttgattgtctactccatcccccatggcattcaggggccagaacatccaaaccctggaaaaccgtttactgctcgaggttttccgaggcagtgttacctgccagacaacgctcagggcagaaaggtgttggaacttctgaaagtcgcctggaagcgacggcttatttttaccgtcggcaccagttcaacgacaggggagaccgataccgttgtgtggaacgagattcatcataaaaccgagatggatcggaacattacaggtcacggttaccctgatcccaactatctacaaaacgtgctggctgaacttgccgctcagggcgtgaccgaggattgcttggaacagcagtag

SEQ ID NO: 41030 - DNA, 45 bp, Artificial Sequence
  derived and/or modified sequence
atggctatggctccttcgccttcattggtgcaggtctatacctag

SEQ ID NO: 41031 - DNA, 87 bp, Artificial Sequence
  derived and/or modified sequence
atggcaatggctccttcgccaagtctagtgcaggtgtacacaagtccagctgccgtagccgtgtgggaatggcaggatgggctctag

SEQ ID NO: 41032 - DNA, 78 bp, Artificial Sequence
  derived and/or modified sequence
atggcaatggccccaagcccctctctagtccaggtctacactagtcccgcagccgtggccgtctgggagtggcaatag

SEQ ID NO: 41033 - DNA, 2623 bp, Artificial Sequence
  derived and/or modified sequence
cttctcctgagagtcggagccacagccagagccctgcccaggccgagccggagctgcagcccgagcgcggtggtgccctcagccccgtcctcttgtcctcctcagcctcggtgccttggaatttgtgtcgctgagtcagcaagcctttcagatttgcccggtttttgttgtttgtggtttgtatcaagatgggaactcaaacaagtcattcctcctaaggagctggtgtcttcatccagaagggacagtttgtgccagctctccagagagaaaagatctgccggaggcgctgggcaatgaccccgggactccaggccagaggggtctgaagctgtttgggaaagcagcgggactccttgggaagatggccatggccccaagcccttccctggtgcaggtgtacaccagccccgcggctgtggccgtgtgggaatggcaggacgggctgggcacctggcacccctacagtgccaccgtctgcagcttcatcgagcagcagtttgtccagcagaagggccaacgttttgggcttgggagcctggcccacagcatccccttgggccaggcagacccctcgctggccccttacattattgacctccccagctggacccagttccgccaggacaccggcaccatgcgggctgtgcggagacacctgttcccccagcactcagcccctggccgaggtgtcgtctgggagtggctgagcgacgatggctcctggactgcctatgaagccagcgtctgtgactatctggagcagcaggtggccaggggcaaccagctcgtggacttggcccccctggggtacaactacactgtcaactacaccacccacacgcagaccaacaagacttccagcttctgccgcagcgtgcggcgccaagcagggccgccttacccggtgaccaccatcatcgctccgccgggccacacaggcgtcgcctgctcttgccaccagtgcctcagtggcagcagaactggccccgtgtcaggccgctaccgccactccatgaccaacctccctgcataccccgtcccccagcaccccccacacaggaccgcttctgtgtttgggacccaccaggcctttgcaccgtacaacaaaccctcactctccggggcccggtctgcgcccaggctgaacaccaccaacgcctggggcgcagctcctccttccctggggagccagcccctctaccgctccagcctctcccacctgggaccgcagcacctgcccccaggatcctccacctccggtgcagtcagtgcctccctccccagcggtccctcaagcagcccagggagcgtccctgccactgtgcccatgcagatgccaaagcccagcagagtccagcaggcgctcgcaggcatgacgagtgttctgatgtcagccattggactccctgtgtgtcttagccgcgcaccccagcccaccagccctcccgcctcccgtctggcttccaaaagtcacggctcagttaagagattgaggaaaatgtccgtgaaaggagcgaccccgaagccagagccagagccagagcaggtcataaaaaactacacggaagagctgaaagtgcccccagatgaggactgcatcatctgcatggagaagctgtccacagcgtctggatacagcgatgtgactgacagcaaggcaatcgggtccctagctgtgggccacctcaccaagtgcagccatgccttccacctgctgtgcctcctggccatgtactgcaacggcaataaggatggaagtctgcagtgtccctcctgcaaaaccatctatggagagaagacggggacccagccccagggaaagatggaggtattacggttccagatgtcgctccccggccacgaggactgcgggaccatcctcatagtttacagcattccccatggtatccagggccctgagcaccccaatcccggaaagccgttcactgccagagggtttccccgccagtgctaccttccagacaacgcccagggccgcaaggtcctagagctcctgaaggtggcctggaagaggcggctcatcttcacagtgggcacgtccagcaccacgggtgagacggacaccgtggtatggaacgagatccaccacaagacagagatggaccgcaacattacgggccacggctatcccgaccccaactacctgcagaacgtgctggctgagctggctgcccagggggtgaccgaggactgcctggagcagcagtgacctcgcaccccagcacgcccgcctctggtggccaccccgctgccccatggctggctgggtggccaggcaggaagtgcccagcccgagaggctgggaggtttgttgagggtgtggggtgtgccccacctgaagccggggctccccctgcctgcctctctctcctcctcccctctgggaattgggcagccctgggcagttgtactcatgggggcttaggatgcagctacctcagtgcgcagggcccgtctgtcctctgggggctgcttcgggcccgcggtgctcggggcctggtgtggggcgagtagagacttccccagcctggacgggcgtgggttctgggtcagcttcttttacctcaattttgtttgcaataaatgctctatagccaaa

SEQ ID NO: 41034 - DNA, 1686 bp, Artificial Sequence
  derived and/or modified sequence
atgagagccgttcgaaggcatctgtttccccagcattctgcccctggcagaggggtcgtgtgggagtggctctcagatgacggctcgtggacggcctacgaagcaagtgtttgtgattacttagaacagcaggtagccagagggaatcagctggtggatctcgctccgctcggctacaattatacagtgaactataccactcatactcagaccaataaaacgtccagcttttgcaggagtgtaagaaggcaggccggacctccctaccccgtgactacaattatagcccctcctggtcacaccggggttgcttgctcctgccatcagtgtctctctggaagccggactggtcccgtgagcggtcggtaccgccacagcatgaccaacctgcccgcataccccgtgccacaacatccgccacatcggactgctagcgtcttcggtacacaccaagccttcgctccttacaataagccgtcgttaagcggagccagaagtgcaccgagacttaatacaactaatgcatggggggctgcccctcctagtctgggcagccagccattatatagaagctccctgtcccacctggggccacaacacctcccacctggatcctcaacaagcggggcagtttccgctagtctgccttccggaccatcatcgagtcccggatccgtgcccgcaaccgttcctatgcagatgcccaaacccagtcgcgtgcagcaggctcttgccggtatgacctcagtacttatgtccgcgatcgggctgcccgtttgtctcagccgcgcacctcagcccaccagcccgcctgccagccggctagcatctaagtcacatggatctgtgaagcgactcaggaagatgtccgttaaaggggctaccccaaaaccggaacccgaacccgaacaggtgattaagaactacaccgaggagcttaaagttcccccagatgaggactgcattatttgtatggagaaactcagtacagcctccggatactcagacgtcacggactcaaaagctatcggtagcctggcggtggggcatttgactaagtgttcacatgcgttccaccttctgtgtcttctggcaatgtactgtaatggcaacaaggatggctccctgcagtgtccctcgtgtaaaacgatatatggggagaaaacaggcacccagcctcaaggtaagatggaggtgttaagatttcagatgtccctgcccggtcacgaggattgtggaactattctgatcgtctattccatcccacatggaattcagggacctgagcacccaaaccctggtaagccctttacggcaaggggtttccctcgccagtgctacctgcctgacaatgcccaaggcaggaaggtgctggaactgttgaaagtggcgtggaagaggcgcctcatttttaccgttgggacctcgtcaactacgggcgagactgatacagtagtctggaatgagatccaccataaaacagagatggatagaaacatcaccggtcatggctacccggaccctaattacttgcagaatgtgctggctgagttagccgcacaaggtgtgaccgaagattgcctggagcagcagcatgcacgcttgtggtggccacccaggtgtccaatggcaggctgggttgcaagacaggaagtcccctcccctaggggatgggaagtgtgctag

SEQ ID NO: 41035 - DNA, 2469 bp, Artificial Sequence
  derived and/or modified sequence
gcgacgccgagtttcactctggctgccttctcctgagagtcggagccacagccagagccctgcccaggccgagccggagctgcagcccgagcgcggtggtgccctcagccccgtcctcttgtcctcctcagcctcggtgccttggaatttgtgtcgctgagtcagcaagcctttcagatttgcccggtttttgttgtttgtggtttgtatcaagatgggaactcaaacaagtcattcctcctaaggagctggtgtcttcatccagaagggacagtttgtgccagctctccagagagaaaaggatctggtactgttctggagtggcctgtagcagacactgaaccaccagccagctgcatttgttgtcctggaagtcattgccaactctgccagtcacactggggtccccagagaagtcaagatctgccggaggcgctgggcaatgaccccgggactccaggccagaggggtctgaagctgtttgggaaagcagcgggactccttgggaagatggccatggccccaagcccttccctggtgcaggtgtacaccagccccgcggctgtggccgtgtgggaatggcaggacgggctgggcacctggcacccctacagtgccaccgtctgcagcttcatcgagcagcagtttgtccagcagaagggccaacgttttgggcttgggagcctggcccacagcatccccttgggccaggcagacccctcgctggccccttacattattgacctccccagctggacccagttccgccaggacaccggcaccatgcgggctgtgcggagacacctgttcccccagcactcagcccctggccgaggtgtcgtctgggagtggctgagcgacgatggctcctggactgcctatgaagccagcgtctgtgactatctggagcagcaggtggccaggggcaaccagctcgtggacttggcccccctggggtacaactacactgtcaactacaccacccacacgcagaccaacaagacttccagcttctgccgcagcgtgcggcgccaagcagggccgccttacccggtgaccaccatcatcgctccgccgggccacacaggcgtcgcctgctcttgccaccagtgcctcagtggcagcagaactggccccgtgtcaggccgctaccgccactccatgaccaacctccctgcataccccgtcccccagcaccccccacacaggaccgcttctgtgtttgggacccaccaggcctttgcaccgtacaacaaaccctcactctccggggcccggtctgcgcccaggctgaacaccaccaacgcctggggcgcagctcctccttccctggggagccagcccctctaccgctccagcctctcccacctgggaccgcagcacctgcccccaggatcctccacctccggtgcagtcagtgcctccctccccagcggtccctcaagcagcccagggagcgtccctgccactgtgcccatgcagatgccaaagcccagcagagtccagcaggcgctcgcaggcatgacgagtgttctgatgtcagccattggactccctgtgtgtcttagccgcgcaccccagcccaccagccctcccgcctcccgtctggcttccaaaagtcacggctcagttaagagattgaggaaaatgtccgtgaaaggagcgaccccgaagccagagccagagccagagcaggtcataaaaaactacacggaagagctgaaagtgcccccagatgaggactgcatcatctgcatggagaagctgtccacagcgtctggatacagcgatgtgactgacagcaaggcaatcgggtccctagctgtgggccacctcaccaagtgcagccatgccttccacctgctgtgcctcctggccatgtactgcaacggcaataaggatggaagtctgcagtgtccctcctgcaaaaccatctatggagagaagacggggacccagccccagggaaagatggaggtattacggttccagatgtcgctccccggccacgaggactgcgggaccatcctcatagtttacagcattccccatggtatccagggccctgagcaccccaatcccggaaagccgttcactgccagagggtttccccgccagtgctaccttccagacaacgcccagggccgcaaggtcctagagctcctgaaggtggcctggaagaggcggctcatcttcacagtgggcacgtccagcaccacgggtgagacggacaccgtggtatggaacgagatccaccacaagacagagatggaccgcaacattacgggccacggctatcccgaccccaactacctgcagaacgtgctggctgagctggctgcccagggggtgaccgaggactgcctggagcagcagcacgcccgcctctggtggccaccccgctgccccatggctggctgggtggccaggcaggaagtgcccagcccgagaggctgggaggtttgttga

SEQ ID NO: 41036 - DNA, 2769 bp, Artificial Sequence
  derived and/or modified sequence
gcgacgccgagtttcactctggctgccttctcctgagagtcggagccacagccagagccctgcccaggccgagccggagctgcagcccgagcgcggtggtgccctcagccccgtcctcttgtcctcctcagcctcggtgccttggaatttgtgtcgctgagtcagcaagcctttcagatttgcccggtttttgttgtttgtggtttgtatcaagatgggaactcaaacaagtcattcctcctaaggagctggtgtcttcatccagaagggacagtttgtgccagctctccagagagaaaaggatctggtactgttctggagtggcctgtagcagacactgaaccaccagccagctgcatttgttgtcctggaagtcattgccaactctgccagtcacactggggtccccagagaagtcaagatctgccggaggcgctgggcaatgaccccgggactccaggccagaggggtctgaagctgtttgggaaagcagcgggactccttgggaagatggccatggccccaagcccttccctggtgcaggtgtacaccagccccgcggctgtggccgtgtgggaatggcaggacgggctgggcacctggcacccctacagtgccaccgtctgcagcttcatcgagcagcagtttgtccagcagaagggccaacgttttgggcttgggagcctggcccacagcatccccttgggccaggcagacccctcgctggccccttacattattgacctccccagctggacccagttccgccaggacaccggcaccatgcgggctgtgcggagacacctgttcccccagcactcagcccctggccgaggtgtcgtctgggagtggctgagcgacgatggctcctggactgcctatgaagccagcgtctgtgactatctggagcagcaggtggccaggggcaaccagctcgtggacttggcccccctggggtacaactacactgtcaactacaccacccacacgcagaccaacaagacttccagcttctgccgcagcgtgcggcgccaagcagggccgccttacccggtgaccaccatcatcgctccgccgggccacacaggcgtcgcctgctcttgccaccagtgcctcagtggcagcagaactggccccgtgtcaggccgctaccgccactccatgaccaacctccctgcataccccgtcccccagcaccccccacacaggaccgcttctgtgtttgggacccaccaggcctttgcaccgtacaacaaaccctcactctccggggcccggtctgcgcccaggctgaacaccaccaacgcctggggcgcagctcctccttccctggggagccagcccctctaccgctccagcctctcccacctgggaccgcagcacctgcccccaggatcctccacctccggtgcagtcagtgcctccctccccagcggtccctcaagcagcccagggagcgtccctgccactgtgcccatgcagatgccaaagcccagcagagtccagcaggcgctcgcaggcatgacgagtgttctgatgtcagccattggactccctgtgtgtcttagccgcgcaccccagcccaccagccctcccgcctcccgtctggcttccaaaagtcacggctcagttaagagattgaggaaaatgtccgtgaaaggagcgaccccgaagccagagccagagccagagcaggtcataaaaaactacacggaagagctgaaagtgcccccagatgaggactgcatcatctgcatggagaagctgtccacagcgtctggatacagcgatgtgactgacagcaaggcaatcgggtccctagctgtgggccacctcaccaagtgcagccatgccttccacctgctgtgcctcctggccatgtactgcaacggcaataaggatggaagtctgcagtgtccctcctgcaaaaccatctatggagagaagacggggacccagccccagggaaagatggaggtattacggttccagatgtcgctccccggccacgaggactgcgggaccatcctcatagtttacagcattccccatggtatccagggccctgagcaccccaatcccggaaagccgttcactgccagagggtttccccgccagtgctaccttccagacaacgcccagggccgcaaggtcctagagctcctgaaggtggcctggaagaggcggctcatcttcacagtgggcacgtccagcaccacgggtgagacggacaccgtggtatggaacgagatccaccacaagacagagatggaccgcaacattacgggccacggctatcccgaccccaactacctgcagaacgtgctggctgagctggctgcccagggggtgaccgaggactgcctggagcagcagtgacctcgcaccccagcacgcccgcctctggtggccaccccgctgccccatggctggctgggtggccaggcaggaagtgcccagcccgagaggctgggaggtttgttgagggtgtggggtgtgccccacctgaagccggggctccccctgcctgcctctctctcctcctcccctctgggaattgggcagccctgggcagttgtactcatgggggcttaggatgcagctacctcagtgcgcagggcccgtctgtcctctgggggctgcttcgggcccgcggtgctcggggcctggtgtggggcgagtagagacttccccagcctggacgggcgtgggttctgggtcagcttcttttacctcaattttgtttgcaataaatgctctatagccaaa

SEQ ID NO: 41037 - DNA, 1869 bp, Artificial Sequence
  derived and/or modified sequence
atggccatggcccccagccccagcctggtgcaggtgtacaccagccccgccgccgtggccgtgtgggagtggcaggacggcctgggcacctggcacccctacagcgccaccgtgtgcagcttcatcgagcagcagttcgtgcagcagaagggccagagattcggcctgggcagcctggcccacagcatccccctgggccaggccgaccccagcctggccccctacatcatcgacctgcccagctggacccagttcagacaggacaccggcaccatgagagccgtgagaagacacctgttcccccagcacagcgcccccggcagaggcgtggtgtgggagtggctgagcgacgacggcagctggaccgcctacgaggccagcgtgtgcgactacctggagcagcaggtggccagaggcaaccagctggtggacctggcccccctgggctacaactacaccgtgaactacaccacccacacccagaccaacaagaccagcagcttctgcagaagcgtgagaagacaggccggccccccctaccccgtgaccaccatcatcgccccccccggccacaccggcgtggcctgcagctgccaccagtgcctgagcggcagcagaaccggccccgtgagcggcagatacagacacagcatgaccaacctgcccgcctaccccgtgccccagcaccccccccacagaaccgccagcgtgttcggcacccaccaggccttcgccccctacaacaagcccagcctgagcggcgccagaagcgcccccagactgaacaccaccaacgcctggggcgccgccccccccagcctgggcagccagcccctgtacagaagcagcctgagccacctgggcccccagcacctgccccccggcagcagcaccagcggcgccgtgagcgccagcctgcccagcggccccagcagcagccccggcagcgtgcccgccaccgtgcccatgcagatgcccaagcccagcagagtgcagcaggccctggccggcatgaccagcgtgctgatgagcgccatcggcctgcccgtgtgcctgagcagagccccccagcccaccagcccccccgccagcagactggccagcaagagccacggcagcgtgaagagactgagaaagatgagcgtgaagggcgccacccccaagcccgagcccgagcccgagcaggtgatcaagaactacaccgaggagctgaaggtgccccccgacgaggactgcatcatctgcatggagaagctgagcaccgccagcggctacagcgacgtgaccgacagcaaggccatcggcagcctggccgtgggccacctgaccaagtgcagccacgccttccacctgctgtgcctgctggccatgtactgcaacggcaacaaggacggcagcctgcagtgccccagctgcaagaccatctacggcgagaagaccggcacccagccccagggcaagatggaggtgctgagattccagatgagcctgcccggccacgaggactgcggcaccatcctgatcgtgtacagcatcccccacggcatccagggccccgagcaccccaaccccggcaagcccttcaccgccagaggcttccccagacagtgctacctgcccgacaacgcccagggcagaaaggtgctggagctgctgaaggtggcctggaagagaagactgatcttcaccgtgggcaccagcagcaccaccggcgagaccgacaccgtggtgtggaacgagatccaccacaagaccgagatggacagaaacatcaccggccacggctaccccgaccccaactacctgcagaacgtgctggccgagctggccgcccagggcgtgaccgaggactgcctggagcagcagtag

SEQ ID NO: 41038 - protein, 575 aa, Artificial Sequence
  derived and/or modified sequence
MAMAPSPSLVQVYTSPAAVAVWEWQDGLGTWHPYSATVCSFIEQQFVQQKGQRFGLGSLAHSIPLGQADPSLAPYIIDLPSWTQFRQDTGTMRAVRRHLFPQHSAPGRGVVWEWLSDDGSWTAYEASVCDYLEQQVARGNQLVDLAPLGYNYTVNYTTHTQTNKTSSFCRSVRRQAGPPYPVTTIIAPPGHTGVACSCHQCLSGSRTGPVSGRYRHSMTNLPAYPVPQHPPHRTASVFGTHQAFAPYNKPSLSGARSAPRLNTTNAWGAAPPSLGSQPLYRSSLSHLGPQHLPPGSSTSGAVSASLPSGPSSSPGSVPATVPMQMPKPSRVQQALAGATPKPEPEPEQVIKNYTEELKVPPDEDCIICMEKLSTASGYSDVTDSKAIGSLAVGHLTKCSHAFHLLCLLAMYCNGNKDGSLQCPSCKTIYGEKTGTQPQGKMEVLRFQMSLPGHEDCGTILIVYSIPHGIQGPEHPNPGKPFTARGFPRQCYLPDNAQGRKVLELLKVAWKRRLIFTVGTSSTTGETDTVVWNEIHHKTEMDRNITGHGYPDPNYLQNVLAELAAQGVTEDCLEQQ

SEQ ID NO: 41039 - protein, 14 aa, Artificial Sequence
  derived and/or modified sequence
MAMAPSPSLVQVYT

SEQ ID NO: 41040 - DNA, 1728 bp, Artificial Sequence
  derived and/or modified sequence
atggctatggctccttctccctctctcgtgcaagtgtacacaagcccagctgccgtcgctgtgtgggagtggcaggacggcctgggaacgtggcacccatacagtgcgaccgtttgctctttcattgaacagcagttcgttcagcagaaaggacagagattcggtctcggcagccttgctcactccattccactgggccaggcagatccaagcctagcaccatacatcatcgacctgcctagttggactcagttcagacaggataccggcacgatgagggcagtcagaaggcatctgttccctcagcattcagcacctggccgaggcgtggtgtgggagtggctgtcagatgacggaagttggacagcatatgaagcatcagtttgcgactacctggagcagcaggtggcaagaggaaatcagttggtcgatctggcgccccttggatacaactacactgtaaactatactacccatactcagacaaacaaaacatcatccttttgccgcagtgtaaggcggcaggccgggcccccttatcccgtcaccacaataattgcccctccaggacacacaggcgtcgcctgttcttgccaccaatgtttgtcagggtccagaacaggtcccgtcagcggtagataccggcacagcatgactaacttaccggcctaccctgtgccacagcacccccctcataggacggcgtctgtcttcggcacacaccaagcattcgctccgtacaacaagcctagtctgtccggggcacgttccgcccctcggctcaacaccacgaacgcttggggcgctgctcctccctccttagggtctcagcctctgtacaggtcctctctttcacatctcggcccgcagcatctaccaccggggtcatctaccagcggagctgtaagtgcttctctgccatccggaccatcttcgtcccccggctccgtgccagcaacggttccaatgcagatgcctaaacctagtcgcgtgcaacaggcacttgccggtgccacacctaagcccgagcccgagcccgagcaggttattaaaaattacacagaagaactgaaggtacctccagatgaggactgcataatctgtatggaaaaattgtcgacggcttcgggctattctgacgtcactgactctaaggcgataggcagcctggctgtggggcatctcactaagtgttctcacgcctttcatttgctttgccttctggcgatgtattgtaacgggaacaaagatggctcgctgcagtgcccatcctgtaaaacaatttatggtgagaagacaggaactcagccacagggcaaaatggaagtactcagatttcagatgtcattgccagggcacgaagattgcggcaccatcctcattgtctacagcatccctcatgggatccaagggcccgagcaccccaaccccgggaaaccatttacggcacggggcttcccgcgccagtgctacctgcccgataatgcacagggtagaaaggtgcttgaactcctgaaggtggcttggaaacgcagactgatcttcacagtggggaccagctccaccacgggcgagactgataccgtcgtgtggaatgagatacatcataaaaccgaaatggataggaatattaccgggcacggttaccctgatcccaactacctacagaatgttctggctgagttggctgcgcaaggggtgacagaagattgtttggaacagcagtag

SEQ ID NO: 41041 - DNA, 1728 bp, Artificial Sequence
  derived and/or modified sequence
atggcgatggcgccgtcaccttcgctggtgcaggtatatacgagccctgccgcggtcgcagtctgggagtggcaagatggtctgggtacctggcacccatactccgcaacagtgtgcagctttattgagcagcagttcgttcagcagaagggccagcgatttgggctagggtcgctcgctcattccatcccactcgggcaagccgatcccagccttgcaccttatattatcgacctgccctcatggacccaattcaggcaggatacaggtaccatgcgagcagtgaggaggcatttgtttccccaacacagcgccccgggcaggggggtagtgtgggagtggctcagcgacgacggatcatggactgcatatgaggcatctgtctgcgactacttggagcagcaggtggccaggggcaaccaattggtcgacctcgcaccccttgggtacaattacaccgtaaactataccacacacacgcagacaaataaaaccagctcattttgtcgcagcgtcaggaggcaggctgggccaccttacccagtaacgacaattatcgctcctcccggacatacaggagtggcttgttcctgccatcagtgcctctccgggtcgaggacggggccggtcagcggcagatatcgccattcgatgacaaatctccccgcataccctgtaccacagcaccccccccatagaaccgcctctgtatttggtactcatcaggcgtttgccccttataataagccgtccctctccggcgcccggagtgcaccccgtctaaatactacaaatgcctggggcgccgctcccccatcactcggttcgcagcctttgtacaggagttccttatcccacctgggcccccaacatcttcccccaggatcctctacaagcggagcagtgtcagcgtccctccctagtggcccctctagcagtcccggatctgttcccgccaccgttccaatgcagatgccaaaacctagccgtgtccagcaggcacttgccggcgccacacctaaacctgaacctgagcccgaacaggttatcaagaattacacggaggagttgaaggtgcctcctgacgaagattgtataatctgtatggagaagctgagcactgccagcggatacagcgatgttactgacagcaaagcgatcggaagtctggcggtgggccacctgacaaagtgtagccacgccttccatttgctgtgtcttctggccatgtattgtaatgggaataaagacggatcactccagtgccccagttgtaaaactatttacggggaaaaaaccgggacacagccgcaggggaaaatggaggtgctgcggttccagatgagtctcccagggcatgaggactgcggtacaatcctcatagtctacagtattcctcatggaatccagggcccggaacatcccaaccccggcaaaccctttactgctcggggctttccaaggcagtgttacttgccggataacgcacagggccgaaaagttctagagctgctaaaggttgcttggaagaggcgcctgatctttaccgtagggacctcttcaacaactggggagactgacacagtggtttggaatgagatccaccacaagacagaaatggataggaacatcaccggacatggctacccggacccaaattatttgcagaacgtgttggccgaactggcggcacagggagtgactgaggactgcctagaacaacagtag

SEQ ID NO: 41042 - DNA, 1728 bp, Artificial Sequence
  derived and/or modified sequence
atggccatggcccccagccccagcctggtgcaggtgtacaccagccctgctgctgtggccgtgtgggagtggcaggacggcctgggcacctggcacccctacagcgccaccgtgtgcagcttcatcgagcagcagtttgtgcagcagaagggccagcgcttcggcctgggcagcctggcccacagcatccccctgggccaggccgaccccagcctggccccctacatcatcgacctgcccagctggacccagttccggcaggacaccggcaccatgagagctgtgcggcggcacctgttcccccagcacagcgcccctggccggggcgtggtgtgggagtggctgagtgatgatggctcctggacagcctatgaggcctctgtgtgtgactacctggagcagcaggtggcccggggcaaccagctggtggacctggcccccctgggctacaactacacagtgaactacaccacccacacccagaccaacaagaccagcagcttctgccgctctgtgcggcggcaggccggccccccctaccctgtgaccaccatcatcgcccctcctggccacactggagtggcctgcagctgccaccagtgcctgagcggcagcaggactggacctgtgtctggccgctaccgccacagcatgaccaacctgcctgcctaccctgtgccccagcaccccccccacaggacagcctctgtgtttggcacccaccaggcctttgccccctacaacaagcccagcctgagcggggcccggagcgccccccggctgaacaccaccaatgcctggggcgccgccccacccagcctgggcagccagcccctgtaccgcagcagcctgagccacctgggcccccagcacctgcccccaggcagcagcaccagcggggctgtgtctgccagcctgcccagcggccccagcagcagccctggctctgtgcctgccaccgtgcccatgcagatgcccaagcccagccgggtgcagcaggccctggccggggccacccccaagccagagcctgagcctgagcaggtgatcaagaactacacagaggagctgaaggtgcccccagatgaggactgcatcatctgcatggagaagctgagcacagccagcggctacagtgatgtgacagacagcaaggccatcggcagcctggccgtgggccacctgaccaagtgcagccacgccttccacctgctgtgcctgctggccatgtactgcaatggaaacaaggatggcagcctgcagtgccccagctgcaagaccatctatggagagaagacaggcacccagccccagggcaagatggaggtgctgcgcttccagatgagcctgcccggccacgaggactgtggcaccatcctgattgtgtacagcatcccccacggcatccagggccctgagcaccccaaccctgggaagcccttcaccgcccggggcttcccccggcagtgctacctgcctgacaatgcccagggcaggaaggtgctggagctgctgaaggtggcctggaagagaagactcatcttcaccgtgggcaccagcagcaccactggagaaacagacacagtggtgtggaatgagatccaccacaagacagagatggacaggaacatcactggacatggctacccagaccccaactacctgcagaatgtgctggccgagctggccgcccagggcgtgacagaggactgcctggagcagcagtag

SEQ ID NO: 41043 - DNA, 1728 bp, Artificial Sequence
  derived and/or modified sequence
atggccatggcccccagccccagcctggtgcaggtgtacaccagcccagcagcggtggccgtgtgggaatggcaggatggcttaggcacatggcacccctactccgcaactgtgtgctcctttattgagcagcagttcgtccagcagaagggacaacgcttcggcctggggagcctggcacacagcatcccactgggccaggcagacccatctctggccccatatataatagacttgccatcttggacacagttcaggcaagacactggaacaatgagggcagtgagacgtcacctctttccccagcacagtgcaccgggcaggggcgtggtgtgggagtggctgtcagacgacggctcctggaccgcatatgaggcctctgtctgcgactatctcgaacagcaagtagcgcgtggcaatcagctggttgatctagcgcctctcgggtataactacactgtaaactacaccacacatacccagacgaataaaacttcatcgttttgccgaagtgtgaggcggcaggctggccccccttatccggtcacaacaattattgctcctcccggccacacaggagtggcgtgtagttgccatcagtgcctttccggttctcggacaggaccagtgagcggtcgctataggcatagtatgactaacttgccagcttatcccgtcccccaacatccccctcaccgaactgcatctgtatttggaacccaccaggccttcgcaccatataacaagccttccctgtccggggcacgtagcgctccaaggctgaacacgacgaacgcgtggggagcggctcctcccagcctgggcagtcagcctttataccggtcctcattgagtcatttaggcccacagcacctgccccctggttcgtcgacttccggggccgtaagtgcttctttgccaagcggcccaagctcttcacctggatccgtgcctgcgactgtacctatgcagatgccaaagccctctagggtgcagcaagctctggcaggggctacgcccaagccagagcccgagccagagcaagtcatcaagaattacaccgaggaactcaaggtgccgcctgacgaggattgtatcatttgtatggagaaactgtcaactgccagcgggtactccgatgtgacagactctaaggccatcggaagcctggccgtcggtcacctaacaaagtgctcacacgctttccacctgctctgcttgctggctatgtactgcaatggcaacaaggatgggtcccttcagtgtccttcttgcaagaccatctatggcgagaagaccggtacccagccccaaggcaagatggaggtcctcaggttccaaatgtccctcccaggacacgaggattgcggtacaatcctgatcgtctatagcattccacatgggatccaggggcccgagcatccaaacccaggcaaaccttttacggcgcgcggctttccacgacagtgctacctcccagataacgctcagggcagaaaggtgctcgaactgctcaaggtggcttggaaaagacggcttatattcaccgtcggcacctcgtcaaccacaggtgaaaccgacactgtagtatggaacgaaatacaccataaaaccgagatggataggaacataacagggcacggttatccggatcccaactatctgcagaacgttctggctgagctggcagcgcagggggtgaccgaagactgcctcgagcagcagtag

SEQ ID NO: 41044 - DNA, 1728 bp, Artificial Sequence
  derived and/or modified sequence
atggccatggcccccagccccagcctggtgcaggtgtacaccagccctgcagcggtggccgtctgggagtggcaagacggtttgggaacgtggcatccttactccgctacagtgtgcagttttatcgaacaacagtttgtccagcagaaaggtcagagatttggcctagggagcctggcccactctataccccttggacaggccgatcctagtctggccccttatatcatcgatttgcccagctggacccagttcaggcaggatactggcacaatgcgtgctgtacggcggcatctctttccacagcactccgcacctggtcggggcgtcgtttgggaatggctcagtgacgacggctcctggacagcctacgaagccagtgtctgcgactatctggaacaacaggtggctcgcgggaaccagctggtagatctggccccactgggctacaattacaccgttaattatacgacccatacccaaaccaacaagacctctagtttctgccggtctgtccggaggcaagcgggacccccgtatcctgtgaccacaatcatcgctcccccgggccacacaggcgtggcgtgtagttgtcatcaatgtctcagtggtagtcgaacgggtcccgtgagcgggcgctaccgacattcgatgacaaatcttccggcctacccggtcccccagcatccccctcacaggacagccagtgtgttcgggacacatcaagcattcgcaccatacaataagcccagtctgtccggggcgaggagcgcaccaagactgaacacaacgaacgcttggggtgccgctccaccctccctgggatcccaacctctatatcgaagtagcttgagccaccttggccctcagcaccttccccctgggtcttccacaagcggagccgtgtctgcctcgctgccgtctgggcctagctcatcacctggcagtgtgccggccaccgtccctatgcagatgccaaagccctctcgagtgcagcaggccctagccggggccacgccaaagcctgaaccggagcctgagcaagtaatcaagaattacacggaggagctcaaagtgccccccgacgaagactgcattatctgtatggagaaactgtcaaccgccagcgggtactctgatgttactgactcaaaggccattggatctctggccgttgggcacctgaccaagtgcagccacgccttccatctcctttgcctgctggcaatgtactgcaacggcaataaagacggtagcctgcaatgcccttcctgcaagacaatttacggcgaaaaaacaggcacacagccacaaggaaagatggaggtgttgcggttccaaatgtccttgccaggacacgaagattgcggcactattttgatcgtgtactccattccgcacggcatacagggaccagagcatccaaaccccggcaaacccttcactgctcgtgggttcccacgacagtgctatttgcctgataatgcacagggacgaaaggttcttgaacttctgaaggttgcctggaagcggagacttattttcactgttgggacctcttctaccaccggcgagacggacactgtcgtctggaacgaaatacaccataagaccgaaatggatcgcaatatcaccggccacggttacccggatcctaactatctccaaaacgtactggctgagctggccgcacagggtgtaactgaagactgtttagagcagcaatag

SEQ ID NO: 41045 - DNA, 1728 bp, Artificial Sequence
  derived and/or modified sequence
atggccatggctccttcaccaagcctggttcaggtgtataccagtccagcagcagttgctgtttgggaatggcaggatggcctcggcacatggcatccctatagcgctactgtatgctcgtttatcgagcagcaattcgtgcagcagaagggccaaagattcggactgggctccctcgcccattctatccctcttggccaggctgacccaagtctggcaccatacatcatagatctgccaagctggacgcagttcagacaggatactggaacgatgcgcgcagttagacggcaccttttccctcaacattccgcgcctggtcgtggcgtggtgtgggagtggttgagcgatgacggaagttggacggcttacgaagcctcggtctgtgactacctcgaacagcaggtcgctagagggaatcagttagtggatctcgccccactcggctataattacactgtgaattacactactcacacccagacaaacaagacctcctctttttgtaggtccgtgcggcgtcaggctggtcctccctaccctgtgacaaccatcatcgcccctcccggtcacacaggggtggcatgctcctgtcatcaatgtctttccggttcgcgtaccggccctgtttctggcagatatcggcacagcatgactaacctgccagcgtatcctgtcccccagcacccccctcaccgcactgcatctgtgttcggaacacaccaagcatttgctccatacaacaagcccagtttatctggcgcacgcagcgcgcctcgcttgaataccacaaacgcctggggcgcagctccgccttcactcggcagccagcctctgtaccggtcttctctaagccacctggggcctcaacacttaccccctggatcaagcacttctggagcagtgagcgcgtctctgccctctggccctagttcgtctccaggtagcgttcctgccacggtccccatgcagatgcctaagcccagtagagtccaacaagccctcgccggtgccacacccaagcccgagcctgagccagaacaggtaattaaaaactacacagaggaacttaaagtgcctcctgatgaggattgcatcatctgcatggagaaactctctacggcctccggctatagtgatgttactgactccaaagcaattggatctctcgcagtgggccacctgactaagtgttcccacgcattccacctcctgtgtctgttggcaatgtactgcaacggtaacaaggacggttctctccagtgcccctcatgcaagaccatttatggggaaaagaccggtactcagccacagggcaagatggaggtgctgcggtttcagatgtctctgcccggacatgaagattgcggcactatcctgatcgtgtacagcatcccgcatggaatccagggaccggagcacccaaatcccggtaaacctttcacagcgcgtgggttcccacggcaatgctacttgcccgataatgctcagggcagaaaagtcctcgagctactcaaggttgcctggaaacggaggctgatttttaccgtgggtacatcctcaaccaccggcgaaacagacacagtggtgtggaatgagatccatcataaaactgagatggatagaaacatcacgggccatgggtacccagatcctaactaccttcaaaatgtgctcgcggaactggcagcacagggcgtgactgaggactgtctcgagcaacagtag

SEQ ID NO: 41046 - DNA, 1728 bp, Artificial Sequence
  derived and/or modified sequence
atggccatggctccttcccctagcctggttcaagtatatacctctcctgccgcagtggctgtgtgggaatggcaggatggactgggcacctggcacccatatagtgccaccgtgtgtagttttattgagcagcagttcgtgcaacaaaagggccagagattcgggctcgggagcctagcacacagtatccccctggggcaggcggatccttcgttagccccatacataatcgatctaccttcatggacacagttcaggcaggataccggcaccatgcgtgctgtgcggagacatctctttccacagcactcagcacccggaagaggagtcgtttgggagtggctgagcgacgatggatcctggacagcctatgaggccagcgtgtgcgattaccttgagcagcaggtcgctaggggcaatcaactggtggatctggctccgctgggatacaattacactgtgaattatacaacgcacacccagactaacaaaaccagcagcttctgccggtccgtcagacgccaggccggtcccccttatcccgtgacaactatcatcgcccctccaggccatacaggagtggcgtgcagctgtcatcagtgcctctccggctcacggaccggacccgtttccggcagataccgccactctatgactaacctgcccgcttaccctgtccctcaacacccaccacaccgcacagcctcagtgttcggcactcaccaggcgtttgctccttacaacaaacccagcctgtcgggggcacgttccgccccaaggttgaatacaaccaatgcctggggagcggctcctccgtctctgggcagtcaaccactctaccgaagctcactgagccatctgggtccacagcatctccctcccggttcttctacaagcggcgctgtctctgcttccttgcccagtggcccatcttcttctcccggatccgtgcctgccactgttccaatgcagatgccaaagccctcccgcgtccagcaagcgctagctggagccactcctaaacccgaacctgaaccagagcaggtcataaaaaattataccgaggaacttaaggtgcctcccgatgaagactgtattatctgtatggaaaaactgagtaccgcaagtggttactctgacgtaaccgattcaaaggccattggatccctagctgtcggtcacctcacaaaatgctcccacgcattccatcttctgtgtcttcttgctatgtactgtaatgggaataaggacggttctttgcagtgtccttcttgcaagaccatatatggggagaaaacaggcacccaaccccagggcaaaatggaggtgttgaggtttcagatgagtctgccgggtcatgaggattgcggtaccatactcatcgtctattcaatacctcacggcatacagggtccagagcatcctaatcctggcaaaccttttacagcaagggggtttcccaggcagtgctacctgcctgataatgcccagggtcgaaaggtgctggagcttctaaaggtggcctggaaaagacggctgatatttacagtgggtacctcaagtacaaccggtgaaacggacacagtggtgtggaacgagattcatcacaagactgagatggaccgtaacattacaggacatggttaccccgatcccaattacctccagaatgttcttgcagagctcgccgctcaaggagttaccgaagactgcctcgagcagcaatag

SEQ ID NO: 41047 - DNA, 1770 bp, Artificial Sequence
  derived and/or modified sequence
atggccatggccccaagcccttccctggtgcaggtgtacaccagccccgcggctgtggccgtgtgggaatggcaggacgggctgggcacctggcacccctacagtgccaccgtctgcagcttcatcgagcagcagtttgtccagcagaagggccaacgttttgggcttgggagcctggcccacagcatccccttgggccaggcagacccctcgctggccccttacattattgacctccccagctggacccagttccgccaggacaccggcaccatgcgggctgtgcggagacacctgttcccccagcactcagcccctggccgaggtgtcgtctgggagtggctgagcgacgatggctcctggactgcctatgaagccagcgtctgtgactatctggagcagcaggtggccaggggcaaccagctcgtggacttggcccccctggggtacaactacactgtcaactacaccacccacacgcagaccaacaagacttccagcttctgccgcagcgtgcggcgccaagcagggccgccttacccggtgaccaccatcatcgctccgccgggccacacaggcgtcgcctgctcttgccaccagtgcctcagtggcagcagaactggccccgtgtcaggccgctaccgccactccatgaccaacctccctgcataccccgtcccccagcaccccccacacaggaccgcttctgtgtttgggacccaccaggcctttgcaccgtacaacaaaccctcactctccggggcccggtctgcgcccaggctgaacaccaccaacgcctggggcgcagctcctccttccctggggagccagcccctctaccgctccagcctctcccacctgggaccgcagcacctgcccccaggatcctccacctccggtgcagtcagtgcctccctccccagcggtccctcaagcagcccagggagcgtccctgccactgtgcccatgcagatgccaaagcccagcagagtccagcaggcgctcgcaggagcgaccccgaagccagagccagagccagagcaggtcataaaaaactacacggaagagctgaaagtgcccccagatgaggactgcatcatctgcatggagaagctgtccacagcgtctggatacagcgatgtgactgacagcaaggcaatcgggtccctagctgtgggccacctcaccaagtgcagccatgccttccacctgctgtgcctcctggccatgtactgcaacggcaataaggatggaagtctgcagtgtccctcctgcaaaaccatctatggagagaagacggggacccagccccagggaaagatggaggtattacggttccagatgtcgctccccggccacgaggactgcgggaccatcctcatagtttacagcattccccatggtatccagggccctgagcaccccaatcccggaaagccgttcactgccagagggtttccccgccagtgctaccttccagacaacgcccagggccgcaaggtcctagagctcctgaaggtggcctggaagaggcggctcatcttcacagtgggcacgtccagcaccacgggtgagacggacaccgtggtatggaacgagatccaccacaagacagagatggaccgcaacattacgggccacggctatcccgaccccaactacctgcagaacgtgctggctgagctggctgcccagggggtgaccgaggactgcctggagcagcagtgacctcgcaccccagcacgcccgcctctggtggccaccccgctg

SEQ ID NO: 41048 - DNA, 2625 bp, Artificial Sequence
  derived and/or modified sequence
gcgacgccgagtttcactctggctgccttctcctgagagtcggagccacagccagagccctgcccaggccgagccggagctgcagcccgagcgcggtggtgccctcagccccgtcctcttgtcctcctcagcctcggtgccttggaatttgtgtcgctgagtcagcaagcctttcagatttgcccggtttttgttgtttgtggtttgtatcaagatgggaactcaaacaagtcattcctcctaaggagctggtgtcttcatccagaagggacagtttgtgccagctctccagagagaaaaggatctggtactgttctggagtggcctgtagcagacactgaaccaccagccagctgcatttgttgtcctggaagtcattgccaactctgccagtcacactggggtccccagagaagtcaagatctgccggaggcgctgggcaatgaccccgggactccaggccagaggggtctgaagctgtttgggaaagcagcgggactccttgggaagatggccatggccccaagcccttccctggtgcaggtgtacaccagccccgcggctgtggccgtgtgggaatggcaggacgggctgggcacctggcacccctacagtgccaccgtctgcagcttcatcgagcagcagtttgtccagcagaagggccaacgttttgggcttgggagcctggcccacagcatccccttgggccaggcagacccctcgctggccccttacattattgacctccccagctggacccagttccgccaggacaccggcaccatgcgggctgtgcggagacacctgttcccccagcactcagcccctggccgaggtgtcgtctgggagtggctgagcgacgatggctcctggactgcctatgaagccagcgtctgtgactatctggagcagcaggtggccaggggcaaccagctcgtggacttggcccccctggggtacaactacactgtcaactacaccacccacacgcagaccaacaagacttccagcttctgccgcagcgtgcggcgccaagcagggccgccttacccggtgaccaccatcatcgctccgccgggccacacaggcgtcgcctgctcttgccaccagtgcctcagtggcagcagaactggccccgtgtcaggccgctaccgccactccatgaccaacctccctgcataccccgtcccccagcaccccccacacaggaccgcttctgtgtttgggacccaccaggcctttgcaccgtacaacaaaccctcactctccggggcccggtctgcgcccaggctgaacaccaccaacgcctggggcgcagctcctccttccctggggagccagcccctctaccgctccagcctctcccacctgggaccgcagcacctgcccccaggatcctccacctccggtgcagtcagtgcctccctccccagcggtccctcaagcagcccagggagcgtccctgccactgtgcccatgcagatgccaaagcccagcagagtccagcaggcgctcgcaggagcgaccccgaagccagagccagagccagagcaggtcataaaaaactacacggaagagctgaaagtgcccccagatgaggactgcatcatctgcatggagaagctgtccacagcgtctggatacagcgatgtgactgacagcaaggcaatcgggtccctagctgtgggccacctcaccaagtgcagccatgccttccacctgctgtgcctcctggccatgtactgcaacggcaataaggatggaagtctgcagtgtccctcctgcaaaaccatctatggagagaagacggggacccagccccagggaaagatggaggtattacggttccagatgtcgctccccggccacgaggactgcgggaccatcctcatagtttacagcattccccatggtatccagggccctgagcaccccaatcccggaaagccgttcactgccagagggtttccccgccagtgctaccttccagacaacgcccagggccgcaaggtcctagagctcctgaaggtggcctggaagaggcggctcatcttcacagtgggcacgtccagcaccacgggtgagacggacaccgtggtatggaacgagatccaccacaagacagagatggaccgcaacattacgggccacggctatcccgaccccaactacctgcagaacgtgctggctgagctggctgcccagggggtgaccgaggactgcctggagcagcagtgacctcgcaccccagcacgcccgcctctggtggccaccccgctgccccatggctggctgggtggccaggcaggaagtgcccagcccgagaggctgggaggtttgttgagggtgtggggtgtgccccacctgaagccggggctccccctgcctgcctctctctcctcctcccctctgggaattgggcagccctgggcagttgtactcatgggggcttaggatgcagctacctcagtgcgcagggcccgtctgtcctctgggggctgcttcgggcccgcggtgctcggggcctggtgtggggcgagtagagacttccccagcctggacgggcgtgggttctgggtcagcttcttttacctcaattttgtttgcaataaatgctctatagcc

SEQ ID NO: 41049 - DNA, 1728 bp, Artificial Sequence
  derived and/or modified sequence
atggccatggcccccagccccagcctggtgcaggtgtacaccagccccgccgccgtggccgtgtgggagtggcaggacggcctgggcacctggcacccctacagcgccaccgtgtgcagcttcatcgagcagcagttcgtgcagcagaagggccagagattcggcctgggcagcctggcccacagcatccccctgggccaggccgaccccagcctggccccctacatcatcgacctgcccagctggacccagttcagacaggacaccggcaccatgagagccgtgagaagacacctgttcccccagcacagcgcccccggcagaggcgtggtgtgggagtggctgagcgacgacggcagctggaccgcctacgaggccagcgtgtgcgactacctggagcagcaggtggccagaggcaaccagctggtggacctggcccccctgggctacaactacaccgtgaactacaccacccacacccagaccaacaagaccagcagcttctgcagaagcgtgagaagacaggccggccccccctaccccgtgaccaccatcatcgccccccccggccacaccggcgtggcctgcagctgccaccagtgcctgagcggcagcagaaccggccccgtgagcggcagatacagacacagcatgaccaacctgcccgcctaccccgtgccccagcaccccccccacagaaccgccagcgtgttcggcacccaccaggccttcgccccctacaacaagcccagcctgagcggcgccagaagcgcccccagactgaacaccaccaacgcctggggcgccgccccccccagcctgggcagccagcccctgtacagaagcagcctgagccacctgggcccccagcacctgccccccggcagcagcaccagcggcgccgtgagcgccagcctgcccagcggccccagcagcagccccggcagcgtgcccgccaccgtgcccatgcagatgcccaagcccagcagagtgcagcaggccctggccggcgccacccccaagcccgagcccgagcccgagcaggtgatcaagaactacaccgaggagctgaaggtgccccccgacgaggactgcatcatctgcatggagaagctgagcaccgccagcggctacagcgacgtgaccgacagcaaggccatcggcagcctggccgtgggccacctgaccaagtgcagccacgccttccacctgctgtgcctgctggccatgtactgcaacggcaacaaggacggcagcctgcagtgccccagctgcaagaccatctacggcgagaagaccggcacccagccccagggcaagatggaggtgctgagattccagatgagcctgcccggccacgaggactgcggcaccatcctgatcgtgtacagcatcccccacggcatccagggccccgagcaccccaaccccggcaagcccttcaccgccagaggcttccccagacagtgctacctgcccgacaacgcccagggcagaaaggtgctggagctgctgaaggtggcctggaagagaagactgatcttcaccgtgggcaccagcagcaccaccggcgagaccgacaccgtggtgtggaacgagatccaccacaagaccgagatggacagaaacatcaccggccacggctaccccgaccccaactacctgcagaacgtgctggccgagctggccgcccagggcgtgaccgaggactgcctggagcagcagtag

SEQ ID NO: 41050 - protein, 589 aa, Artificial Sequence
  derived and/or modified sequence
MEGPLTPPPLQGGGAAAVPEPGARQHPGHETAAQRYSARLLQAGYEPESCFLLELSSVVLLAGVGVQMDRLRRASMADYLISGGTGYVPEDGLTAQQLFASADGLTYNDFLILPGFIDFIADEVDLTSALTRKITLKTPLISSPMDTVTEADMAIAMALMGGIGFIHHNCTPEFQANEVRKVKKFEQGFITDPVVLSPSHTVGDVLEAKMRHGFSGIPITETGTMGSKLVGIVTSRDIDFLAEKDHTTLLSEVMTPRIELVVAPAGVTLKEANEILQRSKKGKLPIVNDCDELVAIIARTDLKKNRDYPLASKDSQKQLLCGAAVGTREDDKYRLDLLTQAGVDVIVLDSSQGNSVYQIAMVHYIKQKYPHLQVIGGNVVTAAQAKNLIDAGVDGLRVGMGCGSICITQEVMACGRPQGTAVYKVAEYARRFGVPIIADGGIQTVGHVVKALALGASTVMMGSLLAATTEAPGEYFFSDGVRLKKYRGMGSLDAMEKSSSSQKRYFSEGDKVKIAQGVSGSIQDKGSIQKFVPYLIAGIQHGCQDIGARSLSVLRSMMYSGELKFEKRTMSAQIEGGVHGLHSYEKRLY

SEQ ID NO: 41051 - DNA, 1770 bp, Artificial Sequence
  derived and/or modified sequence
atggaaggacctttgacaccccctcccctccagggcggcggggcggccgcggtccccgagcccggggccagacagcaccctggtcacgagacagccgcacaacggtatagtgctcgcctgcttcaggcagggtatgagccagagtcctgttttctgctggagcttagcagcgttgtgcttctggccggcgtcggggtgcagatggatcgtctgagaagagcatctatggcagattacctaatttccgggggtaccggctacgtgccagaagatgggctgacggcccaacaactgtttgcctctgctgacggattgacttacaatgattttctgatccttccagggttcatcgattttatcgctgatgaggtggatctcacctcagcactgactagaaaaatcactctgaaaactccactgattagtagtcctatggatactgtgactgaggccgacatggccattgccatggcccttatgggcggcatcggcttcattcaccacaattgcaccccggaatttcaggcaaatgaggtcaggaaagtgaaaaagttcgagcagggatttattaccgatcctgtcgttctttccccaagccacacagttggggatgtactcgaagctaaaatgcgtcatggcttctctgggatcccaatcacagaaaccgggacaatggggtcaaagctagtagggattgtcacctccagggacattgactttctggcagagaaagaccacacaaccttgctgtccgaggtgatgactccacgtatcgagctcgtggtcgctcccgctggagtcacattgaaagaagccaacgagattctccagagatctaaaaaggggaagctccctattgtgaatgattgtgatgaactggtggccattattgcaagaactgatctgaagaagaatcgcgactaccctctggcgtccaaggatagccagaagcagttgctgtgtggcgctgccgtaggcacccgggaagacgacaagtataggctggatctgctgacacaggcgggcgtggatgtcatcgtattggatagtagtcagggaaattcagtttatcaaatcgccatggtccattatatcaaacagaagtaccctcacctgcaggtgatcggtggcaatgtcgttacagctgcccaggccaaaaacttaattgatgcgggagttgatggtctgcgggtggggatgggctgtggcagtatttgcattacacaggaggtgatggcctgtgggaggcctcaaggcaccgctgtgtacaaggtagccgagtacgccagacggtttggggtccctataatcgcagacggaggaatccaaacagtgggtcatgtggtgaaagccttggctctgggtgcatctaccgtgatgatgggctctttgttggctgctaccacagaggcccccggagagtatttcttttcagatggggttagactgaaaaaataccgtggcatgggcagcctggacgcaatggagaaatcctcgagttcccagaagcgatactttagcgagggtgataaagtgaaaatagcgcagggcgtgagcgggagcatccaggacaaggggagcatacagaagttcgtgccctatttgatcgccggtattcagcatggctgccaggacataggcgctaggagcctgagcgtgcttagatcaatgatgtacagtggggaattaaaatttgaaaagagaacaatgtcagctcagatcgaagggggagtgcacggtttacactcttacgaaaaaagactgtactag

SEQ ID NO: 41052 - DNA, 2580 bp, Artificial Sequence
  derived and/or modified sequence
actcgaccgggctgcgctcactgcccagccggggccccgggagcctccaggctcccgcccgccctgagctgcggcctccgcatggaggggccactcactccaccaccgctgcagggaggcggagccgccgctgttccggagcccggagcccggcaacacccgggacacgagacggcggcgcagcggtacagcgcccgactgctgcaggccggctacgagcccgagagctgtttcctcctagaactatcttcagtggtcttactggcaggtgttggtgtccagatggatcgccttcgcagggctagcatggcggactacctgatcagcggcggcaccggctacgtgcccgaggatgggctcaccgcgcagcagctcttcgccagcgccgacggcctcacctacaacgacttcctgattctcccaggattcatagacttcatagctgatgaggtggacctgacctcagccctgacccggaagatcacgctgaagacgccactgatctcctcccccatggacactgtgacagaggctgacatggccattgccatggctctgatgggaggtattggtttcattcaccacaactgcaccccagagttccaggccaacgaggtgcggaaggtcaagaagtttgaacagggcttcatcacggaccctgtggtgctgagcccctcgcacactgtgggcgatgtgctggaggccaagatgcggcatggcttctctggcatccccatcactgagacgggcaccatgggcagcaagctggtgggcatcgtcacctcccgagacatcgactttcttgctgagaaggaccacaccaccctcctcagtgaggtgatgacgccaaggattgaactggtggtggctccagcaggtgtgacgttgaaagaggcaaatgagatcctgcagcgtagcaagaaagggaagctgcctatcgtcaatgattgcgatgagctggtggccatcatcgcccgcaccgacctgaagaagaaccgagactaccctctggcctccaaggattcccagaagcagctgctctgtggggcagctgtgggcacccgtgaggatgacaaataccgtctggacctgctcacccaggcgggcgtcgacgtcatagtcttggactcgtcccaagggaattcggtgtatcagatcgccatggtgcattacatcaaacagaagtacccccacctccaggtgattggggggaacgtggtgacagcagcccaggccaagaacctgattgatgctggtgtggacgggctgcgcgtgggcatgggctgcggctccatctgcatcacccaggaagtgatggcctgtggtcggccccagggcactgctgtgtacaaggtggctgagtatgcccggcgctttggtgtgcccatcatagccgatggcggcatccagaccgtgggacacgtggtcaaggccctggcccttggagcctccacagtgatgatgggctccctgctggccgccactacggaggcccctggcgagtacttcttctcagacggggtgcggctcaagaagtaccggggcatgggctcactggatgccatggagaagagcagcagcagccagaaacgatacttcagcgagggggataaagtgaagatcgcgcagggtgtctcgggctccatccaggacaaaggatccattcagaagttcgtgccctacctcatagcaggcatccaacacggctgccaggatatcggggcccgcagcctgtctgtccttcggtccatgatgtactcaggagagctcaagtttgagaagcggaccatgtcggcccagattgagggtggtgtccatggcctgcactcttacgaaaagcggctgtactgaggacagcggtggaggccgaggtggtggaggggatgcaccccagtgtccacttttgggcacagcctccctccataactgagtggtccacagatttgcactacgggttctccagctcctttccaggcagagaggaggggaggtcctgaggggactgctgcccctcactcggcatcccctgcagagtcaggactgctcccggggccaggctgccctgggagcccccctccgagcccagccagccaggctctcaggccctgcgcctgcctcaggtctttcttgctgcagcctgctccagcctggcccccaccccaggggcaggcggcccctcctggcttctcctgtagggcacctccctgcccctagcctcccaggaaatggtgctctcctggccctgcctctggcccttcccgggccgctgcccctcagccatgtggcacttctgagctcctgacctaggccaaggggaggtctctgcccccttccccggccctgggctacccttgggtcctgctcctcaggccgctcccctgtccctggccatgggtaggagactgccctggtcatggccgcctgcctgtcattcctgactcaccaccgtccccaggtgaaccattcctcccttctcctcagctgcagtcgaaggctttaactttgcacacttgggatcacagttgcgtcattgtgtattaaatacttggaataaatcaagcaggtctcaacgcctccact

SEQ ID NO: 41053 - DNA, 1770 bp, Artificial Sequence
  derived and/or modified sequence
atggagggccccctgaccccaccacccctgcagggcggcggcgctgctgctgtgcctgagcccggggcccggcagcaccctggccatgaaacagctgcccagcgctacagcgcccggctgctgcaggccggctatgagcctgagagctgcttcctgctggagctgagctctgtggtgctgctggccggcgtgggcgtgcagatggaccggctgcggcgggcctccatggctgactacctgatcagcggcggcaccggctacgtgcctgaagatggcctgacagcccagcagctgtttgccagcgcagatggcctgacctacaatgacttcctgatcctgcccggcttcatcgacttcatcgcagatgaggtggacctgaccagcgccctgaccaggaagatcaccctgaagacccccctcatcagcagccccatggacacagtgacagaagctgacatggccatcgccatggccctgatgggcggcatcggcttcatccaccacaactgcaccccagagttccaggccaatgaggtgaggaaggtgaagaagtttgagcagggcttcatcacagatcctgtggtgctgagccccagccacacagtgggagatgtgctggaggccaagatgagacatggcttcagcggcatccccatcacagagaccggcaccatgggcagcaagctggtgggcatcgtgaccagccgggacatcgacttcctggccgagaaggaccacaccaccctgctgtctgaggtgatgaccccccgcatcgagctggtggtggccccagctggggtgaccctgaaggaggccaatgagatcctgcagaggagcaagaagggcaagctgcccatcgtgaatgactgtgatgagctggtggccatcatcgccaggacagacctgaagaagaacagagactaccccctggccagcaaggacagccagaagcagctgctgtgtggggctgctgtgggcaccagagaagatgacaagtaccgcctggacctgctgacccaggccggcgtggatgtgattgtgctggacagcagccagggcaacagcgtgtaccagatcgccatggtgcactacatcaagcagaagtacccccacctgcaggtgattggaggaaatgtggtgacagctgcccaggccaagaacctgattgatgctggggtggatggcctgcgggtgggcatgggctgcggcagcatctgcatcacccaggaggtgatggcctgtggccggccccagggcacagctgtgtacaaggtggccgagtatgcccggcgcttcggcgtgcccatcatcgcagatggcggcatccagacagtgggccacgtggtgaaggccctggccctgggcgccagcacagtgatgatgggcagcctgctggccgccaccacagaggcccctggagagtacttcttcagtgatggagtgcggctgaagaagtaccggggcatgggcagcctggatgccatggagaagagcagcagcagccagaagcgctacttcagcgagggggacaaggtgaagatcgcccagggcgtgtctggcagcatccaggacaagggcagcatccagaagtttgtgccctacctgattgctggcatccagcacggctgccaggacatcggggcccggagcctgtctgtgctgcgctccatgatgtacagcggggagctgaagtttgagaagaggaccatgtctgcccagatcgagggcggcgtgcacggcctgcacagctatgagaagaggctgtactag

SEQ ID NO: 41054 - DNA, 1770 bp, Artificial Sequence
  derived and/or modified sequence
atggagggccccctgacccccccccccctgcagggcggcggcgccgcggccgtgcctgagccaggcgcccgtcagcatcctggacatgagacagcggctcagaggtatagtgcccgtctgctgcaggcggggtacgagcctgagtcttgctttttgctagaactatcctcagttgtcttacttgcaggagtaggagttcagatggacaggctgcgacgggcatcaatggccgattatctaatttcgggagggacaggatacgtacccgaggacggcttaacagcacagcagctgtttgcgagtgctgacggattgacatataacgacttcctcatcctgcctggtttcatcgactttattgctgatgaggtggacttgacctcagcattaacacgcaagatcaccctcaagaccccccttatttcctcacccatggacactgtcactgaggccgacatggctattgcaatggctctcatgggcggaatcgggttcatccatcacaactgcacgcccgagttccaggctaatgaggttagaaaggtgaagaagtttgagcagggcttcattacggaccccgttgtcctctctccatcccacaccgtcggagatgttttggaagctaaaatgcgccatgggttttccggcattcccattacagagacaggtactatgggctctaaactggtggggatcgtcacaagtcgggatattgatttcctcgccgagaaggatcacacaactctgctatctgaggtgatgacacccaggattgagctggttgtggcacctgcaggggtcaccctgaaggaggctaatgagattctccaaagatcaaaaaagggaaagcttcccatcgtgaacgattgcgacgaactcgtagcaataatcgcacggacagatcttaaaaaaaaccgcgactatccgctggcctccaaagactctcagaagcagctgttgtgcggcgcggcagttggcacccgcgaagatgacaagtaccggcttgatctcctgacccaagctggggtggacgtgattgtgttagattcctctcagggaaatagcgtttaccagatcgccatggtacactatataaaacaaaaatatccacacctccaggtgattggaggcaatgtggtcaccgccgcccaggctaaaaacctgatcgacgctggagtcgatggcttgcgagtagggatggggtgtgggtctatatgcatcactcaggaggtaatggcctgcgggaggccacaaggaaccgccgtatacaaggttgctgaatacgcaaggcgcttcggggtgcctattatcgcggatggtggcattcagacggtgggacacgtggtgaaagctctcgcgctgggggccagcactgtgatgatgggatccctgctggcagcgaccaccgaagcacccggcgagtatttcttctctgatggagtcagattgaagaagtaccgtggcatgggatccctggatgccatggaaaagagttcgagttctcagaaacggtactttagcgagggtgataaggtgaaaatcgctcagggggtgtctggatccatccaggataagggttccattcagaagttcgttccttatctgattgctggtatccagcatggatgtcaggacattggcgccaggtccctaagcgtgctgcgtagtatgatgtactcaggtgagctaaagttcgagaagaggaccatgtctgcccagattgaggggggtgttcatgggctgcactcatacgagaaacgactctactag

SEQ ID NO: 41055 - DNA, 1770 bp, Artificial Sequence
  derived and/or modified sequence
atggagggcccactgaccccacccccactgcaagggggaggagccgcagcggtgcccgagccaggtgcgagacaacacccaggccacgagaccgcagcccagaggtactccgcacgcctgcttcaagctggttatgagccagagtcttgttttctcctggagttgtcttctgtcgtactcctggcaggcgtaggcgttcaaatggatcgcctcaggcgtgcgtctatggctgattatttgatctccggcggaacaggctatgtgcccgaggacggactgacagcacagcagctctttgcaagcgccgatggcctgacatacaacgacttcctgattctgccagggttcattgactttattgcagacgaagtggatctgacatccgctctgacacggaagataacacttaagactccgctgatttcatctcccatggatactgtcaccgaggcggatatggcaatcgccatggccctgatggggggtatcggcttcatccaccataattgcactcctgaatttcaggcgaatgaggttcgcaaggtcaagaaatttgagcaaggttttattacagatcccgtggtcctgtcaccaagccacacagtaggtgacgtcctggaagctaaaatgcgtcacggcttttctggcatcccgatcaccgagaccggaactatgggaagtaagctcgtgggcatcgtcacctcgcgtgacatcgattttcttgctgagaaggatcatacaacactgttatccgaggttatgactcctcgtattgagctcgtagtggcgcctgccggagtaaccctcaaagaggctaacgaaatcctgcagagaagtaaaaaagggaaactcccaatagtaaatgattgtgatgaattagtcgcaataattgcccgaaccgacctgaagaagaatcgggattatcccctcgcctcaaaagattcccagaagcagttgctgtgtggggctgccgtcgggacgagggaggatgacaaatacagactggacctgctgacacaggctggagttgacgtgatcgtcctcgatagtagtcagggcaatagcgtctatcagatcgcaatggtgcactacatcaagcagaagtacccacacctgcaagttatcggaggcaacgtggtgaccgccgcacaggcaaaaaacctgattgacgcaggtgtcgacggacttcgcgtggggatgggctgtgggagcatttgtataacgcaggaggtgatggcctgcgggagaccacaaggcacagcagtgtacaaggttgcagagtatgccaggcgctttggcgtgcctatcatcgcagatggaggtattcagaccgtcgggcatgttgtaaaggccctcgccctgggcgcttctactgttatgatggggagtctactggctgccacaacagaggcccctggtgagtacttctttagcgacggtgtcagactgaaaaagtatcgcggaatgggtagtctggatgcaatggaaaagagtagcagctctcagaagcggtacttttctgaaggggataaagtaaagatcgctcagggagtctctgggagtatccaggataagggatccatccagaagttcgtaccatacttaattgctggcattcaacatgggtgccaggacattggagccaggagcctgtctgtgcttagatctatgatgtatagtggggagttgaagttcgaaaagcgcaccatgagtgcgcagatagagggcggagtgcacggtctgcactcttacgaaaagaggctctactag

SEQ ID NO: 41056 - DNA, 1770 bp, Artificial Sequence
  derived and/or modified sequence
atggagggccccctgacccccccccccctgcagggcggcggcgccgccgccgtgcccgagcccggcgccagacagcaccccggccacgagaccgccgcccagagatacagcgccagactgctgcaggccggctacgagcccgagagctgcttcctgctggagctgagcagcgtggtgctgctggccggcgtgggcgtgcagatggacagactgagaagagccagcatggccgactacctgatcagcggcggcaccggctacgtgcccgaggacggcctgaccgcccagcagctgttcgccagcgccgacggcctgacctacaacgacttcctgatcctgcccggcttcatcgacttcatcgccgacgaggtggacctgaccagcgccctgaccagaaagatcaccctgaagacccccctgatcagcagccccatggacaccgtgaccgaggccgacatggccatcgccatggccctgatgggcggcatcggcttcatccaccacaactgcacccccgagttccaggccaacgaggtgagaaaggtgaagaagttcgagcagggcttcatcaccgaccccgtggtgctgagccccagccacaccgtgggcgacgtgctggaggccaagatgagacacggcttcagcggcatccccatcaccgagaccggcaccatgggcagcaagctggtgggcatcgtgaccagcagagacatcgacttcctggccgagaaggaccacaccaccctgctgagcgaggtgatgacccccagaatcgagctggtggtggcccccgccggcgtgaccctgaaggaggccaacgagatcctgcagagaagcaagaagggcaagctgcccatcgtgaacgactgcgacgagctggtggccatcatcgccagaaccgacctgaagaagaacagagactaccccctggccagcaaggacagccagaagcagctgctgtgcggcgccgccgtgggcaccagagaggacgacaagtacagactggacctgctgacccaggccggcgtggacgtgatcgtgctggacagcagccagggcaacagcgtgtaccagatcgccatggtgcactacatcaagcagaagtacccccacctgcaggtgatcggcggcaacgtggtgaccgccgcccaggccaagaacctgatcgacgccggcgtggacggcctgagagtgggcatgggctgcggcagcatctgcatcacccaggaggtgatggcctgcggcagaccccagggcaccgccgtgtacaaggtggccgagtacgccagaagattcggcgtgcccatcatcgccgacggcggcatccagaccgtgggccacgtggtgaaggccctggccctgggcgccagcaccgtgatgatgggcagcctgctggccgccaccaccgaggcccccggcgagtacttcttcagcgacggcgtgagactgaagaagtacagaggcatgggcagcctggacgccatggagaagagcagcagcagccagaagagatacttcagcgagggcgacaaggtgaagatcgcccagggcgtgagcggcagcatccaggacaagggcagcatccagaagttcgtgccctacctgatcgccggcatccagcacggctgccaggacatcggcgccagaagcctgagcgtgctgagaagcatgatgtacagcggcgagctgaagttcgagaagagaaccatgagcgcccagatcgagggcggcgtgcacggcctgcacagctacgagaagagactgtactag

SEQ ID NO: 41057 - protein, 1024 aa, Artificial Sequence
  derived and/or modified sequence
MARHGPPWSRLDAQQERDVRELVRGVAGLQDEADPNFQLALNFAWSNFRFHRFLDVNSHKIEKTIEGIYEKFVIHSDLSKAASWKRLTEEFLNAPLPSIKEIKTDAHYSILSLLLCLSDSPSNSSYVETPRNKEVEKKDDFDWGKYLMEDEEMDIGPYMDTPNWSEESEEENDQQPLSREDSGIQVDRTPLEEQDQNRKLDPCISWKDEPDDRSWLEHHVVHQYWTARPSQFPHSLHLHSNLAAVWDQHLYSSDPLYVPDDRVLVTETQVIRETLWLLSGVKKLFIFQLIDGKVTVRNNIIVTHLTHSCLRSVLEQIAAYGQVVFRLQEFIDEVMGHSSESMLPGSGSVPKKSTEAPFRTYQAFMWALYKYFISFKEELAEIEKCIINNDTTITLAIVVDKLAPRLSQLKVLHKVFSTGVAEVPPDTRNVVRASHLLNTLYKAILEYDNVGEASEQTVSLLFSLWVETVRPYLQTVDEWIVHGHLWDGAREFIIQRNKNVPVNHRDFWYATYTLYSVSEKTENEEKMSDNASASSGSDQGPSSRQHTMVSFLKPVLKQIIMAGKSMQLLKNLQCAESTTCQAGARDAERKSLYTLFLESVQSRLRHGEDSTPQVLTEQQATKENLMKMQSIAESHLELDDVHDPLLAINFARMYLEQSDFHEKFAGGDVCVDRSSESVTCQTFELTLRSCLYPHIDKQYLDCCGNLMQTLKKDYRLVEYLQAMRNFFLMEGGDTMYDFYTSIFDKIREKETWQNVSFLNVQLQEAVGQRYPEDSSRLSISFENVDTAKKKLPVHILDGLTLSYKVPWPVDIVISLECQKIYNQVFLLLLQIKWAKYSLDVLLFGELVSTAEKPRLKEGLIHEQDTVAQFGPQKEPVRQQIHRMFLLRVKLMHFVNSLHNYIMTRILHSTGLEFQHQVEEAKDLDQLIKIHYRYLSTIHDRCLLREKVSFVKEAIMKVLNLALMFADGWQAGLGTWRMESIEKMESDFKNCHMFLVTILNKAVCRGSFPHCEYIMLKYFYLCISL

SEQ ID NO: 41058 - DNA, 3075 bp, Artificial Sequence
  derived and/or modified sequence
atggccagacacggccccccctggagcagactggacgcccagcaggagagagacgtgagagagctggtgagaggcgtggccggcctgcaggacgaggccgaccccaacttccagctggccctgaacttcgcctggagcaacttcagattccacagattcctggacgtgaacagccacaagatcgagaagaccatcgagggcatctacgagaagttcgtgatccacagcgacctgagcaaggccgccagctggaagagactgaccgaggagttcctgaacgcccccctgcccagcatcaaggagatcaagaccgacgcccactacagcatcctgagcctgctgctgtgcctgagcgacagccccagcaacagcagctacgtggagacccccagaaacaaggaggtggagaagaaggacgacttcgactggggcaagtacctgatggaggacgaggagatggacatcggcccctacatggacacccccaactggagcgaggagagcgaggaggagaacgaccagcagcccctgagcagagaggacagcggcatccaggtggacagaacccccctggaggagcaggaccagaacagaaagctggacccctgcatcagctggaaggacgagcccgacgacagaagctggctggagcaccacgtggtgcaccagtactggaccgccagacccagccagttcccccacagcctgcacctgcacagcaacctggccgccgtgtgggaccagcacctgtacagcagcgaccccctgtacgtgcccgacgacagagtgctggtgaccgagacccaggtgatcagagagaccctgtggctgctgagcggcgtgaagaagctgttcatcttccagctgatcgacggcaaggtgaccgtgagaaacaacatcatcgtgacccacctgacccacagctgcctgagaagcgtgctggagcagatcgccgcctacggccaggtggtgttcagactgcaggagttcatcgacgaggtgatgggccacagcagcgagagcatgctgcccggcagcggcagcgtgcccaagaagagcaccgaggcccccttcagaacctaccaggccttcatgtgggccctgtacaagtacttcatcagcttcaaggaggagctggccgagatcgagaagtgcatcatcaacaacgacaccaccatcaccctggccatcgtggtggacaagctggcccccagactgagccagctgaaggtgctgcacaaggtgttcagcaccggcgtggccgaggtgccccccgacaccagaaacgtggtgagagccagccacctgctgaacaccctgtacaaggccatcctggagtacgacaacgtgggcgaggccagcgagcagaccgtgagcctgctgttcagcctgtgggtggagaccgtgagaccctacctgcagaccgtggacgagtggatcgtgcacggccacctgtgggacggcgccagagagttcatcatccagagaaacaagaacgtgcccgtgaaccacagagacttctggtacgccacctacaccctgtacagcgtgagcgagaagaccgagaacgaggagaagatgagcgacaacgccagcgccagcagcggcagcgaccagggccccagcagcagacagcacaccatggtgagcttcctgaagcccgtgctgaagcagatcatcatggccggcaagagcatgcagctgctgaagaacctgcagtgcgccgagagcaccacctgccaggccggcgccagagacgccgagagaaagagcctgtacaccctgttcctggagagcgtgcagagcagactgagacacggcgaggacagcaccccccaggtgctgaccgagcagcaggccaccaaggagaacctgatgaagatgcagagcatcgccgagagccacctggagctggacgacgtgcacgaccccctgctggccatcaacttcgccagaatgtacctggagcagagcgacttccacgagaagttcgccggcggcgacgtgtgcgtggacagaagcagcgagagcgtgacctgccagaccttcgagctgaccctgagaagctgcctgtacccccacatcgacaagcagtacctggactgctgcggcaacctgatgcagaccctgaagaaggactacagactggtggagtacctgcaggccatgagaaacttcttcctgatggagggcggcgacaccatgtacgacttctacaccagcatcttcgacaagatcagagagaaggagacctggcagaacgtgagcttcctgaacgtgcagctgcaggaggccgtgggccagagataccccgaggacagcagcagactgagcatcagcttcgagaacgtggacaccgccaagaagaagctgcccgtgcacatcctggacggcctgaccctgagctacaaggtgccctggcccgtggacatcgtgatcagcctggagtgccagaagatctacaaccaggtgttcctgctgctgctgcagatcaagtgggccaagtacagcctggacgtgctgctgttcggcgagctggtgagcaccgccgagaagcccagactgaaggagggcctgatccacgagcaggacaccgtggcccagttcggcccccagaaggagcccgtgagacagcagatccacagaatgttcctgctgagagtgaagctgatgcacttcgtgaacagcctgcacaactacatcatgaccagaatcctgcacagcaccggcctggagttccagcaccaggtggaggaggccaaggacctggaccagctgatcaagatccactacagatacctgagcaccatccacgacagatgcctgctgagagagaaggtgagcttcgtgaaggaggccatcatgaaggtgctgaacctggccctgatgttcgccgacggctggcaggccggcctgggcacctggagaatggagagcatcgagaagatggagagcgacttcaagaactgccacatgttcctggtgaccatcctgaacaaggccgtgtgcagaggcagcttcccccactgcgagtacatcatgctgaagtacttctacctgtgcatcagcctgtag

SEQ ID NO: 41059 - DNA, 3075 bp, Artificial Sequence
  derived and/or modified sequence
atggcacggcacgggcctccctggtcacgattagatgcccaacaggaacgagacgtgagagagctggtaaggggcgtagcaggcttacaggacgaggccgacccaaatttccaactagccctaaattttgcgtggagtaattttcggttccacaggtttctcgatgtgaactcacacaaaattgaaaagacaattgaaggcatctatgaaaagttcgtcattcactccgacttatcgaaagctgcttcttggaaacgcttgacagaggaattcctgaacgcccctctcccttcaatcaaagagatcaagaccgatgctcactattctatcttgtcactgctcctgtgcctgagcgacagcccaagtaactcttcatatgtggagaccccaaggaacaaagaagtagagaaaaaagacgactttgactgggggaagtacctcatggaagacgaagaaatggacatagggccctatatggatacccccaactggtccgaagaatctgaggaagagaacgaccagcaacccttgtcacgcgaagactccggcattcaggtggatcggaccccactcgaggagcaggaccagaatcggaaactggacccttgtatctcctggaaggacgaacccgatgaccggtcatggctcgaacaccacgtggtacatcaatattggaccgcccgaccgtcccagttcccccactcccttcacctacattcaaacctggccgcagtctgggatcagcacctttatagcagcgaccccctttacgtacctgatgatcgagtgctagtgactgagacccaagtgattcgggagacgctctggttactcagtggggttaagaagctgtttatctttcagctgattgacggtaaagttacagtgcggaacaatattattgtcacgcacctgactcactcatgtctcagaagtgtgcttgagcagatcgccgcttatgggcaagtggtgttccgcctccaagagtttatcgacgaagtcatggggcacagctccgagtctatgcttcccgggtctggcagcgttcccaagaaaagtactgaagccccgttcagaacttaccaagcattcatgtgggcgctgtataaatactttattagtttcaaggaggagctggctgagatcgaaaagtgtattatcaataatgacacgacgatcaccctcgccattgtggtggacaagctagcaccacgcctctctcaacttaaagtgctccataaggtgttcagcaccggcgtggcggaggtgccgcccgatacccgtaatgtcgtgagagcatctcacctgttgaatacactgtataaggccattcttgagtacgataatgtgggggaggcgtctgaacagactgtgtcactcctttttagtctgtgggtggagaccgtcaggccctacctgcagaccgtggacgagtggatcgtccacggtcatctatgggatggcgcgcgggaatttatcattcagagaaataaaaacgtccccgttaaccaccgcgatttctggtacgccacttatacactctatagcgtatcagaaaaaaccgagaacgaagagaaaatgtctgacaacgcctcagcttcttctgggagtgatcagggaccctcctctcggcagcatacaatggtgtcattcctgaagcctgtgctgaagcagattattatggccggaaagagcatgcaactgctgaagaatctgcagtgtgccgaatcgactacttgtcaggctggagcacgagacgcggagcgaaaatccctgtataccctgtttctcgagtctgtgcagagtcggctgcgccacggtgaggactccacgccccaggtgttgaccgaacagcaggcgacaaaagagaatttgatgaaaatgcagagcatcgccgagtcacacctggaactggacgacgttcatgaccctctgctggctatcaatttcgcccgtatgtatcttgagcaatccgattttcacgaaaagttcgctgggggcgatgtctgtgtagatcgctctagcgaaagtgtgacatgtcagacattcgagctcaccctcagatcatgcctctatcctcacattgataagcagtatctagattgctgtgggaatttgatgcagacactgaaaaaagattaccgcctcgtcgagtacctgcaggccatgcgaaacttttttctaatggaggggggagacacgatgtatgacttctataccagtatctttgataaaatccgcgagaaagagacctggcagaatgttagttttctcaatgtccagctccaggaggctgtgggccagaggtacccagaagactcttctcggttgtccattagctttgagaacgtagatactgcaaagaagaagttgccagttcacattctggacggcttaaccctcagctataaagttccatggcctgtcgatattgtcattagcctcgaatgccaaaaaatctacaatcaggtgttcctgctcttgctgcagattaaatgggccaaatactcgcttgacgtcctgttgttcggtgagctcgtatctaccgctgagaagccacggttgaaggaaggtttaatccatgagcaggacactgtggcccagttcggtccccagaaggagccggtcagacagcagattcatagaatgttcctactccgcgtgaagctcatgcacttcgttaactcgcttcataactacataatgacaagaatccttcattcgacagggctcgaatttcagcatcaagttgaggaggccaaggaccttgaccagctgatcaagattcactatagatacctgagtacaatccacgaccgctgtctgcttcgtgagaaggtcagcttcgttaaggaagctattatgaaagtactgaacttggctctgatgttcgctgatggctggcaagcgggtctcggaacctggcgcatggaatcaatagagaagatggagagcgattttaagaactgtcatatgtttctcgttacaatactcaataaagctgtgtgtcgcggctcatttccccattgcgagtatatcatgctgaaatacttctacctttgtatctcattgtag

SEQ ID NO: 41060 - DNA, 3075 bp, Artificial Sequence
  derived and/or modified sequence
atggcccggcacggccccccctggagccggctggatgcccagcaggagagagatgtgcgggagctggtgcggggcgtggccggcctgcaggatgaagctgaccccaacttccagctggccctgaactttgcctggagcaacttccgcttccaccgcttcctggatgtgaacagccacaagattgagaagaccatcgagggcatctatgagaagtttgtgatccacagcgacctgagcaaggccgcctcctggaagaggctgacagaggagttcctgaatgcccccctgcccagcatcaaggagatcaagacagatgcccactacagcatcctgagcctgctgctgtgcctgagtgacagccccagcaacagcagctatgtggagaccccaagaaacaaggaggtggagaagaaggatgactttgactggggcaagtacctgatggaggatgaggagatggacatcggcccctacatggacacccccaactggagcgaggagagcgaggaggagaatgaccagcagcccctgagccgggaggacagcggcatccaggtggacaggacccccctggaggagcaggaccagaacaggaagctggacccctgcatctcctggaaggatgagccagatgaccgctcctggctggagcaccacgtggtgcaccagtactggacagcccggcccagccagttcccccacagcctgcacctgcacagcaacctggccgctgtgtgggaccagcacctgtacagcagtgaccccctgtatgtgcctgatgacagagtgctggtgacagagacccaggtgatccgggagaccctgtggctgctgtctggagtgaagaagctgttcatcttccagctgattgatggcaaggtgacagtgaggaacaacatcatcgtgacccacctgacccacagctgcctgcggtctgtgctggagcagattgctgcctacggccaggtggtgttccggctgcaggagttcattgatgaggtgatgggccacagcagcgagagcatgctgcccggcagcggctctgtgcccaagaagagcacagaggcccccttccgcacctaccaggccttcatgtgggccctgtacaagtacttcatctccttcaaggaggagctggccgagattgagaagtgcatcatcaacaatgacaccaccatcaccctggccatcgtggtggacaagctggccccccggctgagccagctgaaggtgctgcacaaggtgttcagcactggagtggccgaggtgcccccagacaccagaaatgtggtgcgggccagccacctgctgaacaccctgtacaaggccatcctggagtatgacaacgtgggggaggccagcgagcagacagtgtccctgctcttcagcctgtgggtggagaccgtgcggccctacctgcagacagtggatgagtggatcgtgcacggccacctgtgggatggagcccgggagttcatcatccagaggaacaagaatgtgcctgtgaaccaccgggacttctggtacgccacctacaccctgtacagcgtgtctgagaagacagaaaatgaggagaagatgtctgacaatgccagcgccagcagcggcagtgaccagggccccagcagccggcagcacaccatggtgtccttcctgaagcctgtgctgaagcagatcatcatggccggcaagtccatgcagctgctgaagaacctgcagtgtgccgagagcaccacctgccaggccggggccagagatgctgagaggaagagcctgtacaccctcttcctggagagcgtgcagagccggctgcggcacggggaggacagcaccccccaggtgctgacagagcagcaggccaccaaggagaacctgatgaagatgcagagcattgctgagagccacctggagctggatgatgtgcatgaccccctgctggccatcaactttgccaggatgtacctggagcagagcgacttccacgagaagtttgctggaggagatgtgtgtgtggacaggagcagcgagagcgtgacctgccagacctttgagctgaccctgcggagctgcctgtacccccacatcgacaagcagtacctggactgctgcggcaacctgatgcagaccctgaagaaggactaccgcctggtggagtacctgcaggccatgaggaacttcttcctgatggagggcggggacaccatgtatgacttctacaccagcatctttgacaagatccgggagaaggagacctggcagaatgtgtccttcctgaatgtgcagctgcaggaggccgtgggccagcgctacccagaggacagcagccggctgagcatcagctttgaaaatgtggacacagccaagaagaagctgcctgtgcacatcctggatggcctgaccctgagctacaaggtgccctggcctgtggacatcgtcatcagcctggagtgccagaagatctacaaccaggtgttcctgctgctgctgcagatcaagtgggccaagtacagcctggatgtgctgctgtttggagagctggtgtccacagctgagaagccccggctgaaggagggcctcatccacgagcaggacacagtggcccagtttggcccccagaaggagcctgtgcggcagcagatccacaggatgttcctgctgcgggtgaagctgatgcactttgtgaacagcctgcacaactacatcatgacccgcatcctgcacagcacaggcctggagttccagcaccaggtggaggaggccaaggacctggaccagctgatcaagatccactaccgctacctgagcaccatccatgaccgctgcctgctgcgggagaaggtgtcctttgtgaaggaggccatcatgaaggtgctgaacctggccctgatgtttgctgatggctggcaggccggcctgggcacctggaggatggagagcattgagaagatggagagtgacttcaagaactgccacatgttcctggtgaccatcctgaacaaggctgtgtgccggggcagcttcccccactgtgagtacatcatgctgaagtacttctacctgtgcatcagcctgtag

SEQ ID NO: 41061 - DNA, 3075 bp, Artificial Sequence
  derived and/or modified sequence
atggcccggcacggccccccctggagccggctggacgcccagcaggagcgggacgtgagggaactcgtaagaggtgttgccggcctccaagatgaagctgatccgaattttcagctcgcgctgaattttgcttggtctaatttccggttccaccggttcctggacgtgaattctcacaaaattgagaagacgatagagggtatttacgaaaagttcgtgatacattccgatttatccaaagccgcttcttggaaacgactgacagaggagtttctgaatgccccacttccctccattaaggagattaaaactgatgctcactatagtatcctcagtctgctgctgtgtctctcagattcacccagtaattcttcctacgtggagacaccacggaacaaagaagttgagaagaaggacgacttcgattggggcaaatatctcatggaggacgaggagatggatattggcccttatatggatacacctaattggagcgaagagagtgaagaggaaaatgaccaacagcctctctcacgagaggatagcggcatccaagtggaccggactccactggaagaacaggaccaaaaccgaaagctagatccgtgtatctcgtggaaggatgaacctgatgaccgaagttggctcgaacatcatgtggtgcaccagtattggaccgccaggccatcccaatttccacattctttgcacttacactccaatcttgctgcagtttgggatcagcacctgtattcatctgatccactttacgtgcctgatgacagagttcttgtgaccgaaactcaggtgataagagaaacattatggttgctgagcggggtgaaaaaattgttcatattccaactcatcgacggcaaagtgacagtgaggaataacatcattgtgacacacttaacccatagctgtctgaggtctgtcctagaacagatcgcagcatatggccaggtggtctttaggctccaggagtttatagatgaagtgatgggccacagctcagagagcatgctgccaggctcaggttccgtacctaaaaaatccactgaggcccctttcaggacatatcaggctttcatgtgggctctgtacaaatattttatctccttcaaagaagagcttgcagagatcgagaagtgtatcatcaataatgacaccacgattacgctcgcaatcgttgtggacaaattggcacctaggctctcgcagctgaaggtccttcacaaagtcttctctaccggggtcgcggaggtcccccctgatacccgaaacgtcgtgcgcgcatcacatctactaaatactctttacaaagccatccttgaatatgataatgtgggtgaggcttctgagcagacagtatctctgctcttttctctatgggttgaaacagtgagaccctatttgcagactgtcgatgagtggatagtacacggccacctgtgggacggagctagggaattcatcattcaacgcaacaaaaatgtgccagtgaaccatcgggatttttggtatgcaacttacaccctgtattctgtgtccgagaaaaccgaaaacgaagaaaagatgagtgataatgccagcgcatccagcggctctgatcaagggccctcctccaggcagcacacaatggtcagcttcttgaagcccgttctgaagcagatcatcatggccggcaaaagcatgcaactgctcaaaaacttacagtgtgcggaatctaccacatgccaggcaggtgcgagggacgcagagcgaaagtccctctacacactcttcctcgagagcgtccagagcagactgcgccatggcgaggattccactccacaggtcttgacagagcaacaggcgactaaagaaaatctcatgaagatgcagtctatagcagagtcgcacctagagctggacgacgtgcatgaccccctgctggcgatcaacttcgcacgcatgtatttagagcaatccgattttcacgagaaatttgccggcggcgacgtgtgcgttgaccgctcttcagaatcggtcacgtgccagacattcgagttaacgttgcggtcttgtctgtacccacatattgataagcagtaccttgactgctgcggaaatctgatgcagacgctgaagaaagattatcgtctcgtggagtacctccaagctatgagaaacttcttcttgatggaaggaggtgacaccatgtacgacttttacacatccatttttgacaagattagagagaaggagacctggcagaacgtatcttttctgaacgtgcagctgcaggaagcagtcgggcagcgctatcccgaagacagctcaaggttgagtatttcttttgagaatgtggatactgcaaagaaaaagctccctgttcacatcctggacggcctgaccttgagctacaaggtgccttggccggtcgacattgtgatctctctcgagtgccagaaaatctacaaccaggttttcttacttttgcttcagattaagtgggccaaatatagcctggacgtcctgcttttcggcgaactcgtgagtactgccgaaaaaccacgcctgaaggagggcctaattcatgaacaggacaccgtcgctcagtttgggccacagaaagagcctgtgaggcagcaaatacatcgcatgttccttctgagagtgaaattgatgcactttgtaaatagcctccacaactatattatgacgcggattcttcacagtacaggtttggagttccagcaccaggttgaggaggctaaggacctggatcagctgattaaaatccactataggtatctcagcacaatccacgaccggtgtttactacgagagaaggtgtctttcgtgaaggaggcaattatgaaagtgctgaatctcgcattaatgttcgccgatgggtggcaagccgggcttggcacttggcgtatggaaagtatcgaaaaaatggagtccgatttcaagaactgccacatgttcctggtcactattctgaacaaagccgtctgtcggggtagcttcccccactgtgagtatataatgctgaagtatttctatttgtgtatttctttgtag

SEQ ID NO: 41062 - DNA, 3075 bp, Artificial Sequence
  derived and/or modified sequence
atggcaagacatggaccaccatggtccaggttggatgctcagcaggaaagggatgtcagagaactagtgcgaggtgtggctggtctgcaggacgaagctgaccctaatttccagttggccctgaatttcgcatggtccaacttcaggtttcaccgattcctggacgtaaatagtcacaaaatcgagaagaccattgaagggatctacgagaaatttgtcatccatagtgatctgtctaaagctgcctcatggaagcgtcttaccgaggagttcttgaatgccccacttccttctatcaaggagatcaagaccgacgcacattactccatcctctctctgttactgtgcctgtcagacagcccttctaacagctcctatgttgagactccgaggaataaagaggtggagaaaaaggatgattttgactggggcaagtacctcatggaagatgaagagatggatatcggaccttatatggatacgcccaattggagcgaagaaagtgaggaagagaacgaccagcagcctctgtcccgagaggattcgggtattcaggtggaccggacaccacttgaagaacaggaccagaacagaaagttggacccctgtatttcttggaaggatgagcctgacgaccgaagctggctcgaacaccacgttgtccatcaatactggacagctaggcctagtcagttcccccactctctgcatctacactctaatctggctgctgtctgggatcaacatctttattccagtgaccccctgtacgtgcccgacgacagggtgttggtcacagagacgcaggtgattcgggagaccctctggctgctctcgggagtcaagaaactgtttatatttcagctgatcgatgggaaagtcactgtgcgtaacaacatcatagtcacgcatctcacccatagttgcctgcgatctgttcttgaacagattgctgcttacgggcaagtggtcttccgtctgcaggagtttattgatgaggtgatgggccattcatcagagtccatgctacccggtagcgggtccgtgcctaagaaatccacagaggctcctttccgaacttatcaggcatttatgtgggctctgtacaagtacttcatttccttcaaggaggaacttgccgagatcgagaaatgtattatcaacaatgacaccactataacgctggctatagtagtggacaagttagcaccaaggctgagccagcttaaagttctccacaaggtgttctctaccggcgtggcggaggtcccccctgatacccggaacgtggttagggcatcacacctacttaatactctatataaggcgatcctcgagtacgacaatgtcggcgaggcctccgagcagacagttagcctgttattcagcctctgggtagagactgtcagaccttatttgcaaacagtggacgagtggattgttcatggccatctatgggacggcgcacgcgagttcatcatccagagaaataagaacgtgccagtgaatcatagggatttctggtacgccacatacacgctgtactctgtgagtgagaagaccgagaacgaggagaagatgagcgataacgcttcggcaagcagtggtagtgatcagggcccatcctctcggcagcacacaatggtatcttttcttaaacctgtgctgaaacaaatcattatggccggaaaatctatgcaactcctcaagaatctgcagtgcgccgaaagtaccacatgccaggctggcgcacgggatgccgaaagaaaatccctctacacactattcttggaatctgtacagagccgactgaggcatggcgaggattctactccacaagtgctcaccgagcagcaggctacaaaggagaacctgatgaaaatgcaatctatcgccgagagccacctggaactggatgacgttcatgaccccctgctagccattaacttcgctcgaatgtacttggagcagtccgattttcacgaaaagttcgctggtggtgacgtgtgtgtcgaccggagcagcgagtccgtcacttgccagactttcgagctcacgctccgctcgtgtttatacccccacattgacaagcagtatctcgattgctgcggaaatctgatgcaaacgctgaagaaagattaccgcttggtggaataccttcaagccatgaggaacttctttcttatggagggcggagacactatgtatgatttctatacttccatctttgacaagattagagagaaagaaacctggcagaatgtgtcatttttaaacgtgcaactccaggaagctgttggtcagcggtaccccgaggacagctcaagattgtcaatttcttttgagaacgtggacactgctaagaagaagctgcctgtccatattctggatggtctgacactcagttataaagtgccctggccagttgacattgtgatttctctggaatgtcaaaagatatacaaccaggtgtttctgctcttactccagattaagtgggctaaatacagccttgatgtccttctgtttggggagctcgtctcaacagccgagaaaccccgtttaaaagaggggctcatccacgaacaggatacggtggcccagtttggccctcaaaaagagccggtccgacagcaaatccaccgcatgttcctcttgcgggtaaaactcatgcactttgtaaacagcctacacaactatatcatgacacggattctgcactccactggtcttgaattccaacatcaggttgaagaagcaaaggacctggatcaactgattaaaattcactatagatatctgagcactattcacgaccgctgcctcctccgcgaaaaagtgtcttttgttaaagaggccatcatgaaggtccttaatttggctctgatgtttgctgacggttggcaggccggactcggaacctggcgaatggaatccattgagaaaatggaatctgactttaagaattgccatatgttcctcgttaccatactgaacaaggcggtctgccgaggctctttcccacactgtgagtatattatgctgaaatatttttacctctgtatcagcctgtag

SEQ ID NO: 41063 - DNA, 3341 bp, Artificial Sequence
  derived and/or modified sequence
gttagacgcgcgctgcaggagcgcggaacatggcgcggcacgggccaccgtggagtcggttggacgcgcagcaggagcgcgacgtgcgggagctcgtccggggtgtcgccggcctccaggacgaggcagaccccaacttccagctcgccctaaacttcgcctggtccaacttcagatttcatcgtttcttggatgtcaacagccacaaaatagaaaaaacaatcgaaggaatttatgaaaaatttgtcattcattctgatctaagcaaagctgctagttggaagagattaacggaggaatttctaaatgcaccacttcccagtataaaggaaataaagacagatgcacattattccatactgtcacttcttctgtgtctgtcagactctccttcaaacagcagttatgtggagacaccaagaaataaagaagtggaaaagaaagatgatttcgactggggaaaatacttgatggaagatgaagaaatggacattggtccgtacatggacacaccaaattggtctgaagaaagtgaagaggaaaatgatcaacagcccttaagcagagaggactctggaattcaggtagacaggacaccgttagaagaacaagatcaaaacagaaaactggatccttgtatcagttggaaagatgagccagatgaccgaagctggctggaacatcatgtggtccatcagtactggacagccaggccctcccagtttcctcatagtttacatttgcactctaatttagctgctgtctgggaccaacacttgtacagcagtgatccattgtatgttccagatgacagggttttggttactgagactcaggttattcgggaaaccctatggttactttcaggagtgaaaaagctctttatatttcagttgatagatgggaaggtaactgtgagaaacaatattatagtaactcatttaacacatagctgtttacgatctgtgctggaacaaatagcagcatatggccaggttgtgtttcgactccaggagttcattgatgaagtcatgggacacagttctgagagcatgctgcctggaagtgggtctgttcctaagaagtcaactgaagctccctttagaacctaccaggctttcatgtgggccctgtacaaatatttcattagtttcaaagaggaacttgcagaaattgagaagtgcatcatcaataatgatactacaataactcttgcaatagtggtggacaagttggcacctcgattgtctcagctcaaggttctgcacaaagtgtttagtactggagtagcagaagttccacctgatactcgaaatgtcgtccgggcctctcacctgcttaacaccctgtacaaggccattcttgaatatgacaatgttggagaagcctctgagcaaaccgtctccctccttttctctctctgggtggaaacggtgcggccttacctgcagacggtggacgagtggatcgtgcacgggcacctgtgggatggcgccagggagttcatcatccagagaaacaaaaatgttccagttaatcacagagacttctggtatgcaacttacacgttatatagcgtatcagaaaagacagaaaatgaagaaaaaatgagtgataacgctagtgcgagttccggcagtgaccaggggccctccagcaggcagcacaccatggtgtccttcctcaaacctgtcctgaagcagatcataatggctggcaagtcgatgcagctgctgaagaacctgcagtgtgcggagagcaccacctgccaggcaggagccagagatgcagaaagaaaaagtttatacactctctttctggaatctgtacagtcccgtcttcgacatggagaagattccactccacaggttcttactgagcaacaggcaaccaaggagaacctgatgaagatgcagtccattgctgaaagccatcttgaactggatgatgttcatgatccactgcttgccattaactttgcaaggatgtatttggagcagagtgactttcacgagaagtttgctggtggtgatgtatgtgtggatagatcatcggaatctgtgacatgccagacttttgaattaacgctgagatcctgcctctatcctcatattgacaagcagtatctagattgctgtggaaatctcatgcaaactctaaaaaaagattacaggttggtagaatacttgcaagctatgaggaattttttcttaatggaaggaggagataccatgtatgacttctacacgtcaatttttgataaaataagagaaaaggaaacatggcagaatgtgtcttttcttaatgtccaactccaagaagcagtaggacagcgttatcctgaagatagttcacgtctatctatatcttttgaaaatgttgacacagctaagaagaagctgcctgttcatatcttagatggtctgaccctcagctacaaggtcccatggcccgtggacattgttataagtttggaatgtcaaaaaatttataatcaagtgtttcttctcttattgcaaataaagtgggcaaaatatagtctggatgttttactttttggtgaactggttagtactgcagaaaaaccacgacttaaagaaggccttatacatgaacaagacacagttgctcagttcggaccacaaaaagaaccagtaagacagcagattcatcgcatgttcctcttaagagtgaagctcatgcatttcgtgaacagcttgcacaactacatcatgaccaggattctacacagtacagggctggagtttcaacatcaagtcgaggaagccaaggatttagatcaattgattaaaattcactataggtatctgtcaaccatccatgaccggtgtctgctgagagaaaaggtcagctttgtgaaagaagctatcatgaaggtgttgaacttggctctcatgtttgcagacggttggcaggcaggcctgggcacttggcgaatggaatctatagagaaaatggaatctgattttaaaaactgccatatgtttcttgtaaccattttaaacaaagccgtctgtagaggatcctttccccattgtgagtatatcatgttaaaatatttctacctctgtatttccttgtaactaagtgtatgtgtcattgttttgttactgatcccatgaagaattagaaattctcaccattttcaaaactgaaaagtcccttagcagttgtcccatgctttgaattgctttttaagcattacggtgaggtgagtgtaagcctgaggatcttactttctggtataccatttattacaacagatttctaaaactcctattaaataaagttgatggcagaatagatttctgtcacacttc

SEQ ID NO: 41064 - protein, 338 aa, Artificial Sequence
  derived and/or modified sequence
MAGSHPYLNPPDSTHPSPPSAPPSLRWHQCCQPSDATNGLLVALLGGGLPAGFVGPLSHMAYQASNLPSLELLICRCLFHLPIALLLKLRGDPLLGPPDIRGRAYFYALLNVLSIGCAYSAVQVVPAGNAATVRKGSSTVCSAVLTLCLESQGLSGYDWCGLLGSILGLIIIVGPGLWTLQEGITGVYTALGYGQAFVGGLALSLGLLVYRSLHFPSCLPTVAFLSGLVGLLGSVPGLFVLQPPVLPSDLPSWSCVGAVGILALVSFTCVSYAVTKAHPALVCAVLHSEVVVALILQYYMLHETVAPSDIVGAGVVLGSIAIITAWNLSCEREGKVEE

SEQ ID NO: 41065 - DNA, 1017 bp, Artificial Sequence
  derived and/or modified sequence
atggccggcagccacccctacctgaacccccccgacagcacccaccccagcccccccagcgccccccccagcctgagatggcaccagtgctgccagcccagcgacgccaccaacggcctgctggtggccctgctgggcggcggcctgcccgccggcttcgtgggccccctgagccacatggcctaccaggccagcaacctgcccagcctggagctgctgatctgcagatgcctgttccacctgcccatcgccctgctgctgaagctgagaggcgaccccctgctgggcccccccgacatcagaggcagagcctacttctacgccctgctgaacgtgctgagcatcggctgcgcctacagcgccgtgcaggtggtgcccgccggcaacgccgccaccgtgagaaagggcagcagcaccgtgtgcagcgccgtgctgaccctgtgcctggagagccagggcctgagcggctacgactggtgcggcctgctgggcagcatcctgggcctgatcatcatcgtgggccccggcctgtggaccctgcaggagggcatcaccggcgtgtacaccgccctgggctacggccaggccttcgtgggcggcctggccctgagcctgggcctgctggtgtacagaagcctgcacttccccagctgcctgcccaccgtggccttcctgagcggcctggtgggcctgctgggcagcgtgcccggcctgttcgtgctgcagccccccgtgctgcccagcgacctgcccagctggagctgcgtgggcgccgtgggcatcctggccctggtgagcttcacctgcgtgagctacgccgtgaccaaggcccaccccgccctggtgtgcgccgtgctgcacagcgaggtggtggtggccctgatcctgcagtactacatgctgcacgagaccgtggcccccagcgacatcgtgggcgccggcgtggtgctgggcagcatcgccatcatcaccgcctggaacctgagctgcgagagagagggcaaggtggaggagtag

SEQ ID NO: 41066 - DNA, 1017 bp, Artificial Sequence
  derived and/or modified sequence
atggctggctcccatccatacctcaatccaccagattctactcatccatcccccccatccgcccccccgagcttgcgttggcatcagtgctgtcagccatccgacgcaactaatgggctgctggtggctttgctaggcggaggattgccagccgggttcgtgggacctcttagtcatatggcataccaagcctctaacctcccctctctcgagctactgatttgccggtgcttattccatctcccaatagccctgttacttaaactgcgtggcgacccactcttgggaccgcctgatatccgggggcgggcatacttttatgctctgctgaatgtgctctctattggctgcgcatattccgctgtgcaagttgtgcccgccggcaatgctgctacagtcaggaagggtagtagcaccgtttgctcagccgtcctgactttgtgcttggagtcacagggcctgagcgggtacgattggtgcggcttgctcggctcgatactgggcttaatcataatcgtcggaccaggcctctggaccctacaggagggcatcaccggcgtatacaccgctctaggatacgggcaagccttcgtcggcggactggctctgtccctgggtctgctggtgtatcgttccctgcacttcccatcttgtctgccaactgttgctttcctgagcgggctggtggggctgctcggttctgttcccggtctgtttgtgctacaaccccccgtgttgccgtctgatctgccttcctggtcatgcgtaggggcggtaggaattctcgccctcgtgtccttcacatgtgtctcttacgcagtgaccaaggctcatcctgcacttgtctgcgccgtgctccacagtgaagtggtcgtcgccctcattctccagtactacatgttgcatgaaacagtagccccctccgatatagttggtgccggcgttgtcctaggttccatcgcaattattactgcctggaatctttcatgtgagcgcgaagggaaagtggaggagtag

SEQ ID NO: 41067 - DNA, 1017 bp, Artificial Sequence
  derived and/or modified sequence
atggccggcagccacccctacctgaaccccccagacagcacccaccccagcccccccagcgccccacccagcctgcgctggcaccagtgctgccagcccagtgatgccaccaacggcctgctggtggccctgctgggcggcggcctgcctgctggctttgtgggccccctgagccacatggcctaccaggccagcaacctgcccagcctggagctgctgatctgccgctgcctcttccacctgcccatcgccctgctgctgaagctgcggggggaccccctgctgggccccccagacatccggggccgggcctacttctacgccctgctgaatgtgctgagcatcggctgtgcctacagcgctgtgcaggtggtgcctgctggaaatgctgccaccgtgaggaagggcagcagcacagtgtgcagcgctgtgctgaccctgtgcctggagagccagggcctgagcggctatgactggtgtggcctgctgggcagcatcctgggcctcatcatcatcgtgggccctggcctgtggaccctgcaggagggcatcactggagtgtacacagccctgggctacggccaggcctttgtgggcggcctggccctgagcctgggcctgctggtgtaccgcagcctgcacttccccagctgcctgcccaccgtggccttcctgagcggcctggtgggcctgctgggctctgtgcccggcctgtttgtgctgcagccccctgtgctgcccagcgacctgcccagctggagctgtgtgggcgctgtgggcatcctggccctggtgtccttcacctgtgtgtcctatgctgtgaccaaggcccacccagccctggtgtgtgctgtgctgcacagcgaggtggtggtggccctgatcctgcagtactacatgctgcacgagaccgtggcccccagcgacatcgtgggcgccggcgtggtgctgggcagcatcgccatcatcacagcctggaacctgagctgtgagcgggagggcaaggtggaggagtag

SEQ ID NO: 41068 - DNA, 1017 bp, Artificial Sequence
  derived and/or modified sequence
atggccggcagccacccctacctgaacccccccgacagcacccacccaagccctcctagcgcaccacctagcctgaggtggcaccaatgttgtcagccgtcggacgcaaccaatggcctgctcgtggccttgctgggggggggacttcccgccgggtttgtgggaccgctcagtcacatggcatatcaagcatcaaatctacccagcttggaactcctgatctgcagatgtctttttcaccttcccatagcgctcttgctcaagctacgtggcgaccccctgcttggcccccctgatataagggggagggcttatttctatgcgctgctcaatgtgttgagcattggttgtgcctactctgccgtgcaggtggtgcctgcaggcaacgcagccacagtgcgcaagggctcgtcaacggtgtgcagcgcggtattgaccctttgcctcgagtcccaagggctgagcggctacgactggtgcggcttgctgggttcaatcctggggctgatcattatcgtcggtccagggctgtggacactgcaggagggaatcacaggagtctacacggctttaggatacggacaagctttcgtcgggggcctcgccttgtctttgggattgctggtttacaggagtctgcatttcccatcttgtctgcctacagtggcctttctgtctggcctcgtcggactgctgggaagtgtaccaggcctcttcgtcctgcagccgccagtgctaccttcggacctcccatcatggtcttgcgtcggcgctgtagggattctcgcactcgttagcttcacctgcgttagttacgccgtgacaaaagcacacccggccttggtttgcgccgtgctccactcagaagttgtagtcgccctgatcctgcagtattacatgttacacgaaacagtggccccctccgatatcgtgggtgctggcgtggtgctgggttcaatcgcaataatcacagcgtggaatctctcatgtgagcgcgaaggcaaagtggaagaatag

SEQ ID NO: 41069 - DNA, 1017 bp, Artificial Sequence
  derived and/or modified sequence
atggctgggagccacccctacctcaaccctccagattccacgcatccatcccccccatcagcacccccatcattaaggtggcatcagtgctgccagccttctgatgctaccaatggactcctggtggcattgcttggaggcggactgccggcagggtttgtcggccctctgtcccacatggcctaccaggctagcaacctgccatccctcgaattgcttatttgccgatgcctgtttcatctgcccattgcgttactgcttaagctgcggggtgatcccctcctgggtcccccagatatcagaggcagggcctatttctatgccctccttaacgtcctgagcatcggatgcgcctacagtgccgtccaggtggtgcccgctgggaatgcggctacggtgagaaaaggttcgagtactgtgtgttccgccgtgctaactctctgcctcgagtcacagggcctgtctgggtacgattggtgcggcctgctgggatctatactgggactgattattattgttggcccaggcctgtggaccctccaggaggggatcactggagtttataccgccttgggatacggccaggctttcgtaggaggccttgccctcagcctcggcctcctcgtgtatcgaagcctccattttccctcctgtttgcctacagtggccttcctgtctggtttggtcggtctcttgggctctgtgcccggtctgttcgttctgcagcccccagtgctcccctccgacttgccctcttggtcttgtgtgggcgctgttggtatactcgccctggtctcatttacgtgtgtctcttatgcagttaccaaagctcatcctgctctggtttgcgcggtgctgcactccgaagtggtggttgctctgatcttacaatattatatgctgcacgaaaccgtcgcccctagtgacatcgtaggtgccggagtggtcttggggagtatagctattatcaccgcatggaatttaagttgcgagcgggaaggcaaagtcgaagagtag

SEQ ID NO: 41070 - DNA, 1195 bp, Artificial Sequence
  derived and/or modified sequence
ctcaggagagttccagggaagaaccccacccccactccaaccatgtcacaatggctggagctctgaggggcccaggctccctgagccaggaggagaggagaaagtccaaggaaagatggctggcagtcacccctacttgaacccgcctgactccacacacccatcgccgccctccgctccacccagcctccgctggcaccagtgctgccagccctctgatgccaccaatggcctgctggtggccctgctgggtgggggcctgcctgctggcttcgtgggccccctttctcatatggcttaccaggcttccaacctgccctcgctggagctgctcatctgtcgatgcctcttccacctccctattgccctgctacttaaactgcgtggcgacccccttctgggacctcctgacatccgaggccgggcctacttctatgccctgctcaacgtcctcagcattggatgtgcctacagtgcggttcaggtggtgcccgctggcaacgctgccactgttcgcaaaggttcttccaccgtctgctccgccgtcctcaccctctgccttgagagccagggtctcagtggctacgactggtgtggactgttgggcagcatcctaggactaatcatcattgtgggacctggactctggacactacaggaggggatcacgggtgtctacaccgccctgggctatgggcaggctttcgtgggaggactggcgctgtccctggggcttctggtctatcgttctctgcactttccctcctgcctcccaacagtggccttcctatctggcttggtggggctgctgggctctgtgccaggcctctttgtgctgcagccccccgtgttgcccagtgatctcccgagttggagttgtgtgggggcagtggggatcctcgccttggtctccttcacatgtgtgagctatgcggtcaccaaggcccaccctgccctggtgtgcgctgtcctgcattccgaggtggtggtggcccttatactgcagtattatatgctccatgagactgtggcaccttctgacatcgtgggggcaggggttgtgctgggcagcattgccatcatcacagcctggaacctcagctgtgagagggaagggaaggtggaggagtgagatagaacttgggagcccgggggttgggagggacagggataaatagaggcaaagactgaagac

SEQ ID NO: 41071 - protein, 145 aa, Artificial Sequence
  derived and/or modified sequence
MACIHYLRENREKFEAFIEGSFEEYLKRLENPQEWVGQVEISALSLMYRKDFIIYREPNVSPSQVTENNFPEKVLLCFSNGNHYDIVYPIKYKESSAMCQSLLYELLYEKVFKTDVSKIVMELDTLEVADEDNSEISDSEDDSCK

SEQ ID NO: 41072 - DNA, 3150 bp, Artificial Sequence
  derived and/or modified sequence
atggcgtgtattcattatttgagggaaaatcgcgagaaatttgaggccttcattgaaggctcatttgaggagtatctgaagcggcttgagaatcctcaggagtgggttggacaagtagaaatcagcgcactgtcattgatgtacaggaaggactttataatctatcgcgagcccaacgtatcccccagccaggtgacagaaaacaactttccagaaaaggtgttactatgcttttcgaatggaaaccactacgatattgtgtatccaatcaaatataaggagtcaagcgcaatgtgccagtctctgttatacgagctgttgtatgaaaaagtgtttaagaccgacgtgtccaaaatcgtaatggaactggacactctggaagtggccgacgaggataatagcgagatttcagatagtgaggacgattcttgcaaaagcaagacggccgccgcagctgcggatgtcaatggttttaaacctctgtctggcaacgaacagttgaagaataacggcaatagtacatcccttcctcttagtaggaaggtgttgaaatcactgaatccagccgtttatcgtaacgtggagtacgaaatttggctcaaatccaagcaggcccaacagaagagggactatagcattgccgccggcttgcagtacgaagtgggggataagtgtcaagtcagactggatcataacggcaagtttctgaatgcagatgtgcagggcatacactcagagaatggtcccgtcttggtcgaggagctcgggaagaagcatacctctaagaacctgaaggcccccccgcccgagtcctggaacaccgtgagtggaaagaaaatgaagaagccctctactagcggccagaatttccattcggatgttgactaccgaggacctaagaatcccagcaaacccatcaaggccccctcagcactgccgccgcgcttacagcatcccagtggggttaggcagcacgcattctcaagccacagctctggatcacaaagtcagaagttcagttcagagcataagaatctgagcagaaccccttcccagatcatcagaaagccagatagggagcgcgtggaagatttcgaccatacctctcgagagtcaaattacttcgggctatcacccgaagagagaagggagaaacaggcaatagaggagagccggttgttgtacgagatccaaaaccgcgacgaacaagcatttcccgcactgtctagctcgtctgtgaatcaatctgcgtcccagtcatcaaatccatgtgtgcaacgcaaatcttcacacgttggcgatcgcaagggtagccgccggcgcatggatacagaagagcggaaggacaaagatagtatccatggccatagccagctggataaacgaccggaaccttctaccttggagaacattacggatgacaaatatgctacagtgtccagcccctctaagtcgaaaaaattggagtgcccctcaccagccgagcagaagcctgctgagcatgttagcctgagcaacccagcacccttactggtgagccctgaggtacacctcaccccagcagtgcctagtctgcctgccactgttcctgcctggcctagcgaacctacaacttttggtcccaccggagtgcccgcccctatccctgtgttgagtgtaacccaaactctcacaactggtcctgactctgctgtgtcgcaggcccacctgactccctcaccagtaccggtttccatccaagccgtaaaccaacctctgatgcctctgcctcagactctgtcactgtaccaggatccattgtacccaggcttcccttgtaatgaaaagggggatcgcgcaatcgttcctccttatagcctgtgtcagaccggagaagacctccccaaggataaaaatattctccgctttttcttcaacctgggcgttaaagcctactcatgccctatgtgggctccccactcatatttatatcctcttcatcaggcatacctcgcggcgtgtcgaatgtatcccaaagtgccagtccccgtctaccctcacaatccttggttccaggaggctcccgcagctcagaatgagtctgactgtacatgcaccgatgcccactttcccatgcagacagaagcgtcagttaacggccagatgccccagccagagatcgggcctccaaccttctcgagtccattagtgatccctccgtcccaagtgtcagagagccatgggcagctgtcctatcaggccgatctggagagtgagacccctggtcagctgcttcacgcagactacgaagagtcactatccgggaaaaacatgtttccccagcctagctttgggcctaatccctttctcgggcccgtgccaatagcccctccattctttccccacgtttggtacggatatcctttccaggggttcatcgagaaccctgtgatgaggcagaacatcgtactcccaagcgacgagaaaggcgagctagacctttctctggagaatctggacctgagcaaagattgcggcagtgtgtcaacagttgatgagtttcctgaagccagaggagagcacgttcatagcttgcctgaagcttcggtgtcgagtaagcctgatgaggggcggaccgaacagagctcccagacccgcaaagctgacaccgccctggcctctataccacctgtggctgaaggaaaagcccaccccccaacacagatcctcaaccgggagagagaaacagtgcccgttgaattggagccaaaacgaactatccagtctctcaaggagaagaccgaaaaggtgaaggatcccaagaccgcagcagatgtggtatccccaggagctaacagcgtggattcgagagtccagcggccaaaagaagaatcctccgaggacgaaaacgaggtcagtaatatactgaggagcgggcgcagcaaacaattctacaatcagacatacgggtctcgcaagtacaagtctgactgggggtatagtggcaggggcggctaccagcacgttcgttccgaagagtcctggaaaggtcagccaagccgatcaagggacgaaggctaccagtaccaccgaaacgtgcgcggacggccatttcgaggcgaccggcgccggtccgggatgggggatggacaccggggacagcacacctag

SEQ ID NO: 41073 - DNA, 3150 bp, Artificial Sequence
  derived and/or modified sequence
atggcctgcatccactacctgagagaaaatcgggagaagtttgaggccttcatcgagggcagctttgaggagtacctgaagaggctggagaacccccaggagtgggtgggccaggtggagatcagcgccctgagcctgatgtacaggaaggacttcatcatctaccgggagcccaacgtgagccccagccaggtgacagagaacaacttccctgagaaggtgctgctgtgcttcagcaatggaaaccactatgacatcgtgtaccccatcaagtacaaggagagcagcgccatgtgccagagcctgctgtatgagctgctgtatgagaaggtgttcaagacagatgtgtccaagatcgtgatggagctggacaccctggaggtggctgatgaggacaacagcgagatcagtgacagtgaagatgacagctgcaagagcaagacagctgctgctgctgctgatgtgaatggcttcaagcccctgtctggaaatgagcagctgaagaacaacggcaacagcaccagcctgcccctgagcaggaaggtgctgaagagcctgaacccagctgtgtacagaaatgtggagtatgagatctggctgaagagcaagcaggcccagcagaagagggactacagcattgctgctggcctgcagtatgaggtgggggacaagtgccaggtgcggctggaccacaacgggaagttcctgaatgctgatgtgcagggcatccacagtgaaaatggacctgtgctggtggaggagctgggcaagaagcacaccagcaagaacctgaaggcccctcctcctgagagctggaacacagtgtctgggaagaagatgaagaagcccagcaccagcggccagaacttccacagtgatgtggactaccggggccccaagaaccccagcaagcccatcaaggcccccagcgccctgcccccccggctgcagcaccccagcggcgtgcggcagcacgccttcagcagccacagcagcggcagccagagccagaagttcagcagcgagcacaagaacctgagcaggacccccagccagatcatcaggaagccagaccgggagcgggtggaggactttgaccacaccagccgggagagcaactacttcggcctgagccctgaggagcggcgggagaagcaggccatcgaggagagccggctgctgtatgagatccagaacagagatgagcaggccttccctgccctgagcagcagctctgtgaaccagagcgccagccagagcagcaacccctgtgtgcagaggaagagcagccacgtgggggacaggaagggcagcagaagaaggatggacacagaggagaggaaggacaaggacagcatccacggccacagccagctggacaagaggcctgagcccagcaccctggagaacatcacagatgacaagtatgccaccgtgagcagccccagcaagagcaagaagctggagtgccccagccctgctgagcagaagccagctgagcacgtgtccctgagcaacccagcccccctgctggtgtccccagaggtgcacctgaccccagctgtgcccagcctgcctgccaccgtgcctgcctggcccagcgagcccaccaccttcggccccaccggggtgcctgcccccatccctgtgctgtctgtgacccagaccctgaccactggaccagattctgctgtgtcccaggcccacctgacccccagccctgtgcctgtgtccatccaggccgtgaaccagcccctgatgcccctgccccagaccctgagcctgtaccaggaccccctgtacccaggcttcccctgcaatgaaaaaggagaccgggccatcgtgcccccctacagcctgtgccagacaggagaggacctgcccaaggacaagaacatcctgcgcttcttcttcaacctgggcgtgaaggcctacagctgccccatgtgggccccccacagctacctgtaccccctgcaccaggcctacctggccgcctgcaggatgtaccccaaggtgcctgtgcctgtgtacccccacaacccctggttccaggaggccccagctgcccagaatgaaagtgactgcacctgcacagatgcccacttccccatgcagacagaggcctctgtgaatggccagatgccccagcctgagatcggcccccccaccttcagcagccccctggtgatcccccccagccaggtgtctgagagccacggccagctgagctaccaggccgacctggagagcgagaccccaggccagctgctgcacgccgactatgaggagagcctgagcggcaagaacatgttcccccagcccagctttggccccaaccccttcctgggccctgtgcccatcgccccacccttcttcccccacgtgtggtacggctaccccttccagggcttcattgaaaatcctgtgatgaggcagaacatcgtgctgcccagtgatgagaagggggagctggacctgagcctggagaacctggacctgagcaaggactgtggctctgtgtccacagtggatgagttccctgaggcccggggggagcacgtgcacagcctgcctgaggcctctgtgagcagcaagccagatgagggccgcacagagcagagcagccagaccaggaaggctgacacagccctggccagcatcccccctgtggccgagggcaaggcccacccccccacccagatcctgaaccgggagcgggagaccgtgcctgtggagctggagcccaagaggaccatccagagcctgaaggagaagacagagaaggtgaaggaccccaagacagctgctgatgtggtgtcccctggggccaacagcgtggacagccgggtgcagaggcccaaggaggagagcagtgaagatgaaaatgaggtgagcaacatcctgcggagcggccgcagcaagcagttctacaaccagacctacggcagcaggaagtacaagagtgactggggctacagcggccggggcggctaccagcacgtgcgctctgaggagagctggaagggccagcccagccgcagcagagatgagggctaccagtaccacagaaatgtgcggggccggcccttccggggggacagaagaagaagtggcatgggagatggccaccggggccagcacacctag

SEQ ID NO: 41074 - DNA, 3150 bp, Artificial Sequence
  derived and/or modified sequence
atggcctgcatccactacctgcgggagaaccgggagaagttcgaggcttttatcgagggatcatttgaagaatatttgaagcggctggagaacccccaggaatgggtaggccaagtggagatttctgcattgagcttgatgtacagaaaggattttattatctacagagaacccaatgtttcgcccagtcaggtcaccgagaataattttccagaaaaggtgctgctctgcttttccaacggcaatcattacgacatcgtgtatcccattaaatataaggagtcttccgccatgtgccagagcctgctgtacgagctgctttatgagaaagtgttcaaaacagacgtctcgaaaattgtcatggagcttgacaccctcgaggtcgccgatgaagacaactcagagataagtgacagcgaagacgatagctgcaaaagcaagaccgccgcagctgctgccgacgtgaacggcttcaaaccattgtctggcaacgagcagctaaaaaacaacggaaacagtacctccttgccactatccagaaaggttctgaaatcattgaatccagccgtctacagaaatgtggaatacgagatctggttaaaatccaagcaggcccaacagaaaagagactacagcattgctgccgggctgcagtacgaagtgggtgacaagtgccaagtccgccttgatcataatggcaaattcctgaacgccgatgtgcagggcatccactcagagaatggacctgtgctcgttgaggaactgggtaagaaacacacatcaaagaatctcaaggcgcctcctcccgagagctggaacaccgtgagcggaaaaaagatgaagaagccttcaacctctggccaaaactttcacagtgatgtggattatcgcggacccaagaacccttcaaagcctattaaagccccttctgctttgcctccaagactgcaacatcccagtggtgttaggcaacatgcattctcctcccatagttccggatcccagtctcagaaattttcttccgagcacaagaaccttagcaggactccttctcagatcataagaaagcctgatcgagagagggtggaagatttcgatcacaccagccgggagagcaattacttcggcctgtcaccagaggaacgaagagaaaaacaggcaatcgaagagagccgcttattgtacgagatacagaacagagatgagcaggcctttcctgctctctcaagcagcagcgttaatcagagcgcctcccaatcttctaatccctgcgttcagcggaaaagctctcatgtaggcgatcgaaaaggatctcgcagacggatggatacggaggagcgtaaggacaaagacagcatccacggccactctcagctggataaaaggcccgaaccgtctaccctggagaacattactgacgacaagtatgccactgtgtcgtcaccaagcaagagcaaaaagttggagtgcccctcccccgctgagcagaagcccgctgaacacgtgtccctgtccaatcctgcccccctgctagtcagcccggaagtgcacttgactcctgctgtgccttctcttcccgcaacagtgcctgcctggccctctgagcccactacattcggaccgacaggcgtgcccgcgcctattcccgttctgagcgtgacacaaactctgacgaccgggcctgactctgccgtttctcaggcccatctgacccctagtcccgtgcccgtgagtattcaggccgtgaatcagcctctgatgccattgccacagactttaagtctctaccaggatccactttatcccggctttccgtgtaacgagaaaggagatcgggccatcgttcctccttatagtctgtgccagactggcgaggacctacccaaggacaagaatatcttaagattcttttttaatctcggggtcaaggcctacagctgtccgatgtgggcacctcactcctacctgtacccacttcaccaggcctatctcgccgcttgtagaatgtacccgaaggttcctgtccctgtgtatccccataatccatggtttcaggaagcccccgccgcacagaatgaaagtgattgcacatgcaccgacgcacactttccaatgcaaacagaggcgtctgtgaacgggcagatgccccagccagaaatcggcccccctacattttcaagtccacttgttatacccccttcccaggtgagcgagtctcatgggcagctctcctatcaggccgatttggaaagcgaaactcccggccagttgctccacgccgattatgaggaatctctttctggaaagaatatgttccctcagccatcgtttgggcctaaccctttcttgggccctgtgcctatcgcgccaccgttttttcctcacgtctggtatggataccctttccagggttttatcgagaatccagtaatgaggcagaatatcgtcctccccagcgacgaaaagggcgagcttgacctctcccttgaaaatttggacctgtctaaggactgtgggtccgtctccacagtggatgagtttccagaggccaggggtgagcacgtacacagcctcccagaagcgtccgtgtcctctaagcccgatgagggccgaaccgaacagtcgagccagaccagaaaggctgacactgccctggcaagcatccctccagtggcagagggaaaggcacacccccctactcagatacttaatcgggagagggagaccgtccctgtagagctcgagcccaagaggaccatccagtccctgaaggaaaagacagaaaaagtaaaggaccctaaaacagcagctgatgtggtgtccccaggggctaattctgtcgactcacgcgtgcaacggcctaaagaagagtctagcgaggatgagaacgaggtctcgaacatcctgcgctcaggcaggtcaaaacagttctataaccagacgtatggcagcaggaagtacaagagcgactggggctattccggtaggggaggttaccagcatgtgcgcagtgaggaatcatggaagggccaaccgtccaggtcccgcgacgaaggataccagtatcacaggaatgttcgggggcggcccttccgcggggacagacggcggagcgggatgggtgatgggcatcggggtcagcacacttag

SEQ ID NO: 41075 - DNA, 3150 bp, Artificial Sequence
  derived and/or modified sequence
atggcttgcatccattatcttcgtgagaaccgcgagaagtttgaggcctttattgagggatcctttgaggaatatttgaaacggctggagaacccccaggaatgggtaggacaggtcgagattagtgccttgtccttgatgtacagaaaggatttcattatataccgagagcctaacgtaagtccctctcaggtcaccgaaaacaactttcccgaaaaggtgctgctctgcttcagcaatggcaatcactacgatatcgtctacccaataaaatacaaagaatcttctgcaatgtgccagtctcttttgtacgagcttctatacgaaaaagttttcaagaccgatgtttcaaagatagtgatggagttggataccctcgaggtggctgatgaagacaattctgagatctccgactctgaagacgacagttgcaagagtaagactgctgcagctgcagctgacgtgaacggattcaaaccgttgtcagggaatgagcagctcaagaacaacggcaatagcacttctctgccgctgtcgcggaaagtcctcaagtcactaaacccagccgtctaccgaaatgtggaatacgagatatggctcaaaagcaagcaggctcagcaaaagcgagactattctattgccgctgggctccagtacgaagtcggtgataagtgccaggttcgtctggatcacaacggaaagttcctgaacgccgacgttcagggtatccatagtgagaacgggccagttctcgtagaggaactggggaagaagcatacctctaaaaatctgaaggcccctccccctgaatcttggaacacagtgtccgggaagaagatgaaaaagccttctacgtcgggacagaattttcattccgatgtcgactatcgaggcccaaagaacccaagtaagcctatcaaagcacctagcgcactccccccacgactccagcatcctagcggggtcagacaacacgcatttagcagccacagcagtgggagccaaagccagaagttctcatctgaacacaagaatctgagtcgaacgcccagccagatcattaggaaaccagacagggagcgcgttgaagattttgatcatacctctcgggagagtaactactttggcctgagtcccgaagaacgcagggagaaacaagcaatcgaggaatctcgcttactgtacgagattcagaaccgggatgagcaagcctttcctgcattgagctcctctagcgtgaaccagagtgccagtcaaagtagtaacccctgcgtccagcggaaatcatctcacgtgggtgaccggaagggaagcaggcgtcggatggatactgaggagcgaaaggacaaggatagcattcacggtcattctcagctggataaaagaccagagccatcgactttggaaaatattacagacgacaagtacgccacagttagcagcccgagtaaatcaaagaaactggagtgcccttcgcccgcagagcagaaacccgctgaacatgtttccctgagcaaccccgctcctctgctcgtgagcccagaagtgcacctgactcccgctgtcccttcactgccagcaacagtgcccgcatggcccagcgagccgaccacattcggcccaactggggtgccagctccgatccccgtgctgtcggtcactcagactctgacgacgggccctgattccgctgtgtcccaggcacatttgacccccagcccagttcctgtgagtatccaggccgtgaatcagccgcttatgccccttccacagacactttctctgtatcaggatccgctttatcctggtttcccatgcaacgagaagggcgaccgcgctatcgtcccaccatatagcttatgtcagacaggtgaagacctgccaaaggacaagaatatcctgagattcttcttcaatctcggcgtcaaggcttatagttgcccgatgtgggcccctcactcatatctgtaccctctgcaccaggcctatctggctgcttgtagaatgtatccaaaagtgccagtgccagtgtacccacacaacccatggtttcaggaggctcctgccgctcagaatgagtctgactgtacctgtaccgatgcgcatttccccatgcaaacagaagcatccgtaaatgggcaaatgccgcaacccgaaataggaccaccaacatttagtagcccattggtgatccccccttcccaggtcagcgaatcacacggtcaactgagttatcaggctgatctggagtctgagacccccggacaactgctccacgccgattatgaagagtccctctctgggaagaatatgttccctcagccctcattcggacctaaccctttcttagggccagtgcctatagcaccccctttcttccctcatgtctggtacgggtacccttttcagggctttattgagaatcccgtgatgcgacagaatatagtcctgccctccgatgagaagggggaattggacctatctctcgagaacctggatctgtcaaaggactgtggcagtgtgtcaactgtagacgagttccccgaggccagaggcgagcacgtccatagcctgccagaggcttccgtgtccagtaagcccgacgagggcaggacagagcagagtagtcagacccggaaagccgacacagcacttgcttcaataccacccgtggccgaaggaaaggcccacccgccaacacagatcttaaacagggagcgcgagaccgtgccagtcgagctcgagcccaaaaggacaatccagtccctgaaagagaaaaccgagaaggtcaaggaccccaagactgcagccgatgtggttagtcctggggcaaacagtgtcgactctagggttcagagaccaaaggaggagtcatctgaagatgaaaacgaagtgtctaatattcttaggtccggccgtagcaagcagttttataaccagacttatggctctaggaagtataaaagtgattgggggtacagtggccgtgggggataccagcacgttaggtcagaggagagctggaaggggcagccttcccgcagccgcgatgagggctatcagtaccaccgtaacgttcgcggtcgacctttcaggggtgaccggcgacggtctggcatgggggacggccaccggggtcaacatacatag

SEQ ID NO: 41076 - DNA, 3150 bp, Artificial Sequence
  derived and/or modified sequence
atggcctgcatccactacctgagagagaacagagagaagttcgaggccttcatcgagggcagcttcgaggagtacctgaagagactggagaacccccaggagtgggtgggccaggtggagatcagcgccctgagcctgatgtacagaaaggacttcatcatctacagagagcccaacgtgagccccagccaggtgaccgagaacaacttccccgagaaggtgctgctgtgcttcagcaacggcaaccactacgacatcgtgtaccccatcaagtacaaggagagcagcgccatgtgccagagcctgctgtacgagctgctgtacgagaaggtgttcaagaccgacgtgagcaagatcgtgatggagctggacaccctggaggtggccgacgaggacaacagcgagatcagcgacagcgaggacgacagctgcaagagcaagaccgccgccgccgccgccgacgtgaacggcttcaagcccctgagcggcaacgagcagctgaagaacaacggcaacagcaccagcctgcccctgagcagaaaggtgctgaagagcctgaaccccgccgtgtacagaaacgtggagtacgagatctggctgaagagcaagcaggcccagcagaagagagactacagcatcgccgccggcctgcagtacgaggtgggcgacaagtgccaggtgagactggaccacaacggcaagttcctgaacgccgacgtgcagggcatccacagcgagaacggccccgtgctggtggaggagctgggcaagaagcacaccagcaagaacctgaaggcccccccccccgagagctggaacaccgtgagcggcaagaagatgaagaagcccagcaccagcggccagaacttccacagcgacgtggactacagaggccccaagaaccccagcaagcccatcaaggcccccagcgccctgccccccagactgcagcaccccagcggcgtgagacagcacgccttcagcagccacagcagcggcagccagagccagaagttcagcagcgagcacaagaacctgagcagaacccccagccagatcatcagaaagcccgacagagagagagtggaggacttcgaccacaccagcagagagagcaactacttcggcctgagccccgaggagagaagagagaagcaggccatcgaggagagcagactgctgtacgagatccagaacagagacgagcaggccttccccgccctgagcagcagcagcgtgaaccagagcgccagccagagcagcaacccctgcgtgcagagaaagagcagccacgtgggcgacagaaagggcagcagaagaagaatggacaccgaggagagaaaggacaaggacagcatccacggccacagccagctggacaagagacccgagcccagcaccctggagaacatcaccgacgacaagtacgccaccgtgagcagccccagcaagagcaagaagctggagtgccccagccccgccgagcagaagcccgccgagcacgtgagcctgagcaaccccgcccccctgctggtgagccccgaggtgcacctgacccccgccgtgcccagcctgcccgccaccgtgcccgcctggcccagcgagcccaccaccttcggccccaccggcgtgcccgcccccatccccgtgctgagcgtgacccagaccctgaccaccggccccgacagcgccgtgagccaggcccacctgacccccagccccgtgcccgtgagcatccaggccgtgaaccagcccctgatgcccctgccccagaccctgagcctgtaccaggaccccctgtaccccggcttcccctgcaacgagaagggcgacagagccatcgtgcccccctacagcctgtgccagaccggcgaggacctgcccaaggacaagaacatcctgagattcttcttcaacctgggcgtgaaggcctacagctgccccatgtgggccccccacagctacctgtaccccctgcaccaggcctacctggccgcctgcagaatgtaccccaaggtgcccgtgcccgtgtacccccacaacccctggttccaggaggcccccgccgcccagaacgagagcgactgcacctgcaccgacgcccacttccccatgcagaccgaggccagcgtgaacggccagatgccccagcccgagatcggcccccccaccttcagcagccccctggtgatcccccccagccaggtgagcgagagccacggccagctgagctaccaggccgacctggagagcgagacccccggccagctgctgcacgccgactacgaggagagcctgagcggcaagaacatgttcccccagcccagcttcggccccaaccccttcctgggccccgtgcccatcgccccccccttcttcccccacgtgtggtacggctaccccttccagggcttcatcgagaaccccgtgatgagacagaacatcgtgctgcccagcgacgagaagggcgagctggacctgagcctggagaacctggacctgagcaaggactgcggcagcgtgagcaccgtggacgagttccccgaggccagaggcgagcacgtgcacagcctgcccgaggccagcgtgagcagcaagcccgacgagggcagaaccgagcagagcagccagaccagaaaggccgacaccgccctggccagcatcccccccgtggccgagggcaaggcccacccccccacccagatcctgaacagagagagagagaccgtgcccgtggagctggagcccaagagaaccatccagagcctgaaggagaagaccgagaaggtgaaggaccccaagaccgccgccgacgtggtgagccccggcgccaacagcgtggacagcagagtgcagagacccaaggaggagagcagcgaggacgagaacgaggtgagcaacatcctgagaagcggcagaagcaagcagttctacaaccagacctacggcagcagaaagtacaagagcgactggggctacagcggcagaggcggctaccagcacgtgagaagcgaggagagctggaagggccagcccagcagaagcagagacgagggctaccagtaccacagaaacgtgagaggcagacccttcagaggcgacagaagaagaagcggcatgggcgacggccacagaggccagcacacctag

SEQ ID NO: 41077 - protein, 257 aa, Artificial Sequence
  derived and/or modified sequence
MSILFYVIFLAYLRGIQGNNMDQRSLPEDSLNSLIIKLIQADILKNKLSKQMVDVKENYQSTLPKAEAPREPERGGPAKSAFQPVIAMDTELLRQQRRYNSPRVLLSDSTPLEPPPLYLMEDYVGSPVVANRTSRRKRYAEHKSHRGEYSVCDSESLWVTDKSSAIDIRGHQVTVLGEIKTGNSPVKQYFYETRCKEARPVKNGCRGIDDKHWNSQCKTSQTYVRALTSENNKLVGWRWIRIDTSCVCALSRKIGRT

SEQ ID NO: 41078 - protein, 270 aa, Artificial Sequence
  derived and/or modified sequence
MVTFATILQVNKVMSILFYVIFLAYLRGIQGNNMDQRSLPEDSLNSLIIKLIQADILKNKLSKQMVDVKENYQSTLPKAEAPREPERGGPAKSAFQPVIAMDTELLRQQRRYNSPRVLLSDSTPLEPPPLYLMEDYVGSPVVANRTSRRKRYAEHKSHRGEYSVCDSESLWVTDKSSAIDIRGHQVTVLGEIKTGNSPVKQYFYETRCKEARPVKNGCRGIDDKHWNSQCKTSQTYVRALTSENNKLVGWRWIRIDTSCVCALSRKIGRT

SEQ ID NO: 41079 - DNA, 813 bp, Artificial Sequence
  derived and/or modified sequence
atggtgaccttcgccaccatcttgcaggtcaataaggttatgtccatcctattctacgtaatcttcctggcttacctgagaggaattcagggcaacaatatggaccagcggtctctccccgaggattcattgaactcattaattatcaaacttattcaggcggatattcttaagaataagctgtccaaacagatggtcgatgtgaaggagaactaccagagtacactaccaaaggctgaggcgcctagagagcccgagcgcggtggccccgccaaaagtgcctttcaaccagtcatagctatggataccgagctcttacgtcaacagcgtcggtataactccccgcgtgttctgctttcggattccaccccgctggaaccgcctccactctaccttatggaggactatgtgggcagccccgtcgtcgccaaccggactagcaggcggaaaagatacgcagagcataaatcccacaggggcgagtactcagtgtgtgacagtgagtcactctgggtgacagacaaatcctcagccatcgatatcaggggccaccaagtgactgtgctgggcgaaatcaaaactggcaattcccctgtgaaacagtacttctatgagacccggtgcaaagaggccagaccagtgaagaacggctgtcgagggattgacgacaagcactggaatagccagtgcaaaacaagccaaacctacgtgcgggcacttactagcgagaacaacaagctggtgggatggcgctggattcgcatcgacactagctgcgtatgtgcactaagccgtaagattggccggacctag

SEQ ID NO: 41080 - DNA, 813 bp, Artificial Sequence
  derived and/or modified sequence
atggtgacctttgccaccatcctgcaggtgaacaaggtgatgagcatcctcttctacgtgatcttcctggcctacctgcggggcatccagggcaacaacatggaccagaggagcctgcctgaggacagcctgaacagcctcatcatcaagctgatccaggccgacatcctgaagaacaagctgagcaagcagatggtggatgtgaaggagaactaccagagcaccctgcccaaggccgaggccccccgggagcctgagcggggcggccctgccaagagcgccttccagcctgtgattgccatggacacagagctgctgcggcagcagaggcgctacaacagcccccgggtgctgctgagtgacagcacccccctggagcccccacccctgtacctgatggaggactatgtgggcagccctgtggtggccaacagaaccagcaggaggaagagatatgcagagcacaagagccacagaggagagtacagcgtgtgtgacagcgagagcctgtgggtgacagacaagagcagcgccatcgacatccggggccaccaggtgacagtgctgggggagatcaagacaggcaacagccctgtgaagcagtacttctatgagacccgctgcaaggaggcccggcctgtgaagaatggctgccggggcattgatgacaagcactggaacagccagtgcaagaccagccagacctacgtgcgggccctgaccagcgagaacaacaagctggtgggctggcgctggatcagaattgacaccagctgtgtgtgtgccctgagcaggaagattggaagaacatag

SEQ ID NO: 41081 - DNA, 813 bp, Artificial Sequence
  derived and/or modified sequence
atggtgaccttcgccaccatcctgcaggtgaacaaggtgatgagcattctgttttacgttatatttctcgcctatctgagggggattcaggggaacaatatggaccagcggtccttacccgaggactcactcaactctctcatcattaagcttatacaggctgacattctgaaaaacaaactttccaaacagatggtcgacgttaaggaaaattaccagtctactttacctaaggccgaggctcccagagagcctgaacgagggggccctgccaagagtgctttccagcctgtaattgcgatggatactgagttactgcgacagcaaagacgttataatagccccagagtgctcctatcagactcaaccccactggagcccccacctctgtatctcatggaggattacgtcggctccccagtggtcgcgaacaggacatcccgccggaaacgctacgctgaacacaagagccaccgaggcgagtatagcgtatgtgattccgaaagtctatgggtgaccgacaaatcgtccgctatagacattaggggtcaccaggtgaccgttcttggggagattaaaaccggcaattcacctgtgaagcagtatttctacgaaacacggtgcaaggaagctcgtccagttaagaacggttgtcgaggtatcgatgacaaacattggaactcccagtgtaaaacctcgcaaacctacgtccgcgcccttacttcagagaacaacaaactcgtcggctggcggtggattagaatagatacatcttgcgtatgcgcgctaagccgaaaaatcggaaggacctag

SEQ ID NO: 41082 - DNA, 1167 bp, Artificial Sequence
  derived and/or modified sequence
tgccagaataacacagactcagctgccagagcctgctcttaacacctgtgtttccttttcagatcttacaggtgaacaaggtgatgtccatcttgttttatgtgatatttctcgcttatctccgtggcatccaaggtaacaacatggatcaaaggagtttgccagaagactcgctcaattccctcattattaagctgatccaggcagatattttgaaaaacaagctctccaagcagatggtggacgttaaggaaaattaccagagcaccctgcccaaagctgaggctccccgagagccggagcggggagggcccgccaagtcagcattccagccggtgattgcaatggacaccgaactgctgcgacaacagagacgctacaactcaccgcgggtcctgctgagcgacagcacccccttggagcccccgcccttgtatctcatggaggattacgtgggcagccccgtggtggcgaacagaacatcacggcggaaacggtacgcggagcataagagtcaccgaggggagtactcggtatgtgacagtgagagtctgtgggtgaccgacaagtcatcggccatcgacattcggggacaccaggtcacggtgctgggggagatcaaaacgggcaactctcccgtcaaacaatatttttatgaaacgcgatgtaaggaagccaggccggtcaaaaacggttgcaggggtattgatgataaacactggaactctcagtgcaaaacatcccaaacctacgtccgagcactgacttcagagaacaataaactcgtgggctggcggtggatacggatagacacgtcctgtgtgtgtgccttgtcgagaaaaatcggaagaacatgaattggcatctctccccatatataaattattactttaaattatatgatatgcatgtagcatataaatgtttatattgtttttatatattataagttgacctttatttattaaacttcagcaaccctacagtatataagcttttttctcaataaaatcagtgtgcttgccttccctcaggcctctcccatctgttaaaacttgttttgtgatccggctctcaggagtcactctgtaaaatctgtgtacaccagtattttgcattcagtattgtcaaggccatgactgttgttttagtaaacttgttaaaatc

SEQ ID NO: 41083 - DNA, 1141 bp, Artificial Sequence
  derived and/or modified sequence
gagttgaagctcctctcccttccgaacagctccgcgcaccgccccgcgacgcagcccggcgcaactactttcttctctctcctttctttcttcctctcctttttcccctgctgggtagtggctgcggcggggtgggggagactttgaatgaccgagctcgcgtccacctttctcttcatgtcgacgtccctggaaacggccacacggatgccatggttacttttgccacgatcttacaggtgaacaaggtgatgtccatcttgttttatgtgatatttctcgcttatctccgtggcatccaaggtaacaacatggatcaaaggagtttgccagaagactcgctcaattccctcattattaagctgatccaggcagatattttgaaaaacaagctctccaagcagatggtggacgttaaggaaaattaccagagcaccctgcccaaagctgaggctccccgagagccggagcggggagggcccgccaagtcagcattccagccggtgattgcaatggacaccgaactgctgcgacaacagagacgctacaactcaccgcgggtcctgctgagcgacagcacccccttggagcccccgcccttgtatctcatggaggattacgtgggcagccccgtggtggcgaacagaacatcacggcggaaacggtacgcggagcataagagtcaccgaggggagtactcggtatgtgacagtgagagtctgtgggtgaccgacaagtcatcggccatcgacattcggggacaccaggtcacggtgctgggggagatcaaaacgggcaactctcccgtcaaacaatatttttatgaaacgcgatgtaaggaagccaggccggtcaaaaacggttgcaggggtattgatgataaacactggaactctcagtgcaaaacatcccaaacctacgtccgagcactgacttcagagaacaataaactcgtgggctggcggtggatacggatagacacgtcctgtgtgtgtgccttgtcgagaaaaatcggaagaacatgaattggcatctctccccatatataaattattactttaaattatatgatatgcatgtagcatataaatgtttatattgtttttatatattataagttgacctttatttattaaacttc

SEQ ID NO: 41084 - DNA, 813 bp, Artificial Sequence
  derived and/or modified sequence
atggttacatttgcgaccatcctacaggtcaacaaggtgatgtctatcctgttttatgtcatctttctggcctacttgcgcggaatacaggggaacaatatggaccagaggagtctgccagaagactccttaaattctctcataatcaaactgatacaggccgatattcttaaaaacaagctgagtaagcagatggtcgacgtcaaagagaactatcagtccaccttgccaaaggcggaggcacccagagaaccagagagaggagggcctgcaaaatctgccttccagcctgtgatcgcaatggacacagaattgttgaggcaacagagaagatataatagtcccagggtgctcctgtccgatagcaccccactcgagccccctccactctatttaatggaggactacgtgggctcgcctgtggtagctaatcgaacttcaaggaggaagcggtatgccgaacacaagtctcatcggggagagtattccgtctgtgacagtgagtccctgtgggtgaccgataagagtagtgctattgacattcggggtcaccaggtgaccgtactgggagaaattaagaccggcaactcccccgtcaagcaatacttttatgaaacccggtgtaaagaggcgcgtccagtgaaaaacggatgccggggtatcgacgataagcattggaatagccagtgcaaaacatcacaaacatacgttcgcgcactcacctccgagaacaacaagctagtcgggtggaggtggatcagaatagacaccagttgtgtctgcgctctgtcccgaaaaattggcagaacttag

SEQ ID NO: 41085 - DNA, 813 bp, Artificial Sequence
  derived and/or modified sequence
atggtgacatttgcaacaatcctccaagtgaacaaagtgatgtctatccttttttacgtgatctttttggcctacctgcgcgggattcagggaaacaatatggaccaaagaagtctgcctgaagactcgctgaactctctgatcattaaactgattcaagctgacatcctgaagaataagctctccaagcagatggtcgacgtgaaagagaactaccagagcacactaccaaaggctgaagcaccccgcgagcccgagcgaggaggccctgcaaaaagtgcttttcaacccgtaattgctatggatactgagctgctaaggcagcagcgacgctacaacagtccacgcgtcctgcttagtgattccaccccactggagcctcctcccctgtaccttatggaggattatgttggaagccccgttgtggctaatagaacaagccgcaggaaacggtacgcagagcataaatcacacagaggagagtattctgtttgcgatagtgaatcattgtgggtgaccgacaaatcatcagccatcgacattcgcggacaccaagtgacagtgctcggggagatcaagactggcaactcccctgtcaagcagtatttctacgagaccaggtgtaaagaggcccggcctgttaagaacggatgcagaggcattgatgataagcactggaacagccaatgtaagacttcccagacctatgtacgagcactgacctctgaaaacaacaagcttgtggggtggcgttggattcgcatcgatactagctgcgtgtgtgccctgtcgaggaaaataggccggacgtag

SEQ ID NO: 41086 - DNA, 813 bp, Artificial Sequence
  derived and/or modified sequence
atggtcacttttgccactatactgcaggtcaataaagttatgagcatcctgttttatgtaatattcctagcctatctccgggggattcaaggtaacaacatggaccagcgcagcctgcccgaagatagcctgaatagcctgataattaagctaatccaggcagatatcctgaagaataagctctccaaacagatggtcgatgtcaaagagaactaccagagtaccctgccaaaggccgaagccccaagagaacccgaacgcggcggacccgcaaagtctgctttccaacctgtaattgccatggatacagagctccttaggcagcagagaagatacaactctccaagggttctactctccgactctaccccacttgagccaccgccactgtatcttatggaagattatgtgggttctcccgttgtggctaaccgaacatcaaggcgaaagagatatgcagagcacaaaagtcaccgtggagaatacagcgtgtgcgactccgaatctctctgggtgactgacaaatcttctgctatcgacattagaggccaccaggtaaccgtcttgggcgagataaagacgggtaattctccagtgaagcagtatttttatgagaccagatgcaaagaggcacgccctgtcaagaatggatgccgaggaatcgacgataaacattggaattcccaatgcaaaacgagccaaacctacgtcagagcattaacgtctgagaacaacaaactcgtcggatggcgctggattagaattgacacctcttgcgtgtgcgcgctgtcccgtaaaatcggaaggacttag

SEQ ID NO: 41087 - DNA, 813 bp, Artificial Sequence
  derived and/or modified sequence
atggtgaccttcgccaccatcctgcaggtgaacaaggtgatgagcatcctgttctacgtgatcttcctggcctacctgagaggcatccagggcaacaacatggaccagagaagcctgcccgaggacagcctgaacagcctgatcatcaagctgatccaggccgacatcctgaagaacaagctgagcaagcagatggtggacgtgaaggagaactaccagagcaccctgcccaaggccgaggcccccagagagcccgagagaggcggccccgccaagagcgccttccagcccgtgatcgccatggacaccgagctgctgagacagcagagaagatacaacagccccagagtgctgctgagcgacagcacccccctggagcccccccccctgtacctgatggaggactacgtgggcagccccgtggtggccaacagaaccagcagaagaaagagatacgccgagcacaagagccacagaggcgagtacagcgtgtgcgacagcgagagcctgtgggtgaccgacaagagcagcgccatcgacatcagaggccaccaggtgaccgtgctgggcgagatcaagaccggcaacagccccgtgaagcagtacttctacgagaccagatgcaaggaggccagacccgtgaagaacggctgcagaggcatcgacgacaagcactggaacagccagtgcaagaccagccagacctacgtgagagccctgaccagcgagaacaacaagctggtgggctggagatggatcagaatcgacaccagctgcgtgtgcgccctgagcagaaagatcggcagaacctag

SEQ ID NO: 41088 - protein, 261 aa, Artificial Sequence
  derived and/or modified sequence
MSRRYDSRTTIFSPEGRLYQVEYAMEAIGHAGTCLGILANDGVLLAAERRNIHKLLDEVFFSEKIYKLNEDMACSVAGITSDANVLTNELRLIAQRYLLQYQEPIPCEQLVTALCDIKQAYTQFGGKRPFGVSLLYIGWDKHYGFQLYQSDPSGNYGGWKATCIGNNSAAAVSMLKQDYKEGEMTLKSALALAIKVLNKTMDVSKLSAEKVEIATLTRENGKTVIRVLKQKEVEQLIKKHEEEEAKAEREKKEKEQKEKDK

SEQ ID NO: 41089 - protein, 190 aa, Artificial Sequence
  derived and/or modified sequence
MACSVAGITSDANVLTNELRLIAQRYLLQYQEPIPCEQLVTALCDIKQAYTQFGGKRPFGVSLLYIGWDKHYGFQLYQSDPSGNYGGWKATCIGNNSAAAVSMLKQDYKEGEMTLKSALALAIKVLNKTMDVSKLSAEKVEIATLTRENGKTVIRVLKQKEVEQLIKKHEEEEAKAEREKKEKEQKEKDK

SEQ ID NO: 41090 - protein, 221 aa, Artificial Sequence
  derived and/or modified sequence
MSRRYDSRTTIFSPEGRLYQVEYAMEAIGHAGTCLGILANDGVLLAAERRNIHKLLDEVFFSEKIYKLNEDMACSVAGITSDANVLTNELRLIAQRYLLQYQEPIPCEQLVTALCDIKQAYTQFGGKRPFGVSLLYIGWDKHYGFQLYQSDPSGNYGGWKATCIGNNSAAAVSMLKQDYKEGEMTLKSALALAIKVLNKTMDVSKLSAEKVEIATLTRENG

SEQ ID NO: 41091 - protein, 209 aa, Artificial Sequence
  derived and/or modified sequence
MSRRYDSRTTIFSPEGRLYQVEYAMEAIGHAGTCLGILANDGVLLAAERRNIHKLLDEVFFSEKIYKLNEDMACSVAGITSDANVLTNELRLIAQRYLLQYQEPIPCEQLVTALCDIKQAYTQFGGKRPFGVSLLYIGWDKHYGFQLYQSDPSGNYGGWKATCIGNNSAAAVSMLKQDYKEGEMTLKSALALAIKVLNKTMDVSKLSAE

SEQ ID NO: 41092 - protein, 230 aa, Artificial Sequence
  derived and/or modified sequence
MSRRYDSRTTIFSPEAERRNIHKLLDEVFFSEKIYKLNEDMACSVAGITSDANVLTNELRLIAQRYLLQYQEPIPCEQLVTALCDIKQAYTQFGGKRPFGVSLLYIGWDKHYGFQLYQSDPSGNYGGWKATCIGNNSAAAVSMLKQDYKEGEMTLKSALALAIKVLNKTMDVSKLSAEKVEIATLTRENGKTVIRVLKQKEVEQLIKKHEEEEAKAEREKKEKEQKEKDK

SEQ ID NO: 41093 - protein, 236 aa, Artificial Sequence
  derived and/or modified sequence
MSRRYDSRTTIFSPEGRLYQVEYAMEAIGHAGTCLGILANDGVLLAAERRNIHKLLDEVFFSEKIYKLNEDMACSVAGITSDANVLTNELRLIAQRYLLQYQEPIPCEQLVTALCDIKQAYTQFGGKRPFGVSLLYIGWDKHYGFQLYQSDPSGNYGGWKATCIGNNSAAAVSMLKQDYKEGEMTLKSALALAIKVLNKTMDVSKLSAEKVEIATLTRENGKTVIRVLKQKEVEQL

SEQ ID NO: 41094 - DNA, 786 bp, Artificial Sequence
  derived and/or modified sequence
atgtccagaagatacgactcccgcacaaccatattcagtcccgaagggcggctgtatcaggtcgagtacgccatggaggctattggacacgccggcacttgcctgggcattctcgcaaatgacggggtcttgctggccgccgaaagacgaaacattcacaagctccttgatgaggtctttttcagcgagaagatctacaaactaaacgaggatatggcatgctctgtggccggcattacatctgatgccaacgtgttgacaaatgagttgaggttgattgcacagagatacctgttacagtatcaggaacctatcccatgcgaacaattggttactgcactgtgtgacataaagcaggcctatacccaatttggcggaaagcgaccatttggggtctcattactgtatatcggctgggataaacactacggattccagctgtaccagagcgatccctccggcaactacgggggctggaaagcgacatgcatcgggaacaattcagcagctgcagtgagtatgctgaagcaagactataaagagggcgagatgaccctgaagtcggctctggctctggcgatcaaggtgctgaataaaactatggatgtatcaaaactgtctgccgagaaggtggagatcgcaacactgacaagagaaaacggcaaaacagtcattcgcgtgctgaagcaaaaggaggtggagcagcttatcaaaaagcacgaggaggaagaggccaaagctgaacgggaaaagaaggaaaaagaacagaaagagaaggataagtag

SEQ ID NO: 41095 - DNA, 786 bp, Artificial Sequence
  derived and/or modified sequence
atgtcccgaaggtatgactcccgaacaacaatcttcagcccagagggacgcctgtatcaggtggaatacgccatggaagctattggccacgcggggacttgtcttggcattctggcaaatgatggggtacttttagccgccgagaggcgcaacattcataaactcctcgacgaagtctttttttctgagaagatttataaactgaatgaagatatggcatgttcggttgcaggtataaccagtgacgcaaatgtgctgacaaacgagttgagactaattgcgcagaggtaccttctgcagtaccaggaaccaatcccctgcgagcagctcgtgacagccctttgtgacattaaacaagcgtatacacagtttggtgggaaacggccttttggtgtttcgctcctgtatatcggatgggacaaacactatggcttccagttataccaatcggatccctcgggcaattacggcggctggaaggcaacttgtatcggaaacaactcggcagcggccgtcagcatgttgaagcaggattataaagaaggagagatgaccctcaaatctgctctcgcccttgcaattaaggttttgaacaaaactatggacgtaagcaagttaagcgcagaaaaagtagagatagcaaccctgaccagggaaaacggtaagacggtcattcgcgtccttaagcagaaggaggtggagcagctcattaagaagcatgaggaagaagaggccaaagccgagcgggagaagaaagagaaggaacagaaagagaaggataaatag

SEQ ID NO: 41096 - DNA, 666 bp, Artificial Sequence
  derived and/or modified sequence
atgtctagacgatatgattcccgcactactatctttagtccggaaggtcggctgtatcaagtggagtacgccatggaagccataggtcacgccggcacatgcctgggcattctggccaatgacggagtgctattagcagcggagaggagaaatatccataaattactggacgaggtgttcttttccgaaaaaatttataagctgaacgaagatatggcctgtagcgtagcaggtatcactagcgacgccaatgttctgaccaatgagctgcgattgattgcacagcgctacctgctgcagtaccaggagccgatcccctgcgaacaacttgtaacagcattatgcgatattaagcaagcctatacacagtttggcggcaagcgcccgtttggcgtgtctctgctttacattgggtgggacaagcactatgggtttcagttataccagagcgacccttctgggaactatgggggctggaaggctacatgcattggcaacaactccgccgccgccgtgtcaatgttaaaacaggattataaagagggggagatgactttgaagtcggcgcttgcgttggccataaaggtgctcaacaagactatggatgtctcaaaattgtctgcggagaaagtcgagatagctacactcactcgggagaacggatag

SEQ ID NO: 41097 - DNA, 630 bp, Artificial Sequence
  derived and/or modified sequence
atgtcccgtcgctacgactctcggaccacgatcttcagcccagaaggccgcctgtatcaagtcgaatacgccatggaggctataggccatgctggtacatgcctgggtatactcgccaatgatggagtcctgctagctgccgaacgaagaaatatccacaaacttttggatgaagttttcttctcggagaagatctacaagcttaacgaggacatggcctgttcagtcgcaggcattacttccgacgcaaatgtgctgaccaatgaactgagattaattgcgcagcgctatctgctccagtatcaggaacctatcccctgcgagcaacttgtgacagctctttgtgacatcaaacaggcctatacacagtttggggggaaaagaccattcggggtatccctgctatacattgggtgggacaaacactatggttttcagctgtatcagagtgatccctccggaaactacggcggctggaaagctacttgtatagggaataatagcgcggcagcagtctccatgctgaagcaggattataaagagggagaaatgaccctgaagtccgctttggccctggcaatcaaggtactgaacaagaccatggacgtgtctaagctctctgccgaatag

SEQ ID NO: 41098 - DNA, 693 bp, Artificial Sequence
  derived and/or modified sequence
atgtcccggcggtatgactctagaacgacaatcttttcccccgaagccgaaagaaggaacatacacaaactgctcgacgaggtattcttttccgaaaaaatttataaattgaacgaagacatggcctgcagcgtggccggcatcaccagcgatgcaaacgtgctcaccaatgaactcagactgatcgcccagcgctaccttctccagtaccaggaaccaataccctgtgaacagctcgtgacggcactgtgtgacatcaaacaagcatatacacagttcggtgggaaacgccccttcggcgtttctctgctttacattggctgggataagcattatgggtttcagctctaccagtcggacccatctggcaattacggcggctggaaagcgacctgcataggcaacaattctgcggccgccgtgtcaatgctcaagcaagattataaggagggagaaatgaccttaaagagcgcgctggctctggcgattaaagtattgaacaaaaccatggacgtatcaaaactctctgccgagaaagttgaaattgcgaccctgacaagggaaaatgggaagactgttatcagggtactcaaacagaaagaggtcgagcagttgattaaaaaacacgaggaggaggaagccaaggcagagcgggagaagaaagaaaaagagcagaaagagaaggacaaatag

SEQ ID NO: 41099 - DNA, 711 bp, Artificial Sequence
  derived and/or modified sequence
atgtcacgtcgctatgattctcgaactaccatcttctcacctgaaggaaggctctaccaggttgagtacgcaatggaggctatcggacatgccggaacctgcctggggatcttagccaacgatggggtgctcttggcagctgagcgccgaaatatccacaaactgctcgacgaagtatttttctctgagaagatatataagctgaatgaggacatggcctgctctgttgccggaataacttccgatgccaatgtcttgactaacgaactccgacttatcgcacagagatacctcctgcagtatcaggagcctattccttgcgaacagttggttacagcattgtgcgacataaaacaagcgtatactcagtttgggggcaagcgaccattcggtgtgagcttgctgtatattggttgggacaaacactacgggtttcagctctaccagagcgacccctccgggaactacggaggatggaaggccacttgtatcggcaacaactctgcagcggcggtatccatgctgaagcaagactacaaagagggggaaatgaccctgaagtccgccctagccctggccataaaggtgctaaataaaactatggacgtgtctaagctgagcgccgaaaaggttgagattgcgactctcacgcgagagaacggaaagacagttattcgggttcttaagcagaaagaggttgagcagctgtag

SEQ ID NO: 41100 - DNA, 786 bp, Artificial Sequence
  derived and/or modified sequence
atgagcagaagatatgacagcaggaccaccatcttcagccctgagggccgcctgtaccaggtggagtatgccatggaggccatcggccatgctggcacctgcctgggcatcctggccaatgatggagtgctgctggccgctgagaggaggaacatccacaagctgctggatgaggtgttcttcagcgagaagatctacaagctgaatgaagacatggcctgcagcgtggccggcatcaccagtgatgccaacgtgctgaccaatgagctgcggctgattgcccagcgctacctgctgcagtaccaggagcccatcccctgtgagcagctggtgacagccctgtgtgacatcaagcaggcctacacccagtttggaggcaagaggcccttcggcgtgtccctgctgtacatcggctgggacaagcactacggcttccagctgtaccagagcgaccccagcggcaactacggcggctggaaggccacctgcatcggcaacaacagcgctgctgctgtgtccatgctgaagcaggactacaaggagggggagatgaccctgaagagcgccctggccctggccatcaaggtgctgaacaagaccatggatgtgtccaagctgtctgctgagaaggtggagatcgccaccctgaccagagaaaatggcaagacagtcatccgggtgctgaagcagaaggaggtggagcagctgatcaagaagcatgaggaggaggaggccaaggccgagcgggagaagaaggagaaggagcagaaggagaaggacaagtag

SEQ ID NO: 41101 - DNA, 666 bp, Artificial Sequence
  derived and/or modified sequence
atgagcagaagatatgacagcaggaccaccatcttcagccctgagggccgcctgtaccaggtggagtatgccatggaggccatcggccatgctggcacctgcctgggcatcctggccaatgatggagtgctgctggccgctgagaggaggaacatccacaagctgctggatgaggtgttcttcagcgagaagatctacaagctgaatgaagacatggcctgcagcgtggccggcatcaccagtgatgccaacgtgctgaccaatgagctgcggctgattgcccagcgctacctgctgcagtaccaggagcccatcccctgtgagcagctggtgacagccctgtgtgacatcaagcaggcctacacccagtttggaggcaagaggcccttcggcgtgtccctgctgtacatcggctgggacaagcactacggcttccagctgtaccagagcgaccccagcggcaactacggcggctggaaggccacctgcatcggcaacaacagcgctgctgctgtgtccatgctgaagcaggactacaaggagggggagatgaccctgaagagcgccctggccctggccatcaaggtgctgaacaagaccatggatgtgtccaagctgtctgctgagaaggtggagatcgccaccctgaccagagaaaatggatag

SEQ ID NO: 41102 - DNA, 630 bp, Artificial Sequence
  derived and/or modified sequence
atgagcagaagatatgacagcaggaccaccatcttcagccctgagggccgcctgtaccaggtggagtatgccatggaggccatcggccatgctggcacctgcctgggcatcctggccaatgatggagtgctgctggccgctgagaggaggaacatccacaagctgctggatgaggtgttcttcagcgagaagatctacaagctgaatgaagacatggcctgcagcgtggccggcatcaccagtgatgccaacgtgctgaccaatgagctgcggctgattgcccagcgctacctgctgcagtaccaggagcccatcccctgtgagcagctggtgacagccctgtgtgacatcaagcaggcctacacccagtttggaggcaagaggcccttcggcgtgtccctgctgtacatcggctgggacaagcactacggcttccagctgtaccagagcgaccccagcggcaactacggcggctggaaggccacctgcatcggcaacaacagcgctgctgctgtgtccatgctgaagcaggactacaaggagggggagatgaccctgaagagcgccctggccctggccatcaaggtgctgaacaagaccatggatgtgtccaagctgtctgctgagtag

SEQ ID NO: 41103 - DNA, 693 bp, Artificial Sequence
  derived and/or modified sequence
atgagcagaagatatgacagcaggaccaccatcttcagccctgaggccgagaggaggaacatccacaagctgctggatgaggtgttcttcagcgagaagatctacaagctgaatgaagacatggcctgcagcgtggccggcatcaccagtgatgccaacgtgctgaccaatgagctgcggctcatcgcccagcgctacctgctgcagtaccaggagcccatcccctgtgagcagctggtgacagccctgtgtgacatcaagcaggcctacacccagtttggaggcaagaggccctttggagtgtccctgctgtacatcggctgggacaagcactacggcttccagctgtaccagagcgaccccagcggcaactatggaggctggaaggccacctgcatcggcaacaacagcgctgctgctgtgtccatgctgaagcaggactacaaggagggggagatgaccctgaagagcgccctggccctggccatcaaggtgctgaacaagaccatggatgtgtccaagctgtctgctgagaaggtggagatcgccaccctgacccgggagaatggcaagacagtcatccgggtgctgaagcagaaggaggtggagcagctgatcaagaagcatgaggaggaggaggccaaggccgagcgggagaagaaggagaaggagcagaaggagaaggacaagtag

SEQ ID NO: 41104 - DNA, 711 bp, Artificial Sequence
  derived and/or modified sequence
atgagcagaagatatgacagcaggaccaccatcttcagccctgagggccgcctgtaccaggtggagtatgccatggaggccatcggccatgctggcacctgcctgggcatcctggccaatgatggagtgctgctggccgctgagaggaggaacatccacaagctgctggatgaggtgttcttcagcgagaagatctacaagctgaatgaagacatggcctgcagcgtggccggcatcaccagtgatgccaacgtgctgaccaatgagctgcggctgattgcccagcgctacctgctgcagtaccaggagcccatcccctgtgagcagctggtgacagccctgtgtgacatcaagcaggcctacacccagtttggaggcaagaggcccttcggcgtgtccctgctgtacatcggctgggacaagcactacggcttccagctgtaccagagcgaccccagcggcaactacggcggctggaaggccacctgcatcggcaacaacagcgctgctgctgtgtccatgctgaagcaggactacaaggagggggagatgaccctgaagagcgccctggccctggccatcaaggtgctgaacaagaccatggatgtgtccaagctgtctgctgagaaggtggagatcgccaccctgaccagagaaaatggcaagacagtcatccgggtgctgaagcagaaggaggtggagcagctgtag

SEQ ID NO: 41105 - DNA, 786 bp, Artificial Sequence
  derived and/or modified sequence
atgagccggcggtacgacagccggaccaccatcttcagccccgaggggcgactgtaccaggtcgagtatgccatggaggcaatcggtcacgctggaacctgcctgggtattctggccaatgacggagtgctgctggccgcagagagaaggaacattcataagctgctcgacgaagtgttcttctcagaaaagatttataaactgaacgaagacatggcctgttcagtggccgggattaccagcgacgccaacgtgctcacgaatgaactcaggctgatcgcacagcggtatctgcttcagtatcaggaacccattccatgtgaacagctggtcactgccctgtgtgacattaagcaggcttacacccagttcggcggaaagcgaccattcggcgtctccctgttgtatatcggctgggacaagcattacggctttcaattgtaccagtctgatccaagtggcaactatgggggatggaaggctacctgcattgggaataacagcgcagcagccgtttccatgctgaaacaggattacaaggaaggcgaaatgacgttaaaaagtgccctggcactggccataaaagttctcaataaaaccatggacgtgtccaaactgtccgcggagaaggtggaaattgctacattgactcgggaaaacggaaagacagtgattcgtgtcctgaaacagaaggaggtcgagcagctgatcaagaagcatgaggaagaggaagctaaggccgagcgggaaaaaaaggagaaagagcagaaagaaaaggacaagtag

SEQ ID NO: 41106 - DNA, 786 bp, Artificial Sequence
  derived and/or modified sequence
atgagccggcggtacgacagccggaccaccatcttcagccccgagggcaggctatatcaggttgagtatgcgatggaagccatcggacatgccggaacctgtctcgggatcctggcgaatgacggagtcctgctggctgctgagagaaggaatatccacaaattactggacgaggtcttttttagtgagaaaatctataagcttaatgaggacatggcatgtagtgtggccgggatcactagtgacgctaacgttttgacgaatgaactccgactgatagcgcagagatacctgttacagtatcaggagccgattccctgtgagcagctagtgaccgccttatgcgacatcaaacaagcctacacacagtttggaggaaagagaccttttggggtctccctgctgtatattggatgggataagcattacgggttccaactctaccagtctgacccctcaggtaactatggaggatggaaagcgacttgtatcggaaacaactccgctgcggccgttagcatgctcaaacaggattataaggagggagaaatgacactgaaatccgcgctggctctggcgattaaagtgctcaataagaccatggatgtctccaaattgtcagccgaaaaggttgaaatagcaacactgaccagagagaacggtaagacagtcatccgcgtactcaaacagaaggaagtcgagcagttgatcaagaagcatgaggaagaggaggcgaaggcggagcgcgagaagaaggaaaaagaacaaaaggagaaggataagtag

SEQ ID NO: 41107 - DNA, 666 bp, Artificial Sequence
  derived and/or modified sequence
atgagccggcggtacgacagccggaccaccatcttcagccccgagggaaggctgtatcaggttgaatatgctatggaggctatcgggcatgctggtacctgcctcggaatcctagcgaatgacggagttcttttggccgccgaaaggagaaacatccacaagctcctcgatgaggtcttcttctctgaaaagatctataagctcaatgaggatatggcttgttcagtggcaggcatcacaagtgatgcaaacgtgctgaccaacgaattgaggttgatcgcccagaggtatttactgcagtatcaagagcccatcccatgtgagcagctggtgaccgctctttgtgatattaaacaagcttatacccagtttggggggaagcggccatttggggttagcctcctctacattgggtgggataaacactacggattccaactgtatcagtcagaccccagtggtaactatggcggatggaaagccacctgcattggtaataactccgccgcagccgtgtccatgctgaagcaggactacaaggagggcgagatgacattaaagtccgctcttgccttggccattaaggtcctgaacaagactatggacgtatctaaacttagcgctgagaaggtggagattgcgaccctcacaagggagaatggttag

SEQ ID NO: 41108 - DNA, 630 bp, Artificial Sequence
  derived and/or modified sequence
atgagccggcggtacgacagccggaccaccatcttcagccccgagggccgcctataccaagtcgagtatgccatggaagcaattggccatgctgggacatgcttagggatcctcgccaatgacggagtgctgcttgccgctgaacggcgtaacatccacaagctgttggacgaagtgttcttttcggaaaaaatctataagctgaacgaagacatggcttgtagtgtggccggaatcacaagcgatgccaatgtcctgaccaatgaattacgcctcatcgctcaacggtaccttttacagtaccaagagcctatcccttgtgagcagctggtgactgctctgtgtgacatcaagcaagcatacacccagtttgggggtaaacgtccttttggtgtctcattgctgtacatcggatgggataagcactacgggtttcagttataccagtctgatccaagcggcaactacggcggatggaaagccacctgtataggcaacaatagcgctgctgcagtcagtatgctgaagcaagactacaaagagggggaaatgaccttaaagtcagctctggccctagctatcaaagtcctcaacaagacaatggacgtttctaaactgagcgcagagtag

SEQ ID NO: 41109 - DNA, 693 bp, Artificial Sequence
  derived and/or modified sequence
atgagccggcggtacgacagccggaccaccatcttcagccccgaggccgaacgccgcaatattcacaaattactggatgaagtgtttttctcagagaagatttacaaacttaacgaagacatggcatgttcggtggccgggattacctcagatgccaacgttctgacaaatgagctaagattgattgctcagcggtatctgctgcagtatcaggaacccatcccatgcgagcaattggtaaccgccctgtgtgatattaagcaggcttatacacagtttggtggtaagcgcccgttcggtgtttcccttctctatatcgggtgggacaaacattatggcttccaattgtatcaatccgatcctagtgggaactacggaggctggaaagccacctgtatagggaataatagcgccgcagctgtgagtatgctaaagcaagactataaagaaggcgagatgacgttaaaatccgccctggccttggctatcaaggtgctgaacaagaccatggacgtgtcgaagttatcagccgagaaagtggaaatcgcaaccctaacgcgagagaacggcaagactgtcattcgggtcctaaagcagaaggaagtagagcagctgattaagaagcatgaggaggaggaagccaaggcagaacgggagaagaaggagaaagaacagaaagaaaaagacaaatag

SEQ ID NO: 41110 - DNA, 711 bp, Artificial Sequence
  derived and/or modified sequence
atgagccggcggtacgacagccggaccaccatcttcagccccgagggacggttatatcaagtggaatacgccatggaggctatcgggcacgccggcacatgcctcggcatcttggcaaacgatggagttttactcgctgcggaacggagaaacatccacaagcttctagacgaggtgttttttagtgagaagatttataagctgaacgaggacatggcttgtagcgttgccgggatcacctccgatgccaacgtcctgacaaacgagctccgcttgattgctcaacggtatttgctacagtatcaggaaccaatcccgtgcgaacaactagtgacagcgctgtgtgacataaaacaagcttatacgcaattcggcgggaagagaccatttggtgttagcctgttgtatattggctgggataagcattatggatttcaactgtatcagtctgatccctctggcaattacggcggctggaaggctacgtgcataggtaacaacagcgcagccgcagttagcatgcttaagcaggactacaaagaaggggaaatgacactgaagagcgccctggccctcgctatcaaagtgctgaacaaaactatggacgtaagcaagctcagcgccgaaaaggtcgagatcgctaccctgacacgcgaaaacggaaagaccgtgattcgagtgctcaagcaaaaggaggtggaacaactttag

SEQ ID NO: 41111 - DNA, 786 bp, Artificial Sequence
  derived and/or modified sequence
atgtcacgaagatacgattctcgcacaacaatcttcagtccggaaggtaggctctatcaggtggagtatgccatggaagcgatcggccacgctgggacttgcctgggaatcctggccaatgacggagttctgctggctgccgagcgccgaaacatccataaacttctggacgaagtcttttttagcgagaagatttacaaactcaacgaggatatggcatgctccgtagctggaataacttcagatgccaatgtgctcaccaacgaactgcgactgatcgcgcagcgctacctgctccagtaccaggagcctataccttgtgaacagctggttacagctttgtgtgatatcaaacaagcgtacacacagtttggcggaaaaaggccctttggcgtttcccttctttatataggttgggacaaacactacggcttccaactgtatcagagcgacccttccggaaattatgggggatggaaagctacatgcattggcaataacagcgcagctgccgtcagtatgctgaagcaagattataaggagggagagatgaccctaaagagtgctctggccctcgctatcaaggtactcaataagacaatggacgtcagcaaactgtctgcagagaaggtcgagattgccactctcacccgagagaacggtaagaccgtgattcgcgtgctaaaacaaaaggaagtggaacagcttatcaaaaagcacgaagaagaggaggccaaggcagagcgagagaaaaaggagaaagaacagaaggaaaaagacaagtag

SEQ ID NO: 41112 - DNA, 786 bp, Artificial Sequence
  derived and/or modified sequence
atgtcacggagatacgactcccgcaccaccatatttagccctgaagggaggctgtaccaggtcgagtacgctatggaagccattgggcatgcgggaacatgtttaggcattctagccaacgacggtgtcctgttagccgctgaaaggcgtaatatccacaagttgttagatgaagtgttttttagtgagaagatttacaagctgaatgaagacatggcttgtagcgtagcgggaataactagcgatgcaaatgttctgaccaacgaattgagactgatcgcacagcgctatctgcttcagtatcaggaacctatcccctgcgaacagctggtgacagccctttgcgacattaaacaagcctatacccagtttgggggaaagagaccatttggagtcagtctcctgtacatcggctgggacaaacactatggcttccaattatatcagagtgatccctctggaaactacggtggatggaaggccacttgtatcggaaacaacagtgccgcagccgtctccatgctcaagcaggattataaggagggcgagatgacacttaagtccgccctagctctagcgatcaaagtcctgaataagaccatggatgttagcaagttgtcagctgaaaaagtagaaatcgccacactcaccagagagaacggcaagacagttatacgcgtcctaaaacagaaggaggttgaacagttgattaaaaaacacgaggaggaggaggccaaagcggaaagagaaaagaaagaaaaggagcagaaagaaaaggataaatag

SEQ ID NO: 41113 - DNA, 666 bp, Artificial Sequence
  derived and/or modified sequence
atgtccaggaggtatgacagccgcactaccattttttctccggaggggagactataccaagtggaatacgctatggaggctataggacacgcaggcacttgcctcggcatacttgctaatgatggtgtgctgctggcagcggaaaggagaaatatacataaacttctcgacgaggtcttcttcagcgaaaagatctacaagctgaatgaggatatggcgtgtagtgtggctggtatcacctcagacgctaacgtgcttacaaacgagctgcgcctgattgcacagaggtacttactgcagtatcaggagccaatcccatgtgaacaattggtgacagccctgtgtgatatcaaacaggcttatactcagtttggaggcaaacgaccgtttggagttagcctgttgtacattggatgggataaacactacggctttcagctgtaccagtcagaccctagcggaaactacgggggatggaaggcaacttgtatcgggaataactcggcggctgctgtctctatgctgaaacaggattacaaggaaggtgagatgaccctgaagtccgccttagcgctcgcgattaaagtattgaacaagaccatggatgtgtccaagctgagcgccgagaaggtagagatcgccactttgactagggaaaatggatag

SEQ ID NO: 41114 - DNA, 630 bp, Artificial Sequence
  derived and/or modified sequence
atgagcaggcgctatgattcaagaacaaccatcttctcgcctgaagggagactttaccaggtcgagtacgctatggaagcgatcgggcatgcgggaacttgtcttggaatcctggcaaacgacggcgtgctgttggccgctgagcggaggaacatccacaaattactggacgaagtattttttagtgagaagatatacaagcttaacgaagatatggcctgttccgtcgctgggatcacatcagatgcaaacgtgctaactaatgaactgcgcctcatcgcgcagagatacctgttgcagtatcaggagcccataccctgtgaacaactagtgacagcgctatgcgacatcaaacaggcttatacccagtttggaggcaaacgcccatttggggtctcccttctctatattggttgggacaaacattacggatttcaactgtaccagagcgaccctagtggaaattacggcggatggaaggctacttgcattgggaacaactctgctgccgctgtgtcgatgctgaagcaagactataaggaaggggagatgaccctgaagtcggcactcgcactggcaatcaaagtgcttaataaaaccatggacgtctctaaattgtcggcagagtag

SEQ ID NO: 41115 - DNA, 693 bp, Artificial Sequence
  derived and/or modified sequence
atgtcccgtcgctatgacagccggacgactatcttcagcccagaggcagaacggaggaatatccataagttactcgacgaggttttctttagcgagaaaatttataaactgaacgaggacatggcatgttctgtggccggtattacctcagatgccaatgttctgacgaatgaactcagactcattgcacaacgctatctcctgcagtaccaggagccgattccatgcgagcagctggtcaccgcactgtgcgatatcaaacaggcttacacccagttcgggggaaaaaggccttttggagtgtcgctgctgtacattggatgggacaaacattacggcttccaactgtatcaaagcgatccttccggcaattatggtggatggaaggctacgtgtattgggaataattcagccgctgccgtttccatgcttaagcaggattataaggaaggggagatgaccctgaagtcagctcttgctctggcaataaaagtcctgaataaaactatggacgtgtctaagctctcagctgagaaagtggagatcgccaccctaactcgtgaaaacggtaagactgtaattcgagtgcttaaacagaaggaggtggagcagctgatcaagaaacacgaggaggaagaggccaaggcggaacgagaaaaaaaggaaaaagagcagaaagagaaagataaatag

SEQ ID NO: 41116 - DNA, 711 bp, Artificial Sequence
  derived and/or modified sequence
atgagccgcagatatgactccaggaccaccatctttagtccagaaggtaggttataccaggtggagtacgccatggaggcgattgggcatgccggtacatgtctcggtatcttggctaatgatggtgtactgctcgccgcagaacgcaggaatatccataagctacttgatgaagtgtttttttctgagaagatctacaaactaaatgaggacatggcctgtagcgtcgctgggatcacttctgacgccaatgtactgactaacgagctgaggttgattgcacagcgttacctactgcaataccaggagccaataccttgcgagcagctcgttaccgctctgtgcgacatcaagcaagcatacacacagttcggaggaaagcggccattcggtgtgagtctcctctacattgggtgggacaagcattatggtttccaactgtatcaatctgatccatcagggaattacggaggctggaaggccacttgtattggcaacaactcagcggctgcagtcagcatgttgaagcaggactacaaggaaggcgagatgacccttaagtccgccctggccctggctattaaggtgctgaataagactatggatgtatccaagctcagtgctgagaaagtggaaattgccactcttacaagggaaaacgggaagactgtaatacgcgtcctgaaacagaaggaggtggaacagttatag

SEQ ID NO: 41117 - DNA, 1254 bp, Artificial Sequence
  derived and/or modified sequence
aacccagcggttctgcgcatgcgcgggggccatattagcagcggttattcggtgagcggtggtggtttattcttccgtggagttaagggctccgtggacatctcaggtcttcagggtcttccatctggaactatataaagttcagaaaacatgtctcgaagatatgactccaggaccactatattttctccagaaggtcgcttataccaagttgaatatgccatggaagctattggacatgcaggcacctgtttgggaattttagcaaatgatggtgttttgcttgcagcagagagacgcaacatccacaagcttcttgatgaagtctttttttctgaaaaaatttataaactcaatgaggacatggcttgcagtgtggcaggcataacttctgatgctaatgttctgactaatgaactaaggctcattgctcaaaggtatttattacagtatcaggagccaataccttgtgagcagttggttacagcgctgtgtgatatcaaacaagcttatacacaatttggaggaaaacgtccctttggtgtttcattgctgtacattggctgggataagcactatggctttcagctctatcagagtgaccctagtggaaattacgggggatggaaggccacatgcattggaaataatagcgctgcagctgtgtcaatgttgaaacaagactataaagaaggagaaatgaccttgaagtcagcacttgctttagctatcaaagtactaaataagaccatggatgttagtaaactctctgctgaaaaagtggaaattgcaacactaacaagagagaatggaaagacagtaatcagagttctcaaacaaaaagaagtggagcagttgatcaaaaaacatgaggaagaagaagccaaagctgagcgtgagaagaaagaaaaagaacagaaagaaaaggataaatagaatcagagattttattactcatttggggcaccatttcagtgtaaaagcagtcctactcttccacactaggaaggctttactttttttaactggtgcagtgggaaaataggacattacatactgaattgggtccttgtcatttctgtccaattgaatactttattgtaacgatgatggttacccttcatggacgtcttaatcttccacacacatcccctttttttggaataaaatttggaaaatggaaatgaaggaataaattctctgtagcagtaattgttaaatatacaaaaactgacagggcgattactttttgca

SEQ ID NO: 41118 - DNA, 1019 bp, Artificial Sequence
  derived and/or modified sequence
gcgcatgcgcgggggccatattagcagcggttattcggtgagcggtggtggtttattcttccgtggagttaagggctccgtggacatctcaggtcttcagggtcttccatctggaactatataaagttcagaaaacatgtctcgaagatatgactccaggaccactatattttctccagaagggacatggcttgcagtgtggcaggcataacttctgatgctaatgttctgactaatgaactaaggctcattgctcaaaggtatttattacagtatcaggagccaataccttgtgagcagttggttacagcgctgtgtgatatcaaacaagcttatacacaatttggaggaaaacgtccctttggtgtttcattgctgtacattggctgggataagcactatggctttcagctctatcagagtgaccctagtggaaattacgggggatggaaggccacatgcattggaaataatagcgctgcagctgtgtcaatgttgaaacaagactataaagaaggagaaatgaccttgaagtcagcacttgctttagctatcaaagtactaaataagaccatggatgttagtaaactctctgctgaaaaagtggaaattgcaacactaacaagagagaatggaaagacagtaatcagagttctcaaacaaaaagaagtggagcagttgatcaaaaaacatgaggaagaagaagccaaagctgagcgtgagaagaaagaaaaagaacagaaagaaaaggataaatagaatcagagattttattactcatttggggcaccatttcagtgtaaaagcagtcctactcttccacactaggaaggctttactttttttaactggtgcagtgggaaaataggacattacatactgaattgggtccttgtcatttctgtccaattgaatactttattgtaacgatgatggttacccttcatggacgtcttaatcttccacacacatcccctttttttggaataaaatttggaaaatggaaatgaaggaataaa

SEQ ID NO: 41119 - DNA, 1094 bp, Artificial Sequence
  derived and/or modified sequence
ggttctgcgcatgcgcgggggccatattagcagcggttattcggaactatataaagttcagaaaacatgtctcgaagatatgactccaggaccactatattttctccagaaggtcgcttataccaagttgaatatgccatggaagctattggacatgcaggcacctgtttgggaattttagcaaatgatggtgttttgcttgcagcagagagacgcaacatccacaagcttcttgatgaagtctttttttctgaaaaaatttataaactcaatgaggacatggcttgcagtgtggcaggcataacttctgatgctaatgttctgactaatgaactaaggctcattgctcaaaggtatttattacagtatcaggagccaataccttgtgagcagttggttacagcgctgtgtgatatcaaacaagcttatacacaatttggaggaaaacgtccctttggtgtttcattgctgtacattggctgggataagcactatggctttcagctctatcagagtgaccctagtggaaattacgggggatggaaggccacatgcattggaaataatagcgctgcagctgtgtcaatgttgaaacaagactataaagaaggagaaatgaccttgaagtcagcacttgctttagctatcaaagtactaaataagaccatggatgttagtaaactctctgctgaaaaagtggaaattgcaacactaacaagagagaatggaaagacagtaatcagagttctcaaacaaaaagaagtggagcagttgatcaaaaaacatgaggaagaagaagccaaagctgagcgtgagaagaaagaaaaagaacagaaagaaaaggataaatagaatcagagattttattactcatttggggcaccatttcagtgtaaaagcagtcctactcttccacactaggaaggctttactttttttaactggtgcagtgggaaaataggacattacatactgaattgggtccttgtcatttctgtccaattgaatactttattgtaacgatgatggttacccttcatggacgtcttaatcttccacacacatcccctttttttggaataaaatttggaaaa

SEQ ID NO: 41120 - DNA, 786 bp, Artificial Sequence
  derived and/or modified sequence
agtgccaagcctggacgccggggcccgcgagggggcgggctgagggtgggggtctgtgggcaggaccgagagttggggtggcttccgtcctcaggagttcggaactatataaagttcagaaaacatgtctcgaagatatgactccaggaccactatattttctccagaaggtcgcttataccaagttgaatatgccatggaagctattggacatgcaggcacctgtttgggaattttagcaaatgatggtgttttgcttgcagcagagagacgcaacatccacaagcttcttgatgaagtctttttttctgaaaaaatttataaactcaatgaggacatggcttgcagtgtggcaggcataacttctgatgctaatgttctgactaatgaactaaggctcattgctcaaaggtatttattacagtatcaggagccaataccttgtgagcagttggttacagcgctgtgtgatatcaaacaagcttatacacaatttggaggaaaacgtccctttggtgtttcattgctgtacattggctgggataagcactatggctttcagctctatcagagtgaccctagtggaaattacgggggatggaaggccacatgcattggaaataatagcgctgcagctgtgtcaatgttgaaacaagactataaagaaggagaaatgaccttgaagtcagcacttgctttagctatcaaagtactaaataagaccatggatgttagtaaactctctgctgaaaaagtggaaattgcaacactaacaagagagaatgg

SEQ ID NO: 41121 - DNA, 756 bp, Artificial Sequence
  derived and/or modified sequence
ttagctctcccggaggtgccggtgaactcaaaatagtgctgtgcccggcgtcaggcgtggagacaacagaaagttgtgcttaaagctcgaatcagaaatccccggaactatataaagttcagaaaacatgtctcgaagatatgactccaggaccactatattttctccagaaggtcgcttataccaagttgaatatgccatggaagctattggacatgcaggcacctgtttgggaattttagcaaatgatggtgttttgcttgcagcagagagacgcaacatccacaagcttcttgatgaagtctttttttctgaaaaaatttataaactcaatgaggacatggcttgcagtgtggcaggcataacttctgatgctaatgttctgactaatgaactaaggctcattgctcaaaggtatttattacagtatcaggagccaataccttgtgagcagttggttacagcgctgtgtgatatcaaacaagcttatacacaatttggaggaaaacgtccctttggtgtttcattgctgtacattggctgggataagcactatggctttcagctctatcagagtgaccctagtggaaattacgggggatggaaggccacatgcattggaaataatagcgctgcagctgtgtcaatgttgaaacaagactataaagaaggagaaatgaccttgaagtcagcacttgctttagctatcaaagtactaaataagaccatggatgttagtaaactctctgctgaaaa

SEQ ID NO: 41122 - DNA, 944 bp, Artificial Sequence
  derived and/or modified sequence
cccgccccaacccagcggttctgcgcatgcgcgggggccatattagcagcggttattcggtgagcggtggtggtttattcttccgtggagttaagggctccgtggacatctcaggtcttcagggtcttccatctggaactatataaagttcagaaaacatgtctcgaagatatgactccaggaccactatattttctccagaagcagagagacgcaacatccacaagcttcttgatgaagtctttttttctgaaaaaatttataaactcaatgaggacatggcttgcagtgtggcaggcataacttctgatgctaatgttctgactaatgaactaaggctcattgctcaaaggtatttattacagtatcaggagccaataccttgtgagcagttggttacagcgctgtgtgatatcaaacaagcttatacacaatttggaggaaaacgtccctttggtgtttcattgctgtacattggctgggataagcactatggctttcagctctatcagagtgaccctagtggaaattacgggggatggaaggccacatgcattggaaataatagcgctgcagctgtgtcaatgttgaaacaagactataaagaaggagaaatgaccttgaagtcagcacttgctttagctatcaaagtactaaataagaccatggatgttagtaaactctctgctgaaaaagtggaaattgcaacactaacaagagagaatggaaagacagtaatcagagttctcaaacaaaaagaagtggagcagttgatcaaaaaacatgaggaagaagaagccaaagctgagcgtgagaagaaagaaaaagaacagaaagaaaaggataaatagaatcagagattttattactcatttggggcaccatttcagtgtaaaagcagtcctactcttccacactaggaaggctttactttttttaactgg

SEQ ID NO: 41123 - DNA, 815 bp, Artificial Sequence
  derived and/or modified sequence
ccacattataatctatgactgcctctctcacctaactgccagtattagcttttcaggacaggaactggttttacacattttggaactatataaagttcagaaaacatgtctcgaagatatgactccaggaccactatattttctccagaaggtcgcttataccaagttgaatatgccatggaagctattggacatgcaggcacctgtttgggaattttagcaaatgatggtgttttgcttgcagcagagagacgcaacatccacaagcttcttgatgaagtctttttttctgaaaaaatttataaactcaatgaggacatggcttgcagtgtggcaggcataacttctgatgctaatgttctgactaatgaactaaggctcattgctcaaaggtatttattacagtatcaggagccaataccttgtgagcagttggttacagcgctgtgtgatatcaaacaagcttatacacaatttggaggaaaacgtccctttggtgtttcattgctgtacattggctgggataagcactatggctttcagctctatcagagtgaccctagtggaaattacgggggatggaaggccacatgcattggaaataatagcgctgcagctgtgtcaatgttgaaacaagactataaagaaggagaaatgaccttgaagtcagcacttgctttagctatcaaagtactaaataagaccatggatgttagtaaactctctgctgaaaaagtggaaattgcaacactaacaagagagaatggaaagacagtaatcagagttctcaaacaaaaagaagtggagcagttgat

SEQ ID NO: 41124 - DNA, 786 bp, Artificial Sequence
  derived and/or modified sequence
atgagccgaagatatgattcccggacgaccattttctcccccgaagggcgtctctaccaggttgaatatgcaatggaggcaatcggacatgcagggacttgcctgggaatcttggctaatgatggtgtgctgctggcagcagagaggcgaaatatacataagctacttgacgaagttttcttttccgagaagatatataagttaaacgaggacatggcatgttcagtcgcagggatcactagtgacgcaaatgttctgacgaacgagttgcgactgatcgcccagagatacttgctacaataccaagaacctattccttgcgaacaacttgtcaccgcactctgtgacatcaaacaggcttatacacagttcggaggaaagaggccattcggagtgagtttactgtatattggatgggacaaacattatggattccaactctatcaaagcgacccctcgggtaattacgggggttggaaggcgacctgtattggcaacaatagcgcagccgctgtttcaatgcttaagcaggactacaaagaaggagaaatgaccctgaagtcagccttggctcttgccattaaggtgctgaataaaacaatggatgtgtccaagctgtccgcagagaaagtggagattgcaactttaacaagagaaaatggaaagaccgtgatccgggtcctcaagcagaaagaggtagagcagctgattaagaagcatgaagaggaggaggccaaagcagagagagagaagaaagagaaagaacaaaaggagaaagacaaatag

SEQ ID NO: 41125 - DNA, 786 bp, Artificial Sequence
  derived and/or modified sequence
atgagccgaagatatgattcccggacgaccattttctcccccgaagggcgtctctaccaggttgaatatgcaatggaggcaatcggacatgcagggacttgcctgggaatcttggctaatgatggtgtgctgctggcagcagagaggcgaaatatacataagctacttgacgaagttttcttttccgagaagatatataagttaaacgaggacatggcatgttcagtcgcagggatcactagtgacgcaaatgttctgacgaacgagttgcgactgatcgcccagagatacttgctacaatatcaagaacctatcccctgcgagcaactcgtgaccgccctgtgtgacataaagcaggcctatactcagtttggtgggaagaggccttttggagtgtccttactgtacatcggatgggataaacactatgggtttcagctgtatcagtccgacccatctggcaattatggaggatggaaagcaacttgcatcggcaacaatagtgcagccgcagtgagcatgctaaagcaagactacaaagaaggcgaaatgacacttaaaagtgcacttgccctggctatcaaagtgctcaataaaactatggatgtatctaaacttagcgctgagaaggtagagatcgcaaccctgacccgggaaaacggtaagacagtgatccgcgttctaaagcaaaaagaggtggaacagttgatcaagaaacacgaagaagaagaggctaaagcagaaagagagaaaaaagaaaaggagcaaaaggagaaggataaatag

SEQ ID NO: 41126 - DNA, 786 bp, Artificial Sequence
  derived and/or modified sequence
atgagcagaagatacgacagcagaaccaccatcttcagccccgagggcagactgtaccaggtggagtacgccatggaggccatcggccacgccggcacctgcctgggcatcctggccaacgacggcgtgctgctggccgccgagagaagaaacatccacaagctgctggacgaggtgttcttcagcgagaagatctacaagctgaacgaggacatggcctgcagcgtggccggcatcaccagcgacgccaacgtgctgaccaacgagctgagactgatcgcccagagatacctgctgcagtaccaggagcccatcccctgcgagcagctggtgaccgccctgtgcgacatcaagcaggcctacacccagttcggcggcaagagacccttcggcgtgagcctgctgtacatcggctgggacaagcactacggcttccagctgtaccagagcgaccccagcggcaactacggcggctggaaggccacctgcatcggcaacaacagcgccgccgccgtgagcatgctgaagcaggactacaaggagggcgagatgaccctgaagagcgccctggccctggccatcaaggtgctgaacaagaccatggacgtgagcaagctgagcgccgagaaggtggagatcgccaccctgaccagagagaacggcaagaccgtgatcagagtgctgaagcagaaggaggtggagcagctgatcaagaagcacgaggaggaggaggccaaggccgagagagagaagaaggagaaggagcagaaggagaaggacaagtag

SEQ ID NO: 41127 - DNA, 666 bp, Artificial Sequence
  derived and/or modified sequence
atgagcagaagatacgacagcagaaccaccatcttcagccccgagggcagactgtaccaggtggagtacgccatggaggccatcggccacgccggcacctgcctgggcatcctggccaacgacggcgtgctgctggccgccgagagaagaaacatccacaagctgctggacgaggtgttcttcagcgagaagatctacaagctgaacgaggacatggcctgcagcgtggccggcatcaccagcgacgccaacgtgctgaccaacgagctgagactgatcgcccagagatacctgctgcagtaccaggagcccatcccctgcgagcagctggtgaccgccctgtgcgacatcaagcaggcctacacccagttcggcggcaagagacccttcggcgtgagcctgctgtacatcggctgggacaagcactacggcttccagctgtaccagagcgaccccagcggcaactacggcggctggaaggccacctgcatcggcaacaacagcgccgccgccgtgagcatgctgaagcaggactacaaggagggcgagatgaccctgaagagcgccctggccctggccatcaaggtgctgaacaagaccatggacgtgagcaagctgagcgccgagaaggtggagatcgccaccctgaccagagagaacggctag

SEQ ID NO: 41128 - DNA, 630 bp, Artificial Sequence
  derived and/or modified sequence
atgagcagaagatacgacagcagaaccaccatcttcagccccgagggcagactgtaccaggtggagtacgccatggaggccatcggccacgccggcacctgcctgggcatcctggccaacgacggcgtgctgctggccgccgagagaagaaacatccacaagctgctggacgaggtgttcttcagcgagaagatctacaagctgaacgaggacatggcctgcagcgtggccggcatcaccagcgacgccaacgtgctgaccaacgagctgagactgatcgcccagagatacctgctgcagtaccaggagcccatcccctgcgagcagctggtgaccgccctgtgcgacatcaagcaggcctacacccagttcggcggcaagagacccttcggcgtgagcctgctgtacatcggctgggacaagcactacggcttccagctgtaccagagcgaccccagcggcaactacggcggctggaaggccacctgcatcggcaacaacagcgccgccgccgtgagcatgctgaagcaggactacaaggagggcgagatgaccctgaagagcgccctggccctggccatcaaggtgctgaacaagaccatggacgtgagcaagctgagcgccgagtag

SEQ ID NO: 41129 - DNA, 693 bp, Artificial Sequence
  derived and/or modified sequence
atgagcagaagatacgacagcagaaccaccatcttcagccccgaggccgagagaagaaacatccacaagctgctggacgaggtgttcttcagcgagaagatctacaagctgaacgaggacatggcctgcagcgtggccggcatcaccagcgacgccaacgtgctgaccaacgagctgagactgatcgcccagagatacctgctgcagtaccaggagcccatcccctgcgagcagctggtgaccgccctgtgcgacatcaagcaggcctacacccagttcggcggcaagagacccttcggcgtgagcctgctgtacatcggctgggacaagcactacggcttccagctgtaccagagcgaccccagcggcaactacggcggctggaaggccacctgcatcggcaacaacagcgccgccgccgtgagcatgctgaagcaggactacaaggagggcgagatgaccctgaagagcgccctggccctggccatcaaggtgctgaacaagaccatggacgtgagcaagctgagcgccgagaaggtggagatcgccaccctgaccagagagaacggcaagaccgtgatcagagtgctgaagcagaaggaggtggagcagctgatcaagaagcacgaggaggaggaggccaaggccgagagagagaagaaggagaaggagcagaaggagaaggacaagtag

SEQ ID NO: 41130 - DNA, 711 bp, Artificial Sequence
  derived and/or modified sequence
atgagcagaagatacgacagcagaaccaccatcttcagccccgagggcagactgtaccaggtggagtacgccatggaggccatcggccacgccggcacctgcctgggcatcctggccaacgacggcgtgctgctggccgccgagagaagaaacatccacaagctgctggacgaggtgttcttcagcgagaagatctacaagctgaacgaggacatggcctgcagcgtggccggcatcaccagcgacgccaacgtgctgaccaacgagctgagactgatcgcccagagatacctgctgcagtaccaggagcccatcccctgcgagcagctggtgaccgccctgtgcgacatcaagcaggcctacacccagttcggcggcaagagacccttcggcgtgagcctgctgtacatcggctgggacaagcactacggcttccagctgtaccagagcgaccccagcggcaactacggcggctggaaggccacctgcatcggcaacaacagcgccgccgccgtgagcatgctgaagcaggactacaaggagggcgagatgaccctgaagagcgccctggccctggccatcaaggtgctgaacaagaccatggacgtgagcaagctgagcgccgagaaggtggagatcgccaccctgaccagagagaacggcaagaccgtgatcagagtgctgaagcagaaggaggtggagcagctgtag

SEQ ID NO: 41131 - DNA, 573 bp, Artificial Sequence
  derived and/or modified sequence
atggcctgctccgtggccggcattacttctgacgcgaacgtcttgaccaatgaactacgactcatcgcccaacggtatcttttacagtatcaggagccaatcccatgcgaacagctagtgacagctctgtgtgacattaagcaggcatacacacagttcggtggtaagaggccattcggagtgtcgctactttatattggatgggataagcattatggtttccagctgtaccagtccgatcccagcggaaattacggaggctggaaagccacttgtataggaaacaatagtgctgccgccgtaagcatgctgaagcaggactacaaagaaggcgagatgacccttaagtcagcactagctctggccattaaggtccttaacaagaccatggatgtctcaaaactgagcgcagagaaggtcgaaattgctacactgacacgggaaaacggtaaaactgtgattcgtgttctcaagcagaaagaggtggagcagctcatcaaaaaacacgaggaggaagaagccaaggccgaacgcgaaaaaaaggaaaaggagcaaaaagagaaagataagtag

SEQ ID NO: 41132 - DNA, 573 bp, Artificial Sequence
  derived and/or modified sequence
atggcctgcagcgtggccggcatcaccagtgatgccaacgtgctgaccaatgagctgcggctcatcgcccagcgctacctgctgcagtaccaggagcccatcccctgtgagcagctggtgacagccctgtgtgacatcaagcaggcctacacccagtttggaggcaagaggccctttggagtgtccctgctgtacatcggctgggacaagcactacggcttccagctgtaccagagcgaccccagcggcaactatggaggctggaaggccacctgcatcggcaacaacagcgctgctgctgtgtccatgctgaagcaggactacaaggagggggagatgaccctgaagagcgccctggccctggccatcaaggtgctgaacaagaccatggatgtgtccaagctgtctgctgagaaggtggagatcgccaccctgacccgggagaatggcaagacagtcatccgggtgctgaagcagaaggaggtggagcagctgatcaagaagcatgaggaggaggaggccaaggccgagcgggagaagaaggagaaggagcagaaggagaaggacaagtag

SEQ ID NO: 41133 - DNA, 573 bp, Artificial Sequence
  derived and/or modified sequence
atggcctgcagcgtggccggcatcaccagcgacgccaacgtgctgacgaacgagctgaggctgatagcccagaggtacctcctgcagtaccaggagccaattccctgcgagcagctggtgacagccctgtgcgacattaagcaggcctacacccaattcggcggcaagaggccatttggcgtgtctttgctctacattggttgggataagcattatggcttccagttataccagagtgacccaagcggcaattatgggggatggaaggcaacttgtataggaaataattccgccgccgcagtaagtatgctgaagcaggactataaagagggtgagatgaccctgaagtcggctctggcactggcaattaaagtattaaacaagaccatggatgtctccaagctgtccgcagagaaagttgagatagcaacgcttactcgggagaacggtaagactgtgataagagtcctaaaacagaaagaagtcgagcagttgattaaaaagcacgaggaagaagaggcaaaggccgaaagagagaaaaaggaaaaggagcagaaggaaaaggacaaatag

SEQ ID NO: 41134 - DNA, 573 bp, Artificial Sequence
  derived and/or modified sequence
atggcatgctccgtggccggaataacttctgatgccaacgtgctcacaaatgagctgaggctcatcgctcagcgctatttactgcagtaccaggaaccgatcccatgcgagcagctggtgacagcactatgtgacattaagcaggcctacacacagttcggcggaaaacgtccatttggggtaagtctcctctacattgggtgggacaagcactacgggtttcaactataccagtccgatccttccgggaactatgggggatggaaggccacttgcatcggcaacaattccgcagcggctgtgagtatgttgaagcaagattataaagagggagagatgaccctgaagtctgcactcgccctggccatcaaggtactaaacaagaccatggacgtgtccaagctttcagccgagaaagtggagatcgccacactgacaagggagaatgggaagaccgtgattcgggtgctgaagcagaaggaggtggaacaattgatcaagaagcacgaggaagaggaggctaaggccgaaagagaaaagaaagagaaagaacaaaaggaaaaggacaagtag

SEQ ID NO: 41135 - DNA, 573 bp, Artificial Sequence
  derived and/or modified sequence
atggcctgcagcgtggccggcatcaccagcgacgccaacgtgctgaccaacgagctgagactgatcgcccagagatacctgctgcagtaccaggagcccatcccctgcgagcagctggtgaccgccctgtgcgacatcaagcaggcctacacccagttcggcggcaagagacccttcggcgtgagcctgctgtacatcggctgggacaagcactacggcttccagctgtaccagagcgaccccagcggcaactacggcggctggaaggccacctgcatcggcaacaacagcgccgccgccgtgagcatgctgaagcaggactacaaggagggcgagatgaccctgaagagcgccctggccctggccatcaaggtgctgaacaagaccatggacgtgagcaagctgagcgccgagaaggtggagatcgccaccctgaccagagagaacggcaagaccgtgatcagagtgctgaagcagaaggaggtggagcagctgatcaagaagcacgaggaggaggaggccaaggccgagagagagaagaaggagaaggagcagaaggagaaggacaagtag

SEQ ID NO: 41136 - protein, 69 aa, Artificial Sequence
  derived and/or modified sequence
MREQYMRTGEGFLLVFSVTDRGSFEEIYKFQRQILRVKDRDEFPMILIGNKADLDHQRQVTQEEGQQLA

SEQ ID NO: 41137 - DNA, 384 bp, Artificial Sequence
  derived and/or modified sequence
atgcgggaacagtatatgcgcacaggcgaggggtttctacttgtgttttccgtgacagaccggggctcttttgaagaaatctacaagtttcaaaggcagatcttgagagtgaaagatcgggatgagttccccatgattctgatcggtaataaagccgacctggaccatcagaggcaggtgacccaagaagagggtcagcagctagctagacagttgaaggtgacgtacatggaggctagtgctaagatacgcatgaacgtggaccaggcattccatgagttggtgagggtaattagaaaattccaggagcaggagtgccccccttcccctgagcctacacggaaggagaaagacaagaaaggctgccattgcgtcatcttctag

SEQ ID NO: 41138 - DNA, 384 bp, Artificial Sequence
  derived and/or modified sequence
atgcgcgagcagtacatgcgaacaggagaaggattcttgctggtgtttagcgtgactgaccgcggtagcttcgaagaaatttacaaattccagcgacagatcctgagggtcaaggaccgcgacgagttccccatgatacttatcggcaacaaggcagatctcgaccaccagcgacaggtgactcaagaggagggccaacagctggcaaggcagctcaaagtgacctatatggaggcttccgccaagatccgcatgaacgtggatcaggccttccacgagcttgtgcgggtgattcgaaaattccaggagcaagagtgtcccccctctcccgagcctacgcgcaaagagaaggacaaaaaaggatgccattgcgtgattttctag

SEQ ID NO: 41139 - DNA, 384 bp, Artificial Sequence
  derived and/or modified sequence
atgagagaacagtacatgagaaccggggagggttttctactcgtattcagtgtcaccgaccggggaagttttgaagaaatttataaattccagcgccagatcctgcgcgttaaggatcgggatgagttccctatgattttaatcggaaacaaggccgatctggaccaccagcgccaggtcacccaagaagagggtcaacagttggcaaggcagctcaaggtgacatatatggaggcatcggctaagattcgcatgaatgtggaccaggcatttcacgaacttgtgcgagtgattaggaaattccaggaacaagaatgccctcctagtcccgaacccactaggaaggagaaagataagaagggttgtcattgcgtgattttttag

SEQ ID NO: 41140 - DNA, 210 bp, Artificial Sequence
  derived and/or modified sequence
atgcgggagcagtatatgagaaccggcgagggtttcctccttgtgttcagtgtcacggatagaggttcattcgaagaaatttacaagttccaacgtcaaatactgcgggtgaaggaccgcgatgagtttccaatgatcctgattggtaacaaagccgatctggatcatcaaaggcaggtcacacaggaggaagggcagcaactggcttag

SEQ ID NO: 41141 - DNA, 384 bp, Artificial Sequence
  derived and/or modified sequence
atgcgggaacagtatatgcgcacaggcgagggattcctgctggtgtttagcgtcaccgaccggggttcattcgaggagatatacaaatttcagaggcagattctccgagtaaaagacagagatgaattccctatgattctaatcggaaataaggccgacctcgatcaccagcgacaggtaactcaggaggagggccaacagctggcccgacagttgaaagtcacatatatggaggccagcgccaaaatccgcatgaacgtggaccaagcttttcatgagctggttcgagtcataagaaagtttcaagaacaggaatgtcctccatcccctgaaccaacccggaaggagaaagataaaaagggttgccactgtgtgatcttctag

SEQ ID NO: 41142 - DNA, 384 bp, Artificial Sequence
  derived and/or modified sequence
atgagagagcagtatatgcggacaggagaaggctttctcttggtgttttccgttaccgaccgaggcagctttgaagaaatttacaagtttcaacggcagatcctcagagtgaaggacagagatgaatttcctatgattctgattggcaacaaggccgatctggatcaccaaaggcaggtcacccaagaggaaggacaacagctggccagacagctgaaggtgacctacatggaagcttcagctaaaatccgcatgaacgtagaccaagcattccatgaactggtaagagtgatcagaaaattccaggagcaggagtgtccgcccagccccgagcctactaggaaagaaaaagacaaaaagggctgccattgcgttatattctag

SEQ ID NO: 41143 - DNA, 384 bp, Artificial Sequence
  derived and/or modified sequence
atgagggagcagtacatgaggactggagagggcttcctgctggtgttttctgtgacagaccggggcagctttgaggagatctacaagttccagaggcagatcctgcgggtgaaggacagagatgagttccccatgatcctgattggcaacaaggctgacctggaccaccagaggcaggtgacccaggaggagggccagcagctggcccggcagctgaaggtgacctacatggaggccagcgccaagatccgcatgaatgtggaccaggccttccacgagctggtgcgggtcatcaggaagttccaggagcaggagtgcccccccagccctgagcccaccaggaaggagaaggacaagaagggctgccactgcgtcatcttctag

SEQ ID NO: 41144 - DNA, 210 bp, Artificial Sequence
  derived and/or modified sequence
atgagggagcagtacatgaggactggagagggcttcctgctggtgttttctgtgacagaccggggcagctttgaggagatctacaagttccagaggcagatcctgcgggtgaaggacagagatgagttccccatgatcctgattggcaacaaggctgacctggaccaccagaggcaggtgacccaggaggagggccagcagctggcctag

SEQ ID NO: 41145 - DNA, 384 bp, Artificial Sequence
  derived and/or modified sequence
atgcgggagcagtacatgcggaccggcgagggcttcctgctggtgttctcggtcactgacagaggaagcttcgaagagatttataagttccagcgccagattctccgcgtcaaggacagggacgagttccccatgatcctgatcggaaacaaagcagatttagaccatcaacgccaggtgacacaggaagaggggcagcagctcgcccgacagctcaaagtgacgtacatggaggcttctgccaagatcagaatgaacgtggatcaggcttttcacgagctcgtgagggtcatcaggaaatttcaggaacaggagtgcccgccctcaccagagccgacgcgcaaggagaaggataagaagggctgtcactgcgttatattttag

SEQ ID NO: 41146 - DNA, 384 bp, Artificial Sequence
  derived and/or modified sequence
atgcgggagcagtacatgcggaccggcgagggcttcctgctggtgtttagtgtgacggacaggggaagcttcgaagaaatctataaatttcagcggcagatcctgcgtgtgaaggaccgtgacgaatttccgatgatactgatagggaataaggctgaccttgatcatcagcggcaggtcactcaggaggagggccagcagctcgcacggcagcttaaggtgacttatatggaagcctcagcaaaaatccggatgaatgttgatcaggctttccatgagcttgttagagtgatccgcaaatttcaagaacaagagtgtcctccatcaccagaacccacacgtaaagaaaaggataagaagggctgtcattgtgtgattttctag

SEQ ID NO: 41147 - DNA, 384 bp, Artificial Sequence
  derived and/or modified sequence
atgcgggagcagtacatgcggaccggcgagggcttcctgctggtgttttctgtgactgaccggggatctttcgaagagatttacaagtttcagcgacagatccttagagttaaggatcgggacgagttcccaatgatactgattggaaacaaagcagacctagaccaccaacggcaagtcacccaggaggagggacagcagctggcccgacaactgaaggtgacatatatggaggcgagcgccaagataagaatgaatgttgatcaggcattccacgagctcgtgagggtaatccggaagtttcaggaacaggagtgccccccatcacccgagcccacccgcaaggaaaaagataaaaaggggtgccactgtgtaattttctag

SEQ ID NO: 41148 - DNA, 210 bp, Artificial Sequence
  derived and/or modified sequence
atgcgggagcagtacatgcggaccggcgagggcttcctgctggtgttttctgtgactgatcgcggttcatttgaggagatatataagttccagcgccaaattctgcgggtcaaagaccgggatgaatttccaatgatcttgattggtaacaaggccgacctcgaccatcagaggcaagtgactcaagaagaaggacagcaactcgcgtag

SEQ ID NO: 41149 - DNA, 384 bp, Artificial Sequence
  derived and/or modified sequence
atgcgggagcagtacatgcggaccggcgagggcttcctgctggtgttcagcgtgaccgacaggggaagcttcgaggaaatttacaagttccagagacagatattaagagtcaaagatcgagacgagtttcccatgatcctaatcggcaataaggctgatctggaccatcagagacaggtgacccaggaggaaggtcagcagctggctcggcagcttaaggtgacctatatggaggctagtgccaaaatccgaatgaatgttgaccaggcatttcatgaattggtccgagtgataagaaagttccaggagcaagagtgtccaccctcccccgaacctactcgaaaggagaaagataaaaaggggtgtcattgtgtgatcttttag

SEQ ID NO: 41150 - DNA, 384 bp, Artificial Sequence
  derived and/or modified sequence
atgcgggagcagtacatgcggaccggcgagggcttcctgctggtgttctccgtcacagacagaggatccttcgaagagatctataagttccagaggcagatcctgcgtgtgaaggaccgcgacgagttcccgatgatcttgatagggaacaaggctgacctggatcaccaacgtcaggtgacccaggaagagggtcagcagttggcccgccaactgaaagtgacgtatatggaggcttcggcaaagatccggatgaatgtagatcaggcattccacgagctggtgcgggtgatcaggaaatttcaggagcaggaatgtccaccctcgccagaacccacacgtaaggagaaggacaaaaagggctgtcattgtgtcattttctag

SEQ ID NO: 41151 - DNA, 384 bp, Artificial Sequence
  derived and/or modified sequence
atgcgcgagcagtatatgagaacaggagagggctttctgctggtcttctccgtgacggaccggggaagtttcgaggagatatacaagtttcaacggcagatccttagagtgaaggacagagatgaatttccaatgatcttaatcggaaataaggcagacctggaccatcagaggcaggtcactcaggaggagggccaacagctggctcgccagctgaaggtgacgtacatggaagcttctgccaagatccggatgaacgtcgatcaggcctttcatgaactagtcagagtcatcagaaagttccaggagcaagagtgcccaccaagccctgagccaacccgcaaggagaaagataagaagggttgtcattgcgtgatcttctag

SEQ ID NO: 41152 - DNA, 384 bp, Artificial Sequence
  derived and/or modified sequence
atgcgggaacagtacatgaggaccggcgagggcttcctcttggttttcagtgttaccgaccggggttccttcgaggagatatacaaattccagcgacagatcctgcgggtgaaagaccgtgacgagtttccaatgattctgatcggcaacaaggccgatctggaccaccaacggcaagtaacccaggaagaaggacagcagctagcacgccagctcaaagtgacgtatatggaggcaagcgccaagattcgaatgaatgtggaccaagccttccatgagctggttcgcgtgatcagaaaatttcaggaacaggaatgcccgccatcccccgaacccaccaggaaggagaaggacaagaagggctgtcattgcgtcatcttttag

SEQ ID NO: 41153 - DNA, 384 bp, Artificial Sequence
  derived and/or modified sequence
atgcgagaacagtatatgcgtaccggggaaggttttctgctggtgttcagtgtgacggaccgcggatcattcgaagaaatctacaagttccagcgacagatcctcagagtgaaggaccgcgacgagttccccatgatccttattggcaacaaggctgatctggatcatcaaagacaggtgacacaggaagaaggtcagcaactggccaggcagttgaaagtgacttacatggaggcctctgcgaaaatccggatgaatgtggaccaagcatttcatgaacttgttagggttatcaggaagttccaagaacaggaatgccctccaagtccagagcccacccggaaagaaaaggataagaagggatgtcactgtgtgattttttag

SEQ ID NO: 41154 - DNA, 210 bp, Artificial Sequence
  derived and/or modified sequence
atgcgagagcagtacatgcggactggcgagggctttctacttgttttttccgtgactgaccgagggagctttgaggagatttataagttccaacgccagatcctgagagtgaaagatcgagacgagttccccatgatcttaattgggaacaaggcggacttggaccaccagagacaggttacccaggaggaaggacaacaattagcctag

SEQ ID NO: 41155 - DNA, 384 bp, Artificial Sequence
  derived and/or modified sequence
atgcgcgaacagtacatgcgaacgggggagggtttcctcctcgtgttcagtgtcaccgacagggggtcgttcgaagagatctataagtttcagaggcagattttaagggtgaaggaccgggacgagttcccaatgatcttaattggcaacaaggcagatctcgaccaccagcgccaggttacccaggaggaagggcagcagctagcgagacagctgaaggttacttatatggaagcctctgctaagatccgcatgaacgtcgatcaggccttccacgagctcgtccgggttatcaggaaattccaggagcaggagtgtccaccaagcccagagccgacccgaaaggagaaagacaaaaagggatgtcactgtgtgatcttctag

SEQ ID NO: 41156 - DNA, 384 bp, Artificial Sequence
  derived and/or modified sequence
atgcgtgagcagtacatgcggacaggcgaaggatttctactagtatttagtgtgaccgaccgcggatctttcgaagagatctataagttccagcgacaaatattacgggttaaggaccgggacgagttcccgatgattctgattggcaacaaggctgacctggaccatcagaggcaggtgacccaggaagagggacagcagcttgccaggcagcttaaggtgacctatatggaagcatcagctaagatacggatgaatgtcgatcaggctttccacgagctcgtgagagttattagaaagttccaggaacaggagtgccctccttccccagaacccactaggaaagaaaaagataagaagggatgccattgtgtaatcttttag

SEQ ID NO: 41157 - DNA, 384 bp, Artificial Sequence
  derived and/or modified sequence
atgagagagcagtacatgagaaccggcgagggcttcctgctggtgttcagcgtgaccgacagaggcagcttcgaggagatctacaagttccagagacagatcctgagagtgaaggacagagacgagttccccatgatcctgatcggcaacaaggccgacctggaccaccagagacaggtgacccaggaggagggccagcagctggccagacagctgaaggtgacctacatggaggccagcgccaagatcagaatgaacgtggaccaggccttccacgagctggtgagagtgatcagaaagttccaggagcaggagtgcccccccagccccgagcccaccagaaaggagaaggacaagaagggctgccactgcgtgatcttctag

SEQ ID NO: 41158 - DNA, 210 bp, Artificial Sequence
  derived and/or modified sequence
atgagagagcagtacatgagaaccggcgagggcttcctgctggtgttcagcgtgaccgacagaggcagcttcgaggagatctacaagttccagagacagatcctgagagtgaaggacagagacgagttccccatgatcctgatcggcaacaaggccgacctggaccaccagagacaggtgacccaggaggagggccagcagctggcctag

SEQ ID NO: 41159 - protein, 1299 aa, Artificial Sequence
  derived and/or modified sequence
MAAETQTLNFGPEWLRALSSGGSITSPPLSPALPKYKLADYRYGREEMLALFLKDNKIPSDLLDKEFLPILQEEPLPPLALVPFTEEEQRNFSMSVNSAAVLRLTGRGGGGTVVGAPRGRSSSRGRGRGRGECGFYQRSFDEVEGVFGRGGGREMHRSQSWEERGDRRFEKPGRKDVGRPNFEEGGPTSVGRKHEFIRSESENWRIFREEQNGEDEDGGWRLAGSRRDGERWRPHSPDGPRSAGWREHMERRRRFEFDFRDRDDERGYRRVRSGSGSIDDDRDSLPEWCLEDAEEEMGTFDSSGAFLSLKKVQKEPIPEEQEMDFRPVDEGEECSDSEGSHNEEAKEPDKTNKKEGEKTDRVGVEASEETPQTSSSSARPGTPSDHQSQEASQFERKDEPKTEQTEKAEEETRMENSLPAKVPSRGDEMVADVQQPLSQIPSDTASPLLILPPPVPNPSPTLRPVETPVVGAPGMGSVSTEPDDEEGLKHLEQQAEKMVAYLQDSALDDERLASKLQEHRAKGVSIPLMHEAMQKWYYKDPQGEIQGPFNNQEMAEWFQAGYFTMSLLVKRACDESFQPLGDIMKMWGRVPFSPGPAPPPHMGELDQERLTRQQELTALYQMQHLQYQQFLIQQQYAQVLAQQQKAALSSQQQQQLALLLQQFQTLKMRISDQNIIPSVTRSVSVPDTGSIWELQPTASQPTVWEGGSVWDLPLDTTTPGPALEQLQQLEKAKAAKLEQERREAEMRAKREEEERKRQEELRRQQEEILRRQQEEERKRREEEELARRKQEEALRRQREQEIALRRQREEEERQQQEEALRRLEERRREEEERRKQEELLRKQEEEAAKWAREEEEAQRRLEENRLRMEEEAARLRHEEEERKRKELEVQRQKELMRQRQQQQEALRRLQQQQQQQQLAQMKLPSSSTWGQQSNTTACQSQATLSLAEIQKLEEERERQLREEQRRQQRELMKALQQQQQQQQQKLSGWGNVSKPSGTTKSLLEIQQEEARQMQKQQQQQQQHQQPNRARNNTHSNLHTSIGNSVWGSINTGPPNQWASDLVSSIWSNADTKNSNMGFWDDAVKEVGPRNSTNKNKNNASLSKSVGVSNRQNKKVEEEEKLLKLFQGVNKAQDGFTQWCEQMLHALNTANNLDVPTFVSFLKEVESPYEVHDYIRAYLGDTSEAKEFAKQFLERRAKQKANQQRQQQQLPQQQQQQPPQQPPQQPQQQDSVWGMNHSTLHSVFQTNQSNNQQSNFEAVQSGKKKKKQKMVRADPSLLGFSVNASSERLNMGEIETLDDY

SEQ ID NO: 41160 - protein, 93 aa, Artificial Sequence
  derived and/or modified sequence
MAAETQTLNFGPEWLRALSSGGSITSPPLSPALPKYKLADYRYGREEMLALFLKDNKIPSDLLDKEFLPILQEEPLPPLALVPFTEEEQRNFS

SEQ ID NO: 41161 - protein, 113 aa, Artificial Sequence
  derived and/or modified sequence
MAAETQTLNFGPEWLRALSSGGSITSPPLSPALPKYKLADYRYGREEMLALFLKDNKIPSDLLDKEFLPILQEEPLPPLALVPFTEEEQRNFSMSVNSAAVLRLTGRGGGGTV

SEQ ID NO: 41162 - protein, 872 aa, Artificial Sequence
  derived and/or modified sequence
MTKLPDDPGRPNFEEGGPTSVGRKHEFIRSESENWRIFREEQNGEDEDGGWRLAGSRRDGERWRPHSPDGPRSAGWREHMERRRRFEFDFRDRDDERGYRRVRSGSGSIDDDRDSLPEWCLEDAEEEMGTFDSSGAFLSLKKVQKEPIPEEQEMDFRPVDEGEECSDSEGSHNEEAKEPDKTNKKEGEKTDRVGVEASEETPQTSSSSARPGTPSDHQSQEASQFERKDEPKTEQTEKAEEETRMENSLPAKVPSRGDEMVADVQQPLSQIPSDTASPLLILPPPVPNPSPTLRPVETPVVGAPGMGSVSTEPDDEEGLKHLEQQAEKMVAYLQDSALDDERLASKLQEHRAKGVSIPLMHEAMQKWYYKDPQGEIQGPFNNQEMAEWFQAGYFTMSLLVKRACDESFQPLGDIMKMWGRVPFSPGPAPPPHMGELDQERLTRQQELTALYQMQHLQYQQFLIQQQYAQVLAQQQKAALSSQQQQQLALLLQQFQTLKMRISDQNIIPSVTRSVSVPDTGSIWELQPTASQPTVWEGGSVWDLPLDTTTPGPALEQLQQLEKAKAAKLEQERREAEMRAKREEEERKRQEELRRQQEEILRRQQEEERKRREEEELARRKQEEALRRQREQEIALRRQREEEERQQQEEALRRLEERRREEEERRKQEELLRKQEEEAAKWAREEEEAQRRLEENRLRMEEEAARLRHEEEERKRKELEVQRQKELMRQRQQQQEALRRLQQQQQQQQLAQMKLPSSSTWGQQSNTTACQSQATLSLAEIQKLEEERERQLREEESSASFCFYATAKAPAEGVDESSSAAAATATAETLRLGECQQTFRYHEISSGDPAGRGQANAKAAAAAAATPATKQSS

SEQ ID NO: 41163 - protein, 787 aa, Artificial Sequence
  derived and/or modified sequence
MAAETQTLNFGPEWLRALSSGGSITSPPLSPALPKYKLADYRYGREEMLALFLKDNKIPSDLLDKEFLPILQEEPLPPLALVPFTEEEQRNFSMSVNSAAVLRLTGRGGGGTVVGAPRGRSSSRGRGRGRGECGFYQRSFDEVEGVFGRGGGREMHRSQSWEERGDRRFEKPGRKDVGRPNFEEGGPTSVGRKHEFIRSESENWRIFREEQNGEDEDGGWRLAGSRRDGERWRPHSPDGPRSAGWREHMERRRRFEFDFRDRDDERGYRRVRSGSGSIDDDRDSLPEWCLEDAEEEMGTFDSSGAFLSLKKVQKEPIPEEQEMDFRPVDEGEECSDSEGSHNEEAKEPDKTNKKEGEKTDRVGVEASEETPQTSSSSARPGTPSDHQSQEASQFERKDEPKTEQTEKAEEETRMENSLPAKVPSRGDEMVADVQQPLSQIPSDTASPLLILPPPVPNPSPTLRPVETPVVGAPGMGSVSTEPDDEEGLKHLEQQAEKMVAYLQDSALDDERLASKLQEHRAKGVSIPLMHEAMQKWYYKDPQGEIQGPFNNQEMAEWFQAGYFTMSLLVKRACDESFQPLGDIMKMWGRVPFSPGPAPPPHMGELDQERLTRQQELTALYQMQHLQYQQFLIQQQYAQVLAQQQKAALSSQQQQQLALLLQQFQTLKMRISDQNIIPSVTRSVSVPDTGSIWELQPTASQPTVWEGGSVWDLPLDTTTPGPALEQLQQLEKAKAAKLEQERREAEMRAKREEEERKRQEELRRQQEEILRRQQEEERKRREVGKRDS

SEQ ID NO: 41164 - DNA, 3900 bp, Artificial Sequence
  derived and/or modified sequence
atggccgcagaaactcaaacactgaattttggccccgaatggctgcgcgctctctcgtccggtggatccattacaagcccccctttgagtccggccctgcccaaatataaactcgccgactaccgctacggcagggaggaaatgcttgccctttttctcaaggataataaaatcccttccgatcttcttgacaaggagttcctccccatccttcaggaggaacccttaccccccctggccttggtaccctttaccgaagaggaacagcgcaatttctcaatgagtgtgaattcagcagccgtcttgcgtttgacgggcaggggaggcgggggcactgtagtgggggcccccagggggcgtagctcttcaagaggaaggggaaggggcagaggcgaatgtggattttaccagaggagttttgacgaagtggagggcgtgttcgggcgcgggggggggcgtgaaatgcatcgctcccagtcctgggaggagcggggcgatcggaggttcgagaagccgggaagaaaggatgtgggaagacccaacttcgaggaaggagggccaaccagtgtaggccggaaacacgaatttatcagatctgagagcgaaaactggcgaatatttcgggaagagcagaacggggaagatgaggacggaggatggcgcttagccgggagccggcgagatggtgagagatggcgccctcatagcccggatggtcccaggtccgctggttggagggagcacatggagcgtcgacggagatttgagttcgatttcagagacagggatgatgagagagggtaccgccgcgtacgctctggttcaggctcgatagacgacgatcgggattccttaccggaatggtgtctcgaagacgcagaggaagaaatgggtactttcgattcatctggtgcattcctgtccctgaagaaagttcagaaagaaccaatcccggaggagcaggaaatggacttcagacctgttgatgagggtgaggagtgtagcgactcagaggggagccacaatgaggaggccaaagagcctgataaaacgaataagaaggaaggggaaaaaacggaccgcgtcggagtagaggcatcagaggagacaccccagactagctcatcatccgctaggccgggtacaccatctgaccatcagagccaggaagcatcacagtttgagcgtaaggatgagcccaaaaccgaacagacagaaaaggccgaggaagagacaagaatggagaactccctgcccgctaaggtgccaagcagaggcgatgagatggtggcggatgtacagcaaccccttagccagattcctagcgacacagccagcccgcttctcattctcccccctcccgtgcctaacccatcgcctacgttaagacccgtcgaaacaccggtggtgggtgccccgggtatgggttctgtcagcacagagcccgatgacgaggagggtctgaaacatctcgagcaacaggctgagaaaatggtggcgtaccttcaggatagtgccctggatgatgaacggctcgcttcaaaattgcaggaacatcgcgccaagggcgtgtccatccccctcatgcacgaagccatgcagaaatggtactacaaagacccacaaggcgaaatccagggcccctttaataaccaggagatggccgagtggttccaggcaggttacttcacaatgagtttgctcgtgaagagggcttgtgatgaatccttccagcccctgggagatatcatgaaaatgtggggccgagtgccatttagtcccggccctgcaccacctccacatatgggagagctcgaccaggaaagattgacgcggcagcaggaactaactgccctttaccaaatgcaacacctccaataccaacaatttctgatccagcaacagtacgcccaggtgctggcgcagcagcagaaggcagccctgagttcacagcagcagcagcagcttgccctgctgctgcaacagtttcaaaccctgaaaatgcggatcagcgaccagaatattatcccctccgtgaccagatcagtctcggtcccagacacgggatctatctgggaattacaacctaccgccagccaacctacagtatgggagggcggatccgtgtgggatctacctttagacaccaccactcccggaccagccttagaacagctgcagcagttagaaaaagcaaaggctgccaaactcgaacaggagcgtcgcgaagccgagatgagggctaagcgcgaggaggaggaacgaaagcgtcaggaggaactcagacgccagcaagaagaaatacttaggagacaacaagaggaggagcgtaagaggcgtgaagaggaagaactggccaggcggaagcaggaggaagctttgagacgtcagcgggagcaagaaattgccctccggagacagcgcgaggaggaagagagacagcaacaggaagaggcccttagaaggcttgaggagaggcgtagggaagaagaggaaagaagaaaacaagaggaacttcttcgcaagcaggaggaggaagcagcaaagtgggcacgggaggaggaagaggctcagcgacggctggaagaaaatcgtctgcgaatggaggaagaagccgcacgtctccgccacgaggaagaagaacgcaaacgcaaagagctagaggtacagcgccagaaggaactgatgagacaaaggcagcagcagcaggaggccctgagacgcctccagcaacagcaacagcaacagcaattggctcagatgaagcttccatctagctctacctgggggcagcagagcaacactaccgcttgccagtctcaggcgaccctgtctctcgctgagatccagaaactggaggaagaaagggagagacagttaagagaggaacagcgtcgccagcaaagggagttaatgaaagccctccaacagcagcagcagcagcagcagcagaagctctccggatgggggaacgtgtcaaagccaagcggtaccactaagtcactgcttgaaatccagcaggaggaggctaggcaaatgcaaaaacagcagcagcagcaacagcagcaccagcagccaaatagggccagaaataacacccacagtaacctgcacaccagcatcgggaacagcgtctgggggtctattaacactggccctccgaatcagtgggccagcgacctggtgtcaagtatatggtctaatgcggacactaagaactcgaacatgggattctgggacgatgctgtgaaagaggtcggaccaaggaacagcactaataaaaacaaaaacaacgccagtcttagtaagagcgtaggcgtgtccaaccgccagaacaagaaggtggaagaagaggagaagttactgaagctgtttcaaggggtgaacaaggctcaagacggatttacccagtggtgcgagcaaatgctgcacgccctgaacaccgccaacaaccttgatgtccccacattcgtgagtttcctgaaggaggtcgagagcccatatgaggtgcacgactatatacgtgcctatcttggagacaccagcgaggcaaaagaatttgccaagcaatttttggaacggagagccaagcagaaggccaaccagcagcgtcagcaacaacaattgccacagcagcaacaacagcaaccacctcaacaacccccacaacagcctcagcagcaggattcagtttgggggatgaaccactcaacactgcattcagtctttcagaccaaccagtctaacaaccagcaaagcaatttcgaagccgtgcaatctggaaagaagaagaaaaagcagaaaatggtgagggcggaccctagcctgctgggttttagcgtcaatgcatctagcgagcgccttaacatgggtgaaattgagacacttgatgattactag

SEQ ID NO: 41165 - DNA, 3900 bp, Artificial Sequence
  derived and/or modified sequence
atggcagccgagacgcagacactgaattttggccctgagtggcttcgcgccctgtctagcggcgggtccataaccagtccccctctcagcccagctcttcccaagtataagctggctgattataggtacggccgcgaggagatgctggccctgtttctcaaggacaacaagatcccatcagacttgctggataaagagttcctgccaattctccaggaggagcctcttccaccattggctctggtccctttcactgaggaggaacagcgtaatttttctatgagtgtgaattccgctgcagtcctgcggctgacgggtaggggaggcggcggcaccgtggtcggcgcacctcgggggcggagctcctcccgcggacggggcaggggacgcggtgagtgcgggttttaccagcgcagctttgacgaggtcgaaggcgtgtttggtcgcggcggtggtagagagatgcaccggtcccagtcttgggaggagcgtggagatagacggttcgaaaagcccggccgcaaagacgtcggaaggcccaattttgaggaaggtgggcctaccagcgtcggacgtaaacacgagtttattcggtccgagagcgagaattggcgcatcttccgagaagaacagaatggtgaggatgaggacggaggctggcgactggccggttctcgtcgcgatggagagagatggcggccacattcacccgacggcccaaggtctgccggctggagagaacatatggaaagacggcgacgctttgaatttgatttccgcgatcgagacgacgagcgagggtatcgccgggtacggagcgggagcggctccattgatgatgatcgcgacagtttgcccgagtggtgcctggaggacgccgaggaggagatgggtacatttgactccagcggcgccttcctctcacttaagaaggtccagaaggaacctataccagaagaacaagaaatggatttcagaccggtagacgagggggaggaatgttctgatagtgaggggtctcacaacgaagaggccaaagagcccgataagaccaacaaaaaggagggggagaagaccgaccgggtcggggttgaagcctcagaggagactccgcagaccagttcgtcttctgctcgaccaggcaccccatcagaccatcagtctcaggaggccagccaattcgaaaggaaggacgaaccaaagaccgaacaaactgagaaggctgaggaagaaaccaggatggagaactccctcccagccaaggtgccctctcgtggcgatgaaatggttgcagatgtccagcagccattgagtcagatcccatctgacacggcttcaccactgctgatcctgccaccgcctgtacctaatccaagccccactttgagacctgtcgaaactcccgtcgtgggagccccgggcatgggcagtgtcagcacagaacccgacgatgaagagggactcaagcatctggagcaacaggcagagaaaatggtcgcctatctgcaggattccgcccttgacgatgaacggctggcctccaagctccaggaacaccgtgcgaaaggtgtgtccatacctctaatgcatgaagctatgcagaaatggtattataaagacccgcaaggggaaattcaaggccccttcaataatcaggagatggctgagtggttccaagccggctactttacaatgtcactgctggttaaacgcgcatgtgacgaatcgtttcaacctctgggcgatatcatgaaaatgtggggccgcgtaccattttcaccggggcctgcccctccccctcacatgggggaattggatcaagaaagactgacacgccagcaggaactgacagccctctaccagatgcagcaccttcagtatcaacagtttcttattcagcagcagtatgctcaggttttggcacaacagcagaaggccgcactctcctctcagcagcagcaacagttagcgctcctcttacaacaatttcaaaccctgaaaatgagaattagtgatcagaacatcataccgagcgtgacaagaagtgtcagcgtgcctgataccggcagtatctgggagctccagcccactgcaagtcagccaaccgtgtgggagggagggtcagtttgggatcttccactcgacaccaccactcccggcccagccctcgagcagctccagcagttagaaaaggccaaagccgctaagcttgaacaggagaggagggaggcagagatgagagcaaagcgggaagaggaagagagaaagcggcaggaggagctgcgtcggcagcaggaggaaatcctcaggcggcaacaggaagaagagcggaagaggcgagaggaagaggaactggccagaaggaagcaggaggaggccttacgcaggcagagggagcaagaaatcgctttgcgtaggcaaagggaagaagaagagcgccagcagcaggaagaagcccttcggagactggaagaacgcaggcgcgaggaagaggaacgtcggaaacaggaagaacttctccgaaagcaagaggaggaggctgcaaagtgggcacgggaggaggaagaggcccaacgccgccttgaggagaaccgtctaaggatggaggaggaggctgcaagactgcggcatgaagaagaagagcgcaagcgtaaggagctcgaagttcagcgacaaaaggagctgatgcgtcagaggcagcagcaacaggaagcgctcaggaggctgcagcagcagcagcagcagcagcagctggctcagatgaagctgccgagctctagcacttggggtcaacagagcaatacaacagcttgtcagagtcaggccaccttgtccctagccgagatccagaaattggaggaggaaagggagcggcaactccgagaggaacagagacgccagcaacgcgaactgatgaaagccttgcagcagcagcaacagcagcagcaacaaaagctgtccgggtggggtaacgtgtccaaaccctccgggacaaccaaatccctgctggaaatccagcaggaggaagccagacagatgcagaaacaacagcaacagcaacagcagcatcaacaacccaaccgggcccggaataatacccactcaaatctgcacacctctattgggaactctgtgtgggggtctatcaataccggtcctccaaaccagtgggcctcagacctagtgtccagtatctggtctaatgcagataccaaaaatagtaatatgggtttctgggacgacgccgttaaggaagtgggccccagaaattccacaaataaaaacaagaacaatgcctccttaagtaaaagcgttggggtatcaaatcggcaaaacaaaaaggtggaagaggaggaaaagctgttgaagttgttccagggtgttaacaaggctcaggatggctttacccagtggtgtgaacaaatgcttcacgccctaaatacagccaacaacttagacgttcccacgttcgtttcatttcttaaggaagttgagagcccatacgaagtgcatgactacatcagggcgtatctgggggatacctctgaagctaaggagttcgcgaaacagtttctcgagcgacgggccaaacagaaggccaaccagcagagacagcagcagcagctccctcagcagcagcaacagcagcccccacagcagcctcctcagcagccacaacagcaggattctgtctggggaatgaaccactcaaccttacactccgttttccaaacaaatcagtctaataatcaacagtcgaattttgaagccgtgcagagcggcaagaagaagaaaaagcaaaaaatggttagggcagacccttccctgctggggttctccgtcaatgcctcaagtgaacgcctcaacatgggtgagattgagacgctggatgactattag

SEQ ID NO: 41166 - DNA, 2619 bp, Artificial Sequence
  derived and/or modified sequence
atgaccaagctccccgacgatcccggtagacctaactttgaggagggagggccaacctctgtcggcagaaagcatgaattcattcggtcagaatcggagaattggcgcatctttagggaagaacaaaacggggaggacgaagatggcggatggaggctggccggctcgcgccgggacggtgaacgctggcgaccccactcacccgatggcccacgttcagccggctggagagaacacatggaaaggagaaggcggtttgagttcgatttccgagatcgcgacgacgagaggggctatcggcgggtgaggagtggctccggtagtattgacgacgatcgggattccctgcccgaatggtgcctagaagacgctgaagaggaaatggggacttttgactctagcggggcattcctctcgttgaaaaaggttcagaaagaacctatcccagaggagcaggagatggatttccgcccagtggacgaaggtgaagaatgctcggacagtgagggatctcacaacgaggaggcaaaggagcccgacaagaccaataagaaggagggggaaaagacagaccgcgtgggcgtggaggccagtgaggagacaccccaaacatcctcgagctccgccaggccaggaactccctctgaccatcagtcccaggaagcttcccagttcgaaagaaaggacgagcccaaaacggaacagacagaaaaagccgaggaggagacacgcatggagaactccctgcctgccaaggtgcccagcaggggagacgagatggtggccgatgtccagcagcccctttcccagatcccctcggacaccgccagcccactactgattctcccccctcccgtgcccaacccatcccctacactgaggccggtagagacacccgttgtgggtgcgcccggcatgggtagcgtgagcacagagccggatgacgaagaaggcctgaagcacctggagcaacaggcggaaaagatggtggcttatttacaagactccgcactcgatgacgagcgtctggcatctaagctccaggagcaccgggcaaagggcgtgagcatcccactcatgcatgaagccatgcaaaagtggtactataaagatccccagggagaaattcagggcccattcaataatcaggagatggctgagtggttccaggctggctactttaccatgagtctattggtaaaacgcgcatgtgatgaatcatttcagccattaggagatatcatgaagatgtggggcagagtcccatttagtccaggccccgcaccccctccgcacatgggagagcttgatcaggaaagacttacacgacagcaggaactgactgccctttaccagatgcaacacctgcagtaccagcagttcctgatccagcagcagtatgcccaggtgctggcacagcaacagaaagccgccctcagcagccagcaacagcagcagcttgctttgctcctccagcagttccagactcttaaaatgcgcatttccgatcagaacataataccgtccgtgacacggtccgtctcggtgccagacactgggtctatctgggagctgcagcccacagctagtcagccaacagtgtgggaaggcggcagcgtatgggatctgccgctggataccacaacccctggaccagccttggaacagcttcagcagctcgagaaagccaaggcggcaaagctcgaacaggagcgacgcgaggcggaaatgagggccaaacgggaggaagaggagagaaaacgtcaagaagagctgagacggcagcaggaggagatcctgaggcgtcaacaggaagaggagcgaaagcgtcgagaagaagaggagcttgcgagaaggaagcaggaagaggctctacgccgccagagagagcaggaaatagccttgagacggcagcgagaagaagaagagcgccagcagcaggaagaagctcttcgcaggttagaagagaggcggcgagaagaggaagagcgacgtaagcaggaagagttacttaggaaacaagaagaagaggcggccaagtgggcgcgagaagaggaagaagcccagagaaggttagaagagaacaggcttcgcatggaggaggaggcggcccgcctgcgtcatgaagaggaagaaagaaaaagaaaggagcttgaggttcaaagacaaaaggagctcatgcgacagcgacagcagcagcaggaagccctaagaagactgcaacagcagcaacagcagcagcagctcgctcagatgaaattaccaagtagctccacctggggccagcagagcaacacaacagcgtgccaatctcaggctacactgagcttagcagagattcagaaattggaagaagaacgggagagacagctaagggaggaggagtcaagtgcatcattttgcttttatgcaacagccaaggcgcctgccgagggagtcgatgagtcttcaagtgcagccgcagccacagccacagccgaaactctgcgcctaggggaatgccagcaaaccttcagataccacgagatcagttccggcgacccagccggacgtggacaggctaacgcaaaagccgctgcagctgcagcagccacgccagcgactaaacagagttcttag

SEQ ID NO: 41167 - DNA, 2364 bp, Artificial Sequence
  derived and/or modified sequence
atggcagcggagacccagaccctcaatttcggaccggagtggttgcgggcactttcctctggtggcagtatcaccagcccacccctatcccctgctctgccaaaatacaagctggctgactaccgttacgggagagaggagatgctagcactcttcctgaaagacaataaaataccaagtgatctactggacaaagagttcttacctatactccaggaggaacccctgcccccactggctctggttccatttaccgaagaggagcagaggaattttagcatgtctgtcaactccgcagcggtcctgagacttacggggaggggagggggaggaactgtcgtaggagcaccccgtggtcgaagctcctcccgtgggcggggccggggccggggcgagtgcggattctatcagaggtccttcgatgaagttgagggcgtgtttggcagaggcggtgggcgcgaaatgcaccgctctcagagctgggaggagcgcggcgataggcgattcgaaaagccaggacgcaaagatgtgggccgacccaacttcgaagagggaggacccaccagtgtaggacgcaagcatgagttcatccgctctgagtccgaaaattggaggattttccgtgaggagcaaaatggcgaagacgaagacgggggctggagacttgcaggcagtcggagagacggtgaacgctggcgtcctcacagccctgacggaccccgcagcgccggttggcgggagcacatggagcgacgacgcagattcgagttcgattttcgagacagagatgacgagcgaggctaccgaagggtgcggagtggctctgggtctatcgacgacgaccgcgattctctgcccgagtggtgcctagaagatgctgaggaagagatgggcacgtttgactcctctggcgcttttctctcgcttaaaaaggttcagaaggaacctattccggaagagcaggagatggacttcaggccagttgatgagggtgaagaatgttcagactcggaggggagccataacgaagaggccaaagaacccgataagacgaacaaaaaagagggcgaaaaaacggatcgggtaggggtcgaagcctccgaagagactccccagacatcatcatcgagtgcaagacctggcacaccatccgatcatcagtctcaggaggcctcccagttcgaacggaaagatgaaccaaagaccgaacaaactgagaaggcagaggaagagacaaggatggaaaacagccttcctgcaaaggtaccttcacgcggcgacgaaatggttgcagatgtgcaacaacccctttctcagatccctagtgacacggccagccctctcttgatactgcctcctccagttcccaacccatctccaaccctacgcccagtggaaacccccgtggtcggtgcgcccgggatgggctccgtgagcacagagcccgatgatgaagagggcttaaagcacctggagcagcaggccgagaagatggtagcctatctgcaggattcagctcttgacgacgaacggctcgcaagcaaactccaggagcatcgagccaagggcgtatccatccccctcatgcacgaagccatgcaaaagtggtactataaggatccccagggggaaatccagggcccgtttaacaaccaagaaatggcagaatggtttcaggcagggtattttactatgtccctcctggtgaaacgcgcctgcgatgagtcctttcagcctctgggggatataatgaagatgtggggaagggtgccgttcagcccagggccagcacccccaccacacatgggtgagttagaccaagaacgtctgactagacagcaggagctaaccgctctgtaccagatgcagcacctgcagtaccagcagtttttaattcagcagcagtacgcccaggtgctggcccagcaacagaaggcagcactttcatcccagcaacagcaacaactggcactcttactccagcagttccagacactgaaaatgagaattagcgaccaaaacattatcccgtctgtgacaaggtctgtgagcgtgcctgacacaggttccatctgggagctgcagccaaccgcttcgcagccgactgtgtgggagggtggctccgtctgggatctacccctggacacaaccacccccggaccggcactggagcagctccagcaactggagaaggctaaagccgcgaagctggagcaggagagaagagaagctgaaatgcgggctaagagggaggaagaagagaggaagcgacaggaagagcttcgccgccaacaagaagagattctaaggagacagcaggaggaagagcgtaagaggcgcgaagtggggaagagggacagttag

SEQ ID NO: 41168 - DNA, 5847 bp, Artificial Sequence
  derived and/or modified sequence
gacgtgcgtggcgacgtgtcggccatcttgtgttgttgaggctgaggactgactggggttctgagactccctgtcccggaccgcagcgttaaaaggatctgaacaaagtctgctcaaatctcctgctgtgaaccagcagaatttttgaacaggtttcttcacatataaaaatctattgtaaaaatacggaaaagaatggcagcggaaacgcagacactgaactttgggcctgaatggctccgagctctgtccagtggtgggagtattacatcccctcctctttctccagcattgccgaagtataaattagcagattatcgttacggcagagaagaaatgttagcacttttccttaaagacaacaagataccttcagaccttctggataaagaatttctgcctatcctccaggaggaaccccttccaccattggctctggtaccctttacagaagaagaacagagaaacttttccatgtctgtaaatagtgctgctgtcctgcgattgacaggacgaggaggaggaggaacagtggtgggggctcctagaggtcgaagttcttcaagagggcgaggcagaggcagaggtgaatgtggtttctaccaaagaagttttgatgaagtagagggtgtttttggtcgaggaggtggcagagaaatgcatagatcgcagagctgggaggaaaggggtgacagacgttttgaaaaaccaggacgaaaagatgtagggagaccaaattttgaggaaggtggaccaacatcagtagggagaaagcatgaatttatacgctcagaaagtgaaaattggcgcatctttagagaggaacaaaatggagaagatgaagatggaggttggcgactagctggatcaaggagggatggagagaggtggcgacctcacagtcctgatggccctcgttctgcaggctggcgggaacacatggaacgacgtcggaggtttgagtttgattttcgagatagagatgatgaacggggttaccgaagggttcgctctggcagtgggagcatagatgatgacagggatagcttgcccgaatggtgcttagaggatgctgaagaagaaatgggtacatttgactcatctggagcattcctttctctaaaaaaagtacagaaagagcctattccagaagagcaggagatggacttccggcctgtggacgaaggggaggagtgctctgactctgagggtagccataatgaagaggccaaagaacccgataagacaaataagaaagaaggagagaaaacagatagagtaggagttgaagctagtgaggaaactccccagacctcatcatcatctgctagaccaggtactccttcagaccatcagtctcaggaagcatcacagtttgagaggaaagatgaaccaaaaactgagcaaacggaaaaagctgaagaggagactcggatggaaaatagtctaccagccaaagtgcccagcagaggggatgaaatggttgctgatgtccagcagcccctgtcgcagattccttcagatacagcctctcctcttctcatacttccacctcctgttcccaatcctagtcctactctccggccagttgaaacaccagttgtaggtgctcctggtatgggcagtgtttccacagaacctgatgatgaagaaggtctcaaacatttggagcagcaagctgagaaaatggtggcttatctccaagacagtgcactagatgatgaaagattggcatcaaaactgcaagagcacagagctaaaggagtgtcgattccattgatgcatgaagcaatgcagaagtggtattacaaagatcctcagggagaaattcaaggtcccttcaataatcaggagatggcagaatggtttcaggcgggctattttactatgtctttattggtgaagagagcgtgtgatgaaagcttccaacctcttggcgatatcatgaaaatgtggggaagggttcccttttctccaggtccagctccccctcctcatatgggagagctggaccaggaacgactgaccaggcagcaagaactcacagccttataccagatgcagcacctgcagtaccagcagtttttaatacaacaacaatatgcacaggttttggcccaacagcagaaagcagcactgtcttcccagcagcagcagcagttggcacttcttcttcaacagtttcagaccttgaagatgagaatatctgatcagaacatcattccctcagtaactaggtctgtgtccgtgccagatactggctctatctgggagcttcagccaacagcttcacagcctacagtttgggaaggtggtagtgtatgggatcttcctctggacaccacgacaccaggccctgccctggaacagcttcagcagctagagaaggccaaagctgcaaagctagagcaagagagaagagaggcagaaatgagggcaaaacgggaagaggaagagcgaaagaggcaggaagaactccgaagacaacaggaggaaattcttcggcgacagcaggaagaagaaaggaaaaggcgagaggaagaagaacttgcccgaaggaaacaggaagaggctctgcgtcgccagcgggagcaagaaattgcattaaggcgacagcgagaagaggaagaaagacagcagcaagaagaagctcttagaagactggaagagaggagaagagaagaggaagaaaggcggaagcaggaagaattgttacgcaaacaggaagaggaggctgcaaaatgggcccgggaagaagaagaagcccagcgtcgattagaggagaaccggctgcggatggaagaggaggcagccagactccggcatgaggaagaagaacggaagagaaaggagctggaggtccagcggcagaaggagttaatgcgccagaggcagcagcagcaagaggctctccggaggttgcagcagcagcagcagcaacaacagctggcgcagatgaagcttccttcttcttcaacgtggggccagcagtccaatacaacagcatgtcagtcccaggccacgctgtcgttggctgaaatccaaaaactagaggaagaacgagaacggcagcttcgagaagagcaaaggcgccagcagagggagttgatgaaagctcttcagcagcagcagcaacagcaacagcagaaactctcaggttgggggaatgtcagcaaaccttcaggtaccacgaaatctcttctggagatccagcaggaagaggccaggcaaatgcaaaagcagcagcagcagcagcagcaacaccagcaaccaaacagagctcgtaacaatacgcattccaacctgcacaccagcattgggaattctgtttggggctctataaatactggtcctcctaaccagtgggcatctgacctagtcagtagtatttggagtaatgctgacactaaaaactccaacatgggattctgggatgatgcagtgaaagaggtgggacctaggaattcaacaaataaaaataaaaacaacgccagtctcagtaaatctgtaggtgtgtctaaccggcagaataagaaagtagaagaagaagaaaagttgctgaagctctttcagggagtaaataaagcccaagatggatttacgcagtggtgtgaacagatgcttcatgcccttaatacggcaaataacttggatgttcccacatttgtttctttcctgaaagaagtagaatctccttatgaggtccatgattatatcagggcctatttaggagatacttctgaggccaaggagtttgccaagcagttccttgagcgccgtgccaaacagaaagccaaccagcagcgtcagcagcagcagctgccacagcagcagcagcagcagccgccacagcagccgccacagcagccacaacagcaggactctgtgtgggggatgaaccacagtacactccattcagtatttcagaccaatcaaagcaacaaccaacaatccaattttgaggctgtgcagagtggcaagaagaagaaaaagcagaagatggtccgagcagatcccagtttattaggattttcagtcaatgcatcatcggagcgactcaacatgggtgaaatcgagacgttggatgactactgagcacctgccagtggactggccatccctctcctgtctgccgactatggagtctccacctttggacacaacacttactcaccatttactctttatcactctgcaacaaatcacagaaccgatcatctcaggctttttcttctggccctttgtgtccaagattctttaatccatttttgttggtgaacatctcagactatagataagtggactggaccctgtgtcttgggggtggcagttgggattactccccaacaaggctgattttaggcagcatgtgttcactgtgctgtgatttcatctactgtctcccagaaagtgtgttgggatcggccattagcagcttgctttctcttgtcactttttttcttctattttgttttttcttcttctttttccccccatcagggcaaatggtctaactggtgcaatcatgaagagagttaatggttaacagacattggccaataacaaaacaccccatggactgtgactcgagtatccaacaggcagtcagagctctcccggtctgaaagttgcattgccactgctaactttgggattgcatcagagaggccctgagtggggttgagatgaggttggtttggtttgatgttacacactcctcacctgttctttctgagtgtcctttctctgaaaggatttatgtttttcttcgttagatagtgacttctgagcaagctgatctcccctggcatgctccaacctgattggacaaaggaagctctatggcctgggagagagactattcttaatttttctttcttacaaaaactgatttttcccataaatatttttacttcagaggactaggaccattttgttttgggcccttctgctgaaaatttgtctcgtttaagaggcagctagaatctttaccatatgtatgaatttgtataatttcatttttggatagggataaacttttgcttctgataaaagcctggaatttcatctggtcctcagagcattgcgtgtgtgtcttgctgtagcccggaaaaggttttgtgtaaagattctgggatggcaagttgtttgccttttctgaaaagagaacatacagaacctgtccatctttaagaccttcatccatggaatctactatacaggaggatgcagtgggctggaggggatgggcgaaaatgggagcaggaagcctggcctggcttctggtcatggcctcctaaaaccttaaacttcaagtagaaatgtactcaagccctatttataaacaaatacttttcctgcctccaccaaacccctacagaacatcacctggaattgccactcacactgggttggagtcattgggcagctgtgcctgtgcgagaggtgctgtggtctgggcagcccctggaaaagcacctttgctgcctgtcattgttgcctgaagaaggctggagttgctctgagagcagtttgggtttggagtattatatttggcttctatttttattattttggatcaccattctccctatcccttcttgcctccctcccttctaaacatgtgtaataactatacagagactgctacaaaattgtatatagtttttggatcaaatagcatgaggggagaggaaaccattaaaagttggggctcctactctcctttgctttgtaaattcaaaagttgggggtgggtaagagggatagttaaaatgtttacaaaactttaggctccctcggaacttttgccagtgtggaggaaaataaaaaagaacttaaataaaa

SEQ ID NO: 41169 - DNA, 5978 bp, Artificial Sequence
  derived and/or modified sequence
atcttgtgttgttgaggctgaggactgactggggttctgagactccctgtcccggaccgcagattatagtgggaccagtctcattaggttgaatctacagcctatgttggtgttaacccaggtctcttagagcgttaaaaggatctgaacaaagtctgctcaaatctcctgctgtgaaccagcagaatttttgaacagagaccacgtctccacctcctgggctccaacgattctcccatcttggcctcccaaagcgctggatttacaggtttcttcacatataaaaatctattgtaaaaatacggaaaagaatggcagcggaaacgcagacactgaactttgggcctgaatggctccgagctctgtccagtggtgggagtattacatcccctcctctttctccagcattgccgaagtataaattagcagattatcgttacggcagagaagaaatgttagcacttttccttaaagacaacaagataccttcagaccttctggataaagaatttctgcctatcctccaggaggaaccccttccaccattggctctggtaccctttacagaagaagaacagagaaacttttccatgtctgtaaatagtgctgctgtcctgcgattgacaggacgaggaggaggaggaacagtggtgggggctcctagaggtcgaagttcttcaagagggcgaggcagaggcagaggtgaatgtggtttctaccaaagaagttttgatgaagtagagggtgtttttggtcgaggaggtggcagagaaatgcatagatcgcagagctgggaggaaaggggtgacagacgttttgaaaaaccaggacgaaaagatgtagggagaccaaattttgaggaaggtggaccaacatcagtagggagaaagcatgaatttatacgctcagaaagtgaaaattggcgcatctttagagaggaacaaaatggagaagatgaagatggaggttggcgactagctggatcaaggagggatggagagaggtggcgacctcacagtcctgatggccctcgttctgcaggctggcgggaacacatggaacgacgtcggaggtttgagtttgattttcgagatagagatgatgaacggggttaccgaagggttcgctctggcagtgggagcatagatgatgacagggatagcttgcccgaatggtgcttagaggatgctgaagaagaaatgggtacatttgactcatctggagcattcctttctctaaaaaaagtacagaaagagcctattccagaagagcaggagatggacttccggcctgtggacgaaggggaggagtgctctgactctgagggtagccataatgaagaggccaaagaacccgataagacaaataagaaagaaggagagaaaacagatagagtaggagttgaagctagtgaggaaactccccagacctcatcatcatctgctagaccaggtactccttcagaccatcagtctcaggaagcatcacagtttgagaggaaagatgaaccaaaaactgagcaaacggaaaaagctgaagaggagactcggatggaaaatagtctaccagccaaagtgcccagcagaggggatgaaatggttgctgatgtccagcagcccctgtcgcagattccttcagatacagcctctcctcttctcatacttccacctcctgttcccaatcctagtcctactctccggccagttgaaacaccagttgtaggtgctcctggtatgggcagtgtttccacagaacctgatgatgaagaaggtctcaaacatttggagcagcaagctgagaaaatggtggcttatctccaagacagtgcactagatgatgaaagattggcatcaaaactgcaagagcacagagctaaaggagtgtcgattccattgatgcatgaagcaatgcagaagtggtattacaaagatcctcagggagaaattcaaggtcccttcaataatcaggagatggcagaatggtttcaggcgggctattttactatgtctttattggtgaagagagcgtgtgatgaaagcttccaacctcttggcgatatcatgaaaatgtggggaagggttcccttttctccaggtccagctccccctcctcatatgggagagctggaccaggaacgactgaccaggcagcaagaactcacagccttataccagatgcagcacctgcagtaccagcagtttttaatacaacaacaatatgcacaggttttggcccaacagcagaaagcagcactgtcttcccagcagcagcagcagttggcacttcttcttcaacagtttcagaccttgaagatgagaatatctgatcagaacatcattccctcagtaactaggtctgtgtccgtgccagatactggctctatctgggagcttcagccaacagcttcacagcctacagtttgggaaggtggtagtgtatgggatcttcctctggacaccacgacaccaggccctgccctggaacagcttcagcagctagagaaggccaaagctgcaaagctagagcaagagagaagagaggcagaaatgagggcaaaacgggaagaggaagagcgaaagaggcaggaagaactccgaagacaacaggaggaaattcttcggcgacagcaggaagaagaaaggaaaaggcgagaggaagaagaacttgcccgaaggaaacaggaagaggctctgcgtcgccagcgggagcaagaaattgcattaaggcgacagcgagaagaggaagaaagacagcagcaagaagaagctcttagaagactggaagagaggagaagagaagaggaagaaaggcggaagcaggaagaattgttacgcaaacaggaagaggaggctgcaaaatgggcccgggaagaagaagaagcccagcgtcgattagaggagaaccggctgcggatggaagaggaggcagccagactccggcatgaggaagaagaacggaagagaaaggagctggaggtccagcggcagaaggagttaatgcgccagaggcagcagcagcaagaggctctccggaggttgcagcagcagcagcagcaacaacagctggcgcagatgaagcttccttcttcttcaacgtggggccagcagtccaatacaacagcatgtcagtcccaggccacgctgtcgttggctgaaatccaaaaactagaggaagaacgagaacggcagcttcgagaagagcaaaggcgccagcagagggagttgatgaaagctcttcagcagcagcagcaacagcaacagcagaaactctcaggttgggggaatgtcagcaaaccttcaggtaccacgaaatctcttctggagatccagcaggaagaggccaggcaaatgcaaaagcagcagcagcagcagcagcaacaccagcaaccaaacagagctcgtaacaatacgcattccaacctgcacaccagcattgggaattctgtttggggctctataaatactggtcctcctaaccagtgggcatctgacctagtcagtagtatttggagtaatgctgacactaaaaactccaacatgggattctgggatgatgcagtgaaagaggtgggacctaggaattcaacaaataaaaataaaaacaacgccagtctcagtaaatctgtaggtgtgtctaaccggcagaataagaaagtagaagaagaagaaaagttgctgaagctctttcagggagtaaataaagcccaagatggatttacgcagtggtgtgaacagatgcttcatgcccttaatacggcaaataacttggatgttcccacatttgtttctttcctgaaagaagtagaatctccttatgaggtccatgattatatcagggcctatttaggagatacttctgaggccaaggagtttgccaagcagttccttgagcgccgtgccaaacagaaagccaaccagcagcgtcagcagcagcagctgccacagcagcagcagcagcagccgccacagcagccgccacagcagccacaacagcaggactctgtgtgggggatgaaccacagtacactccattcagtatttcagaccaatcaaagcaacaaccaacaatccaattttgaggctgtgcagagtggcaagaagaagaaaaagcagaagatggtccgagcagatcccagtttattaggattttcagtcaatgcatcatcggagcgactcaacatgggtgaaatcgagacgttggatgactactgagcacctgccagtggactggccatccctctcctgtctgccgactatggagtctccacctttggacacaacacttactcaccatttactctttatcactctgcaacaaatcacagaaccgatcatctcaggctttttcttctggccctttgtgtccaagattctttaatccatttttgttggtgaacatctcagactatagataagtggactggaccctgtgtcttgggggtggcagttgggattactccccaacaaggctgattttaggcagcatgtgttcactgtgctgtgatttcatctactgtctcccagaaagtgtgttgggatcggccattagcagcttgctttctcttgtcactttttttcttctattttgttttttcttcttctttttccccccatcagggcaaatggtctaactggtgcaatcatgaagagagttaatggttaacagacattggccaataacaaaacaccccatggactgtgactcgagtatccaacaggcagtcagagctctcccggtctgaaagttgcattgccactgctaactttgggattgcatcagagaggccctgagtggggttgagatgaggttggtttggtttgatgttacacactcctcacctgttctttctgagtgtcctttctctgaaaggatttatgtttttcttcgttagatagtgacttctgagcaagctgatctcccctggcatgctccaacctgattggacaaaggaagctctatggcctgggagagagactattcttaatttttctttcttacaaaaactgatttttcccataaatatttttacttcagaggactaggaccattttgttttgggcccttctgctgaaaatttgtctcgtttaagaggcagctagaatctttaccatatgtatgaatttgtataatttcatttttggatagggataaacttttgcttctgataaaagcctggaatttcatctggtcctcagagcattgcgtgtgtgtcttgctgtagcccggaaaaggttttgtgtaaagattctgggatggcaagttgtttgccttttctgaaaagagaacatacagaacctgtccatctttaagaccttcatccatggaatctactatacaggaggatgcagtgggctggaggggatgggcgaaaatgggagcaggaagcctggcctggcttctggtcatggcctcctaaaaccttaaacttcaagtagaaatgtactcaagccctatttataaacaaatacttttcctgcctccaccaaacccctacagaacatcacctggaattgccactcacactgggttggagtcattgggcagctgtgcctgtgcgagaggtgctgtggtctgggcagcccctggaaaagcacctttgctgcctgtcattgttgcctgaagaaggctggagttgctctgagagcagtttgggtttggagtattatatttggcttctatttttattattttggatcaccattctccctatcccttcttgcctccctcccttctaaacatgtgtaataactatacagagactgctacaaaattgtatatagtttttggatcaaatagcatgaggggagaggaaaccattaaaagttggggctcctactctcctttgctttgtaaattcaaaagttgggggtgggtaagagggatagttaaaatgtttacaaaactttaggctccctcggaacttttgccagtgtggaggaaaataaaaaagaacttaaataaaatctgattgtattcta

SEQ ID NO: 41170 - DNA, 2913 bp, Artificial Sequence
  derived and/or modified sequence
tcatgctatctttatcagtttccaaaggaacgtttaaagttagttccgaagtagtcttcctgatcatgtgtgcaagacttcatgaccaagctcccagatgatccagggagaccaaattttgaggaaggtggaccaacatcagtagggagaaagcatgaatttatacgctcagaaagtgaaaattggcgcatctttagagaggaacaaaatggagaagatgaagatggaggttggcgactagctggatcaaggagggatggagagaggtggcgacctcacagtcctgatggccctcgttctgcaggctggcgggaacacatggaacgacgtcggaggtttgagtttgattttcgagatagagatgatgaacggggttaccgaagggttcgctctggcagtgggagcatagatgatgacagggatagcttgcccgaatggtgcttagaggatgctgaagaagaaatgggtacatttgactcatctggagcattcctttctctaaaaaaagtacagaaagagcctattccagaagagcaggagatggacttccggcctgtggacgaaggggaggagtgctctgactctgagggtagccataatgaagaggccaaagaacccgataagacaaataagaaagaaggagagaaaacagatagagtaggagttgaagctagtgaggaaactccccagacctcatcatcatctgctagaccaggtactccttcagaccatcagtctcaggaagcatcacagtttgagaggaaagatgaaccaaaaactgagcaaacggaaaaagctgaagaggagactcggatggaaaatagtctaccagccaaagtgcccagcagaggggatgaaatggttgctgatgtccagcagcccctgtcgcagattccttcagatacagcctctcctcttctcatacttccacctcctgttcccaatcctagtcctactctccggccagttgaaacaccagttgtaggtgctcctggtatgggcagtgtttccacagaacctgatgatgaagaaggtctcaaacatttggagcagcaagctgagaaaatggtggcttatctccaagacagtgcactagatgatgaaagattggcatcaaaactgcaagagcacagagctaaaggagtgtcgattccattgatgcatgaagcaatgcagaagtggtattacaaagatcctcagggagaaattcaaggtcccttcaataatcaggagatggcagaatggtttcaggcgggctattttactatgtctttattggtgaagagagcgtgtgatgaaagcttccaacctcttggcgatatcatgaaaatgtggggaagggttcccttttctccaggtccagctccccctcctcatatgggagagctggaccaggaacgactgaccaggcagcaagaactcacagccttataccagatgcagcacctgcagtaccagcagtttttaatacaacaacaatatgcacaggttttggcccaacagcagaaagcagcactgtcttcccagcagcagcagcagttggcacttcttcttcaacagtttcagaccttgaagatgagaatatctgatcagaacatcattccctcagtaactaggtctgtgtccgtgccagatactggctctatctgggagcttcagccaacagcttcacagcctacagtttgggaaggtggtagtgtatgggatcttcctctggacaccacgacaccaggccctgccctggaacagcttcagcagctagagaaggccaaagctgcaaagctagagcaagagagaagagaggcagaaatgagggcaaaacgggaagaggaagagcgaaagaggcaggaagaactccgaagacaacaggaggaaattcttcggcgacagcaggaagaagaaaggaaaaggcgagaggaagaagaacttgcccgaaggaaacaggaagaggctctgcgtcgccagcgggagcaagaaattgcattaaggcgacagcgagaagaggaagaaagacagcagcaagaagaagctcttagaagactggaagagaggagaagagaagaggaagaaaggcggaagcaggaagaattgttacgcaaacaggaagaggaggctgcaaaatgggcccgggaagaagaagaagcccagcgtcgattagaggagaaccggctgcggatggaagaggaggcagccagactccggcatgaggaagaagaacggaagagaaaggagctggaggtccagcggcagaaggagttaatgcgccagaggcagcagcagcaagaggctctccggaggttgcagcagcagcagcagcaacaacagctggcgcagatgaagcttccttcttcttcaacgtggggccagcagtccaatacaacagcatgtcagtcccaggccacgctgtcgttggctgaaatccaaaaactagaggaagaacgagaacggcagcttcgagaagaggaatcctcagctagcttctgtttttatgcaacagcaaaggcgccagcagagggagttgatgaaagctcttcagcagcagcagcaacagcaacagcagaaactctcaggttgggggaatgtcagcaaaccttcaggtaccacgaaatctcttctggagatccagcaggaagaggccaggcaaatgcaaaagcagcagcagcagcagcagcaacaccagcaaccaaacagagctcgtaacaatacgcattccaacctgcacaccagcattgggaattctgtttggggctctataaatactggtcctcctaaccagtgggcatctgacctagtcagtagtatttggagtaatgctgacactaaaaactccaacatgggattctgggatgatgcagtgaaagaggtgggacctaggaattcaacaaataaaaataaaaacaacgccagtctcag

SEQ ID NO: 41171 - DNA, 2675 bp, Artificial Sequence
  derived and/or modified sequence
atcttgtgttgttgaggctgaggactgactggggttctgagactccctgtcccggaccgcagattatagtgggaccagtctcattaggttgaatctacagcctatgttggtgttaacccaggtctcttagagcgttaaaaggatctgaacaaagtctgctcaaatctcctgctgtgaaccagcagaatttttgaacaggtttcttcacatataaaaatctattgtaaaaatacggaaaagaatggcagcggaaacgcagacactgaactttgggcctgaatggctccgagctctgtccagtggtgggagtattacatcccctcctctttctccagcattgccgaagtataaattagcagattatcgttacggcagagaagaaatgttagcacttttccttaaagacaacaagataccttcagaccttctggataaagaatttctgcctatcctccaggaggaaccccttccaccattggctctggtaccctttacagaagaagaacagagaaacttttccatgtctgtaaatagtgctgctgtcctgcgattgacaggacgaggaggaggaggaacagtggtgggggctcctagaggtcgaagttcttcaagagggcgaggcagaggcagaggtgaatgtggtttctaccaaagaagttttgatgaagtagagggtgtttttggtcgaggaggtggcagagaaatgcatagatcgcagagctgggaggaaaggggtgacagacgttttgaaaaaccaggacgaaaagatgtagggagaccaaattttgaggaaggtggaccaacatcagtagggagaaagcatgaatttatacgctcagaaagtgaaaattggcgcatctttagagaggaacaaaatggagaagatgaagatggaggttggcgactagctggatcaaggagggatggagagaggtggcgacctcacagtcctgatggccctcgttctgcaggctggcgggaacacatggaacgacgtcggaggtttgagtttgattttcgagatagagatgatgaacggggttaccgaagggttcgctctggcagtgggagcatagatgatgacagggatagcttgcccgaatggtgcttagaggatgctgaagaagaaatgggtacatttgactcatctggagcattcctttctctaaaaaaagtacagaaagagcctattccagaagagcaggagatggacttccggcctgtggacgaaggggaggagtgctctgactctgagggtagccataatgaagaggccaaagaacccgataagacaaataagaaagaaggagagaaaacagatagagtaggagttgaagctagtgaggaaactccccagacctcatcatcatctgctagaccaggtactccttcagaccatcagtctcaggaagcatcacagtttgagaggaaagatgaaccaaaaactgagcaaacggaaaaagctgaagaggagactcggatggaaaatagtctaccagccaaagtgcccagcagaggggatgaaatggttgctgatgtccagcagcccctgtcgcagattccttcagatacagcctctcctcttctcatacttccacctcctgttcccaatcctagtcctactctccggccagttgaaacaccagttgtaggtgctcctggtatgggcagtgtttccacagaacctgatgatgaagaaggtctcaaacatttggagcagcaagctgagaaaatggtggcttatctccaagacagtgcactagatgatgaaagattggcatcaaaactgcaagagcacagagctaaaggagtgtcgattccattgatgcatgaagcaatgcagaagtggtattacaaagatcctcagggagaaattcaaggtcccttcaataatcaggagatggcagaatggtttcaggcgggctattttactatgtctttattggtgaagagagcgtgtgatgaaagcttccaacctcttggcgatatcatgaaaatgtggggaagggttcccttttctccaggtccagctccccctcctcatatgggagagctggaccaggaacgactgaccaggcagcaagaactcacagccttataccagatgcagcacctgcagtaccagcagtttttaatacaacaacaatatgcacaggttttggcccaacagcagaaagcagcactgtcttcccagcagcagcagcagttggcacttcttcttcaacagtttcagaccttgaagatgagaatatctgatcagaacatcattccctcagtaactaggtctgtgtccgtgccagatactggctctatctgggagcttcagccaacagcttcacagcctacagtttgggaaggtggtagtgtatgggatcttcctctggacaccacgacaccaggccctgccctggaacagcttcagcagctagagaaggccaaagctgcaaagctagagcaagagagaagagaggcagaaatgagggcaaaacgggaagaggaagagcgaaagaggcaggaagaactccgaagacaacaggaggaaattcttcggcgacagcaggaagaagaaaggaaaaggcgagaggtgggtaagagggatagttaaaatgtttacaaaactttaggctccctcggaacttttgccagtgtggaggaaaataaaaaagaacttaaat

SEQ ID NO: 41172 - DNA, 3900 bp, Artificial Sequence
  derived and/or modified sequence
atggctgctgagacccagaccctgaactttggacctgagtggctgcgggccctgagcagcggcggcagcatcaccagcccccccctgagccctgccctgcccaagtacaagctggccgactaccgctatggccgggaggagatgctggccctcttcctgaaggacaacaagatccccagcgacctgctggacaaggagttcctgcccatcctgcaggaggagcccctgccccccctggccctggtgcccttcacagaggaggagcagaggaacttctccatgtctgtgaacagcgctgctgtgctgcggctgaccggccggggcggcggcggcaccgtggtgggcgccccccggggccgcagcagcagccggggccggggccggggccgcggggagtgtggcttctaccagaggagctttgatgaggtggagggcgtgtttggccggggcggcggccgggagatgcacaggagccagagctgggaggagcggggggacagaagatttgagaagccaggcaggaaggatgtgggccggcccaactttgaggagggcggccccacctctgtgggcaggaagcatgagttcatccgctctgagagcgagaactggaggatcttccgggaggagcagaatggagaagatgaagatggcggctggaggctggccggcagcagaagagatggagagcgctggaggccccacagcccagatggccccaggtctgctggctggagggagcacatggagaggagaagaagatttgaatttgacttccgggacagagatgatgagcggggctacagaagagtgcgcagcggcagcggcagcattgatgatgaccgggacagcctgcctgagtggtgcctggaggatgctgaggaggagatgggcacctttgacagcagcggggccttcctgagcctgaagaaggtgcagaaggagcccatccctgaggagcaggagatggacttccggcctgtggatgaaggagaagaatgtagtgacagcgagggcagccacaatgaggaggccaaggagccagacaagaccaacaagaaggagggggagaagacagacagagtgggcgtggaggccagcgaggagaccccccagaccagcagcagcagcgcccggcccggcacccccagcgaccaccagagccaggaggccagccagtttgagaggaaggatgagcccaagacagagcagacagagaaggccgaggaggagaccaggatggagaacagcctgcctgccaaggtgcccagcagaggagatgagatggtggctgatgtgcagcagcccctgagccagatccccagcgacacagccagccccctgctgatcctgcccccacctgtgcccaaccccagccccaccctgcggcctgtggagacccctgtggtgggcgcccctggcatgggctctgtgtccacagagccagatgatgaggagggcctgaagcacctggagcagcaggccgagaagatggtggcctacctgcaggacagcgccctggatgatgagcggctggccagcaagctgcaggagcaccgggccaagggcgtgtccatccccctgatgcatgaggccatgcagaagtggtactacaaggacccccagggcgagatccagggccccttcaacaaccaggagatggccgagtggttccaggccggctacttcaccatgagcctgctggtgaagagggcctgtgatgagagcttccagcccctgggggacatcatgaagatgtggggccgggtgcccttcagccctggccctgcccccccaccccacatgggagagctggaccaggagcggctgacccggcagcaggagctgacagccctgtaccagatgcagcacctgcagtaccagcagttcctgatccagcagcagtatgcccaggtgctggcccagcagcagaaggccgccctgagcagccagcagcagcagcagctggccctgctgctgcagcagttccagaccctgaagatgaggatcagtgaccagaacatcatccccagcgtgaccaggtctgtgtctgtgcctgacaccggcagcatctgggagctgcagcccacagccagccagcccaccgtgtgggagggcggctctgtgtgggacctgcccctggacaccaccaccccaggccctgccctggagcagctgcagcagctggagaaggccaaggccgccaagctggagcaggagcggcgggaggccgagatgagggccaagcgggaggaggaggagaggaagaggcaggaggagctgcggcggcagcaggaggagatcctgcggcggcagcaggaggaggagaggaagagaagagaggaggaggagctggcccggaggaagcaggaggaggccctgcggcggcagcgggagcaggagatcgccctgcggcggcagcgggaggaggaggagcggcagcagcaggaggaggccctgcggcggctggaggagaggagaagagaggaggaggagaggaggaagcaggaggagctgctgaggaagcaggaggaggaggccgccaagtgggcccgggaggaggaggaggcccagaggcggctggaggagaaccggctgaggatggaggaggaggccgcccggctgcggcatgaggaggaggagaggaagaggaaggagctggaggtgcagaggcagaaggagctgatgaggcagaggcagcagcagcaggaggccctgcggcggctgcagcagcagcagcagcagcagcagctggcccagatgaagctgcccagcagcagcacctggggccagcagagcaacaccacagcctgccagagccaggccaccctgagcctggccgagatccagaagctggaggaggagcgggagcggcagctgcgggaggagcagaggcggcagcagcgggagctgatgaaggccctgcagcagcagcagcagcagcagcagcagaagctgagcggctggggcaatgtgtccaagcccagcggcaccaccaagagcctgctggagatccagcaggaggaggcccggcagatgcagaagcagcagcagcagcagcagcagcaccagcagcccaacagagccaggaacaacacccacagcaacctgcacaccagcatcggcaacagcgtgtggggcagcatcaacacaggcccccccaaccagtgggccagtgacctggtgagcagcatctggagcaatgctgacaccaagaacagcaacatgggcttctgggatgatgctgtgaaggaggtgggccccaggaacagcaccaacaagaacaagaacaatgccagcctgagcaagtctgtgggcgtgagcaaccggcagaacaagaaggtggaggaggaggagaagctgctgaagctgttccagggcgtgaacaaggcccaggacggcttcacccagtggtgtgagcagatgctgcacgccctgaacacagccaacaacctggatgtgcccacctttgtgtccttcctgaaggaggtggagagcccctatgaggtgcatgactacatccgggcctacctgggggacaccagcgaggccaaggagtttgccaagcagttcctggagcggcgggccaagcagaaggccaaccagcagaggcagcagcagcagctgccccagcagcagcagcagcagcccccccagcagcccccccagcagccccagcagcaggacagcgtgtggggcatgaaccacagcaccctgcacagcgtcttccagaccaaccagagcaacaaccagcagagcaactttgaagctgtgcagagcggcaagaagaagaagaagcagaagatggtgcgggctgaccccagcctgctgggcttctctgtgaatgccagcagcgagcggctgaacatgggagaaattgagaccctggatgactactag

SEQ ID NO: 41173 - DNA, 2619 bp, Artificial Sequence
  derived and/or modified sequence
atgaccaagctgcctgatgaccccggccggcccaactttgaggagggcggccccacctctgtgggcaggaagcatgagttcatccgctctgagagcgagaactggaggatcttccgggaggagcagaatggagaagatgaagatggcggctggaggctggccggcagcagaagagatggagagcgctggaggccccacagcccagatggccccaggtctgctggctggagggagcacatggagaggagaagaagatttgaatttgacttccgggacagagatgatgagcggggctaccgccgggtgcgcagcggcagcggcagcattgatgatgaccgggacagcctgcctgagtggtgcctggaggatgctgaggaggagatgggcacctttgacagcagcggggccttcctgagcctgaagaaggtgcagaaggagcccatccctgaggagcaggagatggacttccggcctgtggatgaaggagaggagtgcagcgacagcgagggcagccacaatgaggaggccaaggagccagacaagaccaacaagaaggagggggagaagacagacagagtgggcgtggaggccagcgaggagaccccccagaccagcagcagcagcgcccggcccggcacccccagcgaccaccagagccaggaggccagccagtttgagaggaaggatgagcccaagacagagcagacagagaaggccgaggaggagaccaggatggagaacagcctgcctgccaaggtgcccagcagaggagatgagatggtggctgatgtgcagcagcccctgagccagatccccagcgacacagccagccccctgctgatcctgcccccacctgtgcccaaccccagccccaccctgcggcctgtggagacccctgtggtgggcgcccctggcatgggctctgtgtccacagagccagatgatgaggagggcctgaagcacctggagcagcaggccgagaagatggtggcctacctgcaggacagcgccctggatgatgagcggctggccagcaagctgcaggagcaccgggccaagggcgtgtccatccccctgatgcatgaggccatgcagaagtggtactacaaggacccccagggcgagatccagggccccttcaacaaccaggagatggccgagtggttccaggccggctacttcaccatgagcctgctggtgaagagggcctgtgatgagagcttccagcccctgggggacatcatgaagatgtggggccgggtgcccttcagccctggccctgcccccccaccccacatgggagagctggaccaggagcggctgacccggcagcaggagctgacagccctgtaccagatgcagcacctgcagtaccagcagttcctgatccagcagcagtatgcccaggtgctggcccagcagcagaaggccgccctgagcagccagcagcagcagcagctggccctgctgctgcagcagttccagaccctgaagatgaggatcagtgaccagaacatcatccccagcgtgaccaggtctgtgtctgtgcctgacaccggcagcatctgggagctgcagcccacagccagccagcccaccgtgtgggagggcggctctgtgtgggacctgcccctggacaccaccaccccaggccctgccctggagcagctgcagcagctggagaaggccaaggccgccaagctggagcaggagcggcgggaggccgagatgagggccaagcgggaggaggaggagaggaagaggcaggaggagctgcggcggcagcaggaggagatcctgcggcggcagcaggaggaggagaggaagaggcgggaggaggaggagctggcccggaggaagcaggaggaggccctgcggcggcagcgggagcaggagatcgccctgcggcggcagcgggaggaggaggagcggcagcagcaggaggaggccctgcggcggctggaggagcggcggcgggaggaggaggagaggaggaagcaggaggagctgctgaggaagcaggaggaggaggccgccaagtgggcccgggaggaggaggaggcccagaggcggctggaggagaaccggctgaggatggaggaggaggccgcccggctgcggcatgaggaggaggagaggaagaggaaggagctggaggtgcagaggcagaaggagctgatgaggcagaggcagcagcagcaggaggccctgcggcggctgcagcagcagcagcagcagcagcagctggcccagatgaagctgcccagcagcagcacctggggccagcagagcaacaccacagcctgccagagccaggccaccctgagcctggccgagatccagaagctggaggaggagcgggagcggcagctgcgggaggaggagagcagcgccagcttctgcttctacgccacagccaaggccccagctgagggcgtggatgagagcagcagcgctgctgctgccacagccacagctgagaccctgcggctgggggagtgccagcagaccttccgctaccacgagatcagcagcggggaccctgctggccggggccaggccaatgccaaggctgctgctgctgctgctgccaccccagccaccaagcagagcagctag

SEQ ID NO: 41174 - DNA, 2364 bp, Artificial Sequence
  derived and/or modified sequence
atggctgctgagacccagaccctgaactttggacctgagtggctgcgggccctgagcagcggcggcagcatcaccagcccccccctgagccctgccctgcccaagtacaagctggccgactaccgctatggccgggaggagatgctggccctcttcctgaaggacaacaagatccccagcgacctgctggacaaggagttcctgcccatcctgcaggaggagcccctgccccccctggccctggtgcccttcacagaggaggagcagaggaacttctccatgtctgtgaacagcgctgctgtgctgcggctgaccggccggggcggcggcggcaccgtggtgggcgccccccggggccgcagcagcagccggggccggggccggggccgcggggagtgtggcttctaccagaggagctttgatgaggtggagggcgtgtttggccggggcggcggccgggagatgcacaggagccagagctgggaggagcggggggacagaagatttgagaagccaggcaggaaggatgtgggccggcccaactttgaggagggcggccccacctctgtgggcaggaagcatgagttcatccgctctgagagcgagaactggaggatcttccgggaggagcagaatggagaagatgaagatggcggctggaggctggccggcagcagaagagatggagagcgctggaggccccacagcccagatggccccaggtctgctggctggagggagcacatggagaggagaagaagatttgaatttgacttccgggacagagatgatgagcggggctacagaagagtgcgcagcggcagcggcagcattgatgatgaccgggacagcctgcctgagtggtgcctggaggatgctgaggaggagatgggcacctttgacagcagcggggccttcctgagcctgaagaaggtgcagaaggagcccatccctgaggagcaggagatggacttccggcctgtggatgaaggagaagaatgtagtgacagcgagggcagccacaatgaggaggccaaggagccagacaagaccaacaagaaggagggggagaagacagacagagtgggcgtggaggccagcgaggagaccccccagaccagcagcagcagcgcccggcccggcacccccagcgaccaccagagccaggaggccagccagtttgagaggaaggatgagcccaagacagagcagacagagaaggccgaggaggagaccaggatggagaacagcctgcctgccaaggtgcccagcagaggagatgagatggtggctgatgtgcagcagcccctgagccagatccccagcgacacagccagccccctgctgatcctgcccccacctgtgcccaaccccagccccaccctgcggcctgtggagacccctgtggtgggcgcccctggcatgggctctgtgtccacagagccagatgatgaggagggcctgaagcacctggagcagcaggccgagaagatggtggcctacctgcaggacagcgccctggatgatgagcggctggccagcaagctgcaggagcaccgggccaagggcgtgtccatccccctgatgcatgaggccatgcagaagtggtactacaaggacccccagggcgagatccagggccccttcaacaaccaggagatggccgagtggttccaggccggctacttcaccatgagcctgctggtgaagagggcctgtgatgagagcttccagcccctgggggacatcatgaagatgtggggccgggtgcccttcagccctggccctgcccccccaccccacatgggagagctggaccaggagcggctgacccggcagcaggagctgacagccctgtaccagatgcagcacctgcagtaccagcagttcctgatccagcagcagtatgcccaggtgctggcccagcagcagaaggccgccctgagcagccagcagcagcagcagctggccctgctgctgcagcagttccagaccctgaagatgaggatcagtgaccagaacatcatccccagcgtgaccaggtctgtgtctgtgcctgacaccggcagcatctgggagctgcagcccacagccagccagcccaccgtgtgggagggcggctctgtgtgggacctgcccctggacaccaccaccccaggccctgccctggagcagctgcagcagctggagaaggccaaggccgccaagctggagcaggagcggcgggaggccgagatgagggccaagcgggaggaggaggagaggaagaggcaggaggagctgcggcggcagcaggaggagatcctgcggcggcagcaggaggaggagaggaagagaagagaggtgggcaagagggacagctag

SEQ ID NO: 41175 - DNA, 3900 bp, Artificial Sequence
  derived and/or modified sequence
atggccgccgagacccagaccctgaacttcggccccgagtggctgagagcactctcatctggaggtagcattacatctcctcctttaagtcccgcgctcccaaaatacaagctggctgattaccgatatgggcgggaggaaatgctggctctcttcttaaaagataacaaaattcctagtgacttactggataaggagttcttacccatcctgcaggaggaaccgctacctccccttgcactggtgccattcaccgaggaagaacagaggaatttctcaatgagcgtgaatagtgccgccgttttacgtctgacaggacgcggcggcggaggcacagtggtgggggccccaaggggtcggagttcttcgagaggacgggggcggggccgcggcgaatgcgggttttatcagaggtctttcgatgaagttgaaggagtctttgggcgcggtgggggccgcgagatgcaccggagtcagtcatgggaggagcggggagaccggagattcgagaagcctgggcgcaaagacgtggggagacccaatttcgaggaaggaggccccacctccgtaggtcggaagcatgagttcatcagaagtgaatccgagaactggagaatttttcgcgaggagcagaatggtgaggacgaggatggtggatggaggctcgcaggttctcggagagatggagagagatggcgccctcacagccccgatggcccgagaagtgctggatggcgggaacatatggaaagaaggcgtaggttcgaatttgactttcgcgatcgggacgatgaacgcggttaccggcgcgtccgttcgggttctgggtctattgatgatgacagagattccctccctgaatggtgcctcgaggacgccgaagaggaaatggggacatttgatagctccggtgctttcctttccctgaaaaaggtgcagaaagaacctatccccgaggagcaggagatggacttcaggcccgtagacgaaggcgaagagtgctcagattccgaagggagccacaatgaggaggcgaaggagcctgacaaaactaacaagaaggagggagagaaaacggacagggtaggagtcgaggccagcgaagagaccccccaaacatcctcttcctctgcccgtccaggcactccgagcgaccaccagagccaggaggcatctcagtttgagcggaaggatgagccaaagacggaacagacagagaaggcagaagaggagacaagaatggagaatagcctgccagcaaaagtgccctcaaggggtgacgaaatggtggccgacgtacagcaaccattaagccagattccctctgataccgcctcccctttactgatcctgccccctcctgtcccaaatccttcccccacactgaggcccgtagaaacgcccgtggtaggcgcacccggtatgggatctgtaagcacagagcccgacgacgaggaagggctgaagcaccttgagcagcaggcagaaaaaatggtagcatacctacaggatagcgcactggatgatgagcgtctggcgtcaaagctgcaggagcacagggcaaagggcgtatccattccacttatgcatgaagccatgcagaaatggtactacaaggacccgcagggggagattcagggccctttcaacaatcaggagatggctgaatggttccaggctggctattttaccatgagcttgctggtgaagcgcgcttgcgacgagtcatttcagcccctaggggatatcatgaaaatgtgggggagagttccttttagccccggtccagcaccccctccacacatgggcgagttggatcaggagcgcctgaccagacagcaggaactcacagcactgtaccagatgcagcatttacagtaccagcagttcctcatccagcagcagtatgcccaggttcttgcacagcagcaaaaagctgccctgagctcacagcagcagcagcagcttgccctcttgctacagcagttccagaccctgaagatgaggatctcagaccagaatataattccttcagtgaccagaagtgtctcagtccctgacactggcagcatctgggaactgcagccaacggccagccagcccaccgtgtgggaaggcggaagtgtatgggatcttcccctggatacaacaaccccgggcccagccctcgaacagctccaacagctggaaaaggccaaggcagcaaagctagagcaggagcggagggaagccgaaatgcgtgccaagcgagaggaggaggaacgaaagcgacaagaagaactgcgacgacagcaggaagagatcctgagaaggcagcaggaggaagaacggaaaaggagggaagaagaagagcttgcaaggcgcaaacaagaggaggctctgagaagacagcgtgaacaggagatcgccctccggagacagcgggaagaagaggagagacagcagcaagaggaggcgttgaggcgactcgaagagaggagacgtgaggaggaagagagacggaaacaggaggagcttctgcgaaaacaggaagaggaggccgccaaatgggcacgggaagaagaggaggcccagaggcggttagaagagaacagactccggatggaagaggaagcagctagactgagacacgaggaagaggaacgcaagaggaaggagctagaagttcagcgtcagaaggagttgatgaggcagcggcagcagcaacaggaagctcttagacgcctccagcagcagcagcagcaacagcagttagcccagatgaagctgccctcctcatccacctggggccagcaaagcaatactacagcctgccagagccaagccactctctctctggccgaaattcagaaactcgaggaagaacgggagcggcagttgagagaggaacaacgacggcagcagcgggaattgatgaaggccctccagcagcaacaacagcagcaacagcagaaactcagcggctgggggaatgtctcaaagcctagcggtactaccaagtctttactggagatccagcaggaagaggctcgccaaatgcagaagcagcagcagcaacaacagcagcatcagcagcccaatcgagcccggaataacacccattctaatctgcatacatcaatcggcaatagcgtgtggggttcaattaacaccgggccccctaatcagtgggccagcgacttggtttcttctatttggtccaacgccgatacaaaaaacagcaatatggggttctgggatgatgccgttaaggaggtgggtccccggaattcgactaacaagaataaaaataatgctagcctcagcaagagcgtgggtgttagtaaccgccagaataaaaaggtggaggaagaagaaaagttactgaaactattccagggtgtgaacaaggcccaggatggctttacacaatggtgcgagcaaatgttgcacgcccttaataccgcaaataatctggatgtccccactttcgttagttttcttaaggaggtagagtccccgtacgaagtacatgactatatccgcgcatacctgggagacacatctgaggccaaagaatttgccaagcagttcctggagaggagggccaaacagaaagctaaccagcagagacagcagcaacagctgccccagcagcaacagcaacagcctccacagcagccccctcaacagccacagcagcaagatagtgtgtggggaatgaaccactcaaccctgcattctgtgttccagaccaatcagtccaacaatcaacagagtaactttgaagccgtgcagtccggtaagaaaaaaaaaaaacagaaaatggtgcgcgctgatcccagtttactcggctttagtgtcaatgcgtctagcgaacgactgaacatgggcgagatcgaaacactggatgattattag

SEQ ID NO: 41176 - DNA, 3900 bp, Artificial Sequence
  derived and/or modified sequence
atggccgccgagacccagaccctgaacttcggccccgagtggctgcgcgccctctcatcaggaggctccatcacatcacccccgctttcacctgcactgcccaaatataagctggctgactatcgatatgggagggaggagatgctagcactgttcctcaaagacaataagataccctcagacttgctcgataaagaattcctgccaatattacaagaggaaccacttcctccactcgctctcgttccatttactgaagaggagcagaggaatttcagcatgagcgtgaacagtgctgcagttctgagactgaccgggagaggcgggggtggaactgtggtgggggctccacgtggcagaagttcatctagggggaggggaaggggccgaggcgaatgtggcttttaccagcggtctttcgacgaagtggagggagtttttggacggggcggtggccgagagatgcacaggtctcagagttgggaagagaggggagaccgccgcttcgaaaaaccagggaggaaagacgtcggccggcctaattttgaagaaggcggccctacttctgtggggaggaaacacgagttcatcagatccgaatctgaaaactggaggattttccgcgaggaacaaaatggggaggatgaggacggcggctggagactcgccgggagtaggcgggacggggaacggtggcgccctcattctcccgatggccctcgcagtgcggggtggcgggagcacatggaaagacgccgccggttcgagttcgacttccgtgatcgcgacgacgagcgcggctatagaagggtcaggtcaggctcaggttctatcgacgacgatagggactcattaccagagtggtgtctggaggacgccgaggaagagatgggcacctttgatagtagcggcgcattcctaagcttaaaaaaggtgcagaaggagcccatacccgaagaacaagaaatggactttcgcccagttgacgaaggggaagaatgtagcgacagcgaaggatcccataatgaggaggcaaaagagcccgataaaactaacaaaaaagaaggagagaagaccgatagggtaggggttgaggcctcagaagagacaccccagacatcctcaagctccgccagacctgggaccccgagcgatcaccagtcccaggaggcctctcagtttgagcggaaggacgaacccaagacagaacagactgagaaggccgaagaggaaactagaatggagaactcgctacctgcaaaggtgcctagccggggcgacgagatggttgccgacgtgcagcaacccctctctcagataccgagcgataccgcgtctccccttttaatcctgccccctcccgtcccaaaccccagcccaaccctcagacccgtggaaacaccagtggtgggcgcacctggaatgggatctgtatcaaccgaacctgacgatgaggagggattaaagcatcttgagcagcaggctgagaagatggttgcttatcttcaggactccgctctcgacgacgagagactcgcttcaaagctacaagaacaccgggctaagggtgtaagtataccccttatgcatgaggccatgcaaaagtggtactataaagatcctcagggggagattcaaggacctttcaataaccaggaaatggcagaatggtttcaggcaggctacttcactatgtcactgctcgtaaaacgagcttgcgatgagagctttcagcccctgggcgatatcatgaagatgtggggcagggtgccattttcacctggcccggcacctccaccacacatgggggaactggatcaggagcggcttacccgccaacaggagctgactgccctgtatcagatgcagcatttgcagtatcaacagttcctgatccagcagcagtatgcccaagtgcttgcccagcaacaaaaagccgcactctcttcccagcagcagcagcaattagcgctcctgctccagcagtttcaaactctgaaaatgcgcatttccgaccagaacatcattccatccgtcacgcggtcggtcagtgtgccagacacaggatccatttgggagctgcagccgacggcctcgcagccaacagtgtgggaaggtggatccgtgtgggaccttccactagacaccaccacgcccggtccagctttggagcagctccagcaattggaaaaagctaaggctgcgaaactggagcaggaacgaagagaggccgaaatgagagccaagcgggaagaggaggagcggaaaaggcaggaagagcttcgacgtcagcaagaagagatacttcggaggcagcaggaggaagaacgcaagcgcagagaggaagaggagcttgctcggcggaagcaagaggaggcgttaaggagacaaagagagcaggagattgcattgcgacgtcagcgagaggaagaagaaaggcagcagcaggaggaagcactccgacgcctggaagaacgtcggagagaagaggaggagaggcgcaaacaagaggagctcctgcggaaacaggaggaggaagcagccaagtgggctcgggaggaagaagaggcccagcggcgcctggaagaaaatcggttgcgtatggaggaggaggccgcccgcctcaggcacgaagaagaggaacgcaaacggaaggagctagaagtccagcgacagaaggagctgatgcggcaacggcaacagcagcaagaagctcttcgtaggctgcagcagcagcagcagcaacagcagctcgcacagatgaagctcccatcctctagcacatggggccagcagagtaacaccactgcctgtcagagccaggctacactctccctcgccgaaattcagaaacttgaggaagagcgtgagagacagctgagggaagagcagagacgtcaacagcgagagctaatgaaggcactccagcaacagcaacagcaacaacaacagaagctatctggctgggggaacgtgtcaaagcctagtggaaccaccaaatcccttctggagatccagcaggaggaggcaaggcagatgcaaaaacagcaacagcagcagcagcaacaccaacaacccaatagagctcgaaataacacccattctaacctccatactagtatcggcaactccgtttggggatcaattaataccggtcctcctaatcaatgggcctctgatctggtgtccagcatttggagcaacgcagacaccaaaaattcaaacatgggattttgggacgatgcagttaaggaggtggggcctagaaactcaacaaacaagaataaaaataatgcttccctttctaagtccgtgggtgtgagcaatcgccagaataaaaaagttgaagaggaagagaagctgctcaagctgttccaaggcgttaataaagcacaggatgggttcactcagtggtgtgagcagatgctgcatgcattgaataccgcgaataatctcgatgtgccgacgttcgtgtctttccttaaagaggtcgaatccccatatgaggttcacgactatattagagcatatctgggagatacctcggaggctaaggaatttgctaaacagttcttggagcgccgcgccaagcagaaagccaatcagcagaggcagcagcagcagctcccccagcagcaacagcaacaaccgcctcagcagcctccacaacagcctcaacaacaggactctgtctggggcatgaatcattccacacttcactccgtttttcagacaaaccagtcgaataatcaacaaagtaacttcgaggctgtccagtccggcaagaaaaaaaagaaacaaaagatggtcagagcggacccatccctgttgggtttctccgtgaatgccagttccgaaaggctgaacatgggagagattgaaacattagacgattattag

SEQ ID NO: 41177 - DNA, 2619 bp, Artificial Sequence
  derived and/or modified sequence
atgaccaagctgcccgacgaccccggccggcccaacttcgaggagggcggacccactagtgtggggagaaagcatgagttcatccgatccgaaagtgaaaattggcgtatttttcgagaagaacaaaatggagaggatgaggacggaggttggaggcttgcaggcagtcgcagagacggcgagcggtggcgtccccactccccagatggcccacgctcggctggttggagggagcacatggagcgtaggcgccgcttcgagtttgactttagagatcgggacgacgagagaggataccgacgagtgagatcagggagcggatccatcgatgatgatagggacagccttcctgaatggtgcctggaggatgcggaggaagagatggggacctttgatagttctggggctttcctgagcctaaaaaaagtacaaaaagaacctatacccgaggagcaggagatggacttcaggccagtggatgagggggaggaatgttccgactccgaagggagccataatgaagaggctaaggaacctgacaaaaccaataaaaaggagggcgagaaaaccgatcgagtgggggtcgaggcttcagaagagactccacaaacaagctccagctctgcaaggcccggaacacctagtgaccaccagagtcaggaagcctcccaattcgagcgcaaggatgaaccgaaaaccgaacagacagagaaagccgaggaagagacacgtatggaaaactctctgccagccaaggtgccttcgcgcggggatgaaatggtcgctgatgtacaacaacctctttctcagatccccagtgatacagcatcacctctgctgattctgccgccacctgtcccaaatcccagtcctacgttgcgcccagtagagaccccagtggtcggtgctcccgggatgggctcagtgagcacagagccagacgatgaggaaggcctcaaacatctggaacagcaggcagaaaaaatggtcgcctatctgcaggattccgctctggacgacgagcgcctggcctctaagttacaggagcacagagccaagggggtttcgatcccactgatgcacgaggcgatgcagaaatggtactataaagacccccaaggtgagatccaaggaccctttaacaatcaggaaatggcagagtggtttcaggcaggttatttcaccatgtcgctgctggttaagagagcttgtgacgaatcattccaacccctaggcgatatcatgaaaatgtggggtagggtgcctttctcacctggccccgccccacctccgcacatgggggaacttgatcaggagaggctgacacgacagcaggagctgactgcactctatcagatgcagcacttgcagtaccagcaattcctcattcagcagcaatatgctcaggtgctcgctcagcagcagaaagcagcattgagctctcagcagcagcagcagctagccctcttgctgcagcaattccagactttaaaaatgcgcatcagcgatcagaatatcattcccagcgtgacacggagcgtatccgtgcccgacacgggcagcatatgggaactccagcctaccgctagccagcccactgtttgggaggggggctcagtgtgggacctgccacttgataccactacgccaggtccggctctggaacagctccaacaattggagaaagccaaggcagctaagcttgagcaggagaggcgtgaggccgagatgagagccaagagagaggaggaagaacgcaaacgacaagaggagctgcgccgtcagcaggaggagattctccggaggcagcaggaagaggaacggaaaagaagagaggaggaggaactcgcaaggcgcaaacaggaagaagcgctgaggcggcaaagggagcaagagatcgcattacgcaggcaacgcgaagaggaggagaggcagcagcaagaggaggctttgaggcggctggaggagcgacgtcgggaggaggaagaacgacgcaaacaggaggagctgctaagaaagcaggaagaagaagccgctaaatgggctagggaggaggaggaggcccagaggcggcttgaggagaacaggctgcggatggaagaagaagccgccaggctcagacatgaggaggaggagagaaagcgcaaggaactggaagtccagagacagaaagagctgatgcggcagcgccagcagcagcaggaagcgctgcgcagattacagcaacagcagcaacaacagcaactggcccagatgaaacttccaagctccagcacatggggccaacagtctaatacaacagcatgtcagtcgcaggccaccctgagtctggcagagattcaaaagcttgaagaagagcgcgaaagacagctgagagaagaggaatcctcggccagtttctgcttttatgccaccgctaaggcccccgctgagggagtggacgagagttcttcagcagctgctgcaacagccaccgctgagaccttgcgtctcggggaatgccagcagacctttcgctaccacgaaatatcctcaggggatcctgctgggcgggggcaggctaatgcaaaggctgctgcagcagctgccgcaacacctgccactaagcaatcttcttag

SEQ ID NO: 41178 - DNA, 2364 bp, Artificial Sequence
  derived and/or modified sequence
atggccgccgagacccagaccctgaacttcggccccgagtggctgcgcgccctctcttcaggcggcagtatcaccagccctccgctgagtcccgctctgccaaagtacaagctcgctgattatcggtacggccgggaggaaatgctggcgctattcctgaaagataataagatacctagcgatctgctggacaaggagttcctgccaatactccaggaagagcccctaccgccgctggccctggtcccattcaccgaagaagagcaaagaaacttcagcatgtctgttaattccgccgccgtgctaagactcactggaagaggcggagggggcaccgtggtaggcgcccccaggggccggagctcgtctcggggtaggggccgggggagaggagagtgcggcttttatcagcggagctttgacgaagtggaaggggtttttggcagaggtggtggccgggagatgcatcgctctcagagctgggaggagaggggagaccgccgtttcgaaaaaccaggccgcaaggacgtgggaaggccgaacttcgaagagggagggcccaccagtgtgggcagaaagcatgaattcattagatcggaatccgagaactggcggatcttccgtgaagaacaaaatggggaagatgaagacggcggttggcgtctggccggttcacgcagagacggagagcggtggcggccccactcacccgacgggcccagatctgccggttggagagagcacatggagcggaggcgaagatttgaatttgacttcagagatcgagatgacgaacggggctacaggagggtgcgttctggtagtggatctattgatgatgatcgggactctttgcccgaatggtgcttggaggacgccgaagaagaaatgggcacttttgattctagcggagcgttcctgtccctcaagaaagtccagaaggaacccatcccagaagagcaggagatggactttcggcctgtggatgaaggagaagagtgtagcgattctgaggggtcgcataatgaggaggcaaaggaacctgataaaactaataaaaaagagggcgagaagaccgatagggtgggcgtggaagccagcgaggaaaccccccagaccagctcttcatccgcgagacctggcacacccagcgatcatcagtctcaagaagcaagccagttcgaacgcaaggacgaaccaaagaccgaacagaccgaaaaggctgaggaggaaactcggatggagaactccctcccagcaaaagtccctagtcgcggagatgagatggtcgctgacgtgcagcagcctctcagccaaataccttccgataccgcatccccactactcattcttccccccccggtgcccaatccaagtcctactctccggcccgtagagacacctgtggtcggcgctcccggaatgggttccgtttctacggagcccgacgacgaggagggccttaagcatttggaacagcaggccgagaagatggtcgcttacttgcaagattcagcactggatgatgagcggctagcttcaaaattacaggagcaccgcgcaaaaggagttagcattcccctcatgcacgaggcaatgcagaagtggtactacaaggatccacagggtgaaatacagggacctttcaacaaccaagagatggcagagtggtttcaggccggctacttcaccatgagccttctggtgaagcgggcatgtgacgagtcttttcagccactaggcgacatcatgaaaatgtggggccgggtacccttctccccaggacccgctccgccaccacatatgggagagcttgaccaagagaggctaacgcggcaacaggaacttacagcactgtatcagatgcagcacctacaatatcaacagttcttgattcagcagcagtacgcccaagtgctggctcagcaacagaaggccgctctgtcaagccagcagcagcagcagttggcattgctccttcagcagttccagacactgaagatgcgcatctctgaccaaaatattattccatccgtcacacgctccgtgtctgttcccgataccgggtcaatctgggagcttcagcccaccgcaagccaaccaactgtctgggaaggaggttcggtgtgggatctccctttagacaccacaactccaggcccagccctggagcagctgcagcaattagaaaaagctaaggcagcgaagctagagcaggagagaagggaagccgagatgcgggcaaagcgggaggaagaagagagaaagaggcaggaggagctgagacgccagcaggaggagattctgagacgccaacaagaggaggagagaaaacgaagagaagtggggaaaagggattcatag

SEQ ID NO: 41179 - DNA, 3900 bp, Artificial Sequence
  derived and/or modified sequence
atggccgctgagacacagacgctcaacttcgggccagagtggttgcgcgctctgtcctcaggaggctcaatcacatctccacccttgtctccagcattacccaagtacaagctcgcagattacagatatggcagggaagaaatgctcgctctctttttgaaagataacaagattccgagcgacctcctggacaaggaattcctgcctatcctgcaagaagaaccccttccccctctggcattggtcccctttaccgaagaagagcagcgaaacttctcgatgagcgttaactctgccgctgtgctgcgattgaccgggagaggaggagggggaaccgtggttggagcccctcggggtcgctcctctagccgcggtcgcggtcgaggcaggggcgagtgcggattttaccaaaggtccttcgatgaggtcgaaggtgtgttcgggaggggcggaggccgagagatgcacagatcacagtcttgggaggagcggggagaccgcagatttgagaaacctggccgaaaggacgtcggaagaccgaacttcgaggagggaggcccaacgagcgtgggtcgaaaacacgagttcattagaagcgaatcggagaactggcgcatctttcgggaggaacagaatggcgaagatgaggacggcggatggagattagctggtagtagaagagatggagaaagatggagacctcattcgccagacggaccacggagcgccggatggcgcgagcacatggagaggcggcgaagatttgaatttgattttcgggatagagacgatgagcgtggctacaggcgagtgcgctccggcagcggctcaatcgatgatgacagagactcacttcctgaatggtgtctggaggacgctgaggaagaaatgggtacctttgactcctcaggcgcatttttgtcgctcaagaaagtccagaaagagccgattcctgaagagcaggagatggatttccggcctgttgacgagggtgaagaatgctctgattcagagggctcacacaatgaagaggccaaagagccggataaaactaacaagaaggagggggaaaagaccgaccgcgtgggtgtggaagcaagcgaggaaacgccacagacaagcagcagctctgctagaccaggtacaccttctgatcatcaatctcaggaggcctcccagtttgagcgaaaagacgagccaaaaaccgaacagacagaaaaagctgaagaggagacacggatggaaaactccctgcccgcaaaagtgccatcacgcggtgatgaaatggtcgccgacgtgcagcagccattgtcccagattccctcggacactgcgtctccgctgctgatactgccccctccggtgcccaatccctccccgacactcagaccggtagaaacccctgtggttggggcacccggaatgggtagtgtgtccactgaacccgacgacgaagagggcctaaaacacttagaacaacaggccgagaagatggtggcttacctgcaggacagtgcgctggatgacgagcggctcgcctcgaagttacaggagcaccgcgctaagggagtgtctattccattaatgcacgaggccatgcagaaatggtattacaaagaccctcagggtgaaatacagggtcctttcaacaaccaggagatggctgaatggttccaggccggatatttcactatgagccttctggtgaagcgcgcttgcgatgaatcctttcagcctcttggtgacattatgaagatgtgggggcgtgtccctttttcacccggtcctgcgccaccgccacacatgggtgagctggatcaagaaaggttaacccgacaacaagagctcaccgctttgtatcagatgcagcacctacagtatcaacagtttttaatccagcagcaatacgcgcaggtgcttgcccagcagcagaaggctgccttatcgagtcagcagcagcaacagcttgctcttctacttcagcaatttcagacactgaagatgcgtatttccgatcagaacataatcccttcagtcaccagatccgtgagcgtgcccgatacaggcagcatctgggagctccaaccaacagcatcccagcccacagtatgggaaggaggatctgtctgggacttgccactggatactacaacaccaggcccagccttggagcagttgcagcagctcgagaaagcgaaggccgctaaattggagcaagaacgccgtgaggctgagatgagagccaagagagaggaggaggaacgcaaaagacaggaggaattgagacgccagcaggaggagatactgaggaggcagcaagaagaagagcgcaagaggagggaagaagaagaattagccagacggaagcaagaggaagctctgagacggcagcgggagcaggagatcgctctgcgtaggcaaagggaggaggaagagcgccagcaacaggaggaagctcttcgacgcctcgaggaaaggaggcgcgaggaggaagaacgacgaaagcaagaggagctactgagaaagcaggaggaggaagcagcaaagtgggccagagaggaagaagaagcgcagaggagactggaagagaaccgtctccggatggaggaggaagcagcccgactgaggcatgaggaagaggagcgaaagagaaaggaactagaggtgcaaagacaaaaggagctcatgagacagcggcagcagcagcaggaggcactgagaaggctgcagcaacagcagcaacaacagcaactggctcagatgaagctgcctagttcttcaacctggggccagcaatccaacactacagcctgtcagtcccaggccactttgtctttagctgagattcaaaaattggaggaagaacgcgagaggcagctgagagaagaacagaggcgccagcagagagagctgatgaaagctctccagcagcagcagcagcagcaacagcagaaattgagcggttggggcaacgttagcaaaccatctgggaccacaaagtcgctgttagaaattcaacaggaagaagcaagacagatgcagaagcagcaacaacagcagcagcagcatcaacagcctaaccgcgcaagaaataacacccactcgaatttgcacactagcatcggaaatagcgtgtgggggagcatcaataccggaccacctaaccaatgggcctctgatctcgtgtcgagcatctggagcaacgccgatacaaagaactctaatatgggcttttgggacgacgctgttaaagaagtcgggcctaggaactccactaacaagaataaaaacaatgcctcactaagcaagtccgtgggagtgtctaaccgtcagaacaagaaagtagaggaggaggaaaaactgttaaaattgtttcagggcgtgaacaaagcacaggatggcttcactcagtggtgtgagcagatgttacatgccctgaacaccgcaaataatctggatgtgcccacctttgtgagctttctgaaggaggtggagagcccttatgaagtccatgactatattagagcctatctgggcgatacttccgaggcaaaggagttcgcgaagcagtttctcgaacgcagggccaaacaaaaagcaaaccagcagagacaacagcagcagttaccacagcagcagcaacagcagcctccacagcagcccccacagcagccccagcagcaggactcagtgtggggcatgaatcattcgacacttcactcagtgtttcagaccaatcaaagcaacaatcagcagtcgaactttgaggccgtgcagagtggcaagaagaaaaagaagcagaaaatggtccgcgcagaccccagcttgctcgggttcagcgtgaatgccagcagcgaacggctcaatatgggcgagatagagaccctcgacgattactag

SEQ ID NO: 41180 - DNA, 3900 bp, Artificial Sequence
  derived and/or modified sequence
atggccgcagagacacagacattaaactttggcccagagtggctgcgcgctctctcaagcggcggatctattacttccccacccctctccccagcgctaccaaagtacaaacttgccgactacaggtacggcagggaggagatgctcgcacttttcctgaaggataacaaaataccctccgacttgttagacaaggaattcttacccattttgcaagaggaaccactgcctccgctagcactagtaccattcacagaggaggaacagagaaacttctcaatgtcagtcaactctgctgccgttttacgactgaccgggagaggaggagggggtactgtcgtgggggctcctcgcggaaggagcagcagccgcggacgtggcaggggcagaggcgagtgtgggttctaccaacggagcttcgatgaggttgaaggggtgtttggccgtgggggtgggcgtgagatgcataggtcacaatcgtgggaagagcggggagacagacgattcgagaagccagggaggaaagatgttggacgtcccaatttcgaggagggcggacccacatccgtgggcagaaagcacgaatttattcggagcgagtcagaaaattggagaatcttcagggaggagcagaacggggaggatgaggatggagggtggcggttagcgggatctcggagagacggagagaggtggaggcctcattctccggatgggcctagatctgccggatggagagagcatatggagcgcaggcgccgattcgagttcgactttcgggatagggacgatgaacggggataccgcagggttcggtcagggagcggttctattgatgacgatagagattcgctgccggaatggtgccttgaggatgctgaggaagagatgggaacattcgacagcagcggtgcctttctctccctgaaaaaggttcagaaggagcccatccctgaagagcaggagatggacttcaggcccgttgacgaaggcgaggagtgctctgatagtgagggctctcacaatgaagaggctaaggagccggacaaaactaataaaaaggagggtgagaagactgaccgcgtaggggtggaggcctcagaggaaacaccacagacaagcagtagtagcgccaggccgggaacccccagcgatcatcagagccaggaggcaagccaattcgagagaaaagacgaacctaagacagaacagacggaaaaggccgaggaggaaacacggatggagaactcccttccggctaaagtcccttcgaggggtgacgagatggtggccgacgtccagcaacctctaagccagatcccttccgacacggcgagcccacttcttatcctccccccacccgtgccaaaccctagtcccacactgaggccggtcgaaactccagtggttggcgcacccggaatgggctcggttagtactgaaccggatgatgaggagggccttaaacacttggagcaacaagccgagaaaatggttgcgtaccttcaggacagcgcattggatgacgaacggttggcctcgaaattgcaggagcatcgggcaaagggtgtgtcaataccgctgatgcacgaggccatgcaaaagtggtactataaggacccccagggggaaatccagggcccattcaataaccaagagatggctgagtggttccaggcaggctatttcaccatgtccctgctcgtaaagcgggcttgcgatgaatccttccagccgctcggagacattatgaagatgtggggtcgcgttccctttagcccgggtccagctccgcctccacatatgggcgagctggaccaggaaaggctgactaggcagcaggagcttactgctttataccagatgcagcacctacagtatcagcagttcctcattcagcagcagtacgcacaagtcctagcccaacagcaaaaagccgctttgagttctcagcagcagcagcagctggccctcctgctgcagcagttccagacactaaagatgaggatttccgatcaaaatataatcccctcagtgacaagaagtgtgagcgttccagatacaggcagcatttgggagctgcagcctaccgcttcccagccgaccgtgtgggaggggggtagtgtgtgggatctccccctcgataccacgactcccggtcctgcccttgagcagctgcagcagcttgagaaagcaaaggccgcaaagctggagcaggagaggcgggaggccgaaatgagggctaagagggaagaggaagagcggaaaaggcaggaggaactccggcgacaacaggaagaaattcttcgcaggcagcaagaagaagagcgcaagagaagagaggaggaagagctcgctaggcggaagcaagaggaggctctccggcgacagcgtgagcaagagatcgctctgagacgtcagcgagaagaagaggaacgccaacagcaggaggaagccctacgacgtttagaagaaagaaggcgagaagaggaagagagacgcaaacaggaagaactcctgcggaagcaagaggaggaagcagcaaagtgggctcgggaggaagaggaggcccagagacgccttgaggaaaataggctccggatggaggaggaggcagccagactcagacacgaggaggaggaaaggaaacggaaggaactggaagtacagcgccagaaagaattaatgaggcagcgacaacaacagcaagaggcccttcgtcgcctccagcagcagcaacaacagcagcagctggctcagatgaaattgcccagcagctcgacctggggccagcagagcaacaccacagcctgtcaatctcaagcgaccttaagtctggccgaaatccagaaacttgaggaggagcgggaaagacagctccgggaggagcagcgcagacagcaacgcgagctgatgaaggcactgcagcaacagcaacagcagcagcagcagaaactgtcgggatggggtaatgttagcaaacccagtggaactacgaagtctcttctcgaaattcaacaagaggaggccaggcagatgcaaaagcagcaacagcagcaacaacagcaccagcagccgaaccgggctcggaacaacacgcactctaacctgcatacttcaatcggaaacagcgtgtggggaagtatcaatactggacccccaaaccaatgggcatcagacttggtgagttccatatggagcaacgctgacacaaagaattcaaacatgggattttgggacgatgcagttaaagaggtaggcccaaggaattctaccaataagaataaaaataacgcttccttgtctaagtctgttggcgtttctaaccgccagaataaaaaggtggaagaagaagagaagctattgaagctttttcaaggtgtgaataaagcccaggacgggtttactcagtggtgcgagcagatgcttcacgctctgaataccgcaaataacctggatgtgcccacctttgtgtcctttcttaaggaggttgagagcccttatgaagtgcatgactatattcgggcttaccttggggacacatcggaagccaaagaattcgctaagcagtttctggagaggagagccaaacaaaaagctaaccagcaaaggcagcagcaacagctgccacaacagcagcaacaacagcctcctcagcagccaccacagcagccacagcagcaggattcggtgtggggcatgaatcactcaacactacattctgtcttccagactaatcaaagcaacaaccagcagtccaactttgaggcagtgcagtcaggaaagaagaaaaaaaaacaaaaaatggtgagggcggatcctagtcttctagggtttagcgtcaacgcttcctccgagcggctgaatatgggtgaaattgagaccctggatgactattag

SEQ ID NO: 41181 - DNA, 2619 bp, Artificial Sequence
  derived and/or modified sequence
atgacaaaactccctgatgaccccggaagaccaaattttgaggaaggtggccctacatcggtgggtcgcaagcacgagttcattcgttccgaatctgaaaattggcgcatcttccgagaggaacagaacggcgaagacgaagacggaggatggagactggccggatcccggagggacggggagagatggcgccctcactcaccagatggtcctcgctccgcgggttggcgcgagcatatggagcgtaggcgcaggttcgagttcgattttcgggaccgcgacgatgagcggggttatcggcgagtcaggtctggttctgggagcatagacgatgacagagattctctacctgagtggtgcctggaagatgcggaggaggagatgggtacattcgattccagcggcgctttcctttctctcaaaaaggtacagaaagaacctatccctgaagaacaggagatggactttagacctgtggacgagggcgaggagtgctcagactctgagggtagccacaatgaggaggctaaagaaccggacaaaacaaataaaaaagaaggcgagaaaaccgaccgagttggagttgaagcgagcgaggagacaccacagacttcatcaagcagcgccaggccagggaccccctccgaccatcaaagccaggaggcgtcccagttcgagagaaaggacgagcctaaaactgaacagacagaaaaagcagaggaggagacccgcatggagaattcactgcctgccaaggtgccctctcggggagacgagatggtggcagatgtgcagcagccattgagccagatcccgtctgacacagcaagtcctctcctgatcctaccaccgcctgtcccaaatccttccccaactctgagaccagttgagacacctgtggtgggcgcaccaggaatgggctcggtgtcgactgaacctgatgacgaagagggactgaagcacctggagcagcaggctgagaagatggtggcgtatcttcaggatagcgccctcgacgacgagcgcctggcttctaagctccaggagcacagagccaaaggagtctctatccctttaatgcacgaggcaatgcagaagtggtactataaggatccccagggcgaaatccaaggtccatttaacaatcaggaaatggcggagtggtttcaggccggatacttcacgatgagtctccttgtcaagcgcgcttgtgacgagagctttcagcccttaggtgacattatgaagatgtggggtcgcgtcccttttagtcctgggccagcccctcccccacacatgggagaactggaccaggagagactcactcgtcagcaagaactgactgccttataccagatgcagcatcttcagtaccagcagtttctaatccaacagcaatatgcacaggtcctcgcccaacagcagaaggccgctctcagttctcagcagcagcagcagttggccctgctcctccaacaatttcagacattgaagatgcgcatcagtgaccagaacataattccctctgttacgagatctgtgagcgtccccgacaccggaagcatttgggagctgcagcctacagcctcacagccaacagtgtgggaaggtggatctgtctgggacctgcctctggatacaaccacaccaggacctgcattggagcaactgcaacaactggagaaagcaaaggccgctaagctggagcaggagaggagagaggctgagatgagagccaaaagggaagaggaggaaaggaagaggcaggaggaactgcgcagacagcaagaggagatcctgaggcgccaacaggaggaggagaggaagcggagggaagaggaggaactggctagacggaagcaagaagaggcactaaggaggcagcgggagcaggaaatcgcattacggagacagcgggaagaggaggaaagacaacagcaggaggaagccctaagacggctcgaggaaaggaggcgggaagaggaggaacgcaggaaacaggaggaattgctgcgaaagcaggaggaggaagcagcaaaatgggccagggaggaggaggaggcccagcggaggctggaagagaacagactccggatggaagaggaagccgcaaggctccggcatgaggaggaagagcgcaagagaaaagaattagaggttcaaaggcagaaggaactgatgcgacagagacaacaacaacaagaagctctccgcagattgcagcagcagcaacagcagcagcagctcgctcagatgaaactcccatcttcttctacctggggccaacagagcaatacaaccgcttgtcagagccaagcgacgttgtcacttgctgagattcaaaagctcgaagaggagcgggagcgccagctgcgcgaggaagaatcttccgcctctttttgtttctacgccactgccaaggcacccgcagaaggggttgatgaatcatcctccgctgccgctgctacagcgactgcagagactctcagactgggagagtgccagcagaccttccgctaccacgaaatcagttctggcgatccagcagggcgtggtcaggcaaatgcaaaagctgccgctgcggctgctgcaacgcccgctaccaagcagagctcttag

SEQ ID NO: 41182 - DNA, 2364 bp, Artificial Sequence
  derived and/or modified sequence
atggcggcagagacccagactctaaacttcggcccagagtggctgcgtgcactgtctagtggaggctctatcacctctccccctctttctcctgccttgcctaagtataagttggctgactataggtatggacgcgaagaaatgcttgccctgtttctcaaagacaataagattccatctgatctgctggataaagaatttcttccaatcttacaggaagaacctctgcccccactagcacttgtcccgttcacagaagaggaacaaagaaacttcagcatgtcggtgaacagtgccgctgtgctccgtctgactgggcgaggcggtggcggaacggttgtgggcgcaccaagaggtcggtcctcttcaaggggcagggggaggggcaggggagagtgcgggttttatcagcgatcctttgatgaggtggagggcgtgtttgggcgaggcggaggtcgagaaatgcatcggtcgcaatcctgggaggagcgcggtgataggaggttcgagaagcctggcaggaaggatgtaggcaggccgaactttgaggagggcggaccaacctccgtgggcagaaagcacgagttcatccgaagcgaaagcgagaattggagaattttcagggaagagcaaaatggcgaggatgaggatggaggctggcgactcgccggatcgcggagagatggtgagcgctggcgcccacattcacctgacggacctaggtccgccggttggagggaacacatggagcggcgacggagattcgagttcgacttccgggatagggatgatgagcgaggttatagacgggtccggtctggctcaggcagtattgacgacgatcgcgactccttgcccgagtggtgccttgaagatgcggaggaagagatggggacgtttgactcaagtggggcttttctgtctctgaagaaagtgcagaaggagccgattccagaggaacaagagatggattttcgacccgttgatgagggtgaagagtgttccgattccgaaggctcacacaatgaggaagccaaggaacctgataagactaacaaaaaagaaggtgagaagacggacagggtgggtgtggaagccagcgaggagacccctcagacttccagctccagcgctcgtcctggtaccccttcagatcatcagagccaggaggccagccagttcgaacgcaaggacgagcctaagacggagcagacagagaaagcagaggaagagacgcgtatggaaaatagtctgcctgcgaaggtgccctctaggggagacgagatggtcgccgacgtacagcaacccctgtcacagatcccatcagatacagcgtctccactgcttatcttgcccccaccagtccccaacccaagcccaacactgcgcccagtagagactcccgtggtcggggctcctggaatggggagtgttagtacagagccggacgacgaggaggggctcaaacacctggaacagcaggccgagaagatggttgcatatctacaggattctgctttagacgatgagcggctggccagcaagctccaggagcatagagctaaaggcgttagtattccgctcatgcacgaggctatgcagaaatggtactacaaagacccacagggggagatccaggggccatttaataaccaggaaatggcagagtggttccaggccggatactttacaatgtcactgctggttaagagggcctgtgacgaatccttccagcccctgggcgatatcatgaaaatgtggggtagggtgccctttagccccggtccagcgccaccacctcacatgggggaactcgatcaagagaggctcaccaggcaacaggaactaaccgccctgtaccagatgcagcatctgcagtatcaacagttcctgatccaacagcagtacgcccaagtcttggcccaacaacagaaagccgcactctcctcccagcagcagcaacagttagctctccttttgcagcagttccagacactgaaaatgcgaataagtgaccaaaacatcattccctccgtcaccaggtcagtgagcgtccctgacactggctccatttgggagctacagcctaccgctagccagccaacggtgtgggagggtgggagcgtttgggacctgcccttggacaccaccactcctggcccagccctggagcagttgcagcagctggaaaaagctaaggccgcaaaacttgaacaagaacgcagagaggctgagatgcgggctaaacgggaagaggaagagcggaagaggcaggaagagctaagacggcagcaagaggaaattttgaggagacagcaggaagaggaaaggaaacggagggaggtcggcaagcgggactcgtag

SEQ ID NO: 41183 - DNA, 3900 bp, Artificial Sequence
  derived and/or modified sequence
atggccgccgagacccagaccctgaacttcggccccgagtggctgagagccctgagcagcggcggcagcatcaccagcccccccctgagccccgccctgcccaagtacaagctggccgactacagatacggcagagaggagatgctggccctgttcctgaaggacaacaagatccccagcgacctgctggacaaggagttcctgcccatcctgcaggaggagcccctgccccccctggccctggtgcccttcaccgaggaggagcagagaaacttcagcatgagcgtgaacagcgccgccgtgctgagactgaccggcagaggcggcggcggcaccgtggtgggcgcccccagaggcagaagcagcagcagaggcagaggcagaggcagaggcgagtgcggcttctaccagagaagcttcgacgaggtggagggcgtgttcggcagaggcggcggcagagagatgcacagaagccagagctgggaggagagaggcgacagaagattcgagaagcccggcagaaaggacgtgggcagacccaacttcgaggagggcggccccaccagcgtgggcagaaagcacgagttcatcagaagcgagagcgagaactggagaatcttcagagaggagcagaacggcgaggacgaggacggcggctggagactggccggcagcagaagagacggcgagagatggagaccccacagccccgacggccccagaagcgccggctggagagagcacatggagagaagaagaagattcgagttcgacttcagagacagagacgacgagagaggctacagaagagtgagaagcggcagcggcagcatcgacgacgacagagacagcctgcccgagtggtgcctggaggacgccgaggaggagatgggcaccttcgacagcagcggcgccttcctgagcctgaagaaggtgcagaaggagcccatccccgaggagcaggagatggacttcagacccgtggacgagggcgaggagtgcagcgacagcgagggcagccacaacgaggaggccaaggagcccgacaagaccaacaagaaggagggcgagaagaccgacagagtgggcgtggaggccagcgaggagaccccccagaccagcagcagcagcgccagacccggcacccccagcgaccaccagagccaggaggccagccagttcgagagaaaggacgagcccaagaccgagcagaccgagaaggccgaggaggagaccagaatggagaacagcctgcccgccaaggtgcccagcagaggcgacgagatggtggccgacgtgcagcagcccctgagccagatccccagcgacaccgccagccccctgctgatcctgcccccccccgtgcccaaccccagccccaccctgagacccgtggagacccccgtggtgggcgcccccggcatgggcagcgtgagcaccgagcccgacgacgaggagggcctgaagcacctggagcagcaggccgagaagatggtggcctacctgcaggacagcgccctggacgacgagagactggccagcaagctgcaggagcacagagccaagggcgtgagcatccccctgatgcacgaggccatgcagaagtggtactacaaggacccccagggcgagatccagggccccttcaacaaccaggagatggccgagtggttccaggccggctacttcaccatgagcctgctggtgaagagagcctgcgacgagagcttccagcccctgggcgacatcatgaagatgtggggcagagtgcccttcagccccggccccgccccccccccccacatgggcgagctggaccaggagagactgaccagacagcaggagctgaccgccctgtaccagatgcagcacctgcagtaccagcagttcctgatccagcagcagtacgcccaggtgctggcccagcagcagaaggccgccctgagcagccagcagcagcagcagctggccctgctgctgcagcagttccagaccctgaagatgagaatcagcgaccagaacatcatccccagcgtgaccagaagcgtgagcgtgcccgacaccggcagcatctgggagctgcagcccaccgccagccagcccaccgtgtgggagggcggcagcgtgtgggacctgcccctggacaccaccacccccggccccgccctggagcagctgcagcagctggagaaggccaaggccgccaagctggagcaggagagaagagaggccgagatgagagccaagagagaggaggaggagagaaagagacaggaggagctgagaagacagcaggaggagatcctgagaagacagcaggaggaggagagaaagagaagagaggaggaggagctggccagaagaaagcaggaggaggccctgagaagacagagagagcaggagatcgccctgagaagacagagagaggaggaggagagacagcagcaggaggaggccctgagaagactggaggagagaagaagagaggaggaggagagaagaaagcaggaggagctgctgagaaagcaggaggaggaggccgccaagtgggccagagaggaggaggaggcccagagaagactggaggagaacagactgagaatggaggaggaggccgccagactgagacacgaggaggaggagagaaagagaaaggagctggaggtgcagagacagaaggagctgatgagacagagacagcagcagcaggaggccctgagaagactgcagcagcagcagcagcagcagcagctggcccagatgaagctgcccagcagcagcacctggggccagcagagcaacaccaccgcctgccagagccaggccaccctgagcctggccgagatccagaagctggaggaggagagagagagacagctgagagaggagcagagaagacagcagagagagctgatgaaggccctgcagcagcagcagcagcagcagcagcagaagctgagcggctggggcaacgtgagcaagcccagcggcaccaccaagagcctgctggagatccagcaggaggaggccagacagatgcagaagcagcagcagcagcagcagcagcaccagcagcccaacagagccagaaacaacacccacagcaacctgcacaccagcatcggcaacagcgtgtggggcagcatcaacaccggcccccccaaccagtgggccagcgacctggtgagcagcatctggagcaacgccgacaccaagaacagcaacatgggcttctgggacgacgccgtgaaggaggtgggccccagaaacagcaccaacaagaacaagaacaacgccagcctgagcaagagcgtgggcgtgagcaacagacagaacaagaaggtggaggaggaggagaagctgctgaagctgttccagggcgtgaacaaggcccaggacggcttcacccagtggtgcgagcagatgctgcacgccctgaacaccgccaacaacctggacgtgcccaccttcgtgagcttcctgaaggaggtggagagcccctacgaggtgcacgactacatcagagcctacctgggcgacaccagcgaggccaaggagttcgccaagcagttcctggagagaagagccaagcagaaggccaaccagcagagacagcagcagcagctgccccagcagcagcagcagcagcccccccagcagcccccccagcagccccagcagcaggacagcgtgtggggcatgaaccacagcaccctgcacagcgtgttccagaccaaccagagcaacaaccagcagagcaacttcgaggccgtgcagagcggcaagaagaagaagaagcagaagatggtgagagccgaccccagcctgctgggcttcagcgtgaacgccagcagcgagagactgaacatgggcgagatcgagaccctggacgactactag

SEQ ID NO: 41184 - DNA, 2619 bp, Artificial Sequence
  derived and/or modified sequence
atgaccaagctgcccgacgaccccggcagacccaacttcgaggagggcggccccaccagcgtgggcagaaagcacgagttcatcagaagcgagagcgagaactggagaatcttcagagaggagcagaacggcgaggacgaggacggcggctggagactggccggcagcagaagagacggcgagagatggagaccccacagccccgacggccccagaagcgccggctggagagagcacatggagagaagaagaagattcgagttcgacttcagagacagagacgacgagagaggctacagaagagtgagaagcggcagcggcagcatcgacgacgacagagacagcctgcccgagtggtgcctggaggacgccgaggaggagatgggcaccttcgacagcagcggcgccttcctgagcctgaagaaggtgcagaaggagcccatccccgaggagcaggagatggacttcagacccgtggacgagggcgaggagtgcagcgacagcgagggcagccacaacgaggaggccaaggagcccgacaagaccaacaagaaggagggcgagaagaccgacagagtgggcgtggaggccagcgaggagaccccccagaccagcagcagcagcgccagacccggcacccccagcgaccaccagagccaggaggccagccagttcgagagaaaggacgagcccaagaccgagcagaccgagaaggccgaggaggagaccagaatggagaacagcctgcccgccaaggtgcccagcagaggcgacgagatggtggccgacgtgcagcagcccctgagccagatccccagcgacaccgccagccccctgctgatcctgcccccccccgtgcccaaccccagccccaccctgagacccgtggagacccccgtggtgggcgcccccggcatgggcagcgtgagcaccgagcccgacgacgaggagggcctgaagcacctggagcagcaggccgagaagatggtggcctacctgcaggacagcgccctggacgacgagagactggccagcaagctgcaggagcacagagccaagggcgtgagcatccccctgatgcacgaggccatgcagaagtggtactacaaggacccccagggcgagatccagggccccttcaacaaccaggagatggccgagtggttccaggccggctacttcaccatgagcctgctggtgaagagagcctgcgacgagagcttccagcccctgggcgacatcatgaagatgtggggcagagtgcccttcagccccggccccgccccccccccccacatgggcgagctggaccaggagagactgaccagacagcaggagctgaccgccctgtaccagatgcagcacctgcagtaccagcagttcctgatccagcagcagtacgcccaggtgctggcccagcagcagaaggccgccctgagcagccagcagcagcagcagctggccctgctgctgcagcagttccagaccctgaagatgagaatcagcgaccagaacatcatccccagcgtgaccagaagcgtgagcgtgcccgacaccggcagcatctgggagctgcagcccaccgccagccagcccaccgtgtgggagggcggcagcgtgtgggacctgcccctggacaccaccacccccggccccgccctggagcagctgcagcagctggagaaggccaaggccgccaagctggagcaggagagaagagaggccgagatgagagccaagagagaggaggaggagagaaagagacaggaggagctgagaagacagcaggaggagatcctgagaagacagcaggaggaggagagaaagagaagagaggaggaggagctggccagaagaaagcaggaggaggccctgagaagacagagagagcaggagatcgccctgagaagacagagagaggaggaggagagacagcagcaggaggaggccctgagaagactggaggagagaagaagagaggaggaggagagaagaaagcaggaggagctgctgagaaagcaggaggaggaggccgccaagtgggccagagaggaggaggaggcccagagaagactggaggagaacagactgagaatggaggaggaggccgccagactgagacacgaggaggaggagagaaagagaaaggagctggaggtgcagagacagaaggagctgatgagacagagacagcagcagcaggaggccctgagaagactgcagcagcagcagcagcagcagcagctggcccagatgaagctgcccagcagcagcacctggggccagcagagcaacaccaccgcctgccagagccaggccaccctgagcctggccgagatccagaagctggaggaggagagagagagacagctgagagaggaggagagcagcgccagcttctgcttctacgccaccgccaaggcccccgccgagggcgtggacgagagcagcagcgccgccgccgccaccgccaccgccgagaccctgagactgggcgagtgccagcagaccttcagataccacgagatcagcagcggcgaccccgccggcagaggccaggccaacgccaaggccgccgccgccgccgccgccacccccgccaccaagcagagcagctag

SEQ ID NO: 41185 - DNA, 2364 bp, Artificial Sequence
  derived and/or modified sequence
atggccgccgagacccagaccctgaacttcggccccgagtggctgagagccctgagcagcggcggcagcatcaccagcccccccctgagccccgccctgcccaagtacaagctggccgactacagatacggcagagaggagatgctggccctgttcctgaaggacaacaagatccccagcgacctgctggacaaggagttcctgcccatcctgcaggaggagcccctgccccccctggccctggtgcccttcaccgaggaggagcagagaaacttcagcatgagcgtgaacagcgccgccgtgctgagactgaccggcagaggcggcggcggcaccgtggtgggcgcccccagaggcagaagcagcagcagaggcagaggcagaggcagaggcgagtgcggcttctaccagagaagcttcgacgaggtggagggcgtgttcggcagaggcggcggcagagagatgcacagaagccagagctgggaggagagaggcgacagaagattcgagaagcccggcagaaaggacgtgggcagacccaacttcgaggagggcggccccaccagcgtgggcagaaagcacgagttcatcagaagcgagagcgagaactggagaatcttcagagaggagcagaacggcgaggacgaggacggcggctggagactggccggcagcagaagagacggcgagagatggagaccccacagccccgacggccccagaagcgccggctggagagagcacatggagagaagaagaagattcgagttcgacttcagagacagagacgacgagagaggctacagaagagtgagaagcggcagcggcagcatcgacgacgacagagacagcctgcccgagtggtgcctggaggacgccgaggaggagatgggcaccttcgacagcagcggcgccttcctgagcctgaagaaggtgcagaaggagcccatccccgaggagcaggagatggacttcagacccgtggacgagggcgaggagtgcagcgacagcgagggcagccacaacgaggaggccaaggagcccgacaagaccaacaagaaggagggcgagaagaccgacagagtgggcgtggaggccagcgaggagaccccccagaccagcagcagcagcgccagacccggcacccccagcgaccaccagagccaggaggccagccagttcgagagaaaggacgagcccaagaccgagcagaccgagaaggccgaggaggagaccagaatggagaacagcctgcccgccaaggtgcccagcagaggcgacgagatggtggccgacgtgcagcagcccctgagccagatccccagcgacaccgccagccccctgctgatcctgcccccccccgtgcccaaccccagccccaccctgagacccgtggagacccccgtggtgggcgcccccggcatgggcagcgtgagcaccgagcccgacgacgaggagggcctgaagcacctggagcagcaggccgagaagatggtggcctacctgcaggacagcgccctggacgacgagagactggccagcaagctgcaggagcacagagccaagggcgtgagcatccccctgatgcacgaggccatgcagaagtggtactacaaggacccccagggcgagatccagggccccttcaacaaccaggagatggccgagtggttccaggccggctacttcaccatgagcctgctggtgaagagagcctgcgacgagagcttccagcccctgggcgacatcatgaagatgtggggcagagtgcccttcagccccggccccgccccccccccccacatgggcgagctggaccaggagagactgaccagacagcaggagctgaccgccctgtaccagatgcagcacctgcagtaccagcagttcctgatccagcagcagtacgcccaggtgctggcccagcagcagaaggccgccctgagcagccagcagcagcagcagctggccctgctgctgcagcagttccagaccctgaagatgagaatcagcgaccagaacatcatccccagcgtgaccagaagcgtgagcgtgcccgacaccggcagcatctgggagctgcagcccaccgccagccagcccaccgtgtgggagggcggcagcgtgtgggacctgcccctggacaccaccacccccggccccgccctggagcagctgcagcagctggagaaggccaaggccgccaagctggagcaggagagaagagaggccgagatgagagccaagagagaggaggaggagagaaagagacaggaggagctgagaagacagcaggaggagatcctgagaagacagcaggaggaggagagaaagagaagagaggtgggcaagagagacagctag

SEQ ID NO: 41186 - protein, 1321 aa, Artificial Sequence
  derived and/or modified sequence
MAAETQTLNFGPEWLRALSSGGSITSPPLSPALPKYKLADYRYGREEMLALFLKDNKIPSDLLDKEFLPILQEEPLPPLALVPFTEEEQRNFSMSVNSAAVLRLTGRGGGGTVVGAPRGRSSSRGRGRGRGECGFYQRSFDEVEGVFGRGGGREMHRSQSWEERGDRRFEKPGRKDVGKKNGYYCMYSPVLLLGQPLCQGRPNFEEGGPTSVGRKHEFIRSESENWRIFREEQNGEDEDGGWRLAGSRRDGERWRPHSPDGPRSAGWREHMERRRRFEFDFRDRDDERGYRRVRSGSGSIDDDRDSLPEWCLEDAEEEMGTFDSSGAFLSLKKVQKEPIPEEQEMDFRPVDEGEECSDSEGSHNEEAKEPDKTNKKEGEKTDRVGVEASEETPQTSSSSARPGTPSDHQSQEASQFERKDEPKTEQTEKAEEETRMENSLPAKVPSRGDEMVADVQQPLSQIPSDTASPLLILPPPVPNPSPTLRPVETPVVGAPGMGSVSTEPDDEEGLKHLEQQAEKMVAYLQDSALDDERLASKLQEHRAKGVSIPLMHEAMQKWYYKDPQGEIQGPFNNQEMAEWFQAGYFTMSLLVKRACDESFQPLGDIMKMWGRVPFSPGPAPPPHMGELDQERLTRQQELTALYQMQHLQYQQFLIQQQYAQVLAQQQKAALSSQQQQQLALLLQQFQTLKMRISDQNIIPSVTRSVSVPDTGSIWELQPTASQPTVWEGGSVWDLPLDTTTPGPALEQLQQLEKAKAAKLEQERREAEMRAKREEEERKRQEELRRQQEEILRRQQEEERKRREEEELARRKQEEALRRQREQEIALRRQREEEERQQQEEALRRLEERRREEEERRKQEELLRKQEEEAAKWAREEEEAQRRLEENRLRMEEEAARLRHEEEERKRKELEVQRQKELMRQRQQQQEALRRLQQQQQQQQLAQMKLPSSSTWGQQSNTTACQSQATLSLAEIQKLEEERERQLREEQRRQQRELMKALQQQQQQQQQKLSGWGNVSKPSGTTKSLLEIQQEEARQMQKQQQQQQQHQQPNRARNNTHSNLHTSIGNSVWGSINTGPPNQWASDLVSSIWSNADTKNSNMGFWDDAVKEVGPRNSTNKNKNNASLSKSVGVSNRQNKKVEEEEKLLKLFQGVNKAQDGFTQWCEQMLHALNTANNLDVPTFVSFLKEVESPYEVHDYIRAYLGDTSEAKEFAKQFLERRAKQKANQQRQQQQLPQQQQQQPPQQPPQQPQQQDSVWGMNHSTLHSVFQTNQSNNQQSNFEAVQSGKKKKKQKMVRADPSLLGFSVNASSERLNMGEIETLDDY

SEQ ID NO: 41187 - protein, 1320 aa, Artificial Sequence
  derived and/or modified sequence
MAAETQTLNFGPEWLRALSSGGSITSPPLSPALPKYKLADYRYGREEMLALFLKDNKIPSDLLDKEFLPILQEEPLPPLALVPFTEEEQRNFSMSVNSAAVLRLTGRGGGGTVVGAPRGRSSSRGRGRGRGECGFYQRSFDEVEGVFGRGGGREMHRSQSWEERGDRRFEKPGRKDVGKKNGYYCMYSPVLLLGQPLCQGRPNFEEGGPTSVGRKHEFIRSESENWRIFREEQNGEDEDGGWRLAGSRRDGERWRPHSPDGPRSAGWREHMERRRRFEFDFRDRDDERGYRRVRSGSGSIDDDRDSLPEWCLEDAEEEMGTFDSSGAFLSLKKVQKEPIPEEQEMDFRPVDEGEECSDSEGSHNEEAKEPDKTNKKEGEKTDRVGVASEETPQTSSSSARPGTPSDHQSQEASQFERKDEPKTEQTEKAEEETRMENSLPAKVPSRGDEMVADVQQPLSQIPSDTASPLLILPPPVPNPSPTLRPVETPVVGAPGMGSVSTEPDDEEGLKHLEQQAEKMVAYLQDSALDDERLASKLQEHRAKGVSIPLMHEAMQKWYYKDPQGEIQGPFNNQEMAEWFQAGYFTMSLLVKRACDESFQPLGDIMKMWGRVPFSPGPAPPPHMGELDQERLTRQQELTALYQMQHLQYQQFLIQQQYAQVLAQQQKAALSSQQQQQLALLLQQFQTLKMRISDQNIIPSVTRSVSVPDTGSIWELQPTASQPTVWEGGSVWDLPLDTTTPGPALEQLQQLEKAKAAKLEQERREAEMRAKREEEERKRQEELRRQQEEILRRQQEEERKRREEEELARRKQEEALRRQREQEIALRRQREEEERQQQEEALRRLEERRREEEERRKQEELLRKQEEEAAKWAREEEEAQRRLEENRLRMEEEAARLRHEEEERKRKELEVQRQKELMRQRQQQQEALRRLQQQQQQQQLAQMKLPSSSTWGQQSNTTACQSQATLSLAEIQKLEEERERQLREEQRRQQRELMKALQQQQQQQQQKLSGWGNVSKPSGTTKSLLEIQQEEARQMQKQQQQQQQHQQPNRARNNTHSNLHTSIGNSVWGSINTGPPNQWASDLVSSIWSNADTKNSNMGFWDDAVKEVGPRNSTNKNKNNASLSKSVGVSNRQNKKVEEEEKLLKLFQGVNKAQDGFTQWCEQMLHALNTANNLDVPTFVSFLKEVESPYEVHDYIRAYLGDTSEAKEFAKQFLERRAKQKANQQRQQQQLPQQQQQQPPQQPPQQPQQQDSVWGMNHSTLHSVFQTNQSNNQQSNFEAVQSGKKKKKQKMVRADPSLLGFSVNASSERLNMGEIETLDDY

SEQ ID NO: 41188 - DNA, 3966 bp, Artificial Sequence
  derived and/or modified sequence
atggcggccgagacacaaaccctgaacttcgggccagagtggcttagggccctcagcagtggtggctccatcacgagcccacccctgagccccgcccttcctaagtataaactggccgactacagatacgggagggaggaaatgctggccctgtttctaaaagacaacaaaatcccctccgaccttctcgataaggaattcctccccatcctgcaagaggaacctctgccacctttggccctggtgccatttacagaggaggagcagagaaacttctccatgagtgtcaatagtgccgccgtactgcgcttaaccgggaggggcggcgggggaaccgtagtgggagccccaagggggcgaagctcctcacgtgggagaggacgtggccgcggggaatgcggattttatcagagatcttttgatgaggttgaaggcgtcttcgggagggggggcgggagggagatgcatcgcagccagagctgggaggagagaggggacaggaggtttgaaaagcccgggcgtaaagacgtcgggaagaagaacggttattattgcatgtatagccctgtcctgctgctgggccagcctctttgccaaggtaggcccaacttcgaggaaggcgggcctacgagcgtggggcgcaaacacgaattcatccgaagtgagtcggagaattggagaatctttcgagaagagcagaacggagaggacgaggatggcggctggcgtctagccgggagccggcgagacggcgagaggtggcgccctcacagtcccgatggaccgaggtccgctgggtggagggaacacatggaacggaggaggcggttcgaatttgatttccgggaccgcgatgacgagcgaggataccggagagtgcggtcaggctccgggtctattgacgatgaccgagatagtctcccggaatggtgcttagaagacgctgaagaggaaatgggtacctttgacagctctggcgccttcctgtctctgaagaaggtgcaaaaggaaccaattccagaagaacaagaaatggattttcgcccagttgatgaaggagaagaatgctccgatagcgagggttctcataatgaggaggctaaagagcctgacaagacaaacaaaaaggagggcgagaagactgaccgcgtgggcgtcgaagcctccgaggagacaccacaaacttcgtcttcatcagctcgccctggcacaccgtctgaccatcagtcacaggaagcgtctcaatttgaaaggaaagatgagcccaagaccgaacagaccgagaaagccgaggaggaaactcgtatggagaattcactaccagctaaagtcccttctcgaggcgacgaaatggtagccgatgtccagcagcccctgtcccagattccctccgatacggcctcccccctcctgatactccccccaccagtgcccaacccatctccaacattgagacctgtcgagacacctgtggttggggcccccggaatgggaagcgtgtctacagagccggatgatgaggaagggcttaagcacctggaacagcaagcagaaaagatggtggcctatctgcaggattccgccttggatgatgagcgcctggcgtctaagctccaggagcaccgagccaaaggagtttctatcccgctcatgcacgaggcaatgcagaagtggtattacaaggacccccagggcgagatccaggggccgtttaataaccaagagatggctgaatggtttcaggccggttactttacaatgagtctgttggtcaaacgtgcctgtgacgagagcttccagcccctgggtgacatcatgaagatgtgggggcgggtgcccttctcccctggccccgcaccaccgccccatatgggcgagctggatcaggagcggttgaccagacagcaggagttaacagccctgtaccagatgcagcatctgcagtatcaacagtttttgatccagcagcagtatgcccaggtgctggcccagcaacagaaagcagcgttatcctctcagcaacagcaacagctggccctgctcctccagcagtttcaaacactgaagatgaggatctctgatcagaacattatcccgtctgtgacccgttccgtcagcgtcccagacactggctcaatctgggagttgcagcctaccgcatcacaaccgacagtgtgggaggggggaagtgtttgggatctgccccttgacactacaacccctggccctgccctcgagcagctgcaacagttggagaaggccaaggctgctaaacttgagcaggagcgccgcgaagcggagatgagagcaaagcgagaagaggaggagcgcaaacggcaagaggaactgcgtaggcagcaggaagagatacttcgtcgccagcaggaagaagagcggaaacgtcgggaggaggaggaactggctcgccgaaagcaggaagaagccctccggcgccagagagaacaggaaatcgcgctgcggcggcagagggaggaggaggagcgtcagcagcaggaagaggcccttaggcgactggaggagaggcggcgtgaagaagaggaacggcggaagcaggaggaactgctcaggaagcaggaggaggaagcggctaaatgggcccgcgaagaggaagaggctcagcggcgactggaggagaatcggctgcggatggaagaagaggccgctcgcctgcggcacgaagaggaagaacgaaaaagaaaagagttagaggtccagcgtcagaaggaactgatgcggcaacggcaacagcagcaagaagccttacgaagactccagcagcaacaacagcagcagcagctggcccaaatgaagttgcctagttccagcacatggggtcaacagagtaacacaacagcatgtcagtcgcaggccacactctctctggccgagatccaaaagttagaagaagagcgggagaggcagttgagggaagaacagcgcagacagcaacgggaactgatgaaggcactccaacagcagcagcagcaacaacagcagaagctcagcggatgggggaacgttagtaaacccagtggcactacaaagtctctgctggagatccagcaggaggaagccagacagatgcaaaagcagcagcagcagcagcaacagcaccagcaacctaatagggcccgaaacaacacacattctaatctgcacaccagcatcgggaacagcgtgtggggctctatcaacacgggccctcctaaccagtgggcgtcagacctggtgtcctctatctggtccaacgcagacactaagaatagtaacatgggcttctgggatgatgcggtaaaagaagtggggcctcgaaattcaaccaacaaaaacaagaataatgcctccctgtccaagtctgtaggtgtctcgaataggcagaataagaaggtggaagaagaagaaaaactcctgaagctgttccagggagttaataaggcccaggacggattcacccaatggtgcgaacaaatgcttcacgcgctcaacaccgccaataacctggatgtgccaacgtttgtcagcttcttgaaagaggtggagtccccatatgaagtacatgattacatacgggcatatctgggcgatacatctgaggccaaggagttcgccaaacagttcctggaacgtcgagcgaaacaaaaagcgaatcagcagcggcagcagcagcagctgcctcagcaacagcagcagcagccgccccagcagcctccacagcagccgcagcaacaggattccgtgtggggcatgaaccattccacgctgcactcagtgttccagactaatcagtcaaataatcagcagtctaacttcgaggcggttcagtccggtaagaagaaaaaaaagcagaagatggttcgagccgacccatccctgcttggattttctgtgaatgctagctccgagcggctgaacatgggtgaaattgaaaccctcgacgactattag

SEQ ID NO: 41189 - DNA, 3966 bp, Artificial Sequence
  derived and/or modified sequence
atggcagcagagactcagaccctcaacttcggtccggagtggcttcgcgctctgtcttctggaggctccatcacgagtccgccactgagcccagcactgcccaagtacaaactggcagactaccgatatgggcgcgaggagatgctagctttgttccttaaagacaacaaaattccaagcgatctgctggataaggagttcctccccatcctccaggaagagcctctgcccccgcttgctttagttccctttacagaagaagaacagcgtaacttttccatgagcgtgaattccgcagcagttctgcgccttacaggaaggggcggcggcggcaccgtagtaggcgcccctcggggcagaagcagcagtcgagggcgtggtagagggcgcggagagtgcggcttttatcagcgtagcttcgacgaggtggaaggagtgtttggcagggggggtggacgggaaatgcaccgtagccagtcttgggaggagcggggtgacagacgattcgaaaaacctgggcggaaggacgtgggtaagaaaaatggttattattgtatgtactctccagtcctgctgcttggtcagccactttgtcaaggccggccaaacttcgaagagggcgggccaacatctgtgggaagaaagcatgagttcatccggtctgaatccgagaattggagaatttttagagaagagcagaacggcgaggacgaggacggagggtggcggcttgcggggtccaggcgggacggtgaaagatggaggccacattcaccggacggccctagatctgccggctggcgggagcatatggaaagacgaagaagatttgaatttgacttcagggatcgggatgatgagcggggttatcgtcgggttaggtcgggctccgggtctatcgatgacgacagggactcgctccccgaatggtgtctggaagacgctgaggaggagatgggcactttcgacagctccggggctttcctcagtttgaaaaaagtccaaaaagagcccattcctgaggaacaggaaatggattttaggccggttgacgagggagaggagtgtagtgattccgagggttcccacaacgaggaagccaaggaacccgataagaccaataaaaaggagggggaaaagacagaccgcgtgggggtcgaggcaagtgaagagactcctcagactagcagcagcagcgcaaggcctggaacaccctctgaccaccagagtcaggaagcctctcaattcgaaaggaaagatgaaccgaagaccgagcagacggaaaaagccgaggaggagacgaggatggagaacagccttcccgccaaggtgccttccagaggggatgagatggtcgcagacgtgcaacagcctctgtcccagatcccatccgatacggcttccccactgttaatattgcctccacccgtgccgaacccttctccaaccctgcgtccagtggagaccccggtggtcggtgccccagggatgggatcagttagcacagaacccgatgatgaggagggactgaaacatctggagcaacaagccgagaaaatggttgcctacctccaggacagcgccctggacgatgagcggctggcctctaagctccaagagcatagagctaagggagtgtctattccactgatgcacgaggcaatgcagaagtggtactacaaagacccccagggggagattcagggcccatttaacaaccaggaaatggccgagtggtttcaggcggggtatttcacaatgtcgttattagtgaaacgcgcttgcgatgaaagttttcagcccctgggcgacataatgaagatgtggggacgggtgccattctctccaggtcctgctccccctccccacatgggcgagttagatcaggagcgacttacccgccagcaggaattgaccgctctgtaccagatgcagcacctgcagtatcaacagtttttaatccagcagcagtacgcccaggtcctcgcgcagcaacagaaggcagcactatcctcacaacagcagcagcagctcgctctcctgctgcagcaattccagacattgaagatgcggatctcggaccaaaatatcattccatctgtgacccgcagcgtgtccgtccctgataccgggtcaatttgggaacttcagcccaccgcctcccagcccaccgtgtgggaggggggctccgtgtgggatttaccactggatacaaccactcctgggcctgcgttggaacagctccagcaacttgagaaagccaaggccgctaagctggagcaagagaggagggaagcggagatgcgagctaaacgcgaggaggaagaaaggaaacggcaagaggagctccggcgacaacaggaggagattttaaggcgacagcaagaggaagagcgtaagcggcgggaagaggaggagctcgcccgcagaaaacaagaagaggccctcaggaggcaaagggagcaggaaatcgcattgcgacgccagcgggaagaggaggagcgccagcagcaggaagaggctctgcggcggctcgaggagaggcgccgcgaggaggaagaaaggcgcaaacaggaggaactattgagaaagcaggaagaggaggccgccaagtgggctcgtgaagaagaggaggcccagaggcgactcgaagaaaataggcttagaatggaagaagaggcggccagacttcgacatgaagaggaggagagaaagcgcaaggagctggaagtgcagcggcagaaagagcttatgagacagcggcagcagcaacaggaggccctgaggagactgcagcaacagcaacagcagcagcagctggctcaaatgaagctgccatctagctctacctggggccagcagtcgaacaccacggcatgtcagtcacaggctacattgtctttagccgaaattcagaagttggaagaggagcgagaaagacaacttcgagaggaacagagaagacagcagagagagctgatgaaggcgttacagcagcagcagcagcagcaacagcagaagctctctgggtggggaaatgtgtcaaaaccttcaggtacgactaagagtttattggaaattcaacaggaggaagctagacagatgcaaaagcagcagcagcaacaacagcagcatcagcagcctaaccgagcaagaaacaacacccacagcaatcttcacacttctataggaaatagtgtctgggggagcataaacacaggcccaccgaatcagtgggctagtgacctggtcagttcgatttggtcaaatgccgacaccaaaaattctaatatgggcttctgggatgatgccgtaaaagaggtagggccacggaacagtacgaataagaacaagaataatgcttccctgtctaaaagcgtcggcgtgagcaataggcagaacaagaaggtggaggaagaagagaaactgttaaagctgttccagggggtcaacaaagcccaagatggattcacgcagtggtgtgaacaaatgctgcacgctctcaataccgctaataacctagacgtcccaacgttcgtttctttcttaaaggaggttgaatccccctacgaggttcacgattacatcagggcctacctgggcgacacctctgaggcaaaggagttcgccaagcagtttctggagcgccgagccaaacagaaggctaatcagcaaaggcagcaacagcaactaccgcaacaacagcagcaacagcccccccagcagcctccccagcagccgcaacagcaggacagcgtctgggggatgaaccatagcaccctgcatagcgtgttccagaccaatcaaagtaacaaccaacagtctaacttcgaagccgtgcagtccggaaaaaagaagaagaaacagaagatggtgcgggcagacccatcgctgctaggcttttcagtgaacgccagtagcgagcgactgaacatgggtgagattgagactttggatgattactag

SEQ ID NO: 41190 - DNA, 42 bp, Artificial Sequence
  derived and/or modified sequence
atggcagcggaaacacaaactctgaatttcggtccggagtag

SEQ ID NO: 41191 - DNA, 3963 bp, Artificial Sequence
  derived and/or modified sequence
atggcagccgagacacaaaccttaaattttggtccagagtggctgcgcgctttgtctagtggtggatcgataacaagcccgcccctgtcccccgccctaccaaaatataagctcgcggattatcggtatggaagagaagagatgttggcactttttctgaaagataataaaatcccctccgacctgcttgacaaggagtttttaccaatcctgcaagaggagcccttaccacctctcgctctggtgcctttcactgaggaggaacagaggaacttttctatgtcagtaaattccgcagcagtcctgcgactgacagggcgtggggggggtgggaccgtcgtgggagccccccgaggtcgatctagttcacgggggagagggcgaggaagaggagagtgtggcttctaccagagaagttttgatgaggtggagggcgtgttcggccgcggcggaggccgcgaaatgcacagatcccagagttgggaagaacgcggagacaggaggttcgagaagccaggcagaaaggatgtggggaagaagaatggctactactgtatgtactctccagttctgcttttgggccaacccctttgtcagggacggcccaattttgaagaagggggccctacctctgtcggccggaagcacgagtttatccgaagcgaatcagagaactggcgcatttttagagaggagcaaaatggggaggacgaggatggcggttggcgcctagccggatcaaggcgcgacggcgaacggtggcgcccacattctccagatggaccacggagcgctgggtggagggaacacatggagagacggcgccgtttcgagttcgactttagagaccgagatgacgaacgagggtatagacgggttagaagtggaagcggctcgatagacgacgaccgtgacagcctgcctgagtggtgtctggaggacgcagaagaagaaatgggtaccttcgactctagtggggcattcctcagcttgaaaaaggtgcagaaagaaccaatcccagaagaacaagaaatggacttcaggccagtagacgagggggaggagtgctcagactccgagggaagccataacgaggaggccaaggagcctgataaaaccaataaaaaagaaggtgagaaaaccgaccgggtgggcgtagcttccgaggagaccccccagacttcctcctctagtgccagacccggaactcctagcgatcaccagagtcaagaggcttcacagtttgagagaaaggatgaacccaaaacagaacagacagagaaggcagaggaagagacacgcatggagaacagcctgcccgccaaagtgccatcccggggggatgagatggtggccgatgtacaacagccgctttcacaaatccctagcgacacagcctctccattactgattttgcccccccctgtccccaacccctcaccaaccctaaggcctgtggaaactccagtggtgggtgcacctggtatgggttctgtgagcacagagccagacgatgaggaaggactgaaacacctcgagcagcaggcagagaagatggtcgcttaccttcaagacagcgccctcgacgacgagaggttggcttctaagctgcaggaacatcgcgccaagggagtgagtataccgctgatgcatgaggccatgcagaagtggtactacaaagacccccagggggaaatccagggacctttcaacaatcaggaaatggcggagtggtttcaggccggatactttactatgagcctacttgtaaaacgcgcatgcgatgaaagttttcagccgctcggagacattatgaagatgtggggaagagtgcctttttctccgggccctgcacctcctcctcacatgggagaattagaccaggagagattaactaggcagcaggagctgacggctctgtatcagatgcagcacctgcaataccagcagttcctgattcaacagcagtatgcccaggttctggcccagcaacagaaggccgccctctcatcccagcaacagcagcagctggccctgcttttacagcagtttcaaacacttaagatgcggattagcgatcagaacatcattccttctgtgactcgatcggtgtctgtcccagataccgggtctatttgggagcttcagcccaccgcttctcagcccaccgtgtgggagggcggttcggtctgggatctgcccctcgatactacaactcctggacctgccctcgagcagctgcagcagctcgagaaagccaaagccgcaaagctggaacaagagaggagggaagccgagatgcgtgcaaagcgcgaagaggaggaaaggaaacggcaggaggagctgaggaggcagcaagaggaaattctccgtcgacagcaggaagaagagagaaagcgaagggaggaggaagagttagcccggagaaagcaggaggaggctttgcgtcgccaacgagagcaggaaatcgcccttcgcagacagagggaagaagaggagaggcagcagcaggaggaggccctgcgtcgtctcgaagaaaggcgccgagaagaagaggaacggaggaagcaagaggaactcctgaggaaacaggaagaggaggccgctaagtgggctcgagaagaagaagaagcacagcgacgcctagaggagaatcgcctacggatggaagaggaggcagcaaggcttcgccacgaggaagaggaaaggaaacggaaagagcttgaggtccagcggcagaaggagctgatgaggcaacggcagcagcagcaggaggcactgcgacgcctgcagcagcagcagcagcagcagcaactcgcccaaatgaaacttccatcaagcagtacatgggggcagcagagcaacacaaccgcttgccaatctcaggccactctttctcttgccgagatccagaaactcgaggaggaaagagaaagacaactgcgagaagaacaacgtcgacagcagagagaactgatgaaagccctgcagcagcagcagcagcagcagcagcagaagctgtcaggatggggcaacgtttctaagccttccggcaccacaaaatcactcctggagatccagcaggaggaggcaaggcaaatgcagaagcagcagcagcaacagcagcaacatcagcaaccaaaccgggcaagaaacaatacccatagcaatctgcacacctccataggcaattccgtgtggggctcaatcaatactggcccaccaaaccaatgggcttcagaccttgtctcctccatctggagcaatgctgataccaagaattcgaacatgggtttctgggatgatgcagtgaaggaagttggtccgagaaattctaccaataagaacaagaacaatgcaagcctctctaaatccgtaggcgtgagtaatcgtcaaaacaagaaggttgaggaagaggagaaattattgaagctgttccagggagtaaataaggctcaggatggattcacacagtggtgtgaacaaatgctgcatgccttgaatacagcaaataaccttgatgtcccgacttttgtcagtttcctaaaagaggtcgagtccccttacgaggtgcatgattacatcagagcttacctgggggacacctctgaggctaaggagtttgcaaagcagtttcttgagagacgggccaagcagaaagccaaccagcaacgacaacagcaacagttgccccaacagcaacaacagcagcccccgcaacagcctccccagcagccgcagcagcaggacagtgtgtgggggatgaatcattccaccctgcacagcgtgttccagaccaaccagtctaacaatcagcagtccaactttgaagctgtgcagagtggaaaaaagaagaaaaaacagaagatggtccgggcagacccttcgcttcttgggtttagtgtcaacgccagttccgaacgtctgaatatgggtgaaattgaaaccttggatgactattag

SEQ ID NO: 41192 - DNA, 7878 bp, Artificial Sequence
  derived and/or modified sequence
gtgacgtgcgtggcgacgtgtcggccatcttgtgttgttgaggctgaggactgactggggttctgagactccctgtcccggaccgcagcgttaaaaggatctgaacaaagtctgctcaaatctcctgctgtgaaccagcagaatttttgaacaggtttcttcacatataaaaatctattgtaaaaatacggaaaagaatggcagcggaaacgcagacactgaactttgggcctgaatggctccgagctctgtccagtggtgggagtattacatcccctcctctttctccagcattgccgaagtataaattagcagattatcgttacggcagagaagaaatgttagcacttttccttaaagacaacaagataccttcagaccttctggataaagaatttctgcctatcctccaggaggaaccccttccaccattggctctggtaccctttacagaagaagaacagagaaacttttccatgtctgtaaatagtgctgctgtcctgcgattgacaggacgaggaggaggaggaacagtggtgggggctcctagaggtcgaagttcttcaagagggcgaggcagaggcagaggtgaatgtggtttctaccaaagaagttttgatgaagtagagggtgtttttggtcgaggaggtggcagagaaatgcatagatcgcagagctgggaggaaaggggtgacagacgttttgaaaaaccaggacgaaaagatgtaggaaagaagaatggatattattgcatgtactcaccagttcttttgctgggtcagcctttatgccaagggagaccaaattttgaggaaggtggaccaacatcagtagggagaaagcatgaatttatacgctcagaaagtgaaaattggcgcatctttagagaggaacaaaatggagaagatgaagatggaggttggcgactagctggatcaaggagggatggagagaggtggcgacctcacagtcctgatggccctcgttctgcaggctggcgggaacacatggaacgacgtcggaggtttgagtttgattttcgagatagagatgatgaacggggttaccgaagggttcgctctggcagtgggagcatagatgatgacagggatagcttgcccgaatggtgcttagaggatgctgaagaagaaatgggtacatttgactcatctggagcattcctttctctaaaaaaagtacagaaagagcctattccagaagagcaggagatggacttccggcctgtggacgaaggggaggagtgctctgactctgagggtagccataatgaagaggccaaagaacccgataagacaaataagaaagaaggagagaaaacagatagagtaggagttgaagctagtgaggaaactccccagacctcatcatcatctgctagaccaggtactccttcagaccatcagtctcaggaagcatcacagtttgagaggaaagatgaaccaaaaactgagcaaacggaaaaagctgaagaggagactcggatggaaaatagtctaccagccaaagtgcccagcagaggggatgaaatggttgctgatgtccagcagcccctgtcgcagattccttcagatacagcctctcctcttctcatacttccacctcctgttcccaatcctagtcctactctccggccagttgaaacaccagttgtaggtgctcctggtatgggcagtgtttccacagaacctgatgatgaagaaggtctcaaacatttggagcagcaagctgagaaaatggtggcttatctccaagacagtgcactagatgatgaaagattggcatcaaaactgcaagagcacagagctaaaggagtgtcgattccattgatgcatgaagcaatgcagaagtggtattacaaagatcctcagggagaaattcaaggtcccttcaataatcaggagatggcagaatggtttcaggcgggctattttactatgtctttattggtgaagagagcgtgtgatgaaagcttccaacctcttggcgatatcatgaaaatgtggggaagggttcccttttctccaggtccagctccccctcctcatatgggagagctggaccaggaacgactgaccaggcagcaagaactcacagccttataccagatgcagcacctgcagtaccagcagtttttaatacaacaacaatatgcacaggttttggcccaacagcagaaagcagcactgtcttcccagcagcagcagcagttggcacttcttcttcaacagtttcagaccttgaagatgagaatatctgatcagaacatcattccctcagtaactaggtctgtgtccgtgccagatactggctctatctgggagcttcagccaacagcttcacagcctacagtttgggaaggtggtagtgtatgggatcttcctctggacaccacgacaccaggccctgccctggaacagcttcagcagctagagaaggccaaagctgcaaagctagagcaagagagaagagaggcagaaatgagggcaaaacgggaagaggaagagcgaaagaggcaggaagaactccgaagacaacaggaggaaattcttcggcgacagcaggaagaagaaaggaaaaggcgagaggaagaagaacttgcccgaaggaaacaggaagaggctctgcgtcgccagcgggagcaagaaattgcattaaggcgacagcgagaagaggaagaaagacagcagcaagaagaagctcttagaagactggaagagaggagaagagaagaggaagaaaggcggaagcaggaagaattgttacgcaaacaggaagaggaggctgcaaaatgggcccgggaagaagaagaagcccagcgtcgattagaggagaaccggctgcggatggaagaggaggcagccagactccggcatgaggaagaagaacggaagagaaaggagctggaggtccagcggcagaaggagttaatgcgccagaggcagcagcagcaagaggctctccggaggttgcagcagcagcagcagcaacaacagctggcgcagatgaagcttccttcttcttcaacgtggggccagcagtccaatacaacagcatgtcagtcccaggccacgctgtcgttggctgaaatccaaaaactagaggaagaacgagaacggcagcttcgagaagagcaaaggcgccagcagagggagttgatgaaagctcttcagcagcagcagcaacagcaacagcagaaactctcaggttgggggaatgtcagcaaaccttcaggtaccacgaaatctcttctggagatccagcaggaagaggccaggcaaatgcaaaagcagcagcagcagcagcagcaacaccagcaaccaaacagagctcgtaacaatacgcattccaacctgcacaccagcattgggaattctgtttggggctctataaatactggtcctcctaaccagtgggcatctgacctagtcagtagtatttggagtaatgctgacactaaaaactccaacatgggattctgggatgatgcagtgaaagaggtgggacctaggaattcaacaaataaaaataaaaacaacgccagtctcagtaaatctgtaggtgtgtctaaccggcagaataagaaagtagaagaagaagaaaagttgctgaagctctttcagggagtaaataaagcccaagatggatttacgcagtggtgtgaacagatgcttcatgcccttaatacggcaaataacttggatgttcccacatttgtttctttcctgaaagaagtagaatctccttatgaggtccatgattatatcagggcctatttaggagatacttctgaggccaaggagtttgccaagcagttccttgagcgccgtgccaaacagaaagccaaccagcagcgtcagcagcagcagctgccacagcagcagcagcagcagccgccacagcagccgccacagcagccacaacagcaggactctgtgtgggggatgaaccacagtacactccattcagtatttcagaccaatcaaagcaacaaccaacaatccaattttgaggctgtgcagagtggcaagaagaagaaaaagcagaagatggtccgagcagatcccagtttattaggattttcagtcaatgcatcatcggagcgactcaacatgggtgaaatcgagacgttggatgactactgagcacctgccagtggactggccatccctctcctgtctgccgactatggagtctccacctttggacacaacacttactcaccatttactctttatcactctgcaacaaatcacagaaccgatcatctcaggctttttcttctggccctttgtgtccaagattctttaatccatttttgttggtgaacatctcagactatagataagtggactggaccctgtgtcttgggggtggcagttgggattactccccaacaaggctgattttaggcagcatgtgttcactgtgctgtgatttcatctactgtctcccagaaagtgtgttgggatcggccattagcagcttgctttctcttgtcactttttttcttctattttgttttttcttcttctttttccccccatcagggcaaatggtctaactggtgcaatcatgaagagagttaatggttaacagacattggccaataacaaaacaccccatggactgtgactcgagtatccaacaggcagtcagagctctcccggtctgaaagttgcattgccactgctaactttgggattgcatcagagaggccctgagtggggttgagatgaggttggtttggtttgatgttacacactcctcacctgttctttctgagtgtcctttctctgaaaggatttatgtttttcttcgttagatagtgacttctgagcaagctgatctcccctggcatgctccaacctgattggacaaaggaagctctatggcctgggagagagactattcttaatttttctttcttacaaaaactgatttttcccataaatatttttacttcagaggactaggaccattttgttttgggcccttctgctgaaaatttgtctcgtttaagaggcagctagaatctttaccatatgtatgaatttgtataatttcatttttggatagggataaacttttgcttctgataaaagcctggaatttcatctggtcctcagagcattgcgtgtgtgtcttgctgtagcccggaaaaggttttgtgtaaagattctgggatggcaagttgtttgccttttctgaaaagagaacatacagaacctgtccatctttaagaccttcatccatggaatctactatacaggaggatgcagtgggctggaggggatgggcgaaaatgggagcaggaagcctggcctggcttctggtcatggcctcctaaaaccttaaacttcaagtagaaatgtactcaagccctatttataaacaaatacttttcctgcctccaccaaacccctacagaacatcacctggaattgccactcacactgggttggagtcattgggcagctgtgcctgtgcgagaggtgctgtggtctgggcagcccctggaaaagcacctttgctgcctgtcattgttgcctgaagaaggctggagttgctctgagagcagtttgggtttggagtattatatttggcttctatttttattattttggatcaccattctccctatcccttcttgcctccctcccttctaaacatgtgtaataactatacagagactgctacaaaattgtatatagtttttggatcaaatagcatgaggggagaggaaaccattaaaagttggggctcctactctcctttgctttgtaaattcaaaagttgggggtgggtaagagggatagttaaaatgtttacaaaactttaggctccctcggaacttttgccagtgtggaggaaaataaaaaagaacttaaataaaatctgattgtattctatctgagtgcacctcttgtactcacctttatggaggctgagttctgcactaaactgttcctcttggtaccatggaaaagctccaagcacccaagacatggaggcagccatggcttctttctctgccagaccacgtagcactggctggttctgtatttgagaatgtagaggtcaaggcagatgtcggtaagtttgaccaaatatcttttctctttttgactctccctttctgctaacatgtggatcagctcctgccctcataccgcagacacacccactctgaacacacccctccagagcttgcccacaccttcccaactagactctgtgtgtgtattcaggaaaaatgaaaataaatttttaaaaattgggagtggaatgggcagattagggggaacaaagtcattttggtcatggaacatccatttgcttaaccaaggagacttgcttctatctgaggaatttcccacttagtagaaagaaacactcttccctgggaatgtttgtttctgtctctctcaatgctactctctttcatattctcatttgctcaccctttcacttagagccaccgttttctcatcccattctatgaacttatttccaaattctcctaactattcctgagttttgaagtatttgttttgtaccctctctgcttccggttttttgtttggttggcttttttggagatagggtcttgtgatgttgcccacactggtctcgagcccctgggctcaagtgatcctcccgcctcagcctcctaaatatctaggactacaggtgtgtgccaccatgcccagctccagttttgttggttgatttgtttaaattcagagatttaaaaacatcccagacaagacagtttgattatggagactgtccccaagcagattggtgtgctggtggctgctgtgcataacagattccctccagattggcttacaacagctacttcattctgtgggtcaggaatttggatagggctcagctgggtggtggttctcctggggtattctttggttgtggtcagatgtcttccagggcatcattcctatgaaggcttaatgaattaggcaagctgtccaagatggctcactcgtgtaatgacagttgacgttggctgtaggctgggaactcagctgggttgatgactggaggagcttatgtgtgtcgtctccggaatggcagcttcagaggagttgaacttaagtggtgattggcttcccccagagaaccaggcagaagctgtgttacctttttgagctcttagctcaggagtcacatagagtcacttctgtgacactgtgttgcatcaaagtagtcacaaacccactcagattcaagagaagggagcatggccctctccctgcaaccccctccccccccgccttgatgaaaggagtgacaaggtcacattggagaagagcttgtggggtgggagatattatagccatttttgggaaatatctgcataaaatgagtttatgcatacatgaaggactttattttcattggctttaagttgagggtttttgtttttgtttttgtattggagatgggttcttactatgttgcccaggctggtctcaaacccctgggctcaagtgatcctgttgcctcagcctcccaagtagctgggactacagctatgtgccagtgcacccagcttgttttttttaaattttaggatagataatggtacttctggctttatttaaataatttttttagggaaaccattgtatttatacatgcatatatttttatatatacaaatatgtatataaaagtatatgttttacattttcaatatatatataatatatacatatatgttatatacgtatatatattgcaccctactttaaaattgactgataacaaaattggtaattttgtataaaatgcccaactgtgcattattaataaaagtatgtgaatgactct

SEQ ID NO: 41193 - DNA, 5976 bp, Artificial Sequence
  derived and/or modified sequence
gtgcgtggcgacgtgtcggccatcttgtgttgttgaggctgaggactgactggggttctgagactccctgtcccggaccgcagattatagtgggaccagtctcattaggttgaatctacagcctatgttggtgttaacccaggtctcttagagcgttaaaaggatctgaacaaagtctgctcaaatctcctgctgtgaaccagcagaatttttgaacaggtttcttcacatataaaaatctattgtaaaaatacggaaaagaatggcagcggaaacgcagacactgaactttgggcctgaatggctccgagctctgtccagtggtgggagtattacatcccctcctctttctccagcattgccgaagtataaattagcagattatcgttacggcagagaagaaatgttagcacttttccttaaagacaacaagataccttcagaccttctggataaagaatttctgcctatcctccaggaggaaccccttccaccattggctctggtaccctttacagaagaagaacagagaaacttttccatgtctgtaaatagtgctgctgtcctgcgattgacaggacgaggaggaggaggaacagtggtgggggctcctagaggtcgaagttcttcaagagggcgaggcagaggcagaggtgaatgtggtttctaccaaagaagttttgatgaagtagagggtgtttttggtcgaggaggtggcagagaaatgcatagatcgcagagctgggaggaaaggggtgacagacgttttgaaaaaccaggacgaaaagatgtaggaaagaagaatggatattattgcatgtactcaccagttcttttgctgggtcagcctttatgccaagggagaccaaattttgaggaaggtggaccaacatcagtagggagaaagcatgaatttatacgctcagaaagtgaaaattggcgcatctttagagaggaacaaaatggagaagatgaagatggaggttggcgactagctggatcaaggagggatggagagaggtggcgacctcacagtcctgatggccctcgttctgcaggctggcgggaacacatggaacgacgtcggaggtttgagtttgattttcgagatagagatgatgaacggggttaccgaagggttcgctctggcagtgggagcatagatgatgacagggatagcttgcccgaatggtgcttagaggatgctgaagaagaaatgggtacatttgactcatctggagcattcctttctctaaaaaaagtacagaaagagcctattccagaagagcaggagatggacttccggcctgtggacgaaggggaggagtgctctgactctgagggtagccataatgaagaggccaaagaacccgataagacaaataagaaagaaggagagaaaacagatagagtaggagttgaagctagtgaggaaactccccagacctcatcatcatctgctagaccaggtactccttcagaccatcagtctcaggaagcatcacagtttgagaggaaagatgaaccaaaaactgagcaaacggaaaaagctgaagaggagactcggatggaaaatagtctaccagccaaagtgcccagcagaggggatgaaatggttgctgatgtccagcagcccctgtcgcagattccttcagatacagcctctcctcttctcatacttccacctcctgttcccaatcctagtcctactctccggccagttgaaacaccagttgtaggtgctcctggtatgggcagtgtttccacagaacctgatgatgaagaaggtctcaaacatttggagcagcaagctgagaaaatggtggcttatctccaagacagtgcactagatgatgaaagattggcatcaaaactgcaagagcacagagctaaaggagtgtcgattccattgatgcatgaagcaatgcagaagtggtattacaaagatcctcagggagaaattcaaggtcccttcaataatcaggagatggcagaatggtttcaggcgggctattttactatgtctttattggtgaagagagcgtgtgatgaaagcttccaacctcttggcgatatcatgaaaatgtggggaagggttcccttttctccaggtccagctccccctcctcatatgggagagctggaccaggaacgactgaccaggcagcaagaactcacagccttataccagatgcagcacctgcagtaccagcagtttttaatacaacaacaatatgcacaggttttggcccaacagcagaaagcagcactgtcttcccagcagcagcagcagttggcacttcttcttcaacagtttcagaccttgaagatgagaatatctgatcagaacatcattccctcagtaactaggtctgtgtccgtgccagatactggctctatctgggagcttcagccaacagcttcacagcctacagtttgggaaggtggtagtgtatgggatcttcctctggacaccacgacaccaggccctgccctggaacagcttcagcagctagagaaggccaaagctgcaaagctagagcaagagagaagagaggcagaaatgagggcaaaacgggaagaggaagagcgaaagaggcaggaagaactccgaagacaacaggaggaaattcttcggcgacagcaggaagaagaaaggaaaaggcgagaggaagaagaacttgcccgaaggaaacaggaagaggctctgcgtcgccagcgggagcaagaaattgcattaaggcgacagcgagaagaggaagaaagacagcagcaagaagaagctcttagaagactggaagagaggagaagagaagaggaagaaaggcggaagcaggaagaattgttacgcaaacaggaagaggaggctgcaaaatgggcccgggaagaagaagaagcccagcgtcgattagaggagaaccggctgcggatggaagaggaggcagccagactccggcatgaggaagaagaacggaagagaaaggagctggaggtccagcggcagaaggagttaatgcgccagaggcagcagcagcaagaggctctccggaggttgcagcagcagcagcagcaacaacagctggcgcagatgaagcttccttcttcttcaacgtggggccagcagtccaatacaacagcatgtcagtcccaggccacgctgtcgttggctgaaatccaaaaactagaggaagaacgagaacggcagcttcgagaagagcaaaggcgccagcagagggagttgatgaaagctcttcagcagcagcagcaacagcaacagcagaaactctcaggttgggggaatgtcagcaaaccttcaggtaccacgaaatctcttctggagatccagcaggaagaggccaggcaaatgcaaaagcagcagcagcagcagcagcaacaccagcaaccaaacagagctcgtaacaatacgcattccaacctgcacaccagcattgggaattctgtttggggctctataaatactggtcctcctaaccagtgggcatctgacctagtcagtagtatttggagtaatgctgacactaaaaactccaacatgggattctgggatgatgcagtgaaagaggtgggacctaggaattcaacaaataaaaataaaaacaacgccagtctcagtaaatctgtaggtgtgtctaaccggcagaataagaaagtagaagaagaagaaaagttgctgaagctctttcagggagtaaataaagcccaagatggatttacgcagtggtgtgaacagatgcttcatgcccttaatacggcaaataacttggatgttcccacatttgtttctttcctgaaagaagtagaatctccttatgaggtccatgattatatcagggcctatttaggagatacttctgaggccaaggagtttgccaagcagttccttgagcgccgtgccaaacagaaagccaaccagcagcgtcagcagcagcagctgccacagcagcagcagcagcagccgccacagcagccgccacagcagccacaacagcaggactctgtgtgggggatgaaccacagtacactccattcagtatttcagaccaatcaaagcaacaaccaacaatccaattttgaggctgtgcagagtggcaagaagaagaaaaagcagaagatggtccgagcagatcccagtttattaggattttcagtcaatgcatcatcggagcgactcaacatgggtgaaatcgagacgttggatgactactgagcacctgccagtggactggccatccctctcctgtctgccgactatggagtctccacctttggacacaacacttactcaccatttactctttatcactctgcaacaaatcacagaaccgatcatctcaggctttttcttctggccctttgtgtccaagattctttaatccatttttgttggtgaacatctcagactatagataagtggactggaccctgtgtcttgggggtggcagttgggattactccccaacaaggctgattttaggcagcatgtgttcactgtgctgtgatttcatctactgtctcccagaaagtgtgttgggatcggccattagcagcttgctttctcttgtcactttttttcttctattttgttttttcttcttctttttccccccatcagggcaaatggtctaactggtgcaatcatgaagagagttaatggttaacagacattggccaataacaaaacaccccatggactgtgactcgagtatccaacaggcagtcagagctctcccggtctgaaagttgcattgccactgctaactttgggattgcatcagagaggccctgagtggggttgagatgaggttggtttggtttgatgttacacactcctcacctgttctttctgagtgtcctttctctgaaaggatttatgtttttcttcgttagatagtgacttctgagcaagctgatctcccctggcatgctccaacctgattggacaaaggaagctctatggcctgggagagagactattcttaatttttctttcttacaaaaactgatttttcccataaatatttttacttcagaggactaggaccattttgttttgggcccttctgctgaaaatttgtctcgtttaagaggcagctagaatctttaccatatgtatgaatttgtataatttcatttttggatagggataaacttttgcttctgataaaagcctggaatttcatctggtcctcagagcattgcgtgtgtgtcttgctgtagcccggaaaaggttttgtgtaaagattctgggatggcaagttgtttgccttttctgaaaagagaacatacagaacctgtccatctttaagaccttcatccatggaatctactatacaggaggatgcagtgggctggaggggatgggcgaaaatgggagcaggaagcctggcctggcttctggtcatggcctcctaaaaccttaaacttcaagtagaaatgtactcaagccctatttataaacaaatacttttcctgcctccaccaaacccctacagaacatcacctggaattgccactcacactgggttggagtcattgggcagctgtgcctgtgcgagaggtgctgtggtctgggcagcccctggaaaagcacctttgctgcctgtcattgttgcctgaagaaggctggagttgctctgagagcagtttgggtttggagtattatatttggcttctatttttattattttggatcaccattctccctatcccttcttgcctccctcccttctaaacatgtgtaataactatacagagactgctacaaaattgtatatagtttttggatcaaatagcatgaggggagaggaaaccattaaaagttggggctcctactctcctttgctttgtaaattcaaaagttgggggtgggtaagagggatagttaaaatgtttacaaaactttaggctccctcggaacttttgccagtgtggaggaaaataaaaaagaacttaaat

SEQ ID NO: 41194 - DNA, 5937 bp, Artificial Sequence
  derived and/or modified sequence
ggctgaggactgactggggttctgagactccctgtcccggaccgcagattatagtgggaccagtctcattaggttgaatctacagcctatgttggtgttaacccaggtctcttagagcgttaaaaggatctgaacaaagtctgctcaaatctcctgctgtgaaccagcagaatttttgaacaggtttcttcacatataaaaatctattgtaaaaatacggaaaagaatggcagcggaaacgcagacactgaactttgggcctgaatggctccgagctctgtccagtggtgggagtattacatcccctcctctttctccagcattgccgaagtataaattagcagattatcgttacggcagagaagaaatgttagcacttttccttaaagacaacaagataccttcagaccttctggataaagaatttctgcctatcctccaggaggaaccccttccaccattggctctggtaccctttacagaagaagaacagagaaacttttccatgtctgtaaatagtgctgctgtcctgcgattgacaggacgaggaggaggaggaacagtggtgggggctcctagaggtcgaagttcttcaagagggcgaggcagaggcagaggtgaatgtggtttctaccaaagaagttttgatgaagtagagggtgtttttggtcgaggaggtggcagagaaatgcatagatcgcagagctgggaggaaaggggtgacagacgttttgaaaaaccaggacgaaaagatgtaggaaagaagaatggatattattgcatgtactcaccagttcttttgctgggtcagcctttatgccaagggagaccaaattttgaggaaggtggaccaacatcagtagggagaaagcatgaatttatacgctcagaaagtgaaaattggcgcatctttagagaggaacaaaatggagaagatgaagatggaggttggcgactagctggatcaaggagggatggagagaggtggcgacctcacagtcctgatggccctcgttctgcaggctggcgggaacacatggaacgacgtcggaggtttgagtttgattttcgagatagagatgatgaacggggttaccgaagggttcgctctggcagtgggagcatagatgatgacagggatagcttgcccgaatggtgcttagaggatgctgaagaagaaatgggtacatttgactcatctggagcattcctttctctaaaaaaagtacagaaagagcctattccagaagagcaggagatggacttccggcctgtggacgaaggggaggagtgctctgactctgagggtagccataatgaagaggccaaagaacccgataagacaaataagaaagaaggagagaaaacagatagagtaggagttgctagtgaggaaactccccagacctcatcatcatctgctagaccaggtactccttcagaccatcagtctcaggaagcatcacagtttgagaggaaagatgaaccaaaaactgagcaaacggaaaaagctgaagaggagactcggatggaaaatagtctaccagccaaagtgcccagcagaggggatgaaatggttgctgatgtccagcagcccctgtcgcagattccttcagatacagcctctcctcttctcatacttccacctcctgttcccaatcctagtcctactctccggccagttgaaacaccagttgtaggtgctcctggtatgggcagtgtttccacagaacctgatgatgaagaaggtctcaaacatttggagcagcaagctgagaaaatggtggcttatctccaagacagtgcactagatgatgaaagattggcatcaaaactgcaagagcacagagctaaaggagtgtcgattccattgatgcatgaagcaatgcagaagtggtattacaaagatcctcagggagaaattcaaggtcccttcaataatcaggagatggcagaatggtttcaggcgggctattttactatgtctttattggtgaagagagcgtgtgatgaaagcttccaacctcttggcgatatcatgaaaatgtggggaagggttcccttttctccaggtccagctccccctcctcatatgggagagctggaccaggaacgactgaccaggcagcaagaactcacagccttataccagatgcagcacctgcagtaccagcagtttttaatacaacaacaatatgcacaggttttggcccaacagcagaaagcagcactgtcttcccagcagcagcagcagttggcacttcttcttcaacagtttcagaccttgaagatgagaatatctgatcagaacatcattccctcagtaactaggtctgtgtccgtgccagatactggctctatctgggagcttcagccaacagcttcacagcctacagtttgggaaggtggtagtgtatgggatcttcctctggacaccacgacaccaggccctgccctggaacagcttcagcagctagagaaggccaaagctgcaaagctagagcaagagagaagagaggcagaaatgagggcaaaacgggaagaggaagagcgaaagaggcaggaagaactccgaagacaacaggaggaaattcttcggcgacagcaggaagaagaaaggaaaaggcgagaggaagaagaacttgcccgaaggaaacaggaagaggctctgcgtcgccagcgggagcaagaaattgcattaaggcgacagcgagaagaggaagaaagacagcagcaagaagaagctcttagaagactggaagagaggagaagagaagaggaagaaaggcggaagcaggaagaattgttacgcaaacaggaagaggaggctgcaaaatgggcccgggaagaagaagaagcccagcgtcgattagaggagaaccggctgcggatggaagaggaggcagccagactccggcatgaggaagaagaacggaagagaaaggagctggaggtccagcggcagaaggagttaatgcgccagaggcagcagcagcaagaggctctccggaggttgcagcagcagcagcagcaacaacagctggcgcagatgaagcttccttcttcttcaacgtggggccagcagtccaatacaacagcatgtcagtcccaggccacgctgtcgttggctgaaatccaaaaactagaggaagaacgagaacggcagcttcgagaagagcaaaggcgccagcagagggagttgatgaaagctcttcagcagcagcagcaacagcaacagcagaaactctcaggttgggggaatgtcagcaaaccttcaggtaccacgaaatctcttctggagatccagcaggaagaggccaggcaaatgcaaaagcagcagcagcagcagcagcaacaccagcaaccaaacagagctcgtaacaatacgcattccaacctgcacaccagcattgggaattctgtttggggctctataaatactggtcctcctaaccagtgggcatctgacctagtcagtagtatttggagtaatgctgacactaaaaactccaacatgggattctgggatgatgcagtgaaagaggtgggacctaggaattcaacaaataaaaataaaaacaacgccagtctcagtaaatctgtaggtgtgtctaaccggcagaataagaaagtagaagaagaagaaaagttgctgaagctctttcagggagtaaataaagcccaagatggatttacgcagtggtgtgaacagatgcttcatgcccttaatacggcaaataacttggatgttcccacatttgtttctttcctgaaagaagtagaatctccttatgaggtccatgattatatcagggcctatttaggagatacttctgaggccaaggagtttgccaagcagttccttgagcgccgtgccaaacagaaagccaaccagcagcgtcagcagcagcagctgccacagcagcagcagcagcagccgccacagcagccgccacagcagccacaacagcaggactctgtgtgggggatgaaccacagtacactccattcagtatttcagaccaatcaaagcaacaaccaacaatccaattttgaggctgtgcagagtggcaagaagaagaaaaagcagaagatggtccgagcagatcccagtttattaggattttcagtcaatgcatcatcggagcgactcaacatgggtgaaatcgagacgttggatgactactgagcacctgccagtggactggccatccctctcctgtctgccgactatggagtctccacctttggacacaacacttactcaccatttactctttatcactctgcaacaaatcacagaaccgatcatctcaggctttttcttctggccctttgtgtccaagattctttaatccatttttgttggtgaacatctcagactatagataagtggactggaccctgtgtcttgggggtggcagttgggattactccccaacaaggctgattttaggcagcatgtgttcactgtgctgtgatttcatctactgtctcccagaaagtgtgttgggatcggccattagcagcttgctttctcttgtcactttttttcttctattttgttttttcttcttctttttccccccatcagggcaaatggtctaactggtgcaatcatgaagagagttaatggttaacagacattggccaataacaaaacaccccatggactgtgactcgagtatccaacaggcagtcagagctctcccggtctgaaagttgcattgccactgctaactttgggattgcatcagagaggccctgagtggggttgagatgaggttggtttggtttgatgttacacactcctcacctgttctttctgagtgtcctttctctgaaaggatttatgtttttcttcgttagatagtgacttctgagcaagctgatctcccctggcatgctccaacctgattggacaaaggaagctctatggcctgggagagagactattcttaatttttctttcttacaaaaactgatttttcccataaatatttttacttcagaggactaggaccattttgttttgggcccttctgctgaaaatttgtctcgtttaagaggcagctagaatctttaccatatgtatgaatttgtataatttcatttttggatagggataaacttttgcttctgataaaagcctggaatttcatctggtcctcagagcattgcgtgtgtgtcttgctgtagcccggaaaaggttttgtgtaaagattctgggatggcaagttgtttgccttttctgaaaagagaacatacagaacctgtccatctttaagaccttcatccatggaatctactatacaggaggatgcagtgggctggaggggatgggcgaaaatgggagcaggaagcctggcctggcttctggtcatggcctcctaaaaccttaaacttcaagtagaaatgtactcaagccctatttataaacaaatacttttcctgcctccaccaaacccctacagaacatcacctggaattgccactcacactgggttggagtcattgggcagctgtgcctgtgcgagaggtgctgtggtctgggcagcccctggaaaagcacctttgctgcctgtcattgttgcctgaagaaggctggagttgctctgagagcagtttgggtttggagtattatatttggcttctatttttattattttggatcaccattctccctatcccttcttgcctccctcccttctaaacatgtgtaataactatacagagactgctacaaaattgtatatagtttttggatcaaatagcatgaggggagaggaaaccattaaaagttggggctcctactctcctttgctttgtaaattcaaaagttgggggtgggtaagagggatagttaaaatgtttacaaaactttaggctccctcggaacttttgccagtgtggaggaaaataaaaaagaacttaaat

SEQ ID NO: 41195 - DNA, 3966 bp, Artificial Sequence
  derived and/or modified sequence
atggctgctgagacccagaccctgaactttggacctgagtggctgcgggccctgagcagcggcggcagcatcaccagcccccccctgagccctgccctgcccaagtacaagctggccgactaccgctatggccgggaggagatgctggccctcttcctgaaggacaacaagatccccagcgacctgctggacaaggagttcctgcccatcctgcaggaggagcccctgccccccctggccctggtgcccttcacagaggaggagcagaggaacttctccatgtctgtgaacagcgctgctgtgctgcggctgaccggccggggcggcggcggcaccgtggtgggcgccccccggggccgcagcagcagccggggccggggccggggccgcggggagtgtggcttctaccagaggagctttgatgaggtggagggcgtgtttggccggggcggcggccgggagatgcacaggagccagagctgggaggagcggggggacagaagatttgagaagccaggcaggaaggatgtgggcaagaagaatggctactactgcatgtacagccctgtgctgctgctgggccagcccctgtgccagggccggcccaactttgaggagggcggccccacctctgtgggcaggaagcatgagttcatccgctctgagagcgagaactggaggatcttccgggaggagcagaatggagaagatgaagatggcggctggaggctggccggcagcagaagagatggagagcgctggaggccccacagcccagatggccccaggtctgctggctggagggagcacatggagaggagaagaagatttgaatttgacttccgggacagagatgatgagcggggctacagaagagtgcgcagcggcagcggcagcattgatgatgaccgggacagcctgcctgagtggtgcctggaggatgctgaggaggagatgggcacctttgacagcagcggggccttcctgagcctgaagaaggtgcagaaggagcccatccctgaggagcaggagatggacttccggcctgtggatgaaggagaagaatgtagtgacagcgagggcagccacaatgaggaggccaaggagccagacaagaccaacaagaaggagggggagaagacagacagagtgggcgtggaggccagcgaggagaccccccagaccagcagcagcagcgcccggcccggcacccccagcgaccaccagagccaggaggccagccagtttgagaggaaggatgagcccaagacagagcagacagagaaggccgaggaggagaccaggatggagaacagcctgcctgccaaggtgcccagcagaggagatgagatggtggctgatgtgcagcagcccctgagccagatccccagcgacacagccagccccctgctgatcctgcccccacctgtgcccaaccccagccccaccctgcggcctgtggagacccctgtggtgggcgcccctggcatgggctctgtgtccacagagccagatgatgaggagggcctgaagcacctggagcagcaggccgagaagatggtggcctacctgcaggacagcgccctggatgatgagcggctggccagcaagctgcaggagcaccgggccaagggcgtgtccatccccctgatgcatgaggccatgcagaagtggtactacaaggacccccagggcgagatccagggccccttcaacaaccaggagatggccgagtggttccaggccggctacttcaccatgagcctgctggtgaagagggcctgtgatgagagcttccagcccctgggggacatcatgaagatgtggggccgggtgcccttcagccctggccctgcccccccaccccacatgggagagctggaccaggagcggctgacccggcagcaggagctgacagccctgtaccagatgcagcacctgcagtaccagcagttcctgatccagcagcagtatgcccaggtgctggcccagcagcagaaggccgccctgagcagccagcagcagcagcagctggccctgctgctgcagcagttccagaccctgaagatgaggatcagtgaccagaacatcatccccagcgtgaccaggtctgtgtctgtgcctgacaccggcagcatctgggagctgcagcccacagccagccagcccaccgtgtgggagggcggctctgtgtgggacctgcccctggacaccaccaccccaggccctgccctggagcagctgcagcagctggagaaggccaaggccgccaagctggagcaggagcggcgggaggccgagatgagggccaagcgggaggaggaggagaggaagaggcaggaggagctgcggcggcagcaggaggagatcctgcggcggcagcaggaggaggagaggaagagaagagaggaggaggagctggcccggaggaagcaggaggaggccctgcggcggcagcgggagcaggagatcgccctgcggcggcagcgggaggaggaggagcggcagcagcaggaggaggccctgcggcggctggaggagaggagaagagaggaggaggagaggaggaagcaggaggagctgctgaggaagcaggaggaggaggccgccaagtgggcccgggaggaggaggaggcccagaggcggctggaggagaaccggctgaggatggaggaggaggccgcccggctgcggcatgaggaggaggagaggaagaggaaggagctggaggtgcagaggcagaaggagctgatgaggcagaggcagcagcagcaggaggccctgcggcggctgcagcagcagcagcagcagcagcagctggcccagatgaagctgcccagcagcagcacctggggccagcagagcaacaccacagcctgccagagccaggccaccctgagcctggccgagatccagaagctggaggaggagcgggagcggcagctgcgggaggagcagaggcggcagcagcgggagctgatgaaggccctgcagcagcagcagcagcagcagcagcagaagctgagcggctggggcaatgtgtccaagcccagcggcaccaccaagagcctgctggagatccagcaggaggaggcccggcagatgcagaagcagcagcagcagcagcagcagcaccagcagcccaacagagccaggaacaacacccacagcaacctgcacaccagcatcggcaacagcgtgtggggcagcatcaacacaggcccccccaaccagtgggccagtgacctggtgagcagcatctggagcaatgctgacaccaagaacagcaacatgggcttctgggatgatgctgtgaaggaggtgggccccaggaacagcaccaacaagaacaagaacaatgccagcctgagcaagtctgtgggcgtgagcaaccggcagaacaagaaggtggaggaggaggagaagctgctgaagctgttccagggcgtgaacaaggcccaggacggcttcacccagtggtgtgagcagatgctgcacgccctgaacacagccaacaacctggatgtgcccacctttgtgtccttcctgaaggaggtggagagcccctatgaggtgcatgactacatccgggcctacctgggggacaccagcgaggccaaggagtttgccaagcagttcctggagcggcgggccaagcagaaggccaaccagcagaggcagcagcagcagctgccccagcagcagcagcagcagcccccccagcagcccccccagcagccccagcagcaggacagcgtgtggggcatgaaccacagcaccctgcacagcgtcttccagaccaaccagagcaacaaccagcagagcaactttgaagctgtgcagagcggcaagaagaagaagaagcagaagatggtgcgggctgaccccagcctgctgggcttctctgtgaatgccagcagcgagcggctgaacatgggagaaattgagaccctggatgactactag

SEQ ID NO: 41196 - DNA, 42 bp, Artificial Sequence
  derived and/or modified sequence
atggctgctgagacccagaccctgaactttggacctgagtag

SEQ ID NO: 41197 - DNA, 3963 bp, Artificial Sequence
  derived and/or modified sequence
atggctgctgagacccagaccctgaactttggacctgagtggctgcgggccctgagcagcggcggcagcatcaccagcccccccctgagccctgccctgcccaagtacaagctggccgactaccgctatggccgggaggagatgctggccctcttcctgaaggacaacaagatccccagcgacctgctggacaaggagttcctgcccatcctgcaggaggagcccctgccccccctggccctggtgcccttcacagaggaggagcagaggaacttctccatgtctgtgaacagcgctgctgtgctgcggctgaccggccggggcggcggcggcaccgtggtgggcgccccccggggccgcagcagcagccggggccggggccggggccgcggggagtgtggcttctaccagaggagctttgatgaggtggagggcgtgtttggccggggcggcggccgggagatgcacaggagccagagctgggaggagcggggggacagaagatttgagaagccaggcaggaaggatgtgggcaagaagaatggctactactgcatgtacagccctgtgctgctgctgggccagcccctgtgccagggccggcccaactttgaggagggcggccccacctctgtgggcaggaagcatgagttcatccgctctgagagcgagaactggaggatcttccgggaggagcagaatggagaagatgaagatggcggctggaggctggccggcagcagaagagatggagagcgctggaggccccacagcccagatggccccaggtctgctggctggagggagcacatggagaggagaagaagatttgaatttgacttccgggacagagatgatgagcggggctacagaagagtgcgcagcggcagcggcagcattgatgatgaccgggacagcctgcctgagtggtgcctggaggatgctgaggaggagatgggcacctttgacagcagcggggccttcctgagcctgaagaaggtgcagaaggagcccatccctgaggagcaggagatggacttccggcctgtggatgaaggagaagaatgtagtgacagcgagggcagccacaatgaggaggccaaggagccagacaagaccaacaagaaggagggggagaagacagacagagtgggcgtggccagcgaggagaccccccagaccagcagcagcagcgcccggcccggcacccccagcgaccaccagagccaggaggccagccagtttgagaggaaggatgagcccaagacagagcagacagagaaggccgaggaggagaccaggatggagaacagcctgcctgccaaggtgcccagcagaggagatgagatggtggctgatgtgcagcagcccctgagccagatccccagcgacacagccagccccctgctgatcctgcccccacctgtgcccaaccccagccccaccctgcggcctgtggagacccctgtggtgggcgcccctggcatgggctctgtgtccacagagccagatgatgaggagggcctgaagcacctggagcagcaggccgagaagatggtggcctacctgcaggacagcgccctggatgatgagcggctggccagcaagctgcaggagcaccgggccaagggcgtgtccatccccctgatgcatgaggccatgcagaagtggtactacaaggacccccagggcgagatccagggccccttcaacaaccaggagatggccgagtggttccaggccggctacttcaccatgagcctgctggtgaagagggcctgtgatgagagcttccagcccctgggggacatcatgaagatgtggggccgggtgcccttcagccctggccctgcccccccaccccacatgggagagctggaccaggagcggctgacccggcagcaggagctgacagccctgtaccagatgcagcacctgcagtaccagcagttcctgatccagcagcagtatgcccaggtgctggcccagcagcagaaggccgccctgagcagccagcagcagcagcagctggccctgctgctgcagcagttccagaccctgaagatgaggatcagtgaccagaacatcatccccagcgtgaccaggtctgtgtctgtgcctgacaccggcagcatctgggagctgcagcccacagccagccagcccaccgtgtgggagggcggctctgtgtgggacctgcccctggacaccaccaccccaggccctgccctggagcagctgcagcagctggagaaggccaaggccgccaagctggagcaggagcggcgggaggccgagatgagggccaagcgggaggaggaggagaggaagaggcaggaggagctgcggcggcagcaggaggagatcctgcggcggcagcaggaggaggagaggaagaggcgggaggaggaggagctggcccggaggaagcaggaggaggccctgcggcggcagcgggagcaggagatcgccctgcggcggcagcgggaggaggaggagcggcagcagcaggaggaggccctgcggcggctggaggagcggcggcgggaggaggaggagaggaggaagcaggaggagctgctgaggaagcaggaggaggaggccgccaagtgggcccgggaggaggaggaggcccagaggcggctggaggagaaccggctgaggatggaggaggaggccgcccggctgcggcatgaggaggaggagaggaagaggaaggagctggaggtgcagaggcagaaggagctgatgaggcagaggcagcagcagcaggaggccctgcggcggctgcagcagcagcagcagcagcagcagctggcccagatgaagctgcccagcagcagcacctggggccagcagagcaacaccacagcctgccagagccaggccaccctgagcctggccgagatccagaagctggaggaggagcgggagcggcagctgcgggaggagcagaggcggcagcagcgggagctgatgaaggccctgcagcagcagcagcagcagcagcagcagaagctgagcggctggggcaatgtgtccaagcccagcggcaccaccaagagcctgctggagatccagcaggaggaggcccggcagatgcagaagcagcagcagcagcagcagcagcaccagcagcccaacagagccaggaacaacacccacagcaacctgcacaccagcatcggcaacagcgtgtggggcagcatcaacacaggcccccccaaccagtgggccagtgacctggtgagcagcatctggagcaatgctgacaccaagaacagcaacatgggcttctgggatgatgctgtgaaggaggtgggccccaggaacagcaccaacaagaacaagaacaatgccagcctgagcaagtctgtgggcgtgagcaaccggcagaacaagaaggtggaggaggaggagaagctgctgaagctgttccagggcgtgaacaaggcccaggacggcttcacccagtggtgtgagcagatgctgcacgccctgaacacagccaacaacctggatgtgcccacctttgtgtccttcctgaaggaggtggagagcccctatgaggtgcatgactacatccgggcctacctgggggacaccagcgaggccaaggagtttgccaagcagttcctggagcggcgggccaagcagaaggccaaccagcagaggcagcagcagcagctgccccagcagcagcagcagcagcccccccagcagcccccccagcagccccagcagcaggacagcgtgtggggcatgaaccacagcaccctgcacagcgtcttccagaccaaccagagcaacaaccagcagagcaactttgaggccgtgcagagcggcaagaagaagaagaagcagaagatggtgcgggctgaccccagcctgctgggcttctctgtgaatgccagcagcgagcggctgaacatgggagaaattgagaccctggatgactactag

SEQ ID NO: 41198 - DNA, 3966 bp, Artificial Sequence
  derived and/or modified sequence
atggccgccgagacccagaccctgaacttcggccccgagtggctgcgagctctcagttccggcgggtcaatcacgagccctcccctgtccccagcactccctaagtataagcttgctgattaccgatacggccgagaggaaatgctcgcccttttcctgaaagataataagatcccctcagaccttctggacaaggaatttctcccaatacttcaagaggaaccactgcccccattagctctggtgccgttcacggaagaggagcagcggaacttcagcatgagtgttaactcagcggcagttctcagattaacgggccggggaggcggggggaccgtggtgggggctccacgcggtagaagcagcagccggggaaggggaagagggagaggcgaatgtgggttctaccagcggagctttgacgaggttgaaggggtcttcggcagaggtggcggacgggagatgcacaggtcacaaagctgggaagagcggggcgacagacgcttcgaaaaacctggccggaaggacgtgggcaagaagaatggctattactgcatgtactctccagtcttactgctgggtcagcccttatgccagggtcgacccaattttgaggaaggcgggcctacctccgtgggacggaagcatgagtttatccgcagtgaaagcgaaaattggcgtatttttcgggaggagcagaatggggaagatgaggatgggggatggaggctggccggctcaaggcgggatggagagcggtggagacctcattctcccgacggtccgcgtagcgccggatggcgtgagcatatggaaaggcgtcgccggttcgagttcgacttccgcgacagggatgatgagcggggctatagacgtgttagatccggttccggctctatcgatgacgacagggactcactgccagagtggtgccttgaggacgcagaagaagagatgggcacatttgactcctcaggagcttttctctctttgaagaaagtgcagaaagagcctatccccgaggagcaggaaatggattttcgtccagttgacgagggtgaggaatgctccgactcagagggctctcataacgaggaggctaaagaaccagacaagacaaacaagaaagagggggaaaagactgaccgagtgggggtggaagcttctgaagaaacgccgcagacttcgtcctcctcagcccgacctggaacccccagcgatcatcaatctcaggaggcatcacagtttgagcggaaagatgagcccaagacggagcaaaccgagaaggccgaggaggagacgcgcatggaaaattctctccccgcaaaagtgccgtcaagaggcgatgagatggtggccgatgttcaacagccactgagtcagataccttccgacacagctagtcctctcctcattctccctccacctgtgcccaacccatcccccacccttaggccagtcgagacacccgttgtgggggccccagggatgggttcagtgagcaccgaacccgatgacgaggaagggctgaagcatctggaacaacaggcggagaagatggtcgcttatttacaggacagtgccctggacgacgaaagactggcttcaaagctccaggaacacagggcgaagggggtgtcaatccctcttatgcacgaggccatgcagaaatggtactacaaagacccacaaggcgagatccaaggcccgtttaacaatcaagagatggcggaatggttccaggccggatactttactatgagtctactagttaaaagagcctgtgatgagtcttttcagccactgggcgatattatgaagatgtgggggagggtgccatttagcccaggtcctgccccgcctccgcacatgggtgaactggatcaagagaggttgaccaggcagcaagaactcaccgccctgtatcaaatgcagcatctgcagtatcaacagttcctcatacagcagcagtacgcccaggtccttgcgcagcaacagaaagctgccttgagctcacagcaacaacagcagttagcattgttactccagcaatttcagaccctaaagatgcgtatatctgaccagaatatcattccttcggtcacgcggtctgtctcagtgccagataccggtagtatttgggagctccagccaactgcatctcaaccgacagtatgggaggggggatctgtgtgggatcttcctttggacactaccacgcctgggcctgctctcgaacagttgcagcaactcgagaaagctaaagccgcaaagctcgagcaggagcgcagggaagcagaaatgagggcaaagagggaagaagaagagagaaaacggcaagaagagctgagacgccagcaggaagagatccttagaaggcagcaggaagaggagcgaaagagacgcgaggaggaggagctggcacggcggaagcaggaagaggcgcttcgccgccagagagagcaggaaattgccctccggaggcagcgagaggaggaggaacggcaacagcaggaggaggctttgcgcagacttgaggagagacgccgcgaggaggaagagcggaggaagcaggaggaactcttgaggaagcaagaggaggaggccgccaagtgggctcgcgaagaggaagaggcacaaaggcgtctcgaagagaaccgtctgaggatggaggaggaagctgcccggctgcggcacgaagaggaggagaggaaaagaaaggagctggaggtgcaaagacagaaagaacttatgcgccaaagacagcagcagcaggaggcactgaggcgtctgcagcagcagcagcaacagcagcaactggctcaaatgaagcttccctcatcaagtacttggggccagcaatctaataccaccgcctgtcagagtcaggccacgctcagcctggctgagatccaaaaactggaggaggaaagagagaggcagcttagagaagagcaacgacggcagcagcgggagttgatgaaggcgctgcagcaacagcagcagcagcaacagcagaaattgtcaggatggggcaatgtgagtaagccaagcgggactaccaagagtcttctcgaaattcaacaggaagaagctcgtcagatgcaaaagcagcaacagcaacagcagcaacatcagcagcccaacagggcaagaaataatacccactcaaatttgcatacgtcaataggcaatagcgtttggggatcaattaacaccgggcctcccaaccaatgggctagtgatctcgtgagtagtatttggagcaatgccgataccaaaaactccaatatgggtttttgggacgatgcggtgaaggaggtgggccctaggaatagtacgaataagaataagaataatgcgtccctttctaaatctgtaggagtgtccaaccgacaaaacaagaaggtggaagaggaggaaaagttacttaagctgttccagggcgtaaacaaggcacaggatggcttcacgcagtggtgcgagcagatgctgcacgccctgaataccgccaacaaccttgatgtgccaacgtttgtgtccttcctcaaggaggtcgagtccccatacgaagtacacgactacatcagagcctacctaggtgatactagcgaggccaaagagtttgctaagcagttcttagagcggcgggcaaagcagaaagccaatcaacagaggcagcagcagcagctgccccaacagcagcaacagcagcctccacagcagccaccccagcagccacagcagcaggacagtgtctgggggatgaatcatagtaccctccactctgtgtttcagaccaaccagtctaacaaccagcagagtaacttcgaggcagtccaatctggtaaaaaaaagaagaagcagaaaatggtgagggccgacccttcgctccttggtttcagtgttaacgcatcctcggagagactaaacatgggggagatagagactctggatgactattag

SEQ ID NO: 41199 - DNA, 3966 bp, Artificial Sequence
  derived and/or modified sequence
atggccgccgagacccagaccctgaacttcggccccgagtggctgcgagcccttagctccgggggttctattacgtctcctcccctcagtcctgccctgcctaaatacaaacttgcagactatcgctacgggcgagaggagatgttagcgctattcctgaaagacaacaaaattccgagcgatttattagacaaggaattccttcccatactgcaagaggagccactgcctccgctcgccttggtcccgtttaccgaagaagaacagcggaatttcagtatgtcagttaattccgccgcagttctccgacttaccggaagaggcggaggcggaaccgtcgtgggggcacctcgggggcggagctcctcaaggggccgcggtcgaggacggggggaatgcggattctaccagcgctccttcgacgaggtcgagggagtcttcgggaggggcgggggacgagaaatgcaccgttcccagagctgggaggagcgtggtgatcgccggtttgaaaagccgggcagaaaagatgtcggcaagaagaatggctattattgtatgtactcccccgtgcttctgctgggccagcctttgtgccagggtaggccaaattttgaggagggtggcccaaccagtgtgggccggaagcacgaatttattcgttccgaatccgagaactggcgcatctttcgggaggaacagaatggagaagatgaggacggaggatggagactggccggatcgcgcagggatggtgagcgatggaggccccactcaccggacgggccaagatccgcaggttggagagaacacatggagaggagacgcaggttcgagttcgactttcgcgatagagacgacgagcggggataccgaagagtaagatctgggagcggtagcattgacgacgaccgtgactccctgcccgaatggtgcctggaggatgccgaagaagagatggggactttcgactcatctggagcttttttatctctgaaaaaagtccaaaaggaacctatccctgaagaacaggagatggacttccgaccagtggatgaaggcgaagaatgttcagactctgaagggtcccataacgaggaagccaaggaaccagataagacaaacaagaaagaaggcgaaaaaacagacagagtcggtgtggaggcgtcggaagaaacaccacagacctcttcatcttcagctagaccaggtacaccttcagatcaccagagtcaagaagcatcacagtttgagcgaaaggacgaaccaaagacggaacaaaccgagaaagcagaagaggagacgaggatggagaactccttgccagctaaggtgccatccaggggcgatgagatggttgcagatgtgcaacagccgctgtcccagatcccaagcgataccgcatcgcccctcctgatacttccccctcccgtgccgaacccatctcccacgctccggccagtagaaacaccagtggtgggcgcccccggaatgggatcggtcagcacggagcctgatgacgaggaggggctgaagcacctggaacagcaggccgaaaagatggtagcttacctgcaggattctgccctcgatgacgagcggctggcttcaaagcttcaagaacaccgagctaagggggtatcaatccccctcatgcatgaggccatgcagaagtggtattacaaggacccacaaggcgagattcaaggacccttcaacaatcaagaaatggccgagtggtttcaggcgggttactttactatgagtttgcttgtcaagcgtgcatgcgatgaatcatttcagcccctgggggatataatgaaaatgtggggaagggtgccattctcacccggcccagctcctccgccacacatgggagagcttgatcaagagcggttgaccaggcagcaggaactgactgcgctgtaccagatgcagcacctgcaataccagcagttcctgatccagcagcagtatgcccaagtgctggcacagcagcagaaggccgccctgagcagccaacagcaacagcaactagccctgctgttgcagcagttccagacactcaaaatgcgaatatctgatcagaatattatccccagtgtgactagaagcgtctctgtgccggacacaggatcaatatgggagctgcagcccaccgcctctcagcccaccgtttgggagggaggctccgtttgggacctccccttagacacgaccacccccgggcctgcattggaacagctacagcaactggagaaagctaaagctgccaaattggaacaggaacgcagagaggctgagatgcgcgcaaagcgggaagaggaagagaggaaaaggcaggaagagctgcggaggcagcaggaggagatcttgcgtagacagcaggaggaagagaggaagcgaagagaggaggaggagctggcccgcaggaagcaggaggaagcactaaggcgccaacgtgagcaggagatagcactgaggagacagcgggaggaggaagagaggcagcagcaagaagaagcacttcggaggcttgaggagagacgccgcgaagaggaggaacggagaaaacaagaggagctgcttcggaagcaggaggaagaggcagcaaagtgggcccgcgaagaggaggaagcgcagcgtcggctcgaggagaacaggcttaggatggaggaagaagcggcccggctccggcatgaagaggaagagcggaaacggaaggagctggaggtgcagcgtcagaaagagctcatgagacagcgccaacagcagcaggaagctctccgtcgacttcagcagcagcagcagcaacagcagcttgcccagatgaaactgcctagctcatctacctggggacaacaaagcaacacaacagcatgccagtcgcaggctacgctgtcgctcgctgaaattcagaagctggaggaggaacgagaaagacagctgagggaggaacagagaaggcaacagcgcgaacttatgaaagcattgcagcagcagcagcaacaacagcaacaaaagttatctgggtggggcaatgtttccaaacctagtggcaccactaagtcactgctggagatccagcaggaagaggcccgacagatgcagaaacagcagcagcagcagcagcagcaccagcagccgaaccgcgctagaaataacacccatagtaatctgcacacatccattgggaactccgtctggggcagcatcaacacaggcccacctaatcagtgggcatccgatttggtgagcagtatctggtccaatgcggatactaaaaattcgaacatgggtttttgggatgacgccgtgaaagaggtcggccctaggaactcaacgaataagaacaagaacaatgcaagtctgagcaagtctgttggcgttagcaataggcaaaataagaaagtagaggaagaggaaaagctgcttaaactgttccagggcgtcaataaggcacaggacggatttacacagtggtgcgaacagatgctccacgccctcaacaccgcaaataacctcgacgttcctactttcgtgtccttcctcaaggaagtggagtcgccctatgaagttcacgactatattagagcttacctgggggacacttcagaagccaaagagttcgccaagcaatttttggagagacgagccaagcagaaggccaaccagcagaggcagcaacagcaactaccacagcagcagcagcaacagcctccacagcagccccctcagcaaccacagcagcaggatagcgtctggggaatgaaccatagtacattgcactctgttttccaaaccaaccagtctaacaaccagcaaagtaacttcgaggccgttcaaagcgggaaaaaaaagaagaagcagaagatggtcagggcagatccatccttgctaggattctccgttaacgcaagttcagagcgtctgaacatgggagaaatcgaaactctcgacgactattag

SEQ ID NO: 41200 - DNA, 3963 bp, Artificial Sequence
  derived and/or modified sequence
atggccgccgagacccagaccctgaacttcggccccgagtggctgagggccttgtcttcaggaggttcaatcacctctcctccactcagccccgctttacctaaatacaagctcgccgattacaggtatggaagggaggaaatgctcgctctgtttttgaaggacaataagatacctagtgatctgcttgacaaggagttcctccctatcctccaggaagaacctcttcccccattggctcttgtgcccttcacagaagaggaacagcggaacttctctatgagcgttaatagtgcagctgtgttgagactgacgggccgcgggggtggcggcacggtggtgggcgccccgcgagggaggagttcctcacgagggcgggggagaggacgcggtgagtgcggtttttatcaaaggagttttgacgaagtggagggcgtgtttggacgcgggggagggagggaaatgcatcggagtcaaagctgggaagagcgaggggaccggagatttgagaagccaggccggaaagacgtagggaagaagaatggatactactgcatgtattctccagttctgctgctggggcaacctctgtgtcagggcaggccaaacttcgaggaaggggggcccaccagtgtgggccgcaagcacgaatttatacggagtgagtcagagaactggcgcatctttcgcgaggaacaaaacggagaggacgaagacgggggatggcgtttggctgggtctcggcgcgatggtgaacgctggcgacctcatagtcccgatgggccaagaagcgcaggttggcgggaacatatggaacgccgccggaggtttgagttcgatttccgggatagagatgatgaacggggctaccggagggtgcgctctggttctggctccatcgatgacgatcgggattctctgcccgaatggtgccttgaggacgcagaagaggaaatggggacatttgactcttccggagccttcctttccctcaagaaagtacaaaaagaacccattcctgaggaacaagagatggactttcgacctgtagatgagggggaggagtgcagcgacagcgaaggctcacacaatgaagaagccaaggaacctgacaaaacaaacaagaaggaaggcgaaaaaacggatagagtgggagtggcttcagaagagacaccacagaccagttcttcctctgcccggcccggaaccccatctgaccaccagtcacaagaagcttcccagttcgagcgcaaagacgagccaaaaaccgagcaaaccgagaaggccgaggaggagacccgaatggaaaactctctgccagccaaagtcccttcccggggcgacgagatggtcgctgatgtgcagcaaccgcttagtcagatcccaagcgacaccgctagcccgctcttgattttgcctccacctgtgcccaacccttcccctacactgcgccccgtggagacaccggtggtgggcgcgcccggcatgggttctgtctcaaccgagcccgacgacgaggagggcctgaagcacttagaacagcaggccgaaaagatggttgcctatctgcaggatagcgccctggacgatgaacgcctggcatccaaattgcaagagcacagggctaagggtgtatcaattcctcttatgcacgaagctatgcagaagtggtactacaaagaccctcaaggcgaaatccagggtcccttcaacaaccaggaaatggctgaatggttccaggcggggtactttaccatgtcactcctggtgaagcgagcctgtgatgaaagttttcagccactgggagacatcatgaagatgtggggcagagtgccttttagccccggacctgcccccccacctcacatgggcgagctcgaccaggagagactgacccgccagcaggaattaacagccttgtaccagatgcagcacctgcagtaccagcagtttctgatccagcagcagtacgcccaggttttggcccaacaacaaaaggccgcgctgagttcccagcagcagcagcagttggcactgttgctccaacagtttcaaacactgaagatgcggatttctgaccagaatatcataccttccgtgactcggagcgtttcagtgcctgacacaggctcaatttgggagcttcaaccaacggcctcgcagcctactgtctgggagggcggatctgtgtgggatctgccccttgatactacgacacccggtcccgctttggagcagctgcagcagctcgaaaaggctaaggcagctaagctagaacaggagagacgggaggccgaaatgcgggccaagcgggaggaggaggaaagaaagcgtcaggaggagctccggcggcaacaagaggaaatactccggaggcagcaggaggaagaaagaaagaggagagaagaagaggagctggctaggaggaagcaggaggaggccctccgccggcagagggaacaggaaattgcactgagacgtcaacgcgaagaggaggagcgacaacagcaagaagaggccctacggcggctggaagagcgccgccgagaggaagaggaaaggcgtaaacaggaagagctcctgagaaaacaggaagaggaggccgccaagtgggcaagggaggaggaagaggctcagaggcgacttgaagaaaacagattgcgcatggaagaggaagcggcccggttgagacacgaggaggaagaacgtaagcgcaaagaactggaggttcagcggcaaaaggagttaatgagacagcggcagcagcagcaggaggcccttagaaggttgcaacagcaacagcaacaacaacagctggcgcagatgaaactgccaagcagctccacgtggggacagcagtcaaacaccaccgcctgccagtctcaagcgaccttgtccctggccgaaattcagaagttagaagaggagagagagagacagctgcgtgaggagcagaggcgccaacagagggaactgatgaaggcactccagcagcagcagcagcagcagcagcagaagctgtccggctggggcaacgtgtctaaaccctcgggcactacaaaaagcctcctggagatccaacaggaggaagcgaggcagatgcaaaaacagcaacagcagcaacagcagcaccagcagccaaacagggctagaaataatactcacagcaatctgcacacaagtatcggtaactctgtatggggctcaattaatacgggccccccaaaccagtgggccagtgaccttgtatcttctatttggtccaatgctgataccaagaactcaaacatggggttctgggacgatgctgtgaaggaggtaggacctagaaattccaccaataagaacaagaataatgccagcctgtccaaaagcgtcggcgttagtaatcgacagaataaaaaggttgaggaggaggagaaactgctcaaactgtttcagggagtgaataaagcgcaggacggattcacccagtggtgtgagcaaatgcttcatgcgcttaatacagccaataatctcgacgtacctacttttgtatctttcctcaaggaagtggagtcaccatatgaggttcacgattacatacgggcctaccttggagatacaagcgaggctaaggagtttgctaagcaattcctggagaggcgagctaaacaaaaagccaaccaacagaggcaacagcaacaactgccacagcagcagcaacaacagcctccccagcaacccccccagcagccccaacaacaggattcagtttgggggatgaatcacagcactctgcattctgtgtttcaaacgaatcagtcgaacaaccaacagtcaaatttcgaggcagtgcaatctggtaagaaaaaaaagaaacagaagatggtccgggctgaccctagcctgctgggtttctcagttaatgcctcctccgaacggctaaacatgggggagatcgaaaccctggatgactactag

SEQ ID NO: 41201 - DNA, 3966 bp, Artificial Sequence
  derived and/or modified sequence
atggcagcggagacacagactcttaactttggccctgagtggctgcgtgctctgagtagtggaggcagtatcacttccccccctttgagccctgcgctcccaaagtacaagctggctgattatagatacggcagagaggaaatgctggccctgtttctgaaggacaataagattccgagcgatcttcttgacaaggagttcctccccatactccaggaggagccacttcccccactggctctggtgccttttacagaggaggagcagagaaactttagtatgtctgtcaacagcgccgcagtcctgcgccttactggaagaggcggaggcggaactgtagtaggagcaccgcgaggcagatcctcaagtcgcggacggggtagaggacgaggggaatgtggattttaccagagatcttttgacgaggtggagggggtgttcggaagaggaggcggacgcgagatgcatcgcagccagagctgggaggagagaggcgacagaaggttcgaaaagcctggcagaaaggatgtaggaaagaagaatggctattactgtatgtactctccagtgctcttgctggggcagccactctgtcaggggcgacctaattttgaggagggcggaccaacctcagtggggagaaaacacgaattcataagaagcgaatcggagaattggcgcatttttagagaagagcaaaacggggaggatgaagacgggggatggaggctggctggctctaggcgggacggggagaggtggcgccctcactcccctgacggccctcgatccgctggttggagggaacatatggagaggaggcgccgattcgagttcgacttccgcgaccgcgacgacgagagaggctatcgtcgtgtacgttccggctccggctccattgacgacgaccgggatagcttgccagagtggtgtctagaagatgcagaggaagaaatgggcaccttcgactcctcaggtgcctttctttcacttaaaaaggtgcagaaggaaccaattcccgaagagcaggagatggatttcaggcctgtggacgagggggaggaatgtagcgactcggaaggatcccacaatgaggaggcaaaggagcctgataaaacaaataagaaagaaggcgaaaagacagacagagtcggagtagaggcaagcgaggagacccctcagaccagttcctcttctgcccgtcctgggacgccgtccgatcaccagtcccaggaagcctcccagtttgaacggaaggatgagccaaaaaccgaacagaccgagaaggctgaggaggagactagaatggaaaattctttgcccgctaaggttccaagccgcggtgacgaaatggtggcagacgtccagcagcccttgtctcagataccaagtgatacagcttctcctctgctcatccttcccccaccagttccaaatccgagtccaacccttaggccagtcgagaccccagtcgtaggggcaccaggcatgggtagcgtttccaccgagcccgatgatgaagaaggcctgaagcacctagaacaacaggcagaaaaaatggttgcctatctgcaggacagcgcactggatgatgagcgattggccagcaaattgcaggagcaccgggcaaaaggcgtctcaatccccctcatgcacgaagccatgcagaaatggtactacaaggatcctcaaggcgaaatccagggtcctttcaataaccaggagatggccgagtggttccaggccggatacttcaccatgagtctgctcgtgaagcgagcatgtgatgaaagctttcagcctctcggcgatatcatgaagatgtggggacgtgtccccttctcacctggccctgctcctcctccacatatgggagaattggatcaggagcgcctcacacgccagcaggaactgacggccctttaccagatgcagcacttgcagtaccagcagttcctgatccagcagcagtatgcccaggtgctcgcccaacagcagaaagctgccttaagcagccagcagcagcagcagcttgcactgctgttgcagcagtttcaaaccctgaaaatgcggatcagcgatcaaaatattataccaagcgtgacgagaagcgtgtcagtccccgatactggctccatctgggagctgcagcccactgcttcacagcctaccgtgtgggagggaggcagcgtctgggacttgccattggacactacgactcctggccctgcacttgagcagctccagcagcttgagaaggctaaggctgccaagctggagcaggagcggcgagaagccgagatgcgagctaaaagggaggaagaagagagaaaacgccaggaagaactgcgtaggcagcaggaggagatcctcagacggcagcaggaagaagagcggaaaagacgcgaagaggaggagcttgccagacgaaagcaagaggaagcactgcggagacagagagaacaggagatcgcgctgcgacggcagcgggaggaggaagagaggcagcaacaagaggaggccttaagaaggcttgaagaacggaggcgcgaggaggaagagcggcgaaagcaggaggagctgctgcgaaaacaggaggaagaggcagccaaatgggcaagagaagaagaggaagcccaacgcaggctcgaagaaaacagactacgcatggaggaggaggcggcacggcttcggcacgaagaggaggagcggaagaggaaagagctggaggtgcagcggcagaaagagctgatgcggcagcgacagcagcaacaggaggcactgcggcgtcttcagcagcagcagcagcagcagcagcttgctcagatgaaacttccatcatcgagcacctgggggcagcaatcgaacaccactgcatgccaatctcaggctactctgagtctggccgagatccaaaagctggaagaagagcgcgagcggcaactgagagaggagcagcgccgacaacagcgggagcttatgaaagcccttcagcagcagcagcagcagcagcagcagaaactgtctggatggggaaatgtttcaaagccttccgggaccacaaagagcctgttggaaatccagcaagaggaagcccgacagatgcagaagcagcaacaacagcagcagcagcatcaacaacctaatagggccagaaacaacactcatagcaacctgcacacgtcgatcggcaattcagtctgggggtcaatcaacaccggtcccccaaaccaatgggcgtctgatctggttagcagcatttggtctaatgcagatacaaagaacagcaacatgggtttctgggatgatgcagtgaaggaagtcggacctcgcaacagcactaacaagaataagaacaatgcatccctttcaaagtcggtgggtgtgagcaataggcaaaataaaaaagtggaggaagaggaaaaacttctgaaactgtttcagggtgtcaacaaagcgcaagacgggtttactcaatggtgtgaacaaatgctacacgcgctgaataccgcgaataatctcgatgttccaacgttcgtttcgttcctcaaggaggtcgagagtccctacgaggttcacgattatataagagcctatctgggcgatacaagtgaggccaaggaatttgccaaacagttcctcgagcgaagagccaagcaaaaagctaaccagcagcggcaacaacagcagttgccacaacagcagcagcagcagccgccacagcagcctccacaacaaccacaacagcaggatagcgtgtggggtatgaaccacagtacacttcacagtgtttttcagaccaatcagtctaacaaccaacaaagtaacttcgaggccgttcaatcaggcaagaagaagaagaaacagaagatggtccgcgcagatccaagcctcctcggcttcagcgtaaacgcctcatccgagagactgaatatgggcgagattgagacactcgacgattattag

SEQ ID NO: 41202 - DNA, 3966 bp, Artificial Sequence
  derived and/or modified sequence
atggcggcagagacccagaccctgaactttgggccagagtggctccgcgctctgtcatcaggcggtagcataacttccccgccattgagccctgcgctcccaaagtataagctggccgattacaggtatgggcgagaggagatgctggcactgtttctgaaagacaataaaataccgtcagacttgctcgacaaggaattcctcccgatactacaggaagagcctctgcctcccctggcactggtaccttttaccgaagaggagcagcgaaatttctcaatgtccgtcaactccgcggcagtactgcgtttgaccgggagaggcggtggagggacagtggttggagctcctagaggcagatcctcttccaggggcaggggaagagggaggggcgaatgcgggttctatcaacgctcctttgatgaagtcgagggtgttttcggaagaggaggaggcagggagatgcataggtctcagtcttgggaagagcgcggtgatcgcagattcgagaaacctggcaggaaagacgtggggaaaaagaacggctactactgcatgtatagtccagtcctgctgctgggccagcctctctgtcaagggagacctaattttgaagagggaggccctacatctgtgggcagaaagcacgagttcatccggagcgaaagtgagaactggcgcatttttcgggaggaacagaatggtgaagatgaggatggaggttggagactagcaggtagccgccgagatggcgagcgttggagaccacactcaccagatggtccacgctccgcaggctggcgggaacatatggagaggaggagaaggtttgagtttgactttcgggaccgggacgatgagcgagggtacagacgcgtgagaagcggatccggttctatcgatgatgaccgcgactccctccctgagtggtgcctagaggacgccgaggaggaaatgggcaccttcgactcttccggtgctttcttgagcctcaagaaagtgcagaaagaacctattccggaagaacaggagatggactttagaccagtcgatgaaggcgaagagtgttcagacagcgagggatcacacaacgaggaagccaaggagccagataaaactaataagaaggaaggagagaaaaccgaccgcgttggagtggaagcatcagaagaaacccctcagactagctctagctccgcacgcccaggaacaccttccgaccatcagtcccaggaggccagtcagtttgaacgtaaagacgagcccaaaaccgagcagaccgagaaggctgaggaggaaaccagaatggaaaactccctgccagcaaaagtcccgtctagaggggatgaaatggtggcggatgtgcagcagccactgagtcagattccatccgacactgcctctcctctcctgattctccctcctcctgtgcccaatccaagcccaacactcaggcctgtcgagacgccagtagtcggcgctcctggaatgggaagtgtgagtacagagcctgacgacgaggagggtctaaagcacctggagcagcaggcggagaaaatggtcgcttatttgcaggacagcgccctggacgatgaaagattggcctctaaactgcaggaacatcgggctaaaggcgtctcgatccccctaatgcatgaggccatgcagaaatggtactataaggatcctcagggcgagatccaaggcccttttaataaccaggagatggcagaatggttccaggcaggttactttacgatgtcacttctggttaagcgtgcctgcgatgaaagcttccaaccgcttggagacataatgaaaatgtgggggagagtgccattctcgcccggacctgcccctccgcctcacatgggagaattggaccaggagagactcactcgtcaacaggagcttacggccctgtaccaaatgcaacacctgcaataccagcagtttttgatacagcagcagtatgcacaggtactcgcacagcaacagaaagcagccctgtcatctcagcagcagcagcagctggctttgctcttgcagcaattccagacgctaaaaatgaggatctccgatcagaacattatcccttccgtaacacgctcagtgtctgtgcccgataccggaagcatttgggagctgcagcctaccgctagccagcccaccgtttgggagggcggaagtgtatgggacctgcctttggacaccacgacccccggacccgcactggagcagctccagcaactggagaaggccaaagctgctaagctcgaacaggagaggagggaggccgagatgagggcaaaaagagaggaagaggaacgcaagcgccaggaagagctgcggcgacaacaggaggaaatacttcgaaggcaacaagaagaggaaaggaaacgcagagaagaagaggaactcgccaggcgtaagcaggaggaagcccttcgacgacagcgtgagcaggagattgcgctcagacgccagcgagaagaagaagaacgccagcaacaggaggaggcgctgcggaggttggaggagcggaggcgagaggaagaggagagaagaaagcaggaagaactccttcgtaagcaggaggaagaagctgcgaaatgggccagggaggaggaagaagctcaacgcagattggaagaaaatagactgcgcatggaggaggaggccgcaagactgcgacatgaagaggaggaacgaaaaaggaaggaacttgaagtccaacgacagaaagagctcatgcggcagagacagcagcagcaagaggcccttaggcgacttcagcaacagcaacagcagcagcagctggctcagatgaaattacccagtagtagtacctgggggcagcagtccaacactactgcctgccagtcacaggctacgctttctctcgctgagattcagaagctagaagaagagcgagaacgccagctgagggaagaacagcgtcgacaacagagggaattaatgaaggcactgcagcagcaacagcaacagcagcagcagaaattaagcggctggggaaatgtgagtaagccaagtgggaccaccaagtccttgctagagatacaacaggaggaagcccgacagatgcagaagcagcagcaacagcagcagcagcaccagcagcctaatagggcaaggaacaatacccatagcaatttgcatacatcaattgggaattctgtctggggcagcataaatacaggccctcccaaccagtgggctagtgatctggtgtcatctatttggtccaacgccgatactaaaaattcaaacatgggcttttgggacgatgccgtgaaggaggtaggtcctcggaatagtacaaacaagaacaaaaataatgcgagcctgtctaaatccgtgggcgtgagcaatcggcagaataagaaggtggaagaggaggaaaaactgctgaagctctttcagggagtgaacaaggcccaggacgggtttacccagtggtgtgaacagatgttgcatgctctcaatacagccaacaacctcgacgtgcccactttcgtgtctttcctaaaagaggtcgagagtccctatgaggtccacgattatattcgggcatacctaggggacacaagcgaggcgaaggaattcgccaagcagttcttggaacggagggcaaagcagaaggccaatcagcagcggcagcagcagcaattaccacagcagcagcagcagcagcctccacagcagccaccccagcaaccccaacagcaggatagcgtgtgggggatgaatcactctactctgcacagcgtgttccaaactaatcagtctaacaatcagcagagcaattttgaggcggtgcagtctgggaagaagaagaagaagcagaagatggtccgcgcagatccaagcctcctggggttctcggttaatgcctcctccgaacgcctcaacatgggtgagattgaaaccctggatgactattag

SEQ ID NO: 41203 - DNA, 42 bp, Artificial Sequence
  derived and/or modified sequence
atggccgcagaaactcagacgctcaacttcggtcctgagtag

SEQ ID NO: 41204 - DNA, 3963 bp, Artificial Sequence
  derived and/or modified sequence
atggccgcagaaacccaaacactgaatttcggcccagaatggttaagagctctgagtagcggaggtagcattacatccccccctctgagtcctgcgcttccgaaatacaagctggccgattaccgctacgggcgagaagaaatgctggctctctttctcaaggataacaaaatccccagcgaccttttggacaaagagttcctgcctatcctgcaggaagagcccctgcccccactcgctcttgtgccatttaccgaggaggagcagcgcaattttagcatgtccgttaactctgcagccgtcctcagattgaccgggaggggaggtggaggtaccgttgtcggggctcccagggggagaagctcatcccgcggacgagggcgagggcgaggcgaatgtggtttctaccagcgcagtttcgacgaagtcgaaggcgtatttggtcgaggaggaggacgggagatgcacaggtcccagtcctgggaggaaaggggcgaccggaggtttgaaaagccaggcaggaaggacgtgggcaaaaaaaatggatactattgcatgtattcccccgtgctgctactggggcagccactctgccagggtcggcctaactttgaagaggggggacctacgagcgtcggcaggaaacacgaattcattcgcagcgagtctgaaaactggcgcatttttagagaagaacaaaacggggaagacgaggacggtggatggaggctcgctggatcgcgccgagacggagagagatggcggccacacagtcccgatggtccccgaagcgccggatggcgcgagcacatggaaaggcggagacggttcgagtttgactttcgagaccgtgacgatgagaggggctatcgaagggtccggtctggatctggctctattgatgacgatcgggactcgctgcccgagtggtgcctggaggatgcagaggaggaaatgggtacgttcgatagttcaggcgcattcttgtccctgaaaaaggttcaaaaggagccaatcccggaggagcaggaaatggacttcagaccggtggatgaaggcgaggaatgcagcgactcagaagggtcccataatgaagaagccaaggagcccgataagaccaataagaaagaaggcgagaaaaccgacagagtgggtgtcgccagtgaagagacgcctcaaacctcgagcagttctgctcgaccgggaacgccctcagaccaccagtcccaagaagcatcacaattcgagagaaaagatgaacctaagactgagcaaactgagaaagctgaggaagagactcggatggaaaattcccttcctgctaaagtgcccagcagaggagacgaaatggtggcagacgtgcaacagcctctgtcccagatacccagcgacacggcatcacccctcctgattctgccccctcctgtgcccaacccttcccccaccctcagaccagttgagacgccagtcgttggcgctcccggtatgggatcagtgtcaaccgagcctgatgacgaagaagggctgaagcacctggagcagcaagctgagaagatggtggcatatcttcaggattccgccctggacgatgagaggctggcttcaaagttgcaggagcatagggcgaaaggagtcagtattccgctgatgcacgaagcaatgcagaagtggtactataaggacccccagggagaaatccagggcccatttaacaaccaggagatggctgagtggttccaggcaggctacttcactatgtctttactagtgaagcgagcttgtgacgagtccttccagcctctgggcgacattatgaagatgtgggggcgagtgccctttagcccaggcccagctcctccccctcacatgggcgagcttgaccaggagagactgacccggcagcaggagctgacggcactatatcagatgcagcatctgcagtatcagcagttcttgatccagcaacagtatgctcaggtcctcgcacagcaacagaaggctgctcttagttcccagcaacagcagcagcttgcactacttctccagcaattccaaaccctcaaaatgcggataagcgatcagaatataatcccatccgttacccgtagtgtttctgtgccagatactgggtcaatatgggaactccagccgacagcttcacagcccacagtctgggaggggggtagcgtgtgggaccttcctctggacaccacaactccaggtcctgcactggagcaactacaacagttagaaaaagcaaaagcggcaaaactagagcaagagcggagagaggcagagatgagagccaaacgggaggaggaagaacgtaagagacaggaggaactccggaggcagcaagaagaaatcctgcggaggcagcaggaggaggagcggaagcggagggaggaggaggagttggcccgtcgcaaacaggaggaagccttaagaaggcagcgggagcaggagatagccctgcgacggcaaagggaggaggaggagcggcagcaacaggaggaggcactgcgacgtttagaggaacgccgaagagaggaagaggaacggcgtaaacaagaggagctgctgcgtaagcaggaagaagaggccgcaaaatgggcccgagaagaggaggaggcccagagacgtctggaagaaaaccgtctgcgcatggaagaggaagcagcacgcctgcgccacgaagaagaggagaggaagagaaaggaattggaggtgcagcgtcagaaggaactgatgagacagcgccagcagcagcaggaggcgctgcgccgtctgcagcaacaacagcagcagcagcagctggcgcagatgaaactaccttccagcagtacttggggtcagcagagcaatactaccgcatgccagtcccaggccaccctgtcactggccgaaatccagaagttggaggaggaacgggagcgtcagctgagggaggagcaacgccgacagcagcgcgagctcatgaaggctctgcagcagcagcaacaacagcaacagcagaaattatccggctggggaaatgtgtccaagccttccggcacaaccaagtcccttctggagatccagcaggaggaagccagacagatgcaaaaacagcaacagcaacagcagcagcaccagcagcctaacagggcacgcaacaacacacattcaaatctgcatacgagcatcggcaatagcgtctggggtagtatcaacaccgggccaccaaatcagtgggccagcgacctagtgtcctctatttggagcaacgccgacacaaaaaactctaacatgggattctgggacgatgctgtgaaggaagtgggccctaggaatagcaccaacaaaaacaagaacaacgccagcctgagtaagagcgtgggagtttcgaatcggcagaacaagaaagtcgaagaagaggagaagctcctcaaactgttccagggggtgaacaaagcgcaggacggctttacacagtggtgcgagcaaatgcttcacgctttgaataccgcgaataatttagacgtgcccaccttcgtttcctttttgaaggaggtcgagtcgccatacgaggtgcacgattacatccgtgcatacctgggagatacttcagaggctaaggagtttgctaagcagtttctagaaaggcgagccaaacagaaggccaaccagcagcgtcaacagcaacagctcccccaacagcagcaacagcaacctccgcagcaacccccacagcagccgcagcagcaggactccgtctgggggatgaaccactcaacacttcatagcgtgttccagacaaaccagtcaaataaccagcagagcaatttcgaagcagtgcagagtgggaagaaaaagaaaaaacagaagatggttcgcgcagaccccagcttgttgggttttagtgtgaacgctagctctgagcggcttaatatgggggagatcgagacattagacgactattag

SEQ ID NO: 41205 - DNA, 3966 bp, Artificial Sequence
  derived and/or modified sequence
atggccgccgagacccagaccctgaacttcggccccgagtggctgagagccctgagcagcggcggcagcatcaccagcccccccctgagccccgccctgcccaagtacaagctggccgactacagatacggcagagaggagatgctggccctgttcctgaaggacaacaagatccccagcgacctgctggacaaggagttcctgcccatcctgcaggaggagcccctgccccccctggccctggtgcccttcaccgaggaggagcagagaaacttcagcatgagcgtgaacagcgccgccgtgctgagactgaccggcagaggcggcggcggcaccgtggtgggcgcccccagaggcagaagcagcagcagaggcagaggcagaggcagaggcgagtgcggcttctaccagagaagcttcgacgaggtggagggcgtgttcggcagaggcggcggcagagagatgcacagaagccagagctgggaggagagaggcgacagaagattcgagaagcccggcagaaaggacgtgggcaagaagaacggctactactgcatgtacagccccgtgctgctgctgggccagcccctgtgccagggcagacccaacttcgaggagggcggccccaccagcgtgggcagaaagcacgagttcatcagaagcgagagcgagaactggagaatcttcagagaggagcagaacggcgaggacgaggacggcggctggagactggccggcagcagaagagacggcgagagatggagaccccacagccccgacggccccagaagcgccggctggagagagcacatggagagaagaagaagattcgagttcgacttcagagacagagacgacgagagaggctacagaagagtgagaagcggcagcggcagcatcgacgacgacagagacagcctgcccgagtggtgcctggaggacgccgaggaggagatgggcaccttcgacagcagcggcgccttcctgagcctgaagaaggtgcagaaggagcccatccccgaggagcaggagatggacttcagacccgtggacgagggcgaggagtgcagcgacagcgagggcagccacaacgaggaggccaaggagcccgacaagaccaacaagaaggagggcgagaagaccgacagagtgggcgtggaggccagcgaggagaccccccagaccagcagcagcagcgccagacccggcacccccagcgaccaccagagccaggaggccagccagttcgagagaaaggacgagcccaagaccgagcagaccgagaaggccgaggaggagaccagaatggagaacagcctgcccgccaaggtgcccagcagaggcgacgagatggtggccgacgtgcagcagcccctgagccagatccccagcgacaccgccagccccctgctgatcctgcccccccccgtgcccaaccccagccccaccctgagacccgtggagacccccgtggtgggcgcccccggcatgggcagcgtgagcaccgagcccgacgacgaggagggcctgaagcacctggagcagcaggccgagaagatggtggcctacctgcaggacagcgccctggacgacgagagactggccagcaagctgcaggagcacagagccaagggcgtgagcatccccctgatgcacgaggccatgcagaagtggtactacaaggacccccagggcgagatccagggccccttcaacaaccaggagatggccgagtggttccaggccggctacttcaccatgagcctgctggtgaagagagcctgcgacgagagcttccagcccctgggcgacatcatgaagatgtggggcagagtgcccttcagccccggccccgccccccccccccacatgggcgagctggaccaggagagactgaccagacagcaggagctgaccgccctgtaccagatgcagcacctgcagtaccagcagttcctgatccagcagcagtacgcccaggtgctggcccagcagcagaaggccgccctgagcagccagcagcagcagcagctggccctgctgctgcagcagttccagaccctgaagatgagaatcagcgaccagaacatcatccccagcgtgaccagaagcgtgagcgtgcccgacaccggcagcatctgggagctgcagcccaccgccagccagcccaccgtgtgggagggcggcagcgtgtgggacctgcccctggacaccaccacccccggccccgccctggagcagctgcagcagctggagaaggccaaggccgccaagctggagcaggagagaagagaggccgagatgagagccaagagagaggaggaggagagaaagagacaggaggagctgagaagacagcaggaggagatcctgagaagacagcaggaggaggagagaaagagaagagaggaggaggagctggccagaagaaagcaggaggaggccctgagaagacagagagagcaggagatcgccctgagaagacagagagaggaggaggagagacagcagcaggaggaggccctgagaagactggaggagagaagaagagaggaggaggagagaagaaagcaggaggagctgctgagaaagcaggaggaggaggccgccaagtgggccagagaggaggaggaggcccagagaagactggaggagaacagactgagaatggaggaggaggccgccagactgagacacgaggaggaggagagaaagagaaaggagctggaggtgcagagacagaaggagctgatgagacagagacagcagcagcaggaggccctgagaagactgcagcagcagcagcagcagcagcagctggcccagatgaagctgcccagcagcagcacctggggccagcagagcaacaccaccgcctgccagagccaggccaccctgagcctggccgagatccagaagctggaggaggagagagagagacagctgagagaggagcagagaagacagcagagagagctgatgaaggccctgcagcagcagcagcagcagcagcagcagaagctgagcggctggggcaacgtgagcaagcccagcggcaccaccaagagcctgctggagatccagcaggaggaggccagacagatgcagaagcagcagcagcagcagcagcagcaccagcagcccaacagagccagaaacaacacccacagcaacctgcacaccagcatcggcaacagcgtgtggggcagcatcaacaccggcccccccaaccagtgggccagcgacctggtgagcagcatctggagcaacgccgacaccaagaacagcaacatgggcttctgggacgacgccgtgaaggaggtgggccccagaaacagcaccaacaagaacaagaacaacgccagcctgagcaagagcgtgggcgtgagcaacagacagaacaagaaggtggaggaggaggagaagctgctgaagctgttccagggcgtgaacaaggcccaggacggcttcacccagtggtgcgagcagatgctgcacgccctgaacaccgccaacaacctggacgtgcccaccttcgtgagcttcctgaaggaggtggagagcccctacgaggtgcacgactacatcagagcctacctgggcgacaccagcgaggccaaggagttcgccaagcagttcctggagagaagagccaagcagaaggccaaccagcagagacagcagcagcagctgccccagcagcagcagcagcagcccccccagcagcccccccagcagccccagcagcaggacagcgtgtggggcatgaaccacagcaccctgcacagcgtgttccagaccaaccagagcaacaaccagcagagcaacttcgaggccgtgcagagcggcaagaagaagaagaagcagaagatggtgagagccgaccccagcctgctgggcttcagcgtgaacgccagcagcgagagactgaacatgggcgagatcgagaccctggacgactactag

SEQ ID NO: 41206 - DNA, 42 bp, Artificial Sequence
  derived and/or modified sequence
atggccgccgagacccagaccctgaacttcggccccgagtag

SEQ ID NO: 41207 - DNA, 3963 bp, Artificial Sequence
  derived and/or modified sequence
atggccgccgagacccagaccctgaacttcggccccgagtggctgagagccctgagcagcggcggcagcatcaccagcccccccctgagccccgccctgcccaagtacaagctggccgactacagatacggcagagaggagatgctggccctgttcctgaaggacaacaagatccccagcgacctgctggacaaggagttcctgcccatcctgcaggaggagcccctgccccccctggccctggtgcccttcaccgaggaggagcagagaaacttcagcatgagcgtgaacagcgccgccgtgctgagactgaccggcagaggcggcggcggcaccgtggtgggcgcccccagaggcagaagcagcagcagaggcagaggcagaggcagaggcgagtgcggcttctaccagagaagcttcgacgaggtggagggcgtgttcggcagaggcggcggcagagagatgcacagaagccagagctgggaggagagaggcgacagaagattcgagaagcccggcagaaaggacgtgggcaagaagaacggctactactgcatgtacagccccgtgctgctgctgggccagcccctgtgccagggcagacccaacttcgaggagggcggccccaccagcgtgggcagaaagcacgagttcatcagaagcgagagcgagaactggagaatcttcagagaggagcagaacggcgaggacgaggacggcggctggagactggccggcagcagaagagacggcgagagatggagaccccacagccccgacggccccagaagcgccggctggagagagcacatggagagaagaagaagattcgagttcgacttcagagacagagacgacgagagaggctacagaagagtgagaagcggcagcggcagcatcgacgacgacagagacagcctgcccgagtggtgcctggaggacgccgaggaggagatgggcaccttcgacagcagcggcgccttcctgagcctgaagaaggtgcagaaggagcccatccccgaggagcaggagatggacttcagacccgtggacgagggcgaggagtgcagcgacagcgagggcagccacaacgaggaggccaaggagcccgacaagaccaacaagaaggagggcgagaagaccgacagagtgggcgtggccagcgaggagaccccccagaccagcagcagcagcgccagacccggcacccccagcgaccaccagagccaggaggccagccagttcgagagaaaggacgagcccaagaccgagcagaccgagaaggccgaggaggagaccagaatggagaacagcctgcccgccaaggtgcccagcagaggcgacgagatggtggccgacgtgcagcagcccctgagccagatccccagcgacaccgccagccccctgctgatcctgcccccccccgtgcccaaccccagccccaccctgagacccgtggagacccccgtggtgggcgcccccggcatgggcagcgtgagcaccgagcccgacgacgaggagggcctgaagcacctggagcagcaggccgagaagatggtggcctacctgcaggacagcgccctggacgacgagagactggccagcaagctgcaggagcacagagccaagggcgtgagcatccccctgatgcacgaggccatgcagaagtggtactacaaggacccccagggcgagatccagggccccttcaacaaccaggagatggccgagtggttccaggccggctacttcaccatgagcctgctggtgaagagagcctgcgacgagagcttccagcccctgggcgacatcatgaagatgtggggcagagtgcccttcagccccggccccgccccccccccccacatgggcgagctggaccaggagagactgaccagacagcaggagctgaccgccctgtaccagatgcagcacctgcagtaccagcagttcctgatccagcagcagtacgcccaggtgctggcccagcagcagaaggccgccctgagcagccagcagcagcagcagctggccctgctgctgcagcagttccagaccctgaagatgagaatcagcgaccagaacatcatccccagcgtgaccagaagcgtgagcgtgcccgacaccggcagcatctgggagctgcagcccaccgccagccagcccaccgtgtgggagggcggcagcgtgtgggacctgcccctggacaccaccacccccggccccgccctggagcagctgcagcagctggagaaggccaaggccgccaagctggagcaggagagaagagaggccgagatgagagccaagagagaggaggaggagagaaagagacaggaggagctgagaagacagcaggaggagatcctgagaagacagcaggaggaggagagaaagagaagagaggaggaggagctggccagaagaaagcaggaggaggccctgagaagacagagagagcaggagatcgccctgagaagacagagagaggaggaggagagacagcagcaggaggaggccctgagaagactggaggagagaagaagagaggaggaggagagaagaaagcaggaggagctgctgagaaagcaggaggaggaggccgccaagtgggccagagaggaggaggaggcccagagaagactggaggagaacagactgagaatggaggaggaggccgccagactgagacacgaggaggaggagagaaagagaaaggagctggaggtgcagagacagaaggagctgatgagacagagacagcagcagcaggaggccctgagaagactgcagcagcagcagcagcagcagcagctggcccagatgaagctgcccagcagcagcacctggggccagcagagcaacaccaccgcctgccagagccaggccaccctgagcctggccgagatccagaagctggaggaggagagagagagacagctgagagaggagcagagaagacagcagagagagctgatgaaggccctgcagcagcagcagcagcagcagcagcagaagctgagcggctggggcaacgtgagcaagcccagcggcaccaccaagagcctgctggagatccagcaggaggaggccagacagatgcagaagcagcagcagcagcagcagcagcaccagcagcccaacagagccagaaacaacacccacagcaacctgcacaccagcatcggcaacagcgtgtggggcagcatcaacaccggcccccccaaccagtgggccagcgacctggtgagcagcatctggagcaacgccgacaccaagaacagcaacatgggcttctgggacgacgccgtgaaggaggtgggccccagaaacagcaccaacaagaacaagaacaacgccagcctgagcaagagcgtgggcgtgagcaacagacagaacaagaaggtggaggaggaggagaagctgctgaagctgttccagggcgtgaacaaggcccaggacggcttcacccagtggtgcgagcagatgctgcacgccctgaacaccgccaacaacctggacgtgcccaccttcgtgagcttcctgaaggaggtggagagcccctacgaggtgcacgactacatcagagcctacctgggcgacaccagcgaggccaaggagttcgccaagcagttcctggagagaagagccaagcagaaggccaaccagcagagacagcagcagcagctgccccagcagcagcagcagcagcccccccagcagcccccccagcagccccagcagcaggacagcgtgtggggcatgaaccacagcaccctgcacagcgtgttccagaccaaccagagcaacaaccagcagagcaacttcgaggccgtgcagagcggcaagaagaagaagaagcagaagatggtgagagccgaccccagcctgctgggcttcagcgtgaacgccagcagcgagagactgaacatgggcgagatcgagaccctggacgactactag

SEQ ID NO: 41208 - protein, 720 aa, Artificial Sequence
  derived and/or modified sequence
MAAETQTLNFGPEWLRALSSGGSITSPPLSPALPKYKLADYRYGREEMLALFLKDNKIPSDLLDKEFLPILQEEPLPPLALVPFTEEEQRNFSMSVNSAAVLRLTGRGGGGTVVGAPRGRSSSRGRGRPNFEEGGPTSVGRKHEFIRSESENWRIFREEQNGEDEDGGWRLAGSRRDGERWRPHSPGWREHMERRRRFEFDFRDRDDERGYRRVRSGSGSIDDDRDSLPEWCLEDAEEEMGTFDSSGAFLSLKKVQKEPIPEEQEMDFRPVDEGEECSDSEGSHNEEAKEPDKTNKKEGEKTDRVGVEASEETPQTSSSSARPGTPSDHQSQEASQFERKDEPKTEQTEKAEEETRMENSLPAKVPSRGDEMVADVQQPLSQIPSDTASPLLILPPPVPNPSPTLRPVETPVVGAPGMGSVSTEPDDEEGLKHLEQQAEKMVAYLQDSALDDERLASKLQEHRAKGVSIPLMHEAMQKWYYKDPQGEIQGPFNNQEMAEWFQAGYFTMSLLVKRACDESFQPLGDIMKMWGRVPFSPGPAPPPHMGELDQERLTRQQELTALYQMQHLQYQQFLIQQQYAQVLAQQQKAALSSQQQQQLALLLQQFQTLKMRISDQNIIPSVTRSVSVPDTGSIWELQPTASQPTVWEGGSVWDLPLDTTTPGPALEQLQQLEKAKAAKLEQERREAEMRAKREEEERKRQEELRRQQEEILRRQQEEER

SEQ ID NO: 41209 - protein, 100 aa, Artificial Sequence
  derived and/or modified sequence
MAAETQTLNFGPEWLRALSSGGSITSPPLSPALPKYKLADYRYGREEMLALFLKDNKIPSDLLDKEFLPILQEEPLPPLALVPFTEEEQRNFSMSVNSAA

SEQ ID NO: 41210 - protein, 13 aa, Artificial Sequence
  derived and/or modified sequence
MAAETQTLNFGPE

SEQ ID NO: 41211 - protein, 115 aa, Artificial Sequence
  derived and/or modified sequence
MAAETQTLNFGPEWLRALSSGGSITSPPLSPALPKYKLADYRYGREEMLALFLKDNKIPSDLLDKEFLPILQEEPLPPLALVPFTEEEQRNFSMSVNSAAVLRLTGRGGGGTVVG

SEQ ID NO: 41212 - protein, 106 aa, Artificial Sequence
  derived and/or modified sequence
MAAETQTLNFGPEWLRALSSGGSITSPPLSPALPKYKLADYRYGREEMLALFLKDNKIPSDLLDKEFLPILQEEPLPPLALVPFTEEEQRNFSMSVNSAAVLRLTG

SEQ ID NO: 41213 - protein, 1293 aa, Artificial Sequence
  derived and/or modified sequence
MAAETQTLNFGPEWLRALSSGGSITSPPLSPALPKYKLADYRYGREEMLALFLKDNKIPSDLLDKEFLPILQEEPLPPLALVPFTEEEQRNFSMSVNSAAVLRLTGRGGGGTVVGAPRGRSSSRGRGRGRGECGFYQRSFDEVEGVFGRGGGREMHRSQSWEERGDRRFEKPGRKDVGRPNFEEGGPTSVGRKHEFIRSESENWRIFREEQNGEDEDGGWRLAGSRRDGERWRPHSPGWREHMERRRRFEFDFRDRDDERGYRRVRSGSGSIDDDRDSLPEWCLEDAEEEMGTFDSSGAFLSLKKVQKEPIPEEQEMDFRPVDEGEECSDSEGSHNEEAKEPDKTNKKEGEKTDRVGVEASEETPQTSSSSARPGTPSDHQSQEASQFERKDEPKTEQTEKAEEETRMENSLPAKVPSRGDEMVADVQQPLSQIPSDTASPLLILPPPVPNPSPTLRPVETPVVGAPGMGSVSTEPDDEEGLKHLEQQAEKMVAYLQDSALDDERLASKLQEHRAKGVSIPLMHEAMQKWYYKDPQGEIQGPFNNQEMAEWFQAGYFTMSLLVKRACDESFQPLGDIMKMWGRVPFSPGPAPPPHMGELDQERLTRQQELTALYQMQHLQYQQFLIQQQYAQVLAQQQKAALSSQQQQQLALLLQQFQTLKMRISDQNIIPSVTRSVSVPDTGSIWELQPTASQPTVWEGGSVWDLPLDTTTPGPALEQLQQLEKAKAAKLEQERREAEMRAKREEEERKRQEELRRQQEEILRRQQEEERKRREEEELARRKQEEALRRQREQEIALRRQREEEERQQQEEALRRLEERRREEEERRKQEELLRKQEEEAAKWAREEEEAQRRLEENRLRMEEEAARLRHEEEERKRKELEVQRQKELMRQRQQQQEALRRLQQQQQQQQLAQMKLPSSSTWGQQSNTTACQSQATLSLAEIQKLEEERERQLREEQRRQQRELMKALQQQQQQQQQKLSGWGNVSKPSGTTKSLLEIQQEEARQMQKQQQQQQQHQQPNRARNNTHSNLHTSIGNSVWGSINTGPPNQWASDLVSSIWSNADTKNSNMGFWDDAVKEVGPRNSTNKNKNNASLSKSVGVSNRQNKKVEEEEKLLKLFQGVNKAQDGFTQWCEQMLHALNTANNLDVPTFVSFLKEVESPYEVHDYIRAYLGDTSEAKEFAKQFLERRAKQKANQQRQQQQLPQQQQQQPPQQPPQQPQQQDSVWGMNHSTLHSVFQTNQSNNQQSNFEAVQSGKKKKKQKMVRADPSLLGFSVNASSERLNMGEIETLDDY

SEQ ID NO: 41214 - DNA, 2163 bp, Artificial Sequence
  derived and/or modified sequence
atggcggccgagacccagaccctcaattttgggccggagtggctgcgcgccttgtcgtccgggggctcgattacctccccacccctgtctcctgccctgccaaagtacaagttggccgattaccggtatggacgtgaggaaatgttggcccttttcctgaaagataacaaaattccatccgacctgctggataaggaattcctccccattttgcaagaggaacccctgcctcccttggcccttgtcccctttacagaggaggagcagagaaacttttccatgagtgtaaattcagctgctgtgctccggctcacaggtagggggggaggggggacagtggtcggggcccctagggggcggagcagttcgaggggtcgtgggaggcccaattttgaagaaggagggcccacgtccgtaggcagaaagcacgagtttattcgtagcgagtccgaaaattggcgaatatttcgggaagagcagaatggtgaggatgaagatggggggtggaggcttgcgggcagtagaagggatggtgaacgatggcgaccccactctcccggctggagggagcacatggaacgtcgtaggagattcgagttcgattttagggatcgcgacgacgagaggggctaccgcagagtgcggtcaggctcaggttcaattgacgacgatcgcgatagcctgccagaatggtgtctggaggatgcagaggaggagatgggcactttcgatagctcaggagcttttctctccctgaagaaggtccagaaggaacctattccagaagaacaggaaatggacttcaggcccgtggacgagggagaagaatgttctgattctgaagggagccacaacgaggaggctaaggagccagacaagaccaacaaaaaagaaggggagaaaacggacagagtaggggtggaggcctccgaggagactccccagacatcctccagttctgcgcggcctggcactccaagcgaccaccaatcacaagaggccagtcagttcgagaggaaagatgaacccaaaactgaacagaccgaaaaggcagaggaagagactcgcatggagaacagtctcccggccaaagttccatcgaggggcgacgaaatggtggccgacgttcagcagccattgtctcagattccctccgacaccgccagtcctctgctgatactgccaccaccagtgcctaaccctagcccaaccctcaggcctgtggagactcccgttgtcggcgctccagggatggggagtgtgtccaccgagcccgatgacgaggagggcctcaagcatttagaacagcaggcagagaaaatggtggcgtacctgcaagattcagcactcgacgacgaaaggctcgccagcaaactgcaggaacacagggcaaagggtgtcagcatcccgctaatgcatgaggcgatgcagaaatggtattacaaagacccccaaggtgagattcaggggcctttcaataaccaggagatggccgagtggtttcaggcagggtattttacaatgtccctcctggttaaacgagcgtgtgatgagagttttcagccactgggtgacatcatgaaaatgtgggggcgggtgccattctcccccggccccgctccccccccacatatgggggaactggatcaggaacgcttgacacgtcaacaggagctgacagcactgtatcaaatgcagcatctccaatatcagcagttcctgattcagcaacagtacgcacaggtgctggctcaacagcagaaagctgcattgagttcccaacagcaacagcagcttgccctgctgcttcagcagttccagaccttgaagatgagaattagcgaccagaatattattccatccgtcacaagatcagtcagtgtaccggatacaggcagtatctgggaactgcagcctactgcttcacaacccactgtgtgggagggtggctcagtttgggacctaccactcgataccaccactcccggcccagctctcgaacaactgcaacaactggagaaggccaaggcagctaagctcgagcaggagcgccgggaggccgagatgcgagctaaaagagaggaggaggagagaaagcgccaggaggaactgcggcgccagcaggaggagattcttcgcagacagcaggaagaagaacggtag

SEQ ID NO: 41215 - DNA, 282 bp, Artificial Sequence
  derived and/or modified sequence
atggccgcagagactcaaacgttgaattttggccccgagtggctgagggctctgagttccggaggcagcattacctcccctcccctgagcccagcactgccaaaatataaattggcagattatagatatggtagggaggagatgctggctcttttcctgaaagataacaagattccttctgatctgcttgataaggagttccttccaattctgcaggaggaacccctcccccccctggcactcgttcctttcaccgaagaagaacagcggaacttctcttag

SEQ ID NO: 41216 - DNA, 303 bp, Artificial Sequence
  derived and/or modified sequence
atggccgcggagacccagaccctcaactttggtcccgagtggctgcgggctctaagtagcgggggctctattacatcccctcccctcagccccgctctgccgaagtacaaactggccgactacaggtacggccgcgaggagatgctcgccttattcctaaaagataacaaaattccgtccgacctgcttgacaaggaatttttgccgattctgcaggaagagccactgccgccacttgccctggtgcctttcaccgaggaagagcagaggaatttcagcatgagcgtgaactccgctgcatag

SEQ ID NO: 41217 - DNA, 348 bp, Artificial Sequence
  derived and/or modified sequence
atggccgctgagacacagactctcaacttcggccctgaatggctccgagcgctttcttctggaggttccattacctcccccccattaagccccgctctgcccaagtataaacttgctgactaccgatatggacgggaggaaatgctggcgctcttccttaaggacaataagatcccttccgatctgctggataaagagtttctgccgatactgcaagaggagccactcccaccattggcccttgttccctttaccgaggaagaacagaggaacttttccatgtctgtaaacagcgccgcagtgctgcgtctcaccggtcggggaggtggagggaccgtggtgggctag

SEQ ID NO: 41218 - DNA, 321 bp, Artificial Sequence
  derived and/or modified sequence
atggccgctgaaacacagactttgaatttcgggcccgagtggctgcgcgccctgagcagtggcggaagcatcacctcaccgcccctgagtccggcgttacctaagtacaagctggctgactaccgttacggaagagaggagatgctggccctgtttcttaaggacaacaaaatccccagcgacttgcttgataaagagttccttcccatcctacaggaggagccgctccctccgctggccctcgttcctttcaccgaagaagaacaaaggaatttctccatgagcgtgaacagcgccgctgtcttgcggctcaccggatag

SEQ ID NO: 41219 - DNA, 342 bp, Artificial Sequence
  derived and/or modified sequence
atggctgccgaaacccagacactcaacttcgggcctgaatggctccgtgccctgtcatctggcggctccataacgagtccccccttgtccccagcccttccgaaatacaagttggctgactatcggtacggacgcgaagaaatgttggcactgtttctgaaggacaataaaataccgtctgatctcctggataaggagtttttgcccatcctgcaggaagaaccacttcctccgctggcccttgtcccattcaccgaagaagagcaaagaaatttcagtatgtccgtcaattccgccgcagttctgagactaaccggacggggcggaggaggcacagtctag

SEQ ID NO: 41220 - DNA, 3882 bp, Artificial Sequence
  derived and/or modified sequence
atggccgcagaaacacagactctgaactttgggcctgaatggctccgcgccctgtctagcgggggctcaatcacctccccccctttgagtccagcactacctaaatataagttggctgactacagatacggccgcgaagagatgcttgccctgtttctgaaggataacaagataccttctgatcttctcgataaggagttcctccctatacttcaagaagaaccactcccaccccttgccctggtgcctttcacggaagaggaacaacggaactttagcatgtcggtaaactctgccgcagtccttcggctgactggccggggcggtgggggcacggtggtgggtgccccacgtggaaggagttcttcaagggggaggggtagaggtaggggtgagtgtggcttttatcagcgcagcttcgatgaagttgagggcgtctttggcagggggggcggacgggaaatgcaccgatcacagtcatgggaagagcggggggaccggcgatttgagaagccgggaaggaaagatgtgggtcgccccaacttcgaggaggggggccccacatctgtgggaagaaagcacgagtttattagatcagaatctgagaattggcggattttcagggaagagcagaacggtgaggacgaagatgggggctggcgcctggcaggcagccgacgcgacggcgaacgctggcgcccacactctccgggatggcgcgaacacatggaaagacgacgacgcttcgaatttgattttagggatagagatgacgagcgtggataccgcagggtcagatctggttccgggtccattgatgacgaccgggacagtttgcccgaatggtgcctggaagacgccgaagaggagatgggtacctttgatagcagcggtgccttcctgtctctcaaaaaggtgcagaaagaaccaataccagaagaacaggaaatggactttcgacctgtagacgagggtgaggagtgctcggattcagaggggtcgcacaatgaggaagctaaggaaccagataagacgaacaaaaaagaaggcgagaagacggacagagtcggagtggaggcctccgaggagactcctcagacttcgtcctcgtctgctcggccagggacaccttctgaccaccagagtcaggaggcatctcagtttgaacgcaaagacgaaccgaagacagagcagacggagaaagccgaagaggagactcggatggaaaactccctgcccgccaaggtgccctcacgtggggacgagatggtggccgacgtgcagcaacccctcagtcagatcccttcggacaccgccagtcccctccttatcctgcctcccccagtcccaaatccgtcaccaacccttcgtcctgtggaaacgcctgtagtgggcgccccaggcatgggctccgtatccaccgagcctgatgatgaagaaggcctaaaacacctggagcagcaagcggagaaaatggtggcttatctgcaggattccgccctggatgatgaaaggctggcctctaaactccaggagcaccgggccaaaggcgtatcaatccccctgatgcatgaagccatgcagaaatggtattacaaagatcctcagggtgaaatccagggaccatttaacaaccaggagatggcagagtggtttcaggccggatatttcactatgtcactgttggtcaaacgagcctgtgacgagagcttccagcctctcggcgacatcatgaagatgtggggccgggttccgttttctcctgggccagctccccctccccacatgggggaactggatcaggagaggcttactaggcagcaagaactgaccgccttgtatcagatgcaacatctgcagtatcagcagttcctgattcaacagcagtacgctcaggtcctggctcagcagcagaaggcagctcttagcagtcaacaacaacagcagctggcgttgctgctccagcagttccaaacacttaaaatgcgcatctccgaccaaaacattataccctccgtgacacgatcagtttctgtccccgacaccgggtccatatgggaactgcagcccactgcttctcaaccaactgtttgggagggtggtagcgtctgggacctgccattagatactaccaccccaggccctgccctagagcagctacagcagctcgaaaaagcaaaagccgcaaaattagagcaggagcgccgggaggctgaaatgcgtgccaagcgcgaggaggaagagaggaagaggcaggaggaactacgtaggcaacaagaggagatactgagaagacaacaggaggaagagcgtaaaagacgagaagaggaggaacttgcgaggcgcaagcaggaagaagccctgcgccgccagcgggagcaggaaattgctctgagacggcagcgcgaggaagaggaaaggcagcaacaggaggaagctcttagacgattggaggagagacggcgggaggaggaagagaggcgaaagcaggaggagctgcttcgaaagcaggaggaagaggctgcaaagtgggctcgagaggaagaggaagcacagaggaggctggaggaaaataggctccgaatggaggaggaagctgctaggctccggcacgaagaagaggagcgcaagcgcaaagagctggaagtgcagaggcagaaagagctgatgaggcagcggcaacagcagcaggaggcgttgcgaaggctgcagcagcagcagcaacagcagcagcttgcccagatgaagctgccctctagcagcacttgggggcaacagtctaacactaccgcctgtcagtcccaggctaccctctcactcgccgaaattcagaagttggaggaagaaagggaacgccagttaagagaagagcaaagacgtcagcagcgggagctcatgaaggccctgcagcaacagcaacagcaacagcagcaaaagcttagcggatggggcaacgtgagtaaacccagcggtaccacaaaatcactcttggagattcagcaggaagaggcaagacaaatgcagaaacagcagcagcaacagcagcagcaccagcagcccaatcgagctagaaacaacacacacagcaatctacatacttcgatcggaaacagcgtgtggggcagtatcaatactgggccaccaaatcagtgggcttcagacttagtcagtagtatatggtctaatgcagatactaagaactcaaatatgggcttttgggacgacgccgttaaagaggttggtcctcgcaatagcacaaacaaaaacaagaataatgcctcactgtctaagtctgttggtgtcagtaaccgccagaacaaaaaggtggaagaagaggagaaacttttaaaattgttccagggggtcaacaaggctcaggacggctttactcagtggtgcgagcaaatgctgcacgctctgaacacagcaaataacttggatgtgccaaccttcgttagcttcctgaaagaggtggaatccccatatgaggtgcatgactatatccgggcctatctcggcgatacgtctgaggccaaagagtttgccaaacagtttctggagcgccgagccaagcaaaaagccaaccagcaacgccagcagcagcagctgccgcaacagcagcagcagcaacccccccagcagcccccacagcagccccagcagcaggattccgtttggggtatgaatcactcaaccctgcactcagtgtttcagaccaaccagtccaataaccaacagagtaacttcgaggctgtgcagagcgggaaaaagaaaaagaagcagaagatggtaagggccgatcccagcctcctcggattcagcgtcaatgcaagtagcgaacgcctgaacatgggtgagatcgaaactctggatgactactag

SEQ ID NO: 41221 - DNA, 7641 bp, Artificial Sequence
  derived and/or modified sequence
gtgacgtgcgtggcgacgtgtcggccatcttgtgttgttgaggctgaggactgactggggttctgagactccctgtcccggaccgcagcgttaaaaggatctgaacaaagtctgctcaaatctcctgctgtgaaccagcagaatttttgaacaggtttcttcacatataaaaatctattgtaaaaatacggaaaagaatggcagcggaaacgcagacactgaactttgggcctgaatggctccgagctctgtccagtggtgggagtattacatcccctcctctttctccagcattgccgaagtataaattagcagattatcgttacggcagagaagaaatgttagcacttttccttaaagacaacaagataccttcagaccttctggataaagaatttctgcctatcctccaggaggaaccccttccaccattggctctggtaccctttacagaagaagaacagagaaacttttccatgtctgtaaatagtgctgctgtcctgcgattgacaggacgaggaggaggaggaacagtggtgggggctcctagaggtcgaagttcttcaagagggcgagggagaccaaattttgaggaaggtggaccaacatcagtagggagaaagcatgaatttatacgctcagaaagtgaaaattggcgcatctttagagaggaacaaaatggagaagatgaagatggaggttggcgactagctggatcaaggagggatggagagaggtggcgacctcacagtcctggctggcgggaacacatggaacgacgtcggaggtttgagtttgattttcgagatagagatgatgaacggggttaccgaagggttcgctctggcagtgggagcatagatgatgacagggatagcttgcccgaatggtgcttagaggatgctgaagaagaaatgggtacatttgactcatctggagcattcctttctctaaaaaaagtacagaaagagcctattccagaagagcaggagatggacttccggcctgtggacgaaggggaggagtgctctgactctgagggtagccataatgaagaggccaaagaacccgataagacaaataagaaagaaggagagaaaacagatagagtaggagttgaagctagtgaggaaactccccagacctcatcatcatctgctagaccaggtactccttcagaccatcagtctcaggaagcatcacagtttgagaggaaagatgaaccaaaaactgagcaaacggaaaaagctgaagaggagactcggatggaaaatagtctaccagccaaagtgcccagcagaggggatgaaatggttgctgatgtccagcagcccctgtcgcagattccttcagatacagcctctcctcttctcatacttccacctcctgttcccaatcctagtcctactctccggccagttgaaacaccagttgtaggtgctcctggtatgggcagtgtttccacagaacctgatgatgaagaaggtctcaaacatttggagcagcaagctgagaaaatggtggcttatctccaagacagtgcactagatgatgaaagattggcatcaaaactgcaagagcacagagctaaaggagtgtcgattccattgatgcatgaagcaatgcagaagtggtattacaaagatcctcagggagaaattcaaggtcccttcaataatcaggagatggcagaatggtttcaggcgggctattttactatgtctttattggtgaagagagcgtgtgatgaaagcttccaacctcttggcgatatcatgaaaatgtggggaagggttcccttttctccaggtccagctccccctcctcatatgggagagctggaccaggaacgactgaccaggcagcaagaactcacagccttataccagatgcagcacctgcagtaccagcagtttttaatacaacaacaatatgcacaggttttggcccaacagcagaaagcagcactgtcttcccagcagcagcagcagttggcacttcttcttcaacagtttcagaccttgaagatgagaatatctgatcagaacatcattccctcagtaactaggtctgtgtccgtgccagatactggctctatctgggagcttcagccaacagcttcacagcctacagtttgggaaggtggtagtgtatgggatcttcctctggacaccacgacaccaggccctgccctggaacagcttcagcagctagagaaggccaaagctgcaaagctagagcaagagagaagagaggcagaaatgagggcaaaacgggaagaggaagagcgaaagaggcaggaagaactccgaagacaacaggaggaaattcttcggcgacagcaggaagaagaaaggaaaaggcgagaggaagaagaacttgcccgaaggaaacaggaagaggctctgcgtcgccagcgggagcaagaaattgcattaaggcgacagcgagaagaggaagaaagacagcagcaagaagaagctcttagaagactggaagagaggagaagagaagaggaagaaaggcggaagcaggaagaattgttacgcaaacaggaagaggaggctgcaaaatgggcccgggaagaagaagaagcccagcgtcgattagaggagaaccggctgcggatggaagaggaggcagccagactccggcatgaggaagaagaacggaagagaaaggagctggaggtccagcggcagaaggagttaatgcgccagaggcagcagcagcaagaggctctccggaggttgcagcagcagcagcagcaacaacagctggcgcagatgaagcttccttcttcttcaacgtggggccagcagtccaatacaacagcatgtcagtcccaggccacgctgtcgttggctgaaatccaaaaactagaggaagaacgagaacggcagcttcgagaagagcaaaggcgccagcagagggagttgatgaaagctcttcagcagcagcagcaacagcaacagcagaaactctcaggttgggggaatgtcagcaaaccttcaggtaccacgaaatctcttctggagatccagcaggaagaggccaggcaaatgcaaaagcagcagcagcagcagcagcaacaccagcaaccaaacagagctcgtaacaatacgcattccaacctgcacaccagcattgggaattctgtttggggctctataaatactggtcctcctaaccagtgggcatctgacctagtcagtagtatttggagtaatgctgacactaaaaactccaacatgggattctgggatgatgcagtgaaagaggtgggacctaggaattcaacaaataaaaataaaaacaacgccagtctcagtaaatctgtaggtgtgtctaaccggcagaataagaaagtagaagaagaagaaaagttgctgaagctctttcagggagtaaataaagcccaagatggatttacgcagtggtgtgaacagatgcttcatgcccttaatacggcaaataacttggatgttcccacatttgtttctttcctgaaagaagtagaatctccttatgaggtccatgattatatcagggcctatttaggagatacttctgaggccaaggagtttgccaagcagttccttgagcgccgtgccaaacagaaagccaaccagcagcgtcagcagcagcagctgccacagcagcagcagcagcagccgccacagcagccgccacagcagccacaacagcaggactctgtgtgggggatgaaccacagtacactccattcagtatttcagaccaatcaaagcaacaaccaacaatccaattttgaggctgtgcagagtggcaagaagaagaaaaagcagaagatggtccgagcagatcccagtttattaggattttcagtcaatgcatcatcggagcgactcaacatgggtgaaatcgagacgttggatgactactgagcacctgccagtggactggccatccctctcctgtctgccgactatggagtctccacctttggacacaacacttactcaccatttactctttatcactctgcaacaaatcacagaaccgatcatctcaggctttttcttctggccctttgtgtccaagattctttaatccatttttgttggtgaacatctcagactatagataagtggactggaccctgtgtcttgggggtggcagttgggattactccccaacaaggctgattttaggcagcatgtgttcactgtgctgtgatttcatctactgtctcccagaaagtgtgttgggatcggccattagcagcttgctttctcttgtcactttttttcttctattttgttttttcttcttctttttccccccatcagggcaaatggtctaactggtgcaatcatgaagagagttaatggttaacagacattggccaataacaaaacaccccatggactgtgactcgagtatccaacaggcagtcagagctctcccggtctgaaagttgcattgccactgctaactttgggattgcatcagagaggccctgagtggggttgagatgaggttggtttggtttgatgttacacactcctcacctgttctttctgagtgtcctttctctgaaaggatttatgtttttcttcgttagatagtgacttctgagcaagctgatctcccctggcatgctccaacctgattggacaaaggaagctctatggcctgggagagagactattcttaatttttctttcttacaaaaactgatttttcccataaatatttttacttcagaggactaggaccattttgttttgggcccttctgctgaaaatttgtctcgtttaagaggcagctagaatctttaccatatgtatgaatttgtataatttcatttttggatagggataaacttttgcttctgataaaagcctggaatttcatctggtcctcagagcattgcgtgtgtgtcttgctgtagcccggaaaaggttttgtgtaaagattctgggatggcaagttgtttgccttttctgaaaagagaacatacagaacctgtccatctttaagaccttcatccatggaatctactatacaggaggatgcagtgggctggaggggatgggcgaaaatgggagcaggaagcctggcctggcttctggtcatggcctcctaaaaccttaaacttcaagtagaaatgtactcaagccctatttataaacaaatacttttcctgcctccaccaaacccctacagaacatcacctggaattgccactcacactgggttggagtcattgggcagctgtgcctgtgcgagaggtgctgtggtctgggcagcccctggaaaagcacctttgctgcctgtcattgttgcctgaagaaggctggagttgctctgagagcagtttgggtttggagtattatatttggcttctatttttattattttggatcaccattctccctatcccttcttgcctccctcccttctaaacatgtgtaataactatacagagactgctacaaaattgtatatagtttttggatcaaatagcatgaggggagaggaaaccattaaaagttggggctcctactctcctttgctttgtaaattcaaaagttgggggtgggtaagagggatagttaaaatgtttacaaaactttaggctccctcggaacttttgccagtgtggaggaaaataaaaaagaacttaaataaaatctgattgtattctatctgagtgcacctcttgtactcacctttatggaggctgagttctgcactaaactgttcctcttggtaccatggaaaagctccaagcacccaagacatggaggcagccatggcttctttctctgccagaccacgtagcactggctggttctgtatttgagaatgtagaggtcaaggcagatgtcggtaagtttgaccaaatatcttttctctttttgactctccctttctgctaacatgtggatcagctcctgccctcataccgcagacacacccactctgaacacacccctccagagcttgcccacaccttcccaactagactctgtgtgtgtattcaggaaaaatgaaaataaatttttaaaaattgggagtggaatgggcagattagggggaacaaagtcattttggtcatggaacatccatttgcttaaccaaggagacttgcttctatctgaggaatttcccacttagtagaaagaaacactcttccctgggaatgtttgtttctgtctctctcaatgctactctctttcatattctcatttgctcaccctttcacttagagccaccgttttctcatcccattctatgaacttatttccaaattctcctaactattcctgagttttgaagtatttgttttgtaccctctctgcttccggttttttgtttggttggcttttttggagatagggtcttgtgatgttgcccacactggtctcgagcccctgggctcaagtgatcctcccgcctcagcctcctaaatatctaggactacaggtgtgtgccaccatgcccagctccagttttgttggttgatttgtttaaattcagagatttaaaaacatcccagacaagacagtttgattatggagactgtccccaagcagattggtgtgctggtggctgctgtgcataacagattccctccagattggcttacaacagctacttcattctgtgggtcaggaatttggatagggctcagctgggtggtggttctcctggggtattctttggttgtggtcagatgtcttccagggcatcattcctatgaaggcttaatgaattaggcaagctgtccaagatggctcactcgtgtaatgacagttgacgttggctgtaggctgggaactcagctgggttgatgactggaggagcttatgtgtgtcgtctccggaatggcagcttcagaggagttgaacttaagtggtgattggcttcccccagagaaccaggcagaagctgtgttacctttttgagctcttagctcaggagtcacatagagtcacttctgtgacactgtgttgcatcaaagtagtcacaaacccactcagattcaagagaagggagcatggccctctccctgcaaccccctccccccccgccttgatgaaaggagtgacaaggtcacattggagaagagcttgtggggtgggagatattatagccatttttgggaaatatctgcataaaatgagtttatgcatacatgaaggactttattttcattggctttaagttgagggtttttgtttttgtttttgtattggagatgggttcttactatgttgcccaggctggtctcaaacccctgggctcaagtgatcctgttgcctcagcctcccaagtagctgggactacagctatgtgccagtgcacccagcttgttttttttaaattttaggatagataatggtacttctggctttatttaaataatttttttagggaaaccattgtatttatacatgcatatatttttatatatacaaatatgtatataaaagtatatgttttacattttcaatatatatataatatatacatatatgttatatacgtatatatattgcaccctactttaaaattgactgataacaaaattggtaattttgtataaaatgcccaactgtgcattattaataaaagtatgtgaatgactct

SEQ ID NO: 41222 - DNA, 564 bp, Artificial Sequence
  derived and/or modified sequence
atcttgtgttgttgaggctgaggactgactggggttctgagactccctgtcccggaccgcagcgttaaaaggatctgaacaaagtctgctcaaatctcctgctgtgaaccagcagaatttttgaacagatgctgcttgaatctggggcttcgtttatatttcaagactgctgcctgtaggagctccatctgtatcatttgtgttaatagtgaccctggagttttgtacttccagaacctatgtttcttcacatataaaaatctattgtaaaaatacggaaaagaatggcagcggaaacgcagacactgaactttgggcctgaatggctccgagctctgtccagtggtgggagtattacatcccctcctctttctccagcattgccgaagtataaattagcagattatcgttacggcagagaagaaatgttagcacttttccttaaagacaacaagataccttcagaccttctggataaagaatttctgcctatcctccaggaggaaccccttccaccattggctctggtaccctttacagaagaagaacagagaaacttttcca

SEQ ID NO: 41223 - DNA, 588 bp, Artificial Sequence
  derived and/or modified sequence
atcttgtgttgttgaggctgaggactgactggggttctgagactccctgtcccggaccgcagcgttaaaaggatctgaacaaagtctgctcaaatctcctgctgtgaaccagcagaatttttgaacagagactgtctcgctctgtcacccaggctagagtgcagtggtgctatcgtaactcactggagccctgatctaggctcaaaccatcctcccacctcagcctcccaagtagctgggactaaggtttcttcacatataaaaatctattgtaaaaatacggaaaagaatggcagcggaaacgcagacactgaactttgggcctgaatggctccgagctctgtccagtggtgggagtattacatcccctcctctttctccagcattgccgaagtataaattagcagattatcgttacggcagagaagaaatgttagcacttttccttaaagacaacaagataccttcagaccttctggataaagaatttctgcctatcctccaggaggaaccccttccaccattggctctggtaccctttacagaagaagaacagagaaacttttccatgtctgtaaatagtgctgc

SEQ ID NO: 41224 - DNA, 544 bp, Artificial Sequence
  derived and/or modified sequence
acgtgcgtggcgacgtgtcggccatcttgtgttgttgaggctgaggactgactggggttctgagactccctgtcccggaccgcagagaccacgtctccacctcctgggctccaacgattctcccatcttggcctcccaaagcgctggatttacaggtttcttcacatataaaaatctattgtaaaaatacggaaaagaatggcagcggaaacgcagacactgaactttgggcctgaatggctccgagctctgtccagtggtgggagtattacatcccctcctctttctccagcattgccgaagtataaattagcagattatcgttacggcagagaagaaatgttagcacttttccttaaagacaacaagataccttcagaccttctggataaagaatttctgcctatcctccaggaggaaccccttccaccattggctctggtaccctttacagaagaagaacagagaaacttttccatgtctgtaaatagtgctgctgtcctgcgattgacaggacgaggaggaggaggaacagtggtggggg

SEQ ID NO: 41225 - DNA, 606 bp, Artificial Sequence
  derived and/or modified sequence
ggactgactggggttctgagactccctgtcccggaccgcagcgttaaaaggatctgaacaaagtctgctcaaatctcctgctgtgaaccagcagaatttttgaacagatgctgcttgaatctggggcttcgtttatatttcaagactgctgcctgtaggagctccatctgtatcatttgtgttaatagtgaccctggagttttgtacttccagaacctatgtgagcatatgtgatggccttgtagtttcttcacatataaaaatctattgtaaaaatacggaaaagaatggcagcggaaacgcagacactgaactttgggcctgaatggctccgagctctgtccagtggtgggagtattacatcccctcctctttctccagcattgccgaagtataaattagcagattatcgttacggcagagaagaaatgttagcacttttccttaaagacaacaagataccttcagaccttctggataaagaatttctgcctatcctccaggaggaaccccttccaccattggctctggtaccctttacagaagaagaacagagaaacttttccatgtctgtaaatagtgctgctgtcctgcgattgacaggac

SEQ ID NO: 41226 - DNA, 561 bp, Artificial Sequence
  derived and/or modified sequence
atcttgtgttgttgaggctgaggactgactggggttctgagactccctgtcccggaccgcagagactgtctcgctctgtcacccaggctagagtgcagtggtgctatcgtaactcactggagccctgatctaggctcaaaccatcctcccacctcagcctcccaagtagctgggactaaggtttcttcacatataaaaatctattgtaaaaatacggaaaagaatggcagcggaaacgcagacactgaactttgggcctgaatggctccgagctctgtccagtggtgggagtattacatcccctcctctttctccagcattgccgaagtataaattagcagattatcgttacggcagagaagaaatgttagcacttttccttaaagacaacaagataccttcagaccttctggataaagaatttctgcctatcctccaggaggaaccccttccaccattggctctggtaccctttacagaagaagaacagagaaacttttccatgtctgtaaatagtgctgctgtcctgcgattgacaggacgaggaggaggaggaacagt

SEQ ID NO: 41227 - DNA, 5747 bp, Artificial Sequence
  derived and/or modified sequence
gttgttgaggctgaggactgactggggttctgagactccctgtcccggaccgcaggtttcttcacatataaaaatctattgtaaaaatacggaaaagaatggcagcggaaacgcagacactgaactttgggcctgaatggctccgagctctgtccagtggtgggagtattacatcccctcctctttctccagcattgccgaagtataaattagcagattatcgttacggcagagaagaaatgttagcacttttccttaaagacaacaagataccttcagaccttctggataaagaatttctgcctatcctccaggaggaaccccttccaccattggctctggtaccctttacagaagaagaacagagaaacttttccatgtctgtaaatagtgctgctgtcctgcgattgacaggacgaggaggaggaggaacagtggtgggggctcctagaggtcgaagttcttcaagagggcgaggcagaggcagaggtgaatgtggtttctaccaaagaagttttgatgaagtagagggtgtttttggtcgaggaggtggcagagaaatgcatagatcgcagagctgggaggaaaggggtgacagacgttttgaaaaaccaggacgaaaagatgtagggagaccaaattttgaggaaggtggaccaacatcagtagggagaaagcatgaatttatacgctcagaaagtgaaaattggcgcatctttagagaggaacaaaatggagaagatgaagatggaggttggcgactagctggatcaaggagggatggagagaggtggcgacctcacagtcctggctggcgggaacacatggaacgacgtcggaggtttgagtttgattttcgagatagagatgatgaacggggttaccgaagggttcgctctggcagtgggagcatagatgatgacagggatagcttgcccgaatggtgcttagaggatgctgaagaagaaatgggtacatttgactcatctggagcattcctttctctaaaaaaagtacagaaagagcctattccagaagagcaggagatggacttccggcctgtggacgaaggggaggagtgctctgactctgagggtagccataatgaagaggccaaagaacccgataagacaaataagaaagaaggagagaaaacagatagagtaggagttgaagctagtgaggaaactccccagacctcatcatcatctgctagaccaggtactccttcagaccatcagtctcaggaagcatcacagtttgagaggaaagatgaaccaaaaactgagcaaacggaaaaagctgaagaggagactcggatggaaaatagtctaccagccaaagtgcccagcagaggggatgaaatggttgctgatgtccagcagcccctgtcgcagattccttcagatacagcctctcctcttctcatacttccacctcctgttcccaatcctagtcctactctccggccagttgaaacaccagttgtaggtgctcctggtatgggcagtgtttccacagaacctgatgatgaagaaggtctcaaacatttggagcagcaagctgagaaaatggtggcttatctccaagacagtgcactagatgatgaaagattggcatcaaaactgcaagagcacagagctaaaggagtgtcgattccattgatgcatgaagcaatgcagaagtggtattacaaagatcctcagggagaaattcaaggtcccttcaataatcaggagatggcagaatggtttcaggcgggctattttactatgtctttattggtgaagagagcgtgtgatgaaagcttccaacctcttggcgatatcatgaaaatgtggggaagggttcccttttctccaggtccagctccccctcctcatatgggagagctggaccaggaacgactgaccaggcagcaagaactcacagccttataccagatgcagcacctgcagtaccagcagtttttaatacaacaacaatatgcacaggttttggcccaacagcagaaagcagcactgtcttcccagcagcagcagcagttggcacttcttcttcaacagtttcagaccttgaagatgagaatatctgatcagaacatcattccctcagtaactaggtctgtgtccgtgccagatactggctctatctgggagcttcagccaacagcttcacagcctacagtttgggaaggtggtagtgtatgggatcttcctctggacaccacgacaccaggccctgccctggaacagcttcagcagctagagaaggccaaagctgcaaagctagagcaagagagaagagaggcagaaatgagggcaaaacgggaagaggaagagcgaaagaggcaggaagaactccgaagacaacaggaggaaattcttcggcgacagcaggaagaagaaaggaaaaggcgagaggaagaagaacttgcccgaaggaaacaggaagaggctctgcgtcgccagcgggagcaagaaattgcattaaggcgacagcgagaagaggaagaaagacagcagcaagaagaagctcttagaagactggaagagaggagaagagaagaggaagaaaggcggaagcaggaagaattgttacgcaaacaggaagaggaggctgcaaaatgggcccgggaagaagaagaagcccagcgtcgattagaggagaaccggctgcggatggaagaggaggcagccagactccggcatgaggaagaagaacggaagagaaaggagctggaggtccagcggcagaaggagttaatgcgccagaggcagcagcagcaagaggctctccggaggttgcagcagcagcagcagcaacaacagctggcgcagatgaagcttccttcttcttcaacgtggggccagcagtccaatacaacagcatgtcagtcccaggccacgctgtcgttggctgaaatccaaaaactagaggaagaacgagaacggcagcttcgagaagagcaaaggcgccagcagagggagttgatgaaagctcttcagcagcagcagcaacagcaacagcagaaactctcaggttgggggaatgtcagcaaaccttcaggtaccacgaaatctcttctggagatccagcaggaagaggccaggcaaatgcaaaagcagcagcagcagcagcagcaacaccagcaaccaaacagagctcgtaacaatacgcattccaacctgcacaccagcattgggaattctgtttggggctctataaatactggtcctcctaaccagtgggcatctgacctagtcagtagtatttggagtaatgctgacactaaaaactccaacatgggattctgggatgatgcagtgaaagaggtgggacctaggaattcaacaaataaaaataaaaacaacgccagtctcagtaaatctgtaggtgtgtctaaccggcagaataagaaagtagaagaagaagaaaagttgctgaagctctttcagggagtaaataaagcccaagatggatttacgcagtggtgtgaacagatgcttcatgcccttaatacggcaaataacttggatgttcccacatttgtttctttcctgaaagaagtagaatctccttatgaggtccatgattatatcagggcctatttaggagatacttctgaggccaaggagtttgccaagcagttccttgagcgccgtgccaaacagaaagccaaccagcagcgtcagcagcagcagctgccacagcagcagcagcagcagccgccacagcagccgccacagcagccacaacagcaggactctgtgtgggggatgaaccacagtacactccattcagtatttcagaccaatcaaagcaacaaccaacaatccaattttgaggctgtgcagagtggcaagaagaagaaaaagcagaagatggtccgagcagatcccagtttattaggattttcagtcaatgcatcatcggagcgactcaacatgggtgaaatcgagacgttggatgactactgagcacctgccagtggactggccatccctctcctgtctgccgactatggagtctccacctttggacacaacacttactcaccatttactctttatcactctgcaacaaatcacagaaccgatcatctcaggctttttcttctggccctttgtgtccaagattctttaatccatttttgttggtgaacatctcagactatagataagtggactggaccctgtgtcttgggggtggcagttgggattactccccaacaaggctgattttaggcagcatgtgttcactgtgctgtgatttcatctactgtctcccagaaagtgtgttgggatcggccattagcagcttgctttctcttgtcactttttttcttctattttgttttttcttcttctttttccccccatcagggcaaatggtctaactggtgcaatcatgaagagagttaatggttaacagacattggccaataacaaaacaccccatggactgtgactcgagtatccaacaggcagtcagagctctcccggtctgaaagttgcattgccactgctaactttgggattgcatcagagaggccctgagtggggttgagatgaggttggtttggtttgatgttacacactcctcacctgttctttctgagtgtcctttctctgaaaggatttatgtttttcttcgttagatagtgacttctgagcaagctgatctcccctggcatgctccaacctgattggacaaaggaagctctatggcctgggagagagactattcttaatttttctttcttacaaaaactgatttttcccataaatatttttacttcagaggactaggaccattttgttttgggcccttctgctgaaaatttgtctcgtttaagaggcagctagaatctttaccatatgtatgaatttgtataatttcatttttggatagggataaacttttgcttctgataaaagcctggaatttcatctggtcctcagagcattgcgtgtgtgtcttgctgtagcccggaaaaggttttgtgtaaagattctgggatggcaagttgtttgccttttctgaaaagagaacatacagaacctgtccatctttaagaccttcatccatggaatctactatacaggaggatgcagtgggctggaggggatgggcgaaaatgggagcaggaagcctggcctggcttctggtcatggcctcctaaaaccttaaacttcaagtagaaatgtactcaagccctatttataaacaaatacttttcctgcctccaccaaacccctacagaacatcacctggaattgccactcacactgggttggagtcattgggcagctgtgcctgtgcgagaggtgctgtggtctgggcagcccctggaaaagcacctttgctgcctgtcattgttgcctgaagaaggctggagttgctctgagagcagtttgggtttggagtattatatttggcttctatttttattattttggatcaccattctccctatcccttcttgcctccctcccttctaaacatgtgtaataactatacagagactgctacaaaattgtatatagtttttggatcaaatagcatgaggggagaggaaaccattaaaagttggggctcctactctcctttgctttgtaaattcaaaagttgggggtgggtaagagggatagttaaaatgtttacaaaactttaggctccctcggaacttttgccagtgtggaggaaaataaaaaagaacttaaataaaatctgattgtattcta

SEQ ID NO: 41228 - DNA, 2163 bp, Artificial Sequence
  derived and/or modified sequence
atggctgctgagacccagaccctgaactttggacctgagtggctgcgggccctgagcagcggcggcagcatcaccagcccccccctgagccctgccctgcccaagtacaagctggccgactaccgctatggccgggaggagatgctggccctcttcctgaaggacaacaagatccccagcgacctgctggacaaggagttcctgcccatcctgcaggaggagcccctgccccccctggccctggtgcccttcacagaggaggagcagaggaacttctccatgtctgtgaacagcgctgctgtgctgcggctgaccggccggggcggcggcggcaccgtggtgggcgccccccggggccgcagcagcagccggggccggggccggcccaactttgaggagggcggccccacctctgtgggcaggaagcatgagttcatccgctctgagagcgagaactggaggatcttccgggaggagcagaatggagaagatgaagatggcggctggaggctggccggcagcagaagagatggagagcgctggaggccccacagccctggctggagggagcacatggagaggagaagaagatttgaatttgacttccgggacagagatgatgagcggggctaccgccgggtgcgcagcggcagcggcagcattgatgatgaccgggacagcctgcctgagtggtgcctggaggatgctgaggaggagatgggcacctttgacagcagcggggccttcctgagcctgaagaaggtgcagaaggagcccatccctgaggagcaggagatggacttccggcctgtggatgaaggagaggagtgcagcgacagcgagggcagccacaatgaggaggccaaggagccagacaagaccaacaagaaggagggggagaagacagacagagtgggcgtggaggccagcgaggagaccccccagaccagcagcagcagcgcccggcccggcacccccagcgaccaccagagccaggaggccagccagtttgagaggaaggatgagcccaagacagagcagacagagaaggccgaggaggagaccaggatggagaacagcctgcctgccaaggtgcccagcagaggagatgagatggtggctgatgtgcagcagcccctgagccagatccccagcgacacagccagccccctgctgatcctgcccccacctgtgcccaaccccagccccaccctgcggcctgtggagacccctgtggtgggcgcccctggcatgggctctgtgtccacagagccagatgatgaggagggcctgaagcacctggagcagcaggccgagaagatggtggcctacctgcaggacagcgccctggatgatgagcggctggccagcaagctgcaggagcaccgggccaagggcgtgtccatccccctgatgcatgaggccatgcagaagtggtactacaaggacccccagggcgagatccagggccccttcaacaaccaggagatggccgagtggttccaggccggctacttcaccatgagcctgctggtgaagagggcctgtgatgagagcttccagcccctgggggacatcatgaagatgtggggccgggtgcccttcagccctggccctgcccccccaccccacatgggagagctggaccaggagcggctgacccggcagcaggagctgacagccctgtaccagatgcagcacctgcagtaccagcagttcctgatccagcagcagtatgcccaggtgctggcccagcagcagaaggccgccctgagcagccagcagcagcagcagctggccctgctgctgcagcagttccagaccctgaagatgaggatcagtgaccagaacatcatccccagcgtgaccaggtctgtgtctgtgcctgacaccggcagcatctgggagctgcagcccacagccagccagcccaccgtgtgggagggcggctctgtgtgggacctgcccctggacaccaccaccccaggccctgccctggagcagctgcagcagctggagaaggccaaggccgccaagctggagcaggagcggcgggaggccgagatgagggccaagcgggaggaggaggagaggaagaggcaggaggagctgcggcggcagcaggaggagatcctgcggcggcagcaggaggaggagaggtag

SEQ ID NO: 41229 - DNA, 282 bp, Artificial Sequence
  derived and/or modified sequence
atggctgctgagacccagaccctgaactttggacctgagtggctgcgggccctgagcagcggcggcagcatcaccagcccccccctgagccctgccctgcccaagtacaagctggccgactaccgctatggccgggaggagatgctggccctcttcctgaaggacaacaagatccccagcgacctgctggacaaggagttcctgcccatcctgcaggaggagcccctgccccccctggccctggtgcccttcacagaggaggagcagaggaacttctcctag

SEQ ID NO: 41230 - DNA, 303 bp, Artificial Sequence
  derived and/or modified sequence
atggctgctgagacccagaccctgaactttggacctgagtggctgcgggccctgagcagcggcggcagcatcaccagcccccccctgagccctgccctgcccaagtacaagctggccgactaccgctatggccgggaggagatgctggccctcttcctgaaggacaacaagatccccagcgacctgctggacaaggagttcctgcccatcctgcaggaggagcccctgccccccctggccctggtgcccttcacagaggaggagcagaggaacttctccatgtctgtgaacagcgctgcctag

SEQ ID NO: 41231 - DNA, 348 bp, Artificial Sequence
  derived and/or modified sequence
atggctgctgagacccagaccctgaactttggacctgagtggctgcgggccctgagcagcggcggcagcatcaccagcccccccctgagccctgccctgcccaagtacaagctggccgactaccgctatggccgggaggagatgctggccctcttcctgaaggacaacaagatccccagcgacctgctggacaaggagttcctgcccatcctgcaggaggagcccctgccccccctggccctggtgcccttcacagaggaggagcagaggaacttctccatgtctgtgaacagcgctgctgtgctgcggctgaccggccggggcggcggcggcaccgtggtgggctag

SEQ ID NO: 41232 - DNA, 321 bp, Artificial Sequence
  derived and/or modified sequence
atggctgctgagacccagaccctgaactttggacctgagtggctgcgggccctgagcagcggcggcagcatcaccagcccccccctgagccctgccctgcccaagtacaagctggccgactaccgctatggccgggaggagatgctggccctcttcctgaaggacaacaagatccccagcgacctgctggacaaggagttcctgcccatcctgcaggaggagcccctgccccccctggccctggtgcccttcacagaggaggagcagaggaacttctccatgtctgtgaacagcgctgctgtgctgcggctgactggatag

SEQ ID NO: 41233 - DNA, 342 bp, Artificial Sequence
  derived and/or modified sequence
atggctgctgagacccagaccctgaactttggacctgagtggctgcgggccctgagcagcggcggcagcatcaccagcccccccctgagccctgccctgcccaagtacaagctggccgactaccgctatggccgggaggagatgctggccctcttcctgaaggacaacaagatccccagcgacctgctggacaaggagttcctgcccatcctgcaggaggagcccctgccccccctggccctggtgcccttcacagaggaggagcagaggaacttctccatgtctgtgaacagcgctgctgtgctgcggctgaccggccggggcggcggcggcaccgtgtag

SEQ ID NO: 41234 - DNA, 3882 bp, Artificial Sequence
  derived and/or modified sequence
atggctgctgagacccagaccctgaactttggacctgagtggctgcgggccctgagcagcggcggcagcatcaccagcccccccctgagccctgccctgcccaagtacaagctggccgactaccgctatggccgggaggagatgctggccctcttcctgaaggacaacaagatccccagcgacctgctggacaaggagttcctgcccatcctgcaggaggagcccctgccccccctggccctggtgcccttcacagaggaggagcagaggaacttctccatgtctgtgaacagcgctgctgtgctgcggctgaccggccggggcggcggcggcaccgtggtgggcgccccccggggccgcagcagcagccggggccggggccggggccgcggggagtgtggcttctaccagaggagctttgatgaggtggagggcgtgtttggccggggcggcggccgggagatgcacaggagccagagctgggaggagcggggggacagaagatttgagaagccaggcaggaaggatgtgggccggcccaactttgaggagggcggccccacctctgtgggcaggaagcatgagttcatccgctctgagagcgagaactggaggatcttccgggaggagcagaatggagaagatgaagatggcggctggaggctggccggcagcagaagagatggagagcgctggaggccccacagccctggctggagggagcacatggagaggagaagaagatttgaatttgacttccgggacagagatgatgagcggggctacagaagagtgcgcagcggcagcggcagcattgatgatgaccgggacagcctgcctgagtggtgcctggaggatgctgaggaggagatgggcacctttgacagcagcggggccttcctgagcctgaagaaggtgcagaaggagcccatccctgaggagcaggagatggacttccggcctgtggatgaaggagaagaatgtagtgacagcgagggcagccacaatgaggaggccaaggagccagacaagaccaacaagaaggagggggagaagacagacagagtgggcgtggaggccagcgaggagaccccccagaccagcagcagcagcgcccggcccggcacccccagcgaccaccagagccaggaggccagccagtttgagaggaaggatgagcccaagacagagcagacagagaaggccgaggaggagaccaggatggagaacagcctgcctgccaaggtgcccagcagaggagatgagatggtggctgatgtgcagcagcccctgagccagatccccagcgacacagccagccccctgctgatcctgcccccacctgtgcccaaccccagccccaccctgcggcctgtggagacccctgtggtgggcgcccctggcatgggctctgtgtccacagagccagatgatgaggagggcctgaagcacctggagcagcaggccgagaagatggtggcctacctgcaggacagcgccctggatgatgagcggctggccagcaagctgcaggagcaccgggccaagggcgtgtccatccccctgatgcatgaggccatgcagaagtggtactacaaggacccccagggcgagatccagggccccttcaacaaccaggagatggccgagtggttccaggccggctacttcaccatgagcctgctggtgaagagggcctgtgatgagagcttccagcccctgggggacatcatgaagatgtggggccgggtgcccttcagccctggccctgcccccccaccccacatgggagagctggaccaggagcggctgacccggcagcaggagctgacagccctgtaccagatgcagcacctgcagtaccagcagttcctgatccagcagcagtatgcccaggtgctggcccagcagcagaaggccgccctgagcagccagcagcagcagcagctggccctgctgctgcagcagttccagaccctgaagatgaggatcagtgaccagaacatcatccccagcgtgaccaggtctgtgtctgtgcctgacaccggcagcatctgggagctgcagcccacagccagccagcccaccgtgtgggagggcggctctgtgtgggacctgcccctggacaccaccaccccaggccctgccctggagcagctgcagcagctggagaaggccaaggccgccaagctggagcaggagcggcgggaggccgagatgagggccaagcgggaggaggaggagaggaagaggcaggaggagctgcggcggcagcaggaggagatcctgcggcggcagcaggaggaggagaggaagagaagagaggaggaggagctggcccggaggaagcaggaggaggccctgcggcggcagcgggagcaggagatcgccctgcggcggcagcgggaggaggaggagcggcagcagcaggaggaggccctgcggcggctggaggagaggagaagagaggaggaggagaggaggaagcaggaggagctgctgaggaagcaggaggaggaggccgccaagtgggcccgggaggaggaggaggcccagaggcggctggaggagaaccggctgaggatggaggaggaggccgcccggctgcggcatgaggaggaggagaggaagaggaaggagctggaggtgcagaggcagaaggagctgatgaggcagaggcagcagcagcaggaggccctgcggcggctgcagcagcagcagcagcagcagcagctggcccagatgaagctgcccagcagcagcacctggggccagcagagcaacaccacagcctgccagagccaggccaccctgagcctggccgagatccagaagctggaggaggagcgggagcggcagctgcgggaggagcagaggcggcagcagcgggagctgatgaaggccctgcagcagcagcagcagcagcagcagcagaagctgagcggctggggcaatgtgtccaagcccagcggcaccaccaagagcctgctggagatccagcaggaggaggcccggcagatgcagaagcagcagcagcagcagcagcagcaccagcagcccaacagagccaggaacaacacccacagcaacctgcacaccagcatcggcaacagcgtgtggggcagcatcaacacaggcccccccaaccagtgggccagtgacctggtgagcagcatctggagcaatgctgacaccaagaacagcaacatgggcttctgggatgatgctgtgaaggaggtgggccccaggaacagcaccaacaagaacaagaacaatgccagcctgagcaagtctgtgggcgtgagcaaccggcagaacaagaaggtggaggaggaggagaagctgctgaagctgttccagggcgtgaacaaggcccaggacggcttcacccagtggtgtgagcagatgctgcacgccctgaacacagccaacaacctggatgtgcccacctttgtgtccttcctgaaggaggtggagagcccctatgaggtgcatgactacatccgggcctacctgggggacaccagcgaggccaaggagtttgccaagcagttcctggagcggcgggccaagcagaaggccaaccagcagaggcagcagcagcagctgccccagcagcagcagcagcagcccccccagcagcccccccagcagccccagcagcaggacagcgtgtggggcatgaaccacagcaccctgcacagcgtcttccagaccaaccagagcaacaaccagcagagcaactttgaagctgtgcagagcggcaagaagaagaagaagcagaagatggtgcgggctgaccccagcctgctgggcttctctgtgaatgccagcagcgagcggctgaacatgggagaaattgagaccctggatgactactag

SEQ ID NO: 41235 - DNA, 2163 bp, Artificial Sequence
  derived and/or modified sequence
atggccgccgagacccagaccctgaacttcggccccgagtggctgagggctctgtcaagcggggggtctattacttcacctccactgagtccagcactgcccaagtataaattagcagattatcgttacggacgcgaagaaatgttagccttgttcctgaaagacaataaaatcccatccgaccttctcgacaaggaatttttacctatattacaggaggagccactgcccccacttgcgctggtgccatttaccgaggaagagcaacgcaatttttcaatgagcgttaactctgcagccgtgttgagactgactggccgaggagggggcggaacagtcgttggagctcccagaggtcgctcctcaagccgaggccgaggcaggcccaatttcgaagaaggagggcccacctccgtgggtcgtaagcatgagttcataagatcagaaagcgaaaattggagaattttcagagaagagcaaaatggcgaggacgaagatggtggatggaggctggcggggtccaggagggatggcgaacggtggcggcctcattccccaggctggcgggagcatatggagcgtcggaggagattcgaattcgacttcagggacagggatgatgagagaggctataggcgggtacggagcggcagcgggtcaatcgatgacgatcgggattccctgcctgagtggtgtctcgaggatgccgaggaagagatgggcacgtttgacagtagtggcgcgttcctcagtctgaaaaaagttcagaaagagcctattcccgaagaacaagaaatggatttccgcccagtagatgagggggaagagtgttctgattctgagggctcccacaatgaggaggctaaagaaccagacaagacaaacaaaaaagagggggagaagaccgatcgggtgggcgtggaagcgtctgaggaaaccccacaaacttcttcctctagcgcacgacctggtacacccagtgatcatcagtcacaagaagcgagccagtttgaaaggaaggatgaacccaaaactgaacagactgaaaaagctgaggaggagactaggatggagaactcattgccagctaaagtgccttctaggggcgacgagatggtggcagacgtgcagcagcccctcagccagattccctcagacacggcatcgccgctgctgatcctgccaccgccagtgccaaatccctcccccactctgaggcccgtggagactcctgtcgtcggagcgcctgggatgggatccgtttccacggagcccgacgatgaggaaggtcttaagcaccttgagcagcaagcggaaaagatggtggcctacttgcaggactctgcccttgatgacgaacgcctagcctcgaaactgcaagagcaccgcgcaaagggagtctcgattcctctaatgcacgaggctatgcaaaagtggtactacaaggacccccaaggcgagatacaaggcccctttaacaaccaggagatggccgagtggttccaggccgggtactttacaatgtccctgctggttaaacgggcttgtgatgagtccttccaacctctgggtgatattatgaaaatgtggggcagagtgcccttttctccaggacccgccccaccacctcacatgggggagctggatcaggagagactgactcgccagcaggagctgacagctctctatcaaatgcaacacctccagtaccagcagttcctgattcaacaacagtatgcccaagtgcttgcccaacaacaaaaggccgcattgtctagccagcagcagcagcagttagccctgctgcttcagcagttccagaccctgaagatgagaataagtgatcagaatataattccatctgtgacaaggtctgtgtccgtgccagacaccgggtcgatttgggagttacagccaacggccagccaaccaaccgtttgggaggggggaagcgtgtgggatttaccactggataccaccacacccggaccagccctggaacagctccagcagttggagaaggccaaagcagccaaactcgaacaggagcgtagggaggccgagatgagagctaagcgcgaagaagaagagcgcaagcggcaggaggagctcaggagacaacaggaagaaatcctgcgcagacagcaggaagaggaaagatag

SEQ ID NO: 41236 - DNA, 282 bp, Artificial Sequence
  derived and/or modified sequence
atggccgccgagacccagaccctgaacttcggccccgagtggctgcgcgccctgtcctccggcggctcgataacctccccgcccctgagccctgctttgccaaagtataagctagctgattacagatatggccgggaggaaatgctcgccctcttcctgaaagacaataagatacctagcgatctgttagataaggaattcctgcctattcttcaggaagaacctctcccaccactggccctggtgcccttcacagaggaagagcagaggaatttttcatag

SEQ ID NO: 41237 - DNA, 303 bp, Artificial Sequence
  derived and/or modified sequence
atggccgccgagacccagaccctgaacttcggccccgagtggctgcgagccttaagctccggtggctcaattacatccccacccttatcccccgccctgcctaagtataagctagctgactatcgttatggccgggaggagatgctagccctgttcctgaaggacaataaaatccccagtgatctgctggataaggagtttctcccaatcctgcaggaggaaccgcttccacccctggctcttgttccatttactgaggaagaacagcggaacttctctatgtcagttaacagcgccgcatag

SEQ ID NO: 41238 - DNA, 348 bp, Artificial Sequence
  derived and/or modified sequence
atggccgccgagacccagaccctgaacttcggccccgagtggctgagagctctctcctccggtggatcaatcacaagcccaccgctgtctcctgcgctgcccaagtacaagctggctgattaccggtatggaagagaggagatgctcgccctgtttcttaaggataacaagatcccaagcgaccttctcgataaagaatttttgcccatcctacaggaggaaccgttaccgccgcttgctttagtaccttttacagaagaggaacagagaaactttagtatgagcgtgaattccgcagcagtccttaggctgactggccggggtggagggggaaccgtggtcgggtag

SEQ ID NO: 41239 - DNA, 321 bp, Artificial Sequence
  derived and/or modified sequence
atggccgccgagacccagaccctgaacttcggccccgagtggctgcgagctttgtccagcggaggatccattacctcccccccgctctcccctgctttgcctaagtataaattggcggattatcggtacggacgggaggaaatgctggcgctcttcttgaaggataataaaatccctagcgatctgttggacaaggagttcctgcctatcttgcaagaagagcctttaccacccctggccctggtgcccttcaccgaagaagagcagcggaattttagtatgtcggtgaattccgccgccgtactcagactaaccggctag

SEQ ID NO: 41240 - DNA, 342 bp, Artificial Sequence
  derived and/or modified sequence
atggccgccgagacccagaccctgaacttcggccccgagtggctgagagccctgtcatccggggggtccataacaagcccccctctgtctcccgccttacctaagtataagttggcagattacaggtacggacgggaggaaatgttggccctgtttttaaaagacaataaaattccgagtgacttgttggataaggaattcttgcctatcctacaggaagaaccacttccgccattggccctggtgccttttactgaggaggagcagcggaatttcagtatgtctgttaatagcgctgccgtgttgcgcctgaccggtcgcggcggcggcgggaccgtttag

SEQ ID NO: 41241 - DNA, 3882 bp, Artificial Sequence
  derived and/or modified sequence
atggccgccgagacccagaccctgaacttcggccccgagtggctgcgtgcattgtcctctggtggatctataacctcgcccccgctcagccctgccctccctaagtataagttggctgattatcgctacggtcgggaagagatgctggctctgttcctaaaagataataagattccttctgatctcttagataaggaattcctcccaatcctacaagaagaacctctgccgcctctcgcgctggtcccctttaccgaagaagagcagcgcaactttagcatgtctgtcaactctgccgccgtcctgcgactgactggccggggagggggcggaaccgtagtcggggctcctagaggacgaagttcttcccgcggtcggggccgaggacggggagaatgcggtttctaccagaggtcctttgatgaagttgagggagtgttcggacggggagggggtcgggaaatgcacagatcgcagagctgggaggagagaggggacagacgctttgaaaaacctggtaggaaagatgtcgggaggccaaactttgaggaaggcggcccaacgtcagttggaagaaaacacgagttcattaggtccgaatccgaaaattggcgtatcttccgagaggaacaaaacggagaagacgaggacgggggatggagactggcaggatcaaggcgggatggcgagcgttggagaccccactctcccgggtggcgcgagcacatggagcggaggagaagattcgagttcgactttcgtgaccgggatgatgagcgcggttacagaagggttcgctccggatctggcagcattgatgacgaccgggatagcctcccagaatggtgcctcgaggacgccgaagaggaaatgggtacgtttgactcatcgggcgcctttctttccctcaagaaggtccagaaagagcccattcccgaagaacaggagatggatttcagacccgtagacgagggagaagaatgtagtgactccgaaggttcccacaatgaggaggcgaaggagcccgataagactaataagaaggagggagagaagaccgacagggtgggggtggaagccagtgaagagacgccccagacttcctcctctagcgctcggccagggacgccttctgatcaccagtcccaagaagctagccagtttgagagaaaagacgaaccaaaaacagaacagacagagaaggctgaagaagagactcgcatggagaatagccttccagccaaggttccttctagaggagatgagatggtggccgatgtccagcagccgctttctcagattcccagcgataccgcatctccactgctgattctgccaccgccagtccctaaccccagcccaaccctgagaccagttgagactcccgttgtaggggcacctggcatgggctctgtttcaaccgagcccgacgacgaggagggcctgaaacacttggaacaacaggctgagaaaatggtggcatatctgcaagatagtgccttagacgatgagcgcctggcctcaaagttgcaggaacacagagccaagggggttagcattcccctgatgcatgaagccatgcaaaaatggtactataaggacccccaaggagagattcagggcccattcaacaaccaggagatggctgagtggttccaggcagggtattttacaatgtcactcctggtcaagagggcctgcgatgagtcctttcagcctctgggagatattatgaagatgtggggccgtgttccattctccccaggccccgcaccccctcctcacatgggcgagctggatcaagagagacttacccggcagcaggagctgacggccctttaccagatgcagcacctccagtaccagcagttccttattcagcaacagtacgctcaggtgctggcgcagcaacagaaagcagccttgtccagccagcaacaacagcagctggctttgttgctgcagcagtttcagacactgaagatgcggatatcagaccagaacattatcccgtcagtgacccggagcgtctccgtgcccgacacggggtctatctgggaacttcagcctactgcctcccagccaacggtgtgggaagggggttccgtgtgggaccttcccctcgataccacgactccaggacccgccctggagcaactgcagcagctggaaaaagccaaggccgccaagcttgagcaggaaaggagggaagcagagatgcgcgctaaaagggaggaggaggaacggaagcgccaagaggagttaagaaggcagcaggaagagattctgagaagacagcaggaggaagaaaggaaacggcgcgaagaggaggagttagctcgtagaaagcaggaagaagcattgaggcggcagcgcgagcaggagattgctctgaggcgacaacgcgaggaggaggaaaggcagcagcaggaagaggcactgcgacgactagaggagcggagacgcgaggaagaggagcggagaaagcaggaggagctcttgagaaagcaagaagaggaggccgcaaagtgggcgcgagaagaagaggaagctcagagaagacttgaagaaaatcgccttagaatggaagaagaggcagcacggctgcggcacgaagaggaggagcgtaaacgcaaagaattggaagtccagaggcagaaggagctcatgcgacagcggcagcagcagcaggaggcgctacgaaggctccagcagcagcagcaacagcagcagctggcccagatgaaactgccctcctcatccacttggggccagcagtccaatactacagcgtgtcagagccaggctaccctgagtctggcggaaatacagaagctcgaggaggaacgtgagcgccaactgcgagaggaacagaggcgccagcagagagagctaatgaaagccttgcagcaacagcaacagcagcagcagcagaaactcagtggctggggcaacgtgtcaaaaccatctggtactacaaagtccctgctggagatacagcaggaagaagcccgtcagatgcagaagcaacagcagcagcagcagcaacaccagcagccaaatcgcgcccgcaacaatactcacagcaatttacacacatccatagggaactctgtttgggggagtatcaacaccgggccccctaatcagtgggcctctgatctggtgtcaagcatttggtcgaatgccgacaccaagaactccaacatgggattctgggacgatgcagttaaagaggtgggccccagaaactccaccaataagaacaaaaataatgcctccttgtccaagtcggtcggcgtgtccaatcgtcagaataagaaagtggaggaagaggagaagctgcttaaacttttccagggcgtgaacaaggcgcaggatggattcacacagtggtgtgagcagatgttgcacgcccttaatactgcaaacaatctggacgtgcctacttttgttagctttctcaaggaggttgaatctccatatgaggtgcacgactacataagggcatatctgggggatacttcagaggctaaagaatttgccaagcagtttttggagaggagggctaagcagaaggccaatcagcagcggcagcagcagcagcttccacagcagcaacagcagcagcccccgcagcagcctcctcaacagcctcagcaacaggattcagtttgggggatgaatcacagtactctgcattccgtgttccaaacaaatcaatccaacaaccagcagtccaacttcgaagcagtgcagtcgggaaagaaaaagaaaaaacagaaaatggtgagggcagatcccagccttttagggttctcagtgaatgcctccagcgaacgccttaatatgggggaaatcgagacgctggacgactattag

SEQ ID NO: 41242 - DNA, 2163 bp, Artificial Sequence
  derived and/or modified sequence
atggccgcagaaactcagaccctcaactttggaccagagtggctgagggccctgagctctggaggctctatcacgtctccaccattgtcacccgcactccctaaatacaagctggctgactatcgctatgggcgagaggagatgctggccttgttcctcaaggataacaagataccatccgatctcttggataaagagttcctgccaatactgcaggaggagccactaccaccactcgccttggttccattcactgaggaggagcagcgaaatttctctatgagcgtgaactcggcagccgtactcaggctgaccggccgtggaggcggaggaacagtggtcggggcaccgaggggtcggtcgtccagccggggacgcggtcggcctaatttcgaagaggggggtccgactagtgtgggacgcaaacatgagtttatccgtagtgagagtgaaaactggcgaatcttcagggaagaacaaaacggggaagacgaggatggagggtggcggttggccggttctagaagggacggcgagaggtggaggcctcatagcccagggtggcgggaacacatggaacggcgtcggagattcgaatttgatttccgggatagagacgacgaacgcggataccgaagggtcagatccgggagtggaagcatcgacgacgacagggacagcctgccagagtggtgtttagaggacgctgaggaagaaatgggcacattcgatagctcaggtgcttttttatccctgaaaaaggtccagaaagaaccaattcccgaagaacaggaaatggattttaggccagtcgacgaaggagaggagtgcagtgatagcgagggtagccacaacgaggaggcaaaggagcctgataagaccaataagaaggaaggtgaaaagacagacagagtcggcgtcgaggccagcgaagaaacccctcagacttctagttcttctgctcgcccaggtacgccctcagatcatcagagccaggaagcttcccagtttgaacgcaaggatgaacccaaaactgaacagacggaaaaagcagaagaagagaccagaatggagaacagcctgcccgctaaggtgcctagcaggggagacgagatggtggctgatgttcagcaacctttatcccagattcccagcgacacagcctcccctctgctgatcttacctccccctgtccccaatccaagccctaccctgaggccagtcgagactccagtggtgggcgctcccggaatggggtcggtttccactgaaccggacgatgaggaaggcttaaaacatttggaacaacaggcagagaaaatggtggcatatttgcaagattcggccttggatgacgaaagacttgcctcaaaactgcaggaacaccgggctaaaggggtctcgatccccctgatgcacgaagccatgcaaaaatggtattacaaagaccctcagggtgagatccaagggccattcaacaaccaggagatggcggagtggttccaagcaggctacttcactatgtcactgttggtgaaacgagcctgtgatgagagtttccaacccctcggagacatcatgaagatgtgggggagagtcccctttagccccggaccagcaccgcctccgcatatgggcgagctggaccaggagagactgactagacagcaagagctaacagccctgtatcagatgcagcacttacaataccagcagtttctcatacagcagcagtacgcacaagtgctggcccagcaacagaaggctgcactgagttcacaacaacagcagcagctagcattgcttctccaacagttccagaccctgaagatgcgcatctctgatcagaatatcattccttctgttaccaggagcgtgagcgtccccgacaccgggtcaatctgggagctacagccaacagccagccagcccacagtctgggaaggaggttcagtgtgggatctccccctggatactaccactcctggccctgcactggagcagctgcagcaactggagaaggccaaggccgctaaattagaacaggaacggagagaggcagaaatgcgtgcaaagagggaggaagaggagcgaaagaggcaagaagagctccgtaggcagcaggaagaaatcttaaggcgccagcaggaggaggaaaggtag

SEQ ID NO: 41243 - DNA, 282 bp, Artificial Sequence
  derived and/or modified sequence
atggcagctgagactcagacactgaacttcggacccgaatggttgagggccctgtcatccgggggatcgattactagtccacccctgagccccgcactccctaagtataagctggctgattaccgctatgggagagaggagatgttggctcttttccttaaggataacaaaattccatcagatttactcgataaggagttcctgccaatacttcaagaggagccattgccccctcttgccctggtcccctttacagaagaagaacagaggaactttagctag

SEQ ID NO: 41244 - DNA, 303 bp, Artificial Sequence
  derived and/or modified sequence
atggccgcagagactcagaccctgaactttggccctgagtggctgcgcgctttgtcatcaggcggatcaatcacctccccgccattgagccccgcactcccaaagtacaagcttgccgattatcgctacggaagagaagagatgctagcactttttctgaaggataataaaatccctagcgatctgctggataaggagttcctgcccattctacaggaagagccattaccgcctctggccctggttccatttacagaggaagaacagaggaatttcagtatgagcgtgaactcagctgcttag

SEQ ID NO: 41245 - DNA, 348 bp, Artificial Sequence
  derived and/or modified sequence
atggcggctgaaacccagacactgaattttgggccagagtggcttagggccctctcatctgggggaagcattacaagtcctccgctttcacctgccttgcccaagtacaaactagctgattatcgatatggaagagaggagatgctggccctatttctgaaggacaacaagatacccagcgatctcctcgataaagaatttctccctatcctgcaggaagaaccacttcctccactggcactggttccatttacggaggaggagcagcgcaacttcagcatgtcagtcaattccgcggcagtattacggttaacgggtagaggcggaggcggaaccgtcgtgggctag

SEQ ID NO: 41246 - DNA, 321 bp, Artificial Sequence
  derived and/or modified sequence
atggctgccgagacccagactttaaacttcgggccagaatggctgcgagccctgtcctctgggggatccataacgtctcctcccctctccccagctctgccaaaatacaagctcgccgattatagatatggccgtgaggaaatgctggcactgttcctaaaagataataagattcccagcgacctcctggacaaggaatttctacccatcctgcaagaggagcccctgcctcccctggcgctagtaccctttaccgaggaagaacagcggaatttctctatgagcgtcaattcagcagccgtgctgagattgaccggatag

SEQ ID NO: 41247 - DNA, 342 bp, Artificial Sequence
  derived and/or modified sequence
atggcagccgagacgcagacattgaactttggcccagagtggctgcgggctttatcatcgggcggatcgatcaccagcccccctctctctcctgcccttcctaagtacaaattggccgattaccgttatggcagggaggagatgcttgccttgtttctaaaagataacaaaatacccagtgatctgctggacaaggagttcctgccaatcctgcaggaagagcccttgccacccctggcgctcgtgcccttcaccgaagaagaacagcggaacttctcaatgagtgtgaattccgcggcagtgttgcgtctcactggtcggggagggggaggcaccgtgtag

SEQ ID NO: 41248 - DNA, 3882 bp, Artificial Sequence
  derived and/or modified sequence
atggccgctgagacgcagactcttaactttggtcccgaatggttgagggccctaagcagcggaggcagtattacctcacctccactgagccctgccctgcccaaatacaaactcgccgactatagatacgggagggaggaaatgcttgccctcttcttaaaagacaacaagatcccgagcgatttgctggataaggaattcctccctatattacaggaggagcctctccccccattagcactcgtgcccttcaccgaggaagagcagagaaactttagtatgtccgtgaactcagctgccgtgttacgactgacgggcaggggagggggaggtacagttgtgggagcccctcgaggtcgatcatcgagtagggggaggggacgaggacggggagagtgcggattctaccagagatctttcgacgaagttgagggagtctttggaagaggcggaggtcgggagatgcacaggagccagagttgggaggagaggggtgatcgaaggtttgaaaagcctgggagaaaggatgtcggccgacccaatttcgaggaggggggtccgaccagtgtcggcagaaagcatgagttcattcggagtgagagtgaaaattggcgcatatttagggaggaacagaatggcgaggacgaagacggtgggtggcgcctggccggttcaaggcgggacggagagaggtggaggccacattcccccggttggcgggagcatatggaaagacggagaagattcgagtttgactttagggacagggatgatgagagagggtataggcgggttcgctccggctctggatctatcgatgacgatcgcgattccttgcctgagtggtgcttggaagatgccgaggaggaaatgggcacgtttgatagctccggggcttttctgagcctcaaaaaggtgcagaaggagccaatcccagaggaacaggaaatggatttccgccctgtggacgagggggaggagtgctcagatagtgaaggttcccataatgaggaagccaaagaacccgacaagacgaacaaaaaagaaggtgagaaaactgaccgcgtgggagtggaagcctccgaggagacaccgcagactagctcctcaagtgccaggcccggaactccaagtgatcaccaatcacaagaagccagccagttcgagcggaaggatgaacctaagaccgagcagaccgaaaaagccgaggaagagacacgaatggagaactcccttccggctaaagtgccctcacgcggagacgagatggtggccgatgtgcagcaacccttgtcacagattccttccgacacagcttccccgttgctcattttgcccccaccagttccaaatcccagcccaacacttcgccctgttgagacccctgtggtgggggcacccggtatgggctccgtgagcaccgagccagacgatgaggagggccttaaacacctggagcaacaggcagagaagatggtggcctatctacaggactctgcccttgacgacgaaagactcgcctcaaaattacaggagcatcgagctaagggcgtctccattccattaatgcacgaggcgatgcagaaatggtactataaggatccacagggagagatccagggacccttcaacaatcaggaaatggccgaatggttccaagccggatattttaccatgagcctgctggttaagagagcctgcgacgagagcttccagccccttggggacatcatgaagatgtggggcagagtgcctttctctcccggacccgctccacctccgcatatgggggaactcgatcaggaacgattgacacgccaacaagagctaacagcactgtaccagatgcagcatctccaataccagcaattcctcatacagcagcaatatgctcaagtgctggctcagcaacagaaggccgctttatcttctcagcagcaacagcagctggcgctgttactgcagcagtttcagacactgaaaatgcggatttccgatcagaacatcatcccgagtgtgacccggtcagtgtccgtgcccgacaccgggtcaatttgggaactgcaacccacggcttctcagcctacagtgtgggagggcggttccgtgtgggatcttccgctggacacgactacacccggtccagcccttgagcagttgcagcagctggagaaagccaaagcggcaaaactcgaacaggagagaagagaggcagagatgcgagccaaaagagaagaagaagagcggaagaggcaggaggaactccggaggcagcaggaggaaatcttgcgcagacagcaggaagaagagcggaagcggcgagaagaggaagagctagccaggaggaaacaggaggaggccttacgccgtcagagggaacaggaaatcgctctgagaagacagcgggaggaagaagaacgacaacagcaggaagaggcacttcgcagactggaggagagacggagggaagaggaggagaggcgcaagcaagaggaacttcttaggaaacaggaggaagaggccgctaagtgggcacgcgaggaggaagaggcccagcgcaggctcgaggagaataggctgcggatggaggaggaagccgcaagactccgacacgaggaggaggagcgaaaacggaaggaactggaggtacagcggcagaaagaactgatgcgacagagacaacaacagcaggaggccttgcgccgtctccagcaacagcaacaacagcaacagttggctcagatgaagctgccaagcagctctacatgggggcagcaaagtaatacgaccgcgtgccagtcccaggctacactgagtctggccgaaattcaaaagctggaggaagaacgcgagaggcaactgcgcgaagaacagcggaggcagcagcgcgagttaatgaaggccctgcaacagcagcagcaacagcagcagcagaagttgtcaggctgggggaacgtttctaagcctagcggtactaccaaatctctgctggagattcagcaggaagaagccaggcaaatgcagaaacagcaacagcagcagcagcagcatcaacagcctaaccgcgctcgtaacaatacgcatagcaacttgcataccagcatcggcaacagcgtctggggatctattaacactggccctccaaatcagtgggccagcgatctggtaagctcgatttggtccaatgccgacacaaaaaattcaaacatgggattctgggatgacgctgtgaaggaagttggcccacggaactcaacaaacaagaacaaaaataacgcgtccctgtctaagtctgtgggagtctctaacagacagaacaagaaagtcgaagaagaagaaaagctgttgaaactgtttcagggcgtcaataaagcccaggatggattcacacaatggtgcgaacaaatgctgcacgcactcaacacagcaaacaacctggacgtgccgacttttgtgtctttcctcaaagaggtcgagagtccatatgaagtgcacgactacattcgcgcatatcttggtgacacctccgaagccaaggagtttgccaaacaatttctcgaaaggagggctaagcagaaggccaatcagcaacggcagcaacaacagctgccacaacagcagcagcagcagccacctcaacagccacctcagcaacctcagcagcaagacagtgtttggggtatgaaccattcgaccctccactcagtcttccagaccaatcagtctaataaccagcagagcaacttcgaggccgtgcagtcaggaaagaaaaagaagaagcaaaaaatggtgcgagccgacccttccctgctcggcttttctgtcaacgcctcttcagagcggcttaacatgggagaaattgagacactggatgactattag

SEQ ID NO: 41249 - DNA, 2163 bp, Artificial Sequence
  derived and/or modified sequence
atggccgccgagacccagaccctgaacttcggccccgagtggctgagagccctgagcagcggcggcagcatcaccagcccccccctgagccccgccctgcccaagtacaagctggccgactacagatacggcagagaggagatgctggccctgttcctgaaggacaacaagatccccagcgacctgctggacaaggagttcctgcccatcctgcaggaggagcccctgccccccctggccctggtgcccttcaccgaggaggagcagagaaacttcagcatgagcgtgaacagcgccgccgtgctgagactgaccggcagaggcggcggcggcaccgtggtgggcgcccccagaggcagaagcagcagcagaggcagaggcagacccaacttcgaggagggcggccccaccagcgtgggcagaaagcacgagttcatcagaagcgagagcgagaactggagaatcttcagagaggagcagaacggcgaggacgaggacggcggctggagactggccggcagcagaagagacggcgagagatggagaccccacagccccggctggagagagcacatggagagaagaagaagattcgagttcgacttcagagacagagacgacgagagaggctacagaagagtgagaagcggcagcggcagcatcgacgacgacagagacagcctgcccgagtggtgcctggaggacgccgaggaggagatgggcaccttcgacagcagcggcgccttcctgagcctgaagaaggtgcagaaggagcccatccccgaggagcaggagatggacttcagacccgtggacgagggcgaggagtgcagcgacagcgagggcagccacaacgaggaggccaaggagcccgacaagaccaacaagaaggagggcgagaagaccgacagagtgggcgtggaggccagcgaggagaccccccagaccagcagcagcagcgccagacccggcacccccagcgaccaccagagccaggaggccagccagttcgagagaaaggacgagcccaagaccgagcagaccgagaaggccgaggaggagaccagaatggagaacagcctgcccgccaaggtgcccagcagaggcgacgagatggtggccgacgtgcagcagcccctgagccagatccccagcgacaccgccagccccctgctgatcctgcccccccccgtgcccaaccccagccccaccctgagacccgtggagacccccgtggtgggcgcccccggcatgggcagcgtgagcaccgagcccgacgacgaggagggcctgaagcacctggagcagcaggccgagaagatggtggcctacctgcaggacagcgccctggacgacgagagactggccagcaagctgcaggagcacagagccaagggcgtgagcatccccctgatgcacgaggccatgcagaagtggtactacaaggacccccagggcgagatccagggccccttcaacaaccaggagatggccgagtggttccaggccggctacttcaccatgagcctgctggtgaagagagcctgcgacgagagcttccagcccctgggcgacatcatgaagatgtggggcagagtgcccttcagccccggccccgccccccccccccacatgggcgagctggaccaggagagactgaccagacagcaggagctgaccgccctgtaccagatgcagcacctgcagtaccagcagttcctgatccagcagcagtacgcccaggtgctggcccagcagcagaaggccgccctgagcagccagcagcagcagcagctggccctgctgctgcagcagttccagaccctgaagatgagaatcagcgaccagaacatcatccccagcgtgaccagaagcgtgagcgtgcccgacaccggcagcatctgggagctgcagcccaccgccagccagcccaccgtgtgggagggcggcagcgtgtgggacctgcccctggacaccaccacccccggccccgccctggagcagctgcagcagctggagaaggccaaggccgccaagctggagcaggagagaagagaggccgagatgagagccaagagagaggaggaggagagaaagagacaggaggagctgagaagacagcaggaggagatcctgagaagacagcaggaggaggagagatag

SEQ ID NO: 41250 - DNA, 282 bp, Artificial Sequence
  derived and/or modified sequence
atggccgccgagacccagaccctgaacttcggccccgagtggctgagagccctgagcagcggcggcagcatcaccagcccccccctgagccccgccctgcccaagtacaagctggccgactacagatacggcagagaggagatgctggccctgttcctgaaggacaacaagatccccagcgacctgctggacaaggagttcctgcccatcctgcaggaggagcccctgccccccctggccctggtgcccttcaccgaggaggagcagagaaacttcagctag

SEQ ID NO: 41251 - DNA, 303 bp, Artificial Sequence
  derived and/or modified sequence
atggccgccgagacccagaccctgaacttcggccccgagtggctgagagccctgagcagcggcggcagcatcaccagcccccccctgagccccgccctgcccaagtacaagctggccgactacagatacggcagagaggagatgctggccctgttcctgaaggacaacaagatccccagcgacctgctggacaaggagttcctgcccatcctgcaggaggagcccctgccccccctggccctggtgcccttcaccgaggaggagcagagaaacttcagcatgagcgtgaacagcgccgcctag

SEQ ID NO: 41252 - DNA, 348 bp, Artificial Sequence
  derived and/or modified sequence
atggccgccgagacccagaccctgaacttcggccccgagtggctgagagccctgagcagcggcggcagcatcaccagcccccccctgagccccgccctgcccaagtacaagctggccgactacagatacggcagagaggagatgctggccctgttcctgaaggacaacaagatccccagcgacctgctggacaaggagttcctgcccatcctgcaggaggagcccctgccccccctggccctggtgcccttcaccgaggaggagcagagaaacttcagcatgagcgtgaacagcgccgccgtgctgagactgaccggcagaggcggcggcggcaccgtggtgggctag

SEQ ID NO: 41253 - DNA, 321 bp, Artificial Sequence
  derived and/or modified sequence
atggccgccgagacccagaccctgaacttcggccccgagtggctgagagccctgagcagcggcggcagcatcaccagcccccccctgagccccgccctgcccaagtacaagctggccgactacagatacggcagagaggagatgctggccctgttcctgaaggacaacaagatccccagcgacctgctggacaaggagttcctgcccatcctgcaggaggagcccctgccccccctggccctggtgcccttcaccgaggaggagcagagaaacttcagcatgagcgtgaacagcgccgccgtgctgagactgaccggctag

SEQ ID NO: 41254 - DNA, 342 bp, Artificial Sequence
  derived and/or modified sequence
atggccgccgagacccagaccctgaacttcggccccgagtggctgagagccctgagcagcggcggcagcatcaccagcccccccctgagccccgccctgcccaagtacaagctggccgactacagatacggcagagaggagatgctggccctgttcctgaaggacaacaagatccccagcgacctgctggacaaggagttcctgcccatcctgcaggaggagcccctgccccccctggccctggtgcccttcaccgaggaggagcagagaaacttcagcatgagcgtgaacagcgccgccgtgctgagactgaccggcagaggcggcggcggcaccgtgtag

SEQ ID NO: 41255 - DNA, 3882 bp, Artificial Sequence
  derived and/or modified sequence
atggccgccgagacccagaccctgaacttcggccccgagtggctgagagccctgagcagcggcggcagcatcaccagcccccccctgagccccgccctgcccaagtacaagctggccgactacagatacggcagagaggagatgctggccctgttcctgaaggacaacaagatccccagcgacctgctggacaaggagttcctgcccatcctgcaggaggagcccctgccccccctggccctggtgcccttcaccgaggaggagcagagaaacttcagcatgagcgtgaacagcgccgccgtgctgagactgaccggcagaggcggcggcggcaccgtggtgggcgcccccagaggcagaagcagcagcagaggcagaggcagaggcagaggcgagtgcggcttctaccagagaagcttcgacgaggtggagggcgtgttcggcagaggcggcggcagagagatgcacagaagccagagctgggaggagagaggcgacagaagattcgagaagcccggcagaaaggacgtgggcagacccaacttcgaggagggcggccccaccagcgtgggcagaaagcacgagttcatcagaagcgagagcgagaactggagaatcttcagagaggagcagaacggcgaggacgaggacggcggctggagactggccggcagcagaagagacggcgagagatggagaccccacagccccggctggagagagcacatggagagaagaagaagattcgagttcgacttcagagacagagacgacgagagaggctacagaagagtgagaagcggcagcggcagcatcgacgacgacagagacagcctgcccgagtggtgcctggaggacgccgaggaggagatgggcaccttcgacagcagcggcgccttcctgagcctgaagaaggtgcagaaggagcccatccccgaggagcaggagatggacttcagacccgtggacgagggcgaggagtgcagcgacagcgagggcagccacaacgaggaggccaaggagcccgacaagaccaacaagaaggagggcgagaagaccgacagagtgggcgtggaggccagcgaggagaccccccagaccagcagcagcagcgccagacccggcacccccagcgaccaccagagccaggaggccagccagttcgagagaaaggacgagcccaagaccgagcagaccgagaaggccgaggaggagaccagaatggagaacagcctgcccgccaaggtgcccagcagaggcgacgagatggtggccgacgtgcagcagcccctgagccagatccccagcgacaccgccagccccctgctgatcctgcccccccccgtgcccaaccccagccccaccctgagacccgtggagacccccgtggtgggcgcccccggcatgggcagcgtgagcaccgagcccgacgacgaggagggcctgaagcacctggagcagcaggccgagaagatggtggcctacctgcaggacagcgccctggacgacgagagactggccagcaagctgcaggagcacagagccaagggcgtgagcatccccctgatgcacgaggccatgcagaagtggtactacaaggacccccagggcgagatccagggccccttcaacaaccaggagatggccgagtggttccaggccggctacttcaccatgagcctgctggtgaagagagcctgcgacgagagcttccagcccctgggcgacatcatgaagatgtggggcagagtgcccttcagccccggccccgccccccccccccacatgggcgagctggaccaggagagactgaccagacagcaggagctgaccgccctgtaccagatgcagcacctgcagtaccagcagttcctgatccagcagcagtacgcccaggtgctggcccagcagcagaaggccgccctgagcagccagcagcagcagcagctggccctgctgctgcagcagttccagaccctgaagatgagaatcagcgaccagaacatcatccccagcgtgaccagaagcgtgagcgtgcccgacaccggcagcatctgggagctgcagcccaccgccagccagcccaccgtgtgggagggcggcagcgtgtgggacctgcccctggacaccaccacccccggccccgccctggagcagctgcagcagctggagaaggccaaggccgccaagctggagcaggagagaagagaggccgagatgagagccaagagagaggaggaggagagaaagagacaggaggagctgagaagacagcaggaggagatcctgagaagacagcaggaggaggagagaaagagaagagaggaggaggagctggccagaagaaagcaggaggaggccctgagaagacagagagagcaggagatcgccctgagaagacagagagaggaggaggagagacagcagcaggaggaggccctgagaagactggaggagagaagaagagaggaggaggagagaagaaagcaggaggagctgctgagaaagcaggaggaggaggccgccaagtgggccagagaggaggaggaggcccagagaagactggaggagaacagactgagaatggaggaggaggccgccagactgagacacgaggaggaggagagaaagagaaaggagctggaggtgcagagacagaaggagctgatgagacagagacagcagcagcaggaggccctgagaagactgcagcagcagcagcagcagcagcagctggcccagatgaagctgcccagcagcagcacctggggccagcagagcaacaccaccgcctgccagagccaggccaccctgagcctggccgagatccagaagctggaggaggagagagagagacagctgagagaggagcagagaagacagcagagagagctgatgaaggccctgcagcagcagcagcagcagcagcagcagaagctgagcggctggggcaacgtgagcaagcccagcggcaccaccaagagcctgctggagatccagcaggaggaggccagacagatgcagaagcagcagcagcagcagcagcagcaccagcagcccaacagagccagaaacaacacccacagcaacctgcacaccagcatcggcaacagcgtgtggggcagcatcaacaccggcccccccaaccagtgggccagcgacctggtgagcagcatctggagcaacgccgacaccaagaacagcaacatgggcttctgggacgacgccgtgaaggaggtgggccccagaaacagcaccaacaagaacaagaacaacgccagcctgagcaagagcgtgggcgtgagcaacagacagaacaagaaggtggaggaggaggagaagctgctgaagctgttccagggcgtgaacaaggcccaggacggcttcacccagtggtgcgagcagatgctgcacgccctgaacaccgccaacaacctggacgtgcccaccttcgtgagcttcctgaaggaggtggagagcccctacgaggtgcacgactacatcagagcctacctgggcgacaccagcgaggccaaggagttcgccaagcagttcctggagagaagagccaagcagaaggccaaccagcagagacagcagcagcagctgccccagcagcagcagcagcagcccccccagcagcccccccagcagccccagcagcaggacagcgtgtggggcatgaaccacagcaccctgcacagcgtgttccagaccaaccagagcaacaaccagcagagcaacttcgaggccgtgcagagcggcaagaagaagaagaagcagaagatggtgagagccgaccccagcctgctgggcttcagcgtgaacgccagcagcgagagactgaacatgggcgagatcgagaccctggacgactactag

SEQ ID NO: 41256 - protein, 271 aa, Artificial Sequence
  derived and/or modified sequence
MTEPQVGCVACPRVHKEPAQVGTPWPAKPRSHPRKRDPTALLPRSLWPACQESVTALCFLQETVERLGQSPAQDTPVLGPCWDPMALGTQGRLLLDRDSKDTQTRISQKGRRLQPPGTPSAPPQRRPRKQLNPCRGTERVDPGFEGVTLKFQIKPDSSLQIIPTYSLPCSSRSQESPADAVGGPAAHPGGTEAHSAGSEALEPRRCASCRTQRTPLWRDAEDGTPLCNACGIRYKKYGTRCSSCWLVPRKNVQPKRLCGRCGVSLDPIQEG

SEQ ID NO: 41257 - DNA, 816 bp, Artificial Sequence
  derived and/or modified sequence
atgaccgagccccaggtgggctgcgtggcctgccccagagtgcacaaggagcccgcccaggtgggcaccccctggcccgccaagcccagaagccaccccagaaagagagaccccaccgccctgctgcccagaagcctgtggcccgcctgccaggagagcgtgaccgccctgtgcttcctgcaggagaccgtggagagactgggccagagccccgcccaggacacccccgtgctgggcccctgctgggaccccatggccctgggcacccagggcagactgctgctggacagagacagcaaggacacccagaccagaatcagccagaagggcagaagactgcagccccccggcacccccagcgcccccccccagagaagacccagaaagcagctgaacccctgcagaggcaccgagagagtggaccccggcttcgagggcgtgaccctgaagttccagatcaagcccgacagcagcctgcagatcatccccacctacagcctgccctgcagcagcagaagccaggagagccccgccgacgccgtgggcggccccgccgcccaccccggcggcaccgaggcccacagcgccggcagcgaggccctggagcccagaagatgcgccagctgcagaacccagagaacccccctgtggagagacgccgaggacggcacccccctgtgcaacgcctgcggcatcagatacaagaagtacggcaccagatgcagcagctgctggctggtgcccagaaagaacgtgcagcccaagagactgtgcggcagatgcggcgtgagcctggaccccatccaggagggctag

SEQ ID NO: 41258 - DNA, 816 bp, Artificial Sequence
  derived and/or modified sequence
atgactgagccccaggtgggctgtgtcgcctgtccaagggtccataaggagcctgctcaagtgggtaccccatggcctgcaaagcctcgcagtcaccctagaaaacgcgaccctacggctctgctgcccagatctctatggcctgcatgccaggagtcggtaaccgcactgtgctttttacaagagacagtcgaacgtttggggcagtcacccgcccaggacacccccgtactgggcccatgctgggacccaatggcacttggcacacagggacgccttctgctggatcgcgattctaaagacacccagactcgcatctcgcaaaagggccgcagactccagccacctgggaccccaagtgctcctccacagcgacgacccagaaagcaactcaacccctgtaggggcacggagcgagtggacccaggattcgagggggtgaccctaaaattccagattaagcctgatagctctctgcaaatcatccccacctattccttgccgtgcagttccagaagtcaggagtcgcctgccgatgcagtgggcggaccagcagcccacccgggaggcaccgaggcacatagcgccgggtcggaggccctggagccaagacgatgtgccagctgcaggacccagcgtacgcctctgtggcgcgacgcggaagatggtacccccctgtgtaatgcctgtggaattagatataagaagtacggcactaggtgctcaagttgctggctcgtcccaagaaagaatgtgcagcctaagagactctgcgggagatgcggagtttcgcttgacccgatacaggaggggtag

SEQ ID NO: 41259 - DNA, 816 bp, Artificial Sequence
  derived and/or modified sequence
atgacagagccccaggtgggctgtgtggcctgcccccgggtgcacaaggagcccgcccaggtgggcaccccctggccagccaagcccaggagccaccccaggaagagggaccccacagccctgctgcccaggagcctgtggccagcctgccaggagagcgtgacagccctgtgcttcctgcaggagaccgtggagcggctgggccagagccctgcccaggacacccctgtgctgggcccctgctgggaccccatggccctgggcacccagggccgcctgctgctggaccgggacagcaaggacacccagacccgcatcagccagaagggccgccgcctgcagcccccaggcacccccagcgccccaccccagaggcggcccaggaagcagctgaacccctgccggggcacagagcgggtggaccccggctttgagggcgtgaccctgaagttccagatcaagccagacagcagcctgcagatcatccccacctacagcctgccctgcagcagccgcagccaggagagccctgcagatgctgtgggcggccctgctgcccaccctgggggcacagaggcccacagcgctggcagcgaggccctggagccccggcgctgtgccagctgcaggacccagaggacccccctgtggagagatgctgaagatggcacccccctgtgcaatgcctgtggcatccgctacaagaagtatggcacccgctgcagcagctgctggctggtgcccaggaagaatgtgcagcccaagaggctgtgtggccgctgtggggtgtccctggaccccatccaggagggctag

SEQ ID NO: 41260 - DNA, 816 bp, Artificial Sequence
  derived and/or modified sequence
atgaccgagccccaggtgggctgcgtggcctgcccccgggtgcacaaggaaccagcccaggtgggtaccccgtggcctgccaaaccacgttcccatccaaggaaaagagatccaaccgcactgcttcctcggtcactgtggcccgcatgtcaggaatcagttacagcattatgtttccttcaggagaccgtcgagcgcctgggtcagtctcctgctcaggacactccagtgctgggaccctgctgggatcctatggcactcgggacccaaggtagattgctgctggacagggatagcaaggacactcagactaggatcagtcagaagggccgcaggctccagccaccagggactccctccgctccgccccagcgcagacctcgcaaacaactcaatccttgccggggaacagaaagggtggacccggggtttgagggggtcaccctaaagttccagataaaacccgacagttccctccaaataattcccacctactcactaccttgcagctcccggagccaggagtccccagcagatgcagtgggaggtcctgccgcgcacccgggaggcaccgaagcccactcggccggttcagaggccctcgaacccaggcggtgtgcttcatgccgcacacagagaaccccactttggcgtgatgctgaggatggcactccgctctgcaatgcctgcgggatcagatataagaaatacggtactagatgcagctcctgctggctcgtcccgcggaagaatgtacagcccaaacggctgtgtggcaggtgcggtgtgagtctcgatccaatccaggagggttag

SEQ ID NO: 41261 - DNA, 816 bp, Artificial Sequence
  derived and/or modified sequence
atgaccgaaccgcaggtgggctgcgtggcctgtcctcgggtccacaaagagcctgcccaagtaggcaccccatggcccgctaaaccacggtcacatcctaggaagagagaccccacagcgctgctgccaaggtcgctttggcctgcctgccaggagagtgttactgctctgtgtttcttgcaagaaaccgtggaacgattgggacaaagccctgcacaagacacacccgttctggggccttgctgggaccctatggctctgggcacacagggtcgcctgcttcttgacagggacagcaaagacactcagactagaattagccagaaaggaaggagattacaaccgccagggacaccgtctgcacctcctcagagacgccctcggaagcagttgaacccttgtcgcggaaccgagagagtcgatccgggattcgagggtgtaacacttaagtttcagattaaaccagattcatctctgcagattatcccaacatattcactcccttgttcaagccggtctcaggaatctcctgcggacgccgttggcggtccggctgcccacccaggtggaacggaagctcactcagccggaagcgaagccttagaaccccgtagatgtgcaagttgtaggacccagcgtacacccttgtggcgtgacgctgaggacggcacccctttgtgcaacgcctgcgggattagatacaagaagtacggcactcggtgcagcagttgttggctcgtccctagaaagaacgtgcaacctaagagactgtgcggacgttgtggcgtaagtctcgatccaatccaggaagggtag

SEQ ID NO: 41262 - DNA, 2303 bp, Artificial Sequence
  derived and/or modified sequence
aaacaaaaacaaaccacacctgcatctgctgtgctgggcccccggttctcttttccctctgggatctaagatgccgctggggatccaaggcagaggcctgggagcccccatttccgagggggagggctagcgtggaaggccccgccccggcagctgcggagggatttggtggggtccaggccgcccttgccacgcaggggtgcgcggatgacctgaaaaaagccagaaagaggaaaggtgccgccgaggctggtcgctctcagctggggctcatcgcatcctctaccaagagcgctcccaccacacaggtcccgcccctcccaggtgggtttcatcgggtgggcccagcgggacagggccgggtgaaattagggagggggctgggctggggcgcaatggaggccgagccaatcccggactcctcaatgccagcaaagcttctggcgccgccctgtctgaacctggagcggctgggaggatccccctcccaggagaagccgaggaccccaggatgctgcagaatcagtgagaggtgcgtaaggccaaaccccattccccggaccccgctagcacttcaccacctggctcagtgatcaaggggtcatgacctctctttgctggggttatcgagaagtggcaattttataatagttactgaaacttacaaagaggttctggtgcccagagacacttggggtcatctagggatcagaggccatgcaattccatgtctctggggctgatgtaggcactccccagggatcatccaggggttatggagggcaactcaataataatgaaaatgataaaaatcgtaatcatattatggcaagccagcggcgtggtggcgcgtgcctgtaagtcccagctactcgggaggctgaggcggaaggatcggtcgagcccaggagttctaggctgcactgagtcctgatcacgcccctgcactccaggcgggggtacagagtgaggctcggtctctaaaagaaacacaaagaaaaaaagtaacctttttctcgatcctgcagccagaggcttgatatcctgcctcggtcacctagggcggtccctgcctgggtgatctacgggtgccgtaaggggttgattgatgtggagggctgggcgtgcctgggaggcccacagtgggcgaggtgagttgcaattactgcaactcttaaaccttccacccagagttagaaatgactgaacctcaggtggggtgtgtagcctgtccaagggtacacaaagagccggcccaagttggaaccccctggccggctaaacccaggagtcacccaagaaaacgtgaccccactgcccttctccccaggtccctctggcctgcatgccaggagtcggtcaccgccctgtgcttcctccaagagacagtggagaggctgggtcagtcccctgcccaggacaccccggtcctggggccttgctgggacccgatggctctggggactcagggccgcctgctgctggacagggattccaaggacacacagaccaggatcagccaaaagggccgccgtctgcagcccccggggactccctcggccccaccccagagaaggccccggaaacagctgaacccctgccggggcaccgagagagtggaccctgggttcgagggggtgactctgaagtttcagataaagccggactccagcctgcagatcatccccacgtacagcctgccctgcagtagccgttctcaggaatcccctgcagatgctgttgggggccctgcagcccacccaggaggcaccgaggcccactcagcaggcagcgaggccctggagccccggcgctgtgcttcctgtcggacccagaggaccccgctctggagagacgctgaagatgggacccctctctgcaacgcctgtgggatcaggtacaagaaatacggcactcgctgctccagctgctggctggtgcccaggaaaaatgtccagcccaagaggctatgtggcagatgtggagtgtccctggaccccattcaggaaggttaaacccagcttcaccctgctgagctgctgcttctgcctccgtttcaccagtgggagaatgggcagaagcagctctcctaggaggattggggaaagagccggcctgcctcctctctgccatctccagattcaaggatcccgggggaagacccaggcctcaggtggcagagcctgctaggggtcaccagccccttctccagtcagccttggccgaggccccctcaggagacgctctcaggaaggatgagcattgttacagcagggacaataaagtacagagatatgccgaga

SEQ ID NO: 41263 - protein, 1196 aa, Artificial Sequence
  derived and/or modified sequence
MENVDNSLDGSDVSEPAKPEAGLEVAQSILSKFSMKSLFGFTSKLESVNPEEEDAVLKAFHSLDVNPTSQQDDSSNGLDPQEAGSRVSPDLGNDEKIASVETESEGSQRKEAGTSLLAQELLPLSTLKGTKDDVICVRGTLVHTTSDSDSDDGGQEPEEGSSTNGPKSPSGVLSEPSQESKENPGGFRENTVTGEMNGAELCAEDPQRIPPEMSSKLEAGNGGLQTERRPSQDQVGEEGSQDLPAVTNQNSSVGITESASSKKEVSGEKSFQLPAFFSGLRVLKKGATAEGGETITEIKPKDGDLALLKLTQPVQKSLVQAGLQTVKSEKKATDPKATPTLLEQLSLLLNIDMPKTEPKGADPESPRREEMGCNADQESQSGPGVPQTQGGEVKPKSPETALEAFKALFIRPPRKGTTADTSELEALKRKMRHEKESLRAVFERSNSKPADGPSDSKSPDHSLTEQDDRTPGRLQAVWPPPKTKDTEEKVGLKYTEAEYQAAILHLKREHKEEIENLQAQFELRAFHIRGEHAMITARLEETIENLKHELEHRWRGGCEERKDVCISTDDDCPPKTFRNVCVQTDRETFLKPCESESKTTRSNQLVPKKLNISSLSQLSPPNDHKDIHAALQPMEGMASNQQKALPPPPASIPPPPPLPSGLGSLSPAPPMPPVSAGPPLPPPPPPPPPLPPPSSAGPPPPPPPPPLPNSPAPPNPGGPPPAPPPPGLAPPPPPGLFFGLGSSSSQCPRKPAIEPSCPMKPLYWTRIQISDRSQNATPTLWDSLEEPDIRDPSEFEYLFSKDTTQQKKKPLSETYEKKNKVKKIIKLLDGKRSQTVGILISSLHLEMKDIQQAIFNVDDSVVDLETLAALYENRAQEDELVKIRKYYETSKEEELKLLDKPEQFLHELAQIPNFAERAQCIIFRSVFSEGITSLHRKVEIITRASKDLLHVKSVKDILALILAFGNYMNGGNRTRGQADGYSLEILPKLKDVKSRDNGINLVDYVVKYYLRYYDQEAGTEKSVFPLPEPQDFFLASQVKFEDLIKDLRKLKRQLEASEKQMVVVCKESPKEYLQPFKDKLEEFFQKAKKEHKMEESHLENAQKSFETTVRYFGMKPKSGEKEITPSYVFMVWYEFCSDFKTIWKRESKNISKERLKMAQESVSKLTSEKKVETKKINPTASLKERLRQKEASVTTN

SEQ ID NO: 41264 - protein, 503 aa, Artificial Sequence
  derived and/or modified sequence
MENVDNSLDGSDVSEPAKPEAGLEVAQSILSKFSMKSLFGFTSKLESVNPEEEDAVLKAFHSLDVNPTSQQDDSSNGLDPQEAGSRVSPDLGNDEKIASVETESEGSQRKEAGTSLLAQELLPLSTLKGTKDDVICVRGTLVHTTSDSDSDDGGQEPEEGSSTNGPKSPSGVLSEPSQESKENPGGFRENTVTGEMNGAELCAEDPQRIPPEMSSKLEAGNGGLQTERRPSQDQVGEEGSQDLPAVTNQNSSVGITESASSKKEVSGEKSFQLPAFFSGLRVLKKGATAEGGETITEIKPKDGDLALLKLTQPVQKSLVQAGLQTVKSEKKATDPKATPTLLEQLSLLLNIDMPKTEPKGADPESPRREEMGCNADQESQSGPGVPQTQGGEVKPKSPETALEAFKALFIRPPRKGTTADTSELEALKRKMRHEKESLRAVFERSNSKPADGPSDSKSPDHSLTEQDDRTPGRLQAVWPPPKTKDTEEKVGLKYTEAGNVKGS

SEQ ID NO: 41265 - DNA, 3591 bp, Artificial Sequence
  derived and/or modified sequence
atggagaacgtggacaacagcctggacggcagcgacgtgagcgagcccgccaagcccgaggccggcctggaggtggcccagagcatcctgagcaagttcagcatgaagagcctgttcggcttcaccagcaagctggagagcgtgaaccccgaggaggaggacgccgtgctgaaggccttccacagcctggacgtgaaccccaccagccagcaggacgacagcagcaacggcctggacccccaggaggccggcagcagagtgagccccgacctgggcaacgacgagaagatcgccagcgtggagaccgagagcgagggcagccagagaaaggaggccggcaccagcctgctggcccaggagctgctgcccctgagcaccctgaagggcaccaaggacgacgtgatctgcgtgagaggcaccctggtgcacaccaccagcgacagcgacagcgacgacggcggccaggagcccgaggagggcagcagcaccaacggccccaagagccccagcggcgtgctgagcgagcccagccaggagagcaaggagaaccccggcggcttcagagagaacaccgtgaccggcgagatgaacggcgccgagctgtgcgccgaggacccccagagaatcccccccgagatgagcagcaagctggaggccggcaacggcggcctgcagaccgagagaagacccagccaggaccaggtgggcgaggagggcagccaggacctgcccgccgtgaccaaccagaacagcagcgtgggcatcaccgagagcgccagcagcaagaaggaggtgagcggcgagaagagcttccagctgcccgccttcttcagcggcctgagagtgctgaagaagggcgccaccgccgagggcggcgagaccatcaccgagatcaagcccaaggacggcgacctggccctgctgaagctgacccagcccgtgcagaagagcctggtgcaggccggcctgcagaccgtgaagagcgagaagaaggccaccgaccccaaggccacccccaccctgctggagcagctgagcctgctgctgaacatcgacatgcccaagaccgagcccaagggcgccgaccccgagagccccagaagagaggagatgggctgcaacgccgaccaggagagccagagcggccccggcgtgccccagacccagggcggcgaggtgaagcccaagagccccgagaccgccctggaggccttcaaggccctgttcatcagaccccccagaaagggcaccaccgccgacaccagcgagctggaggccctgaagagaaagatgagacacgagaaggagagcctgagagccgtgttcgagagaagcaacagcaagcccgccgacggccccagcgacagcaagagccccgaccacagcctgaccgagcaggacgacagaacccccggcagactgcaggccgtgtggcccccccccaagaccaaggacaccgaggagaaggtgggcctgaagtacaccgaggccgagtaccaggccgccatcctgcacctgaagagagagcacaaggaggagatcgagaacctgcaggcccagttcgagctgagagccttccacatcagaggcgagcacgccatgatcaccgccagactggaggagaccatcgagaacctgaagcacgagctggagcacagatggagaggcggctgcgaggagagaaaggacgtgtgcatcagcaccgacgacgactgcccccccaagaccttcagaaacgtgtgcgtgcagaccgacagagagaccttcctgaagccctgcgagagcgagagcaagaccaccagaagcaaccagctggtgcccaagaagctgaacatcagcagcctgagccagctgagcccccccaacgaccacaaggacatccacgccgccctgcagcccatggagggcatggccagcaaccagcagaaggccctgccccccccccccgccagcatccccccccccccccccctgcccagcggcctgggcagcctgagccccgccccccccatgccccccgtgagcgccggcccccccctgcccccccccccccccccccccccccccctgcccccccccagcagcgccggccccccccccccccccccccccccccccctgcccaacagccccgccccccccaaccccggcggccccccccccgccccccccccccccggcctggcccccccccccccccccggcctgttcttcggcctgggcagcagcagcagccagtgccccagaaagcccgccatcgagcccagctgccccatgaagcccctgtactggaccagaatccagatcagcgacagaagccagaacgccacccccaccctgtgggacagcctggaggagcccgacatcagagaccccagcgagttcgagtacctgttcagcaaggacaccacccagcagaagaagaagcccctgagcgagacctacgagaagaagaacaaggtgaagaagatcatcaagctgctggacggcaagagaagccagaccgtgggcatcctgatcagcagcctgcacctggagatgaaggacatccagcaggccatcttcaacgtggacgacagcgtggtggacctggagaccctggccgccctgtacgagaacagagcccaggaggacgagctggtgaagatcagaaagtactacgagaccagcaaggaggaggagctgaagctgctggacaagcccgagcagttcctgcacgagctggcccagatccccaacttcgccgagagagcccagtgcatcatcttcagaagcgtgttcagcgagggcatcaccagcctgcacagaaaggtggagatcatcaccagagccagcaaggacctgctgcacgtgaagagcgtgaaggacatcctggccctgatcctggccttcggcaactacatgaacggcggcaacagaaccagaggccaggccgacggctacagcctggagatcctgcccaagctgaaggacgtgaagagcagagacaacggcatcaacctggtggactacgtggtgaagtactacctgagatactacgaccaggaggccggcaccgagaagagcgtgttccccctgcccgagccccaggacttcttcctggccagccaggtgaagttcgaggacctgatcaaggacctgagaaagctgaagagacagctggaggccagcgagaagcagatggtggtggtgtgcaaggagagccccaaggagtacctgcagcccttcaaggacaagctggaggagttcttccagaaggccaagaaggagcacaagatggaggagagccacctggagaacgcccagaagagcttcgagaccaccgtgagatacttcggcatgaagcccaagagcggcgagaaggagatcacccccagctacgtgttcatggtgtggtacgagttctgcagcgacttcaagaccatctggaagagagagagcaagaacatcagcaaggagagactgaagatggcccaggagagcgtgagcaagctgaccagcgagaagaaggtggagaccaagaagatcaaccccaccgccagcctgaaggagagactgagacagaaggaggccagcgtgaccaccaactag

SEQ ID NO: 41266 - DNA, 1512 bp, Artificial Sequence
  derived and/or modified sequence
atggagaacgtggacaacagcctggacggcagcgacgtgagcgagcccgccaagcccgaggccggcctggaggtggcccagagcatcctgagcaagttcagcatgaagagcctgttcggcttcaccagcaagctggagagcgtgaaccccgaggaggaggacgccgtgctgaaggccttccacagcctggacgtgaaccccaccagccagcaggacgacagcagcaacggcctggacccccaggaggccggcagcagagtgagccccgacctgggcaacgacgagaagatcgccagcgtggagaccgagagcgagggcagccagagaaaggaggccggcaccagcctgctggcccaggagctgctgcccctgagcaccctgaagggcaccaaggacgacgtgatctgcgtgagaggcaccctggtgcacaccaccagcgacagcgacagcgacgacggcggccaggagcccgaggagggcagcagcaccaacggccccaagagccccagcggcgtgctgagcgagcccagccaggagagcaaggagaaccccggcggcttcagagagaacaccgtgaccggcgagatgaacggcgccgagctgtgcgccgaggacccccagagaatcccccccgagatgagcagcaagctggaggccggcaacggcggcctgcagaccgagagaagacccagccaggaccaggtgggcgaggagggcagccaggacctgcccgccgtgaccaaccagaacagcagcgtgggcatcaccgagagcgccagcagcaagaaggaggtgagcggcgagaagagcttccagctgcccgccttcttcagcggcctgagagtgctgaagaagggcgccaccgccgagggcggcgagaccatcaccgagatcaagcccaaggacggcgacctggccctgctgaagctgacccagcccgtgcagaagagcctggtgcaggccggcctgcagaccgtgaagagcgagaagaaggccaccgaccccaaggccacccccaccctgctggagcagctgagcctgctgctgaacatcgacatgcccaagaccgagcccaagggcgccgaccccgagagccccagaagagaggagatgggctgcaacgccgaccaggagagccagagcggccccggcgtgccccagacccagggcggcgaggtgaagcccaagagccccgagaccgccctggaggccttcaaggccctgttcatcagaccccccagaaagggcaccaccgccgacaccagcgagctggaggccctgaagagaaagatgagacacgagaaggagagcctgagagccgtgttcgagagaagcaacagcaagcccgccgacggccccagcgacagcaagagccccgaccacagcctgaccgagcaggacgacagaacccccggcagactgcaggccgtgtggcccccccccaagaccaaggacaccgaggagaaggtgggcctgaagtacaccgaggccggcaacgtgaagggcagctag

SEQ ID NO: 41267 - DNA, 11293 bp, Artificial Sequence
  derived and/or modified sequence
atggagaacgttgataattctctggatggcagtgatgtgtcagaaccagcaaaaccagaagccggacttgaagtggctcagtcgatcctgagtaagttctctatgaaatccctatttgggtttacgagtaaattagaatctgtgaatccagaagaggaagatgctgtgctgaaagcattccatagtttagacgtgaatcccacatctcagcaggatgattccagcaatggcttggatccacaggaagcagggtctcgggtttcacctgacctcggaaatgatgagaaaattgcaagcgtggagacagaatcagagggaagtcagagaaaagaagcagggacatctctccttgctcaagagctgcttccactgtctactttgaaagggacaaaagacgatgtcatttgtgttcgtgggaccctggtgcacaccaccagtgattctgactctgatgatggtggccaggagccagaggagggaagcagcaccaatggcccaaagtcccctagtggtgttttatctgagccatctcaggagtccaaagaaaacccaggaggtttcagggaaaatactgtcactggggaaatgaatggtgcagagctctgtgcagaagatcctcaaaggattccacctgagatgagcagcaaactggaagctggcaacggtggtcttcagacagagcgtcgccccagccaggaccaggtgggagaagaagggtcccaagacctacctgcagtaacaaaccagaattcgagtgttggtatcactgagagtgcctcttctaaaaaagaagtctctggagagaagtcattccaacttccagcttttttcagtgggcttcgtgtgctgaagaagggggctaccgctgagggaggagagaccatcacggaaattaaaccaaaggatggggacttagctttgctcaaattgacgcagcctgtgcagaagtccttagtgcaggcagggctgcagacagtgaagagtgagaagaaagcaactgatccgaaggccactcccactctcctggagcagctctctctgctgctcaacattgacatgcccaaaactgaaccgaagggagcagaccctgagtcgcccaggagagaagagatgggctgcaatgctgaccaagagagccagagcggccctggagtaccacaaacccagggtggtgaggtcaagccaaagtcgccagagacagccctggaggcttttaaagccctattcatccggccccccagaaaggggaccacagctgacacctctgagctggaagctctcaagcgcaagatgagacatgagaaggagtcgctaagagctgtgtttgaacggtccaattctaagccagcggatggcccctctgattccaaaagtcctgaccacagcctgactgagcaggatgacaggactcctggcagacttcaagctgtctggccacccccaaagacaaaagacacagaagaaaaagtgggactgaagtacactgaagcagaataccaagctgctattttacacttgaagagggagcacaaagaagaaattgaaaacctgcaggcacagtttgaacttcgggcatttcatatccggggcgagcatgcaatgataacagcgagactagaagaaaccattgaaaatctgaaacacgagctagaacacagatggcgagggggttgtgaagagaggaaagatgtgtgcatttccaccgatgatgactgccctccaaagaccttcagaaatgtgtgcgtccagacagacagagagaccttcctcaagccctgtgaaagtgaaagcaagacaaccagaagtaatcaattagtacccaaaaagctgaatatctcctctttaagccagctctcacccccaaatgaccacaaagacatccatgcagcactccagccaatggagggcatggcatcaaatcagcagaaggcattgcctccgcctcccgcatccatccctccccctccgcccctcccctcaggacttggatctttgtctcccgcacctccaatgccacctgtgagtgctgggccaccgctaccacctccgcctcctccaccgccacctctacctccaccttcaagtgctggacctccaccacccccacccccacccccacttcctaactcccctgccccacccaaccctggagggcctcctcctgctccaccacccccaggacttgcacccccacctccccctggactcttctttggacttggctcttcttccagtcaatgtcctcgaaaaccagccatcgagcccagttgtcccatgaagcctttatattggactaggatacaaataagtgataggagccaaaatgctacaccaaccttatgggactccttagaagaacctgacattcgggaccccagtgaatttgagtatttattctccaaagacacaactcaacagaagaaaaaacctctgtcagagacttatgagaagaaaaacaaggtcaaaaagatcatcaaattgttggatggaaaacgatctcaaactgtgggaatcttgatatctagtttacatttagaaatgaaggatatccaacaggccattttcaatgtggatgactccgtggttgatctggagaccctggcagccttatatgaaaacagagcccaagaggatgagctggttaaaataagaaagtattacgagacatccaaagaagaagaactgaagctgctggataaacctgagcaatttttacatgagttagcccagattcctaattttgctgaacgtgcccagtgcataatcttcagatctgtcttttctgagggtatcacctccttgcacagaaaggtagagatcatcacgcgagcttctaaggacttgctgcacgtgaagagcgtgaaggatattttagctctcatcttggcttttggaaattatatgaatggaggaaataggactcggggacaagccgatggatatagcttagaaattctgcccaaactcaaggatgtcaaaagtcgggataatgggattaatctggtggactacgttgttaagtattacctgcgttactatgatcaggaagctggaacagaaaagagtgttttccccttgccggaaccacaggatttctttctggcctcccaagtcaagtttgaagacctcataaaagatttgagaaaactgaagaggcaactagaagcaagtgagaaacagatggtggtggtgtgcaaggagtccccaaaggagtatctccagcctttcaaggacaaactagaggagttcttccaaaaagccaaaaaagagcataagatggaagaaagtcacttggagaatgcacagaaaagttttgaaacaacagtacgatattttgggatgaagccaaagtctggtgagaaggagatcacacccagctacgtgtttatggtgtggtatgagttctgcagtgacttcaagacaatttggaaacgggagagtaaaaacatatctaaagaaagattgaaaatggctcaggaatcagtcagcaagttgacttcagagaagaaagtggagacaaagaaaatcaatcccactgctagcctgaaagaaagactgcgtcagaaggaagccagtgtgaccactaactaagatgaagacacatggaaatgatggcactggaggtggaggaccttgcacgcatactctttgtgaccacagggttgcaggacgttcttgaaagatgtgtcactaaatgtttgtttttgctcatctctttctgaggtcatctgcagagagtgccccatgccttctttaagaagtccctcattaagccgcaggaacaatggaaaactatttaagggaacattgcagaaatatttgatgactgtttcttgtggaagcccaaagtccactctaagagcagaagaaataccaaaatgtttccaaaatttttttaaaagctgagatttccagctttataaccaaagcttgatatatgtcacattgtcacagaagagagaaaagatcattgaggacagttgccttgggagagttcaagtctttgtcgttacacactgctgttttgattattggtcttagttttgatcctgttgcagcaaaatcctgcagcatctttctctccaataatgttgcaactcaccaaaactattcttgaagaggtccaagaacatgtattatccagactaaaaaaatgattttttgttgttatggtttacgtgatgaaaaggagaaaaaacagaatcatacctgggtggagagagggagacaaatagccataaacttcatcctggagaacaagttaccatgcaaggagttgacatcagttgttaagtgaggcccattcttgtttttacatcggtcctttgtggtttttctgggccagcagagattctgcaccccaactcccaggagaaaatgtaatacctgagcaagcacagccttgggtgtgcttggacaagagacccagcggcagagcaccttttacattttggaccgttcatgaatgggcaatgttgtgttgatacgcagccgagttctacgttatgtgctgtgactgtgcagctggacgacccccatccccaggaggcagtttccagacaggagagcaaatgcaactcacagcacctgctcatgaccttggctgataggcatgtgaagtaggatgaagcaggactctttaatgtcaaaaaaactgaagggcagaaaaaaggttccttacatcaaaatgaaagtaattacattaatagaaaacttccaagtggaatattgttcacaggcagctctttctgaccctggctcttgagtcacataaggaaaccacctttgacctctctgacacttttgtctttaagccacgtctctgaaatcttgtgaggggtgaagaaagaggactggagatgaatggacaatatgatcaaagactcatttttaggccttgaagaggccgagctttctccccccaattggtggaggacagtccagagatgagcagaaatcttaaattccttcctgatccagcctccacatgtggcctgccccttgccccagcatctttccagaacccctggacttgccaggtgcctgagcatcttcccaggatatgcctgccagccagcagcccctcaggaatgcttctataatagatccagtaatgaaagcagcaccatatcctaatctaatgtcagcttcgagaatgaagactgcagtcaggatcaaatcaagtcacagaagccatattcatgcaggtgctaaccgccttttctactggtgcaactgaaaggaatatggtaacatggttggatttttaaaattcacaatgaaggaacgagacaagcaaaacagaaaagccgagaaggaacatgcatgactaaaaaggcttgaagttgcttgtgagcaagaagctttttatgctgctttcttacatagtttctcttcattttcacttaactctgaagacaaccaaaagaacggatcaattaaaaactgattccacttataaccattgtatgctccttctagtgttatcatgcacaagaaaagtgccagttttacccatgccatataattcagctcttttgagttatgtggggccagcagaagtctcaatccttataggcttgatggtgagagcagcgggaggtttgaggtgtactcattgcagtccactttggtctgtaagtaggatgcttacgagaaatcagtgaaggtaagcagggctgccactgtggccacgtaacccttcaggaaccagtgctgaagaataatgagtgagaacacttaatttgagagttagacaaatacagcccactttggatttcatcctagtgaacagactaaaactttgcagtaaaatacctatttctacaaagcaaggtttgcctgcctcggttggggaaacctagtggttttgtcacactagtcgatgtatgatgttagtgttgtaagacaccatggcagaatcttcattattctcacctattctgaaccctgcatcatgtatctgggatgccccctcccaagtccaccaatgtaccacgttgctgacacagccttcatttttaactcaaattgatgctcagtaaaggtcaatgacaatttgttcaaggaagttcatctaaaataatctggaggccttgaaaatgatccctctaaaatgctgttgagcttgtgttcagtgtagcaggaggatctgaacttttcctggagaggaggtgatcgggatgccatttggcagcttaagcacatcctgccagcaggctttaagtggctgttctaggcatagccctccctgaactagaaaggagagtaaccagtttgctatgctgcatctaaccagacacacctgacttagtagtaactctaagaacccttaacttacaaacaactttgtctcctcttagacaatattcattaaatctgaggacacagtttgacagtagttcagattcttgcatgagcaattgacagcatcagagcacacaatatcataagttacataaattacacaaagtacatcataaattacactacagacacgttaggtaaaaagcatcaggcccgggccgggcgtggtggctcatgcctataatcccagcactttgggaggccaagcgggggcggatcacgaggtcaggagattgagaccatcctggctaacacggtgaaaccccatctctactaaaaatacaaaaaattagccgggcgtggtggtgggcgcctgtagtcccagctactcgggaggctgaggcaggagaatggcgtgaacccaggaggtggagcttgcagctagccgagatagcaccactgcactccagcctgggcgacagtgagactccgtttcaaaaaaaaaagcatcaggcccatgaagtatcaaaaaccaggttaggaggtgtgctgtatggcttttatctcaataagtggcagcttactggggaaaaagaaataagaaaaagtgtggccaagcagaagtggatgtttatgatgacggtgggggcccagaggtcataggtgatggtcctactgcccaacagttgccttttgaatccttatgttgatgatggtgtctttctacacactcactgcaactactcaggaattataaagattttctgaaatctgagaagtggaataaggaaacccagtggagctattacacttttaaatgttctagccaaaacaaattgccagtatggttgaggaattgaatatcagatggcatgcagtctcccctcccctcccctatcaaggacagtagaagctgcaaacctcttctcagcctccttcaggcacctcctgttttcataagcaccatgaagaatggtgtttcctaaatgaaaagttcagatactgctggtaaagaaactggaaaaactgaaggaaggaataaaatatgttggtggtattaacacctccagtaagataagtcattggtacggtttttctaagggccgcagtgagatgtagcagaagaaatatgtttattttgggcaaagatttgcttattggcctgggattgcacattttctctatgatgtttgcaacagagaaattttcattttaatgatactcttcctttcttgaaagttacatgtcctcatttctgtttctgcttctcccttggccagtgtcattgatgcagatcattgcatacaacagcacagcaaattgcgccaagtcagtgtgtgaatgggaattagcaatgcacgcttgcaggctctttttccaggaaccaggctgtaacattgaccggggaacctcttcattccctgacatactaaattggtcaattttgtagtactcatctccatccacaaaaacaacaaagataaaatcaatttggagctttatatgacaaaaaggaagaagtccaaaaatatatagccttcccccctcccacatatctgatccaaatattaaatatctgattttataaaacagtttaaattgtctttttaaattgctaacaagcatcagttatatttgagcttcatttttcttttatcctgtctgtcctaataaaaacaaaaatggccaaaaagtggagaggaaagaaaaagcttccactttttaaaatttgttttgtattagttattttacctttagggaccctacaactgaagagagtggagagaataaagaagtgaactttcattcatgtctgctactttgacctcataaagaaatctgcaacacagatgaaaccagtctgtgtggccaagctgatgggatttgaaaagagtggataatttttagcctttccaaaatgcaaataacttggatatatttccattttccagctatagagagaaacaatccagctgcctggaaactgttattagtatagaagtggcttaaagaaaagcatcttcaaatacttgacttagcatatctttcttctttagacttacataatgatattcatctctccattagcaattgaatccaggcataaccgggctcagttacacagcttgtctgtgactgggaagcccattttgtgtcatttctgcacacctgtccgctgttgacaccttattagaggcactgcattttggtttcacaattcttcatctcccttcccaaggaatgggcaatctactgaacttccagatcaatgctttgttggaaagtgatgaatttaagagagttttaacatgtcaaatttgaagccaattcagtatccttatttgttccaagactcttaaccaatactgtgatataaagttaggatttgggaaacgtgtagttaacaacttggaaacatgaagatattaaaatggcagctggctaactgtctcttaagccactatgcaatttctaccaatggagagattagggaagcaaattaagcctcattcagtaggtctgctgtctggtggaacttacggaactcatttcctcctctatccccagcccttctcctaactatggtgataaccagggccatagaagaccttttctctcttacctttctctgataggatcgtgtccttcagtcaagagctcatgtgaactccagactttatattacatctctgaagttcttgatgtggggaagattgacttttattccatttttatatgaaggtgttagatatagccatcaatttatttttctacattccctctacgcttatgtaattttctatttttaaatcttctcttaaatatactgagaatctctagtctccttttctaaaggctgatccaactacacttgtgggctatttttccaagctttgtgtgaaacttgatgacattgggccagcaaaatgcaaagaagactatagtttcaggcagaaaatcacgtccaaagaatttggcatggattaaacaacctctaccacactatagctctcacataggctgaacattttcctaaattctacctgtgcagacactgaggggctctctacctttgaaactatgagaacgtcttaaattaatatgaatatttctctccatgtatagtgtgagctgccaatgcattatcttaatacatcaagaaggaaatcagatttcaggcacacattagcaattgtttgttaatgtccttggcaaacgtgtacctgctttccttcattgttctcttcaggggctttcttccactttcctcttatgaaacgaatgtgtttttgactgttaactgggttcgctttccagatctgtctttcccaaatgaaaggttagtcccatagaccactggctattcagggaaattactctctacctccccatgacatggatgataagtgttgagggatgaacactctggaaactcttagcatggattttgaattccagatttctttataggagatgtataaaaaggagtttatagcatacaaaaattatactgctcttcccagtaagggactaaaaggacatttgaaatctttacattttagatgtttttgtgaattataaatatctcctttttcctcgcttcatgctaacttgtctctagataaaatcttatttcttcatacattggaccacaaggcataaagaaggtagctcagcgccactgagattgtgttctgcataatatttggaaggcttccatttccattgaaaacaaatccatgagtgagagggaaagtctagtatcaattcttctgtttgctcgcaatgacacaaataggttttggggatctacctaagggataggtctactccaaaattattaaatttataattgtgcaattctgtaatttcccaaggcataagtaatatgaccctactgtcagctagatgtcttatcttcaaagagagtatgcattaataaaaagaacttccctttaaagaaccaatctaaaatactaaaaaggcagaaacttttaaaattagaaattggataatttttaagaatctttagagaaaacattggtttatcatagtctttttctttcattgagttttcatttagactagcatggcaagcagggtggccttggactttgatttaggggatcgtgctttggcctggaaaataagcactggcctgcatgcctagaacctgagtgaaggcagtcaacatcctagtatgaatcagacctagcagaaatgtaaattatttcaagtacttcagggtttagttttcttagtgacaccctggaccctggatgctgctttctaaagtgcacctgatccatgcagttttatgtcttcatataactggtatcttgtgagtttgcaagcaatgggatgagcaagaaaaaaaggacgcatggaggagaaaaatttgaacgaggctagtgcaatgttttgctgatagattacattgttagggagctggtgattttttgccatggtcgtatcgtggacagcttttccgtggaaattcaaggcatctgtattaggcaaatgtgagtgcccttgatcttgtattgatcagtgccaatgtactgggaaagcaggtaccccagtgaaactggtctgtgcttggtttaacagctccaacaatttcagatccatggggctgcttgaccatagaccctgtttactccatgcctgttcaaaagtcattttgacttctagctttgtttcactttcttctttcaatacttctgtttcctcgtccttttccttcatattccatggctatttctttcctactttacagtttcccccagacccagattttttcacacctctgcatcatagacaactgagtagctcccttggcccctcctccatcctctcacaccctgtgctccgttcctcagccgtttggacagggagctccgctgtcaccaaggagcccatgtgagacacactgctgtgactgcctcttgttaatgtcagcatcacctcatcacttaagcaaaaa

SEQ ID NO: 41268 - DNA, 4060 bp, Artificial Sequence
  derived and/or modified sequence
tccctggtccgtgtgtagtaaggtgcgcagcctcggctgcttctgggcatagactccacagatttttcacagttgccctggaacacatcatcgcacaaaccggaaggagggcactgtgacccgaaagagaccaagtgtgtttgctgtgcggctgacagcctgactcccgggtcctgttgctctctgtcctgtaaattaagagcagatggagtggataaactgagagcgcaggagaaggtaacacaagtcagaacttccaccaagggcattactgagacatggagaacgttgataattctctggatggcagtgatgtgtcagaaccagcaaaaccagaagccggacttgaagtggctcagtcgatcctgagtaagttctctatgaaatccctatttgggtttacgagtaaattagaatctgtgaatccagaagaggaagatgctgtgctgaaagcattccatagtttagacgtgaatcccacatctcagcaggatgattccagcaatggcttggatccacaggaagcagggtctcgggtttcacctgacctcggaaatgatgagaaaattgcaagcgtggagacagaatcagagggaagtcagagaaaagaagcagggacatctctccttgctcaagagctgcttccactgtctactttgaaagggacaaaagacgatgtcatttgtgttcgtgggaccctggtgcacaccaccagtgattctgactctgatgatggtggccaggagccagaggagggaagcagcaccaatggcccaaagtcccctagtggtgttttatctgagccatctcaggagtccaaagaaaacccaggaggtttcagggaaaatactgtcactggggaaatgaatggtgcagagctctgtgcagaagatcctcaaaggattccacctgagatgagcagcaaactggaagctggcaacggtggtcttcagacagagcgtcgccccagccaggaccaggtgggagaagaagggtcccaagacctacctgcagtaacaaaccagaattcgagtgttggtatcactgagagtgcctcttctaaaaaagaagtctctggagagaagtcattccaacttccagcttttttcagtgggcttcgtgtgctgaagaagggggctaccgctgagggaggagagaccatcacggaaattaaaccaaaggatggggacttagctttgctcaaattgacgcagcctgtgcagaagtccttagtgcaggcagggctgcagacagtgaagagtgagaagaaagcaactgatccgaaggccactcccactctcctggagcagctctctctgctgctcaacattgacatgcccaaaactgaaccgaagggagcagaccctgagtcgcccaggagagaagagatgggctgcaatgctgaccaagagagccagagcggccctggagtaccacaaacccagggtggtgaggtcaagccaaagtcgccagagacagccctggaggcttttaaagccctattcatccggccccccagaaaggggaccacagctgacacctctgagctggaagctctcaagcgcaagatgagacatgagaaggagtcgctaagagctgtgtttgaacggtccaattctaagccagcggatggcccctctgattccaaaagtcctgaccacagcctgactgagcaggatgacaggactcctggcagacttcaagctgtctggccacccccaaagacaaaagacacagaagaaaaagtgggactgaagtacactgaagcaggtaatgtgaaaggaagctagggacccgggaatgaatctcttcctgcaatggcttttagttctagcttagttgactctcagaatttggggttttatttcattataaaatgtaatgctgaagggtttctttttggttttgctgttaaagtgaacctttgcacacttattgttaacgagcctctgaaagatgaaagatgaatgcagtggaatgaatgaaagggggaatgtgtgtgaagtaggagaaccttgggggacctgatggagaaggtagattgcaaatccctcaggaagccggtggttggtcctcatacaattttgtgagctggcagtgttgctagaagaggcagagtatggttctctagagctgtaatctgatttgttgtttgtcttcgagtaatgcttttgagataaaggaaccttgtgcagagtgaatgtacagataccgtatcagttactcgttcacttttgtgagacaaagctttatttaatgcatggccaactttaaagcaacctaactctctggaaacctgcctaggaactttacttgaatttatttaaatgaaatgggaatctagatatggttactatttaagtggaagtttcacgtgaactgtaaaatgacaccaaagcattagaggatgggtatgtaagatattaagaattgcatgtgtgtgtatatatccatgaaacctctctgccttcttcctgatatttggagattacctatacgtggcttatatttgttgtttttattaggtgtatgtgtgcattgaggtctatctatctatctggttatagaaaaataacttctttccattcctgttcattgatagacatgaacagatcaaagttgggtggttcagtaggtttttccataatatcaaattactccagtgattgagaacacactggcagttgaatcttgagatgatttctagctttcatttacacagtttctgcagggcattggttacttcatagcattttctttctgtggtgtttgacttacaggatgaaaactcatatccttaatgaaaatatgtatagcaatttaagtcttctttcccacatttgattttccaaaaatcataattgtgtaagaatgaacagcataagggtggaaaatgattgtttcatctgagcagagcaattcagacacagcagtaaagaaagcataaggatgttctaggtaattgaagcatagaagtagcatagggctaaacttctgtttaacccaaacttgaatggaaaatttcctaaaccacattagatcacttttttccttttgctttgtttagtccaaacgcacttaactttattttctctagggtaattacatatatgactgtatcaatgagggtcgtactaatcaggaatcaggtggcactcaaatggagtgatttgaggagagtttattagagacctttcacagaggtacagacggggtttagaaaaagcagtaagagagcgctactctggggccagtaccaaggagaagcttttaccacacccaagcctgaaggggcaagagtagaagtcgctatcgaaaactagaacttaagagggaggctgagtggtgtggaggcagctgctgggcaggacccgcagccctcagcagggaggtgccgccggtccatagtgacatgccaggctgggaactgagggcacacaacctgatctcttctcatcccactctctggtccctcatcgtcattcccattggccaaacccaaagagaagtcagcagactgggagccacttgaggctatcatttcaggcctgtcaccggggcccagaaagggcacagacctggagaagcacgtagaagatcccctgcacagttatggtaccaccatgggcgcccagcaggccctgggcagagagacttctaaagccctcctggagaagaatctgcacagacatgctggtgttgtcataccacacgacacgggagtttagtacaagggcacaaagacaagcttctgttattatcatcctgtgggagggttatattttctagtataatcagttcatagaaaatatacagctattattcgaggcttgctctgtagaaaactacttcattttaatgtgagggatttgtttactgatctcagaaaatctctcataaggttttaaatgttccccaaataaagtaaaatttgaagatatccagaaaaatcatgaagcaaaagaaactttctatgattctatttcagagaaactgttgtcacttttgaaactaggcctatgaatttaatgtggaaaaataaaaatagaatttgaatcat

SEQ ID NO: 41269 - DNA, 3591 bp, Artificial Sequence
  derived and/or modified sequence
atggagaacgtggataatagccttgacggaagcgacgtttcagagccagcgaaacctgaagctggactggaggtggcgcagtcgatactgtcaaagttcagtatgaagtctttgtttggattcacttccaaattggagtcagtgaatcctgaggaggaagacgctgtcttgaaagcattccactccctggacgtcaatcccacatcccagcaagacgactcttccaatggcctggacccacaggaggcaggaagccgggttagcccagacctgggtaacgacgaaaagatcgctagcgtcgagaccgagtccgaagggtcgcagaggaaagaggcaggtaccagccttctcgctcaagaactgctgcccttaagtactttgaaaggtactaaagatgacgtcatctgtgtgaggggaaccctggtccataccacaagcgattcagacagcgatgacggaggccaggagcctgaggaaggcagcagcactaacggacccaagtctcctagtggggtgctatccgaaccatcgcaggagtcaaaagagaatcctggggggttccgcgagaacactgtcaccggtgagatgaacggggcagaattatgcgcggaggatccccagaggatacctccagagatgtcctccaagctggaggctggcaacggggggcttcagaccgaaaggcggccaagccaagatcaggtcggggaagagggttctcaggatctgccagcagtgacaaatcagaactctagcgtcggcatcactgaatctgcaagctctaaaaaagaagtttcaggcgagaaaagctttcagcttcccgcctttttctctggactaagggtgctaaaaaaaggcgccacagctgaagggggagagaccatcaccgagataaaacccaaggacggggatctagcacttctaaaacttacacagccagtgcagaagtccctggtacaagcaggcctacagactgtgaaaagcgaaaagaaggccaccgacccaaaagccaccccaacgctgctcgaacagctttccttattgctcaatattgacatgccaaaaacagaacctaaaggagcggatccggaaagccccaggcgcgaggagatgggatgtaatgcagatcaagaatctcagtccgggccaggggtaccgcagacacagggaggcgaagtcaagcccaagtctcccgagacagccttagaggctttcaaggcgctctttatccgaccccctcgcaagggcaccactgctgataccagtgaacttgaagcgctgaaaagaaagatgcgacacgaaaaggaatccctccgggccgtgtttgaaaggagtaattctaaacctgcagacggcccatccgatagtaagagtcccgatcacagcctgacagaacaggacgaccgaactcccggacggctgcaagcagtatggcctccgcccaagaccaaagacactgaagaaaaagtcggtctgaaatatacggaggccgagtaccaggccgcaattctgcacctcaaacgagaacataaggaggagattgaaaacctgcaggcccagttcgagctgagagcatttcacattcgcggcgaacacgccatgataaccgcccgcctagaagaaactatcgagaatctcaaacacgaattggagcatcgatggcgtggcggctgtgaagagagaaaggacgtttgtatttcaacggacgatgactgccctccaaaaactttcagaaacgtatgcgttcagaccgatcgcgagaccttcttgaagccttgtgagagcgagtcaaaaactacacggagcaaccagctagttccaaagaaactcaacatatcgtcactgtctcaactcagcccgcctaacgaccacaaggatatccacgcggccttacagccaatggaggggatggcatcaaaccaacagaaagcattacccccacctccggcatccatacccccacctcccccactgccaagcggcttgggtagcctatcccccgcgccccctatgccgcccgtatctgccggtccacctctccccccacccccaccaccaccaccacctctgcccccgcccagttccgctggtcctccaccccctccccctccacctcccctgccaaacagtcctgctccccctaatccgggcggcccaccccccgcccctcctcctccaggtctggcccctccacctccacccggactgttcttcggccttggttcatcttcatcacaatgcccccgaaagccagcaatagagccgagctgcccgatgaagcctctgtactggacacggatacagatctcagacagaagtcagaacgccacacctaccctatgggattccctcgaagagcccgatatcagggacccatctgagtttgagtatctgttctccaaagacactacacagcagaagaagaagccgctaagcgaaacatacgagaaaaaaaacaaagttaagaagattatcaagctattagacggcaagcggagtcagacagtggggatcttgattagcagccttcaccttgaaatgaaagatatacagcaggcaatcttcaacgtggatgacagcgtggtggacctcgaaacactggcggccctctatgagaatagagctcaggaagacgaactggtgaaaatcagaaagtattatgaaaccagcaaggaggaagaattaaagctccttgacaaacctgagcagttcctgcatgaactagcacagattcctaactttgcggaaagggcccaatgcatcatatttcgatcagtcttcagcgagggaatcacatccctacacagaaaggtggagatcatcacccgagcgagtaaggaccttcttcacgttaagtcagtaaaggacatacttgctctgatattggcattcgggaactacatgaatggaggtaataggacaagaggccaggccgatggctacagtcttgagatcctcccgaaattaaaggatgtgaaaagccgggataacggaattaatttggtagactatgtcgtaaagtactatctccggtactatgaccaggaggcagggaccgagaagagcgtgtttccactgccagagccacaggatttcttcctcgcttcacaggtgaagttcgaggacttgataaaggacctccggaagctcaagagacagctggaggcatcagagaaacagatggtggtggtgtgcaaggagtcccccaaggagtacctccagccttttaaggacaagctcgaggaatttttccagaaagcgaaaaaagaacacaaaatggaggaaagccacctcgagaatgcacagaagtccttcgaaaccaccgttcggtatttcgggatgaaacccaagtccggagagaaggaaattacgccaagctatgttttcatggtgtggtacgaattttgttctgactttaagaccatctggaagcgtgaatccaaaaatataagcaaagagcgactcaagatggcccaagagtccgtctcgaaactaacctctgagaaaaaggtggaaacaaagaagatcaacccaacagcgagcctgaaggagagactgaggcagaaggaggcctccgtgacgaccaactag

SEQ ID NO: 41270 - DNA, 1512 bp, Artificial Sequence
  derived and/or modified sequence
atggaaaacgtcgataactcgctggacggttccgatgtgtcagaaccagcaaagcccgaagccgggcttgaggtggcacaaagcattttaagtaagttttctatgaagagtctgttcggttttaccagcaagctggaatcagtgaaccccgaggaagaagatgcagtgttgaaggccttccacagcctggatgtgaatcctacatcacagcaggacgacagcagcaacggtctggaccctcaggaagccggctctagagtcagtcctgatctcggcaacgatgagaaaatcgcatccgtcgaaactgagtctgagggctcacagaggaaagaggccggaacgagtctgttagctcaggagctgcttcctttatctaccttaaagggtacgaaggatgatgtcatctgcgtgcgaggcacattagtgcacaccacttctgactccgattcagacgacggaggccaggagcctgaagagggttcctccacaaacggtcctaagtctccttcgggggtgctgtcggaaccttcccaggaatctaaagagaacccaggaggctttcgtgagaacaccgtgaccggcgaaatgaatggagcagagttgtgtgccgaggacccccagcgcatcccacccgaaatgtcttccaagttggaggcgggtaacgggggcctgcagactgaaaggcgacccagtcaggatcaagtgggggaggaagggtcccaggacctgcctgcggtgacaaaccaaaacagttctgtcggtatcaccgagtcggcgagctctaagaaggaggtgtctggcgagaagtcttttcagttaccagccttcttctcagggttacgggtcctcaagaagggcgcgacagcagaaggaggagaaactatcactgagattaagcctaaggacggcgacttagccctgctgaaacttacccagcccgtgcagaagtccttggtccaggccggcctgcagaccgttaagagcgaaaaaaaggccacagatcctaaggctactcccactctattggaacaactgtcactgctgcttaacatcgatatgcccaagactgagccaaaaggggccgatcccgaatcacctcggagggaggaaatggggtgcaatgcagaccaggaaagccagagcggccctggagtgccccagacccaaggaggggaggtgaaaccaaaatcaccagaaacggctttggaggcttttaaggctctcttcatccgtcccccccgaaaagggacaaccgccgacactagcgagctggaggcattaaagagaaaaatgaggcacgagaaagagtcacttagagcggtgtttgagcggtccaacagcaaacctgctgacggcccaagtgactcgaaatccccagatcattcattgaccgaacaggacgaccgcactcccggccgtctgcaagctgtgtggccacctcctaagaccaaggataccgaggaaaaagtggggctgaagtacacggaagcaggcaatgtcaaaggtagctag

SEQ ID NO: 41271 - DNA, 3591 bp, Artificial Sequence
  derived and/or modified sequence
atggagaatgtggacaacagcctggatggcagtgatgtgtctgagcccgccaagccagaggccggcctggaggtggcccagagcatcctgagcaagttctccatgaagagcctgtttggcttcaccagcaagctggagagcgtgaaccctgaggaggaggatgctgtgctgaaggccttccacagcctggatgtgaaccccaccagccagcaggatgacagcagcaatggcctggacccccaggaggccggcagccgggtgtccccagacctgggcaatgatgagaagatcgcctctgtggagacagagagcgagggcagccagaggaaggaggccggcaccagcctgctggcccaggagctgctgcccctgagcaccctgaagggcaccaaggatgatgtgatctgtgtgcggggcaccctggtgcacaccaccagtgacagcgacagtgatgatggcggccaggagcctgaggagggcagcagcaccaacggccccaagagccccagcggcgtgctgtctgagcccagccaggagagcaaggagaaccctgggggcttcagagaaaatacagtgactggagagatgaatggagctgagctgtgtgccgaggacccccagaggatccccccagagatgagcagcaagctggaggccggaaatggaggcctgcagacagagcggcggcccagccaggaccaggtgggggaggagggcagccaggacctgcctgctgtgaccaaccagaacagctctgtgggcatcacagagagcgccagcagcaagaaggaggtgtctggagagaagagcttccagctgcctgccttcttcagcggcctgcgggtgctgaagaagggggccacagctgagggcggggagaccatcacagagatcaagcccaaggatggagacctggccctgctgaagctgacccagcctgtgcagaagagcctggtgcaggccggcctgcagacagtgaagtctgagaagaaggccacagaccccaaggccacccccaccctgctggagcagctgagcctgctgctgaacatcgacatgcccaagacagagcccaagggagctgaccctgagagcccccggcgggaggagatgggctgcaatgctgaccaggagagccagagcggccctggggtgccccagacccagggcggggaggtgaagcccaagagccctgagacagccctggaggccttcaaggccctcttcatccggccccccaggaagggcaccacagctgacaccagcgagctggaggccctgaagaggaagatgagacatgagaaggagagcctgcgggctgtgtttgagaggagcaacagcaagccagcagatggccccagcgacagcaagagcccagaccacagcctgacagagcaggatgacaggaccccaggccgcctgcaggccgtgtggcccccacccaagaccaaggacacagaggagaaggtgggcctgaagtacacagaagctgagtaccaggccgccatcctgcacctgaagcgggagcacaaggaggagattgagaacctgcaggcccagtttgagctgcgggccttccacatccggggggagcacgccatgatcacagcccggctggaggagaccatcgagaacctgaagcatgagctggagcaccgctggaggggcggctgtgaggagaggaaggatgtgtgcatcagcacagatgatgactgcccccccaagaccttcagaaatgtgtgtgtgcagacagaccgggagaccttcctgaagccctgtgagagcgagagcaagaccaccaggagcaaccagctggtgcccaagaagctgaacatcagcagcctgagccagctgagccccccaaatgaccacaaggacatccatgctgccctgcagcccatggagggcatggccagcaaccagcagaaggccctgcccccacctccagccagcatccccccacctccacccctgcccagcggcctgggcagcctgagccctgccccacccatgcctcctgtgtctgctggcccccccctgcccccacctcctcctcctcctccacccctgcccccacccagcagcgctggccccccacctcctcctcctcctccacccctgcccaacagccctgccccacccaaccctgggggccccccaccagcccctcctcctcctggcctggcccctcctcctcctcctggcctcttcttcggcctgggcagcagcagcagccagtgccccaggaagccagccatcgagcccagctgccccatgaagcccctgtactggacccgcatccagatcagtgacaggagccagaatgccacccccaccctgtgggacagcctggaggagccagacatccgggaccccagcgagtttgagtacctgttcagcaaggacaccacccagcagaagaagaagcccctgtctgagacctatgagaagaagaacaaggtgaagaagatcatcaagctgctggatggcaagaggagccagacagtgggcatcctgatcagcagcctgcacctggagatgaaggacatccagcaggccatcttcaacgtggatgacagcgtggtggacctggagaccctggccgccctgtatgagaacagagcccaggaggatgagctggtgaagatcaggaagtactatgagaccagcaaggaggaggagctgaagctgctggacaagccagagcagttcctgcacgagctggcccagatccccaactttgctgagcgggcccagtgcatcatcttccgctctgtgttcagcgagggcatcaccagcctgcacaggaaggtggagatcatcacccgggccagcaaggacctgctgcacgtgaagtctgtgaaggacatcctggccctgatcctggccttcggcaactacatgaatggaggcaacagaacccggggccaggctgatggctacagcctggagatcctgcccaagctgaaggatgtgaagagccgggacaatggcatcaacctggtggactatgtggtgaagtactacctgcgctactatgaccaggaggccggcacagagaagagcgtcttccccctgcctgagccccaggacttcttcctggccagccaggtgaagtttgaagatctcatcaaggacctgaggaagctgaagaggcagctggaggccagcgagaagcagatggtggtggtgtgcaaggagagccccaaggagtacctgcagcccttcaaggacaagctggaggagttcttccagaaggccaagaaggagcacaagatggaggagagccacctggagaatgcccagaagagctttgagaccaccgtgcgctacttcggcatgaagcccaagagcggggagaaggagatcacccccagctatgtgttcatggtgtggtatgagttctgcagcgacttcaagaccatctggaagcgggagagcaagaacatcagcaaggagcggctgaagatggcccaggagagcgtgtccaagctgaccagcgagaagaaggtggagaccaagaagatcaaccccacagccagcctgaaggagcggctgcggcagaaggaggcctctgtgaccaccaactag

SEQ ID NO: 41272 - DNA, 1512 bp, Artificial Sequence
  derived and/or modified sequence
atggagaatgtggacaacagcctggatggcagtgatgtgtctgagcccgccaagccagaggccggcctggaggtggcccagagcatcctgagcaagttctccatgaagagcctgtttggcttcaccagcaagctggagagcgtgaaccctgaggaggaggatgctgtgctgaaggccttccacagcctggatgtgaaccccaccagccagcaggatgacagcagcaatggcctggacccccaggaggccggcagccgggtgtccccagacctgggcaatgatgagaagatcgcctctgtggagacagagagcgagggcagccagaggaaggaggccggcaccagcctgctggcccaggagctgctgcccctgagcaccctgaagggcaccaaggatgatgtgatctgtgtgcggggcaccctggtgcacaccaccagtgacagcgacagtgatgatggcggccaggagcctgaggagggcagcagcaccaacggccccaagagccccagcggcgtgctgtctgagcccagccaggagagcaaggagaaccctgggggcttcagagaaaatacagtgactggagagatgaatggagctgagctgtgtgccgaggacccccagaggatccccccagagatgagcagcaagctggaggccggaaatggaggcctgcagacagagcggcggcccagccaggaccaggtgggggaggagggcagccaggacctgcctgctgtgaccaaccagaacagctctgtgggcatcacagagagcgccagcagcaagaaggaggtgtctggagagaagagcttccagctgcctgccttcttcagcggcctgcgggtgctgaagaagggggccacagctgagggcggggagaccatcacagagatcaagcccaaggatggagacctggccctgctgaagctgacccagcctgtgcagaagagcctggtgcaggccggcctgcagacagtgaagtctgagaagaaggccacagaccccaaggccacccccaccctgctggagcagctgagcctgctgctgaacatcgacatgcccaagacagagcccaagggagctgaccctgagagcccccggcgggaggagatgggctgcaatgctgaccaggagagccagagcggccctggggtgccccagacccagggcggggaggtgaagcccaagagccctgagacagccctggaggccttcaaggccctcttcatccggccccccaggaagggcaccacagctgacaccagcgagctggaggccctgaagaggaagatgagacatgagaaggagagcctgcgggctgtgtttgagaggagcaacagcaagccagcagatggccccagcgacagcaagagcccagaccacagcctgacagagcaggatgacaggaccccaggccgcctgcaggccgtgtggcccccacccaagaccaaggacacagaggagaaggtgggcctgaagtacacagaagctggaaatgtgaagggcagctag

SEQ ID NO: 41273 - DNA, 3591 bp, Artificial Sequence
  derived and/or modified sequence
atggagaacgtggacaacagcctggacggcagcgacgtgagcgagccggccaaaccagaggctggcctagaggtcgcgcagtccatactgagtaaattcagcatgaagtccctttttggctttacatcaaagttggagtcagtgaacccagaggaggaagacgctgtgctcaaggcctttcattcacttgacgtcaatcccacttcccagcaggacgacagctctaatggtctcgatccacaagaagccggaagtagagtgtcccctgatctcggaaacgatgaaaagatcgcatccgtggaaactgagtccgaagggtcccagcgcaaagaggccggaacctctctccttgcacaggaattgttgcctctgtctaccctcaagggcactaaagatgatgtgatttgtgtccgcggtaccttagtccacaccaccagcgattccgacagcgatgacggcggacaggagccagaggagggatcctctactaatggacctaaatcaccttcaggagtcttgtcggagccgagccaggaaagcaaagagaatcctggagggttccgcgaaaacactgttactggcgaaatgaatggggctgaactatgcgctgaggatccacagaggatccccccagagatgtccagtaaacttgaggcagggaatggaggtctgcaaaccgagcggcgtcctagccaggatcaggtgggtgaggagggttctcaggatctgccagctgtgacgaaccagaatagttctgtaggaattaccgagagtgccagttccaaaaaggaggttagtggggagaaatctttccagttgccggccttcttcagtggtctgcgcgtcctgaaaaagggagctactgccgagggaggcgaaaccatcaccgagataaaaccaaaagacggagaccttgccctgctcaagctaacccagccagttcaaaaaagtctggtacaggctggcctccagaccgtcaaatcagaaaagaaagcaacagatcccaaggctacaccgactctcctggagcagttatcgctgcttctgaatatagacatgccaaaaaccgaaccaaagggtgcagaccctgaatcacccagaagggaggaaatgggttgcaacgcagatcaagaaagtcagtctggcccaggggtaccacaaacgcagggcggcgaggttaagccaaagtcaccggagacagccctagaagctttcaaggctttgttcattaggccaccgaggaaaggtaccaccgctgacacttctgaattggaggcactcaagaggaagatgaggcacgaaaaagagtcactccgagccgtgtttgagagatctaacagcaagcctgctgatggcccttctgattctaagagccccgatcactcccttaccgagcaggacgacagaacccccggacggttacaagccgtctggccccctcccaaaacgaaagatacagaggaaaaggtcgggctgaaatacaccgaggctgagtatcaagccgccattcttcacttgaaaagagagcacaaagaggaaatcgagaacctgcaagcgcagttcgagctacgggcctttcacataaggggcgagcatgcaatgataaccgcgcgtctggaagagaccatcgaaaatctgaagcatgagctagagcacagatggagggggggatgcgaggagcgtaaagacgtatgcattagcacagatgacgattgcccgcctaaaactttcagaaatgtttgtgtgcagacagaccgcgagacattcttaaagccatgcgagtctgaaagtaaaacaacccgcagcaaccaattggtgccgaaaaagttgaacatctcctctctgagtcaactctccccccccaatgatcacaaggatatacatgcagcactgcagccaatggagggcatggcctccaaccaacagaaagccttacctcctccaccagcatctatccccccaccgcctcccctgcccagcggattaggctctctttcccccgccccccccatgccgcctgtcagcgccgggccccctctgcctcctccccccccccccccaccgccactgcccccaccaagtagtgctggtcctccacctccgcccccacctccccccctccccaactccccagccccaccgaatcccggtggaccaccccccgcccctcctcccccgggcttggcgccgcctcctcctcccggactttttttcggcctgggttcttcctcctcccagtgccctcgaaaacccgccattgagccttcttgccccatgaaacccctctactggaccagaattcagatttctgatcgatcacagaatgccacaccaactctttgggactcactggaggaacccgatatcagggatccatcggagtttgaatacctgttctcgaaggacacgacacaacagaaaaagaaacctctgagcgagacgtatgaaaaaaagaataaagtgaagaagatcattaagctgctcgacggcaagcgcagccagactgtggggattcttatcagcagtctgcacttggagatgaaagatatccagcaggccatcttcaacgttgatgattcagtagtggatctggaaacccttgctgcactgtatgaaaatcgggctcaagaggacgagcttgtaaaaatacggaaatactatgagacgagcaaggaagaagagctgaagctacttgataagcccgaacaattcctgcacgagttggcacagatccccaactttgcagaacgcgcgcaatgtatcatctttcggagtgtgttttctgaaggcatcaccagcctacacaggaaggtcgagataattacccgtgcctctaaggacctgctgcatgtgaagagcgtgaaggacattctcgctttaatcctcgcctttggaaactatatgaatggcggaaataggacaagagggcaagcagatggttactcccttgaaatactcccaaagctgaaggatgtgaagtcgcgagacaatggcattaatctcgtcgattacgttgttaaatattacctccggtactacgaccaggaagctgggacagagaagtccgtatttccgcttcctgagccccaggacttttttctcgcctctcaggtgaagtttgaggatttgattaaggacttgcgaaagttgaagagacaactggaggcctcggagaagcagatggtggtagtgtgcaaggaatcacctaaagaatacctgcagcccttcaaggataagcttgaagaatttttccagaaggctaaaaaagagcataagatggaggaatcgcatctcgagaacgcccaaaagtcttttgaaacaacggtgaggtactttggcatgaagcccaaatctggagaaaaggaaataaccccatcgtacgtcttcatggtttggtatgaattctgtagcgacttcaaaactatctggaagagagaatctaagaatatctcgaaggaaaggttgaagatggcccaggagtctgtcagtaagctcactagcgaaaagaaggtggaaaccaagaaaatcaatcctacagccagtctgaaagagcggctccgccagaaggaggcttctgtcacaacaaattag

SEQ ID NO: 41274 - DNA, 1512 bp, Artificial Sequence
  derived and/or modified sequence
atggagaacgtggacaacagcctggacggcagcgacgtgagcgagcccgccaaacctgaggcgggactcgaggtcgcacaatccatccttagcaaattttccatgaaatcccttttcggctttacttccaaactggagtcggtgaaccctgaggaggaggacgcagtgctcaaagcttttcacagcttggatgttaacccaacgagccagcaggatgattctagtaacggtctggatccacaagaagccgggagtagagtttcacccgacctcggaaatgacgagaagattgcatcagttgaaaccgaatcggaaggttcgcagcgtaaggaggcaggaacttccctgctggcccaggagttgttgccactcagtacgcttaagggaaccaaggatgatgtcatctgtgtgagaggcactctcgtgcacacaacgagtgatagcgacagcgatgacggcggtcaagaacccgaggaggggagctcgacaaatgggcccaaaagtccttctggtgtcctgtctgagccaagccaggagtcgaaggaaaatccaggtggatttagggagaacactgtgaccggagagatgaatggggctgagctgtgtgccgaggatccacagcgcataccgccagaaatgtcatccaaactggaagcaggcaacggagggctgcaaaccgagaggaggccttctcaagaccaggtaggagaggaaggttctcaggatctgccagcagttaccaaccagaacagtagtgtgggtatcaccgagtcggcctcatcaaagaaagaagtttccggggagaaaagcttccagctcccagcatttttctccgggctccgggtccttaagaaaggagccaccgcagagggcggagaaaccattactgaaatcaagcccaaagacggggacctggcacttctgaaactgacccaacccgtacaaaagagcttggtccaggccgggctgcagacggttaagagcgaaaagaaggcaactgaccctaaggcaacaccaacccttctggagcagctgtccctcctgcttaacatcgacatgcccaagactgagccgaaaggcgccgatccagagagtccaagaagagaggaaatgggatgcaatgcggaccaggagagccagtcaggcccgggggtccctcaaacacagggcggcgaggtcaaaccaaaaagccccgaaaccgccctcgaagcattcaaggccctattcattcgccccccccgcaagggaaccactgccgatacaagcgaactagaggccctgaaaaggaaaatgaggcacgagaaggaatctctgcgcgcagtgttcgagcgctccaactccaaacctgccgacggtccatctgatagcaaatctcccgaccacagtcttactgagcaggacgaccgaactcctgggcggctgcaggctgtttggcccccccctaagacaaaagacaccgaggaaaaagtgggtcttaaatacacagaggctggcaacgttaagggctcttag

SEQ ID NO: 41275 - DNA, 3591 bp, Artificial Sequence
  derived and/or modified sequence
atggaaaacgtggacaactctctggatggcagtgatgttagcgaacctgctaagcccgaggcaggtctggaggttgctcagtctattcttagcaaatttagtatgaagtcactgttcgggttcacaagtaaacttgaaagcgtcaacccagaggaagaggatgcagtcttgaaggctttccactctttggatgttaacccgacatctcaacaggatgacagttcgaatggactggaccctcaagaggctgggagtcgggtatcaccggacttgggaaatgatgagaaaattgcttctgtcgaaacggagagtgagggctcgcagcgtaaggaggctgggacctccctgctcgctcaggaactgttgcctctctctactctcaaagggacaaaagatgatgtcatttgtgtgcgtggcacattagtccacacaacaagcgactcagacagcgacgatgggggtcaggagccggaggagggttctagcacaaatggacccaagtccccctcaggtgtcctgagtgagccatcacaggaatcgaaggagaatcctgggggatttcgagaaaacactgttacaggcgagatgaatggcgctgagttatgcgcggaagatcctcagcggatcccgcctgagatgtcttctaaactggaggcaggcaacgggggactccagactgagaggcggccttcccaggaccaggtgggtgaggaggggagtcaggacctcccagccgtcaccaatcagaactcgtctgtcggtatcaccgagagcgctagctccaaaaaagaggtctccggcgaaaaaagttttcaactgccagcttttttctctggactacgcgttctcaagaaaggtgccacagcagaaggaggagaaactatcaccgaaatcaagccgaaagatggagacttggctctgctcaaactaactcagccggttcagaagtctctcgtgcaggctgggctccagactgtgaaaagcgagaaaaaggcaaccgacccgaaagctacacccacgcttctcgagcaactctctctgctgctaaacattgacatgcccaaaacagagccaaaaggcgctgatcctgagtcccctagacgcgaggaaatgggttgcaacgctgatcaggaatctcagagcggacccggagtgcctcaaacccagggaggggaagtcaaaccgaaatctcctgagacggcactggaggcatttaaggctttgtttatacgtcctcccaggaaagggacgacagctgacacgtcagagctcgaagccttgaaacggaagatgaggcacgagaaggagagtttacgcgcagtatttgagaggtcaaactctaaacccgcagatggcccatcggactccaagtcccctgatcattctcttaccgaacaggatgatcgcacaccaggccgtctgcaagccgtctggcctccgccaaagactaaggacacagaggagaaagttgggttgaagtacacggaagctgagtatcaagctgctatactgcatctgaagcgagaacacaaagaagagatagaaaacctgcaagcacagttcgagctgcgggcatttcatatacgcggtgaacatgcgatgatcacggcccgactggaggaaaccatcgagaacttaaagcacgagctcgagcatcggtggagaggcggatgtgaggagcgcaaggatgtttgcatctcaaccgatgacgattgcccccctaagacattccggaatgtttgcgtccaaactgatagagagacctttcttaaaccttgtgagtcagagtcaaagaccaccaggtctaaccagttggttcccaaaaagctgaacatctcctccctatcccagctgtctccgcctaatgaccacaaggatatccatgccgctcttcagcctatggagggcatggcctctaaccagcagaaggccttaccccctcccccagcctctatccccccacctccccctctgcctagcgggctaggttcattaagtcctgctcccccaatgccacccgtaagcgcgggacctcccctacccccaccgcctccgcctccgccacctctgcctcccccatctagcgccggacctcccccaccccctcctccccctccgctgcctaatagccccgctccaccaaatccaggaggccctcctcctgcccctccaccacccggactggctccgccaccacctccgggtctatttttcggcttgggttcatcatcctcccagtgccctagaaagccagcaatagagccttcatgtccaatgaaacccttgtactggactcgaattcagatctcggaccgtagccagaacgctaccccaacactttgggactcactggaagagccagacatcagagaccccagtgagttcgaatacctttttagcaaggacacgacccagcagaaaaaaaagcctctcagcgaaacgtatgagaagaagaataaagtaaaaaaaatcataaagctgctggatgggaagcgttctcagaccgtgggaattctcattagctctctccacctcgaaatgaaagacattcagcaagccattttcaatgtggacgacagcgtggtggacctggagaccctggctgcactgtacgaaaatcgcgctcaggaggatgagctggtaaaaatccgaaaatattatgaaacctccaaagaagaggaactgaaattgcttgataagcccgaacaattcctgcacgagttggcacagatccccaacttcgctgaaagggcacagtgcatcatttttcggtctgtattttccgaaggcataactagcctccaccgcaaagtggagattataacacgtgcttctaaggacctgctgcacgtgaagtcagtgaaggatatcctcgccttgattttggctttcggtaattatatgaacggtggcaatcgcacccgtgggcaagccgacgggtatagcctcgagattctgcctaaactgaaggatgtgaaaagccgcgacaacggtattaatctcgtggattacgtggttaagtactacctgaggtattacgatcaggaggcaggaacagaaaaatccgtgttccccttgccagaaccccaggacttttttcttgcatcacaggtcaaattcgaggatctgatcaaggacctccgcaagctgaagcggcagttggaggctagcgaaaagcaaatggtggttgtgtgtaaagaaagtccaaaggaatatctgcagccctttaaggacaaactggaggagttctttcagaaagccaagaaagaacataagatggaggagtcacatcttgagaatgcccagaaaagtttcgagacgacagtgaggtattttggaatgaaacccaagtccggggaaaaagagatcacaccttcatacgtgttcatggtttggtatgagttctgctccgacttcaagacaatttggaagagggagtctaaaaacatttcgaaagagcgcttgaaaatggctcaagaatctgtgtcaaaattgactagcgaaaaaaaggtggaaaccaagaaaattaaccctacagcaagcctgaaggagcggctgcggcaaaaagaagcctctgtcacaaccaattag

SEQ ID NO: 41276 - DNA, 1512 bp, Artificial Sequence
  derived and/or modified sequence
atggagaatgttgacaatagcctcgacgggtcagacgtttccgaacccgctaaacctgaggccggtttggaggtagcccaaagcatcttaagcaagttttcgatgaagtccctgttcggctttactagcaagctcgagtccgtgaatcccgaggaggaagacgcggtgttaaaggccttccactcactcgatgttaaccccacatctcagcaggacgactcatccaatggcctggatccgcaggaggcaggtagccgagtatcacctgatctcggcaacgacgagaaaattgcctctgtcgagaccgagtccgagggaagtcaaagaaaagaagcagggacaagtcttctcgcccaggagttattgccactgagcaccctcaaggggacgaaagatgacgtcatctgtgtacggggaacactggtgcacactactagcgacagtgacagcgacgacgggggtcaggaacctgaggaaggatccagtaccaacggccctaagagcccctcaggtgtgcttagcgagccttcgcaggagtccaaggaaaatcctgggggatttagagagaatacagtgaccggagagatgaacggcgctgagctgtgcgcggaggacccccaacgaatccctccagaaatgtcttcaaagctggaggccggtaacgggggtcttcagactgagaggcgtccttcacaagatcaggtcggagaagaggggtctcaagatttgccagccgttactaaccagaactccagcgtggggattactgaatccgctagtagtaaaaaggaagtgtccggcgagaaatcttttcagctcccggcattttttagtggtctgcgagtcctcaagaagggcgctactgcagaaggcggagaaactattacagagataaagccaaaggatggagacctggctctgttgaaactgacccagccagtgcagaagtcgcttgtgcaggcgggattgcaaacggtaaaaagcgagaagaaggctaccgatcctaaggctacacccactctgctggaacagctctctcttctgcttaacatcgatatgcctaaaacagagccgaagggtgcagacccagagagccctagacgggaagaaatggggtgtaatgccgatcaggaatcacaaagcggacctggcgttccccaaacacaaggaggggaagtgaagccaaagagtccagagactgctctcgaagcgtttaaggccctgtttatcagacccccaagaaagggaacaaccgccgacacatcagaactcgaagcactgaagagaaaaatgcggcatgagaaagaatccctacgcgcagtatttgagaggtctaatagcaaaccagcagacggcccatctgactcaaaatcacccgatcattcattaactgaacaggatgacagaacgcccggtcgcctgcaggccgtttggcctcccccaaaaacgaaggatacagaagagaaagtgggactgaagtacacagaggctggaaacgtgaagggtagctag

SEQ ID NO: 41277 - protein, 509 aa, Artificial Sequence
  derived and/or modified sequence
MVDGVMILPVLIMIALPSPSMEDEKPKVNPKLYMCVCEGLSCGNEDHCEGQQCFSSLSINDGFHVYQKGCFQVYEQGKMTCKTPPSPGQAVECCQGDWCNRNITAQLPTKGKSFPGTQNFHLEVGLIILSVVFAVCLLACLLGVALRKFKRRNQERLNPRDVEYGTIEGLITTNVGDSTLADLLDHSCTSGSGSGLPFLVQRTVARQITLLECVGKGRYGEVWRGSWQGENVAVKIFSSRDEKSWFRETELYNTVMLRHENILGFIASDMTSRHSSTQLWLITHYHEMGSLYDYLQLTTLDTVSCLRIVLSIASGLAHLHIEIFGTQGKPAIAHRDLKSKNILVKKNGQCCIADLGLAVMHSQSTNQLDVGNNPRVGTKRYMAPEVLDETIQVDCFDSYKRVDIWAFGLVLWEVARRMVSNGIVEDYKPPFYDVVPNDPSFEDMRKVVCVDQQRPNIPNRWFSDPTLTSLAKLMKECWYQNPSARLTALRIKKTLTKIDNSLDKLKTDC

SEQ ID NO: 41278 - protein, 87 aa, Artificial Sequence
  derived and/or modified sequence
MVDGVMILPVLIMIALPSPSMEDEKPKVNPKLYMCVCEGLSCGNEDHCEGQQCFSSLSINDGFHVYQKGCFQVYEQGKMTCKTPPSP

SEQ ID NO: 41279 - protein, 21 aa, Artificial Sequence
  derived and/or modified sequence
MVDGVMILPVLIMIALPSPSM

SEQ ID NO: 41280 - protein, 71 aa, Artificial Sequence
  derived and/or modified sequence
MVDGVMILPVLIMIALPSPSMEDEKPKVNPKLYMCVCEGLSCGNEDHCEGQQCFSSLSINDGFHVYQKGCF

SEQ ID NO: 41281 - protein, 73 aa, Artificial Sequence
  derived and/or modified sequence
MVDGVMILPVLIMIALPSPSMEDEKPKVNPKLYMCVCEGLSCGNEDHCEGQQCFSSLSINDGFHVYQKGCFQV

SEQ ID NO: 41282 - protein, 512 aa, Artificial Sequence
  derived and/or modified sequence
MTAPWVALALLWGSLCAGSGRGEAETRECIYYNANWELERTNQSGLERCEGEQDKRLHCYASWRNSSGTIELVKKGCWLDDFNCYDRQECVATEENPQVYFCCCEGNFCNERFTHLPEAGGPEVTYEPPPTAPTLLTVLAYSLLPIGGLSLIVLLAFWMYRHRKPPYGHVDIHEDPGPPPPSPLVGLKPLQLLEIKARGRFGCVWKAQLMNDFVAVKIFPLQDKQSWQSEREIFSTPGMKHENLLQFIAAEKRGSNLEVELWLITAFHDKGSLTDYLKGNIITWNELCHVAETMSRGLSYLHEDVPWCRGEGHKPSIAHRDFKSKNVLLKSDLTAVLADFGLAVRFEPGKPPGDTHGQVGTRRYMAPEVLEGAINFQRDAFLRIDMYAMGLVLWELVSRCKAADGPVDEYMLPFEEEIGQHPSLEELQEVVVHKKMRPTIKDHWLKHPGLAQLCVTIEECWDHDAEARLSAGCVEERVSLIRRSVNGTTSDCLVSLVTSVTNVDLPPKESSI

SEQ ID NO: 41283 - DNA, 1539 bp, Artificial Sequence
  derived and/or modified sequence
atgacagctccttgggtggccctggctctgctctggggctctctatgcgccggtagcgggaggggcgaggcagagactagagaatgcatatactataatgcaaattgggagttagagcggaccaaccagtcaggtctggagcgttgcgaaggtgagcaagataagcgtctccattgttacgcttcctggagaaacagttctggcacaatcgagctggtcaaaaagggatgctggcttgacgactttaattgctacgaccgtcaagaatgtgtcgcaacagaagaaaatccacaggtctacttttgttgttgtgaggggaatttctgcaacgaacgttttactcatctcccggaggccggcggccccgaagtgacctatgagcctccaccaacagcgcccactttactgactgtgctggcgtacagcctactccctattgggggcctgagcctgattgtcctgctcgccttctggatgtaccggcatcgcaagcctccctatgggcatgtggatattcacgaagacccaggacccccacctccgagccctctagtgggcctgaaacctctgcaactgctcgaaatcaaggcacgtggtcgtttcggctgtgtgtggaaagctcagctgatgaacgactttgtagcggtgaagatctttccgttacaggataagcagtcctggcagtcagagagggagattttcagcacgccagggatgaagcatgaaaacttgttgcagttcatcgcagccgaaaaacgaggaagtaaccttgaagtcgagttatggttaattaccgcattccacgacaaaggctcgctgactgactacctcaaaggaaatattattacctggaacgaactttgccacgtggcagagactatgtctcgcgggctcagttatttacacgaagacgtgccctggtgtagaggcgaaggtcacaaaccctcgattgcacacagggactttaagtccaaaaatgtgctcctgaaatccgacttaacagccgtgctcgccgactttggactggctgtgaggttcgagcccgggaaacccccgggagatactcatgggcaggtggggacacggcgatatatggcaccggaagttctcgagggtgccatcaactttcagagagatgccttcctgaggattgatatgtatgctatgggcttggtgctctgggaactggtgtctaggtgtaaagctgctgacggacccgtggatgaatacatgctgcctttcgaagaggagataggccagcacccctcactggaggaacttcaggaagtagtggttcataagaagatgcggcctaccatcaaagaccactggctcaaacaccctggcctcgctcaattgtgcgttaccattgaggagtgttgggaccacgatgcagaagcaagactctcagccggatgcgtagaggagcgtgtttccctcatcaggcgaagtgtgaatggcaccacaagcgactgcttagtgtctctggttacttcagtcaccaatgtggatttgccgcctaaagaatcgtccatttag

SEQ ID NO: 41284 - DNA, 1539 bp, Artificial Sequence
  derived and/or modified sequence
atgacagccccctgggtggccctggccctgctgtggggcagcctgtgtgccggcagcggccgcggggaggccgagacccgggagtgcatctactacaatgccaactgggagctggagaggaccaaccagagcggcctggagcgctgtgagggggagcaggacaagaggctgcactgctacgcctcctggaggaacagcagcggcaccatcgagctggtgaagaagggctgctggctggatgacttcaactgctatgaccggcaggagtgtgtggccacagaggagaacccccaggtgtacttctgctgctgtgagggcaacttctgcaatgaacgcttcacccacctgcctgaggccggcggccctgaggtgacctatgagcccccacccacagcccccaccctgctgactgtgctggcctacagcctgctgcccatcggcggcctgagcctcatcgtgctgctggccttctggatgtaccgccacaggaagccaccctacggccacgtggacatccacgaggaccccggccccccaccacccagccccctggtgggcctgaagcccctgcagctgctggagatcaaggcccggggccgcttcggctgtgtgtggaaggcccagctgatgaatgactttgtggccgtgaagatcttccccctgcaggacaagcagagctggcagagcgagcgggagatcttcagcaccccaggcatgaagcatgagaacctgctgcagttcatcgctgctgagaagaggggcagcaacctggaggtggagctgtggctgatcacagccttccatgacaagggcagcctgacagactacctgaagggcaacatcatcacctggaatgagctgtgccacgtggccgagaccatgagccggggcctgagctacctgcatgaagatgtgccctggtgccgcggggagggccacaagcccagcatcgcccaccgggacttcaagagcaagaatgtgctgctgaagagtgacctgacagctgtgctggccgactttggcctggccgtgcgctttgagcccgggaagcccccaggggacacccacggccaggtgggcacccggcgctacatggcccctgaggtgctggagggcgccatcaacttccagagagatgccttcctgagaattgacatgtatgccatgggcctggtgctgtgggagctggtgagccgctgcaaggctgctgatggccctgtggatgagtacatgctgccctttgaggaggagatcggccagcaccccagcctggaggagctgcaggaggtggtggtgcacaagaagatgaggcccaccatcaaggaccactggctgaagcaccctggcctggcccagctgtgtgtgaccatcgaggagtgctgggaccatgatgctgaggcccggctgtctgctggctgtgtggaggagcgggtgtccctcatccgccgctctgtgaatggcaccaccagtgactgcctggtgtccctggtgacctctgtgaccaacgtggacctgccccccaaggagagcagcatctag

SEQ ID NO: 41285 - DNA, 1539 bp, Artificial Sequence
  derived and/or modified sequence
atgaccgccccctgggtggccctggccctgctgtggggcagcctgtgtgccggttccggaagaggggaagccgagacaagagagtgcatttattacaatgctaattgggaactcgaacggacaaatcaatccggcctggaaagatgtgagggcgaacaggataaaagacttcattgctatgcatcttggcgtaactcgtccggaactatcgagctcgttaagaagggctgttggctcgacgattttaattgctatgaccgacaggagtgtgttgcgacagaagagaaccctcaggtctacttttgctgctgtgaaggcaacttttgcaacgagcggttcactcatctccctgaagcaggcggtcccgaggtcacatacgaaccaccgccgaccgcaccaactcttctgaccgtactggcttactctttattgcctataggtggtctgagccttattgtactgttggcgttttggatgtacagacatcgaaaaccaccttacggacacgttgacatccatgaggacccaggccctcccccaccctcccctctggtaggcctgaagccgctgcagcttttggagataaaggcaagggggagattcggctgcgtgtggaaagcacagcttatgaacgactttgtagctgtcaaaatatttccgcttcaagataagcaatcttggcagtcagagagggaaatttttagcacacccggaatgaagcacgagaacctgctgcagttcattgcagccgagaagaggggatccaacctcgaagtagaactttggctgatcaccgccttccatgacaaaggaagcttaaccgactacctcaagggtaacattatcacttggaatgagctttgtcatgtcgctgagacaatgagtaggggactcagttacttacatgaggacgtcccgtggtgcaggggggagggccacaagccgagtatcgcccaccgggactttaaatccaagaacgtgcttcttaaatctgacctgaccgccgtcctcgccgacttcggcttggcggtgagatttgagccaggcaaaccaccaggcgacactcatggtcaggtgggcactcgcagatacatggccccggaagtgctggagggcgcaattaacttccagagggacgcatttttaagaattgatatgtacgccatggggctcgtgctgtgggaactcgtgtcacgatgcaaggccgctgatggccctgtagatgagtacatgctcccctttgaggaagaaatcggacagcatccttcgctagaggagctccaggaggtcgtggttcacaagaaaatgcgacccactattaaagaccactggctcaaacacccaggtcttgcccagctctgcgtgacaattgaagagtgctgggaccatgacgcagaagctaggctcagcgccgggtgtgtagaggaacgagtgtcgctaattagacgcagcgttaacgggacaacaagcgattgtctcgtttctctcgtgacctcagtgacaaacgtcgatctccctccaaaggaaagttcgatctag

SEQ ID NO: 41286 - DNA, 1539 bp, Artificial Sequence
  derived and/or modified sequence
atgacagcgccatgggtcgcactggcgttgctgtggggaagcctatgtgccggtagcggccgtggcgaagcggaaacacgcgagtgtatttactataacgccaactgggaactcgagcgaacaaatcagtctggcctggagcgctgtgagggcgaacaagacaagaggctacactgttatgccagttggaggaatagcagtggcactatagaattagtcaaaaaggggtgttggctagacgactttaactgctacgatcgacaagaatgcgtagccaccgaggaaaatccccaggtgtatttctgctgttgcgaaggcaatttttgcaacgaacgtttcactcacctgccagaagccggtggtcccgaagtcacatatgaaccccctcctacagcacctaccttgctcaccgtgctggcttattcactgctgccaatcggcggattgtctctcattgttctgctcgctttctggatgtaccgacacaggaagcccccttacggccatgtggacatccacgaggacccgggacctccacccccttcccccttagtaggcttaaagcccctacagttactagagatcaaagcaagaggacgctttggatgcgtttggaaggctcagttaatgaatgacttcgttgcagtcaagatcttcccactccaggataagcagtcctggcagagcgagcgcgaaatcttttcaacccctggaatgaagcacgagaatctgttgcagtttatcgctgctgagaaaagggggagcaaccttgaggtagagctatggttgataacggcttttcacgacaaagggagtctcactgattatcttaaaggcaatatcattacatggaacgagttgtgtcacgtcgcagagaccatgagcagaggtttatcttacctgcacgaggacgtcccttggtgcagaggcgaaggccataagcctagcattgcccacagagacttcaaatctaaaaacgtgttgttgaagagtgatttgacagcagtgctggctgattttgggctggccgtgcggtttgagcctggcaagccaccaggtgacacacacggtcaggtcggaactcgaaggtacatggcccctgaagttcttgagggggctataaacttccagagggacgccttcctacgaatcgacatgtacgctatgggccttgtgttgtgggagctggttagccggtgcaaagccgcagatggccctgtggatgagtacatgctacctttcgaggaggaaatcggtcagcacccttctttggaggaactccaagaggtcgtcgtgcacaagaaaatgaggcctactatcaaagaccattggttgaagcaccctggcttagctcaactgtgcgtgaccatagaggagtgctgggatcacgacgcagaggcacgcctgtccgcaggatgcgtggaagagagggtttctctgatcagacgctccgtcaacggtactacatccgactgtctagtgtccctcgttacttccgtgaccaacgtcgacctcccccctaaagaatcttccatttag

SEQ ID NO: 41287 - DNA, 1539 bp, Artificial Sequence
  derived and/or modified sequence
atgaccgccccctgggtggccctggccctgctgtggggcagcctgtgcgccggcagcggcagaggcgaggccgagaccagagagtgcatctactacaacgccaactgggagctggagagaaccaaccagagcggcctggagagatgcgagggcgagcaggacaagagactgcactgctacgccagctggagaaacagcagcggcaccatcgagctggtgaagaagggctgctggctggacgacttcaactgctacgacagacaggagtgcgtggccaccgaggagaacccccaggtgtacttctgctgctgcgagggcaacttctgcaacgagagattcacccacctgcccgaggccggcggccccgaggtgacctacgagcccccccccaccgcccccaccctgctgaccgtgctggcctacagcctgctgcccatcggcggcctgagcctgatcgtgctgctggccttctggatgtacagacacagaaagcccccctacggccacgtggacatccacgaggaccccggcccccccccccccagccccctggtgggcctgaagcccctgcagctgctggagatcaaggccagaggcagattcggctgcgtgtggaaggcccagctgatgaacgacttcgtggccgtgaagatcttccccctgcaggacaagcagagctggcagagcgagagagagatcttcagcacccccggcatgaagcacgagaacctgctgcagttcatcgccgccgagaagagaggcagcaacctggaggtggagctgtggctgatcaccgccttccacgacaagggcagcctgaccgactacctgaagggcaacatcatcacctggaacgagctgtgccacgtggccgagaccatgagcagaggcctgagctacctgcacgaggacgtgccctggtgcagaggcgagggccacaagcccagcatcgcccacagagacttcaagagcaagaacgtgctgctgaagagcgacctgaccgccgtgctggccgacttcggcctggccgtgagattcgagcccggcaagccccccggcgacacccacggccaggtgggcaccagaagatacatggcccccgaggtgctggagggcgccatcaacttccagagagacgccttcctgagaatcgacatgtacgccatgggcctggtgctgtgggagctggtgagcagatgcaaggccgccgacggccccgtggacgagtacatgctgcccttcgaggaggagatcggccagcaccccagcctggaggagctgcaggaggtggtggtgcacaagaagatgagacccaccatcaaggaccactggctgaagcaccccggcctggcccagctgtgcgtgaccatcgaggagtgctgggaccacgacgccgaggccagactgagcgccggctgcgtggaggagagagtgagcctgatcagaagaagcgtgaacggcaccaccagcgactgcctggtgagcctggtgaccagcgtgaccaacgtggacctgccccccaaggagagcagcatctag

SEQ ID NO: 41288 - DNA, 2136 bp, Artificial Sequence
  derived and/or modified sequence
cgcccgcctctttgtatccaacatccgggtttccccgctggctcggctccgtggccgccgctcaggagccattttggactcggttcagctcccctcccccccacccctccccccgttcatggcccctccggactcggcccctgcgcccggggcccgggcccagccccgccgcgctatgcctgagtcgggcgcgccccggcccgtgccccgccgccgccccccggcccccgcgtcgccccggagcccgggccgcagcctgcgccgcccgcagcggccctgagcccggccccgccgaccggcccttggagcccgaacgctgctcggggacgaaggcgcaggaagcgcgcagggaacgagaccgaaggaaggagcgggaaggagagcgcagccgccgcctggccctgcgcgccccgggagcgccgtgcggccctgcccgcgggctccgggtgtgcgcggggcggcgccgcggaacatgacggcgccctgggtggccctcgccctcctctggggatcgctgtgcgccggctctgggcgtggggaggctgagacacgggagtgcatctactacaacgccaactgggagctggagcgcaccaaccagagcggcctggagcgctgcgaaggcgagcaggacaagcggctgcactgctacgcctcctggcgcaacagctctggcaccatcgagctcgtgaagaagggctgctggctagatgacttcaactgctacgataggcaggagtgtgtggccactgaggagaacccccaggtgtacttctgctgctgtgaaggcaacttctgcaacgaacgcttcactcatttgccagaggctgggggcccggaagtcacgtacgagccacccccgacagcccccaccctgctcacggtgctggcctactcactgctgcccatcgggggcctttccctcatcgtcctgctggccttttggatgtaccggcatcgcaagcccccctacggtcatgtggacatccatgaggaccctgggcctccaccaccatcccctctggtgggcctgaagccactgcagctgctggagatcaaggctcgggggcgctttggctgtgtctggaaggcccagctcatgaatgactttgtagctgtcaagatcttcccactccaggacaagcagtcgtggcagagtgaacgggagatcttcagcacacctggcatgaagcacgagaacctgctacagttcattgctgccgagaagcgaggctccaacctcgaagtagagctgtggctcatcacggccttccatgacaagggctccctcacggattacctcaaggggaacatcatcacatggaacgaactgtgtcatgtagcagagacgatgtcacgaggcctctcatacctgcatgaggatgtgccctggtgccgtggcgagggccacaagccgtctattgcccacagggactttaaaagtaagaatgtattgctgaagagcgacctcacagccgtgctggctgactttggcttggctgttcgatttgagccagggaaacctccaggggacacccacggacaggtaggcacgagacggtacatggctcctgaggtgctcgagggagccatcaacttccagagagatgccttcctgcgcattgacatgtatgccatggggttggtgctgtgggagcttgtgtctcgctgcaaggctgcagacggacccgtggatgagtacatgctgccctttgaggaagagattggccagcacccttcgttggaggagctgcaggaggtggtggtgcacaagaagatgaggcccaccattaaagatcactggttgaaacacccgggcctggcccagctttgtgtgaccatcgaggagtgctgggaccatgatgcagaggctcgcttgtccgcgggctgtgtggaggagcgggtgtccctgattcggaggtcggtcaacggcactacctcggactgtctcgtttccctggtgacctctgtcaccaatgtggacctgccccctaaagagtcaagcatctaagcccaggacatgagtgtctgtccagactcagtggatctgaagaaaaaaggaaaaaaagttgtgttttgttttggaaatcccataaaaccaacaaacacataaaatgcagctgctattttaccttg

SEQ ID NO: 41289 - protein, 281 aa, Artificial Sequence
  derived and/or modified sequence
MAFSDLTSRTVHLYDNWIKDADPRVEDWLLMSSPLPQTILLGFYVYFVTSLGPKLMENRKPFELKKAMITYNFFIVLFSVYMCYEFVMSGWGIGYSFRCDIVDYSRSPTALRMARTCWLYYFSKFIELLDTIFFVLRKKNSQVTFLHVFHHTIMPWTWWFGVKFAAGGLGTFHALLNTAVHVVMYSYYGLSALGPAYQKYLWWKKYLTSLQLVQFVIVAIHISQFFFMEDCKYQFPVFACIIMSYSFMFLLLFLHFWYRAYTKGQRLPKTVKNGTCKNKDN

SEQ ID NO: 41290 - protein, 165 aa, Artificial Sequence
  derived and/or modified sequence
MAFSDLTSRTVHLYDNWIKDADPRVEDWLLMSSPLPQTILLGFYVYFVTSLGPKLMENRKPFELKKAMITYNFFIVLFSVYMCYEFVMSGWGIGYSFRCDIVDYSRSPTALRMARTCWLYYFSKFIELLDTIFFVLRKKNSQVTFLHVFHHTIMPWTWWFGVKFA

SEQ ID NO: 41291 - DNA, 846 bp, Artificial Sequence
  derived and/or modified sequence
atggctttctcggacctaacttctcggaccgtgcacctgtacgacaattggatcaaggatgccgatccccgagtggaggattggctactaatgagcagccctctgccacaaactatcctgctcggcttttacgtgtactttgttacaagtctcgggccaaagctgatggagaaccgtaagcctttcgaactgaagaaagctatgattacatacaacttcttcattgttctgttctccgtatatatgtgttatgaatttgtgatgagtggatggggcatcggctactcattcaggtgcgatatcgtggactactctcgcagccccacagccttgcgcatggccagaacatgctggctttactacttttcaaagttcatcgaactgctggatacgatcttctttgtgctccggaaaaaaaacagccaggtgacatttctgcatgtgttccatcacacaattatgccctggacgtggtggttcggggttaagtttgccgcggggggactcggtacctttcacgcgttactgaatacagcagtgcatgtcgtcatgtatagctactacggactgagcgccctaggccccgcgtaccagaagtacctctggtggaaaaagtacttaacatctttgcagctggttcagtttgtgatcgtggctattcacattagccaatttttcttcatggaggactgcaagtatcaattcccagtttttgcttgtattataatgtcttacagctttatgttcctcctgctgttccttcacttctggtatagggcttatacgaaaggtcagcgtcttcctaaaacagtcaaaaatggcacttgtaagaacaaggacaactag

SEQ ID NO: 41292 - DNA, 846 bp, Artificial Sequence
  derived and/or modified sequence
atggccttcagcgatctgactagcagaactgtccacctgtatgacaattggattaaggacgccgatccccgtgttgaggactggctgctgatgagctcccctctgcctcagaccattctcttaggattctacgtgtattttgtcacatctctgggtccaaagcttatggaaaaccgaaagcctttcgagctcaaaaaagctatgattacctacaatttttttattgtcctgttctcagtgtacatgtgctacgagtttgtcatgagcggatggggaatcggatatagtttcaggtgtgatattgtcgactatagccggagtcccacagcactccgcatggctcggacctgttggctttactatttctcaaaattcatcgaactgctcgatactattttctttgtgcttcgcaaaaagaattcacaagtgacattcctccacgtgtttcaccatacaatcatgccttggacgtggtggtttggcgtcaagttcgctgctggtggcctcggaaccttccacgccttgctcaataccgccgtacacgtggtgatgtacagctattacggacttagcgcactgggacctgcataccagaaatatctgtggtggaaaaagtatttgacaagcctccagttggtacagttcgtcattgtggccatccatatctcccagttctttttcatggaagattgtaagtaccagtttccagtattcgcctgcatcatcatgtcctattcgttcatgtttcttttactgttcctgcatttttggtatcgggcgtataccaaaggacagcgcctgcctaagacagtgaaaaatggcacatgtaaaaacaaggacaactag

SEQ ID NO: 41293 - DNA, 498 bp, Artificial Sequence
  derived and/or modified sequence
atggcgttttcagatctgacgtcacggactgtgcacctgtacgataactggattaaggatgcagacccccgcgtggaagattggcttttgatgagctcacctttgccacagacgattcttctgggattctatgtgtatttcgtcacatccctcggaccaaaacttatggagaatcgaaaaccgtttgaactcaagaaagccatgattacctacaacttcttcatcgtgctcttcagcgtgtatatgtgctacgagttcgtaatgagcggctgggggattgggtacagcttccgctgcgatatagtggattactccaggtcacccaccgcgcttcgtatggcacggacctgctggctctactatttttccaaattcatcgagctgctcgacactatcttcttcgtcctacgcaaaaaaaattcacaggtgacgttcttgcacgtgttccaccacacgattatgccctggacttggtggtttggggtgaaattcgcttag

SEQ ID NO: 41294 - DNA, 846 bp, Artificial Sequence
  derived and/or modified sequence
atggcgttttccgacctgacaagccgcactgttcacctgtacgataactggatcaaggatgccgatccgcgggtagaagactggctcctgatgtcttccccactgccacagactattctcctaggcttctacgtgtactttgtgaccagcctcggccccaagttgatggaaaaccgtaaaccgttcgagctgaagaaggccatgatcacatacaatttcttcattgtccttttctcagtctatatgtgttatgaatttgttatgtcagggtggggaatcgggtactcctttcgttgcgacatcgttgactactcaagaagccccactgctctgaggatggccagaacatgctggctgtactacttttctaaatttatcgagctgttggacacaattttcttcgttttgcggaagaaaaactctcaggttaccttcctgcacgtctttcatcacacaatcatgccgtggacatggtggtttggtgtgaagttcgctgccggtggacttggtactttccacgccctcctgaacacggcagtgcatgtggtcatgtattcttactacggcctttccgccctcgggccagcctaccaaaagtacttgtggtggaagaagtacctcacaagcttacagctagtgcaatttgtgatcgtggcaattcatatctcgcagttctttttcatggaggactgtaaatatcagtttcccgtgtttgcctgcatcattatgtcatactcttttatgtttctcctgctgttcctacacttctggtaccgggcctatacaaaagggcagcgtctgccaaagacggtgaaaaacggtacctgcaaaaacaaggataactag

SEQ ID NO: 41295 - DNA, 498 bp, Artificial Sequence
  derived and/or modified sequence
atggcgttcagcgacttgacctcaaggacagtgcatctgtacgacaattggataaaggatgcggatcctcgagtggaggactggctgctgatgtcttcccccctgccccagacaatactcctgggtttctatgtctacttcgtcaccagtctaggccccaagttaatggagaatcgcaaaccctttgagctcaagaaggccatgattacgtacaatttcttcattgtgctcttctcagtctatatgtgctacgagtttgtgatgtcaggctggggcatcggatattcattcagatgtgacattgttgattacagtcggtctcccacagctctccgcatggctaggacatgctggctatattacttttccaagttcatagagctgctcgacaccattttttttgttcttaggaagaagaactcgcaagtcacattcctgcatgttttccaccacaccattatgccctggacttggtggttcggggtgaaattcgcttag

SEQ ID NO: 41296 - DNA, 846 bp, Artificial Sequence
  derived and/or modified sequence
atggccttcagtgacctgaccagcaggacagtgcacctgtatgacaactggatcaaggatgctgacccccgggtggaggactggctgctgatgagcagccccctgccccagaccatcctgctgggcttctacgtgtactttgtgaccagcctgggccccaagctgatggagaacaggaagccctttgagctgaagaaggccatgatcacctacaacttcttcatcgtgctcttctctgtgtacatgtgctatgaatttgtgatgagcggctggggcatcggctacagcttccgctgtgacatcgtggactacagccgcagccccacagccctgaggatggcccggacctgctggctgtactacttcagcaagttcatcgagctgctggacaccatcttctttgtgctgaggaagaagaacagccaggtgaccttcctgcacgtgttccaccacaccatcatgccctggacctggtggtttggagtgaagtttgctgctgggggcctgggcaccttccacgccctgctgaacacagctgtgcacgtggtgatgtacagctactacggcctgagcgccctgggccctgcctaccagaagtacctgtggtggaagaagtacctgaccagcctgcagctggtgcagtttgtgattgtggccatccacatcagccagttcttcttcatggaggactgcaagtaccagtttcctgtgtttgcctgcatcatcatgagctacagcttcatgttcctgctgctcttcctgcacttctggtaccgggcctacaccaagggccagaggctgcccaagacagtgaagaatggcacctgcaagaacaaggacaactag

SEQ ID NO: 41297 - DNA, 498 bp, Artificial Sequence
  derived and/or modified sequence
atggccttcagtgacctgaccagcaggacagtgcacctgtatgacaactggatcaaggatgctgacccccgggtggaggactggctgctgatgagcagccccctgccccagaccatcctgctgggcttctacgtgtactttgtgaccagcctgggccccaagctgatggagaacaggaagccctttgagctgaagaaggccatgatcacctacaacttcttcatcgtgctcttctctgtgtacatgtgctatgaatttgtgatgagcggctggggcatcggctacagcttccgctgtgacatcgtggactacagccgcagccccacagccctgaggatggcccggacctgctggctgtactacttcagcaagttcatcgagctgctggacaccatcttctttgtgctgaggaagaagaacagccaggtgaccttcctgcacgtgttccaccacaccatcatgccctggacctggtggtttggagtgaagtttgcctag

SEQ ID NO: 41298 - DNA, 846 bp, Artificial Sequence
  derived and/or modified sequence
atggccttcagcgacctgaccagccggaccgtgcacctgtacgacaattggattaaggacgcagatccccgtgtggaggattggctgttgatgtcgagcccactgccacagacaattctcctggggttctacgtgtattttgtcacgagccttgggcctaaactgatggagaatcggaaaccattcgagctgaaaaaagcgatgataacatataactttttcatcgtgttgttctccgtctacatgtgttatgagttcgtcatgagcgggtggggcataggttactcttttaggtgtgacatcgtagactactcaaggtccccgacagcacttaggatggctaggacctgttggctgtattacttttcgaagtttatcgaactgctggacaccattttctttgtcctccgcaaaaagaatagtcaggttacatttctccacgtgttccatcacaccattatgccctggacctggtggtttggggtaaaattcgcagctgggggattaggaacctttcacgctctgctaaacactgctgtacacgtggtgatgtattcctactacggcctatctgcgctgggtccagcttaccagaaatacctgtggtggaaaaaatacctcacatcattgcagctcgtacagttcgtaatcgtagctattcacatctctcagttcttttttatggaagattgcaagtatcagttccctgtttttgcctgcataatcatgtcatattcgttcatgttcctgctcctgtttctgcatttttggtatcgggcctatacaaaagggcaaagactgcccaagactgttaaaaacggcacatgcaagaacaaggataactag

SEQ ID NO: 41299 - DNA, 846 bp, Artificial Sequence
  derived and/or modified sequence
atggccttcagcgacctgaccagccggaccgtgcacctgtacgacaattggatcaaggacgctgaccctagagtggaagattggctgttaatgagtagtcccctcccacagactatcttgctcgggttctatgtctatttcgttacgagcctgggccccaagctgatggaaaaccgaaagcccttcgagctgaagaaagctatgattacctataacttcttcatcgttttattttctgtgtacatgtgttatgagtttgtcatgtcgggatggggcatagggtacagttttagatgtgacattgtcgattactcgagatcacccaccgccctgcgtatggcccgcacatgttggttatactacttttcaaaatttatcgaactgctcgacacgatcttctttgtcttgcggaagaagaatagtcaagtgacgttcctgcacgtgttccatcacacaatcatgccctggacttggtggttcggggtgaagttcgcagccggcggcctggggaccttccacgccctgctgaataccgccgtgcacgtagtcatgtatagctactatggattgagcgcattaggaccagcgtaccaaaagtatctgtggtggaaaaaatatttaacctctctgcaactggtgcaatttgttatcgtggcaatccacataagccaatttttttttatggaggactgcaagtaccagtttccggtctttgcttgcatcatcatgtcctacagcttcatgtttctgctgctattcttgcatttctggtaccgggcatatacaaagggacagcgcctgcccaagactgtcaagaatggcacatgcaagaacaaagataactag

SEQ ID NO: 41300 - DNA, 498 bp, Artificial Sequence
  derived and/or modified sequence
atggccttcagcgacctgaccagccggaccgtgcacctgtacgacaattggatcaaagacgcagatccccgcgtcgaagactggttgcttatgtcctctccattacctcagactatcttgctgggcttctatgtgtacttcgtgacttccctcggcccaaagcttatggaaaacagaaaaccctttgaactcaaaaaggccatgataacgtacaatttcttcatcgtactgttttccgtatacatgtgttacgagtttgtgatgtccggatggggcatcggctactccttccgatgtgatatcgtggattattccaggtcgcccacggccctgcggatggccagaacctgctggctctattatttctccaaattcatcgaactgctggataccattttctttgtgctgcggaagaagaactcacaggtgacctttctgcacgtgttccaccacaccataatgccctggacctggtggttcggcgtgaaatttgcctag

SEQ ID NO: 41301 - DNA, 846 bp, Artificial Sequence
  derived and/or modified sequence
atggccttcagcgacctgaccagccggaccgtgcacctgtacgacaactggatcaaggatgctgacccgcgagtcgaggactggctgcttatgagtagccccctcccacagaccattctgctgggcttttacgtatatttcgtcacctccttggggccaaaactgatggagaatcgtaaaccattcgaactcaaaaaagctatgattacatacaatttctttatcgtgctatttagtgtgtatatgtgctacgagttcgtgatgagtggctggggcatcggttacagctttcggtgtgacatagttgattacagtcgatctcctacagcactgcgaatggcccgcacatgttggttgtactatttttccaagttcatcgaacttttagatactatcttttttgtcctgcggaaaaagaattcccaggtcacatttctacatgtcttccaccatactataatgccttggacctggtggttcggagtcaaattcgcggccggggggctgggtacatttcatgccctgctcaatactgccgttcacgttgtgatgtattcatattatggattgagtgccctcggaccagcctaccaaaagtatctgtggtggaagaaatatctgacctctcttcagctggtgcagtttgtgatcgtggccatacacatttcccagtttttctttatggaagactgcaagtaccaatttcccgtgttcgcttgcattattatgtcctattccttcatgtttttattgctttttcttcatttctggtaccgcgcttacaccaagggtcagagactgcccaagacagtcaagaacggcacctgtaagaacaaggataactag

SEQ ID NO: 41302 - DNA, 498 bp, Artificial Sequence
  derived and/or modified sequence
atggccttcagcgacctgaccagccggaccgtgcacctgtacgacaattggatcaaggatgccgatcccagagtcgaagattggcttttgatgtcaagccccctgcctcagaccatactgctcggtttttacgtctattttgtgacgagtctggggcccaagctcatggagaataggaaaccatttgagcttaagaaggctatgatcacgtacaacttctttatcgtcctgttctcagtgtacatgtgctacgagtttgtgatgtcgggatggggcataggctatagctttaggtgcgacatagttgattactcaagatcacccacagcactgagaatggcgcgtacctgctggttgtactacttctctaagtttatcgaactgttagataccatttttttcgttctgcgaaagaaaaattcgcaggtgacattcctacatgttttccaccacaccattatgccatggacctggtggtttggtgtcaaatttgcttag

SEQ ID NO: 41303 - DNA, 846 bp, Artificial Sequence
  derived and/or modified sequence
atggcttttagcgatctgacttctcggactgtccacctgtacgacaactggatcaaggacgcagacccaagagtggaggactggctgctgatgtcaagccctcttcctcagacaatcctccttgggttttacgtatacttcgtaactagccttggtccaaagctgatggagaaccgcaagccatttgaattgaaaaaggctatgataacatacaactttttcatcgtgctcttttcagtctacatgtgttatgaattcgtcatgtctggatggggcattggatatagcttccggtgtgacatcgttgactattctagatccccgaccgcccttaggatggcaagaacctgttggctatattacttctcgaaatttattgaactcctcgacactatcttctttgtcctgcgaaaaaagaattcccaggtgaccttcctgcacgttttccaccacacaatcatgccatggacttggtggtttggcgtgaagttcgccgcaggaggcctagggacattccacgccttactgaatacagcagtccatgtcgtgatgtacagctactacggcctatcagctctgggcccagcataccagaaatacttgtggtggaagaaatacctgactagcttgcaactggtccagtttgtcattgtggcgattcacatcagccaatttttttttatggaggactgcaagtatcagttcccggtctttgcctgcattattatgtcttactcctttatgtttctcttactgttcttgcatttctggtaccgggcttacactaagggccagcgtcttcctaagactgtgaaaaatggcacatgcaagaacaaagataactag

SEQ ID NO: 41304 - DNA, 846 bp, Artificial Sequence
  derived and/or modified sequence
atggcctttagtgatctcacctcccggactgtgcacttgtacgataactggatcaaagatgcggatcctcgggtggaagattggctactgatgtcctcccccctgccccagaccatcttgctcgggttttacgtgtactttgttactagcctcggacccaaacttatggagaacaggaaaccttttgagctgaagaaggcaatgattacctataacttttttattgttctgttctctgtgtatatgtgctacgagtttgtcatgagcggatggggaatcgggtatagctttcgatgcgatattgtggattactctaggtccccaaccgctcttcgtatggctcgcacctgctggctgtactatttttccaaatttattgaactgctcgacactatctttttcgtgttgagaaagaagaattcccaagttacattcttgcacgtatttcatcacacaattatgccctggacctggtggttcggcgtgaagttcgctgctggaggattgggcacgtttcacgctctgttgaacactgccgtccacgtcgtgatgtattcttactacggcctctccgccctgggtcccgcttaccagaaatatctgtggtggaaaaagtatctcacctcactacagcttgtgcaatttgtcatagtcgcgattcatattagtcagttcttcttcatggaggactgtaagtatcagtttcctgtatttgcctgtattatcatgtcatactcgtttatgtttctgctgctcttcctccatttctggtacagggcatacacaaaagggcaacggctcccaaagacagttaaaaacggcacatgcaagaacaaggacaactag

SEQ ID NO: 41305 - DNA, 498 bp, Artificial Sequence
  derived and/or modified sequence
atggccttcagcgatctaacctctcgtaccgtgcacctgtacgacaattggattaaggacgccgaccctcgagtagaagattggttactgatgtcctcccccctgccccaaaccattctcctcgggttttacgtttattttgttacctccctgggacccaaacttatggaaaacagaaaaccttttgagttgaagaaggcaatgattacctataacttctttatagttctattctcagtatatatgtgttatgaattcgtcatgagcgggtggggtattggctactcgtttagatgtgatatcgtagattacagcaggtccccaactgccttaagaatggcacgaacctgttggctatattatttctccaaatttatcgaactcttagataccatattcttcgtcctccgcaaaaaaaacagccaagtgacattccttcacgtgttccatcacactataatgccttggacgtggtggttcggcgtgaaattcgcctag

SEQ ID NO: 41306 - DNA, 846 bp, Artificial Sequence
  derived and/or modified sequence
atggccttcagcgatctgacttcccgcactgtgcacttgtacgacaactggatcaaagatgccgaccctcgtgtcgaagactggctcctcatgagctcccctctaccacaaacgatcctgctgggtttttatgtgtattttgtcactagtttaggacccaagctgatggagaacagaaaacccttcgagcttaagaaggccatgattacttacaatttcttcattgtgctcttctcagtctacatgtgctacgagtttgtgatgtcagggtggggtatcggctactctttccgctgtgacatcgtggactattctagaagtccaacggccctcaggatggccaggacatgctggctgtactacttttcaaagttcattgagcttctcgacaccatttttttcgtgttaagaaagaagaactcacaggtgaccttcctgcacgttttccatcatactatcatgccttggacctggtggttcggggtgaaatttgctgccggtggtcttgggacattccatgccttactcaacaccgccgtgcatgtagttatgtattcctattacggtctttctgcccttggcccagcctatcagaaatacctctggtggaagaaataccttaccagtctgcaattggtgcaatttgttattgtggcaatacatatctcccagtttttttttatggaagactgcaagtaccagtttccagtatttgcctgcattataatgagctattctttcatgttcttgttgctgtttctccatttctggtatcgcgcatatacaaagggccagcgattgccaaaaaccgtaaagaatggaacatgcaaaaataaagataactag

SEQ ID NO: 41307 - DNA, 498 bp, Artificial Sequence
  derived and/or modified sequence
atggcctttagcgacctgactagtcgcacggtgcatttgtacgacaactggatcaaagatgccgatcctagggttgaagactggctgctgatgtccagccccctccctcagacgattcttctgggtttttacgtgtattttgtcaccagcctgggccctaagctcatggagaaccgtaagccatttgagctaaagaaagcaatgattacttacaatttcttcatcgtattattttccgtgtatatgtgttacgagtttgttatgtccgggtgggggatcggctattcgttcaggtgcgatatcgtggactacagccgtagtcccaccgccctacgaatggccagaacttgttggctgtattacttcagcaagtttatcgaattgctggatacaattttctttgtactccggaagaagaactcacaggtgacattcctgcacgtgttccatcacacaattatgccttggacctggtggtttggggtgaagtttgcctag

SEQ ID NO: 41308 - DNA, 846 bp, Artificial Sequence
  derived and/or modified sequence
atggccttcagcgacctgaccagcagaaccgtgcacctgtacgacaactggatcaaggacgccgaccccagagtggaggactggctgctgatgagcagccccctgccccagaccatcctgctgggcttctacgtgtacttcgtgaccagcctgggccccaagctgatggagaacagaaagcccttcgagctgaagaaggccatgatcacctacaacttcttcatcgtgctgttcagcgtgtacatgtgctacgagttcgtgatgagcggctggggcatcggctacagcttcagatgcgacatcgtggactacagcagaagccccaccgccctgagaatggccagaacctgctggctgtactacttcagcaagttcatcgagctgctggacaccatcttcttcgtgctgagaaagaagaacagccaggtgaccttcctgcacgtgttccaccacaccatcatgccctggacctggtggttcggcgtgaagttcgccgccggcggcctgggcaccttccacgccctgctgaacaccgccgtgcacgtggtgatgtacagctactacggcctgagcgccctgggccccgcctaccagaagtacctgtggtggaagaagtacctgaccagcctgcagctggtgcagttcgtgatcgtggccatccacatcagccagttcttcttcatggaggactgcaagtaccagttccccgtgttcgcctgcatcatcatgagctacagcttcatgttcctgctgctgttcctgcacttctggtacagagcctacaccaagggccagagactgcccaagaccgtgaagaacggcacctgcaagaacaaggacaactag

SEQ ID NO: 41309 - DNA, 498 bp, Artificial Sequence
  derived and/or modified sequence
atggccttcagcgacctgaccagcagaaccgtgcacctgtacgacaactggatcaaggacgccgaccccagagtggaggactggctgctgatgagcagccccctgccccagaccatcctgctgggcttctacgtgtacttcgtgaccagcctgggccccaagctgatggagaacagaaagcccttcgagctgaagaaggccatgatcacctacaacttcttcatcgtgctgttcagcgtgtacatgtgctacgagttcgtgatgagcggctggggcatcggctacagcttcagatgcgacatcgtggactacagcagaagccccaccgccctgagaatggccagaacctgctggctgtactacttcagcaagttcatcgagctgctggacaccatcttcttcgtgctgagaaagaagaacagccaggtgaccttcctgcacgtgttccaccacaccatcatgccctggacctggtggttcggcgtgaagttcgcctag

SEQ ID NO: 41310 - DNA, 3827 bp, Artificial Sequence
  derived and/or modified sequence
aacccagtcggcggccgggacagcgggggccgctgtgaggagctccgcgctcgcgctgccagtcgccgccctctctcccgcgcgcgcccggcgcttcggctccgctccctgtgcgaacccattaaaagagccagtaaatcctgtggaaaatggccttcagtgatcttacatcgaggactgtgcatctttatgataattggatcaaagatgctgatccaagagttgaagattggctcctcatgtcctcgcctctgccacaaaccatcctcctaggattctatgtctattttgtcacttccttgggaccaaagctcatggaaaatcgcaagccctttgaactcaagaaagcaatgataacgtacaattttttcatagtactcttttctgtgtatatgtgttatgagtttgtgatgtctggctggggtataggttattcatttcgatgtgacattgttgactattcacggtcacccacagctttgaggatggcacgtacctgctggctttattacttctccaaatttattgagctattagatacgatcttttttgttctgcgcaagaaaaatagccaagtgactttccttcatgtattccatcataccatcatgccgtggacctggtggtttggagtcaaatttgctgcaggtggtttgggaacattccatgcccttctaaatacagctgtacatgtagtcatgtattcctactatggactttctgcattggggccagcctaccagaagtatttgtggtggaaaaaatatttgacatcattacagcttgtccagtttgttattgtcgccatccacataagccagttctttttcatggaggattgcaagtatcagtttccagtctttgcgtgcatcattatgagttacagtttcatgtttctgctgctctttctccatttttggtaccgtgcttacaccaaaggtcagaggttgcccaaaactgtgaaaaatggaacttgcaaaaacaaagataattgaagcccaacataagtctatgatcgaaactgatacattgtcttccttgacaatcaagagatatttacctatgcagtgcattttgtatatttttcaaaactaagagcttgtatttttatggtaagttattgggatgtctgatatttgagagcccgaagcttccagataacagtcttctgataattagagcctacagcagccagaatttgtttttgtttttgtttttgtttttttagctgcttttaaacctaatccaaaggttttgtttaaaacattttgttgcagtgaaaaaaagatatgaagcaatacagtactcttcaaagaagtccaataaagatgaaaaatatcattaggtattttgagcacagacggagatccatgtgataaaatagattccttctgctgggtctggaaagtctggaaaccacctgtaggccctggctttgtcatttattgactgtattcagaagatactatatttgctctagagttaactcccattttagcaagctagcacaggtgaaaattgagtgagtttttgataacttgtcatttaaaatcattaatgataattttcaatggatcttttcagtagccatcaccagttttgctgataagacttcctcacaacccatttgttgtacaaactgtttcaaagtagcaatcctttgggttagtacacttgataccaagtttcattcagttgattattttcaaaacaaggtgatttgttttaatgggttaatgaatactttgctattactgttttacaattaactttgtatatctctggaaagaggtgaatttgtcaatgaaaaaagtattgtgtagttcagtgggaaaaacctgttgtctgttatagtatcacatcactttcttacattgtcatggtttaaattattatcttggtgaaatatataggttagatacttaaatgttcatattattagcacactacaggtactacccttaaatcataaataatattacccattgtacacagtttccagatatgagttagagtggctgtgaagcaactagaggcaaattgtggcacagagaatatccaggggaaaattgattatgtaagcaagggctgttctactttgagagagagacagacagactacataatagtaatatattatataattaatgttatagatacactgaacaataaaacattttctggaattatgaattaattaacaacctggatttctgtttccagacctataaaccatgtaatgaaggactgaaattcgtttggcatacactttgtttctttaaaattgctagtttctttctgttatttttacattttcttgtcagagaatcaaaactattagtcagtagagttttgtccatgaaataatatttggacatttgtgaatttttccctattttttttcttcttttatttatactcaattttgaagcactgtttatgtttgtaggactttaaacaattagtacttaaagccccagttaattttgaacacacagagatacttattgtactctgtgtacagtaagtatttttatgtttacacttaccagattcataaggttatttgcctttaagtgatcttttgtgattttacttgattacagcatgagaaggtaaaggttgataaatgggagtaattacatatatatatataatttattatttttttttctgaagcagagttttactcttgttgcccaggctagagtgcaatggcacaatctcggttcactgcaacctctgcctcccaggttcaagtgattctcctgtctcagcctcccaagtagctgggattacaggtgcccgccaccatgctcagctaatttttgtatttttagtagagacagggttggccaggctggtctcgagctcctgacctcaggtgatcctcccacctcggcctcccaaagttctgggattacaggggtgagccactgtgcccggccataattttatatttttagaaaataaagaatgaaggacaaaagagcacagctaaatgaaactgctgctctaatttattccactggaaaggtctcaggactccttaactgttttccaggtttggctcttcatatctaacctgtgctaaaatgagaaggtatgctaggtgctgttagaaatcacaccatttccaaagaacccaagtagtatagagaccaaaatgaggcaaaaataaaagagatgaaacaggagagtttatttcttgcatactttccgaccttcatcatacaacctctcctaacctccctgtagtctttaaaatgtttaacttgcctataagctaacatgtaataaaacacatactcaattatatgaatagaagtggagagccagaatgctacaaaagaaatcacagctgctagaagtatcctccatagaaacatcaacatgattgtggatcaaaatgattttcactggatatggaatttgtatgggccatatttattaaaagagttctgtgtggtcacatagagttcctttgggatttcatcccacttttcaggacttaatttgtttgggtttgcttacctaacaagcaacaacaacaacaaaataaatagttccaaaatctagtttattacataaatctctatgaatccttgagggcctatatctatattataaataaatacaaatatagatttttaaatatctatgggactttgccatttacagccttaagtataaaattacgagattatattctttccattaccctttatttctgctaactttttaaagactggaacattctgtggatgttgtcaaagtttgagtttgtttttccctgtgtattataataaatttgtggtattgcatgt

SEQ ID NO: 41311 - DNA, 3871 bp, Artificial Sequence
  derived and/or modified sequence
aacccagtcggcggccgggacagcgggggccgctgtgaggagctccgcgctcgcgctgccagtcgccgccctctctcccgcgcgcgcccggcgcttcggctccgctccctgtgcggcatttatagattataaactcatttctgttttattttactgaagaacccattaaaagagccagtaaatcctgtggaaaatggccttcagtgatcttacatcgaggactgtgcatctttatgataattggatcaaagatgctgatccaagagttgaagattggctcctcatgtcctcgcctctgccacaaaccatcctcctaggattctatgtctattttgtcacttccttgggaccaaagctcatggaaaatcgcaagccctttgaactcaagaaagcaatgataacgtacaattttttcatagtactcttttctgtgtatatgtgttatgagtttgtgatgtctggctggggtataggttattcatttcgatgtgacattgttgactattcacggtcacccacagctttgaggatggcacgtacctgctggctttattacttctccaaatttattgagctattagatacgatcttttttgttctgcgcaagaaaaatagccaagtgactttccttcatgtattccatcataccatcatgccgtggacctggtggtttggagtcaaatttgctgcaggtggtttgggaacattccatgcccttctaaatacagctgtacatgtagtcatgtattcctactatggactttctgcattggggccagcctaccagaagtatttgtggtggaaaaaatatttgacatcattacagcttgtccagtttgttattgtcgccatccacataagccagttctttttcatggaggattgcaagtatcagtttccagtctttgcgtgcatcattatgagttacagtttcatgtttctgctgctctttctccatttttggtaccgtgcttacaccaaaggtcagaggttgcccaaaactgtgaaaaatggaacttgcaaaaacaaagataattgaagcccaacataagtctatgatcgaaactgatacattgtcttccttgacaatcaagagatatttacctatgcagtgcattttgtatatttttcaaaactaagagcttgtatttttatggtaagttattgggatgtctgatatttgagagcccgaagcttccagataacagtcttctgataattagagcctacagcagccagaatttgtttttgtttttgtttttgtttttttagctgcttttaaacctaatccaaaggttttgtttaaaacattttgttgcagtgaaaaaaagatatgaagcaatacagtactcttcaaagaagtccaataaagatgaaaaatatcattaggtattttgagcacagacggagatccatgtgataaaatagattccttctgctgggtctggaaagtctggaaaccacctgtaggccctggctttgtcatttattgactgtattcagaagatactatatttgctctagagttaactcccattttagcaagctagcacaggtgaaaattgagtgagtttttgataacttgtcatttaaaatcattaatgataattttcaatggatcttttcagtagccatcaccagttttgctgataagacttcctcacaacccatttgttgtacaaactgtttcaaagtagcaatcctttgggttagtacacttgataccaagtttcattcagttgattattttcaaaacaaggtgatttgttttaatgggttaatgaatactttgctattactgttttacaattaactttgtatatctctggaaagaggtgaatttgtcaatgaaaaaagtattgtgtagttcagtgggaaaaacctgttgtctgttatagtatcacatcactttcttacattgtcatggtttaaattattatcttggtgaaatatataggttagatacttaaatgttcatattattagcacactacaggtactacccttaaatcataaataatattacccattgtacacagtttccagatatgagttagagtggctgtgaagcaactagaggcaaattgtggcacagagaatatccaggggaaaattgattatgtaagcaagggctgttctactttgagagagagacagacagactacataatagtaatatattatataattaatgttatagatacactgaacaataaaacattttctggaattatgaattaattaacaacctggatttctgtttccagacctataaaccatgtaatgaaggactgaaattcgtttggcatacactttgtttctttaaaattgctagtttctttctgttatttttacattttcttgtcagagaatcaaaactattagtcagtagagttttgtccatgaaataatatttggacatttgtgaatttttccctattttttttcttcttttatttatactcaattttgaagcactgtttatgtttgtaggactttaaacaattagtacttaaagccccagttaattttgaacacacagagatacttattgtactctgtgtacagtaagtatttttatgtttacacttaccagattcataaggttatttgcctttaagtgatcttttgtgattttacttgattacagcatgagaaggtaaaggttgataaatgggagtaattacatatatatatataatttattatttttttttctgaagcagagttttactcttgttgcccaggctagagtgcaatggcacaatctcggttcactgcaacctctgcctcccaggttcaagtgattctcctgtctcagcctcccaagtagctgggattacaggtgcccgccaccatgctcagctaatttttgtatttttagtagagacagggttggccaggctggtctcgagctcctgacctcaggtgatcctcccacctcggcctcccaaagttctgggattacaggggtgagccactgtgcccggccataattttatatttttagaaaataaagaatgaaggacaaaagagcacagctaaatgaaactgctgctctaatttattccactggaaaggtctcaggactccttaactgttttccaggtttggctcttcatatctaacctgtgctaaaatgagaaggtatgctaggtgctgttagaaatcacaccatttccaaagaacccaagtagtatagagaccaaaatgaggcaaaaataaaagagatgaaacaggagagtttatttcttgcatactttccgaccttcatcatacaacctctcctaacctccctgtagtctttaaaatgtttaacttgcctataagctaacatgtaataaaacacatactcaattatatgaatagaagtggagagccagaatgctacaaaagaaatcacagctgctagaagtatcctccatagaaacatcaacatgattgtggatcaaaatgattttcactggatatggaatttgtatgggccatatttattaaaagagttctgtgtggtcacatagagttcctttgggatttcatcccacttttcaggacttaatttgtttgggtttgcttacctaacaagcaacaacaacaacaaaataaatagttccaaaatctagtttattacataaatctctatgaatccttgagggcctatatctatattataaataaatacaaatatagatttttaaatatctatgggactttgccatttacagccttaagtataaaattacgagattatattctttccattaccctttatttctgctaactttttaaagactggaacattctgtggatgttgtcaaagtttgagtttgtttttccctgtgtattataataaatttgtggtattgcatgt

SEQ ID NO: 41312 - DNA, 730 bp, Artificial Sequence
  derived and/or modified sequence
agtcggcggccgggacagcgggggccgctgtgaggagctccgcgctcgcgctgccagtcgccgccctctctcccgcgcgcgcccggcgcttcggctccgctccctgtgcgatacttaggaacttcaagcagtcgtcccagatataaaaggcatttaaacttccctcttagaactgcttttgtggcatcccataagttttgaacccattaaaagagccagtaaatcctgtggaaaatggccttcagtgatcttacatcgaggactgtgcatctttatgataattggatcaaagatgctgatccaagagttgaagattggctcctcatgtcctcgcctctgccacaaaccatcctcctaggattctatgtctattttgtcacttccttgggaccaaagctcatggaaaatcgcaagccctttgaactcaagaaagcaatgataacgtacaattttttcatagtactcttttctgtgtatatgtgttatgagtttgtgatgtctggctggggtataggttattcatttcgatgtgacattgttgactattcacggtcacccacagctttgaggatggcacgtacctgctggctttattacttctccaaatttattgagctattagatacgatcttttttgttctgcgcaagaaaaatagccaagtgactttccttcatgtattccatcataccatcatgccgtggacctggtggtttggagtcaaatttgctg

SEQ ID NO: 41313 - DNA, 3994 bp, Artificial Sequence
  derived and/or modified sequence
tccctccggccctcggcgggcacctggcggcggcgggcagggggcggcgctgcgcgcgtcacgcggctgggtgggatagcgggcaggtgacacccggcggcctcctcccctttccaacccagtcggcggccgggacagcgggggccgctgtgaggagctccgcgctcgcgctgccagtcgccgccctctctcccgcgcgcgcccggcgcttcggctccgctccctgtgcggcatttaaacttccctcttagaactgcttttgtggcatcccataagttttgaacccattaaaagagccagtaaatcctgtggaaaatggccttcagtgatcttacatcgaggactgtgcatctttatgataattggatcaaagatgctgatccaagagttgaagattggctcctcatgtcctcgcctctgccacaaaccatcctcctaggattctatgtctattttgtcacttccttgggaccaaagctcatggaaaatcgcaagccctttgaactcaagaaagcaatgataacgtacaattttttcatagtactcttttctgtgtatatgtgttatgagtttgtgatgtctggctggggtataggttattcatttcgatgtgacattgttgactattcacggtcacccacagctttgaggatggcacgtacctgctggctttattacttctccaaatttattgagctattagatacgatcttttttgttctgcgcaagaaaaatagccaagtgactttccttcatgtattccatcataccatcatgccgtggacctggtggtttggagtcaaatttgctgcaggtggtttgggaacattccatgcccttctaaatacagctgtacatgtagtcatgtattcctactatggactttctgcattggggccagcctaccagaagtatttgtggtggaaaaaatatttgacatcattacagcttgtccagtttgttattgtcgccatccacataagccagttctttttcatggaggattgcaagtatcagtttccagtctttgcgtgcatcattatgagttacagtttcatgtttctgctgctctttctccatttttggtaccgtgcttacaccaaaggtcagaggttgcccaaaactgtgaaaaatggaacttgcaaaaacaaagataattgaagcccaacataagtctatgatcgaaactgatacattgtcttccttgacaatcaagagatatttacctatgcagtgcattttgtatatttttcaaaactaagagcttgtatttttatggtaagttattgggatgtctgatatttgagagcccgaagcttccagataacagtcttctgataattagagcctacagcagccagaatttgtttttgtttttgtttttgtttttttagctgcttttaaacctaatccaaaggttttgtttaaaacattttgttgcagtgaaaaaaagatatgaagcaatacagtactcttcaaagaagtccaataaagatgaaaaatatcattaggtattttgagcacagacggagatccatgtgataaaatagattccttctgctgggtctggaaagtctggaaaccacctgtaggccctggctttgtcatttattgactgtattcagaagatactatatttgctctagagttaactcccattttagcaagctagcacaggtgaaaattgagtgagtttttgataacttgtcatttaaaatcattaatgataattttcaatggatcttttcagtagccatcaccagttttgctgataagacttcctcacaacccatttgttgtacaaactgtttcaaagtagcaatcctttgggttagtacacttgataccaagtttcattcagttgattattttcaaaacaaggtgatttgttttaatgggttaatgaatactttgctattactgttttacaattaactttgtatatctctggaaagaggtgaatttgtcaatgaaaaaagtattgtgtagttcagtgggaaaaacctgttgtctgttatagtatcacatcactttcttacattgtcatggtttaaattattatcttggtgaaatatataggttagatacttaaatgttcatattattagcacactacaggtactacccttaaatcataaataatattacccattgtacacagtttccagatatgagttagagtggctgtgaagcaactagaggcaaattgtggcacagagaatatccaggggaaaattgattatgtaagcaagggctgttctactttgagagagagacagacagactacataatagtaatatattatataattaatgttatagatacactgaacaataaaacattttctggaattatgaattaattaacaacctggatttctgtttccagacctataaaccatgtaatgaaggactgaaattcgtttggcatacactttgtttctttaaaattgctagtttctttctgttatttttacattttcttgtcagagaatcaaaactattagtcagtagagttttgtccatgaaataatatttggacatttgtgaatttttccctattttttttcttcttttatttatactcaattttgaagcactgtttatgtttgtaggactttaaacaattagtacttaaagccccagttaattttgaacacacagagatacttattgtactctgtgtacagtaagtatttttatgtttacacttaccagattcataaggttatttgcctttaagtgatcttttgtgattttacttgattacagcatgagaaggtaaaggttgataaatgggagtaattacatatatatatataatttattatttttttttctgaagcagagttttactcttgttgcccaggctagagtgcaatggcacaatctcggttcactgcaacctctgcctcccaggttcaagtgattctcctgtctcagcctcccaagtagctgggattacaggtgcccgccaccatgctcagctaatttttgtatttttagtagagacagggttggccaggctggtctcgagctcctgacctcaggtgatcctcccacctcggcctcccaaagttctgggattacaggggtgagccactgtgcccggccataattttatatttttagaaaataaagaatgaaggacaaaagagcacagctaaatgaaactgctgctctaatttattccactggaaaggtctcaggactccttaactgttttccaggtttggctcttcatatctaacctgtgctaaaatgagaaggtatgctaggtgctgttagaaatcacaccatttccaaagaacccaagtagtatagagaccaaaatgaggcaaaaataaaagagatgaaacaggagagtttatttcttgcatactttccgaccttcatcatacaacctctcctaacctccctgtagtctttaaaatgtttaacttgcctataagctaacatgtaataaaacacatactcaattatatgaatagaagtggagagccagaatgctacaaaagaaatcacagctgctagaagtatcctccatagaaacatcaacatgattgtggatcaaaatgattttcactggatatggaatttgtatgggccatatttattaaaagagttctgtgtggtcacatagagttcctttgggatttcatcccacttttcaggacttaatttgtttgggtttgcttacctaacaagcaacaacaacaacaaaataaatagttccaaaatctagtttattacataaatctctatgaatccttgagggcctatatctatattataaataaatacaaatatagatttttaaatatctatgggactttgccatttacagccttaagtataaaattacgagattatattctttccattaccctttatttctgctaactttttaaagactggaacattctgtggatgttgtcaaagtttgagtttgtttttccctgtgtattataataaatttgtggtattgcatgta

SEQ ID NO: 41314 - DNA, 737 bp, Artificial Sequence
  derived and/or modified sequence
gagccgcatcctgtcttggtggctgctgctggccgggaggaggctgatgaatacagagccgtggaacaggtcgtgccggagatggaaacaggaaagcctgttgttttgtcgtcccagatacttaggaacttcaagcagtcgtcccagatataaaaggcatttaaacttccctcttagaactgcttttgtggcatcccataagttttgaacccattaaaagagccagtaaatcctgtggaaaatggccttcagtgatcttacatcgaggactgtgcatctttatgataattggatcaaagatgctgatccaagagttgaagattggctcctcatgtcctcgcctctgccacaaaccatcctcctaggattctatgtctattttgtcacttccttgggaccaaagctcatggaaaatcgcaagccctttgaactcaagaaagcaatgataacgtacaattttttcatagtactcttttctgtgtatatgtgttatgagtttgtgatgtctggctggggtataggttattcatttcgatgtgacattgttgactattcacggtcacccacagctttgaggatggcacgtacctgctggctttattacttctccaaatttattgagctattagatacgatcttttttgttctgcgcaagaaaaatagccaagtgactttccttcatgtattccatcataccatcatgccgtggacctggtggtttggagtcaaatttgctg

SEQ ID NO: 41315 - protein, 725 aa, Artificial Sequence
  derived and/or modified sequence
MEQSNDSLRVNHNDGEESKTSAQVFEHLICMDSRDSSFGQNDSPTVLPITTREANNSLISQNIPGPLTQTQTLSAEQFHLVDQNGQAIQYELQSLGESNAQMMIVASPTENGQVLRVIPPTQTGMAQVIIPQGQLVDVNSPRDVPEEKPSNRNLPTVRVDTLADNTSNYILHPQTSFPLPKKSVTGMLEEPLLGPLQPLSSNTPIWACRLRSCEKIGDSYRGYCVSETELESVLTFHKQQTQSVWGTRQSPSPAKPATRLMWKSQYVPYDGIPFVNAGSRAVVMECQYGPRRKGFQLKKVSEQESRSCQLYKATCPARIYIKKVQKFPEYRVPTDPKIDKKIIRMEQEKAFNMLKKNLVDAGGVLRWYVQLPTQQAHQYHELETPCLTLSPSPFPVSSLEEEETAVRDENCALPSRLHPQVAHKIQELVSQGIEQVYAVRKQLRKFVERELFKPDEVPERHNLSFFPTVNDIKNHIHEVQKSLRNGDTVYNSEIIPATLQWTTDSGNILKETMTVTFAEGNSPGESITTKVETNQTRGSLSPEPTHLLSSLSSFQPKIFTQLQGLQLQPRYTSPDESPAVVSVNNQPSSSPSGLLDTIGSAVMNNNSLLLGQSHSLQRDTCLTQNNSTASTMGNLPEPDQNLVAMDELVEVGDVEDTGNLEGTVHRILLGDVQTIPIQIIDNHSALIEENPESTISVSQVKQEPKEPALSMEAKKTVDYKKLSAT

SEQ ID NO: 41316 - protein, 207 aa, Artificial Sequence
  derived and/or modified sequence
MLEAWNLNLSHYLKHLICMDSRDSSFGQNDSPTVLPITTREANNSLISQNIPGPLTQTQTLSAEQFHLVDQNGQAIQYELQSLGESNAQMMIVASPTENGQVLRVIPPTQTGMAQVIIPQGQLVDVNSPRDVPEEKPSNRNLPTVRVDTLADNTSNYILHPQTSFPLPKKSVTGMLEEPLLGPLQPLSSNTPIWACRLRSCEGVELW

SEQ ID NO: 41317 - DNA, 2178 bp, Artificial Sequence
  derived and/or modified sequence
atggagcagagcaatgattccttgcgtgttaaccataatgacggagaagaatccaagacttcagcacaagttttcgagcaccttatctgcatggatagccgggactctagttttgggcagaatgattcacccactgtcctgcccatcaccacacgtgaggctaacaattcccttatctctcagaatatccccggtccacttactcaaactcagacactcagcgccgagcagtttcaccttgtcgatcagaatggacaggccattcagtacgagcttcaaagtctgggggaatccaacgcccaaatgatgattgtggcctcccccactgaaaacggacaggtcctcagagtcattcctccaacccagaccgggatggctcaagtgatcatcccccaagggcagctggtggacgtgaattctccaagagacgtgccagaagaaaagcctagcaaccggaacctgccaaccgtgagggtggacacactggcggacaataccagcaactacatcctccatccacaaaccagttttcctctgcccaagaagtctgtgactggaatgcttgaagagcccctgttaggccctttacagccactgagctctaacacccccatttgggcctgtcgcctgcggagctgtgagaaaatcggagattcgtatcggggatactgtgtcagtgagactgagctggagtccgtgctgactttccacaagcaacagactcagagtgtgtggggcacaagacagagcccaagccccgcgaagcctgccactaggctaatgtggaaatcacaatatgttccttatgacggtattccctttgtaaacgcaggctcaagagcagtggtcatggagtgccagtatggaccaaggcgcaaaggattccagttgaaaaaggtcagcgagcaggagtctcgtagttgtcagttgtacaaggcaacatgcccggcccggatttacatcaagaaggtgcaaaaattccccgagtacagggttcccactgaccccaaaattgataagaaaatcatccggatggagcaggagaaggcttttaacatgctgaagaaaaaccttgtggatgctggcggcgttttacgatggtacgtacagctgccgacccaacaggcccatcaataccatgagctggagacgccatgcctgacactgagcccctcccccttcccagtgagctcattggaagaagaggaaactgcagtcagggacgaaaactgcgcattgccgtctcggttgcatccgcaggtggctcataagatccaggaactagtgtcccagggcattgaacaggtctatgctgtgaggaagcagctaagaaaatttgtggagagggagctgttcaagccagacgaagtccctgagcggcataatctcagcttcttcccaaccgtcaacgatatcaaaaatcatatccacgaagtgcagaaaagtctgagaaacggcgacactgtgtacaattctgaaatcattccggccaccctgcagtggaccacagacagtggcaacatcctgaaagaaacgatgaccgtcacgtttgcagaagggaattcacccggtgagtcaattactaccaaagtggagacgaatcagacccgtggtagtctgtcaccagagcccacccatctactctcttctctctctagctttcagccgaagatcttcacacaactgcaaggacttcaattgcagccacgctacacttccccagatgaatcccccgccgtcgtaagcgtgaataatcaaccttcttccagcccctctggactgcttgacactattgggtcagccgttatgaataataattctctcctgcttggccagtcacatagtctccagcgggacacttgcctcactcagaacaactctacagccagtaccatgggcaaccttcctgagccagatcagaacctagtggccatggacgaacttgtcgaggtgggagacgtggaagacactggaaatcttgagggaacagttcatcggattctcctaggggacgtccaaactattcctatacagattatagacaatcacagcgccctaatagaggaaaacccagaatccacaatcagcgtctcccaagttaaacaggagcccaaagaacctgcgttgtcgatggaagccaaaaagactgtggactataaaaagttgtccgcgacctag

SEQ ID NO: 41318 - DNA, 2178 bp, Artificial Sequence
  derived and/or modified sequence
atggaacagtccaatgattcccttcgcgttaatcataatgacggcgaagagtcaaaaaccagcgcacaggtgtttgagcacctcatctgcatggattctagggatagtagttttgggcagaatgactctcctacagttctgccaattacaacaagggaggcgaataattccctgattagccagaatatacctgggccgttaactcagactcagactttaagtgcagagcaatttcacctcgtggatcagaacgggcaagcaatccagtacgagctccagtcactcggggagagcaacgctcaaatgatgattgtcgctagtcccaccgagaacggccaggtgctacgcgtgattccccccacacagactgggatggcccaggtgatcatccctcaaggccaactcgtagatgtcaacagccctcgagatgttccagaggaaaagccctcaaacaggaatttacccacagtgcgagtggatacactggctgacaacacaagcaactatatcctccaccctcagacaagtttcccactgcctaagaaaagtgtgacgggcatgctggaggagcccctcttgggtcctctgcagccgctgtcctctaatactccaatctgggcttgccgtctgaggtcttgcgaaaaaattggcgattcctataggggctactgtgtaagcgagacagaactggagtcagtgctgactttccacaagcaacaaacgcagtccgtgtggggtacacgccagtctccatcgcccgctaagcccgcaacccgactgatgtggaaatcacagtatgtgccctacgacggcatacccttcgttaacgctgggagtcgcgctgtagtcatggaatgccaatatgggccacgtcgcaaaggcttccagttgaagaaggtaagtgaacaagaatcgaggagttgccaactatacaaagccacatgtcccgccagaatctacataaagaaggttcagaaattcccagaatatcgggtccccacggatccaaagattgataagaaaattatccgcatggagcaagagaaggccttcaatatgctgaaaaaaaatctggttgacgcaggcggagtgcttaggtggtacgtgcagctgccgactcagcaggcacatcagtaccatgagctggagacgccctgtctcaccctctctcccagcccatttccagtgtcatccctggaagaagaagagactgctgttcgtgatgaaaactgtgcgctgccaagccggcttcaccctcaggtcgcacataagattcaggaacttgtatcccagggcatcgagcaagtttatgccgtgagaaagcagctgcggaaattcgtggagcgggagctcttcaaaccagatgaagtgcctgaaagacacaacctgtccttcttccctacggtgaacgacataaagaaccacattcatgaagtgcagaaaagcttgagaaacggcgacactgtctacaattcagaaataattccggcaaccctgcagtggactaccgactccggaaatatcctgaaggaaactatgacggtgactttcgccgagggaaactctcccggagagtccataactacgaaggtcgagaccaaccaaacccgcggctcactgtctccagagcctacccacttattgtcatcgctgtcaagctttcagccaaagattttcacccagcttcagggtctacagctccagcccaggtatacctcccctgacgagagtcctgcagtagtgtccgttaacaatcagccatcatctagccccagcggccttctcgataccatcgggtcggcagtcatgaacaacaactccctgctgttgggacagtcccattccttacagagggatacatgcctgacccagaacaatagcaccgcaagcacaatgggtaatctccccgaacctgatcagaatttagtcgcaatggatgagctggtcgaagtgggcgatgtagaggacaccggaaaccttgaaggcaccgttcatcgaattctgctcggagacgttcagaccatccccattcagatcattgacaaccactctgccttgatcgaagagaaccctgagtccaccatttccgtatcgcaggtcaaacaagaacccaaggagccagcactcagtatggaggctaaaaagacggtggattataagaagcttagcgccacgtag

SEQ ID NO: 41319 - DNA, 66 bp, Artificial Sequence
  derived and/or modified sequence
atggaacagtcgaatgatagcctgagagtcaaccataatgatggcgaagagtctaagacatcctag

SEQ ID NO: 41320 - DNA, 2178 bp, Artificial Sequence
  derived and/or modified sequence
atggagcagagcaacgatagcctaagagtcaaccacaatgacggcgaggaatccaagaccagcgcccaggttttcgagcacttgatctgcatggattctcgggactcatctttcggccagaatgactctccaaccgtactccccattacaacccgggaagccaacaacagtcttataagccagaacatccctgggcccttgacccaaacccagaccctctcggccgagcaattccacctggttgatcagaacggccaagccatacagtatgagttgcaatcactaggggagtccaatgcacagatgatgattgtagcctcgcccaccgagaatggtcaggtgctccgtgtgatccctcccacccagaccggaatggcccaggttattattccacaagggcagttggtagacgtcaattccccgcgcgatgtcccagaagagaaacctagcaaccgtaacctgcctacagtccgggtggacacgctggccgataacaccagcaattacatcctccaccctcagactagctttcctctgcccaaaaagagcgtgactggcatgctcgaggaacctctgctgggaccacttcaacccctgtcttcgaatacaccaatctgggcctgccgactgaggagctgcgaaaaaatcggcgactcttatagggggtactgtgtgtctgagaccgaactggagagcgtccttacgtttcacaagcagcagactcagtccgtttgggggacacggcagagcccatcacccgcaaagccagccacacgcctgatgtggaaaagccagtatgttccctacgacggaattcctttcgttaacgccggtagtagggctgtggttatggaatgccagtacggccctcgtagaaaggggttccagctcaaaaaggtgagcgaacaggagtcgcgcagctgccaactctataaagctacctgccccgctagaatttacattaagaaggttcagaagttccccgagtacagggtgccaacagatcccaagattgacaagaagattatccgaatggagcaagaaaaggcatttaacatgcttaagaaaaacctagtggatgccggtggcgtcctaagatggtacgttcagcttcccactcagcaggctcatcagtatcatgaactcgagaccccatgcctgacgctttctccaagccccttccccgtcagctccttggaagaagaggagactgctgtgcgggatgaaaactgtgccttgccaagccgattgcatccgcaggtcgcgcataaaattcaggagttggtttcccaggggattgagcaggtctacgctgtgagaaagcagctgaggaagtttgtggagcgagaattgtttaaacctgacgaggtgcccgagcggcataacttgagcttcttccccaccgtgaatgatatcaagaaccatattcatgaggtgcagaaatcactccgaaacggggacaccgtatacaattcagaaataattcccgcgacgctgcagtggacaacagatagtggaaatattttaaaggagaccatgacagtcactttcgctgaagggaattcaccaggcgaatccattacaactaaggttgagactaaccagacacgcggatccctcagccctgagccaacacacctgttgtcttccttatcatccttccaacctaagatcttcactcagctacaggggctacagctacaacctcgttacactagccctgatgagtctcctgccgtggtatcagttaacaatcagcccagcagctcaccctctggactccttgataccataggcagcgccgtgatgaataataattctttgcttctgggacaaagtcattctttacagagagacacttgcctgacccagaataactccactgcttctactatgggtaatctgcctgaacctgaccagaatctcgtcgccatggatgagcttgtcgaagtaggtgacgtggaagacacagggaacctggaaggcactgtgcacaggattctgctgggggatgtccagactatccctattcagataatcgataaccatagcgcactaatagaggaaaatccagagagtacaatatccgtgtcacaggttaagcaagaacccaaggagcccgccctgagtatggaggctaagaaaactgtcgactataagaaattgtctgccacctag

SEQ ID NO: 41321 - DNA, 2178 bp, Artificial Sequence
  derived and/or modified sequence
atggagcagagcaatgacagcctgcgggtgaaccacaatgatggagaggagagcaagaccagcgcccaggtgtttgagcacctgatctgcatggacagccgggacagcagctttggccagaatgacagccccaccgtgctgcccatcaccacccgggaggccaacaacagcctcatcagccagaacatccctggccccctgacccagacccagaccctgtctgctgagcagttccacctggtggaccagaatggccaggccatccagtatgagctgcagagcctgggggagagcaatgcccagatgatgattgtggccagccccacagaaaatggccaggtgctgcgggtcatcccccccacccagacaggcatggcccaggtgatcatcccccagggccagctggtggatgtgaacagccccagagatgtgcctgaggagaagcccagcaacagaaacctgcccaccgtgcgggtggacaccctggccgacaacaccagcaactacatcctgcacccccagaccagcttccccctgcccaagaagtctgtgacaggcatgctggaggagcccctgctgggccccctgcagcccctgagcagcaacacccccatctgggcctgccgcctgcggagctgtgagaagatcggggacagctaccggggctactgtgtgtctgaaacagagctggagagcgtgctgaccttccacaagcagcagacccagagcgtgtggggcacccggcagagccccagccctgccaagccagccacccggctgatgtggaagagccagtatgtgccctatgatggcatcccctttgtgaatgccggcagcagagctgtggtgatggagtgccagtatggccccaggaggaagggcttccagctgaagaaggtgtctgagcaggagagccgcagctgccagctgtacaaggccacctgcccagcccgcatctacatcaagaaggtgcagaagtttcctgagtacagagtgcccacagaccccaagattgacaagaagatcatccgcatggagcaggagaaggccttcaacatgctgaagaagaacctggtggatgctggaggagtgctgcgctggtacgtgcagctgcccacccagcaggcccaccagtaccacgagctggagaccccctgcctgaccctgagccccagccccttccctgtgagcagcctggaggaggaggagacagctgtgagagatgagaactgtgccctgcccagccggctgcacccccaggtggcccacaagatccaggagctggtgtcccagggcatcgagcaggtgtatgctgtgaggaagcagctgaggaagtttgtggagcgggagctgttcaagccagatgaggtgcctgagcggcacaacctgtccttcttccccaccgtgaatgacatcaagaaccacatccacgaggtgcagaagagcctgagaaatggagacacagtgtacaacagcgagatcatcccagccaccctgcagtggaccacagattctggcaacatcctgaaggagaccatgacagtgacctttgctgagggcaacagccctggagagagcatcaccaccaaggtggagaccaaccagacccggggcagcctgagccctgagcccacccacctgctgagcagcctgagcagcttccagcccaagatcttcacccagctgcagggcctgcagctgcagccccgctacaccagcccagatgagagccctgctgtggtgtctgtgaacaaccagcccagcagcagccccagcggcctgctggacaccatcggcagcgctgtgatgaacaacaacagcctgctgctgggccagagccacagcctgcagagggacacctgcctgacccagaacaacagcacagccagcaccatgggcaacctgcctgagccagaccagaacctggtggccatggatgagctggtggaggtgggagatgtggaggacaccggcaacctggagggcaccgtgcaccgcatcctgctgggagatgtgcagaccatccccatccagatcatcgacaaccacagcgccctgattgaagaaaatcctgagagcaccatctctgtgtcccaggtgaagcaggagcccaaggagcccgccctgtccatggaggccaagaagacagtggactacaagaagctgagcgccacctag

SEQ ID NO: 41322 - DNA, 66 bp, Artificial Sequence
  derived and/or modified sequence
atggagcagagcaatgacagcctgcgggtgaaccacaatgatggagaggagagcaagaccagctag

SEQ ID NO: 41323 - DNA, 2178 bp, Artificial Sequence
  derived and/or modified sequence
atggagcagagcaacgacagcctgcgggtgaaccacaacgacggcgaagagtccaagacgtccgcccaagtttttgaacacctgatttgcatggacagcagggatagctccttcggccagaatgacagtcctacggttctgccaataaccaccagagaggctaataatagcttgattagtcagaacatccctggcccactgactcaaactcaaacccttagcgctgagcagtttcacctggtggaccaaaacgggcaggcaatccagtacgagctccagtcgcttggcgagtctaatgctcaaatgatgatcgtggcctcgcccaccgagaacgggcaggtcttgcgtgtaatcccacccacgcagacaggaatggcccaagttatcattccacagggccagctcgtcgatgttaactccccccgagatgtgcctgaggagaaacctagtaacaggaatttacctacagtccgagtagacactcttgctgataatactagtaattacattcttcatcctcagacaagtttcccactgccaaaaaagtccgtgacaggaatgctggaggagccgctgttggggccacttcaacctctttccagcaatactccaatttgggcgtgcagattgcgcagttgcgagaaaatcggcgattcctatcggggatactgcgtgtccgaaactgaactcgagagcgtcctaaccttccacaagcagcaaactcagtccgtttggggaaccaggcagagccctagcccagcaaagccagccacccggctgatgtggaagtcccagtacgttccctacgacggcattcctttcgtaaatgcagggagccgggccgtcgtgatggaatgccagtatggcccgaggcgtaagggtttccagctgaagaaggtcagtgaacaggagtcacgaagctgtcagctctataaggccacatgtcctgcgaggatttacatcaaaaaagtgcagaagtttcccgaataccgcgtccccactgatccaaagatcgataagaagataattcggatggaacaggaaaaggcatttaacatgttaaagaaaaatcttgtcgatgcaggcggcgtgctgcggtggtacgttcagctcccaactcagcaggcccatcagtatcatgaactggagactccatgcctgaccctttctcctagcccttttccagtatcgtctctggaggaagaggaaaccgcagtccgcgatgagaattgcgccctaccatctcgacttcatccgcaggttgctcacaagatccaggagctggtatctcagggcatagagcaggtttacgccgtcagaaaacagctccggaagtttgtggagcgcgaactgttcaaacctgatgaagtacctgaacgacacaacctgagtttttttcccacagtgaatgatattaagaaccatatccacgaggttcagaaaagccttaggaacggtgataccgtttataactccgagatcatccccgccactcttcagtggactactgactccggaaatattctgaaggaaaccatgacagttacctttgcggaggggaactctcctggagagtctatcaccacgaaggtggaaacaaatcaaacgcgcggatcattaagccccgagcctacccatttattgagctctctcagttctttccagccaaagatcttcacccagctccaggggctccagcttcagccgcgatacacgtctccagatgagtctccggccgtggtcagtgtcaacaaccagccaagctcctcaccatctggacttctggatacgatcggctcggccgtcatgaacaataacagcctgctgctcggccagtcacacagtcttcagagagacacatgcctgacccaaaacaatagtaccgccagcaccatgggtaatttacctgaacctgatcagaatctggtggctatggatgagctggtggaagtgggtgacgtggaggacacaggcaatctggagggaacagtccaccgcattctgttaggggacgtgcagaccattcccatacagattatagacaatcattcagctctgatcgaagagaatcccgagtctactatctctgtgtcccaagtgaagcaggagccaaaagaacctgctctgtctatggaggctaaaaagacggttgactacaagaaactctctgcgacttag

SEQ ID NO: 41324 - DNA, 2178 bp, Artificial Sequence
  derived and/or modified sequence
atggagcagagcaacgacagcctgcgggtgaaccacaacgacggcgaggaatccaagacctccgcccaggtgttcgaacatctcatttgtatggactcacgagacagctcctttgggcaaaatgattcaccaaccgttttaccaattaccacaagagaagcaaataactccctgatcagtcagaatatccctgggccgctgactcaaacccaaactctgagcgccgagcagttccatctcgttgatcagaatggccaggcgatacagtacgaactgcagtcactgggcgagagcaatgcccaaatgatgatagtggcgtctccaacagaaaatggacaggtgttacgagttatcccccctacgcagacaggcatggcacaggtgattatacctcaggggcagctcgtggacgtaaactcacctagagatgtgccggaagaaaagccatctaacaggaatctcccgacggtgcgagtagacaccctagccgacaacacatctaactacattctgcacccacagacctcttttccactgccaaagaaatccgtcaccgggatgctggaggaaccccttctcggccctttgcagccccttagtagcaacaccccgatttgggcctgccggctgcgcagctgcgagaaaatcggggactcctaccggggctattgtgtgtcggagacagaactagagtctgttctgacattccacaaacagcagacacagtctgtgtggggaaccagacagagcccgagccccgcgaagccggcaactcgcctcatgtggaagagccagtatgttccttacgatggaatcccctttgtgaatgccgggtccagagctgtggtaatggagtgccaatatggccctcgacggaagggatttcagttgaagaaggtctccgagcaggaaagccggagctgccaactctacaaagcgacctgtcctgcacgaatctacataaagaaagtgcagaaattccccgagtatcgggtgcctactgaccctaagatcgacaaaaagattattcgcatggagcaggaaaaggcctttaacatgctgaaaaagaacctggtggacgccgggggagtgctgaggtggtacgttcagctccctacacaacaggctcaccagtatcatgagttagaaaccccctgcctcaccctttcaccttccccgttcccggtgagttccctggaagaggaagaaaccgctgtgcgagacgaaaactgcgcattgccctctagactgcaccctcaggtcgctcacaagatccaggagttagtgagtcaaggtatcgagcaggtctacgcggttaggaagcaactgaggaagttcgtagagcgcgagttattcaaacccgatgaggtccctgagcgacacaatctgagtttctttccaactgttaacgacattaagaatcatattcacgaagtccagaaaagtctgaggaatggtgatacagtgtataattccgagatcatacctgcaacactccaatggacaaccgatagcggaaacatcctcaaagagaccatgaccgtaacgttcgccgaaggcaactcgccaggcgaatcaatcactacaaaggtcgaaacgaatcagaccaggggttccctcagtccagaacccactcacctcctctcatccctatcaagcttccagccgaaaattttcactcagctgcagggactccagctccagccccgttacaccagcccagacgagtcacccgccgtggttagcgtgaataatcagccgagttcatctccatccggcctgctagataccattggtagcgcggtgatgaataataatagcttgctcctgggacaaagtcactccttacagcgagatacttgccttacacagaataacagtacggctagcacaatgggcaacttgccagagcccgatcagaatctagtcgccatggacgagttagtggaggttggggacgtggaggacaccggcaacttagagggaaccgtccatcgcattctgctcggggatgtccagacaattccaatccaaatcatcgacaatcactctgctctcatagaggagaacccagagagcaccatcagtgtgtcacaggtgaaacaggagccaaaggaaccagccctgtccatggaagcaaagaagacggttgattataagaaactgtctgcaacatag

SEQ ID NO: 41325 - DNA, 66 bp, Artificial Sequence
  derived and/or modified sequence
atggagcagagcaacgacagcctgcgggtgaaccacaacgacggcgaggagagcaagacatcctag

SEQ ID NO: 41326 - DNA, 2178 bp, Artificial Sequence
  derived and/or modified sequence
atggagcagagcaacgacagcctgcgggtgaaccacaacgacggcgaagagtcaaagacctccgcccaggttttcgagcatttgatttgtatggattcccgtgattctagctttggccagaacgacagtcccaccgttttgcctatcacgacccgagaggccaataatagcctaatcagtcagaacatacccggtcccctgacacagacccaaacgctgtctgcagagcagttccacctcgtagaccagaatgggcaggctattcagtatgaactgcagtcactgggtgaaagcaatgctcagatgatgatcgtggcctcgcccaccgaaaacggccaggtactgcgggtgatcccgccgacgcagaccggcatggctcaagtgattataccccagggccagctggtcgatgtgaactctcccagagatgttccagaggagaagccaagcaaccgcaatttgcccaccgtgcgcgtggatactctggcggacaatacatccaattatattctgcatcctcaaacctcttttcctttacccaaaaagtccgtgactggcatgcttgaggaaccgctcctagggccgctgcaacctttgagttcgaatacacccatatgggcctgcaggctgcgcagctgtgagaaaatcggcgactcatatagaggctactgtgtctctgagacagaactcgaaagcgtgctcaccttccataaacagcagacgcagtccgtgtggggtactcggcagtcgccttctccggccaagcccgctacacgtctcatgtggaagagccagtacgtcccttacgacggaatcccattcgtcaatgcgggcagcagagccgtagtgatggaatgccagtatggtccccgtcgaaaaggcttccagctgaagaaagtgtctgagcaggagtctaggtcgtgccaactttataaagctacgtgcccagccagaatatatattaaaaaggtgcaaaaattcccagagtaccgcgtccctacagatccaaaaatagataagaaaattattaggatggagcaggagaaagctttcaatatgctaaagaaaaatttggtggatgccggcggcgtcctgcggtggtatgtacaactccccacacagcaagcccaccagtaccatgagctggagactccctgcctaactctaagcccctccccctttcccgtgtcctcactggaggaggaagaaaccgcggttcgggacgaaaattgtgctcttccgagcagactgcaccctcaggttgcccataaaattcaagagctggtcagccaggggatcgagcaggtgtacgccgtaaggaagcagctgaggaagtttgtggagcgagagctgttcaaaccagatgaggtgccagagagacacaacctgagttttttcccaacagttaatgacataaagaaccacatccacgaagtacagaagagcctgcgaaacggcgacacagtgtacaatagcgagattatccccgcaacgttgcaatggactactgacagcggcaacatactgaaggagaccatgacggtaacgtttgctgagggtaactcccccggtgagtcaatcaccaccaaggttgagaccaaccaaactcgtggatctttaagtccagagcccacacacctactctcctcactatcgagctttcagcctaagattttcactcagcttcagggtctccagttgcaaccgcgctatacctctcccgacgaaagccccgccgtggtctccgttaataatcagccaagtagctccccatcaggcctgctggacaccataggaagcgctgtgatgaacaataatagccttctactgggacaatctcattctcttcagagagacacttgcctgacacagaataactccaccgcatccacgatgggcaatctgcccgagcccgaccagaatctggtcgctatggatgaacttgtagaagtgggggacgtggaggacactgggaacttggagggtacagtacatcgaattctgctgggagacgtgcaaacaattcccatccagatcatcgataaccactccgccctgattgaagagaatcccgagagcacaatctcagtaagtcaggtcaagcaggagcctaaagaacccgccttatccatggaggccaagaagacggtggactacaaaaagctctcagcaacttag

SEQ ID NO: 41327 - DNA, 5934 bp, Artificial Sequence
  derived and/or modified sequence
atcggcggcggcaggactgggggagtcagaggtctggcagcgctgtctgcgcagacctaccggacgctacctcccaaccccccgtcttcctcctgcctcctcctcctcccgtcacctcctgacccgccggagctccgagcaactgccggcctccgcccccagccgcagccggtcactggcggcgccttccgcgccaagcttgggggccttttcggggtcccacatggcacggcttccgacccccggcccgggacggggctcgcaggccccagaggggcaggctggagaaggaggaggttaggtgtcttcaggagggttgctgagcccaaggacgcgccatcgccgcggagaaggagccggaccccttgggcggagcgcccaatgtgtggtccctcacgccgtcccgcaccttgctttttagggttctttttccgctttctgagcccttttataccttacgtttagaaggggaaaatcatcctcccacaccttctccccgactttttgccttttttgtcttgaagttacccaaaggcctgtgtattgttctcaatggtcccaagaattactctaatatagttgtttttctgagggaggatggatggagataactatcctgatcccaatgtcactttttaaggcattcgcttcaagagacaagcagtttagaatcaggcagaactggattgcaaaatttatgggcagaccgagaaaatgctgctgtgaagacccaattaaagctttcacataaatgaagctacagctatcatgatttagtgcccccaaaaggaagaacttcagtggacaagaaaggacatttctgggggtagtagaatgcttgaggcctggaatttaaacctgagccactatctgaaggtaattttttttaactaattgaaagtaacaactttattttaaaaagttaactattatctattacatgtttaaaaagtcaaattaccctttgtatataggtgctttgttctatttatgtttatcagttggaaaaaacataagaaaatggaattgaatatgatgtcagcatggaacaatctaatgattcattaagagtcaaccataatgacggtgaagagtcaaaaaccagtgctcaagtatttgagcatctaatctgtatggactccagggattcttcctttggacaaaatgattctcctacagttttgcccatcactactcgtgaagcaaataattcactcatatcacagaatataccagggcccctgactcagacacagactctttctgcagagcaattccatctagtggaccaaaatgggcaggctattcaatatgaacttcagtcattgggggaatccaatgcacaaatgatgatcgttgccagcccaacagaaaatggacaggtacttcgtgtaattccacctacccagacaggaatggcacaagtgattatacctcaggggcaacttgtggatgtgaatagtcctcgggatgtccctgaagagaaacccagtaacagaaacttaccaactgtaagagtggatactctagcagacaataccagcaattacattcttcatcctcaaacatccttcccattgcccaaaaagtcagtgaccggaatgctggaagaaccccttctggggcctcttcagccactttcttctaatacacctatatgggcctgccgtcttaggagctgtgagaaaattggagattcataccgtggctactgtgtaagtgagactgaattagaaagtgtcctaacatttcacaagcagcaaacacagagtgtttgggggacccgtcagtctccaagcccagccaagcctgctacacgcttgatgtggaaatcccagtatgttccatatgatggaatcccatttgttaatgcagggagtagagctgtggtaatggagtgtcagtatgggccaagaagaaaaggtttccagttaaaaaaagtcagtgagcaggaaagcaggtcttgtcagctctacaaagccacttgtccagctcggatttacattaaaaaggtacagaagtttcctgaatatagagttcctacagaccccaaaattgacaagaaaattatcagaatggagcaggagaaagcttttaacatgctaaagaagaacttggtagatgctggtggtgttcttaggtggtatgtacagttacctacacagcaagctcatcagtatcatgaattagagactccctgcctcactttgtcaccttctccttttcctgtgtcttctcttgaagaagaggaaactgcagttagagatgagaattgtgcattaccctcacgtttacatcctcaagtagcacataagattcaagaattagtatcacagggaatagaacaagtgtatgcagtaaggaaacagctaagaaaatttgtggaaagggaactgttcaaacccgatgaggtacctgaaagacataatttatctttttttccaactgtaaatgatataaaaaatcacatccatgaggtacagaaatccttgagaaatggagatacggtatataactcagagattattccagcaacgcttcaatggactacagacagtgggaatattctcaaagagaccatgacagttacatttgcagaaggaaattcaccaggagaatcaattaccaccaaagtggaaacaaatcagaccaggggttctttgtctcctgagccaacccacttgctctcctcactctcctcatttcagcccaaaatatttacacaactacagggtttgcagttacaaccaaggtacacctctcctgatgaatcaccagctgtggtatcagtaaataaccagccgtcctctagtccttcaggacttctggatacaataggaagtgctgtaatgaataataattctctactgcttggtcaaagtcatagccttcaaagagatacatgcttaacccaaaacaatagtactgcctccaccatgggtaaccttccagaaccagatcaaaatctagttgcaatggacgagctggtagaagttggagatgttgaggatacagggaatctggaaggaactgttcatcggattctgttgggagatgtgcagactattccaatacagattatagacaaccactcagctcttattgaagaaaatccagaaagtaccatttctgtgagccaagttaaacaagaacccaaagaaccagcattgtctatggaagcaaaaaaaactgtggactataagaaattatctgctacataaattattgaagcttttcagaatttacaactctggtgacttctgatgtcttagaaaggaaggtgaatatagtcaaagcgtggcattgagataattggactgaagaccagtttgatgagaagcttttatttaaaactgatatatttgttgccagttccatatttttaccttccttaagagatgttttactcttcttattttgtataatttttatgctctttgattatctaataaggccagtatttcaaaagctgttctgaatttatccacagtaatatagtctgaacacaaatagtttacttaacttatccttggaaatattcaattttggttattacaaaacagaaaagaacaacagcaacaaaaacattgtgtgaatgtatgtttgtatgtgtgtatgtatatcatgaattttttttttaagttctgaaaaagaacttgttctctccttaaagttgtgaagaaattgttaattgccagacaggtaagaaaatgtttataatctatctcattaagaaagatgaagtattagattttacatcataacacaaagtccagcagctacatctgtggaaactgtgcagttgcattttagcctcttcccttccaatttttgtacttttaactacaaaccagtagtatactaatggttatctaatagaaatttaaagtgtcttggtaagtactgagaatttttacttgaattaatcagataagcaacagaaatcaacatatgtagcatggatttgtgctatattggaagtaaaacactataggcagaaagatgtagaaattaagagaattgaaaaagaataatagaattccttggtgtttacagataatttggaaaactttttgatgacagcagaggattttttcccccttattttgtaatgaagatccagcactggttaaaaaataatttgatttgtagttacatttttctatgccagagctcttactgaattgatgatattaggatttctagtattttaaggtaagtatttatagtttaaaatttagtttatatttaaaactttaaaacatctgatctgggatttttttgttaagtaagtatattaacttcaaataccaaattactactaagcagtatattgattataagcatctgttgtctaaagattggtactaggctggacatggtggctcacacctgtaatcacaatactttgggaggctgaggtgggtagataacctgaggtcaggagttcgagaccagcctggccaacgtggtgaaaccctgtttctactaaaaatacaaaaattagctgggtgtggtggtgggcacctgtaatcccagctacttgggaggctaaggcaggagaatcgcttgaacaccggaggcggaggttgcaatgagccgagatcgcgccattgcactccagcctgggtgacaagagaaaaactccatctcaaaaaaaaaaaaaagattggtaaactagaaatatcaactataattgtcaggaaattaacctaaaggcttttgtttctccagagaccatttgtgggtatattttatattttaaaaataaagattttaaatggatatcaatgtttaatattcaaaacatgcacaatataatatcaaatttaaccttaatactttacatgaatatgagtcacttttggcttttctaagtccagcctcccattcttaattgacttggtttcaggtacatgacatgtatctaaatataaagtactgttatagtagaggtaggtggaattctaatattccctgctctttagatttatattttatttaatataaagtttattatttataccctttttaatgcaaagctaatatttagttatatgtatgatttttaataaaaattactttactttttcctatgaatttaaaacatttgatgttggcattttatacaggcaggttgccaaatttaattatgttacactaagttaaacacagcacttaattacctcaaatccagatttctcttaatctgtgtgtacataaaaggaataagtccaaattaatttatagtttagtgttgcactataggtaatattcttttgttatttctagtttttatggaatccttttctttcaagattctaaataataaatcgttacgtctcaatagtggtaatagtggtaatggtttattattagctgtttcaccaattgaactacattcttttggagacattcctttcttttttgatgttgatttgcaaaggagaaatgcttgttaatatacaaactctagtcagttacctgtgaggatgagatgtgtcagaggactcagactttggtatagttagaaaaataatatttttctcacttgattctgtgtgaatgtctcttctgatactgttttttaatcagaaagttacagagcaactttcccacaaacaaaccaataaaacaaaaccccacaaaaaccaagagcatgaagaaaagtttaaatccctaattatatactcttttggtttttaggtagaaactggagctatcaatattttcatgtaagtatttcaaggagtagctctttaaaaatggtttctaaattagattttaaaaattcattgtcatctaaatgcatgtttagtcacaatgtatcagtattgtgtttaaaggtgctcagcatcactttttgaaaactatgtttacatatttaaaatgtttaattattttgaaatgtatagggtattaaatacaagcttc

SEQ ID NO: 41328 - DNA, 3368 bp, Artificial Sequence
  derived and/or modified sequence
gacggtggccgatagtggtcctactgtcgtgggactgctctgcgcgctcccggtggggcgcgcctgcgcattatgctggtctccatggcggggcctcggagccaagacgagagaaaatgctgctgtgaagacccaattaaagctttcacataaatgaagctacagctatcatgatttagtgcccccaaaaggaagaacttcagtggacaagaaaggacatttctgggggtagtagaatgcttgaggcctggaatttaaacctgagccactatctgaagctattaaataatagaagaaaatggaattgaatatgatgtcagcatggaacaatctaatgattcattaagagtcaaccataatgacggtgaagagtcaaaaaccagtgctcaagtatttgagcatctaatctgtatggactccagggattcttcctttggacaaaatgattctcctacagttttgcccatcactactcgtgaagcaaataattcactcatatcacagaatataccagggcccctgactcagacacagactctttctgcagagcaattccatctagtggaccaaaatgggcaggctattcaatatgaacttcagtcattgggggaatccaatgcacaaatgatgatcgttgccagcccaacagaaaatggacaggtacttcgtgtaattccacctacccagacaggaatggcacaagtgattatacctcaggggcaacttgtggatgtgaatagtcctcgggatgtccctgaagagaaacccagtaacagaaacttaccaactgtaagagtggatactctagcagacaataccagcaattacattcttcatcctcaaacatccttcccattgcccaaaaagtcagtgaccggaatgctggaagaaccccttctggggcctcttcagccactttcttctaatacacctatatgggcctgccgtcttaggagctgtgagaaaattggagattcataccgtggctactgtgtaagtgagactgaattagaaagtgtcctaacatttcacaagcagcaaacacagagtgtttgggggacccgtcagtctccaagcccagccaagcctgctacacgcttgatgtggaaatcccagtatgttccatatgatggaatcccatttgttaatgcagggagtagagctgtggtaatggagtgtcagtatgggccaagaagaaaaggtttccagttaaaaaaagtcagtgagcaggaaagcaggtcttgtcagctctacaaagccacttgtccagctcggatttacattaaaaaggtacagaagtttcctgaatatagagttcctacagaccccaaaattgacaagaaaattatcagaatggagcaggagaaagcttttaacatgctaaagaagaacttggtagatgctggtggtgttcttaggtggtatgtacagttacctacacagcaagctcatcagtatcatgaattagagactccctgcctcactttgtcaccttctccttttcctgtgtcttctcttgaagaagaggaaactgcagttagagatgagaattgtgcattaccctcacgtttacatcctcaagtagcacataagattcaagaattagtatcacagggaatagaacaagtgtatgcagtaaggaaacagctaagaaaatttgtggaaagggaactgttcaaacccgatgaggtacctgaaagacataatttatctttttttccaactgtaaatgatataaaaaatcacatccatgaggtacagaaatccttgagaaatggagatacggtatataactcagagattattccagcaacgcttcaatggactacagacagtgggaatattctcaaagagaccatgacagttacatttgcagaaggaaattcaccaggagaatcaattaccaccaaagtggaaacaaatcagaccaggggttctttgtctcctgagccaacccacttgctctcctcactctcctcatttcagcccaaaatatttacacaactacagggtttgcagttacaaccaaggtacacctctcctgatgaatcaccagctgtggtatcagtaaataaccagccgtcctctagtccttcaggacttctggatacaataggaagtgctgtaatgaataataattctctactgcttggtcaaagtcatagccttcaaagagatacatgcttaacccaaaacaatagtactgcctccaccatgggtaaccttccagaaccagatcaaaatctagttgcaatggacgagctggtagaagttggagatgttgaggatacagggaatctggaaggaactgttcatcggattctgttgggagatgtgcagactattccaatacagattatagacaaccactcagctcttattgaagaaaatccagaaagtaccatttctgtgagccaagttaaacaagaacccaaagaaccagcattgtctatggaagcaaaaaaaactgtggactataagaaattatctgctacataaattattgaagcttttcagaatttacaactctggtgacttctgatgtcttagaaaggaaggtgaatatagtcaaagcgtggcattgagataattggactgaagaccagtttgatgagaagcttttatttaaaactgatatatttgttgccagttccatatttttaccttccttaagagatgttttactcttcttattttgtataatttttatgctctttgattatctaataaggccagtatttcaaaagctgttctgaatttatccacagtaatatagtctgaacacaaatagtttacttaacttatccttggaaatattcaattttggttattacaaaacagaaaagaacaacagcaacaaaaacattgtgtgaatgtatgtttgtatgtgtgtatgtatatcatgaattttttttttaagttctgaaaaagaacttgttctctccttaaagttgtgaagaaattgttaattgccagacaggtaagaaaatgtttataatctatctcattaagaaagatgaagtattagattttacatcataacacaaagtccagcagctacatctgtggaaactgtgcagttgcattttagcctcttcccttccaatttttgtacttttaactacaaaccagtagtatactaatggttatctaatagaaatttaaagtgtcttggtaagtactgagaatttttacttgaattaatcagataagcaacagaaatcaacatatgtagcatggatttgtgctatattggaagtaaaacactataggcagaaagatgtagaaattaagagaattgaaaaagaataatagaattccttggtgtttacagataatttggaaaactttttgatgacagcagagga

SEQ ID NO: 41329 - DNA, 3455 bp, Artificial Sequence
  derived and/or modified sequence
cttttcggggtcccacatggcacggcttccgacccccggcccgggacggggctcgcaggccccagaggggcaggctggagaaggaggaggttaggtgtcttcaggagggttgctgagcccaaggacgcgccatcgccgcggagaaggagccggaccccttgggcggagcgcccaatgtgtggtccctcacgccgtcccgcaccttgctttttagggttctttttccgctttctgagcccttttataccttacgtttagaaggggaaaatcatcctcccacaccttctccccgactttttgccttttttgtcttgaagttacccaaaggcctgtgtattgttctcaatggtcccaagaattactctaatatagttgtttttctgagggaggatggatggagataactatcctgatcccaatgtcactttttaaggcattcgcttcaagagacaagcagtttagaatcaggcagaactggattgcaaaatttatgggcagaccgagaaaatgctgctgtgaagacccaattaaagctttcacataaatgaagctacagctatcatgatttagtgcccccaaaaggaagaacttcagtggacaagaaaggacatttctgggggtagtagaatgcttgaggcctggaatttaaacctgagccactatctgaagctattaaataatagaagaaaatggaattgaatatgatgtcagcatggaacaatctaatgattcattaagagtcaaccataatgacggtgaagagtcaaaaaccagtgctcaagtatttgagcatctaatctgtatggactccagggattcttcctttggacaaaatgattctcctacagttttgcccatcactactcgtgaagcaaataattcactcatatcacagaatataccagggcccctgactcagacacagactctttctgcagagcaattccatctagtggaccaaaatgggcaggctattcaatatgaacttcagtcattgggggaatccaatgcacaaatgatgatcgttgccagcccaacagaaaatggacaggtacttcgtgtaattccacctacccagacaggaatggcacaagtgattatacctcaggggcaacttgtggatgtgaatagtcctcgggatgtccctgaagagaaacccagtaacagaaacttaccaactgtaagagtggatactctagcagacaataccagcaattacattcttcatcctcaaacatccttcccattgcccaaaaagtcagtgaccggaatgctggaagaaccccttctggggcctcttcagccactttcttctaatacacctatatgggcctgccgtcttaggagctgtgagaaaattggagattcataccgtggctactgtgtaagtgagactgaattagaaagtgtcctaacatttcacaagcagcaaacacagagtgtttgggggacccgtcagtctccaagcccagccaagcctgctacacgcttgatgtggaaatcccagtatgttccatatgatggaatcccatttgttaatgcagggagtagagctgtggtaatggagtgtcagtatgggccaagaagaaaaggtttccagttaaaaaaagtcagtgagcaggaaagcaggtcttgtcagctctacaaagccacttgtccagctcggatttacattaaaaaggtacagaagtttcctgaatatagagttcctacagaccccaaaattgacaagaaaattatcagaatggagcaggagaaagcttttaacatgctaaagaagaacttggtagatgctggtggtgttcttaggtggtatgtacagttacctacacagcaagctcatcagtatcatgaattagagactccctgcctcactttgtcaccttctccttttcctgtgtcttctcttgaagaagaggaaactgcagttagagatgagaattgtgcattaccctcacgtttacatcctcaagtagcacataagattcaagaattagtatcacagggaatagaacaagtgtatgcagtaaggaaacagctaagaaaatttgtggaaagggaactgttcaaacccgatgaggtacctgaaagacataatttatctttttttccaactgtaaatgatataaaaaatcacatccatgaggtacagaaatccttgagaaatggagatacggtatataactcagagattattccagcaacgcttcaatggactacagacagtgggaatattctcaaagagaccatgacagttacatttgcagaaggaaattcaccaggagaatcaattaccaccaaagtggaaacaaatcagaccaggggttctttgtctcctgagccaacccacttgctctcctcactctcctcatttcagcccaaaatatttacacaactacagggtttgcagttacaaccaaggtacacctctcctgatgaatcaccagctgtggtatcagtaaataaccagccgtcctctagtccttcaggacttctggatacaataggaagtgctgtaatgaataataattctctactgcttggtcaaagtcatagccttcaaagagatacatgcttaacccaaaacaatagtactgcctccaccatgggtaaccttccagaaccagatcaaaatctagttgcaatggacgagctggtagaagttggagatgttgaggatacagggaatctggaaggaactgttcatcggattctgttgggagatgtgcagactattccaatacagattatagacaaccactcagctcttattgaagaaaatccagaaagtaccatttctgtgagccaagttaaacaagaacccaaagaaccagcattgtctatggaagcaaaaaaaactgtggactataagaaattatctgctacataaattattgaagcttttcagaatttacaactctggtgacttctgatgtcttagaaaggaaggtgaatatagtcaaagcgtggcattgagataattggactgaagaccagtttgatgagaagcttttatttaaaactgatatatttgttgccagttccatatttttaccttccttaagagatgttttactcttcttattttgtataatttttatgctctttgattatctaataaggccagtatttcaaaagctgttctgaatttatccacagtaatatagtctgaacacaaatagtttacttaacttatccttggaaatattcaattttggttattacaaaacagaaaagaacaacagcaacaaaaacattgtgtgaatgtatgtttgtatgtgtgtatgtatatcatgaattttttttttaagttctgaaaaagaacttgttctctccttaaagttgtgaagaaattgttaattgccagacaggtaagaaaatgtttataatctatctcattaagaaagatgaagtattagattttacatcataacacaaagtccagcagctacatc

SEQ ID NO: 41330 - DNA, 2178 bp, Artificial Sequence
  derived and/or modified sequence
atggaacagtcaaacgactccctgcgggtgaaccataatgacggcgaggaatccaagacatccgcccaggtgttcgagcaccttatctgcatggattcacgcgatagctcttttggccaaaacgacagccctactgtcctgccgatcactacacgcgaggccaacaactccctaattagtcaaaacatccctggccctctcacgcagacgcagacactgtccgcagaacaattccacctggtggaccaaaacgggcaggccatccagtacgagctccagagccttggtgagagcaatgcgcaaatgatgattgtggcaagtcctaccgagaacgggcaggtcctccgtgtaataccaccgactcagaccgggatggctcaggtgattatcccccaaggtcaactggtagacgtgaattccccccgagatgtgccggaagagaagccctcaaatcgcaacctgcctaccgtccgcgtcgatacgctggcagacaacaccagcaactatatcctgcacccacaaacctccttccctctgccaaagaaatccgtaactggcatgctggaagagcctttgctggggcctctgcagccactgtcatcaaacacccccatttgggcttgccggctgcgttcctgtgagaaaatcggagattcatacaggggatattgtgtttctgagactgagctggaatcagtgcttacttttcacaagcagcagacccagagcgtgtggggtactagacagagtccctcaccggctaagcccgctaccagattgatgtggaagtctcagtatgttccttacgatgggatcccttttgtcaacgccggatcacgggcagtggtgatggaatgtcagtacggccctaggcgtaagggctttcagttgaagaaggtgtcggagcaggaaagcaggagctgccagctctacaaagctacctgcccagccaggatttacatcaaaaaagtgcagaagttcccagagtatcgtgtacccacagaccctaaaatcgataagaagataattcgtatggagcaggaaaaggccttcaatatgctgaaaaaaaacttagtggatgcaggaggggtgttaaggtggtatgtccagttacccactcagcaagcccaccaataccatgagctagaaacgccatgtctcaccctgtctcccagtccatttcctgtttcctcactcgaagaagaagaaacggcagtgagggatgaaaactgcgctctgcccagccggttacacccccaggtggcacacaagattcaggagttggtcagccaaggcatagaacaggtgtatgcagtgcggaagcagctccggaagtttgtcgagcgtgagctcttcaagccagatgaggtgcctgagcggcacaacctatctttttttcctacagtgaacgacattaagaaccacattcatgaagtgcaaaagtccttacgcaatggggacacagtgtacaatagcgagattatccctgcgaccttgcaatggacaaccgatagtgggaatatcctcaaggaaaccatgactgtcacgtttgcagaaggtaactcacctggggagagcattacaacaaaagtggaaaccaaccagacccgcggatccttatcacccgagcccacccacctgctgtctagcctgagtagctttcagccaaaaatattcacccagttgcagggattgcagctacaacctcgatacacatctcctgacgagagcccagcagtcgtgagtgtgaacaaccagccctcatcttctccgtccgggctgctggacactattggtagcgccgtcatgaataacaattcgctcctactgggccaatcacacagcttgcagcgagatacctgtttgactcagaataattcaactgcaagcacaatgggtaacttaccggagccagatcagaatcttgtcgcaatggatgaactggtcgaggtgggtgacgtggaggatacaggaaacctggaaggcacagtccatcggattctactgggtgacgtacaaactatccccatccagatcatcgacaatcattccgccttgatagaagagaaccccgagagtactatttcagttagccaggtcaagcaagaacccaaagaacccgctttgtcaatggaggcgaagaagaccgtggactataagaaacttagtgctacttag

SEQ ID NO: 41331 - DNA, 2178 bp, Artificial Sequence
  derived and/or modified sequence
atggagcagtccaatgactcactgagggtgaatcacaacgacggggaagagtcgaaaacaagcgcccaggttttcgagcacttgatctgcatggatagccgcgacagcagcttcgggcaaaatgactcccctacagtgctgcccatcactacccgagaggccaataattcccttatttcacagaatattcctgggcctctgactcagacgcagacactgagcgcggaacaattccacctcgtagaccaaaatggccaggccattcaatatgagctccagtccctcggggagagtaacgcacagatgatgattgtggcctcacccaccgaaaatggacaggttttgagagtgattcctccaacccagactggaatggcccaggtcatcatcccccaggggcagctggtcgatgtgaactctcccagggatgtccccgaggaaaagccttcgaatcgaaatttacctaccgtgcgtgtggataccctagccgataatacaagcaactatatcctccatccgcagacatcatttcccctacctaaaaagtccgtcaccgggatgctggaggaacccctgctgggtcctcttcagcctcttagctccaatacccccatttgggcttgccggttgcggtcttgtgagaagataggagacagttacagggggtactgtgtgtccgagactgagttggagtcagtgctgaccttccacaagcagcagacacagtccgtatggggcacgagacagtctccgtcaccagcaaaaccagccacccggttaatgtggaagtctcaatatgttccttacgacggcataccctttgttaatgcagggtcgagagcagtggtgatggagtgccagtatgggcctcggaggaaaggctttcaattaaaaaaagtgtccgagcaggagtcacgcagctgtcagttatataaggccacctgccccgcacggatctacattaagaaggtgcaaaagtttccagaatacagagtgcccactgaccccaaaatcgacaaaaagattatccgcatggaacaagaaaaggcgttcaacatgctgaagaagaacctggtagacgccggtggcgtgttgaggtggtacgttcagttgcctacccagcaggctcaccagtatcacgagctagaaaccccctgccttacacttagtccttcaccttttcccgtcagcagcctggaagaagaagagacagcggttagggatgagaactgcgcactgcctagccgattgcacccacaagtggcccacaagatccaggagcttgtctctcaggggatagaacaggtctacgctgtcagaaagcagctgaggaagtttgtggagcgggagctttttaagccagatgaagtgcccgagcgtcacaacctctccttctttcctactgttaacgacattaaaaatcacattcatgaggtgcagaagtcactgcggaacggagacacagtatataactccgagatcattcctgccaccctgcagtggaccaccgacagtggtaacatactgaaggagactatgacggtcactttcgccgaaggaaacagccccggagaaagcatcacaacaaaagttgagaccaatcagactaggggatccctatccccggagcctactcacctcctatcatctcttagttcgttccagcctaaaattttcacccaactgcaggggctccagctgcagcctcggtataccagccctgacgaatctcctgctgtggtctccgtgaacaatcagccatcctccagcccgagcggcctgctcgatacaattggatctgccgtgatgaacaacaactctctcctcctgggccagagtcacagtctgcagcgagatacatgtcttactcagaataatagcacggccagtacaatgggcaacttacccgagcccgaccagaatttagtggcaatggacgagctggtggaggtaggagatgtggaagatactgggaacttagagggtaccgtgcacagaattcttctgggtgacgtacaaaccatcccaattcagatcattgataaccacagcgcactcattgaagagaatccggagagtaccatctcagtgagccaggtgaagcaagagcccaaagaaccagcactgtctatggaggctaaaaaaacagtggattacaaaaagctgtcagcgacttag

SEQ ID NO: 41332 - DNA, 66 bp, Artificial Sequence
  derived and/or modified sequence
atggaacagagcaatgattcactcagggtgaaccacaacgacggtgaagagagcaaaacaagttag

SEQ ID NO: 41333 - DNA, 2178 bp, Artificial Sequence
  derived and/or modified sequence
atggagcaaagtaacgatagcctgagagtcaaccacaacgacggggaggagtccaagaccagcgctcaggtatttgagcacctgatttgtatggacagcagagacagctcgtttggccaaaacgattcccctactgtgttaccaattaccaccagggaggcaaataatagtctgatatcccagaacatccccggtccactcacgcagactcaaactctgagcgctgaacaattccacctggtggatcagaacgggcaggccatccagtacgaattgcagtctcttggagagtccaatgcacagatgatgatcgtggcgtcccctaccgaaaatgggcaagtgctcagagtgatcccacccacacaaacagggatggcccaggtaataatcccacagggacagctggtggacgtcaactctccccgtgacgtgccagaagagaagcctagtaaccgcaatttgcctacagtgagagtggacactctggcggacaacacttcaaactacattctgcatcctcagacctctttccccctgcctaaaaagtcagttaccgggatgctggaagagcccctgttaggcccactgcagccgctgagcagcaatacaccgatatgggcgtgcagactcaggtcgtgtgagaagatcggcgacagctacagaggctattgtgtgagtgagacagagctggagtctgtcctgactttccacaagcagcagactcagtccgtgtggggaacgaggcaatctccaagcccagccaagccagccacacggctcatgtggaagtctcagtatgtcccctatgacggcatcccattcgtgaatgcaggctcaagggccgtcgtgatggagtgtcagtatggccctaggcggaagggttttcagctaaagaaggtttcagaacaggaaagccggtcttgtcaactgtacaaggcaacatgccccgctcgcatttacatcaagaaagtgcagaagttccctgaatacagggtaccaacagatccaaagatcgacaagaagattattagaatggagcaagagaaagcgttcaacatgctgaaaaaaaacctagtcgacgctggtggtgtgctgagatggtacgtgcagctgcctacccaacaggctcaccagtatcacgagctggagaccccttgcctgaccctatctcctagtccgttccctgttagctccctagaagaggaggagacagcagtcagggatgagaactgcgccttacctagtcgccttcatccgcaggtggcgcataagatccaggaactggtgtcccaaggaattgaacaggtgtacgccgttcgcaagcagctgaggaaattcgtagagagagagttgtttaaacccgacgaggtacccgaacgccacaacctgtcctttttccctacagttaatgacattaaaaaccacatccacgaagtgcaaaagtctttacgtaatggcgacacagtgtacaactctgaaatcattcctgcgacactacagtggacgaccgatagtggtaacatcctgaaggaaaccatgactgtgactttcgccgagggcaattcccctggagagagcattactacaaaggttgaaactaaccagactagaggctctctctcacccgagcctacccacctactttcaagtctttctagttttcagcccaagatcttcacccagctacaggggttacagttgcaaccccgatatacgagccctgatgagagtccagctgtagtgagtgtgaacaatcagcccagttcctccccaagcggcctgctcgataccatcggaagtgcggttatgaacaataatagtctgctgctgggacagtcccattccctgcaacgggacacttgtctgacccagaacaacagcactgcttccactatgggtaacctcccagaacccgatcagaatctggttgccatggacgaacttgtggaagtgggggacgtggaagatactggaaacctggagggaacagtgcatcggatcttactgggcgacgtacagacaatccccattcaaatcatcgataatcacagcgcgctgattgaagaaaaccccgaatccacaatctctgtctctcaggtcaagcaggagccgaaagaacctgccctatcaatggaggctaaaaagacagtggattacaaaaagctgagtgccacttag

SEQ ID NO: 41334 - DNA, 2178 bp, Artificial Sequence
  derived and/or modified sequence
atggagcagagcaacgacagcctgagagtgaaccacaacgacggcgaggagagcaagaccagcgcccaggtgttcgagcacctgatctgcatggacagcagagacagcagcttcggccagaacgacagccccaccgtgctgcccatcaccaccagagaggccaacaacagcctgatcagccagaacatccccggccccctgacccagacccagaccctgagcgccgagcagttccacctggtggaccagaacggccaggccatccagtacgagctgcagagcctgggcgagagcaacgcccagatgatgatcgtggccagccccaccgagaacggccaggtgctgagagtgatcccccccacccagaccggcatggcccaggtgatcatcccccagggccagctggtggacgtgaacagccccagagacgtgcccgaggagaagcccagcaacagaaacctgcccaccgtgagagtggacaccctggccgacaacaccagcaactacatcctgcacccccagaccagcttccccctgcccaagaagagcgtgaccggcatgctggaggagcccctgctgggccccctgcagcccctgagcagcaacacccccatctgggcctgcagactgagaagctgcgagaagatcggcgacagctacagaggctactgcgtgagcgagaccgagctggagagcgtgctgaccttccacaagcagcagacccagagcgtgtggggcaccagacagagccccagccccgccaagcccgccaccagactgatgtggaagagccagtacgtgccctacgacggcatccccttcgtgaacgccggcagcagagccgtggtgatggagtgccagtacggccccagaagaaagggcttccagctgaagaaggtgagcgagcaggagagcagaagctgccagctgtacaaggccacctgccccgccagaatctacatcaagaaggtgcagaagttccccgagtacagagtgcccaccgaccccaagatcgacaagaagatcatcagaatggagcaggagaaggccttcaacatgctgaagaagaacctggtggacgccggcggcgtgctgagatggtacgtgcagctgcccacccagcaggcccaccagtaccacgagctggagaccccctgcctgaccctgagccccagccccttccccgtgagcagcctggaggaggaggagaccgccgtgagagacgagaactgcgccctgcccagcagactgcacccccaggtggcccacaagatccaggagctggtgagccagggcatcgagcaggtgtacgccgtgagaaagcagctgagaaagttcgtggagagagagctgttcaagcccgacgaggtgcccgagagacacaacctgagcttcttccccaccgtgaacgacatcaagaaccacatccacgaggtgcagaagagcctgagaaacggcgacaccgtgtacaacagcgagatcatccccgccaccctgcagtggaccaccgacagcggcaacatcctgaaggagaccatgaccgtgaccttcgccgagggcaacagccccggcgagagcatcaccaccaaggtggagaccaaccagaccagaggcagcctgagccccgagcccacccacctgctgagcagcctgagcagcttccagcccaagatcttcacccagctgcagggcctgcagctgcagcccagatacaccagccccgacgagagccccgccgtggtgagcgtgaacaaccagcccagcagcagccccagcggcctgctggacaccatcggcagcgccgtgatgaacaacaacagcctgctgctgggccagagccacagcctgcagagagacacctgcctgacccagaacaacagcaccgccagcaccatgggcaacctgcccgagcccgaccagaacctggtggccatggacgagctggtggaggtgggcgacgtggaggacaccggcaacctggagggcaccgtgcacagaatcctgctgggcgacgtgcagaccatccccatccagatcatcgacaaccacagcgccctgatcgaggagaaccccgagagcaccatcagcgtgagccaggtgaagcaggagcccaaggagcccgccctgagcatggaggccaagaagaccgtggactacaagaagctgagcgccacctag

SEQ ID NO: 41335 - DNA, 66 bp, Artificial Sequence
  derived and/or modified sequence
atggagcagagcaacgacagcctgagagtgaaccacaacgacggcgaggagagcaagaccagctag

SEQ ID NO: 41336 - protein, 809 aa, Artificial Sequence
  derived and/or modified sequence
MEAEGSSAPARAGSGEGSDSAGGATLKAPKHLWRHEQHHQYPLRQPQFRLLHPHHHLPPPPPPSPQPQPQCPLQPPPPPPLPPPPPPPGAARGRYASSGATGRVRHRGYSDTERYLYCRAMDRTSYAVETGHRPGLKKSRMSWPSSFQGLRRFDVDNGTSAGRSPLDPMTSPGSGLILQANFVHSQRRESFLYRSDSDYDLSPKSMSRNSSIASDIHGDDLIVTPFAQVLASLRTVRNNFAALTNLQDRAPSKRSPMCNQPSINKATITEEAYQKLASETLEELDWCLDQLETLQTRHSVSEMASNKFKRMLNRELTHLSEMSRSGNQVSEFISNTFLDKQHEVEIPSPTQKEKEKKKRPMSQISGVKKLMHSSSLTNSSIPRFGVKTEQEDVLAKELEDVNKWGLHVFRIAELSGNRPLTVIMHTIFQERDLLKTFKIPVDTLITYLMTLEDHYHADVAYHNNIHAADVVQSTHVLLSTPALEAVFTDLEILAAIFASAIHDVDHPGVSNQFLINTNSELALMYNDSSVLENHHLAVGFKLLQEENCDIFQNLTKKQRQSLRKMVIDIVLATDMSKHMNLLADLKTMVETKKVTSSGVLLLDNYSDRIQVLQNMVHCADLSNPTKPLQLYRQWTDRIMEEFFRQGDRERERGMEISPMCDKHNASVEKSQVGFIDYIVHPLWETWADLVHPDAQDILDTLEDNREWYQSTIPQSPSPAPDDPEEGRQGQTEKFQFELTLEEDGESDTEKDSGSQVEEDTSCSDSKTLCTQDSESTEIPLDEQVEEEAVGEEEESQPEACVIDDRSPDT

SEQ ID NO: 41337 - DNA, 2430 bp, Artificial Sequence
  derived and/or modified sequence
atggaggctgagggaagctcggcacccgcgagggcaggctccggcgaaggctcggactcagcagggggtgccacacttaaggcacctaaacatctgtggagacacgaacagcaccaccaataccccctgcggcagccccagttccggttgttgcatcctcaccaccatcttccgcctccgccccctccttcccctcagccacagcctcagtgtccgctgcaaccccctccgcctcctcccttaccgcctcctcctcccccaccaggagcagccaggggccgatacgcaagctccggtgcaacagggcgtgtgcgccatcggggatattctgacactgagaggtatctgtactgtcgagccatggatagaacaagctacgccgtggagacgggtcatagacctggcctcaaaaaatctcgcatgtcctggccttcctccttccagggactgcgaaggttcgacgtggataacggtacatctgctggcaggtctccactcgacccgatgacgtctcctggaagcggccttatcttacaggcaaacttcgttcactcacaacggcgcgagagcttcctttaccgctctgattcagactatgacctcagtcccaagtctatgagccgtaactcctcaatcgcaagcgatatccacggcgatgacctaattgtgaccccatttgcccaagtgttggcatctctgcggacagtccggaataacttcgccgccctcactaacttgcaggacagggccccgagcaaacggagccccatgtgtaatcaaccatcgatcaacaaggctaccatcacggaagaagcctatcagaaactggcctcagaaaccctggaggaattggactggtgtttagaccagctggagacacttcaaaccaggcacagcgtctcagagatggcttcaaacaaatttaaaaggatgctaaatcgtgaactgacccatctttctgaaatgtccagatctggcaatcaagtttctgaatttatctcaaacactttccttgacaagcaacacgaagtagaaattcccagtcccacacagaaggagaaggagaagaagaagcgcccgatgagccagatctctggggttaaaaagctgatgcacagcagttcactaaccaatagcagcataccccgctttggtgtgaagaccgagcaggaggatgtgctggccaaggagctggaagatgtgaacaagtgggggcttcacgtgttcagaattgccgaattgtcagggaaccgaccacttacagttatcatgcacaccatctttcaggagcgcgacttgctcaaaacattcaagattcctgtcgacactctgatcacttatctaatgactctcgaagaccattaccacgcagatgtggcctaccacaataatattcatgctgccgacgtagtccagtccacccacgtgctgctctcgaccccagccctcgaagcagtcttcaccgatttagagattttagcagcaatttttgcgtctgctatccatgatgtggatcatccgggtgtcagtaaccagttccttattaacaccaattctgagttggcgctgatgtataacgactcatcagtgctggagaaccatcacctcgccgtcggctttaagctgctccaggaggagaattgtgacatctttcagaacctcaccaagaagcagagacagtccctccgcaagatggttatcgacatagtgctagccactgacatgagcaagcatatgaatctcctggcagacctaaagacaatggtggagaccaagaaggttacgtcctctggagtcctgctcctcgataattactccgatcgcatccaggtgctgcagaacatggtgcattgcgcagacctcagcaaccccaccaaaccactacagctgtacaggcagtggaccgatagaatcatggaagagttcttccgacagggagatagagaaagggaacgaggcatggagatatccccgatgtgtgacaaacataacgcttccgtcgaaaaatcccaggtgggatttatcgattacatcgtccaccccctgtgggaaacttgggccgatctggttcacccagacgctcaggatatcctggatacccttgaggataatagggaatggtaccagtcaacaattccacaaagccccagtccagcccctgacgacccagaagaggggcgccagggccaaacagaaaaattccagttcgaattaactctcgaggaggatggggagtccgacacagaaaaagacagcggctcccaggttgaggaagacacatcttgctccgattcaaaaaccctgtgtacccaggatagcgagagtacagagatcccactggatgagcaagttgaagaagaggcagttggcgaggaggaggagtcgcaacccgaagcatgtgtgatcgacgatcgatcacctgatacctag

SEQ ID NO: 41338 - DNA, 2430 bp, Artificial Sequence
  derived and/or modified sequence
atggaggccgagggcagcagcgccccagcccgggccggcagcggggagggcagtgacagcgctggaggagccaccctgaaggcccccaagcacctgtggaggcatgagcagcaccaccagtaccccctgcggcagccccagttccggctgctgcacccccaccaccacctgcccccacctcctccacccagcccccagccccagccccagtgccccctgcagcccccacctcctccacccctgcccccacctcctcctcctcctggggccgcccggggccgctatgccagcagcggggccaccggccgggtgcgccaccggggctacagcgacacagagcgctacctgtactgccgggccatggacaggaccagctatgctgtggagaccggccaccggcccggcctgaagaagagcaggatgtcctggcccagcagcttccagggcctgcggagatttgatgtggacaatggcaccagcgctggccgcagccccctggaccccatgaccagccctggcagcggcctcatcctgcaggccaactttgtgcacagccagaggcgggagagcttcctgtacagaagtgacagcgactatgacctgagccccaagtccatgagcaggaacagcagcatcgccagtgacatccatggagatgacctgattgtgaccccatttgcccaggtgctggccagcctgaggacagtgaggaacaactttgctgccctgaccaacctgcaggaccgggcccccagcaagaggagccccatgtgcaaccagcccagcatcaacaaggccaccatcacagaggaggcctaccagaagctggccagcgagaccctggaggagctggactggtgcctggaccagctggagaccctgcagaccaggcacagcgtgtctgagatggccagcaacaagttcaagaggatgctgaaccgggagctgacccacctgtctgagatgagccgcagcggcaaccaggtgtctgagttcatcagcaacaccttcctggacaagcagcacgaggtggagatccccagccccacccagaaggagaaggagaagaagaagaggcccatgagccagatctctggagtgaagaagctgatgcacagcagcagcctgaccaacagcagcatcccccgcttcggcgtgaagacagagcaggaggatgtgctggccaaggagctggaggatgtgaacaagtggggcctgcacgtgttcagaattgctgagctgagcggcaaccggcccctgaccgtcatcatgcacaccatcttccaggagcgggacctgctgaagaccttcaagatccctgtggacaccctcatcacctacctgatgaccctggaggaccactaccacgcagatgtggcctaccacaacaacatccatgctgctgatgtggtgcagagcacccacgtgctgctgagcaccccagccctggaggccgtgttcacagacctggagatcctggccgccatctttgccagcgccatccatgatgtggaccaccctggggtgagcaaccagttcctgatcaacaccaacagcgagctggccctgatgtacaatgacagctctgtgctggagaaccaccacctggccgtgggcttcaagctgctgcaggaggagaactgtgacatcttccagaacctgaccaagaagcagaggcagagcctgaggaagatggtgattgatattgtgctggccacagacatgagcaagcacatgaacctgctggccgacctgaagaccatggtggagaccaagaaggtgaccagcagtggagtgctgctgctggacaactacagcgaccgcatccaggtgctgcagaacatggtgcactgtgccgacctgagcaaccccaccaagcccctgcagctgtaccggcagtggacagaccgcatcatggaggagttcttccggcagggcgaccgggagcgggagcggggcatggagatcagccccatgtgtgacaagcacaatgcctctgtggagaagagccaggtgggcttcatcgactacatcgtgcaccccctgtgggagacctgggccgacctggtgcacccagatgcccaggacatcctggacaccctggaggacaaccgggagtggtaccagagcaccatcccccagagccccagccctgccccagatgatcctgaggagggccggcagggccagacagagaagttccagtttgagctgaccctggaggaggatggagagagtgacacagagaaggacagcggcagccaggtggaggaggacaccagctgcagcgacagcaagaccctgtgcacccaggacagcgagagcacagagatccccctggatgagcaggtggaggaggaggccgtgggggaggaggaggagagccagcctgaggcctgtgtgattgatgacaggagcccagacacctag

SEQ ID NO: 41339 - DNA, 2430 bp, Artificial Sequence
  derived and/or modified sequence
atggaggccgagggcagcagcgcccccgcccgggccggcagcggcgaaggaagcgattccgccggtggggcgacactcaaagctccaaagcatttatggaggcacgagcagcaccatcagtaccctctacgccagccacaatttaggctgctgcatcctcatcaccatctgccaccccccccaccgcccagtccgcagcctcagccacaatgccccctccagccaccgcccccccctcccttgcccccgcctcctcctcctccaggcgcggctaggggtcgctacgcctcaagtggggccaccgggcgagtgcgtcatagaggttactccgacactgaacgctacctctattgcagagctatggaccgcacatcatatgctgttgagaccggccaccgtccgggactaaaaaaaagtcgcatgagctggcccagcagtttccaaggcctgcgccggtttgatgttgacaatggaactagcgccggacgaagcccgctggatcccatgacttctcccggctcaggtcttatcctccaggccaattttgtgcattcacagcgacgggagtcatttctgtaccggtctgactccgactatgacctgtctcccaagtcgatgagtcgtaacagttccattgcaagcgacatccatggagatgacctgatagtgacccctttcgcacaagttctagcgtctttgcggacagtgaggaacaattttgctgccctgacaaatctccaggacagggctcctagcaagaggtccccgatgtgtaatcagcctagtattaacaaggctaccatcacagaagaggcttaccagaaattggcatctgagacgctcgaagagctggactggtgtctcgaccagctggagacattgcagacgcgccatagtgttagcgagatggctagcaacaagttcaagcggatgttaaacagggagttaactcacctctcagagatgagtagatcaggaaaccaggtgagtgagttcatctccaacacattcctggacaaacaacatgaggtggagatcccgagccccacccaaaaggagaaggaaaagaagaagcgccccatgtcacagataagcggcgtgaaaaaactgatgcatagctcttccctgaccaatagcagcataccacggttcggagtaaaaacggaacaggaggacgtgctggccaaggagctggaggacgttaataagtgggggctgcatgtatttagaatcgctgaactatctgggaaccggcccctgaccgtcataatgcacactatctttcaggagcgcgacctcctaaagacattcaagatcccagtagacacgcttattacatacctgatgacactagaggaccactatcacgccgatgtggcttaccacaataacatacacgcagccgatgtggtccagagcacacacgttctcctctctacacccgccctcgaggccgtgtttaccgaccttgaaattctggccgccatctttgcgtcagccattcacgatgtggatcaccctggggtgtctaatcagtttttgatcaatactaattctgagttggccttaatgtacaacgacagttctgttctggaaaaccaccacctggctgtggggtttaaattgttgcaggaggagaactgcgacattttccagaacctcacaaagaagcaacgccagtccttacgaaagatggtgattgacattgttctagccacggatatgtctaagcatatgaatctgcttgccgacctcaaaactatggtcgagacaaagaaggtgacaagctctggcgtattgctgctggataattacagtgataggatccaggtgctgcagaacatggtgcactgtgccgatttgagcaatccgaccaaacccttgcagctgtatcgacagtggacagacaggattatggaggagttctttcgtcagggcgaccgtgagagagagcgtggtatggagataagccccatgtgcgataagcataatgcttcagtggagaaatcacaggttggctttatcgactacatcgtccacccactttgggaaacatgggcggatttggtgcatcccgatgcacaagacatcttagacaccttggaagacaacagggaatggtatcagtctaccattcctcagagcccctctcccgcccccgacgatcccgaagaagggaggcagggccagacagaaaagtttcagtttgaacttactctggaagaggacggtgaatcggacactgaaaaagattccgggagccaagtggaggaggatacatcttgctcagactctaagactctttgtacacaggattctgaaagcacagagatcccacttgacgagcaggtggaggaagaggccgttggggaagaagaggaatcccagccggaggcttgtgtcatcgatgaccggagcccagacacatag

SEQ ID NO: 41340 - DNA, 8232 bp, Artificial Sequence
  derived and/or modified sequence
gggccccctctcggtagccctgaggctctggcgccttcaagtgagaagctaagcaccagcctctgctgggctgcagaagcggcggcggcggcagcagcagcagcagcatcaggaaggcgctcgggccagcgcggtgaacccgggctgggcagcaggtcgcggagccgcgagccaggatggaggcagagggcagcagcgcgccggcccgggcgggcagcggagagggcagcgacagcgccggcggggccacgctcaaagcccccaagcatctctggaggcacgagcagcaccaccagtacccgctccggcagccccagttccgcctcctgcatccccatcaccacctgcccccgccgccgccaccctcgccccagccccagccccagtgtccgctacagccgccgccgccgccccccctgccgccgcccccgccgccgcccggggctgcccgcggccgctacgcctcgagcggggccaccggccgcgtccggcatcgcggctactcggacaccgagcgctacctgtactgtcgcgccatggaccgcacctcctacgcggtggagaccggccaccggcccggcctgaagaaatccaggatgtcctggccctcctcgttccagggactcaggcgttttgatgtggacaatggcacatctgcgggacggagtcccttggatcccatgaccagcccaggatccgggctaattctccaagcaaattttgtccacagtcaacgacgggagtccttcctgtatcgatccgacagcgattatgacctctctccaaagtctatgtcccggaactcctccattgccagtgatatacacggagatgacttgattgtgactccatttgctcaggtcttggccagtctgcgaactgtacgaaacaactttgctgcattaactaatttgcaagatcgagcacctagcaaaagatcacccatgtgcaaccaaccatccatcaacaaagccaccataacagaggaggcctaccagaaactggccagcgagaccctggaggagctggactggtgtctggaccagctagagaccctacagaccaggcactccgtcagtgagatggcctccaacaagtttaaaaggatgcttaatcgggagctcacccatctctctgaaatgagtcggtctggaaatcaagtgtcagagtttatatcaaacacattcttagataagcaacatgaagtggaaattccttctccaactcagaaggaaaaggagaaaaagaaaagaccaatgtctcagatcagtggagtcaagaaattgatgcacagctctagtctgactaattcaagtatcccaaggtttggagttaaaactgaacaagaagatgtccttgccaaggaactagaagatgtgaacaaatggggtcttcatgttttcagaatagcagagttgtctggtaaccggcccttgactgttatcatgcacaccatttttcaggaacgggatttattaaaaacatttaaaattccagtagatactttaattacatatcttatgactctcgaagaccattaccatgctgatgtggcctatcacaacaatatccatgctgcagatgttgtccagtctactcatgtgctattatctacacctgctttggaggctgtgtttacagatttggagattcttgcagcaatttttgccagtgcaatacatgatgtagatcatcctggtgtgtccaatcaatttctgatcaatacaaactctgaacttgccttgatgtacaatgattcctcagtcttagagaaccatcatttggctgtgggctttaaattgcttcaggaagaaaactgtgacattttccagaatttgaccaaaaaacaaagacaatctttaaggaaaatggtcattgacatcgtacttgcaacagatatgtcaaaacacatgaatctactggctgatttgaagactatggttgaaactaagaaagtgacaagctctggagttcttcttcttgataattattccgataggattcaggttcttcagaatatggtgcactgtgcagatctgagcaacccaacaaagcctctccagctgtaccgccagtggacggaccggataatggaggagttcttccgccaaggagaccgagagagggaacgtggcatggagataagccccatgtgtgacaagcacaatgcttccgtggaaaaatcacaggtgggcttcatagactatattgttcatcccctctgggagacatgggcagacctcgtccaccctgacgcccaggatattttggacactttggaggacaatcgtgaatggtaccagagcacaatccctcagagcccctctcctgcacctgatgacccagaggagggccggcagggtcaaactgagaaattccagtttgaactaactttagaggaagatggtgagtcagacacggaaaaggacagtggcagtcaagtggaagaagacactagctgcagtgactccaagactctttgtactcaagactcagagtctactgaaattccccttgatgaacaggttgaagaggaggcagtaggggaagaagaggaaagccagcctgaagcctgtgtcatagatgatcgttctcctgacacgtaacagtgcaaaaactttcatgccttttttttttttaagtagaaaaattgtttccaaagtgcatgtcacatgccacaaccacggtcacacctcactgtcatctgccaggacgtttgttgaacaaaactgaccttgactactcagtccagcgctcaggaatatcgtaaccagttttttcacctccatgtcatccgagcaaggtggacatcttcacgaacagcgtttttaacaagatttcagcttggtagagctgacaaagcagataaaatctactccaaattattttcaagagagtgtgactcatcaggcagcccaaaagtttattggacttggggtttctattcctttttatttgtttgcaatattttcagaagaaaggcattgcacagagtgaacttaatggacgaagcaacaaatatgtcaagaacaggacatagcacgaatctgttaccagtaggaggaggatgagccacagaaattgcataattttctaatttcaagtcttcctgatacatgactgaatagtgtggttcagtgagctgcactgacctctacattttgtatgatatgtaaaacagattttttgtagagcttacttttattattaaatgtattgaggtattatatttaaaaaaaactatgttcagaacttcatctgccactggttatttttttctaaggagtaacttgcaagttttcagtacaaatctgtgctacactggataaaaatctaatttatgaattttacttgcaccttatagttcatagcaattaactgatttgtagtgattcattgtttgttttatataccaatgacttccatattttaaaagagaaaaacaactttatgttgcaggaaaccctttttgtaagtctttattatttactttgcattttgtttcactctttccagataagcagagttgctcttcaccagtgtttttcttcatgtgcaaagtgactatttgttctataatacttttatgtgtgttatatcaaatgtgtcttaagcttcatgcaaactcagtcatcagttcgtgttgtctgaagcaagtgggagatatataaatacccagtagctaaaatggtcagtcttttttagatgttttcctacttagtatctcctaataacgttttgctgtgtcactagatgttcatttcacaagtgcatgtctttctaataatccacacatttcatgctctaataatccacacatttcatgctcatttttattgtttttacagccagttatagtaagaaaaaggtttttccccttgtgctgctttataatttagcgtgtgtctgaaccttatccatgtttgctagatgaggtcttgtcaaatatatcactaccattgtcaccggtgaaaagaaacaggtagttaagttagggttaacattcatttcaaccacgaggttgtatatcatgactagcttttactcttggtttacagagaaaagttaaacagccaactaggcagtttttaagaatattaacaatatattaacaaacaccaatacaactaatcctatttggttttaatgatttcaccatgggattaagaactatatcaggaacatccctgagaaacggttttaagtgtagcaactactcttccttaatggacagccacataacgtgtaggaagtcctttatcacttatcctcgatccataagcatatcttgcagaggggaactacttctttaaacacatggagggaaagaagatgatgccactggcaccagagggttagtactgtgatgcatcctaaaatatttattatattggtaaaaattctggttaaataaaaaattagagatcactcttggctgatttcagcaccaggaactgtattacagttttagagattaattcctagtgtttacctgattatagcagttggcatcatggggcatttaattctgactttatccccacgtcagccttaataaagtcttctttaccttctctatgaagactttaaagcccaaataatcatttttcacattgatattcaagaattgagatagatagaagccaaagtgggtatctgacaagtggaaaatcaaacgtttaagaagaattacaactctgaaaagcatttatatgtggaacttctcaaggagcctcctggggactggaaagtaagtcatcagccaggcaaatgactcatgctgaagagagtccccatttcagtcccctgagatctagctgatgcttagatcctttgaaataaaaattatgtctttataactctgatcttttacataaagcagaagaggaatcaactagttaattgcaaggtttctactctgtttcctctgtaaagatcagatggtaatctttcaaataagaaaaaaataaagacgtatgtttgaccaagtagtttcacaagaatatttgggaacttgtttcttttaattttatttgtccctgagtgaagtctagaaagaaaggtaaagagtctagagtttattcctctttccaaaacattctcattcctctcctccctacacttagtatttcccccacagagtgcctagaatcttaataatgaataaaataaaaagcagcaatatgtcattaacaaatccagacctgaaagggtaaagggtttataactgcactaataaagagaggctctttttttttcttccagtttgttggtttttaatggtaccgtgttgtaaagatacccactaatggacaatcaaattgcagaaaaggctcaatatccaagagacagggactaatgcactgtacaatctgcttatccttgcccttctctcttgccaaagtgtgcttcagaaatatatactgctttaaaaaagaataaaagaatatccttttacaagtggctttacatttcctaaaatgccataagaaaatgcaatatctgggtactgtatggggaaaaaaatgtccaagtttgtgtaaaaccagtgcatttcagcttgcaagttactgaacacaataatgctgttttaattttgttttatatcagttaaaattcacaataatgtagatagaacaaattacagacaaggaaagaaaaaacttgaatgaaatggattttacagaaagctttatgataatttttgaatgcattatttattttttgtgccatgcattttttttctcaccaaatgaccttacctgtaatacagtcttgtttgtctgtttacaaccatgtatttattgcaatgtacatactgtaatgttaattgtaaattatctgttcttattaaaacatcatcccatgatgggatggtgttgatatatttggaaactcttggtgagagaatgaatggtgtgtatacatactctgtacatttttcttttctcctgtaatatagtcttgtcaccttagagcttgtttatggaagattcaagaaaactataaaatacttaaagatatataaatttaaaaaaacatagctgcaggtctttggtcccagggctgtgccttaactttaaccaatattttcttctgttttgctgcatttgaaaggtaacagtggagctagggctgggcattttacatccaggcttttaattgattagaattctgccaataggtggattttacaaaaccacagacaacctctgaaagattctgagacccttttgagacagaagctcttaagtacttcttgccagggagcagcactgcatgtgtgatggttgtttgccatctgttgatcaggaactacttcagctacttgcatttgattatttcctttttttttttttttaactcggaaacacaactggggaaatatattctttcccagtgattataaacaatctttttcttttttttaagtccttttggcttctagagctcataggaaaatggacttgatttgaaattggagccagagtttactcgtgttggttatctattcatcagcttcctgacatgttaagagaatacattaaagagaaaatactgttttttaatcctaaaatttttcttccactaagataaaccaaatgtccttacatatatgtaaacccatctatttaaacgcaaaggtgggttgatgtcagtttacatagcagaaagcattcactatcctctaagatttgtttctgcaaaactttcattgctttagaattttaaaatttcaccttgtacaatggccagcccctaaagcaggaaacatttataatggattatatggaaacatcctcccagtacttgcccagcccttgaatcatgtggcttttcagtgaaaggaaagattctttttctaggaaaaatgagcctattttattttattttattttattttttgacacaaactgtagattttagcagccctggcccaaaggaatttgattacttttgttttaaacagtacaaaggggacactataattacaaaaacatccttaactgatttgagttgtttttatttctttggatatattttcagagtggtaaattgtgtgtgagaattacaaatgattattcttttagtggtttcttagcctctcttacagcccacggggatagtactgtacatcaataccttcatatgaaatttttatatgcaatgaaaataaaagcatgggttgattctgcctatttatgactcaatcttttacaaataaaagattattcattttaaattatagttcaatcagcatgtctcttaggatactgaacgtggttgaaatgaaaggatagtgacatcataagttagtactgatattcataaccaaataaagccaacttgagtaattttgctacattaaaaattaccaaaattacttagatggcctataagattaagcatggtgttttctaagcaagctttgaaaggggccttccatacttacttaattgaatattctgggatattgaaaattattcagatacttgacaattatttttggttacctactccgcaaactacaaagttttaaggactcaacaataagttaatgagacacagtgtttgctttcatggagcttacagtctggaggggacaaaggcttaaacaatactcatataattatatatgtgatcagtacaatgaaggagctcagtggggtaaataagcaggaacctgaacttgatctgttccggagggccacagaaggcttccttgaggccttgagaaagtgatttgcatctgagttctgaaggattgtaagaggtaactagggaaaaagttgacaggaagaggaaggggatccagacaagaaacatttgcaaagatcttgaggcataaatgagcttgagacatctggagaaactgaggaaaagtgagagagtaggcagggcctggagccgcagagccattgctaaccatcctgtgtgagatatcccccattctgtagctttattctcataaccctgctcaattttctttataacacttctcacagatttatatacgtgtttgtttttgttatctgtctctcccaccagaccacagctccatgagagcaaggtctttgcttaccaatatatcactagcacttaaaactatgcctggtacacagtaggttcttaatatgtgttgaatatagccatcaaattgatattggatataattcaatctgataagatattttgagatattaaagagtttttaacttgataccataaaaa

SEQ ID NO: 41341 - DNA, 2430 bp, Artificial Sequence
  derived and/or modified sequence
atggaggcagagggctcctctgcgccagcacgtgccggatcaggagaggggtctgactccgctggcggagcaacgctcaaagctcctaaacatctctggagacatgagcagcatcaccagtacccacttcgtcagccacaatttagactcttacatccccaccatcacctgcctccgccaccacccccttcacctcagccccagccacaatgtccacttcagcctccgccacctccacccctgcctccgccaccgccaccacccggagccgcacgtgggaggtatgcatcttctggcgctaccggacgtgtccggcaccgcggatattccgatacagagcgttacctttactgccgggctatggatcgaacaagctatgccgtggaaacaggccacaggccaggccttaagaaaagccggatgtcctggccctcctctttccagggcctaaggagattcgacgtggacaatgggacgtctgctggcaggtctcctctggacccgatgactagcccaggctccggcctaatcctgcaggccaattttgtgcactcacagcgtcgcgagtcgttcctttatcgatctgactctgactatgacttgagccctaaatccatgagccggaactcgagtattgcatcagacatacatggtgacgatttgatagtgactccatttgcccaagtgctggccagcctgaggaccgtccgcaataactttgctgccctgaccaacctgcaggatcgtgcccctagtaagaggtcaccgatgtgtaaccagcccagcatcaacaaagcaactatcaccgaagaagcctatcagaaacttgcttccgaaacactggaggaactggactggtgcttggatcagctcgaaaccctgcagactaggcatagcgtgtcagagatggcctcaaacaaattcaagcgaatgttaaaccgggagctgactcacttaagcgagatgtctcgttcaggcaaccaggtctcagagttcatctcgaacaccttccttgataaacagcatgaggtcgagatcccctctcccacccagaaggaaaaggaaaaaaagaagagacccatgagtcagatcagtggcgttaagaagctaatgcactcaagtagtcttaccaattcctccatcccgaggttcggcgtgaaaacagagcaggaagacgtcctcgcaaaggaacttgaggacgtgaacaaatggggcttgcacgtgtttagaatagctgagctttccggcaataggccgctcacagtgattatgcacacaatttttcaggaaagagatctgctaaaaacatttaaaattcccgtcgacaccttgatcacttatctcatgacccttgaagaccattatcacgccgacgtggcttatcataacaatattcacgccgctgatgtggtgcagagcactcatgtgcttttatccacacctgccctcgaagccgtcttcacagatctcgaaatcttagctgccatcttcgcatcggccatccatgacgtggatcaccccggagtgtctaaccagtttttaattaatactaattcagagctggccctcatgtataatgattcgagtgtgcttgagaaccaccatttggctgtggggtttaagctccttcaggaagagaactgcgatatatttcagaacctcaccaagaagcagcgccagagtctgcgaaaaatggtcattgacatcgtccttgctacagatatgtctaaacatatgaacttactggccgacctaaaaacaatggtagaaaccaaaaaggtgacaagttcaggggtgcttttgctggataactatagcgaccgcattcaggtcctgcagaatatggtgcattgcgccgatctgtctaaccctactaaacctctacagctgtaccggcagtggacagacagaataatggaggagttcttcaggcagggtgatagagaacgagaaagaggaatggaaatcagcccgatgtgtgacaaacacaacgcgtctgtagagaagtcacaagtgggcttcattgattacattgtgcatcccctttgggagacgtgggcagacctcgtgcacccagatgctcaagatattctggatacgcttgaagacaatcgggaatggtatcagagcacgatcccccagagcccatcccctgcacccgatgatccggaagaagggaggcaggggcagaccgaaaagttccagttcgaactgacgttagaggaggatggagagtccgataccgagaaagacagcgggtctcaagtggaggaggacacctcttgtagcgatagcaaaactctttgcacccaagacagcgagagcaccgagattcctctggacgaacaggtggaagaggaggcagtgggcgaggaggaagagtcccagcctgaggcctgcgtgatcgatgatagatcacccgatacctag

SEQ ID NO: 41342 - DNA, 2430 bp, Artificial Sequence
  derived and/or modified sequence
atggaggccgagggcagcagcgcccccgccagagccggcagcggcgagggcagcgacagcgccggcggcgccaccctgaaggcccccaagcacctgtggagacacgagcagcaccaccagtaccccctgagacagccccagttcagactgctgcacccccaccaccacctgccccccccccccccccccagcccccagccccagccccagtgccccctgcagccccccccccccccccccctgcccccccccccccccccccccggcgccgccagaggcagatacgccagcagcggcgccaccggcagagtgagacacagaggctacagcgacaccgagagatacctgtactgcagagccatggacagaaccagctacgccgtggagaccggccacagacccggcctgaagaagagcagaatgagctggcccagcagcttccagggcctgagaagattcgacgtggacaacggcaccagcgccggcagaagccccctggaccccatgaccagccccggcagcggcctgatcctgcaggccaacttcgtgcacagccagagaagagagagcttcctgtacagaagcgacagcgactacgacctgagccccaagagcatgagcagaaacagcagcatcgccagcgacatccacggcgacgacctgatcgtgacccccttcgcccaggtgctggccagcctgagaaccgtgagaaacaacttcgccgccctgaccaacctgcaggacagagcccccagcaagagaagccccatgtgcaaccagcccagcatcaacaaggccaccatcaccgaggaggcctaccagaagctggccagcgagaccctggaggagctggactggtgcctggaccagctggagaccctgcagaccagacacagcgtgagcgagatggccagcaacaagttcaagagaatgctgaacagagagctgacccacctgagcgagatgagcagaagcggcaaccaggtgagcgagttcatcagcaacaccttcctggacaagcagcacgaggtggagatccccagccccacccagaaggagaaggagaagaagaagagacccatgagccagatcagcggcgtgaagaagctgatgcacagcagcagcctgaccaacagcagcatccccagattcggcgtgaagaccgagcaggaggacgtgctggccaaggagctggaggacgtgaacaagtggggcctgcacgtgttcagaatcgccgagctgagcggcaacagacccctgaccgtgatcatgcacaccatcttccaggagagagacctgctgaagaccttcaagatccccgtggacaccctgatcacctacctgatgaccctggaggaccactaccacgccgacgtggcctaccacaacaacatccacgccgccgacgtggtgcagagcacccacgtgctgctgagcacccccgccctggaggccgtgttcaccgacctggagatcctggccgccatcttcgccagcgccatccacgacgtggaccaccccggcgtgagcaaccagttcctgatcaacaccaacagcgagctggccctgatgtacaacgacagcagcgtgctggagaaccaccacctggccgtgggcttcaagctgctgcaggaggagaactgcgacatcttccagaacctgaccaagaagcagagacagagcctgagaaagatggtgatcgacatcgtgctggccaccgacatgagcaagcacatgaacctgctggccgacctgaagaccatggtggagaccaagaaggtgaccagcagcggcgtgctgctgctggacaactacagcgacagaatccaggtgctgcagaacatggtgcactgcgccgacctgagcaaccccaccaagcccctgcagctgtacagacagtggaccgacagaatcatggaggagttcttcagacagggcgacagagagagagagagaggcatggagatcagccccatgtgcgacaagcacaacgccagcgtggagaagagccaggtgggcttcatcgactacatcgtgcaccccctgtgggagacctgggccgacctggtgcaccccgacgcccaggacatcctggacaccctggaggacaacagagagtggtaccagagcaccatcccccagagccccagccccgcccccgacgaccccgaggagggcagacagggccagaccgagaagttccagttcgagctgaccctggaggaggacggcgagagcgacaccgagaaggacagcggcagccaggtggaggaggacaccagctgcagcgacagcaagaccctgtgcacccaggacagcgagagcaccgagatccccctggacgagcaggtggaggaggaggccgtgggcgaggaggaggagagccagcccgaggcctgcgtgatcgacgacagaagccccgacacctag

SEQ ID NO: 41343 - protein, 311 aa, Artificial Sequence
  derived and/or modified sequence
MSQRDTLVHLFAGGCGGTVGAILTCPLEVVKTRLQSSSVTLYISEVQLNTMAGASVNRVVSPGPLHCLKVILEKEGPRSLFRGLGPNLVGVAPSRAIYFAAYSNCKEKLNDVFDPDSTQVHMISAAMAGFTAITATNPIWLIKTRLQLDARNRGERRMGAFECVRKVYQTDGLKGFYRGMSASYAGISETVIHFVIYESIKQKLLEYKTASTMENDEESVKEASDFVGMMLAAATSKTCATTIAYPHEVVRTRLREEGTKYRSFFQTLSLLVQEEGYGSLYRGLTTHLVRQIPNTAIMMATYELVVYLLNG

SEQ ID NO: 41344 - DNA, 936 bp, Artificial Sequence
  derived and/or modified sequence
atgagccagagagacaccctggtgcacctgttcgccggcggctgcggcggcaccgtgggcgccatcctgacctgccccctggaggtggtgaagaccagactgcagagcagcagcgtgaccctgtacatcagcgaggtgcagctgaacaccatggccggcgccagcgtgaacagagtggtgagccccggccccctgcactgcctgaaggtgatcctggagaaggagggccccagaagcctgttcagaggcctgggccccaacctggtgggcgtggcccccagcagagccatctacttcgccgcctacagcaactgcaaggagaagctgaacgacgtgttcgaccccgacagcacccaggtgcacatgatcagcgccgccatggccggcttcaccgccatcaccgccaccaaccccatctggctgatcaagaccagactgcagctggacgccagaaacagaggcgagagaagaatgggcgccttcgagtgcgtgagaaaggtgtaccagaccgacggcctgaagggcttctacagaggcatgagcgccagctacgccggcatcagcgagaccgtgatccacttcgtgatctacgagagcatcaagcagaagctgctggagtacaagaccgccagcaccatggagaacgacgaggagagcgtgaaggaggccagcgacttcgtgggcatgatgctggccgccgccaccagcaagacctgcgccaccaccatcgcctacccccacgaggtggtgagaaccagactgagagaggagggcaccaagtacagaagcttcttccagaccctgagcctgctggtgcaggaggagggctacggcagcctgtacagaggcctgaccacccacctggtgagacagatccccaacaccgccatcatgatggccacctacgagctggtggtgtacctgctgaacggctag

SEQ ID NO: 41345 - DNA, 936 bp, Artificial Sequence
  derived and/or modified sequence
atgtctcagagagacacacttgtgcaccttttcgctggcgggtgtggtgggactgtcggagcgatccttacgtgcccactggaggtcgtcaagaccaggttgcaaagttctagcgtgaccctttacatcagcgaggtccagcttaacacaatggctggcgccagcgtgaacagagtcgttagtcccggccctcttcactgtcttaaggtgatcctcgagaaagaaggaccacggtccctgttccgtggcctggggcccaacctcgtcggagtggcaccttctagagccatctattttgccgcgtatagcaattgcaaggagaagctcaacgacgtatttgatccagacagcactcaggtgcatatgatctctgctgcaatggcaggcttcactgctattactgcaaccaatcctatctggctgataaaaacacgtcttcagctagatgccagaaatcggggtgaaaggcggatgggtgcctttgagtgtgtccggaaagtttaccagaccgacgggctgaagggattctatcgaggaatgtctgccagttacgccggaatcagcgagacagtcattcacttcgtgatatacgaaagcattaaacagaaattgcttgagtataagactgccagcactatggaaaacgatgaggagagcgtaaaggaggcatctgattttgtgggaatgatgctggccgctgcgacctctaagacttgtgctaccactatcgcctatccccacgaagtggtgagaacccgccttcgcgaggagggcacaaagtaccgtagtttctttcagacgttaagtctgctggttcaggaggaaggatacggtagcctataccgcgggctcactacccacctagttcgccagattccaaacacagctatcatgatggccacctatgaattagtggtttatctgcttaacggctag

SEQ ID NO: 41346 - DNA, 936 bp, Artificial Sequence
  derived and/or modified sequence
atgagccagagggacaccctggtgcacctgtttgctgggggctgcggcggcaccgtgggcgccatcctgacctgccccctggaggtggtgaagacccggctgcagagcagctctgtgaccctgtacatcagcgaggtgcagctgaacaccatggccggggcctctgtgaacagagtggtgtccccaggccccctgcactgcctgaaggtgatcctggagaaggagggccccaggagcctcttccggggcctgggccccaacctggtgggcgtggcccccagccgggccatctactttgctgcctacagcaactgcaaggagaagctgaatgatgtgtttgatcctgacagcacccaggtgcacatgatctctgctgccatggccggcttcaccgccatcacagccaccaaccccatctggctgatcaagacccggctgcagctggatgccaggaacagaggagagaggaggatgggcgcctttgaatgtgtgaggaaggtgtaccagacagatggcctgaagggcttctaccggggcatgtctgccagctatgccggcatcagcgagaccgtcatccacttcgtcatctatgagagcatcaagcagaagctgctggagtacaagacagccagcaccatggagaatgatgaggagagcgtgaaggaggccagtgactttgtgggcatgatgctggccgccgccaccagcaagacctgtgccaccaccatcgcctacccccatgaggtggtgaggacccggctgcgggaggagggcaccaagtaccgctccttcttccagaccctgagcctgctggtgcaggaggagggctacggcagcctgtaccggggcctgaccacccacctggtgcggcagatccccaacacagccatcatgatggccacctatgagctggtggtgtacctgctgaatggatag

SEQ ID NO: 41347 - DNA, 936 bp, Artificial Sequence
  derived and/or modified sequence
atgagccagcgggacaccctggtgcacctgttcgccggcggctgcggtggaaccgtgggcgctatactgacgtgtccattggaagtggtcaagacccggctccagtcgagttcagttaccctttacatcagcgaggtgcagctgaatactatggccggggccagtgtgaatcgggtggttagccctggtccgctccactgcttaaaagtaattttagagaaggaggggcctcgcagccttttcaggggtctgggtcccaatcttgtgggcgtcgcaccaagccgagcaatctacttcgccgcctattccaattgcaaagaaaaactgaatgacgttttcgatccagacagtacacaggtgcacatgattagcgccgctatggccggttttactgcgatcaccgccaccaaccctatttggctgatcaagacacgtcttcagctggacgccaggaaccgcggggagaggcgcatgggagcttttgaatgtgtgcgaaaagtataccaaaccgacggtctcaaaggtttctataggggaatgagcgcatcatacgctggcataagcgaaactgtgatccactttgttatatacgagtcaatcaagcagaaacttctggaatacaaaacagcttccacaatggagaatgacgaagaatccgtcaaagaggccagcgattttgttggaatgatgcttgccgccgcaacttctaagacatgcgcaaccaccattgcctaccctcatgaggtggttcgcacacgactcagagaagaaggaaccaagtacaggagcttttttcaaaccctctctctcttggtccaggaggaggggtatgggtctctgtacagggggttgacgactcatctggtgagacagatcccgaacacagctataatgatggccacctatgagctagttgtatacctcctgaatgggtag

SEQ ID NO: 41348 - DNA, 936 bp, Artificial Sequence
  derived and/or modified sequence
atgtctcagcgcgacaccctagtgcacctgtttgccggagggtgcggcggaactgtgggcgcaatattgacctgtcccttggaagtagtcaaaactcgcctacagtccagcagcgtgacgttgtacatctctgaggtacagttgaatacaatggctggcgcatccgtgaacagggttgtatctccaggaccactgcactgcctcaaagtcatcctggaaaaagaagggccacgctccttattcaggggactgggccctaatctggtgggggtcgcgcctagtcgggctatctacttcgcagcctattcgaattgcaaggaaaagctaaacgacgtgtttgacccagattccacacaggttcacatgatcagcgccgcaatggcgggattcaccgccatcacggcgaccaatccaatttggcttatcaaaacccggctccagcttgatgctagaaatagaggcgagaggaggatgggtgccttcgagtgcgtacgtaaggtgtatcaaaccgacggcttgaaagggttctaccggggtatgtctgcaagctacgcaggcattagcgagacagttattcattttgtgatctacgagtccatcaagcagaagttgctggaatataagactgcgtcaacaatggaaaatgatgaagagtctgtcaaggaggcatcggattttgtaggcatgatgttagctgctgccacatcaaagacatgtgcaaccacaatcgcttatccacatgaagttgtcagaacgcggctgcgcgaagagggtaccaaatatagatcattttttcagacgctgtctctgttggttcaggaagaaggatacggcagcttatatagaggccttacaactcaccttgtaaggcagatccctaacaccgccatcatgatggccacatacgagctggtggtgtatctcctgaatgggtag

SEQ ID NO: 41349 - DNA, 1301 bp, Artificial Sequence
  derived and/or modified sequence
gccgcggggagggctgtgccggttgctttctgcagccgcatctcggccagctctcctcgccgtccccggggcgctgtgcgtctccagtccgggaccgaagccgcctgccgtagcgggcggccagatccgcgtcccgcctcagcggccggaggacatgcgggagagagaatgagccagagggacacgctggtgcatctgtttgccggaggatgtggtggtacagtgggagctattctgacatgtccactggaagttgtaaaaacacgactgcagtcatcttctgtgacgctttatatttctgaagttcagctgaacaccatggctggagccagtgtcaaccgagtagtgtctcccggacctcttcattgcctaaaggtgatcttggaaaaagaagggcctcgttccttgtttagaggactaggccccaatttagtgggggtagccccttccagagcaatatactttgctgcttattcaaactgcaaggaaaagttgaatgatgtatttgatcctgattctacccaagtacatatgatttcagctgcaatggcaggttttactgcaatcacagcaaccaaccccatttggcttataaagactcggttacagcttgatgcaaggaaccgcggggaaaggcgaatgggtgcttttgaatgtgttcgtaaagtgtatcagacagatggactaaaaggattttataggggcatgtctgcttcatatgctggtatatcagagactgttatccattttgttatttatgaaagtataaaacaaaaactactggaatataagactgcttctacaatggaaaatgatgaagagtctgtgaaagaagcatcagattttgtgggaatgatgctagctgctgccacctcaaaaacttgtgccacaactatagcatatccacatgaagttgtaagaacaagactacgtgaagagggaacaaaatacagatctttttttcagactctatctttgcttgttcaagaagaaggttatgggtctctttatcgtggtctgacaactcatctagtgagacagattccaaacacagccattatgatggccacctatgaattggtggtttacctactcaatggatagcagcacgaggactgctgtactgcaaaaaaagaagaccaaaagattacagtggaccatgggatacagaagccagcatggcagacagaagaaaaatagtttgggaacatgtaactattctaagtggaagttttgttgtaggaattatagtaatcacaccacattacttggcctttcggtaatgtgaaaaaaaaaaaaaa

SEQ ID NO: 41350 - protein, 577 aa, Artificial Sequence
  derived and/or modified sequence
MHWLRKVQGLCTLWGTQMSSRTLYINSRQLVSLQWGHQEVPAKFNFASDVLDHWADMEKAGKRLPSPALWWVNGKGKELMWNFRELSENSQQAANILSGACGLQRGDRVAVMLPRVPEWWLVILGCIRAGLIFMPGTIQMKSTDILYRLQMSKAKAIVAGDEVIQEVDTVASECPSLRIKLLVSEKSCDGWLNFKKLLNEASTTHHCVETGSQEASAIYFTSGTSGLPKMAEHSYSSLGLKAKMDAGWTGLQASDIMWTISDTGWILNILGSLLESWTLGACTFVHLLPKFDPLVILKTLSSYPIKSMMGAPIVYRMLLQQDLSSYKFPHLQNCLAGGESLLPETLENWRAQTGLDIREFYGQTETGLTCMVSKTMKIKPGYMGTAASCYDVQVIDDKGNVLPPGTEGDIGIRVKPIRPIGIFSGYVENPDKTAANIRGDFWLLGDRGIKDEDGYFQFMGRADDIINSSGYRIGPSEVENALMKHPAVVETAVISSPDPVRGEVVKAFVILASQFLSHDPEQLTKELQQHVKSVTAPYKYPRKIEFVLNLPKTVTGKIQRTKLRDKEWKMSGKARAQ

SEQ ID NO: 41351 - protein, 208 aa, Artificial Sequence
  derived and/or modified sequence
MHWLRKVQGLCTLWGTQMSSRTLYINSRQLVSLQWGHQEVPAKFNFASDVLDHWADMEKAGKRLPSPALWWVNGKGKELMWNFRELSENSQQAANILSGACGLQRGDRVAVMLPRVPEWWLVILGCIRAGLIFMPGTIQMKSTDILYRLQMSKAKAIVAGDEVIQEVDTVASECPSLRIKLLVSEKSCDGWLNFKKLLKYKVRHREVK

SEQ ID NO: 41352 - DNA, 1734 bp, Artificial Sequence
  derived and/or modified sequence
atgcattggctgcgcaaggtgcaggggctctgtacactgtggggcacgcagatgagttcccgaactctatacatcaatagtcgccaactggtaagtctccaatggggccaccaagaagtgcctgcaaagtttaacttcgcgagcgacgtgctggatcactgggcagacatggaaaaggcaggcaaacggctaccctcgccagcgctgtggtgggtcaatggaaaaggcaaggagctaatgtggaacttcagagaactatcagagaatagtcaacaggccgctaacatcctgtctggagcgtgcggcctgcagagaggagaccgtgtagctgtaatgctgccgcgggtgccagagtggtggttggtgattcttggatgcattcgggcggggttgatatttatgccgggcactattcaaatgaaatctacggacatcctatatcggttgcagatgagtaaagctaaggcgattgtggccggtgatgaggttatccaggaagtggacactgtggcctcagaatgcccctccttaaggataaagctgctcgtgtctgaaaagtcctgtgacggatggctgaactttaaaaagctgcttaatgaagcatctaccacacatcattgtgtagagaccggaagtcaggaagcctctgcgatttatttcacatctggcacaagcggcctcccaaaaatggctgagcactcgtatagctctttgggcctgaaggcaaagatggacgcgggatggactggtctccaggcttctgatatcatgtggactatcagcgatactggctggattttgaacattctgggaagcctgctcgagtcctggactttgggcgcctgtactttcgtccacttactgcctaagtttgaccccctggtgattttgaaaaccctatcttcttatcccattaagagtatgatgggagccccgatcgtctacagaatgctgctacagcaggacctgtcgtcatacaagtttcctcacctccagaactgccttgccgggggcgagagcctgctgcccgaaacactcgagaactggcgggctcaaacagggctcgacatcagggagttctacggccagacggaaacagggctgacctgtatggttagcaagacaatgaagattaagccagggtatatggggaccgccgcaagttgttacgacgtccaggtcatcgatgacaaagggaacgtcctgccaccgggaacagagggagacatcgggataagggtgaagcccatccggcccatcggtatatttagtggatacgtcgagaaccccgacaaaaccgccgcgaacatcagaggtgatttctggctgctgggggatcgagggatcaaggatgaggacgggtactttcagttcatgggccgggccgatgacatcataaattcgtctgggtacagaatcgggcctagtgaagtggaaaatgcactgatgaagcacccagctgttgtcgagacagctgtcatttcctcccccgacccggtgaggggtgaagtcgtgaaagcctttgttatccttgcttcccagtttctgtcccatgatcccgagcaactgaccaaggaactgcagcaacatgtgaagtccgtcacagctccatacaaataccccaggaaaatcgaatttgtgttaaacctccccaagaccgtgacagggaagatccagaggactaagctgcgtgataaggagtggaaaatgtccgggaaggcaagagcccagtag

SEQ ID NO: 41353 - DNA, 1734 bp, Artificial Sequence
  derived and/or modified sequence
atgcactggctgaggaaggtgcagggcctgtgcaccctgtggggcacccagatgagcagcaggaccctgtacatcaacagccggcagctggtgtccctgcagtggggccaccaggaggtgcctgccaagttcaactttgccagtgatgtgctggaccactgggccgacatggagaaggccggcaagaggctgcccagccctgccctgtggtgggtgaatggcaagggcaaggagctgatgtggaacttccgggagctgtctgagaacagccagcaggccgccaacatcctgagcggggcctgtggcctgcagagaggagacagagtggccgtgatgctgccccgggtgcctgagtggtggctggtgatcctgggctgcatccgggccggcctcatcttcatgcctggcaccatccagatgaagagcacagacatcctgtaccgcctgcagatgagcaaggccaaggccatcgtggccggagatgaagtcatccaggaggtggacacagtggcctctgaatgtcccagcctgcgcatcaagctgctggtgtctgagaagagctgtgatggctggctgaacttcaagaagctgctgaatgaggccagcaccacccaccactgtgtggagaccggcagccaggaggccagcgccatctacttcaccagcggcaccagcggcctgcccaagatggccgagcacagctacagcagcctgggcctgaaggccaagatggatgctggctggacaggcctgcaggccagtgacatcatgtggaccatcagtgacaccggctggatcctgaacatcctgggcagcctgctggagagctggaccctgggcgcctgcacctttgtgcacctgctgcccaagtttgaccccctggtgatcctgaagaccctgagcagctaccccatcaagtccatgatgggcgcccccatcgtgtacaggatgctgctgcagcaggacctgagcagctacaagttcccccacctgcagaactgcctggccggcggggagagcctgctgcctgagaccctggagaactggagggcccagacaggcctggacatccgggagttctacggccagacagagaccggcctgacctgcatggtgtccaagaccatgaagatcaagccaggctacatgggcacagctgccagctgctatgatgtgcaggtgattgatgacaagggaaatgtgctgcccccaggcacagaaggagacatcggcatccgggtgaagcccatccggcccatcggcatcttcagcggctacgtggagaacccagacaagacagctgccaacatccggggggacttctggctgctgggggaccggggcatcaaggatgaagatggctacttccagttcatgggccgggcagatgacatcatcaacagcagcggctacagaattggccccagcgaggtggagaatgccctgatgaagcaccctgctgtggtggagacagctgtgatcagcagcccagaccctgtgcggggggaggtggtgaaggccttcgtcatcctggccagccagttcctgagccatgaccctgagcagctgaccaaggagctgcagcagcacgtgaagtctgtgacagccccctacaagtaccccaggaagattgaatttgtgctgaacctgcccaagacagtgacaggcaagatccagaggaccaagctgcgggacaaggagtggaagatgtctgggaaggcccgggcccagtag

SEQ ID NO: 41354 - DNA, 1734 bp, Artificial Sequence
  derived and/or modified sequence
atgcactggctgcggaaggtgcagggcctgtgcaccctgtggggcacacagatgtctagccggactctgtacataaactcccgccagctagtgtctctgcagtggggccatcaggaagtgcccgccaaattcaatttcgcttccgatgtgctagatcactgggccgacatggagaaagcaggaaagaggctgcccagcccggcactttggtgggtgaatggcaaaggtaaggagctcatgtggaacttccgggagctttccgagaacagtcaacaagctgcgaacattctctctggggcttgcggtttacagaggggggaccgcgttgcggtgatgttaccccgagtgcccgagtggtggctagtcattctgggttgtattcgagccggcctgatctttatgccaggtactattcaaatgaagtcgaccgatattctgtaccgtctgcagatgtccaaggcgaaagcaatcgtggctggcgatgaggttatccaggaagtggataccgttgcctccgaatgcccttcactgaggatcaagctattggtctccgagaagtcatgcgacggttggcttaatttcaagaagctgttgaatgaggcctcgaccacacaccattgtgtcgagaccggatcccaagaagcctccgccatctactttaccagcggtacgagtggtttgcctaaaatggcagagcactcatattcttccttgggactaaaggccaaaatggatgcgggctggacaggactgcaggcctccgacataatgtggaccatctctgatacagggtggattttaaatatcctgggctccctgctcgaatcctggaccttaggcgcatgtaccttcgtgcacttgctgccgaaatttgatcctctggtaattttgaaaacactcagtagctaccccatcaagagtatgatgggtgcccctatcgtttaccgaatgttgttgcaacaggatctctcttcgtacaaatttccacatttacaaaactgtttagccggtggggaatccctccttcccgaaactctggaaaattggcgtgcccagacaggactagatatcagagagttctacggccagacagaaaccggccttacctgcatggtcagtaagaccatgaagatcaaaccgggttatatgggaacggccgccagctgttacgacgtccaggtaatagatgataaaggcaatgtgctgccgccgggcaccgaaggagacatcggaatacgggtaaagccaatccgacccattgggatctttagcgggtacgtcgaaaaccccgataagaccgccgccaatatcagaggcgacttctggctcctgggcgatagaggcatcaaagacgaggacggctattttcagtttatgggccgtgcagacgatataattaacagctctggctatcgcattggccctagcgaggtagaaaacgctctcatgaagcaccccgccgtcgtggaaacagctgtcatatccagtcccgaccctgtaaggggtgaggtagtcaaagctttcgtgatacttgctagccagttcctgtcccatgatcctgagcaactcacaaaagagctgcagcagcatgtcaaatctgtcacagcaccatataagtatcccagaaaaattgagtttgtgctgaatcttcccaaaaccgtgaccggcaagatacagcggacaaagctccgcgataaggagtggaagatgtccggcaaagcgagagcccaatag

SEQ ID NO: 41355 - DNA, 1734 bp, Artificial Sequence
  derived and/or modified sequence
atgcattggctgaggaaagtgcagggactttgtaccctgtggggcacacagatgagcagtcgcactctctacattaatagccgtcagctggttagcttgcagtggggacaccaggaggtgccggcaaaattcaatttcgccagcgatgtgttggaccattgggcggatatggaaaaagcgggtaaacgcctcccaagtcctgcgttgtggtgggtcaacgggaagggtaaggaactgatgtggaactttagagagctttctgaaaactctcagcaagcagccaacattttatcaggcgcatgtgggctgcagcgaggcgacagagtggccgtgatgctcccgagagtgcccgagtggtggttggtgatcctgggctgtattcgagccggactgattttcatgccaggtactatacaaatgaagagtaccgatattctgtaccgcctgcagatgtcaaaggctaaagccattgtcgcgggtgacgaggtgatccaggaggtggacacagtcgcgtcagaatgtcctagcctcagaatcaagttactagtgtccgagaagagctgcgacggctggctgaattttaagaaactgctgaacgaagcctccaccacccaccactgtgtggaaacaggctctcaggaggcatctgccatctacttcacatctggcactagcggtctccccaaaatggctgagcactcttactcgtctctcggactcaaagccaagatggacgccggatggaccgggctacaggcgtctgacataatgtggaccatcagcgacacagggtggatcttaaatatacttggttccctcctggagtcatggactctcggggcttgcacattcgtgcatttgctgcccaaatttgaccctctggtcattctcaaaactctttccagttatccaattaagtcgatgatgggcgctcccattgtgtatcgaatgctccttcaacaggatctctcttcatataaatttccgcacctacagaattgcctcgcaggtggtgagtctttgctccccgaaactctggagaattggcgtgctcagactggtctggatatcagggagttttatggccagaccgagaccggcctgacctgtatggtctccaagacgatgaagattaagccaggctacatgggaacagctgcgtcctgctacgatgtgcaggtgatcgacgacaaaggcaatgttctgccacccggaacagagggagatataggcatcagggtcaaacccattagacccataggtatattttccggctatgttgaaaaccctgacaagaccgctgccaacatccgaggagatttttggctcttgggcgatagggggatcaaggacgaagatgggtatttccagtttatgggtcgagccgatgatatcatcaactcgagtgggtacagaattggcccttccgaggttgagaacgccctcatgaaacatcctgccgtggttgaaacagctgtgatcagcagtcccgatccagtccgaggtgaggtggtgaaagccttcgtaattctggcgtcccagtttctgagccatgatcccgagcagttgaccaaagaactgcaacagcacgttaaatctgtaaccgcaccttataagtatccacgtaaaatcgagtttgttctcaacctccccaagactgtgacaggaaaaattcaacgcaccaagctgagggataaagaatggaagatgagtggaaaggctcgggcacaatag

SEQ ID NO: 41356 - DNA, 1734 bp, Artificial Sequence
  derived and/or modified sequence
atgcactggctgagaaaggtgcagggcctgtgcaccctgtggggcacccagatgagcagcagaaccctgtacatcaacagcagacagctggtgagcctgcagtggggccaccaggaggtgcccgccaagttcaacttcgccagcgacgtgctggaccactgggccgacatggagaaggccggcaagagactgcccagccccgccctgtggtgggtgaacggcaagggcaaggagctgatgtggaacttcagagagctgagcgagaacagccagcaggccgccaacatcctgagcggcgcctgcggcctgcagagaggcgacagagtggccgtgatgctgcccagagtgcccgagtggtggctggtgatcctgggctgcatcagagccggcctgatcttcatgcccggcaccatccagatgaagagcaccgacatcctgtacagactgcagatgagcaaggccaaggccatcgtggccggcgacgaggtgatccaggaggtggacaccgtggccagcgagtgccccagcctgagaatcaagctgctggtgagcgagaagagctgcgacggctggctgaacttcaagaagctgctgaacgaggccagcaccacccaccactgcgtggagaccggcagccaggaggccagcgccatctacttcaccagcggcaccagcggcctgcccaagatggccgagcacagctacagcagcctgggcctgaaggccaagatggacgccggctggaccggcctgcaggccagcgacatcatgtggaccatcagcgacaccggctggatcctgaacatcctgggcagcctgctggagagctggaccctgggcgcctgcaccttcgtgcacctgctgcccaagttcgaccccctggtgatcctgaagaccctgagcagctaccccatcaagagcatgatgggcgcccccatcgtgtacagaatgctgctgcagcaggacctgagcagctacaagttcccccacctgcagaactgcctggccggcggcgagagcctgctgcccgagaccctggagaactggagagcccagaccggcctggacatcagagagttctacggccagaccgagaccggcctgacctgcatggtgagcaagaccatgaagatcaagcccggctacatgggcaccgccgccagctgctacgacgtgcaggtgatcgacgacaagggcaacgtgctgccccccggcaccgagggcgacatcggcatcagagtgaagcccatcagacccatcggcatcttcagcggctacgtggagaaccccgacaagaccgccgccaacatcagaggcgacttctggctgctgggcgacagaggcatcaaggacgaggacggctacttccagttcatgggcagagccgacgacatcatcaacagcagcggctacagaatcggccccagcgaggtggagaacgccctgatgaagcaccccgccgtggtggagaccgccgtgatcagcagccccgaccccgtgagaggcgaggtggtgaaggccttcgtgatcctggccagccagttcctgagccacgaccccgagcagctgaccaaggagctgcagcagcacgtgaagagcgtgaccgccccctacaagtaccccagaaagatcgagttcgtgctgaacctgcccaagaccgtgaccggcaagatccagagaaccaagctgagagacaaggagtggaagatgagcggcaaggccagagcccagtag

SEQ ID NO: 41357 - DNA, 2884 bp, Artificial Sequence
  derived and/or modified sequence
ctctttccgacagtgcagggattctgaagctgtctgcttgagttactgtgctctcttccaaggctgtaggagttctggagctgctggctggagaggagggtggacgaagctctctccagaaagacatcctgagaggacttggcaggcctgaacatgcattggctgcgaaaagttcagggactttgcaccctgtggggtactcagatgtccagccgcactctctacattaatagtaggcaactggtgtccctgcagtggggccaccaggaagtgccggccaagtttaactttgctagtgatgtgttggatcactgggctgacatggagaaggctggcaagcgactcccaagcccagccctgtggtgggtgaatgggaaggggaaggaattaatgtggaatttcagagaactgagtgaaaacagccagcaggcagccaacatcctctcgggagcctgtggcctgcagcgtggggatcgtgtggcagtgatgctgccccgagtgcctgagtggtggctggtgatcctgggctgcattcgagcaggtctcatctttatgcctggaaccatccagatgaaatccactgacatactgtataggttgcagatgtctaaggccaaggctattgttgctggggatgaagtcatccaagaagtggacacagtggcatctgaatgtccttctctgagaattaagctactggtgtctgagaaaagctgcgatgggtggctgaacttcaagaaactactaaatgaggcatccaccactcatcactgtgtggagactggaagccaggaagcatctgccatctacttcactagtgggaccagtggtcttcccaagatggcagaacattcctactcgagcctgggcctcaaggccaagatggatgctggttggacaggcctgcaagcctctgatataatgtggaccatatcagacacaggttggatactgaacatcttgggctcacttttggaatcttggacattaggagcatgcacatttgttcatctcttgccaaagtttgacccactggttattctaaagacactctccagttatccaatcaagagtatgatgggtgcccctattgtttaccggatgttgctacagcaggatctttccagttacaagttcccccatctacagaactgcctcgctggaggggagtcccttcttccagaaactctggagaactggagggcccagacaggactggacatccgagaattctatggccagacagaaacgggattaacttgcatggtttccaagacaatgaaaatcaaaccaggatacatgggaacggctgcttcctgttatgatgtacaggttatagatgataagggcaacgtcctgccccccggcacagaaggagacattggcatcagggtcaaacccatcaggcctataggcatcttctctggctatgtggaaaatcccgacaagacagcagccaacattcgaggagacttttggctccttggagaccggggaatcaaagatgaagatgggtatttccagtttatgggacgggcagatgatatcattaactccagcgggtaccggattggaccctcggaggtagagaatgcactgatgaagcaccctgctgtggttgagacggctgtgatcagcagcccagaccccgtccgaggagaggtggtgaaggcatttgtgatcctggcctcgcagttcctatcccatgacccagaacagctcaccaaggagctgcagcagcatgtgaagtcagtgacagccccatacaagtacccaagaaagatagagtttgtcttgaacctgcccaagactgtcacagggaaaattcaacgaaccaaacttcgagacaaggagtggaagatgtccggaaaagcccgtgcgcagtgaggcgtctaggagacattcatttggattcccctcttctttctctttcttttccctttgggcccttggccttactatgatgatatgagattctttatgaaagaacatgaatgtaagttttgtcttgccctggttattagcacaaaacattactatgttagatattgaaataagaaagggaaggaatgagagagagtgaaaaggagagggtaacagaaaaagaggaaagaaaagtaagtcagggaaatgttaaaaactgcaagagaaagcaattgaaaaagaaataaagtagggagggaaggcgagaggaagcaagggaaggaggaagaaaggaaagaggagatgaaagggggagaaaagatagaagaaaaataattgaagggagaatcagaaaaataaagagaagaaaggaaagaaataaagagagaaagagaaagaagaaagagcaaaagaacacaagaaagaaagagagggagaaagagagggagaaagggagagaaaaaaattgtaaaaataaaaatagtaaaagaaactgataaagaaaagtcatggaagacaggaagaaaggaagagagggaagtaaagaggaaaacctataaatattcccacagatagacaaagtcaagcataaaactggagcttgagaaggaaatgaaaggaaaagaagtggtactttcttttaccctaggagaagacctccatacaggaagacttgtgtgtggggctgggacattagaatcatccgcaagtcactccaaaccttgaaactgtcagggtcagaggggaaccaccatttattaagcatttgccatgtgccaggcactgacccagacacattataaataccacattgtttcacctgtgtgtggcatctacagaccttagatcatagctgtgagaacaaagtaagcactgccaaagttatcagctacccatacctcatgtttttggtgttatctactcttcctagaatcaaatattaaaataattttaaaaccaa

SEQ ID NO: 41358 - protein, 1116 aa, Artificial Sequence
  derived and/or modified sequence
MILDEFYNVKFCIDASQPDVGSWLKYIRFAGCYDQHNLVACQINDQIFYRVVADIAPGEELLLFMKSEDYPHETMAPDIHEERQYRCEDCDQLFESKAELADHQKFPCSTPHSAFSMVEEDFQQKLESENDLQEIHTIQECKECDQVFPDLQSLEKHMLSHTEEREYKCDQCPKAFNWKSNLIRHQMSHDSGKHYECENCAKQVFTDPSNLQRHIRSQHVGARAHACPECGKTFATSSGLKQHKHIHSSVKPFICEVCHKSYTQFSNLCRHKRMHADCRTQIKCKDCGQMFSTTSSLNKHRRFCEGKNHFAAGGFFGQGISLPGTPAMDKTSMVNMSHANPGLADYFGANRHPAGLTFPTAPGFSFSFPGLFPSGLYHRPPLIPASSPVKGLSSTEQTNKSQSPLMTHPQILPATQDILKALSKHPSVGDNKPVELQPERSSEERPFEKISDQSESSDLDDVSTPSGSDLETTSGSDLESDIESDKEKFKENGKMFKDKVSPLQNLASINNKKEYSNHSIFSPSLEEQTAVSGAVNDSIKAIASIAEKYFGSTGLVGLQDKKVGALPYPSMFPLPFFPAFSQSMYPFPDRDLRSLPLKMEPQSPGEVKKLQKGSSESPFDLTTKRKDEKPLTPVPSKPPVTPATSQDQPLDLSMGSRSRASGTKLTEPRKNHVFGGKKGSNVESRPASDGSLQHARPTPFFMDPIYRVEKRKLTDPLEALKEKYLRPSPGFLFHPQFQLPDQRTWMSAIENMAEKLESFSALKPEASELLQSVPSMFNFRAPPNALPENLLRKGKERYTCRYCGKIFPRSANLTRHLRTHTGEQPYRCKYCDRSFSISSNLQRHVRNIHNKEKPFKCHLCDRCFGQQTNLDRHLKKHENGNMSGTATSSPHSELESTGAILDDKEDAYFTEIRNFIGNSNHGSQSPRNVEERMNGSHFKDEKALVTSQNSDLLDDEEVEDEVLLDEEDEDNDITGKTGKEPVTSNLHEGNPEDDYEETSALEMSCKTSPVRYKEEEYKSGLSALDHIRHFTDSLKMRKMEDNQYSEAELSSFSTSHVPEELKQPLHRKSKSQAYAMMLSLSDKESLHSTSHSSSNVWHSMARAAAESSAIQSISHV

SEQ ID NO: 41359 - DNA, 4900 bp, Artificial Sequence
  derived and/or modified sequence
ccttgccaagtaacagctttgctgtccaacatcgtgtgctgcttcgcgagaaagtcacattcggaccctttggctagattgcttattcatagggcttcttgactaaagcccttggagcactgggtttttcttgaagtatatgatcttagacgaattttacaatgtgaagttctgcatagatgccagtcaaccagatgttggaagctggctcaagtacattagattcgctggctgttatgatcagcacaaccttgttgcatgccagataaatgatcagatattctatagagtagttgcagacattgcgccgggagaggagcttctgctgttcatgaagagcgaagactatccccatgaaactatggcgccggatatccacgaagaacggcaatatcgctgcgaagactgtgaccagctctttgaatctaaggctgaactagcagatcaccaaaagtttccatgcagtactcctcactcagcattttcaatggttgaagaggactttcagcaaaaactcgaaagcgagaatgatctccaagagatacacacgatccaggagtgtaaggaatgtgaccaagtttttcctgatttgcaaagcctggagaaacacatgctgtcacatactgaagagagggaatacaagtgtgatcagtgtcccaaggcatttaactggaagtccaatttaattcgccaccagatgtcacatgacagtggaaagcactatgaatgtgaaaactgtgccaagcaggttttcacggaccctagcaaccttcagcggcacattcgctctcagcatgtcggtgcccgggcccatgcatgcccggagtgtggcaaaacgtttgccacttcgtcgggcctcaaacaacacaagcacatccacagcagtgtgaagccctttatctgtgaggtctgccataaatcctatactcagttttcaaacctttgccgtcataagcgcatgcatgctgattgcagaacccaaatcaagtgcaaagactgtggacaaatgttcagcactacgtcttccttaaataaacacaggaggttttgtgagggcaagaaccattttgcggcaggtggattttttggccaaggcatttcacttcctggaaccccagctatggataaaacgtccatggttaatatgagtcatgccaacccgggccttgctgactattttggcgccaataggcatcctgctggtcttacctttccaacagctcctggattttcttttagcttccctggtctgtttccttccggcttgtaccacaggcctcctttgatacctgctagttctcctgttaaaggactatcaagtactgaacagacaaacaaaagtcaaagtcccctcatgacacatcctcagatactgccagctacacaggatattttgaaggcactatctaaacacccatctgtaggggacaataagccagtggagctccagcccgagaggtcctctgaagagaggccctttgagaaaatcagtgaccagtcagagagtagtgaccttgatgatgtcagtacaccaagtggcagtgacctggaaacaacctcgggctctgatctggaaagtgacattgaaagtgataaagagaaatttaaagaaaatggtaaaatgttcaaagacaaagtaagccctcttcagaatctggcttcaataaataataagaaagaatacagcaatcattccattttctcaccatctttagaggagcagactgcggtgtcaggagctgtgaatgattctataaaggctattgcttctattgctgaaaaatactttggttcaacaggactggtggggctgcaagacaaaaaagttggagctttaccttacccttccatgtttcccctcccattttttccagcattctctcaatcaatgtacccatttcctgatagagacttgagatcgttacctttgaaaatggaaccccaatcaccaggtgaagtaaagaaactgcagaagggcagctctgagtccccctttgatctcaccactaagcgaaaggatgagaagcccttgactccagtcccctccaagcctccagtgacacctgccacaagccaagaccagcccctggatctaagtatgggcagtaggagtagagccagtgggacaaagctgactgagcctcgaaaaaaccacgtgtttgggggaaaaaaaggaagcaacgtcgaatcaagacctgcttcagatggttccttgcagcatgcaagacccactcctttctttatggaccctatttacagagtagagaaaagaaaactaactgacccacttgaagctttaaaagagaaatacttgaggccttctccaggattcttgtttcacccacaattccaactgcctgatcagagaacttggatgtcagctattgaaaacatggcagaaaagctagagagcttcagtgccctgaaacctgaggccagtgagctcttacagtcagtgccctctatgttcaacttcagggcgcctcccaatgccctgccagagaaccttctgcggaagggaaaggagcgctatacctgcagatactgtggcaagatttttccaaggtctgcaaacctaacacggcacttgagaacccacacaggagagcagccttacagatgcaaatactgtgacagatcatttagcatatcttctaacttgcaaaggcatgttcgcaacatccacaataaagagaagccatttaagtgtcacttatgtgataggtgttttggtcaacaaaccaatttagacagacacctaaagaaacatgagaatgggaacatgtccggtacagcaacatcgtcgcctcattctgaactggaaagtacaggtgcgattctggatgacaaagaagatgcttacttcacagaaattcgaaatttcattgggaacagcaaccatggcagccaatctcccaggaatgtggaggagagaatgaatggcagtcattttaaagatgaaaaggctttggtgaccagtcaaaattcagacttgctggatgatgaagaagttgaagatgaggtgttgttagatgaggaggatgaagacaatgatattactggaaaaacaggaaaggaaccagtgacaagtaatttacatgaaggaaaccctgaggatgactatgaagaaaccagtgccctggagatgagttgcaagacatccccagtgaggtataaagaggaagaatataaaagtggactttctgctctagatcatataaggcacttcacagatagcctcaaaatgaggaaaatggaagataatcaatattctgaagctgagctgtcttcttttagtacttcccatgtgccagaggaacttaagcagccgttacacagaaagtccaaatcgcaggcatatgctatgatgctgtcactgtctgacaaggagtccctccattctacatcccacagttcttccaacgtgtggcacagtatggccagggctgcggcggaatccagtgctatccagtccataagccacgtatgacgttatcaaggttgaccagagtgggaccaagtccaacagtagcatggctctttcatataggactatttacaagactgctgagcagaatgccttataaacctgcagggtcactcatctaaagtctagtgaccttaaactgaatgatttaaaaaagaaaagaaagaaaaaagaaactatttattctcgatattttgttttgcacagcaaaggcagctgctgacttctggaagatcaatcaatgcgacttaaagtgattcagtgaaaacaaaaaacttggtgggctgaaggcatcttccagtttaccccaccttagggtatgggtgggtgagaagggcagttgagatggcagcattgatatgaatgaacactccatagaaactgaattctcttttgtacaagatcacctgacatgattgggaacagttgcttttaattacagatttaatttttttcttcgttaaagttttatgtaatttaaccctttgaagacagaagtagttggatgaaatgcacagtcaattattatagaaactgataacagggagtacttgttcccccttttgccttcttaagtacattgtttaaaactagggaaaaagggtatgtgtatattgtaaactatggatgttaacactcaaagaggttaagtcagtgaagtaacctattcatcaccagtaccgctgtaccactaataaattgtttgccaaatccttgtaataacatcttaattttagacaatcatgtcactgtttttaatgtttatttttttgtgtgtgttgcgtgtatcatgtatttatttgttggcaaactattgtttgttgattaaaatagcactgttccagtcagccactactttatgacgtctgaggcacacccctttccgaatttcaaggaccaaggtgacccgacctgtgtatgagagtgccaaatggtgtttggcttttcttaacattcctttttgtttgtttgttttgttttccttcttaatgaactaaatacgaatagatgcaacttagtttttgtaatactgaaatcgattcaattgtataaacgattataatttctttcatggaagcatgattcttctgattaaaaactgtactccatattttatgctggttgtctgcaagcttgtgcgatgttatgttcatgttaatcctatttgtaaaatgaagtgttcccaaccttatgttaaaagagagaagtaaataacagactgtattcagttattttgccctttattgaggaaccagatttgttttctttttgtttgtaatctcattttgaaataatcagcaagttgaggtactttcttcaaatgctttgtacaatataaactgttatgcctttcagtgcattactatgggaggagcaactaaaaaataaagacttacaaaaaggagtattttt

SEQ ID NO: 41360 - DNA, 3508 bp, Artificial Sequence
  derived and/or modified sequence
tttgctgtccaacatcgtgtgctgcttcgcgagaaagtcacattcggaccctttggctagattgcttattcatagggcttcttgactaaagcccttggagcactgggtttttcttgaagtatatgatcttagacgaattttacaatgtgaagttctgcatagatgccagtcaaccagatgttggaagctggctcaagtacattagattcgctggctgttatgatcagcacaaccttgttgcatgccagataaatgatcagatattctatagagtagttgcagacattgcgccgggagaggagcttctgctgttcatgaagagcgaagactatccccatgaaactatggcgccggatatccacgaagaacggcaatatcgctgcgaagactgtgaccagctctttgaatctaaggctgaactagcagatcaccaaaagtttccatgcagtactcctcactcagcattttcaatggttgaagaggactttcagcaaaaactcgaaagcgagaatgatctccaagagatacacacgatccaggagtgtaaggaatgtgaccaagtttttcctgatttgcaaagcctggagaaacacatgctgtcacatactgaagagagggaatacaagtgtgatcagtgtcccaaggcatttaactggaagtccaatttaattcgccaccagatgtcacatgacagtggaaagcactatgaatgtgaaaactgtgccaagcaggttttcacggaccctagcaaccttcagcggcacattcgctctcagcatgtcggtgcccgggcccatgcatgcccggagtgtggcaaaacgtttgccacttcgtcgggcctcaaacaacacaagcacatccacagcagtgtgaagccctttatctgtgaggtctgccataaatcctatactcagttttcaaacctttgccgtcataagcgcatgcatgctgattgcagaacccaaatcaagtgcaaagactgtggacaaatgttcagcactacgtcttccttaaataaacacaggaggttttgtgagggcaagaaccattttgcggcaggtggattttttggccaaggcatttcacttcctggaaccccagctatggataaaacgtccatggttaatatgagtcatgccaacccgggccttgctgactattttggcgccaataggcatcctgctggtcttacctttccaacagctcctggattttcttttagcttccctggtctgtttccttccggcttgtaccacaggcctcctttgatacctgctagttctcctgttaaaggactatcaagtactgaacagacaaacaaaagtcaaagtcccctcatgacacatcctcagatactgccagctacacaggatattttgaaggcactatctaaacacccatctgtaggggacaataagccagtggagctccagcccgagaggtcctctgaagagaggccctttgagaaaatcagtgaccagtcagagagtagtgaccttgatgatgtcagtacaccaagtggcagtgacctggaaacaacctcgggctctgatctggaaagtgacattgaaagtgataaagagaaatttaaagaaaatggtaaaatgttcaaagacaaagtaagccctcttcagaatctggcttcaataaataataagaaagaatacagcaatcattccattttctcaccatctttagaggagcagactgcggtgtcaggagctgtgaatgattctataaaggctattgcttctattgctgaaaaatactttggttcaacaggactggtggggctgcaagacaaaaaagttggagctttaccttacccttccatgtttcccctcccattttttccagcattctctcaatcaatgtacccatttcctgatagagacttgagatcgttacctttgaaaatggaaccccaatcaccaggtgaagtaaagaaactgcagaagggcagctctgagtccccctttgatctcaccactaagcgaaaggatgagaagcccttgactccagtcccctccaagcctccagtgacacctgccacaagccaagaccagcccctggatctaagtatgggcagtaggagtagagccagtgggacaaagctgactgagcctcgaaaaaaccacgtgtttgggggaaaaaaaggaagcaacgtcgaatcaagacctgcttcagatggttccttgcagcatgcaagacccactcctttctttatggaccctatttacagagtagagaaaagaaaactaactgacccacttgaagctttaaaagagaaatacttgaggccttctccaggattcttgtttcacccacaattccaactgcctgatcagagaacttggatgtcagctattgaaaacatggcagaaaagctagagagcttcagtgccctgaaacctgaggccagtgagctcttacagtcagtgccctctatgttcaacttcagggcgcctcccaatgccctgccagagaaccttctgcggaagggaaaggagcgctatacctgcagatactgtggcaagatttttccaaggtctgcaaacctaacacggcacttgagaacccacacaggagagcagccttacagatgcaaatactgtgacagatcatttagcatatcttctaacttgcaaaggcatgttcgcaacatccacaataaagagaagccatttaagtgtcacttatgtgataggtgttttggtcaacaaaccaatttagacagacacctaaagaaacatgagaatgggaacatgtccggtacagcaacatcgtcgcctcattctgaactggaaagtacaggtgcgattctggatgacaaagaagatgcttacttcacagaaattcgaaatttcattgggaacagcaaccatggcagccaatctcccaggaatgtggaggagagaatgaatggcagtcattttaaagatgaaaaggctttggtgaccagtcaaaattcagacttgctggatgatgaagaagttgaagatgaggtgttgttagatgaggaggatgaagacaatgatattactggaaaaacaggaaaggaaccagtgacaagtaatttacatgaaggaaaccctgaggatgactatgaagaaaccagtgccctggagatgagttgcaagacatccccagtgaggtataaagaggaagaatataaaagtggactttctgctctagatcatataaggcacttcacagatagcctcaaaatgaggaaaatggaagataatcaatattctgaagctgagctgtcttcttttagtacttcccatgtgccagaggaacttaagcagccgttacacagaaagtccaaatcgcaggcatatgctatgatgctgtcactgtctgacaaggagtccctccattctacatcccacagttcttccaacgtgtggcacagtatggccagggctgcggcggaatccagtgctatccagtccataagccacgtatgacgttatcaaggttgaccagagtgggaccaagtcca

SEQ ID NO: 41361 - DNA, 3351 bp, Artificial Sequence
  derived and/or modified sequence
atgattttagacgagttttacaacgtgaagttttgtatcgacgcctctcagcctgatgtgggatcttggctgaaatacattcggttcgcagggtgctacgatcagcacaacctggtggcctgtcagatcaacgatcagattttttatagggtagtggcagacatcgctcctggagaagagctgctgctatttatgaagtctgaggattacccacacgagactatggccccagatatccacgaggagcgtcagtataggtgtgaagattgcgatcagctgtttgaatctaaggctgagttagccgaccatcagaaatttccttgcagtactcctcattccgcttttagcatggtagaggaggactttcaacagaagctggaaagcgagaatgacttacaggagatacatacaattcaggaatgcaaagagtgcgatcaggtatttcctgatctccaaagcttagagaagcacatgctgagccacaccgaggagcgagagtataagtgtgatcagtgcccaaaggcatttaactggaagtcaaatcttatccggcatcagatgtcccacgacagtggtaaacattacgagtgtgagaattgcgcgaagcaagtatttacagacccttctaatctccagcgccacattagatcgcagcacgtgggggccagggcccatgcatgtcccgagtgtggcaagacattcgcgactagcagtgggttgaagcagcacaagcatattcactctagcgttaaacctttcatctgtgaggtttgccataagtcatatacccagttttccaatctttgtagacataaacggatgcacgccgactgccggactcaaattaagtgcaaggattgcggccaaatgttctcaactacatcatcgctgaataaacatcgccgcttttgcgaagggaaaaaccatttcgccgctggcggcttctttgggcaggggatatcactgccagggacccccgctatggacaagacatccatggtgaacatgagccacgccaaccctggactcgccgactactttggagcaaatcggcatcccgctggactgactttccccaccgcccctggattcagcttttccttccctggactattcccctcgggactgtatcatagacccccattgattccagcatcctctccggtgaagggcctctcttcgactgagcagacaaacaagagccagtccccactgatgacccacccccaaatactcccagctacacaggatatcctcaaggcgctgtccaaacatccttccgtcggcgataacaaacctgtcgagctgcagcccgaaaggagctccgaagaaagaccgtttgagaaaatttcggaccaatccgagtcgtcagaccttgacgatgttagcactccatcaggcagtgatctcgagaccacatcaggatccgacctggagtcagacatcgagagcgacaaagagaagttcaaggaaaacggcaaaatgtttaaggataaggtgagccccctgcagaacttggcctcaattaataacaaaaaagaatattctaatcactccatcttttcaccatccctagaagaacagaccgcagtctctggggcagtgaacgactctatcaaggcaatcgcttcaatcgcagaaaagtatttcggaagcacaggactcgtcggcctccaggacaaaaaagtgggagctctaccatacccttccatgtttccactcccattcttcccggcttttagtcagtccatgtatccttttccggaccgagacttgcgtagcctgcccctgaagatggagccccagagccccggagaggtgaagaaactgcagaagggttcttctgaatctcctttcgacctcacgactaagagaaaagatgagaaaccacttaccccagtgccaagcaagcctcccgtgacccctgcaacaagccaggatcagccactggatctgtctatgggttcccgctctcgcgcatctggaaccaaactcactgagccacggaagaatcatgtgtttggaggtaagaagggaagcaatgtcgagagccggcccgcatccgacggtagtctgcagcacgcccgcccaacgccgttctttatggatccgatttacagagtggaaaaaaggaagttgacagatccgctggaagccttgaaagagaaatatttgcgcccttcgccgggattcctcttccacccccagttccagctgcccgaccagcgaacatggatgtctgcaattgaaaacatggctgaaaagttggaatcattttcagcattgaagcccgaagcctcggaattgttacagtcggtcccaagcatgttcaacttccgtgccccccctaatgccctgccggagaacctgctgagaaaaggtaaggaacggtacacatgcagatattgtggcaaaatcttcccacgtagcgccaacctgactcgccacttgcgcacccatactggcgaacagccgtatcgttgcaaatattgcgatagaagtttttccataagctcaaaccttcagaggcacgtgcggaacatacataacaaagaaaagcctttcaaatgccatctgtgtgacaggtgcttcgggcagcagaccaatctggataggcacctgaaaaaacacgagaacggaaacatgagtgggaccgccacttcttccccacacagcgaactggaatctactggcgctatattggatgataaggaggacgcttacttcacagagattaggaacttcattggcaattccaatcatggcagccaatcaccacgaaacgtggaggagaggatgaatggctcccactttaaagacgaaaaagctctggttacctcccagaactctgaccttttggacgacgaggaagtagaagacgaggtactccttgacgaggaggacgaagataatgacattacaggcaaaactgggaaagagcctgtgacgagcaacctgcatgagggtaatcctgaggacgattatgaggagacctctgccctagaaatgtcctgcaaaacatctcctgtgagatataaggaggaagaatataagtcaggcctaagtgccttagatcatatcaggcactttacggattctttgaagatgcgaaagatggaggacaaccaatatagtgaggccgagctttcctccttcagcacaagccacgtccccgaggagttgaagcagccactgcacagaaaaagcaaatcccaggcatacgcaatgatgctgagcctgagcgacaaggaatctcttcatagtacgtcacattccagttccaacgtgtggcactccatggctagggcggcagccgaaagcagcgccatccagtccatttcacacgtatag

SEQ ID NO: 41362 - DNA, 3159 bp, Artificial Sequence
  derived and/or modified sequence
atgaagtctgaggactatccacatgaaacgatggccccggatatccacgaagagagacagtatcggtgcgaggattgtgatcagctgtttgaatctaaagctgagttggccgaccaccagaagttcccatgctccacaccgcattccgcatttagcatggtcgaagaggattttcagcagaagttggaatctgaaaacgatctccaggagatccatacgatccaggaatgcaaggaatgtgaccaggtgtttccagatttgcagtctctggaaaagcacatgctgtcccacaccgaagaacgtgagtacaagtgcgaccaatgccccaaagccttcaattggaaaagcaacctcatccggcaccagatgtctcacgatagcggtaagcattacgagtgcgagaactgcgctaagcaggtgttcaccgatcccagtaatttgcagaggcacatccgttcccagcatgttggtgcaagggctcatgcatgcccagaatgcgggaaaacattcgcgacgagtagcggtctaaagcagcataagcacatccatagctccgtaaagcctttcatttgcgaggtctgtcacaagtcctatactcagttctctaacctgtgcagacataagagaatgcatgcagattgccgcacccagatcaaatgtaaagattgtggccagatgttcagcactactagctctcttaataaacataggaggttttgtgaagggaaaaatcactttgccgccggaggattttttgggcagggcatttctctacctggaactcccgcgatggacaaaacatccatggtgaacatgagccacgccaatccaggcctggccgattacttcggagctaatcgtcatcccgcagggctcacgtttccaaccgcccctggtttctccttttcttttcccggcttgttcccctccggcctgtatcacaggccacccttgattccggcctccagtcccgtgaagggactctcctccacagaacagactaacaaatcccagtccccccttatgacacacccccaaatattgcccgcaacgcaagatatcctaaaggcactgagcaaacacccttccgtgggtgataacaaacccgttgagctgcaaccagaaagatcttccgaagagcggcccttcgaaaaaattagtgaccagtcagagtcttccgacctggacgatgtcagcactccctcaggctctgatctggagactacatcaggaagcgaccttgagtctgacatcgagagtgacaaagagaaattcaaagagaacggcaagatgttcaaagataaagtgtctcccctacagaaccttgcatcaatcaacaataagaaggaatattccaatcactcgattttcagcccctctctggaagagcagactgcagtgagcggggccgtcaacgactcaatcaaggccatcgccagcattgccgagaaatattttggaagcacgggtctggtcggtctgcaagataagaaggtcggcgcactcccctaccctagtatgtttccattacccttcttcccagccttctctcaatcaatgtatcctttcccagatcgagatttgaggagccttccactgaagatggaaccccagtcacctggagaggttaagaaactccagaagggatctagcgagtctccgtttgacttaactactaagcggaaggacgagaaacctctaaccccggtcccatcgaaacccccagtcacacctgctacctcccaggatcaaccactagacctgtctatgggaagtagatcgcgcgcctccgggacaaaactgaccgagccacgaaaaaatcatgttttcggcggcaagaaaggcagcaatgtggaatctaggcccgcgagtgatgggtccttgcagcacgcaagacctactcccttcttcatggaccccatctaccgggtggaaaaaagaaaactgaccgaccctctggaggccttaaaagaaaaatatctgagacccagtcctggattcttgtttcacccgcaattccagttacctgatcagaggacctggatgagcgccattgagaacatggctgaaaaactggaaagtttctccgccctgaagcccgaggcctcagagctgctgcagtcagtgccctctatgttcaactttagagctccacctaacgctctgcctgagaatctcttacgaaagggcaaggagcggtacacctgcaggtactgtggtaagatcttccctaggtctgccaacctgacacgccacctgcgcactcatacaggcgagcagccgtatagatgcaaatactgtgacaggagcttctccatttcctccaacctgcagcgtcatgtgcgcaacattcataataaggaaaagccattcaaatgtcatctttgcgaccggtgcttcggacagcagactaaccttgatagacatttgaaaaaacacgaaaatggcaacatgagtggaacagctacatcaagcccacattccgagctggagagcacaggcgctatcctcgacgataaagaggacgcctacttcaccgagattaggaatttcatcgggaacagcaaccatgggtctcagtctccacgaaacgtcgaagaaagaatgaatggctctcacttcaaagacgagaaggccttggtgacctcccagaacagcgatctgctcgacgatgaagaggttgaagatgaggttttactcgacgaggaggacgaggacaacgacattacaggaaaaactgggaaagaacccgtaacttcgaatctgcacgagggcaatcccgaagatgactatgaagagacaagtgctttggagatgtcatgtaaaacgagtcccgtaaggtacaaagaagaagagtataagtctggcttgtctgcactggaccacatccggcatttcacagatagtctgaagatgcgaaaaatggaggataaccagtatagtgaggctgagctaagcagctttagcacaagccatgtacctgaggagctgaagcaaccgctccacaggaagtctaagagtcaggcctatgctatgatgttatccctctccgacaaagagagtttgcactctacatcacatagctcttccaacgtgtggcactccatggctagggctgctgctgagagttccgccatccagagtatctctcacgtttag

SEQ ID NO: 41363 - DNA, 3159 bp, Artificial Sequence
  derived and/or modified sequence
atgaagtcagaggattatccccatgagaccatggctccagatattcacgaagagaggcagtaccgctgtgaggactgcgaccagctatttgagagcaaagctgaactggccgatcaccaaaagtttccttgctccaccccacattccgcattttccatggtggaagaggactttcagcagaaattggagagtgaaaacgacctacaggagatccacacaatccaggagtgtaaggaatgcgaccaagtgtttcctgaccttcagagcctggagaagcacatgctgtcacatactgaagagcgggagtacaagtgcgaccaatgcccaaaagcatttaactggaaaagcaacctaattcgccaccagatgagtcatgactcaggaaaacactacgaatgcgagaattgcgccaaacaggtgtttactgatcctagtaatttgcagaggcacatcagaagccagcacgttggagccagagcccacgcctgcccagaatgcggaaagactttcgcaacctccagtggcctgaagcaacataagcatatccactcctcggttaagcctttcatttgcgaagtgtgtcacaagtcctacacccaattctcaaatttgtgcaggcacaagaggatgcatgccgattgtagaacgcagatcaagtgtaaggactgcggtcagatgttttcaacaaccagcagtttaaacaagcatagacggttctgcgaagggaagaaccacttcgccgcaggcgggttcttcggacaaggaattagccttccagggacccccgccatggacaaaacatccatggtaaatatgagccacgcaaaccctgggttggctgactattttggcgccaatagacaccccgccgggctgaccttcccaacagctccagggttttcctttagttttccagggctattcccgtcgggcctctaccaccgccccccattgatccccgctagttcccccgtgaagggactgtcctctacagaacagacgaataagtcacagagtccgctaatgacacatccccagatactgcctgctacgcaggacatcttgaaagccctgtctaaacacccaagtgttggtgacaacaagccagtcgagcttcagcctgagcgctcctcagaggagcgccccttcgaaaaaataagcgaccaaagtgagtcctctgacctcgatgacgtaagcacacccagcgggtctgacctggaaactacctctggttctgatttagagtctgacatcgaaagcgataaagagaagttcaaggagaacggaaagatgtttaaggacaaggtttcgcccctccaaaatctggcatcaattaacaacaagaaggagtatagcaatcacagtatatttagcccctccctcgaggagcaaacggcggtgtccggcgcagtgaacgacagcataaaagccatcgctagtatcgctgagaagtacttcggatccaccggcctggtgggcctgcaggacaagaaggtcggagcactgccttacccctccatgttcccccttcctttctttccagctttttctcaaagtatgtacccatttccagaccgagatcttagaagtttgcccctgaagatggaaccccagtctcctggagaggttaagaagctacagaagggctcttcagaatctcctttcgatctcacaacaaagcgcaaggacgagaagcctcttactcccgtgccctctaagccgcctgtcaccccagccaccagtcaggatcagcccctggacctgagcatgggctcgaggagtagggcctcaggcactaaattaacagagcctcgtaagaaccacgttttcggtgggaaaaagggtagcaacgtagagagccgccccgcatcagacgggtcactccagcacgcccggccaaccccatttttcatggatcccatatatcgcgtggagaagcgaaaactgaccgatcccctcgaggcccttaaggagaaatacttaagaccgtcccctggttttctgttccaccctcagttccagctacccgaccagcgtacatggatgagtgctattgagaacatggccgaaaaactagagtctttttccgctttgaagcccgaagcctctgagctgctgcagtctgtcccatccatgttcaacttcagggccccgcctaatgcccttcctgagaacttgctgaggaaggggaaggagcgctatacctgtcgctactgtggcaaaatttttccaaggagcgctaatcttacacggcacctaagaacccacaccggcgaacagccttatcgctgtaaatactgtgaccgcagcttcagtattagctccaacctgcagcgccatgtacgtaacatccataacaaagagaagccattcaagtgccatctttgtgacagatgcttcgggcaacaaaccaacctggaccgtcaccttaagaaacatgagaacggaaatatgtcagggactgccactagctcacctcactcagaactggagtcaacaggcgccatcctcgacgacaaggaggatgcttacttcacggaaatcaggaacttcatcggaaactcgaaccacgggagccagtcccctcggaacgtggaggaaaggatgaacgggagccacttcaaagatgaaaaggcactggtcacttctcagaactcagacctgctggatgatgaagaagtagaagacgaggtccttctggatgaagaagatgaagacaacgatataacgggaaagaccgggaaagagcccgttacctccaatcttcatgagggcaaccccgaggacgattacgaagagacaagcgcactggaaatgtcctgcaaaacatcacctgtgcggtacaaggaggaagagtacaagtcaggcctgtccgctctggaccacatcaggcacttcacagactctctcaaaatgaggaaaatggaagataatcaatacagcgaggctgagctgagtagtttcagtaccagccatgtcccagaggagcttaagcagccactgcacagaaagagcaaaagtcaagcttacgctatgatgcttagcctgagcgacaaggagagtttacacagcacaagccactcctctagcaacgtatggcactctatggctcgcgcagccgctgagtccagtgcgattcagtcaatctctcatgtctag

SEQ ID NO: 41364 - DNA, 3351 bp, Artificial Sequence
  derived and/or modified sequence
atgatcctggatgagttctacaacgtgaagttctgcattgatgccagccagccagatgtgggctcctggctgaagtacatccgctttgctggctgctatgaccagcacaacctggtggcctgccagatcaatgaccagatcttctacagagtggtggccgacatcgcccctggagaggagctgctgctcttcatgaagtctgaggactacccccatgagaccatggccccagacatccacgaggagcggcagtaccgctgtgaggactgtgaccagctgtttgagagcaaggccgagctggccgaccaccagaagttcccctgcagcaccccccacagcgccttctccatggtggaggaggacttccagcagaagctggagagtgaaaatgacctgcaggagatccacaccatccaggagtgcaaggaatgtgaccaggtgtttcctgacctgcagagcctggagaagcacatgctgagccacacagaggagcgggagtacaagtgtgaccagtgccccaaggccttcaactggaagagcaacctgatccgccaccagatgagccatgattctgggaagcactatgaatgtgagaactgtgccaagcaggtgttcacagaccccagcaacctgcagaggcacatccgcagccagcacgtgggcgcccgggcccacgcctgcccagaatgtgggaagacctttgccaccagcagcggcctgaagcagcacaagcacatccacagctctgtgaagcccttcatctgtgaggtgtgccacaagagctacacccagttcagcaacctgtgccgccacaagaggatgcacgccgactgcaggacccagatcaagtgcaaggactgtggccagatgttcagcaccaccagcagcctgaacaagcaccggcgcttctgtgagggcaagaaccactttgctgctgggggcttcttcggccagggcatcagcctgcccggcaccccagccatggacaagacctccatggtgaacatgagccacgccaaccctggcctggccgactactttggagccaacagacaccctgctggcctgaccttccccacagcccctggcttctccttctccttccctggcctcttccccagcggcctgtaccaccggcccccactcatcccagccagcagccctgtgaagggcctgagcagcacagagcagaccaacaagagccagagccccctgatgacccacccccagatcctgcctgccacccaggacatcctgaaggccctgagcaagcaccccagcgtgggggacaacaagcctgtggagctgcagcctgagaggagcagcgaggagcggccctttgagaagatcagtgaccagagcgagagcagtgacctggatgatgtgtccacccccagcggcagtgacctggagaccaccagcggcagtgacctggagagtgacatcgagagtgacaaggagaagttcaaggaaaatggcaagatgttcaaggacaaggtgagccccctgcagaacctggccagcatcaacaacaagaaggagtacagcaaccacagcatcttcagccccagcctggaggagcagacagctgtgtctggagctgtgaatgacagcatcaaggccatcgccagcattgctgagaagtacttcggcagcacaggcctggtgggcctgcaggacaagaaggtgggcgccctgccctaccccagcatgttccccctgcccttcttccctgccttcagccagagcatgtaccccttcccagaccgggacctgcggagcctgcccctgaagatggagccccagagccctggagaggtgaagaagctgcagaagggcagcagcgagagcccctttgacctgaccaccaagaggaaggatgagaagcccctgacccctgtgcccagcaagccccctgtgaccccagccaccagccaggaccagcccctggacctgtccatgggcagccgcagccgggccagcggcaccaagctgacagagcccaggaagaaccacgtgtttggaggcaagaagggcagcaatgtggagagcaggcctgccagtgatggcagcctgcagcacgcccggcccacccccttcttcatggaccccatctacagagtggagaagaggaagctgacagaccccctggaggccctgaaggagaagtacctgcggcccagccctggcttcctgttccacccccagttccagctgcctgaccagaggacctggatgtctgccatcgagaacatggccgagaagctggagagcttcagcgccctgaagccagaggccagcgagctgctgcagagcgtgcccagcatgttcaacttccgggcccccccaaatgccctgcctgagaacctgctgaggaagggcaaggagcgctacacctgccgctactgcggcaagatcttccccaggtctgccaacctgaccaggcacctgcggacccacactggagagcagccctaccgctgcaagtactgtgacaggagcttcagcatcagcagcaacctgcagagacatgtgaggaacatccacaacaaggagaagcccttcaagtgccacctgtgtgaccgctgcttcggccagcagaccaacctggacagacacctgaagaagcatgaaaatggaaacatgtctggaacagccaccagcagcccccacagcgagctggagagcactggagccatcctggatgacaaggaggatgcctacttcacagagatccggaacttcatcggcaacagcaaccacggcagccagagccccagaaatgtggaggagaggatgaatggcagccacttcaaggatgagaaggccctggtgaccagccagaacagcgacctgctggatgatgaggaggtggaggatgaggtgctgctggatgaagaagatgaagataatgacatcaccgggaagacaggcaaggagcctgtgaccagcaacctgcacgagggcaacccagaagatgattatgaggagaccagcgccctggagatgagctgcaagaccagccctgtgcgctacaaggaggaggagtacaagagcggcctgagcgccctggaccacatccgccacttcacagacagcctgaagatgaggaagatggaggacaaccagtacagcgaggccgagctgagcagcttcagcaccagccacgtgcctgaggagctgaagcagcccctgcacaggaagagcaagagccaggcctatgccatgatgctgagcctgagtgacaaggagagcctgcacagcaccagccacagcagcagcaatgtgtggcacagcatggcccgggctgctgctgagagcagcgccatccagagcatcagccacgtgtag

SEQ ID NO: 41365 - DNA, 3159 bp, Artificial Sequence
  derived and/or modified sequence
atgaagtctgaggactacccccatgagaccatggccccagacatccacgaggagcggcagtaccgctgtgaggactgtgaccagctgtttgagagcaaggccgagctggccgaccaccagaagttcccctgcagcaccccccacagcgccttctccatggtggaggaggacttccagcagaagctggagagtgaaaatgacctgcaggagatccacaccatccaggagtgcaaggaatgtgaccaggtgtttcctgacctgcagagcctggagaagcacatgctgagccacacagaggagcgggagtacaagtgtgaccagtgccccaaggccttcaactggaagagcaacctgatccgccaccagatgagccatgattctgggaagcactatgaatgtgagaactgtgccaagcaggtgttcacagaccccagcaacctgcagaggcacatccgcagccagcacgtgggcgcccgggcccacgcctgcccagaatgtgggaagacctttgccaccagcagcggcctgaagcagcacaagcacatccacagctctgtgaagcccttcatctgtgaggtgtgccacaagagctacacccagttcagcaacctgtgccgccacaagaggatgcacgccgactgcaggacccagatcaagtgcaaggactgtggccagatgttcagcaccaccagcagcctgaacaagcaccggcgcttctgtgagggcaagaaccactttgctgctgggggcttcttcggccagggcatcagcctgcccggcaccccagccatggacaagacctccatggtgaacatgagccacgccaaccctggcctggccgactactttggagccaacagacaccctgctggcctgaccttccccacagcccctggcttctccttctccttccctggcctcttccccagcggcctgtaccaccggcccccactcatcccagccagcagccctgtgaagggcctgagcagcacagagcagaccaacaagagccagagccccctgatgacccacccccagatcctgcctgccacccaggacatcctgaaggccctgagcaagcaccccagcgtgggggacaacaagcctgtggagctgcagcctgagaggagcagcgaggagcggccctttgagaagatcagtgaccagagcgagagcagtgacctggatgatgtgtccacccccagcggcagtgacctggagaccaccagcggcagtgacctggagagtgacatcgagagtgacaaggagaagttcaaggaaaatggcaagatgttcaaggacaaggtgagccccctgcagaacctggccagcatcaacaacaagaaggagtacagcaaccacagcatcttcagccccagcctggaggagcagacagctgtgtctggagctgtgaatgacagcatcaaggccatcgccagcattgctgagaagtacttcggcagcacaggcctggtgggcctgcaggacaagaaggtgggcgccctgccctaccccagcatgttccccctgcccttcttccctgccttcagccagagcatgtaccccttcccagaccgggacctgcggagcctgcccctgaagatggagccccagagccctggagaggtgaagaagctgcagaagggcagcagcgagagcccctttgacctgaccaccaagaggaaggatgagaagcccctgacccctgtgcccagcaagccccctgtgaccccagccaccagccaggaccagcccctggacctgtccatgggcagccgcagccgggccagcggcaccaagctgacagagcccaggaagaaccacgtgtttggaggcaagaagggcagcaatgtggagagcaggcctgccagtgatggcagcctgcagcacgcccggcccacccccttcttcatggaccccatctacagagtggagaagaggaagctgacagaccccctggaggccctgaaggagaagtacctgcggcccagccctggcttcctgttccacccccagttccagctgcctgaccagaggacctggatgtctgccatcgagaacatggccgagaagctggagagcttcagcgccctgaagccagaggccagcgagctgctgcagagcgtgcccagcatgttcaacttccgggcccccccaaatgccctgcctgagaacctgctgaggaagggcaaggagcgctacacctgccgctactgcggcaagatcttccccaggtctgccaacctgaccaggcacctgcggacccacactggagagcagccctaccgctgcaagtactgtgacaggagcttcagcatcagcagcaacctgcagagacatgtgaggaacatccacaacaaggagaagcccttcaagtgccacctgtgtgaccgctgcttcggccagcagaccaacctggacagacacctgaagaagcatgaaaatggaaacatgtctggaacagccaccagcagcccccacagcgagctggagagcactggagccatcctggatgacaaggaggatgcctacttcacagagatccggaacttcatcggcaacagcaaccacggcagccagagccccagaaatgtggaggagaggatgaatggcagccacttcaaggatgagaaggccctggtgaccagccagaacagcgacctgctggatgatgaggaggtggaggatgaggtgctgctggatgaagaagatgaagataatgacatcaccgggaagacaggcaaggagcctgtgaccagcaacctgcacgagggcaacccagaagatgattatgaggagaccagcgccctggagatgagctgcaagaccagccctgtgcgctacaaggaggaggagtacaagagcggcctgagcgccctggaccacatccgccacttcacagacagcctgaagatgaggaagatggaggacaaccagtacagcgaggccgagctgagcagcttcagcaccagccacgtgcctgaggagctgaagcagcccctgcacaggaagagcaagagccaggcctatgccatgatgctgagcctgagtgacaaggagagcctgcacagcaccagccacagcagcagcaatgtgtggcacagcatggcccgggctgctgctgagagcagcgccatccagagcatcagccacgtgtag

SEQ ID NO: 41366 - DNA, 3351 bp, Artificial Sequence
  derived and/or modified sequence
atgatcctggacgagttctacaacgtgaagttctgcatcgacgcctctcagccagacgtggggtcctggctgaagtacattcggttcgccggctgctacgaccagcacaacctggtggcatgtcaaattaatgaccaaattttttaccgggtcgtggctgacatcgctcctggggaggaattattgctcttcatgaagtccgaagattatcctcacgaaaccatggcaccagatattcacgaagagcggcagtaccggtgtgaggattgcgaccagctctttgagtctaaggccgaacttgcagaccaccagaagttcccgtgctcgactccccactcagcattctctatggtcgaagaagatttccaacaaaaactggagtccgagaacgatctgcaggaaatacacaccatacaggaatgtaaggaatgtgaccaggtcttcccagacctacaaagcctggaaaagcacatgctgtcacacaccgaagaacgggagtataaatgtgatcagtgccccaaagcctttaattggaaatctaacctgatccggcaccagatgtcacacgactcagggaaacactacgaatgtgagaactgcgctaagcaggtcttcactgacccctccaacctgcaacgacatatcaggagccaacacgtcggggcacgggcccacgcctgcccagagtgcggcaagacatttgccacaagcagtggactaaaacagcacaagcatatccacagttcagtcaaaccattcatctgcgaagtttgtcataaatcttatactcagttcagcaacctgtgccggcataagagaatgcacgcggactgccgtactcagataaaatgtaaggactgtggccagatgttttctactacaagctcacttaataagcacaggcgcttttgcgaagggaagaaccactttgccgccggagggttctttggccaggggatcagtttgcctggcacacccgccatggataagacgtctatggtaaatatgtcccacgcgaacccgggcttggcagattattttggtgctaacagacatccagctggattgacctttccgacggcacccggcttttccttctcattccctggattattcccgagcggactgtaccatcggccgccgctgataccagcaagtagcccagtcaagggactgtctagcactgaacagacaaacaaaagccagagcccattgatgacacatccacagatcttgcctgccacacaggatatccttaaagcactgagtaagcacccgtctgtgggcgacaacaagccagtggaactccagccagaacgctcctccgaggagcgccctttcgaaaaaattagcgaccaatccgagagttctgacctcgacgatgtatctactccttctgggtctgatttagaaaccacctcagggtccgacctcgagagcgacatcgagtcagacaaggagaagtttaaagagaacggaaagatgtttaaggataaggtctccccattacaaaatctggcttcgatcaacaataaaaaggagtactcaaatcattctatcttctctcctagtctggaagagcagacggcagtctcaggggcagttaatgactccattaaggcaatcgccagtatagccgaaaaatactttgggtccaccggattggtgggcctgcaggacaagaaagtcggtgccctgccctatccttctatgttcccactgcctttctttcctgccttcagccagtctatgtacccttttccagaccgcgatctgaggtcattacctcttaagatggagccccagagcccgggggaggtcaagaagttacaaaagggatcgagtgagagcccttttgacttaacaaccaaacggaaagatgagaaacccctgactccagttccctctaagccacccgtaacaccggccacctctcaagatcagcccttagatctgagcatggggagtaggtcaagggcctcgggtaccaagcttactgaaccccgcaagaaccacgtattcggcggtaagaaaggcagcaacgtcgagagtcgaccagcctcggacggctccctccagcacgctcgtcccactccgtttttcatggatccaatctatcgagttgagaagaggaagctcactgatcccctggaagctctcaaagaaaaatatcttcgcccctcgcctggcttccttttccacccacagttccagctgcctgatcaacgaacctggatgagcgccattgagaatatggcagagaagttagagtcgttcagcgccctaaaacccgaagctagcgaactgttgcagtctgtgccttctatgtttaactttagagcaccacctaatgctctgccggaaaatctgcttagaaagggcaaagaacgctatacctgtcggtattgtgggaaaatttttcctagatctgcaaatctgacacgtcacttgcggacacataccggggagcagccttacaggtgtaagtactgtgataggtccttttctatctcctccaatttgcagaggcacgttcggaatattcataacaaggagaaaccgttcaagtgccacttatgcgatcggtgtttcggccagcagaccaatctcgaccgtcacctgaaaaaacacgagaatgggaatatgtccggcacagcaacctcaagtcctcactctgaactagagagtaccggagccattctcgacgacaaggaagacgcctacttcaccgaaataaggaatttcatcgggaactccaatcatggctctcagagtccacggaacgtcgaagaaaggatgaatggttcacattttaaggacgagaaggccttagtaacttcccagaattccgacctgcttgacgatgaggaagttgaagacgaggtgctgctggacgaagaggatgaggacaacgatatcacaggaaaaacgggaaaggaacctgtgaccagcaatttacatgagggcaaccctgaggacgactacgaagagacaagcgcgttagaaatgagttgcaaaacctccccagtgcggtataaagaagaggaatacaagagcgggctgagcgcccttgaccacatccgtcattttacagatagcctcaagatgagaaaaatggaggacaaccagtactctgaagcggaactatctagtttctccacgagccacgtcccagaggaactgaagcagccactgcacagaaagtcaaaatcacaagcttatgcaatgatgctgtcgctttcagataaagagtccctccattccacctcacatagctcaagcaacgtttggcactcaatggccagggctgccgcagagagcagcgctatccagtcaatctcccacgtgtag

SEQ ID NO: 41367 - DNA, 3159 bp, Artificial Sequence
  derived and/or modified sequence
atgaagagcgaggactacccccacgagaccatggcccccgacatccatgaggaaaggcagtataggtgcgaagactgcgaccagctttttgagtcaaaagccgagctggccgatcaccaaaaatttccatgtagcacaccccacagtgccttttcaatggtggaggaagatttccaacagaagcttgagagtgagaacgacttgcaggaaatacacaccatccaagagtgcaaggagtgtgaccaagttttcccagaccttcagagcctcgagaaacacatgctgtcacatacggaagagcgcgagtacaaatgcgaccagtgcccaaaggcctttaactggaagagtaatttaattagacaccaaatgtctcacgatagcggcaagcactacgagtgcgaaaactgcgccaaacaagtctttactgatccttctaaccttcagcgccatatcagatctcagcacgtcggtgctcgagcccacgcctgtcctgaatgtggtaaaactttcgctacctcaagtggccttaaacagcataaacatattcatagcagtgtgaaaccctttatatgtgaggtgtgtcacaaatcgtacacccagtttagcaacctctgtcggcataaacgcatgcacgcagattgcaggacccaaattaagtgtaaagactgcggacaaatgtttagcactacttctagcctcaacaagcaccgtagattctgcgagggcaagaaccattttgccgctggcggcttcttcggccagggcatcagcttaccgggcacccctgccatggacaagacgtctatggtgaatatgtcacacgccaatcccggcctagccgactacttcggcgctaatcgccaccctgctggacttacattcccaactgctcccggattctcttttagttttccggggttgttcccatcaggtttgtatcatagacctccactgattcctgcttcatctcccgtcaagggactgagcagcacagagcaaactaacaagtctcaatcaccactgatgacccaccctcaaattttacccgctactcaggacattctgaaagctctaagcaagcacccctcggttggggacaataaacctgtggagcttcaacctgagcgcagctctgaggagaggcccttcgagaaaatttccgatcagagcgagagctcagatctggacgatgtgtctaccccatcaggatccgatttagaaacaaccagcgggtccgacttggagagtgacatcgaatctgacaaagaaaagttcaaggagaatggtaaaatgtttaaagacaaggtctcaccactgcagaatctggctagcataaacaataaaaaagagtattccaaccattcaatcttctcacctagtttggaagaacaaacagctgttagcggtgccgttaatgattccattaaagccatcgcatccatcgccgaaaagtatttcggtagcacaggacttgtcggtctgcaggacaagaaagtgggcgccctcccgtatccttctatgtttccactgcctttttttcctgccttttctcaaagtatgtatcccttccccgaccgggatttgaggagccttcctctgaaaatggagccgcagtctcccggggaagtcaaaaagctgcaaaagggatcgtccgagagtccttttgatttgactacgaagaggaaggacgagaaacctctcacgccagttccttccaaaccacctgtgacacccgctaccagtcaagaccagcccctggatttaagcatgggctcacggtcacgggcttctggcaccaaactcaccgaaccccggaagaatcacgtgttcggcgggaagaagggaagcaatgttgaaagcaggcccgcctctgatggttcattacagcatgcccgcccaaccccatttttcatggatcccatttatagagtggaaaaacgtaagttgactgatcccttggaagctctgaaagagaagtatctgaggcctagccccggcttcttattccatccccagtttcaactgcccgaccagagaacctggatgtctgcaatcgaaaatatggcagagaagcttgaaagcttttccgccctgaagcctgaagcctcggagctgctacagagtgtcccatctatgttcaactttcgagcaccgccaaatgccctacctgagaatctgctgcgcaagggcaaagaaagatacacatgccgatattgcggcaaaatcttccctagatcagccaacctaacaaggcacctcaggacacatactggagaacaaccatatagatgcaagtattgtgacaggtcttttagtatctcttcaaacctgcagaggcatgttagaaatattcataataaagaaaagcccttcaagtgccacctgtgcgatcggtgtttcggccaacaaacaaatcttgaccgccaccttaaaaagcacgaaaatggcaatatgagcgggactgctaccagttcaccacattctgagctcgaaagtacaggtgctatcctggacgacaaagaggacgcctactttacggagattagaaatttcattggcaacagcaaccatggctctcagagccccagaaacgtcgaggagagaatgaatggctcacactttaaggatgaaaaggctttggtgacttctcagaattcagatttgctggacgacgaagaagtagaggatgaagtgctcctcgacgaagaagatgaagataatgacatcacggggaaaacaggaaaggagcccgtgacaagtaatttgcacgagggtaatccagaggatgactacgaggagaccagtgctctggaaatgtcatgcaagacatcacctgtcagatataaggaggaagagtacaagagcgggctgagtgccctcgaccatatcagacatttcacagattccctgaaaatgaggaaaatggaggacaaccaatattcggaagctgagctgtctagcttctcaacttcgcacgtaccagaggagctgaaacagcccctgcacaggaaatcgaagagtcaggcctacgccatgatgctgtccttatccgataaagagagtctgcactccaccagtcatagctcctcgaatgtctggcactcgatggctcgggctgccgccgagtccagcgcaattcagagcatttctcacgtgtag

SEQ ID NO: 41368 - DNA, 3159 bp, Artificial Sequence
  derived and/or modified sequence
atgaagagcgaggactacccccacgagaccatggcccccgacatccatgaggagagacaataccgctgcgaggattgcgatcagctgttcgagagcaaagctgaactcgcagaccaccaaaagttcccctgttcaacaccccattctgcttttagcatggtggaggaagatttccagcaaaaactggagtcagagaatgatttacaagaaatccatacaatccaggagtgtaaagagtgtgaccaggtgttccctgatctgcagtctcttgagaagcacatgctatcccacacagaggaacgggagtacaagtgtgatcagtgcccgaaagcgtttaattggaagtctaatctgatccgtcaccagatgagtcacgacagcgggaaacactacgagtgcgagaactgcgcgaaacaggtttttactgatccctctaatcttcagcggcatatcaggtcccagcacgtgggggctcgagctcacgcgtgtcctgaatgtggaaaaactttcgcaacatcatccgggttaaaacagcataagcacatccacagtagtgtgaaaccgttcatttgcgaagtctgtcacaagagctatactcagtttagcaatctgtgccggcataaaagaatgcacgctgactgtagaacacagataaagtgtaaagactgtggccaaatgtttagcacgacatcttccctcaacaagcacagacgattttgcgagggcaaaaaccacttcgctgctgggggcttcttcggacaggggatttcattgcctggcacaccagcaatggacaagacatctatggttaatatgtctcacgctaatccaggcctggcggattatttcggagccaaccgccaccccgcagggctgacgtttcctacagccccgggatttagcttctcctttcctggactgttcccctctggcctgtaccacagacctcccctcatcccagcgtcaagccccgtgaagggcctgtcctccacagaacagaccaacaagagtcagtcacctctgatgacccatccacaaatacttccagctactcaagacatcctgaaggccctatccaagcatccctcagtgggggataacaagccagtggaactgcagcccgaaagatcatctgaagagcgcccatttgagaagatctctgaccagtcagagtcctctgacctggatgatgtcagtacacccagcggcagcgacctagaaacaacatccggcagcgacctggaatccgatatagagtctgataaagaaaaattcaaagaaaacggcaagatgttcaaggacaaagtcagccctctacagaatctggccagtataaataacaagaaggagtacagtaatcactcaatcttctctccttccctcgaagaacagacagctgtttccggagctgtcaacgatagcatcaaggccattgcctcaattgctgaaaagtactttgggtccacaggtctggtgggactccaggataaaaaggtgggcgcactcccttacccgagcatgtttcccctgcccttctttcccgcattttctcagtcaatgtaccctttccccgacagggatctcagatcactgccactgaaaatggagccccagtcccccggggaggtcaaaaagctccagaagggatcgtccgagtccccttttgacctcacaacgaagcgcaaagatgagaagcccctcacacccgtgcctagcaaacctcctgtgacccccgccacctctcaggaccagcctcttgatctgtccatgggcagtcgctcccgcgcatctggcacaaagctgaccgaacctcgaaaaaaccatgtgttcgggggtaaaaaaggcagtaacgtagaaagccggcccgcctcagatgggtccctccagcatgcccgcccaacaccgtttttcatggacccaatctacagggtggagaagagaaagctcaccgatcctctcgaggctctgaaggagaaatacttgcgaccttcccccggcttcttattccatcctcaattccagctgcccgaccagaggacttggatgagcgccatagagaacatggctgagaaactggaaagtttctctgccctcaagcctgaagccagcgagctgctgcagagcgtgccaagcatgtttaacttcagggcccccccaaacgctctcccagagaatctattgcgcaagggaaaggagagatacacgtgccgatattgcggcaagatcttccctagatcagcaaatctcaccaggcaccttaggactcacacaggagagcagccgtacagatgcaagtactgcgatcggagtttctcgatcagctcaaatctccagcgccatgttagaaatatccataacaaggagaagccctttaagtgccacctgtgcgacagatgcttcgggcagcagactaatctcgatcgtcaccttaaaaagcacgagaacggcaatatgtctggcacagcaaccagctcaccacactccgaactggaaagcacaggcgccatcctggatgataaggaagacgcctactttacagagatccgtaactttatcggtaactccaaccacggctcccagtcaccacgcaacgtggaagaacgcatgaacggcagtcattttaaagatgagaaagccctcgtgacctcacagaactctgatctgctggacgacgaagaggtcgaggatgaggtgctcctggatgaggaggacgaggataatgacatcacgggcaagacggggaaggagcctgtgacatctaacttgcatgaaggtaacccagaggacgactacgaggaaaccagcgcactcgaaatgtcatgtaagacttcgcctgtacggtacaaagaagaagagtacaaatccggcctaagcgcacttgaccacatacgtcatttcaccgattctctgaagatgcggaagatggaagacaatcagtactccgaggccgagctttcatcgttctccacgtcccacgttccggaggagttaaagcagccacttcatcgaaaaagtaagagccaggcatacgctatgatgttatcactgtcagataaggagagtctgcacagcacctcgcactcatcctccaatgtgtggcattctatggcgcgggcagccgctgaatcttctgctatacagtctatttcccacgtttag

SEQ ID NO: 41369 - DNA, 3351 bp, Artificial Sequence
  derived and/or modified sequence
atgatccttgacgagttctacaacgtcaaattttgcattgatgcgtcccagcccgacgttggcagctggctgaagtacattcggtttgccggttgttatgatcaacataacctagtcgcatgccagatcaacgaccaaatattttacagggtcgtggcagacatcgcaccgggtgaagaactcctgctctttatgaaatcagaggattacccgcatgaaaccatggcacccgacatccatgaagaaagacagtacaggtgtgaggactgtgatcagctgttcgagtctaaagccgaactggccgatcaccagaaatttccatgttctaccccgcactctgctttttccatggtcgaggaagatttccaacaaaaattagaatccgagaacgacttgcaggagatccacaccatccaggaatgtaaagaatgcgaccaggtgttcccagatctacagtccctagaaaagcatatgctcagtcataccgaggagagggagtacaagtgtgatcaatgcccaaaagcctttaactggaagtccaacctgatcagacaccagatgagccatgactctggcaagcactacgaatgcgaaaattgtgctaagcaggtctttacagatccctctaacctccagcgtcatattcgatcacagcacgtgggagcaagggcccacgcctgtcctgagtgtggaaaaacgttcgccaccagctcaggactgaagcagcacaagcatatccacagctctgtgaaaccttttatctgcgaggtctgtcataaaagttatacccagttctctaacctctgtagacacaaaagaatgcacgctgactgcagaacacaaataaaatgcaaggactgcgggcagatgttctctactacatcctccttaaacaaacacaggcgtttctgtgagggtaagaatcactttgccgctggcggttttttcggacagggtataagcctgccaggtacgcccgctatggataaaaccagcatggtcaacatgtcacatgccaatccgggactagctgattactttggagctaatagacatcctgcgggtctcacctttcctacagctcctggcttttcattcagctttccagggctgttccccagcgggctgtaccacagacctcctctgatcccagcctcatcaccagttaaaggcctttctagcaccgagcagaccaacaaatcacaatctcctctgatgacgcaccctcagattctgccagccacccaagatatcctcaaagcgttgtctaagcaccctagcgtcggcgataacaagccagtggaactgcaaccggaacgctcatctgaagagcgaccttttgaaaagatcagtgaccagtccgagtctagcgacctggatgatgtgtccacacccagcgggagtgatctcgaaacaacgtctggcagtgaccttgagtctgatatcgagagcgataaagaaaaatttaaggaaaacggtaagatgttcaaggataaggtgtctcctctccagaacctggcctcaataaacaataagaaggaatatagcaaccattctatattcagccctagtctggaagagcagacagcggtgagtggggctgtcaatgacagcataaaagccatcgcatcgatcgccgaaaagtacttcgggtcaaccggtctggtcgggctgcaggataagaaagtgggagcgctgccatacccttcgatgttcccgctccccttcttccctgccttcagccagagtatgtatccattcccggatcgagatttgcggtcccttccactcaaaatggaacctcagtctccaggggaggtgaagaagcttcagaaaggctcatcagaaagccccttcgatcttacaacaaaacggaaggatgagaagcccttgactcctgttccatccaaaccccctgtaacccctgccacaagccaggatcagccgctggacctgagcatggggagccggtcccgcgcatccggtaccaaactgacagaaccacgcaagaatcatgtgtttggcggaaaaaaaggaagtaatgtcgaaagccgcccagccagcgacggttccctgcagcatgccaggcctactcctttcttcatggaccccatttacagagttgaaaagaggaaactgacagatccattggaagctcttaaagagaaatacctgcgaccttcccctggcttcctgttccacccacagtttcagctgcctgatcaacgcacgtggatgtccgcaatagaaaatatggcagaaaaactggaaagcttttctgctctgaaacctgaggcatctgagctgctgcagtctgttcctagtatgttcaactttcgcgcacccccaaatgccctgccagaaaatctgctccggaaaggtaaggagagatatacttgtcggtattgtggcaagatattcccgaggagcgctaaccttacccggcatctaagaacccatacgggggagcagccctatcgctgtaagtactgtgaccgttcatttagcatttcctctaatctgcagcggcatgtgcgaaacattcacaacaaggagaagccttttaagtgccacctctgcgatcgctgtttcggtcaacagacaaatctggaccggcacctaaaaaaacacgagaacggcaacatgtccggcaccgcaactagctctcctcactccgagcttgagagtacaggggctatcttggacgataaggaggacgcatactttaccgagatcagaaactttattggcaactccaaccacggaagtcagagccccaggaacgtggaggagcggatgaacgggtcccactttaaggatgaaaaagctctagtcacaagccagaattccgacctacttgatgatgaggaagtggaggacgaagtgcttttggatgaggaagacgaggacaacgacattacaggcaagactggaaaggaacccgtgacctctaatctacatgagggcaatcccgaagatgattacgaagagactagcgcacttgagatgagctgcaagacatcccctgtgcgatataaagaggaggaatacaagtcaggcctttctgctctggatcacatccgacatttcactgactcactgaaaatgcgaaaaatggaggacaaccaatattcggaagcggagctcagtagcttctcaacatctcatgtacccgaggagctgaaacagcccctacatcgcaagagcaaatcccaggcctatgccatgatgctgtccctgtccgataaagaatctctacatagcacatcacactcttcatccaacgtctggcactccatggcaagggccgctgcggaatccagcgcaattcagagcatttcccatgtatag

SEQ ID NO: 41370 - DNA, 3159 bp, Artificial Sequence
  derived and/or modified sequence
atgaagtcagaggattacccacacgagacaatggcaccagacatccatgaggagaggcagtaccgatgtgaagattgtgatcagttattcgagagcaaggcagagctggctgatcaccagaagttcccctgctccactccacattccgccttttcaatggtcgaagaagatttccagcagaaactcgagagcgagaacgacttacaggagatccatacaattcaggagtgcaaggaatgcgatcaggtttttccagacctgcagagtcttgagaagcacatgctgtcgcacaccgaggagagggagtataagtgtgaccagtgccccaaggcattcaattggaagagtaacctgatcagacaccaaatgtcacacgactcgggcaagcattacgaatgcgaaaattgtgccaagcaggtcttcactgatccctccaatctgcagaggcacattagatcccagcacgtcggtgctcgcgcacacgcttgtcctgaatgcggtaagacttttgccacatccagcggattgaaacagcataaacacatacactcttcggtgaagcctttcatttgcgaggtatgtcataagtcctatacacagttcagtaatctgtgtagacacaagaggatgcacgccgattgcaggacacagatcaaatgtaaagactgtgggcagatgttttccacaactagttcactcaataagcatcgaaggttctgtgaggggaaaaaccatttcgctgccggagggttttttgggcagggcatttcactgccaggaaccccggcaatggataagacctccatggtcaacatgtcccacgcgaatcccggtttggccgattacttcggcgcaaaccggcatccagctggactgactttccccaccgcaccaggattttcttttagttttccagggctattccctagtggcctgtatcaccgccctccactaattccagctagcagtcctgtgaaaggcctcagcagcacagagcaaaccaataaatcccagagcccccttatgacacatccacagatattgcctgccacccaggatattttaaaggcattatccaaacacccctcggtgggcgacaataaacctgtagaattgcagcccgaaagatcctccgaagaacggcctttcgaaaagatctccgatcaatccgaaagcagtgacctggacgacgtttccacccctagcggctccgacctggagaccacatccggcagcgacctagagtcagacattgaatccgataaggagaagttcaaagaaaacgggaaaatgtttaaagacaaagtctccccactgcagaacctcgcatccattaataataagaaggaatactccaatcattcaatattttctccctctcttgaggaacagacggctgtgtccggcgctgttaacgactctattaaggcgattgccagtatagcagagaagtactttggatccaccggtttagttgggctccaagataagaaggtgggcgctctgccctatccaagcatgtttccattgcccttcttccccgctttttctcagagcatgtacccgtttccagatcgagaccttagaagcttgcccctcaagatggagccccagtccccaggagaggtgaagaagctgcagaagggctcttcagaatctcccttcgacctgaccacaaagcgcaaggacgagaaacccctcactcccgtgccttctaaaccacctgtcacacctgctacatctcaggatcagcccctcgacttaagcatgggatccagatcacgggcatctgggacaaagctcacagagccgagaaagaaccacgtttttggtgggaagaaagggagtaacgtggagtcgcgacccgcatcagacggaagccttcaacacgcgaggcctacacccttctttatggatccaatttacagggtggagaaaaggaaacttaccgacccccttgaggcactgaaagaaaaatatctcaggccctctcctggttttctcttccacccccagttccagctgcccgatcagagaacctggatgtcagcgatcgaaaacatggcggagaagttagagagcttttctgccctaaagcccgaagcgtcggagctcctgcaaagtgtcccttccatgtttaattttcgggcacctccaaatgcgctccccgagaaccttctccggaagggcaaggagagatatacctgtcgatactgcggtaagatcttccccaggtccgcaaacctgactaggcacctgcgtactcataccggggaacagccgtacaggtgtaaatattgcgatcgatcgtttagcatctcctccaatctgcaacgacacgtgagaaatatccacaataaagagaaacctttcaagtgccacctgtgcgaccggtgcttcggacaacagaccaacctcgaccggcacttgaaaaagcacgaaaacggcaacatgtctggtaccgccacaagttccccccactccgagctggagtctaccggcgcaattctcgacgacaaggaagatgcctattttacggaaatccgtaatttcattggcaactctaatcatggctctcaaagccctcggaacgtggaagagcgaatgaacggctcacactttaaagatgagaaagcactggtgaccagccagaactctgacctgcttgatgatgaagaggtcgaagatgaagtgttgttagacgaagaagatgaagacaatgacataactggtaaaacggggaaggagcccgtgacatctaacctgcacgagggcaaccctgaggacgattatgaagagacctcagcactagagatgagctgtaagacaagtcccgtgcggtacaaggaagaggagtacaagtccggacttagtgccctggaccacatacgccatttcaccgatagcctgaagatgaggaaaatggaagataaccaatacagtgaggcggaactgagctccttttctacgagccatgtgcctgaagaactaaagcagcccctgcaccgcaagtctaaatcccaggcctacgccatgatgctcagcctgtctgacaaggagtcactccactccactagccacagttcatccaacgtctggcactctatggccagagccgctgcggagtccagcgcaatccagagtatttcacatgtctag

SEQ ID NO: 41371 - DNA, 3159 bp, Artificial Sequence
  derived and/or modified sequence
atgaagtccgaggactacccccatgaaaccatggcccctgatattcacgaagaaaggcaataccgctgcgaggactgtgaccagttgttcgagtctaaggccgagttggccgatcaccagaaattcccctgtagtacccctcactctgcttttagcatggtggaggaagacttccagcagaagcttgagtccgagaatgacctccaggagatccacaccattcaggaatgcaaagaatgtgatcaggtgtttccggaccttcaatcgcttgaaaagcacatgttatctcacactgaggagagagaatacaagtgcgatcagtgtcctaaggctttcaactggaagtcgaacctgattcgccaccaaatgtctcacgactctggcaagcactacgaatgcgagaactgcgcaaagcaagtcttcacagacccttccaacctgcaacgacacatccggagccaacacgtgggcgctcgcgcacacgcttgtcctgagtgcgggaagaccttcgcgacatcatccggcctgaaacagcataagcacattcactcctctgtcaaaccattcatctgcgaagtatgccacaagagctacacccagttctcaaacttgtgccggcataaacggatgcatgccgattgccgtacacaaattaaatgcaaggattgtggtcaaatgtttagcaccaccagcagtttgaataagcataggcgattttgtgagggaaagaaccattttgcggcagggggattttttggacagggcatctccttgccaggaacacccgctatggataagacaagcatggttaacatgagccatgctaaccccggactcgcagactatttcggagcgaaccgacaccctgctgggctgaccttccctaccgcaccaggttttagcttctctttcccaggtctcttcccttccgggctgtaccatcgcccacctctgattcctgcatcctcccctgtgaaaggactctcctccactgaacagactaacaagtcacaatcccccctgatgacacaccctcaaattctgcctgccactcaagacattctcaaagcactgagtaaacacccctcagtgggagataacaagccggtggaacttcagcccgaacggtcgtcagaggagcggccatttgagaagattagtgatcagtcagaatcgtccgacctcgatgatgtgtctacaccatccggcagtgacttggaaaccacctcaggctctgacctggaatccgatatcgagtctgataaggagaagtttaaagaaaacggcaagatgttcaaggacaaggtgtccccattacaaaacttggcaagtataaacaacaaaaaagaatactctaatcactctatcttttccccctcacttgaagagcagaccgctgtgagcggcgcagtgaatgattcaatcaaagccatcgcttctattgccgagaagtacttcggaagcacaggcctggtgggattacaggataagaaggtcggcgcactgccctacccttcaatgttccccctgcccttttttccagccttttctcaaagtatgtatccattccctgacagggacctgcgatccctacccctgaaaatggaaccacaaagtcccggtgaagtgaaaaagctgcagaaggggagctctgaatcaccgtttgaccttaccaccaagcggaaggacgaaaagcccttaacccctgtgccttccaaaccgcctgtcacaccagcgacgagccaggatcagccactggatctttccatgggctcccggtcaagagcctccgggaccaaactcaccgagccgcgtaagaaccacgtgtttggtggaaaaaaggggagtaacgttgagtcaaggcccgctagtgatgggtctttgcagcatgcaagacctacccctttcttcatggaccctatctatcgtgtagagaagagaaagctgactgatccactggaggcgctcaaggaaaaatacttaagaccatccccaggcttcctgtttcatccccagttccagctgccagaccagcggacctggatgtcagccatagagaatatggctgaaaagcttgaaagtttctcagcgctgaagcctgaagccagcgagcttctccaaagcgtgccctctatgttcaatttccgcgcaccccctaacgcgctacctgaaaatctcctgcgaaaggggaaggaaaggtacacctgcaggtactgcggcaaaattttcccacgtagcgccaatctcactcgccacctgaggactcacacaggcgaacaaccctatcgctgcaagtactgcgatcgtagcttctcaatctctagtaatcttcagagacatgtgaggaacattcataacaaggaaaaaccattcaagtgccatctctgtgaccggtgctttggccagcagacaaacctcgatagacacctcaagaagcatgagaatggaaatatgtcaggcacggccaccagttctccgcatagcgagctggagtctacgggcgctatcctggacgataaagaggacgcatactttacagagatcagaaacttcattggtaattcaaatcacggatcacaaagtccacgaaacgtcgaggagcgaatgaacggaagccacttcaaggatgagaaggctcttgtgacgtctcaaaacagcgatttattagatgatgaagaggttgaggacgaggtattgttggacgaggaagatgaggataatgacatcacaggaaagacagggaaggaacccgtgactagcaacttgcatgaaggtaaccccgaggatgactatgaagaaacctctgctctggaaatgtcgtgcaagacttcccctgttcgttacaaggaggaggagtacaaatctggtcttagcgccctggatcacatacggcactttacagatagtcttaaaatgaggaaaatggaagacaatcagtactcggaagccgagctcagtagtttttccacctcccacgtccctgaagaacttaaacagccgctccaccggaagagtaagtctcaggcatacgcaatgatgttgtccctgtcagataaagagtcacttcacagtacttctcactcttccagtaatgtgtggcatagcatggccagggccgctgcggagagttcagcgatacagtccatatcccatgtttag

SEQ ID NO: 41372 - DNA, 3351 bp, Artificial Sequence
  derived and/or modified sequence
atgatcctggacgagttctacaacgtgaagttctgcatcgacgccagccagcccgacgtgggcagctggctgaagtacatcagattcgccggctgctacgaccagcacaacctggtggcctgccagatcaacgaccagatcttctacagagtggtggccgacatcgcccccggcgaggagctgctgctgttcatgaagagcgaggactacccccacgagaccatggcccccgacatccacgaggagagacagtacagatgcgaggactgcgaccagctgttcgagagcaaggccgagctggccgaccaccagaagttcccctgcagcaccccccacagcgccttcagcatggtggaggaggacttccagcagaagctggagagcgagaacgacctgcaggagatccacaccatccaggagtgcaaggagtgcgaccaggtgttccccgacctgcagagcctggagaagcacatgctgagccacaccgaggagagagagtacaagtgcgaccagtgccccaaggccttcaactggaagagcaacctgatcagacaccagatgagccacgacagcggcaagcactacgagtgcgagaactgcgccaagcaggtgttcaccgaccccagcaacctgcagagacacatcagaagccagcacgtgggcgccagagcccacgcctgccccgagtgcggcaagaccttcgccaccagcagcggcctgaagcagcacaagcacatccacagcagcgtgaagcccttcatctgcgaggtgtgccacaagagctacacccagttcagcaacctgtgcagacacaagagaatgcacgccgactgcagaacccagatcaagtgcaaggactgcggccagatgttcagcaccaccagcagcctgaacaagcacagaagattctgcgagggcaagaaccacttcgccgccggcggcttcttcggccagggcatcagcctgcccggcacccccgccatggacaagaccagcatggtgaacatgagccacgccaaccccggcctggccgactacttcggcgccaacagacaccccgccggcctgaccttccccaccgcccccggcttcagcttcagcttccccggcctgttccccagcggcctgtaccacagaccccccctgatccccgccagcagccccgtgaagggcctgagcagcaccgagcagaccaacaagagccagagccccctgatgacccacccccagatcctgcccgccacccaggacatcctgaaggccctgagcaagcaccccagcgtgggcgacaacaagcccgtggagctgcagcccgagagaagcagcgaggagagacccttcgagaagatcagcgaccagagcgagagcagcgacctggacgacgtgagcacccccagcggcagcgacctggagaccaccagcggcagcgacctggagagcgacatcgagagcgacaaggagaagttcaaggagaacggcaagatgttcaaggacaaggtgagccccctgcagaacctggccagcatcaacaacaagaaggagtacagcaaccacagcatcttcagccccagcctggaggagcagaccgccgtgagcggcgccgtgaacgacagcatcaaggccatcgccagcatcgccgagaagtacttcggcagcaccggcctggtgggcctgcaggacaagaaggtgggcgccctgccctaccccagcatgttccccctgcccttcttccccgccttcagccagagcatgtaccccttccccgacagagacctgagaagcctgcccctgaagatggagccccagagccccggcgaggtgaagaagctgcagaagggcagcagcgagagccccttcgacctgaccaccaagagaaaggacgagaagcccctgacccccgtgcccagcaagccccccgtgacccccgccaccagccaggaccagcccctggacctgagcatgggcagcagaagcagagccagcggcaccaagctgaccgagcccagaaagaaccacgtgttcggcggcaagaagggcagcaacgtggagagcagacccgccagcgacggcagcctgcagcacgccagacccacccccttcttcatggaccccatctacagagtggagaagagaaagctgaccgaccccctggaggccctgaaggagaagtacctgagacccagccccggcttcctgttccacccccagttccagctgcccgaccagagaacctggatgagcgccatcgagaacatggccgagaagctggagagcttcagcgccctgaagcccgaggccagcgagctgctgcagagcgtgcccagcatgttcaacttcagagccccccccaacgccctgcccgagaacctgctgagaaagggcaaggagagatacacctgcagatactgcggcaagatcttccccagaagcgccaacctgaccagacacctgagaacccacaccggcgagcagccctacagatgcaagtactgcgacagaagcttcagcatcagcagcaacctgcagagacacgtgagaaacatccacaacaaggagaagcccttcaagtgccacctgtgcgacagatgcttcggccagcagaccaacctggacagacacctgaagaagcacgagaacggcaacatgagcggcaccgccaccagcagcccccacagcgagctggagagcaccggcgccatcctggacgacaaggaggacgcctacttcaccgagatcagaaacttcatcggcaacagcaaccacggcagccagagccccagaaacgtggaggagagaatgaacggcagccacttcaaggacgagaaggccctggtgaccagccagaacagcgacctgctggacgacgaggaggtggaggacgaggtgctgctggacgaggaggacgaggacaacgacatcaccggcaagaccggcaaggagcccgtgaccagcaacctgcacgagggcaaccccgaggacgactacgaggagaccagcgccctggagatgagctgcaagaccagccccgtgagatacaaggaggaggagtacaagagcggcctgagcgccctggaccacatcagacacttcaccgacagcctgaagatgagaaagatggaggacaaccagtacagcgaggccgagctgagcagcttcagcaccagccacgtgcccgaggagctgaagcagcccctgcacagaaagagcaagagccaggcctacgccatgatgctgagcctgagcgacaaggagagcctgcacagcaccagccacagcagcagcaacgtgtggcacagcatggccagagccgccgccgagagcagcgccatccagagcatcagccacgtgtag

SEQ ID NO: 41373 - DNA, 3159 bp, Artificial Sequence
  derived and/or modified sequence
atgaagagcgaggactacccccacgagaccatggcccccgacatccacgaggagagacagtacagatgcgaggactgcgaccagctgttcgagagcaaggccgagctggccgaccaccagaagttcccctgcagcaccccccacagcgccttcagcatggtggaggaggacttccagcagaagctggagagcgagaacgacctgcaggagatccacaccatccaggagtgcaaggagtgcgaccaggtgttccccgacctgcagagcctggagaagcacatgctgagccacaccgaggagagagagtacaagtgcgaccagtgccccaaggccttcaactggaagagcaacctgatcagacaccagatgagccacgacagcggcaagcactacgagtgcgagaactgcgccaagcaggtgttcaccgaccccagcaacctgcagagacacatcagaagccagcacgtgggcgccagagcccacgcctgccccgagtgcggcaagaccttcgccaccagcagcggcctgaagcagcacaagcacatccacagcagcgtgaagcccttcatctgcgaggtgtgccacaagagctacacccagttcagcaacctgtgcagacacaagagaatgcacgccgactgcagaacccagatcaagtgcaaggactgcggccagatgttcagcaccaccagcagcctgaacaagcacagaagattctgcgagggcaagaaccacttcgccgccggcggcttcttcggccagggcatcagcctgcccggcacccccgccatggacaagaccagcatggtgaacatgagccacgccaaccccggcctggccgactacttcggcgccaacagacaccccgccggcctgaccttccccaccgcccccggcttcagcttcagcttccccggcctgttccccagcggcctgtaccacagaccccccctgatccccgccagcagccccgtgaagggcctgagcagcaccgagcagaccaacaagagccagagccccctgatgacccacccccagatcctgcccgccacccaggacatcctgaaggccctgagcaagcaccccagcgtgggcgacaacaagcccgtggagctgcagcccgagagaagcagcgaggagagacccttcgagaagatcagcgaccagagcgagagcagcgacctggacgacgtgagcacccccagcggcagcgacctggagaccaccagcggcagcgacctggagagcgacatcgagagcgacaaggagaagttcaaggagaacggcaagatgttcaaggacaaggtgagccccctgcagaacctggccagcatcaacaacaagaaggagtacagcaaccacagcatcttcagccccagcctggaggagcagaccgccgtgagcggcgccgtgaacgacagcatcaaggccatcgccagcatcgccgagaagtacttcggcagcaccggcctggtgggcctgcaggacaagaaggtgggcgccctgccctaccccagcatgttccccctgcccttcttccccgccttcagccagagcatgtaccccttccccgacagagacctgagaagcctgcccctgaagatggagccccagagccccggcgaggtgaagaagctgcagaagggcagcagcgagagccccttcgacctgaccaccaagagaaaggacgagaagcccctgacccccgtgcccagcaagccccccgtgacccccgccaccagccaggaccagcccctggacctgagcatgggcagcagaagcagagccagcggcaccaagctgaccgagcccagaaagaaccacgtgttcggcggcaagaagggcagcaacgtggagagcagacccgccagcgacggcagcctgcagcacgccagacccacccccttcttcatggaccccatctacagagtggagaagagaaagctgaccgaccccctggaggccctgaaggagaagtacctgagacccagccccggcttcctgttccacccccagttccagctgcccgaccagagaacctggatgagcgccatcgagaacatggccgagaagctggagagcttcagcgccctgaagcccgaggccagcgagctgctgcagagcgtgcccagcatgttcaacttcagagccccccccaacgccctgcccgagaacctgctgagaaagggcaaggagagatacacctgcagatactgcggcaagatcttccccagaagcgccaacctgaccagacacctgagaacccacaccggcgagcagccctacagatgcaagtactgcgacagaagcttcagcatcagcagcaacctgcagagacacgtgagaaacatccacaacaaggagaagcccttcaagtgccacctgtgcgacagatgcttcggccagcagaccaacctggacagacacctgaagaagcacgagaacggcaacatgagcggcaccgccaccagcagcccccacagcgagctggagagcaccggcgccatcctggacgacaaggaggacgcctacttcaccgagatcagaaacttcatcggcaacagcaaccacggcagccagagccccagaaacgtggaggagagaatgaacggcagccacttcaaggacgagaaggccctggtgaccagccagaacagcgacctgctggacgacgaggaggtggaggacgaggtgctgctggacgaggaggacgaggacaacgacatcaccggcaagaccggcaaggagcccgtgaccagcaacctgcacgagggcaaccccgaggacgactacgaggagaccagcgccctggagatgagctgcaagaccagccccgtgagatacaaggaggaggagtacaagagcggcctgagcgccctggaccacatcagacacttcaccgacagcctgaagatgagaaagatggaggacaaccagtacagcgaggccgagctgagcagcttcagcaccagccacgtgcccgaggagctgaagcagcccctgcacagaaagagcaagagccaggcctacgccatgatgctgagcctgagcgacaaggagagcctgcacagcaccagccacagcagcagcaacgtgtggcacagcatggccagagccgccgccgagagcagcgccatccagagcatcagccacgtgtag

SEQ ID NO: 41374 - protein, 460 aa, Artificial Sequence
  derived and/or modified sequence
MFEKYPGKMEGLFRHNPYTAFPPAVPGLPPGLPPAVSFGSLQGAFQPKSTNPELPPRLGPVPSGLSQKGTQIPDHFRPPLRKPGKWCAMHVRVAYMILRHQEKMKGDSHKLDFRNDLLPCLPGPYGALPPGQELSHPASLFTATGAVHAAANPFTAAPGAHGPFLSPSTHIDPFGRPTSFASLAALSNGAFGGLGSPTFNSGAVFAQKESPGAPPAFASPPDPWGRLHRSPLTFPAWVRPPEAARTPGSDKERPVERREPSITKEEKDRDLPFSRPQLRVSPATPKARAGEEGPRPTKESVRVKEERKEEAAAAAAAAAAAAAAAAAAATGPQGLHLLFERPRPPPFLGPSPPDRCAGFLEPTWLAAPPRLARPPRFYEAGEELTGPGAVAAARLYGLEPAHPLLYSRLAPPPPPAAAPGTPHLLSKTPPGALLGAPPPLVPAPRPSSPPRGPGPARADR

SEQ ID NO: 41375 - protein, 769 aa, Artificial Sequence
  derived and/or modified sequence
MYPQGRHPAPHQPGQPGFKFTVAESCDRIKDEFQFLQAQYHSLKVEYDKLANEKTEMQRHYVMYYEMSYGLNIEMHKQTEIAKRLNTILAQIMPFLSQEHQQQVAQAVERAKQVTMTELNAIIGQQQLQAQHLSHATHGPPVQLPPHPSGLQPPGIPPVTGSSSGLLALGALGSQAHLTVKDEKNHHELDHRERESSANNSVSPSESLRASEKHRGSADYSMEAKKRKAEEKDSLSRYDSDGDKSDDLVVDVSNEDPATPRVSPAHSPPENGLDKARSLKKDAPTSPASVASSSSTPSSKTKDLGHNDKSSTPGLKSNTPTPRNDAPTPGTSTTPGLRSMPGKPPGMDPIASALRTPISITSSYAAPFAMMSHHEMNGSLTSPGAYAGLHNIPPQMSAAAAAAAAAYGRSPMVSFGAVGFDPHPPMRATGLPSSLASIPGGKPAYSFHVSADGQMQPVPFPHDALAGPGIPRHARQINTLSHGEVVCAVTISNPTRHVYTGGKGCVKIWDISQPGSKSPISQLDCLNRDNYIRSCKLLPDGRTLIVGGEASTLTIWDLASPTPRIKAELTSSAPACYALAISPDAKVCFSCCSDGNIAVWDLHNQTLVRQFQGHTDGASCIDISHDGTKLWTGGLDNTVRSWDLREGRQLQQHDFTSQIFSLGYCPTGEWLAVGMESSNVEVLHHTKPDKYQLHLHESCVLSLKFAYCGKWFVSTGKDNLLNAWRTPYGASIFQSKESSSVLSCDISADDKYIVTGSGDKKATVYEVIY

SEQ ID NO: 41376 - DNA, 2310 bp, Artificial Sequence
  derived and/or modified sequence
atgtacccccagggcagacaccccgccccccaccagcccggccagcccggcttcaagttcaccgtggccgagagctgcgacagaatcaaggacgagttccagttcctgcaggcccagtaccacagcctgaaggtggagtacgacaagctggccaacgagaagaccgagatgcagagacactacgtgatgtactacgagatgagctacggcctgaacatcgagatgcacaagcagaccgagatcgccaagagactgaacaccatcctggcccagatcatgcccttcctgagccaggagcaccagcagcaggtggcccaggccgtggagagagccaagcaggtgaccatgaccgagctgaacgccatcatcggccagcagcagctgcaggcccagcacctgagccacgccacccacggcccccccgtgcagctgcccccccaccccagcggcctgcagccccccggcatcccccccgtgaccggcagcagcagcggcctgctggccctgggcgccctgggcagccaggcccacctgaccgtgaaggacgagaagaaccaccacgagctggaccacagagagagagagagcagcgccaacaacagcgtgagccccagcgagagcctgagagccagcgagaagcacagaggcagcgccgactacagcatggaggccaagaagagaaaggccgaggagaaggacagcctgagcagatacgacagcgacggcgacaagagcgacgacctggtggtggacgtgagcaacgaggaccccgccacccccagagtgagccccgcccacagcccccccgagaacggcctggacaaggccagaagcctgaagaaggacgcccccaccagccccgccagcgtggccagcagcagcagcacccccagcagcaagaccaaggacctgggccacaacgacaagagcagcacccccggcctgaagagcaacacccccacccccagaaacgacgcccccacccccggcaccagcaccacccccggcctgagaagcatgcccggcaagccccccggcatggaccccatcgccagcgccctgagaacccccatcagcatcaccagcagctacgccgcccccttcgccatgatgagccaccacgagatgaacggcagcctgaccagccccggcgcctacgccggcctgcacaacatccccccccagatgagcgccgccgccgccgccgccgccgccgcctacggcagaagccccatggtgagcttcggcgccgtgggcttcgacccccacccccccatgagagccaccggcctgcccagcagcctggccagcatccccggcggcaagcccgcctacagcttccacgtgagcgccgacggccagatgcagcccgtgcccttcccccacgacgccctggccggccccggcatccccagacacgccagacagatcaacaccctgagccacggcgaggtggtgtgcgccgtgaccatcagcaaccccaccagacacgtgtacaccggcggcaagggctgcgtgaagatctgggacatcagccagcccggcagcaagagccccatcagccagctggactgcctgaacagagacaactacatcagaagctgcaagctgctgcccgacggcagaaccctgatcgtgggcggcgaggccagcaccctgaccatctgggacctggccagccccacccccagaatcaaggccgagctgaccagcagcgcccccgcctgctacgccctggccatcagccccgacgccaaggtgtgcttcagctgctgcagcgacggcaacatcgccgtgtgggacctgcacaaccagaccctggtgagacagttccagggccacaccgacggcgccagctgcatcgacatcagccacgacggcaccaagctgtggaccggcggcctggacaacaccgtgagaagctgggacctgagagagggcagacagctgcagcagcacgacttcaccagccagatcttcagcctgggctactgccccaccggcgagtggctggccgtgggcatggagagcagcaacgtggaggtgctgcaccacaccaagcccgacaagtaccagctgcacctgcacgagagctgcgtgctgagcctgaagttcgcctactgcggcaagtggttcgtgagcaccggcaaggacaacctgctgaacgcctggagaaccccctacggcgccagcatcttccagagcaaggagagcagcagcgtgctgagctgcgacatcagcgccgacgacaagtacatcgtgaccggcagcggcgacaagaaggccaccgtgtacgaggtgatctactag

SEQ ID NO: 41377 - DNA, 2325 bp, Artificial Sequence
  derived and/or modified sequence
atgcccccccccccccccctgagctgcctgagaggcctgcaggccccccaccagcccggccagcccggcttcaagttcaccgtggccgagagctgcgacagaatcaaggacgagttccagttcctgcaggcccagtaccacagcctgaaggtggagtacgacaagctggccaacgagaagaccgagatgcagagacactacgtgatgtactacgagatgagctacggcctgaacatcgagatgcacaagcagaccgagatcgccaagagactgaacaccatcctggcccagatcatgcccttcctgagccaggagcaccagcagcaggtggcccaggccgtggagagagccaagcaggtgaccatgaccgagctgaacgccatcatcggccagcagctgcaggcccagcacctgagccacgccacccacggcccccccgtgcagctgcccccccaccccagcggcctgcagccccccggcatcccccccgtgaccggcagcagcagcggcctgctggccctgggcgccctgggcagccaggcccacctgaccgtgaaggacgagaagaaccaccacgagctggaccacagagagagagagagcagcgccaacaacagcgtgagccccagcgagagcctgagagccagcgagaagcacagaggcagcgccgactacagcatggaggccaagaagagaaaggccgaggagaaggacagcctgagcagatacgacagcgacggcgacaagagcgacgacctggtggtggacgtgagcaacgaggaccccgccacccccagagtgagccccgcccacagcccccccgagaacggcctggacaaggccagaagcctgaagaaggacgcccccaccagccccgccagcgtggccagcagcagcagcacccccagcagcaagaccaaggacctgggccacaacgacaagagcagcacccccggcctgaagagcaacacccccacccccagaaacgacgcccccacccccggcaccagcaccacccccggcctgagaagcatgcccggcaagccccccggcatggaccccatcgccagcgccctgagaacccccatcagcatcaccagcagctacgccgcccccttcgccatgatgagccaccacgagatgaacggcagcctgaccagccccggcgcctacgccggcctgcacaacatccccccccagatgagcgccgccgccgccgccgccgccgccgcctacggcagaagccccatggtgagcttcggcgccgtgggcttcgacccccacccccccatgagagccaccggcctgcccagcagcctggccagcatccccggcggcaagcccgcctacagcttccacgtgagcgccgacggccagatgcagcccgtgcccttcccccacgacgccctggccggccccggcatccccagacacgccagacagatcaacaccctgagccacggcgaggtggtgtgcgccgtgaccatcagcaaccccaccagacacgtgtacaccggcggcaagggctgcgtgaagatctgggacatcagccagcccggcagcaagagccccatcagccagctggactgcctgaacagagacaactacatcagaagctgcaagctgctgcccgacggcagaaccctgatcgtgggcggcgaggccagcaccctgaccatctgggacctggccagccccacccccagaatcaaggccgagctgaccagcagcgcccccgcctgctacgccctggccatcagccccgacgccaaggtgtgcttcagctgctgcagcgacggcaacatcgccgtgtgggacctgcacaaccagaccctggtgagacagttccagggccacaccgacggcgccagctgcatcgacatcagccacgacggcaccaagctgtggaccggcggcctggacaacaccgtgagaagctgggacctgagagagggcagacagctgcagcagcacgacttcaccagccagatcttcagcctgggctactgccccaccggcgagtggctggccgtgggcatggagagcagcaacgtggaggtgctgcaccacaccaagcccgacaagtaccagctgcacctgcacgagagctgcgtgctgagcctgaagttcgcctactgcggcaagtggttcgtgagcaccggcaaggacaacctgctgaacgcctggagaaccccctacggcgccagcatcttccagagcaaggagagcagcagcgtgctgagctgcgacatcagcgccgacgacaagtacatcgtgaccggcagcggcgacaagaaggccaccgtgtacgaggtgatctactag

SEQ ID NO: 41378 - DNA, 2310 bp, Artificial Sequence
  derived and/or modified sequence
atgtatccccaggggcgccaccccgccccacaccaacctggtcagcccggcttcaagttcaccgtggccgagtcctgcgaccgaataaaggacgagttccagttccttcaggcccagtaccattcactgaaggtcgaatacgataagctcgcaaacgaaaaaaccgaaatgcagcgccactacgttatgtactacgagatgagttacggcttgaatattgaaatgcacaagcaaactgaaattgcaaagaggcttaacactatcctcgctcagataatgccatttttgtctcaggagcaccaacagcaagttgctcaggccgtagaacgcgctaagcaggttacaatgactgaacttaatgctattattgggcagcaacagctgcaagcgcagcatctgagccatgccactcacggtcctcccgtacaactgccaccccatccctccggtttgcagcccccggggatcccccctgtgaccggatcttccagtggcttacttgcactaggtgctttgggcagtcaagctcatttaaccgtaaaagacgaaaagaatcaccatgaactggatcatagagagagggaatcaagcgctaataacagtgtaagcccctcagagtcgcttagggcaagcgagaagcatcggggctccgcggactatagcatggaggccaagaaaaggaaggccgaagaaaaagatagcctctcaaggtatgactcagacggcgacaagtccgatgatctggtggtggatgtcagcaatgaggatcctgccaccccgcgcgtgagtcctgcccattccccccctgagaacggcctggacaaggcccggtctctgaagaaagacgcccccacaagcccggctagcgtggctagctcttccagtacgcccagcagcaagactaaggacttggggcataacgataagtcaagcacccccggccttaaatctaacacacctaccccaagaaacgatgcccctacccctggcacctctaccaccccaggcctgcgctctatgcccgggaaaccacctggaatggacccgatcgcttctgcactgcggacccctataagcatcacaagttcttacgcggcacctttcgccatgatgtcacaccacgaaatgaatggctccttaaccagccctggggcatacgccggtctccataacatccctcctcaaatgtccgcagcggccgcggctgcagcagcagcgtacgggcggtcacccatggtgagcttcggagctgttggcttcgaccctcacccacctatgcgggcaaccggactccctagttccttagccagtataccggggggaaaacctgcatactccttccatgtgagcgccgacggtcagatgcagccagtgccttttccccacgatgctctggcagggccagggattccacggcacgcacggcagattaataccttgtcccatggagaagtagtctgcgccgtaacaatctccaaccccaccagacacgtgtatacaggaggaaaaggttgcgtaaaaatctgggatatatctcaacctggatctaaaagccctatctcgcagttggattgcctgaaccgcgataactacattaggtcctgcaagcttttgcccgacggcaggactctcatcgtcggtggagaggcttcgaccctaaccatttgggatctggcgagtcctacgcctaggatcaaggccgagctgacttcctctgcccctgcctgctatgcactcgccattagtcctgacgccaaggtttgctttagttgctgtagtgacggaaacatcgcggtttgggatctacataatcagacgcttgtgaggcagtttcaaggccataccgacggcgcaagctgcattgacatctcgcacgatggtaccaagctttggacaggagggctcgacaacacagtgcggtcgtgggatcttagggaaggtagacagttacagcaacacgatttcaccagccaaatctttagcttgggctattgtcccacaggggaatggctggccgtgggcatggagtcttctaatgtcgaggtcttacatcatacgaaaccggacaagtaccaattgcatcttcacgagtcctgtgttctctcccttaagtttgcatattgcggcaaatggtttgtcagcactggcaaggataacctactgaatgcttggaggacgccttacggtgcaagtatctttcagagcaaagaaagttcatctgtactcagttgcgacatatccgctgacgacaaatatattgtcacaggctctggggataagaaggcgaccgtatacgaagtcatctactag

SEQ ID NO: 41379 - DNA, 2325 bp, Artificial Sequence
  derived and/or modified sequence
atgccgcctccaccacctctgtcttgtctgcggggccttcaggcgccacatcagcctggtcagccaggatttaagttcaccgtggccgagagctgtgatagaataaaggatgaatttcaattcctccaggcacagtaccacagcctgaaagttgagtatgataaactggcaaacgagaaaactgaaatgcagaggcattacgtgatgtattatgaaatgtcttacggtttaaacatcgagatgcacaaacagaccgaaatcgccaaacggttgaacacgattctggctcagatcatgcccttcttgtctcaggagcaccagcaacaggtcgcacaggcagtggagcgcgcgaagcaggtaacaatgaccgagcttaatgcaattataggacagcagctccaggcacaacacctgagccatgcaacccacgggcctcctgtgcagttacctccccacccctcagggctgcagccacccggaatacccccagtgactggatcctcctccggcctgctcgccctgggggccttggggtcccaggctcatctcacagtgaaggacgaaaagaaccatcacgagctggatcaccgggagagggaaagctctgccaacaattctgtgtctcctagtgagagccttcgggccagtgaaaagcaccggggcagcgcagactacagcatggaggccaagaagcggaaagctgaagagaaagacagtttatcccgatatgatagcgatggagataagtccgacgacctggttgttgacgtgtctaacgaggatccagcaacaccacgggtgagtccagctcactcaccacccgaaaacggacttgataaggcccgtagcctgaaaaaagacgctcccacaagcccggcctctgttgcctcaagctctagcacgccttcatctaagaccaaggatttgggacataacgataagtcctcaacccctggcttaaaatcaaatactcccacgccaaggaatgatgcccccacccctggcacctctaccacaccggggctgcgaagcatgcctggcaagccacccgggatggacccaatcgccagcgctctgcggactccgatctccatcacctctagttatgcagccccctttgcaatgatgtcgcatcacgagatgaacggcagcctgaccagccctggggcctacgctggcctgcacaacatacctccccagatgtccgcggctgcagccgctgctgcagctgcctatgggagatctcccatggttagtttcggggctgttgggtttgaccctcatcccccaatgagggcaacgggtttaccctcaagccttgcttctattcctggcgggaagcctgcgtacagcttccatgtttctgctgatggccagatgcagcccgttcctttcccccacgacgccctggccggccctggaattccacggcacgcaaggcaaatcaatacgctaagccacggtgaggtggtttgtgccgtaaccataagcaacccaactcggcacgtttatacgggcgggaagggctgtgtcaagatctgggacatctctcagcctggctctaagtcacctatttcacagctcgactgccttaaccgagataattatatacgctcctgtaagctgctgcctgacggaaggaccctcatcgtgggaggcgaggcctcgaccctgacaatttgggatctggcatctcctactccacgtatcaaggccgaactgacctcgagtgccccggcttgttatgccttggccatctcccctgatgccaaggtgtgctttagttgttgttcagatgggaacatcgcggtgtgggatctgcacaaccagaccctagtccgccagtttcaaggacacaccgacggcgcaagttgtatcgatattagccatgatggaaccaagctttggactgggggattggacaatacagtcagatcctgggatctgcgtgaagggcgccaattgcagcagcatgactttaccagccagatcttttccctgggatactgcccgactggcgagtggctcgctgtcggcatggagagttcaaacgtggaggtgttacaccacactaagccagacaagtaccagctacatctgcacgagtcatgtgtgttatcactgaaattcgcgtactgcggcaagtggttcgtgagcacgggaaaggataacttactgaacgcttggaggaccccatatggagcttcaatttttcaaagcaaagagagctcaagcgtactgtcatgcgacatctctgctgacgacaaatatatagtgactggcagtggtgataagaaggcaactgtctacgaagtgatttattag

SEQ ID NO: 41380 - DNA, 2310 bp, Artificial Sequence
  derived and/or modified sequence
atgtacccccagggccgccacccagccccccaccagcccggccagcccggcttcaagttcaccgtggccgagagctgtgaccgcatcaaggatgagttccagttcctgcaggcccagtaccacagcctgaaggtggagtatgacaagctggccaatgagaagacagagatgcagaggcactacgtgatgtactatgagatgtcctatggcctgaacatcgagatgcacaagcagacagaaattgccaagaggctgaacaccatcctggcccagatcatgcccttcctgagccaggagcaccagcagcaggtggcccaggccgtggagcgggccaagcaggtgaccatgacagagctgaatgccatcatcggccagcagcagctgcaggcccagcacctgagccacgccacccacggcccccctgtgcagctgcccccccaccccagcggcctgcagcccccaggcatcccccctgtgacaggcagcagcagcggcctgctggccctgggcgccctgggcagccaggcccacctgactgtgaaggatgagaagaaccaccacgagctggaccaccgggagcgggagagcagcgccaacaacagcgtgagccccagcgagagcctgcgggccagcgagaagcaccggggcagcgctgactacagcatggaggccaagaagaggaaggccgaggagaaggacagcctgagccgctatgacagtgatggagacaagagtgatgacctggtggtggatgtgtccaatgaagatcctgccaccccccgggtgtccccagcccacagccccccagaaaatggcctggacaaggcccggagcctgaagaaggatgcccccaccagccctgcctctgtggccagcagcagcagcacccccagcagcaagaccaaggacctgggccacaatgacaagagcagcaccccaggcctgaagagcaacacccccaccccaagaaatgatgcccccaccccaggcaccagcaccaccccaggcctgcgctccatgcctgggaagcccccaggcatggaccccatcgccagcgccctgcggacccccatcagcatcaccagcagctatgctgccccctttgccatgatgagccaccacgagatgaatggcagcctgaccagccctggggcctatgccggcctgcacaacatccccccccagatgtctgctgctgctgctgctgctgctgctgcctacggccgcagccccatggtgtcctttggagctgtgggctttgacccccacccccccatgagggccaccggcctgcccagcagcctggccagcatccctgggggcaagccagcctacagcttccacgtgtctgcagatggccagatgcagcctgtgcccttcccccatgatgccctggccggccctggcatccccaggcatgcccggcagatcaacaccctgagccacggggaggtggtgtgtgctgtgaccatcagcaaccccaccaggcatgtgtacacaggaggcaagggctgtgtgaagatctgggacatcagccagcccggcagcaagagccccatcagccagctggactgcctgaacagagacaactacatccgcagctgcaagctgctgcctgatggccgcaccctgattgtgggcggggaggccagcaccctgaccatctgggacctggccagccccaccccccgcatcaaggccgagctgaccagcagcgccccagcctgctacgccctggccatcagcccagatgccaaggtgtgcttcagctgctgcagtgatggcaacattgctgtgtgggacctgcacaaccagaccctggtgcggcagttccagggccacacagatggagccagctgcatcgacatcagccatgatggcaccaagctgtggacaggaggcctggacaacacagtgcgctcctgggacctgcgggagggccggcagctgcagcagcacgacttcaccagccagatcttcagcctgggctactgccccactggagagtggctggccgtgggcatggagagcagcaatgtggaggtgctgcaccacaccaagccagacaagtaccagctgcacctgcacgagagctgtgtgctgagcctgaagtttgcctactgtgggaagtggtttgtgtccacaggcaaggacaacctgctgaatgcctggaggaccccctacggggccagcatcttccagagcaaggagagcagctctgtgctgagctgtgacatctctgcagatgacaagtacatcgtgactggaagtggggacaagaaggccaccgtgtatgaagtcatctactag

SEQ ID NO: 41381 - DNA, 2325 bp, Artificial Sequence
  derived and/or modified sequence
atgcctcctcctccacccctgagctgcctgcggggcctgcaggccccccaccagcccggccagcccggcttcaagttcaccgtggccgagagctgtgaccgcatcaaggatgagttccagttcctgcaggcccagtaccacagcctgaaggtggagtatgacaagctggccaatgagaagacagagatgcagaggcactacgtgatgtactatgagatgtcctatggcctgaacatcgagatgcacaagcagacagaaattgccaagaggctgaacaccatcctggcccagatcatgcccttcctgagccaggagcaccagcagcaggtggcccaggccgtggagcgggccaagcaggtgaccatgacagagctgaatgccatcatcggccagcagctgcaggcccagcacctgagccacgccacccacggcccccctgtgcagctgcccccccaccccagcggcctgcagcccccaggcatcccccctgtgacaggcagcagcagcggcctgctggccctgggcgccctgggcagccaggcccacctgactgtgaaggatgagaagaaccaccacgagctggaccaccgggagcgggagagcagcgccaacaacagcgtgagccccagcgagagcctgcgggccagcgagaagcaccggggcagcgctgactacagcatggaggccaagaagaggaaggccgaggagaaggacagcctgagccgctatgacagtgatggagacaagagtgatgacctggtggtggatgtgtccaatgaagatcctgccaccccccgggtgtccccagcccacagccccccagaaaatggcctggacaaggcccggagcctgaagaaggatgcccccaccagccctgcctctgtggccagcagcagcagcacccccagcagcaagaccaaggacctgggccacaatgacaagagcagcaccccaggcctgaagagcaacacccccaccccaagaaatgatgcccccaccccaggcaccagcaccaccccaggcctgcgctccatgcctgggaagcccccaggcatggaccccatcgccagcgccctgcggacccccatcagcatcaccagcagctatgctgccccctttgccatgatgagccaccacgagatgaatggcagcctgaccagccctggggcctatgccggcctgcacaacatccccccccagatgtctgctgctgctgctgctgctgctgctgcctacggccgcagccccatggtgtcctttggagctgtgggctttgacccccacccccccatgagggccaccggcctgcccagcagcctggccagcatccctgggggcaagccagcctacagcttccacgtgtctgcagatggccagatgcagcctgtgcccttcccccatgatgccctggccggccctggcatccccaggcatgcccggcagatcaacaccctgagccatggagaggtggtgtgtgctgtgaccatcagcaaccccaccaggcatgtgtacacaggaggcaagggctgtgtgaagatctgggacatcagccagcccggcagcaagagccccatcagccagctggactgcctgaacagagacaactacatccgcagctgcaagctgctgcctgatggccgcaccctcatcgtgggcggggaggccagcaccctgaccatctgggacctggccagccccaccccccgcatcaaggccgagctgaccagcagcgccccagcctgctacgccctggccatcagcccagatgccaaggtgtgcttcagctgctgcagtgatggcaacattgctgtgtgggacctgcacaaccagaccctggtgcggcagttccagggccacacagatggagccagctgcatcgacatcagccatgatggcaccaagctgtggacaggaggcctggacaacacagtgcgctcctgggacctgcgggagggccggcagctgcagcagcacgacttcaccagccagatcttcagcctgggctactgccccaccggggagtggctggccgtgggcatggagagcagcaatgtggaggtgctgcaccacaccaagccagacaagtaccagctgcacctgcacgagagctgtgtgctgagcctgaagtttgcctactgcggcaagtggtttgtgtccacaggcaaggacaacctgctgaatgcctggaggaccccctatggagccagcatcttccagagcaaggagagcagctctgtgctgagctgtgacatctctgcagatgacaagtacatcgtgacaggcagcggggacaagaaggccaccgtgtatgaggtgatctactag

SEQ ID NO: 41382 - DNA, 2310 bp, Artificial Sequence
  derived and/or modified sequence
atgtacccccagggccggcaccccgccccccaccagcccggccagcccggctttaagttcactgtagcagagtcctgtgaccgtatcaaagacgagttccagttcctccaagctcagtaccacagcctgaaagtggaatatgacaaactagctaacgaaaagaccgagatgcagaggcattacgttatgtattacgaaatgtcctacggtctgaacattgagatgcacaaacaaaccgagatcgctaaacgacttaatacgattttggctcaaattatgcccttcctgtcccaggaacaccaacagcaagtggctcaagccgttgaacgagccaaacaggtgaccatgaccgaactcaacgccattataggtcagcagcaactccaggctcagcatttatctcacgccacacatggccctcctgttcaactgcctcctcacccatcagggcttcagccacccgggatcccgcccgtcacaggtagttcaagcggtctacttgccttgggggctctcggttcgcaggcccacctcacggtgaaagatgaaaaaaatcatcacgaactggaccatagggagcgtgaaagcagcgcaaacaactcagtctcaccctccgagtcactccgtgccagcgagaagcatagaggatccgctgattacagtatggaagctaaaaagcggaaggcagaggaaaaggattccttatccagatatgattccgacggagacaagagcgacgatttagtggtggatgtgagtaacgaagatcctgccaccccacgggtgtctcctgcccactcaccccccgaaaatggcctagataaggcacggagtcttaagaaagacgctcctaccagcccagcaagtgtcgcttcttcatcgagcacaccctcgagcaaaaccaaggacctcggtcataacgacaagtcttctacgcctggcctcaagtcgaacacacctacaccaaggaacgacgcgccaactcccggtacatccaccacaccgggactcaggagcatgcccggaaagccgcccggtatggacccaatcgcatctgctctccgcactcccatctcgatcacttcgtcctatgcggctccctttgccatgatgtcgcatcacgagatgaacggctccttgacctcccctggtgcctacgccggattacacaacattcccccgcagatgtctgccgcagcagcagccgccgccgccgcctacggacgtagccctatggtgtccttcggtgcagtgggtttcgatcctcaccctccgatgagggccactggcttgccatcctccctcgcttctatccccgggggaaaacctgcttatagttttcatgtctcagccgatggacagatgcagcctgtacctttcccgcatgacgcattagcaggcccgggcatacctcgtcacgcccgccagatcaacaccctgagtcacggagaagttgtgtgcgctgtgaccatcagcaacccaacacggcatgtgtacacggggggaaaaggctgtgtgaagatttgggacattagccaacctgggtccaaatccccaatttctcagttggattgcctgaaccgtgataactatatacgaagctgcaaactgctgcccgatggccgaacactcatcgtgggaggggaggcgagtactctgaccatttgggacctggcatcccctacccccaggatcaaggctgagctcacttcttctgcccctgcctgttacgccctcgcaatctctccagatgctaaagtgtgtttttcttgttgttcagacggcaacatcgccgtgtgggacctacacaaccagaccttggtgaggcagttccaaggacataccgatggggcatcctgtatcgacatcagtcatgatggcactaaactgtggaccgggggcctggacaatactgtgcgcagctgggatcttcgagagggaaggcagctgcaacagcacgactttacttcccagatctttagcctcgggtactgccccactggggagtggctggcagtggggatggaatcttcaaatgtggaagtgctgcaccacacgaaacctgataagtatcagcttcatttgcacgagtcatgcgttctgtcattaaaatttgcttactgcggcaagtggttcgtgtcaaccggcaaggacaatctactgaatgcctggaggaccccttatggcgcaagtatattccagtccaaagaaagttcttcggttttgtcttgcgatatatcggcggacgataagtatatagtgacaggaagcggagacaagaaagctaccgtatacgaagtgatttattag

SEQ ID NO: 41383 - DNA, 2325 bp, Artificial Sequence
  derived and/or modified sequence
atgcccccccccccccccctgagctgcctgcggggcctgcaggccccacaccaacctgggcagccagggttcaaatttacagtggctgagagttgcgaccggattaaagacgagttccagttccttcaggctcaatatcatagtctcaaagtggaatacgacaagctcgctaatgagaagaccgagatgcagagacactatgtgatgtactacgagatgagttacgggttaaacattgagatgcataagcaaactgagatcgccaagcggctcaacaccattctggctcagattatgccattcctgtcccaggagcatcagcagcaggtggctcaggctgtggagcgagctaagcaggtcactatgactgagctcaacgccattatcgggcagcaactgcaagcccagcatctgtcgcacgccacccatggaccaccagtccagcttccccctcacccaagcggactccaaccgcctggcatacccccagtaacggggagtagtagcgggctcctagcactgggggccctgggttctcaggcgcatctcacagtgaaggacgaaaagaaccaccatgaactggaccacagggagagggaatcaagcgcaaacaattctgtctcccctagcgagtcgctgcgtgcaagcgaaaagcaccgcgggtctgcagattattccatggaagcgaaaaaacgaaaagctgaggagaaggactctctctccagatatgatagtgacggcgacaaatctgatgatttggtcgtggatgttagcaatgaggaccccgcgacacccagggtcagccccgcacactcacctccggaaaacgggctcgacaaggcaaggagtctgaagaaagatgccccaacgtctccagcctcagtggccagcagcagtagtaccccgagctctaagaccaaagaccttggccacaacgataaatcctccaccccgggtttgaaatctaacactcccacccctcgtaatgatgcacctacaccaggaacctcaacaacccccgggttacggtccatgccaggaaagccccccggaatggaccctatcgcaagcgcactgcgcacccccatctccattacctccagctacgcggctccattcgccatgatgtcccatcatgagatgaatggctccctaacgtctcccggcgcatatgccggtctgcacaacatcccaccacagatgtcagctgctgccgcagccgccgcagctgcttatgggcggtcacctatggtgtcctttggtgccgtcgggttcgaccctcacccccccatgcgggccaccggacttccctctagccttgcctcgatccctggtgggaaaccagcctattcattccatgtcagtgccgacgggcagatgcagccggtgccattcccccatgatgcactggcaggacctggaatccctcgccacgctcgccagatcaatacgttgtcacatggtgaggtggtctgtgcagtgactatttctaaccccacacgtcacgtctataccggcggaaaagggtgtgtgaaaatctgggatatatcgcagccagggtccaaatcccctataagccagttagactgcttaaaccgggataattatattcggtcttgcaaactgcttccagatggccggactctcatcgtcggcggcgaagcatccactctaaccatttgggacctcgcttccccaacaccccgtatcaaagcagaactaacgtcaagcgcccctgcatgctatgctttagcgatttcgccagacgccaaggtgtgcttctcttgctgctctgatggaaacatcgccgtgtgggacctgcacaatcagacactggtccgccagttccagggtcatactgacggtgccagttgcattgacatctcacatgacgggactaagctctggacaggtggacttgataacactgtccgcagttgggaccttagggagggtcggcagttacagcagcacgacttcacatctcagatcttttccctcggatattgtcctacaggggaatggctagccgtcggaatggagtcgtctaacgtggaggtactgcatcacaccaagcctgacaagtaccagctgcatttgcacgagtcatgtgtactaagcctcaaatttgcgtattgcggaaaatggtttgtgtcaacgggaaaagacaacctcttgaatgcatggagaacaccttatggcgcttccattttccaatccaaagaatcctcttctgtgcttagctgcgatattagcgccgatgacaagtacattgtgaccgggtctggggacaaaaaagccaccgtctatgaggtcatctattag

SEQ ID NO: 41384 - DNA, 2310 bp, Artificial Sequence
  derived and/or modified sequence
atgtatccacagggcagacatccagcccctcaccagcctggacagccaggctttaaattcactgtcgccgaaagctgcgatagaatcaaagatgaatttcaatttctgcaggctcagtaccattcacttaaggtagagtatgataagttggccaacgagaaaacagagatgcaacggcattatgttatgtactatgagatgtcttatgggctgaacattgagatgcataagcaaacagaaattgctaagaggctcaacaccattctcgcccagataatgcccttcctctcccaggaacatcaacagcaggtggcacaggccgtggagcgggctaagcaggtgacaatgactgagctgaatgccattattggacagcagcagctgcaggcccagcacctatcacacgctacacatgggccacctgtgcagctgccgcctcacccatcaggactgcagccacccggtatccctcccgtgaccggctcaagctctgggctgttggccctgggcgcactggggtcacaggctcaccttaccgttaaggacgagaagaaccaccacgagcttgatcatagggaaagggagtctagcgccaacaacagcgtttccccatctgagagtttgagagcaagcgaaaaacataggggatcagcagactactctatggaggctaagaaacgcaaggctgaagagaaggattccctgagcaggtacgactccgacggggacaagtccgacgatctggttgtggatgtctcgaacgaggatcccgctactcccagagtctcgcccgctcatagcccaccggagaatggactggacaaagctagatctttgaagaaggatgcgccaaccagtcctgccagtgtggctagctcgtccagtacccccagcagcaagacaaaggacctggggcacaatgacaagtccagcacacctggtttgaaatcaaacactcctactccccgtaatgacgccccaacgccagggacgagcactaccccaggacttagaagtatgcccggtaaacccccaggcatggaccccattgcctccgcgctacgaacacctatatctatcacatcaagctatgccgcaccgttcgctatgatgtcacatcacgaaatgaacggatctcttacatcaccaggcgcttatgcgggactccacaatattccaccgcagatgtcagcagctgcggctgccgctgctgccgcatacggcagatctccaatggtctccttcggagctgtggggtttgaccctcacccaccaatgagagctaccggtctgcccagctccttagccagcatccccggtggcaagcctgcctactctttccacgtttccgctgacggtcagatgcagccggttccattccctcacgatgccttggcgggacctggaatccctagacacgcccgtcagatcaacacattgtcccacggcgaggtggtgtgtgccgtgacaattagcaatccgacaaggcatgtgtatactggagggaaagggtgtgttaagatttgggacatctctcaaccaggcagtaaatccccaatcagccagctagattgtttgaaccgggacaactacatcaggtcgtgcaaactgttaccagatggtagaactctcattgtaggaggcgaggcgtctacccttacgatctgggatctcgcctcacctacgccccgtatcaaggcagaattaacatcaagtgcgcctgcctgttatgctctagctataagtcccgacgccaaggtttgcttttcttgttgctctgatggcaatattgcagtctgggatctgcacaatcaaaccttggtcagacaatttcagggtcatactgatggtgccagctgcatcgatatctctcacgatggcacaaaactctggacaggcggactcgacaacaccgtacggtcttgggacctgagagagggacgccagctacaacaacacgactttaccagccagatattctctcttggatactgcccaactggagagtggctcgcggtcggcatggaatccagcaacgtggaagttcttcatcatactaagccggacaagtaccaactgcacctccatgaatcgtgtgttctgtccctaaagttcgcgtactgtgggaagtggtttgtcagtacaggcaaagataatttgctcaatgcctggaggacgccttacggcgcttccatctttcaaagcaaggaaagctcatcagtcctctcgtgcgatatcagcgctgacgataagtacatcgtgaccgggtctggggataagaaggcgacagtttatgaagtgatttactag

SEQ ID NO: 41385 - DNA, 2325 bp, Artificial Sequence
  derived and/or modified sequence
atgccgccaccgccaccactctcctgcttgagagggctgcaagcccctcaccagccagggcagcctgggttcaaatttacagtagccgagtcttgcgatcgcatcaaggatgaatttcagtttctgcaggcacagtaccattccctaaaggtggagtacgacaaactcgcgaatgagaagacagaaatgcagagacattacgtgatgtattatgagatgagctatgggctgaatatagagatgcataagcagacagagatcgcaaaaaggcttaatacaatcctcgcccagataatgccattcctgtcacaagaacatcaacagcaggtggctcaggccgtggaacgggcaaaacaagttaccatgaccgaactgaacgcgataatcggccagcagctacaggcccagcatttatctcatgcaacccatgggccacccgtgcagctacctccacacccttccggactccagcctccgggaattccgcctgtgactgggagctcgagcgggctgcttgccttgggagctttaggttctcaagcccacctcactgtgaaagacgaaaagaatcaccacgagcttgatcacagggagagggagagctctgcaaacaactcagtaagtcccagtgagtctctgcgcgcttctgagaaacaccgcggtagtgcagattactcaatggaggctaagaagagaaaggctgaggagaaagactcactctctcgctacgactccgacggagacaaatcagacgacctggttgtagacgtatcaaacgaggacccagccacgccaagagtttcaccagcccattcccctcccgagaacgggctggataaggctcggagcctgaagaaggatgcccctaccagccccgcaagcgttgcaagttccagcagcaccccgagttcaaagactaaagacctcggacataacgataaatccagcacccccggtctcaagagcaacacaccaaccccaaggaatgacgcccctacccccggaacttccaccacaccgggattgcgcagtatgccaggaaagcccccaggcatggatcctatagcctctgcgctccgcactccgattagtatcaccagctcttacgctgccccattcgccatgatgagccatcatgagatgaatggcagcttgacgtcgcccggagcttacgctggattgcacaatatcccacctcagatgtctgcggcagccgcagctgccgctgcggcttacggcaggtcgcctatggtttcgttcggagcagttggatttgacccacacccacccatgagagcaaccggactaccatcatcactagcctctatccctggaggtaagccagcttacagtttccacgtatctgcggatgggcagatgcagccggttcctttcccccatgacgcattggctggaccagggatccctcgccacgccaggcaaatcaataccctgagtcatggggaagtggtatgtgccgttaccatctctaaccctactcgacacgtctacaccggtgggaaggggtgcgtgaaaatttgggacatctctcaacctgggagtaaatcgcccatatcccagctcgactgcttgaatcgggacaactatattcgctcttgcaagctgttgcctgatgggaggactctcattgttggcggagaggcgagtacattgacaatatgggatcttgcaagtccgactccccgaatcaaggcggaacttacatcctccgcacctgcttgctatgctctcgccatcagcccagacgccaaagtttgtttcagttgttgtagtgacggcaacatagctgtttgggacctccacaaccagacccttgttaggcagttccagggccacactgacggagccagctgcatcgacattagtcacgacggcactaagctttggacgggcggtctcgataataccgtgcgatcatgggatctgcgggaaggaaggcagctgcagcaacacgactttaccagccagatcttctcactagggtattgcccaactggcgaatggctcgccgtgggaatggaatctagcaatgtcgaggttctacaccacacgaaacctgacaaataccagttgcatctgcatgagtcatgcgtgctgtctctgaagtttgcatactgcggcaaatggtttgtcagcacaggtaaggacaatctgctgaatgcttggcggacaccatacggggctagcatcttccagtcaaaagaatctagctcggtgctaagctgtgacatttccgccgatgacaagtacatcgttacaggttctggggacaagaaagctactgtctatgaagtgatctactag

SEQ ID NO: 41386 - DNA, 5322 bp, Artificial Sequence
  derived and/or modified sequence
agtccctatttggaactgctctcgcggcagttcagacctcgtgctcgtccccttcgcctgtctgtgtgtggtatccgtaggtccggggcacttttttttttggtgtgtgtgtgtgtgcgtgcgcgcgtgtgtgtgtgttgggtgtgtgtgttttgggggtttgccggggcgcggagaggagagccgggccgaggggaaggaaggaagccgtagagctccccggtctcgggctgcgtctcccctccagcgctctcctgcctgtgcgctccgacgcggcagcggcggtggcgctgagcgctcctcggtggggacgcggtgctcaagctgggagcagcgagaaccctttgcggaggcttcccgtgcccgctggacttaggatgccagggcgtttgatttgcacctactgagcccggagttcctccccggccctgggaagggcttgcagcggcggcggcggcggcggcagcggcagtagcagacggaacagcaggctctcctctccgagggggggcgtcgaagcgcccgcgccgggctcccgccctcaccctccggcgctcctgcggccccaagccaccacctcgtagcccgcctccttcctcttctcgccgcgagccccaggcccggacgcctctaggatcggacccgcgcgccccggatgcttggggctgccccggcgcgcccccctacaggcgcgacccgctgagtgacccggagggggcccgagctcgccccaggaggggcccccggcctcgggaccccgcgccggacctgctggggagccgacgatgtccgcgcagtcccaggcattgacgcgctcgacgcagcccagggaaggcggccggccgctgcccgccgagccctaggcgcacaaagcccgcgcccgccgcccggccccggcgcccgccgacgactttgccgcctgctccgcggctctttgtctccacttggggcgggcgcccgactctgggatttcgctgcgagaacgagctgggggggccgggggcgagctctcggtttcccggccgccccccgctcgggctcggctcccccctcccccgcacctccccggcccgggctctcggcgcttccacgctctcggaatcacgacccctccctgccatgtatccgcagggcagacatccggctccccatcaacccgggcagccgggatttaaattcacggtggctgagtcttgtgacaggatcaaagacgaattccagttcctgcaagctcagtatcacagcctcaaagtggagtacgacaagctggcaaacgagaagacggagatgcagcgccattatgtgatgtactatgagatgtcctatggcttgaacattgaaatgcacaagcagacagagattgcgaagagactgaacacaattttagcacagatcatgcctttcctgtcacaagagcaccagcagcaggtggcgcaggcagtggagcgcgccaagcaggtcaccatgacggagctgaacgccatcatcgggcagcagcagctccaggcgcagcacctctcccatgccacacacggccccccggtccagttgccaccccacccgtcaggtctccagcctccaggaatccccccagtgacagggagcagctccgggctgctggcactgggcgccctgggcagccaggcccatctgacggtgaaggatgagaagaaccaccatgaactcgatcacagagagagagaatccagtgcgaataactctgtgtcaccctcggaaagcctccgggccagtgagaagcaccggggctctgcggactacagcatggaagccaagaagcggaaggcggaggagaaggacagcttgagccgatacgacagtgatggagacaagagtgatgatctggtggtggatgtttccaatgaggaccccgcaacgccccgggtcagcccggcacactcccctcctgaaaatgggctggacaaggcccgtagcctgaaaaaagatgcccccaccagccctgcctcggtggcctcttccagtagcacaccttcctccaagaccaaagaccttggtcataacgacaaatcctccacccctgggctcaagtccaacacaccaaccccaaggaacgacgccccaactccaggcaccagcacgaccccagggctcaggtcgatgccgggtaaacctccgggcatggacccgatagcctcggctctgcgcacgcccatctccatcaccagctcctatgcggcgcccttcgccatgatgagccaccatgagatgaacggctccctcaccagtcctggcgcctacgccggcctccacaacatcccaccccagatgagcgccgccgccgctgctgcagccgctgcctatggccgatcgccaatggtgagctttggagctgttggttttgaccctcaccccccgatgcgggccacaggcctcccctcaagcctggcctccattcctggaggaaaaccagcgtactcattccatgtgagtgctgatgggcagatgcagcccgtgcccttcccccacgacgccctggcaggccccggcatcccgaggcacgcccggcagatcaacacactcagccacggggaggtggtgtgtgccgtgaccatcagcaaccccacgaggcacgtctacacaggtggcaagggctgcgtgaagatctgggacatcagccagccaggcagcaagagccccatctcccagctggactgcctgaacagggacaattacatccgctcctgcaagctgctccctgatgggcgcacgctcatcgtgggcggcgaggccagcacgctcaccatctgggacctggcctcgcccacgccccgcatcaaggccgagctgacgtcctcggctcccgcctgttatgccctggccattagccctgacgccaaagtctgcttctcctgctgcagcgatgggaacattgctgtctgggacctgcacaaccagaccctggtcaggcagttccagggccacacagatggggccagctgcatagacatctcccatgatggcaccaaactgtggacagggggcctggacaacacggtgcgctcctgggacctgcgggagggccgacagctacagcagcatgacttcacttcccagatcttctcgctgggctactgccccactggggagtggctggctgtgggcatggagagcagcaacgtggaggtgctgcaccacaccaagcctgacaagtaccagctgcacctgcacgagagctgcgtgctctccctcaagttcgcctactgcggcaagtggttcgtgagcactgggaaagataaccttctcaacgcctggaggacgccttatggagccagcatattccagtctaaagaatcctcgtctgtcttgagttgtgacatttcagcggatgacaaatacattgtaacaggctctggtgacaagaaggccacagtttatgaggtcatctactaaacaagaactccagcagggctgtcaaactctgggagaaaccgactcggctctgacagggagacccccaggcgaggggccccgaggatggcggaggatgggccgcaggcagccgagcgttcagggctgcgctccggccggctgagagggcacgtgccccgtcacagtctggactcctgggcctggattgatgtgtctcacagactcggaagggttctgctcctcctcctccccctgaacaatgctggcagttgctacaaatagatttattggaggcttatggctccggttcccccacagacccgctcatgagtctctgtttgttcttcccttttcttttgccctgtccctcaccttgggtcgggggtgctggagtggaccacaatgttgtgctgggggatgggggggtctctctttgccgattgtgcagtgcacaagatttgtgaaaaatgtaaataacagactcctattgcggactgatcagtgggagaggaggccccttcccaccggaaactctgagtgtgtatttcgcctgctgtatttgtaatccactcgtggtggtggcttttttttttttttttttttaaataaacagatgctctcacctgggaagaggagacagggaggggaaccaattgaagaaagaggagaaaagtcttagagtgtggaaaaggcaaccaggttggccgtaaggtgcctgctggaatgcgtgtgcctccacacgggtctgggcatccggactgataaccagccggccagactgagggatggaaggcactgagatgggggcccgtccaggcggacacccgcagaaatggagctttctgtggtctcttgcactctggctgcctcttgccctctctgtgtctctctttcttggtctctccctctctcctcctcagcctggtctttctctttggtgcacacttagttattgttgtgagcaatggaagttcaaaggaactccctctccagctcttctgaatcttgggacacagcctaaaaaggacaaaaagttagaagacagcatagcaactcagctcagggagctaccagagaaaaatagcaactgatgtgggtgctttttttttttttttaatttgaataaaaagaattagaagtgatgtccttttataaaatgccttctcccccttcccgcctacagtctcttcctctccccttagaggggggaaagtgtataaacctacagggttgtgagtctgaaaagaggatccccctcacccccaccctgggcagagcagtgggggttggggggtgggagagggggacacagatcctggcacactgtggatatttcttgcagattgcagtctcttgtggcccaaacaggttaggtagactatcgcctctggcaggtgccaccttttggtaccaacatgttctgaggtgttaggatttgggttgggttttttttgtttgttttttttttccttttggtctttttttttttctccttttaaagaaaagctaaaggccgctgtgagtcctggtggcaggctctccatggatgtagcatatcgaagataatttttatactgcatttttatggattattttgtaatgtgtgattccgtctgctgaggaggtgggaggggctccagggaaagccacccaccttcagtgaggttgctccccagctgagcgcaccgggcatgggatgtggaggctggcgacacaccctgtgcctctccaaggctgggcgcgtggggcgtccagagtctctctgggtctcagatgtccatctgccacctcttgttaaggctctagccagaagggagggtgagggtagaagaaagttattcccgaagaaaaaaagaatgaaaagtcattgtactgaactgtttttatatttttaaaagttactatttaaaggtt

SEQ ID NO: 41387 - DNA, 3021 bp, Artificial Sequence
  derived and/or modified sequence
cattttgcttgttgctacctttatggtgtgtgtgtttgtgtgtgtgctctcacacaaagggggatgcggccggggggcgccgttgagagaggaggttaattccgcgcgagtggcgcggggggctgcttgtgttccagggggagctgttcacgcggtccccggccccgctctgaagtctcccaactcacccggcttgtctcccgcccccgccttactggggagagggaggcccttggtgaaaggcatgggagccccgctgccgacggggagagatggggcgccccccctccgccccgtcggagagctgagaaacttgctgggaaggttctgggctgagggtggcctcttttggttgggcgccgttggggaggggccggggccgctctgagcgcggtctcatgcccccgccccctcccctgtcttgtcttcgcgggctccaggctccccatcaacccgggcagccgggatttaaattcacggtggctgagtcttgtgacaggatcaaagacgaattccagttcctgcaagctcagtatcacagcctcaaagtggagtacgacaagctggcaaacgagaagacggagatgcagcgccattatgtgatgtactatgagatgtcctatggcttgaacattgaaatgcacaagcagacagagattgcgaagagactgaacacaattttagcacagatcatgcctttcctgtcacaagagcaccagcagcaggtggcgcaggcagtggagcgcgccaagcaggtcaccatgacggagctgaacgccatcatcgggcagcagctccaggcgcagcacctctcccatgccacacacggccccccggtccagttgccaccccacccgtcaggtctccagcctccaggaatccccccagtgacagggagcagctccgggctgctggcactgggcgccctgggcagccaggcccatctgacggtgaaggatgagaagaaccaccatgaactcgatcacagagagagagaatccagtgcgaataactctgtgtcaccctcggaaagcctccgggccagtgagaagcaccggggctctgcggactacagcatggaagccaagaagcggaaggcggaggagaaggacagcttgagccgatacgacagtgatggagacaagagtgatgatctggtggtggatgtttccaatgaggaccccgcaacgccccgggtcagcccggcacactcccctcctgaaaatgggctggacaaggcccgtagcctgaaaaaagatgcccccaccagccctgcctcggtggcctcttccagtagcacaccttcctccaagaccaaagaccttggtcataacgacaaatcctccacccctgggctcaagtccaacacaccaaccccaaggaacgacgccccaactccaggcaccagcacgaccccagggctcaggtcgatgccgggtaaacctccgggcatggacccgatagcctcggctctgcgcacgcccatctccatcaccagctcctatgcggcgcccttcgccatgatgagccaccatgagatgaacggctccctcaccagtcctggcgcctacgccggcctccacaacatcccaccccagatgagcgccgccgccgctgctgcagccgctgcctatggccgatcgccaatggtgagctttggagctgttggttttgaccctcaccccccgatgcgggccacaggcctcccctcaagcctggcctccattcctggaggaaaaccagcgtactcattccatgtgagtgctgatgggcagatgcagcccgtgcccttcccccacgacgccctggcaggccccggcatcccgaggcacgcccggcagatcaacacactcagccacggggaggtggtgtgtgccgtgaccatcagcaaccccacgaggcacgtctacacaggtggcaagggctgcgtgaagatctgggacatcagccagccaggcagcaagagccccatctcccagctggactgcctgaacagggacaattacatccgctcctgcaagctgctccctgatgggcgcacgctcatcgtgggcggcgaggccagcacgctcaccatctgggacctggcctcgcccacgccccgcatcaaggccgagctgacgtcctcggctcccgcctgttatgccctggccattagccctgacgccaaagtctgcttctcctgctgcagcgatgggaacattgctgtctgggacctgcacaaccagaccctggtcaggcagttccagggccacacagatggggccagctgcatagacatctcccatgatggcaccaaactgtggacagggggcctggacaacacggtgcgctcctgggacctgcgggagggccgacagctacagcagcatgacttcacttcccagatcttctcgctgggctactgccccactggggagtggctggctgtgggcatggagagcagcaacgtggaggtgctgcaccacaccaagcctgacaagtaccagctgcacctgcacgagagctgcgtgctctccctcaagttcgcctactgcggcaagtggttcgtgagcactgggaaagataaccttctcaacgcctggaggacgccttatggagccagcatattccagtctaaagaatcctcgtctgtcttgagttgtgacatttcagcggatgacaaatacattgtaacaggctctggtgacaagaaggccacagtttatgaggtcatctactaaacaagaactccagcagggctgtcaaactctgggagaaaccgactcggctctgacagggagacccccaggcgaggggccccgaggatggcggaggatgggccgcaggcagccgagcgttcagggctgcgctccggccggctgagagggcacgtgccccgtcacagtctggactcctgggcctggattgatgtgtctcacagactcggaagggttctgctcctcctcctccccctgaacaatgctggcagttgctacaaatagatttattggaggcttatggctccggttcccccacaga

SEQ ID NO: 41388 - protein, 861 aa, Artificial Sequence
  derived and/or modified sequence
MELKRGKTFIKSSLQVSHEKPPDPAAVAAAREGTGPWSVLPGGQQRPHSEKGPQASPSAQEYDRCPNKGAQLDPKGGPAALCGATFKPVRKCKTHDSMSGAGRATAATGQLVGSASFPGSPGSRRMIDYRHFVPQMPFVPAVAKSIPRKRISLKRPKKCFRNLFHIRRNKTEDLASLAAEGKSLPSPGDPSDPGGRRSKAFLPPGEGPGLDGLCQDLLDSELLADASFGLCRALCEDVASLQSFDSLTGCGEVFADESSVPSLELNEGPESPTQAAQGLESKVPRGPLQGSVEQLASPAQNEASDFTRFWDSVNRSVRQQQRALLGPWLSGPQGTDRDQSRLDTAGLAELPLCPCRDPRSGSKASSIDTGTPKSEQPESVSTSDEGYYDSFSPGLEEDKKEAESPGTPAATFPRDSYSGDALYELFHDPSEGPLGPSPDDDLCVSESLSGPALGTPLSICSFRVGAEENLAPAPGPDLLSQGFLQSSWKGKECLLKLCDTELAITMGIVSWLRRGPTPRAPPTPGQPAAPPGSQGAPRAPTEKLGGREGLASDAGGATVCSAPSRQELWAHPGTTGLLAGESKALGGATQGTGTLSRDASREEETRGHSEGLFSSMESAATSTTDTSGKNKAPVPSTWPCSQKEPGPPGVLGCFRGPWRPGHGGDTLDAEPMLAGCVARVAALKISSNEQPPAAWPPRQDMGSGLFGQRWARGPDMLEQKQSSSSPSMTTIHGLPYSASTQDQRCRDRVQDLSWLRVEPTGLGVQAWASVEDQPLQLSTEAVEQVAHGSQLDSEPRSAPAARWSSQGHHPESLGLTLNSQQEGGVSASAPECRCSLLAREGLLCGQPEVGASGPAMAEPHL

SEQ ID NO: 41389 - protein, 142 aa, Artificial Sequence
  derived and/or modified sequence
MELKRGKTFIKSSLQVSHEKPPDPAAVAAAREGTGPWSVLPGGQQRPHSEKGPQASPSAQEYDRCPNKGAQLDPKGGPAALCGATFKPVRKCKTHDSMSGAGRATAATGQLVGSASFPGSPGSRRMIDYRHFVPQMPFVPAV

SEQ ID NO: 41390 - protein, 180 aa, Artificial Sequence
  derived and/or modified sequence
MELKRGKTFIKSSLQVSHEKPPDPAAVAAAREGTGPWSVLPGGQQRPHSEKGPQASPSAQEYDRCPNKGAQLDPKGGPAALCGATFKPVRKCKTHDSMSGAGRATAATGQLVGSASFPGSPGSRRMIDYRHFVPQMPFVPAVAKSIPRKRISLKRPKKCFRNLFHIRRNKTEDLASLAAE

SEQ ID NO: 41391 - DNA, 2586 bp, Artificial Sequence
  derived and/or modified sequence
atggagctgaagagaggcaagaccttcatcaagagcagcctgcaggtgagccacgagaagccccccgaccccgccgccgtggccgccgccagagagggcaccggcccctggagcgtgctgcccggcggccagcagagaccccacagcgagaagggcccccaggccagccccagcgcccaggagtacgacagatgccccaacaagggcgcccagctggaccccaagggcggccccgccgccctgtgcggcgccaccttcaagcccgtgagaaagtgcaagacccacgacagcatgagcggcgccggcagagccaccgccgccaccggccagctggtgggcagcgccagcttccccggcagccccggcagcagaagaatgatcgactacagacacttcgtgccccagatgcccttcgtgcccgccgtggccaagagcatccccagaaagagaatcagcctgaagagacccaagaagtgcttcagaaacctgttccacatcagaagaaacaagaccgaggacctggccagcctggccgccgagggcaagagcctgcccagccccggcgaccccagcgaccccggcggcagaagaagcaaggccttcctgccccccggcgagggccccggcctggacggcctgtgccaggacctgctggacagcgagctgctggccgacgccagcttcggcctgtgcagagccctgtgcgaggacgtggccagcctgcagagcttcgacagcctgaccggctgcggcgaggtgttcgccgacgagagcagcgtgcccagcctggagctgaacgagggccccgagagccccacccaggccgcccagggcctggagagcaaggtgcccagaggccccctgcagggcagcgtggagcagctggccagccccgcccagaacgaggccagcgacttcaccagattctgggacagcgtgaacagaagcgtgagacagcagcagagagccctgctgggcccctggctgagcggcccccagggcaccgacagagaccagagcagactggacaccgccggcctggccgagctgcccctgtgcccctgcagagaccccagaagcggcagcaaggccagcagcatcgacaccggcacccccaagagcgagcagcccgagagcgtgagcaccagcgacgagggctactacgacagcttcagccccggcctggaggaggacaagaaggaggccgagagccccggcacccccgccgccaccttccccagagacagctacagcggcgacgccctgtacgagctgttccacgaccccagcgagggccccctgggccccagccccgacgacgacctgtgcgtgagcgagagcctgagcggccccgccctgggcacccccctgagcatctgcagcttcagagtgggcgccgaggagaacctggcccccgcccccggccccgacctgctgagccagggcttcctgcagagcagctggaagggcaaggagtgcctgctgaagctgtgcgacaccgagctggccatcaccatgggcatcgtgagctggctgagaagaggccccacccccagagccccccccacccccggccagcccgccgccccccccggcagccagggcgcccccagagcccccaccgagaagctgggcggcagagagggcctggccagcgacgccggcggcgccaccgtgtgcagcgcccccagcagacaggagctgtgggcccaccccggcaccaccggcctgctggccggcgagagcaaggccctgggcggcgccacccagggcaccggcaccctgagcagagacgccagcagagaggaggagaccagaggccacagcgagggcctgttcagcagcatggagagcgccgccaccagcaccaccgacaccagcggcaagaacaaggcccccgtgcccagcacctggccctgcagccagaaggagcccggcccccccggcgtgctgggctgcttcagaggcccctggagacccggccacggcggcgacaccctggacgccgagcccatgctggccggctgcgtggccagagtggccgccctgaagatcagcagcaacgagcagccccccgccgcctggccccccagacaggacatgggcagcggcctgttcggccagagatgggccagaggccccgacatgctggagcagaagcagagcagcagcagccccagcatgaccaccatccacggcctgccctacagcgccagcacccaggaccagagatgcagagacagagtgcaggacctgagctggctgagagtggagcccaccggcctgggcgtgcaggcctgggccagcgtggaggaccagcccctgcagctgagcaccgaggccgtggagcaggtggcccacggcagccagctggacagcgagcccagaagcgcccccgccgccagatggagcagccagggccaccaccccgagagcctgggcctgaccctgaacagccagcaggagggcggcgtgagcgccagcgcccccgagtgcagatgcagcctgctggccagagagggcctgctgtgcggccagcccgaggtgggcgccagcggccccgccatggccgagccccacctgtag

SEQ ID NO: 41392 - DNA, 429 bp, Artificial Sequence
  derived and/or modified sequence
atggagctgaagagaggcaagaccttcatcaagagcagcctgcaggtgagccacgagaagccccccgaccccgccgccgtggccgccgccagagagggcaccggcccctggagcgtgctgcccggcggccagcagagaccccacagcgagaagggcccccaggccagccccagcgcccaggagtacgacagatgccccaacaagggcgcccagctggaccccaagggcggccccgccgccctgtgcggcgccaccttcaagcccgtgagaaagtgcaagacccacgacagcatgagcggcgccggcagagccaccgccgccaccggccagctggtgggcagcgccagcttccccggcagccccggcagcagaagaatgatcgactacagacacttcgtgccccagatgcccttcgtgcccgccgtgtag

SEQ ID NO: 41393 - DNA, 543 bp, Artificial Sequence
  derived and/or modified sequence
atggagctgaagagaggcaagaccttcatcaagagcagcctgcaggtgagccacgagaagccccccgaccccgccgccgtggccgccgccagagagggcaccggcccctggagcgtgctgcccggcggccagcagagaccccacagcgagaagggcccccaggccagccccagcgcccaggagtacgacagatgccccaacaagggcgcccagctggaccccaagggcggccccgccgccctgtgcggcgccaccttcaagcccgtgagaaagtgcaagacccacgacagcatgagcggcgccggcagagccaccgccgccaccggccagctggtgggcagcgccagcttccccggcagccccggcagcagaagaatgatcgactacagacacttcgtgccccagatgcccttcgtgcccgccgtggccaagagcatccccagaaagagaatcagcctgaagagacccaagaagtgcttcagaaacctgttccacatcagaagaaacaagaccgaggacctggccagcctggccgccgagtag

SEQ ID NO: 41394 - DNA, 2586 bp, Artificial Sequence
  derived and/or modified sequence
atggagctaaagcgcgggaaaactttcataaagagtagtctccaggtatctcacgagaaaccgcctgaccctgccgccgtcgccgcggcccgagagggaacgggtccatggtccgtactgccaggtggccaacagaggcctcactccgaaaaaggtccccaggcgagcccatcggctcaagagtatgatcggtgcccaaataaaggcgcacaactcgatcctaagggaggacccgctgctctgtgcggggctaccttcaaaccagttagaaaatgcaagacccatgacagcatgagtggcgccggccgggctactgctgccaccgggcagctggtgggttcagccagttttcccgggagtccgggttcaagacggatgatcgactaccggcacttcgtaccgcagatgccattcgtgcccgccgtggccaagagtattcctagaaaacgcatctctctcaaaaggcctaaaaaatgctttaggaatctctttcatattcggagaaataagaccgaagatctggcctcccttgcagcggaggggaagtccctgccgtccccaggcgacccttctgatccgggtgggcggcggagtaaagccttcttacctcctggcgagggcccaggactcgatggactgtgccaggacctcttagattctgagctcttggcagacgcaagtttcggactttgcagggcactctgtgaggacgtagcctcactccaaagcttcgacagccttacagggtgcggcgaggtgtttgctgacgaaagttctgtgcctagcctggagctcaatgaaggtccggagtctcctacgcaggctgctcagggcctggagagcaaggtgcctaggggacccctccaaggatccgttgagcaacttgcttcgcctgcccagaacgaggccagcgatttcacacgcttctgggattcagtgaatagatcagtgcgacagcagcaaagagccctgctgggcccttggctctctggaccccagggaacggatagggatcagtcacggctggatactgctggactcgccgaactgccgctgtgtccctgccgcgaccctagaagcggttcaaaggcaagcagcatcgacacaggcacacccaagtcagaacagcccgaatcagtttccacttccgacgaagggtattatgacagcttctctcccggcctagaggaggacaaaaaagaggccgagagccctggtactcctgcggcaacctttcccagagactcttacagcggggatgcactgtacgagctgttccatgaccccagcgaaggccctttaggtccgagtccggacgacgatttatgtgtgagcgagtcactatccggccccgcgttagggactcccttatcaatctgttcttttagagtgggcgccgaagaaaatctggctcctgcaccaggtcctgacctgctaagccagggatttctgcagtcttcatggaaagggaaagagtgcttgctgaagctgtgcgataccgagttggcaattaccatgggcatcgtcagttggttgagacgaggaccgacaccgagggctccccctacaccaggacagcccgcagccccccctggatctcagggcgcaccccgggctcctacagagaagcttgggggacgcgaggggctggcttctgacgcgggaggggctacagtctgttccgccccgagccggcaggaattgtgggcccacccgggcaccactggtttactggctggcgagagcaaggccctgggcggagccactcagggcacaggcacactgagccgggatgccagccgggaagaggaaaccagaggacactcggagggattattctccagcatggagagcgcagctacttccacaactgacacgtctggaaagaacaaggcgcctgtccctagtacatggccctgttcccagaaagaaccaggccctcccggcgtgctcggatgttttaggggtccttggcgaccgggacatgggggtgatacactggacgctgaacctatgctcgctggttgtgtcgcgcgagtagctgccctgaaaatttcatccaatgagcagcctccagctgcttggcccccaaggcaagatatggggagtggcctgttcggacagagatgggcccggggcccggatatgctcgagcagaaacaatcaagtagttcgccttcaatgacaaccattcacggtctgccttacagcgccagcacgcaggaccaacggtgccgcgaccgtgtgcaggatctgagttggctgcgggtggagccaacgggcctgggtgtgcaggcttgggcatcagtagaggatcagccgctccagctatcaaccgaagcagtggagcaggtagctcatggctcacagctggacagcgagcctcggtcagcgcctgccgcccgatggtctagtcaaggacaccatccagagagcctggggctgacactcaactctcagcaggagggcggggtatctgcttccgcaccggaatgtcggtgcagcctcctggcccgagagggattgctgtgcgggcagcccgaagtcggcgctagcggccccgctatggcagagccacacctttag

SEQ ID NO: 41395 - DNA, 2586 bp, Artificial Sequence
  derived and/or modified sequence
atggaactgaagcggggaaaaacttttataaagtcgtccctgcaagtatctcacgagaagccacccgaccccgcagccgtggctgccgccagggaggggacgggcccgtggagtgtgttgcctggcggacagcagcgtccccatagcgagaagggtcctcaggcaagcccttccgcccaagagtatgatagatgtccaaacaagggcgcccagctcgaccctaaaggcggtcctgctgctctttgtggcgcaacttttaaaccggtgcggaagtgcaaaacccacgacagcatgtccggggctgggcgtgctactgctgccaccgggcagctggtgggatccgcctccttccctggctctcccgggtccagacgcatgatagattatcggcatttcgttccccaaatgccctttgtgccagcagtcgccaaaagcattcctcgcaaaaggatttcgctgaagcggcccaaaaaatgctttaggaaccttttccatattcggcgaaacaaaaccgaggatcttgcatcactcgctgccgaaggcaagtccttacccagcccgggtgatccttctgatccgggcggtaggagatccaaggcattcttgcctcccggtgagggtccaggcctggacggcctctgccaggatctcttggactctgagcttttggctgatgcttcgttcggcctctgcagggcactgtgcgaggacgtcgcatcactgcagtcctttgactcacttaccggctgtggggaagtcttcgccgacgaatcgtccgttccgagcttggagctaaatgagggacctgagagccccactcaggctgctcagggtttagagtctaaagtgccccgcggcccgctccagggctctgtggaacaattggcctctcccgcccaaaatgaagcatcagattttactcggttttgggatagtgttaatcgtagtgtgcggcagcagcaaagagccctgctcgggccttggctgtccggtcctcagggcaccgatcgagatcagagcaggctggacacagctggccttgctgagttgcccctgtgcccatgtagggatccccggtcaggaagtaaagcttcctctattgacactggaacgccaaagtccgagcagcctgaatcagtgtcgacgtcagacgaaggctactacgactccttcagccctgggctggaagaagacaagaaagaggcagagtcccccggcacccccgctgctacttttccaagggattcctattccggggatgccctgtacgaactgttccacgatccatcagaagggcccttaggcccgagtccagacgatgatctatgcgtctctgagtccctttcaggacccgcactaggcactcccctgagcatttgtagcttccgcgttggtgctgaagagaacttagcacctgcccccggtcccgatctcctgtcacaaggattcttgcagtctagttggaaaggtaaggagtgccttctcaagttatgcgatacggaactggccattaccatgggcatcgtatcctggttgagaagagggccaaccccccgggcgccacccactccaggccagcccgccgccccgccaggcagccagggggcgccccgggcaccaactgagaaactggggggtagagagggcctcgctagcgacgctggcggtgctacagtttgcagtgccccatctcgccaggaactgtgggcccatccaggtacaaccgggcttctagccggtgaatctaaggcgcttggcggcgccacgcaaggcacaggaacactcagccgtgatgcgtctcgcgaggaagaaacccgagggcactccgagggacttttctccagtatggagtccgccgccaccagcactactgataccagcggtaagaataaggcacctgttccaagtacgtggccttgcagccaaaaggaacccggcccccctggagtgctgggttgctttaggggcccatggcggccagggcacggcggagacaccctggacgctgagcctatgttggcaggatgtgtggcaagggtcgctgccctcaaaattagcagcaatgaacaacccccagctgcctggccccctagacaagatatgggcagtgggctgttcggccagcggtgggccaggggacctgacatgttggaacaaaaacagagctcaagttccccttcaatgaccactatccacgggctcccctactctgctagtacccaggatcagcgatgtcgggatcgcgtgcaggacctgtcatggctgcgcgtcgagcccaccggtctaggagtgcaggcctgggcatccgtcgaggatcagcccttacaattaagcaccgaggccgttgaacaggtggcacatggaagccagctagacagtgaaccgcgatcggcccccgccgcacgctggagttctcagggacatcaccctgagagtttggggctgaccttgaattcgcagcaggaggggggagtttcagcgagtgctccggagtgcagatgttcgctcctggcaagggagggactcctgtgcgggcagccggaggttggtgccagcggccccgcgatggccgaacctcacttgtag

SEQ ID NO: 41396 - DNA, 429 bp, Artificial Sequence
  derived and/or modified sequence
atggagctaaaaagaggaaagaccttcatcaagtcctccctccaggtttcacacgaaaagccgccggatccagccgccgtggcggctgcacgcgaggggactggcccatggtcagtactgccagggggacagcaacgcccccatagcgaaaaagggcctcaggccagcccaagtgctcaggagtacgaccgctgtcccaataagggggcccagctggaccctaagggaggtcctgcagctttatgcggggcgacattcaaacccgtgcgcaaatgtaagacccacgactctatgtccggtgccggacgcgccacggccgccaccggccagctggtgggaagcgccagcttcccggggtctccagggtcacgacgcatgattgactacaggcattttgtgcctcagatgcctttcgtcccagctgtgtag

SEQ ID NO: 41397 - DNA, 543 bp, Artificial Sequence
  derived and/or modified sequence
atggagcttaagcgcggtaagaccttcataaagagcagcttgcaggtcagtcatgaaaaaccccccgatcctgcagctgtcgctgcagcccgagaggggacgggcccttggagcgtccttcccggaggccagcagaggcctcacagtgaaaaggggcctcaagcaagtcccagcgcacaggaatacgacagatgcccaaataagggggcccagctcgatccaaagggtggacctgcagctctgtgtggcgccacttttaaaccggtgaggaaatgcaagacacacgattcaatgtccggggccgggcgcgccactgccgcgaccgggcaactggttggatctgcatccttccctggctctccaggctcccgtaggatgattgactaccggcactttgtgccacagatgccttttgtcccagcagtggctaaaagtatcccaagaaaaagaatttccctgaaacggccaaaaaagtgcttccgaaatctgttccacattagacgaaataaaacagaggatctggcctccctcgctgccgaatag

SEQ ID NO: 41398 - DNA, 3273 bp, Artificial Sequence
  derived and/or modified sequence
atcagcctctccccagcaccgactgtgcgctcccgctcccccctcctccccacaaccccgccccacactactggcactgctgcctgagccttcctggagttacttaatccaccccagccccaggcactgaaccacgcgtgcagacccctcgtcctcagttctgcggagacagagtccccacagcatttctgctcctccctcaagactgcggcagagcacagcaccagtagaccccacacacagctggggcactggcagcatggagctgaagagaggaaagaccttcatcaagtccagcctgcaggtttcccacgagaaacccccagacccagcagccgtggctgcagccagggaggggacaggcccctggtcagtccttccaggagggcaacagaggccccacagtgagaagggcccccaagccagccccagtgcccaagaatacgacagatgccccaacaaaggggcgcagctggaccccaaagggggacccgcagccctctgtggagccaccttcaaaccggtgcgaaagtgcaagactcacgacagcatgtctggggcaggcagggccacggctgccacagggcagctggtgggcagtgcaagcttcccgggctccccgggcagccggcgcatgatcgactaccgccactttgtgccccagatgccctttgtgccagctgtggccaagagcatcccgaggaagaggatttccctgaagaggcccaagaagtgctttcggaacctattccacattcggagaaacaagactgaggacttggcctcgctggcggccgaggggaaaagcctgccctccccaggggacccgtcagaccctggggggcggcgaagcaaagccttcctccccccgggtgaggggccggggctggacggcctgtgccaggacctgttggacagcgagctcctggccgatgcatcctttggtctctgcagggccctgtgtgaggacgtggcctcactccagagcttcgactcgctcacgggttgtggggaggtgttcgcagatgagagctcggtgccatctctggagctgaacgagggcccggagagcccaacccaggctgctcagggcctggagagcaaggttcccaggggccctctccagggcagtgtggagcagctggcctcgcccgcccagaatgaagcctctgacttcaccaggttctgggacagtgtgaatcgctcagtgcgtcagcagcagcgtgccctcctaggcccgtggctttcaggcccccaggggacagacagggaccaatcccggctggacacagctgggctcgctgagctgcccctctgcccctgcagggaccctcgcagcggctccaaagccagctccatcgacacaggcacccccaagagcgagcagcccgaatccgtgtccacaagtgacgagggctactatgattccttctcgccaggacttgaggaggacaagaaggaagctgagagcccaggcactcctgccgccaccttcccacgggacagctacagtggggacgccctctacgagctcttccacgaccccagcgagggtcctcttggccccagcccagatgatgacctgtgcgtgtctgagagtctgtcagggccggccctggggacgccactgtccatatgcagcttccgagtgggggccgaggagaacttggccccagcaccaggccctgacctgctcagccagggcttcctacagagctcctggaagggcaaggagtgcctgctgaagctgtgtgacactgagctcgccatcaccatgggcatcgtcagctggctgcgccgaggccccacgccccgtgccccacccacccctgggcagcctgcagctccacctggttcccagggagcccctagggcacccacagagaagctggggggcagggagggcctggcctcagatgcagggggggcgacagtttgctcagcacccagcaggcaggagctgtgggcacacccgggcaccacaggcctgctcgccggagagagcaaggccctcggaggggccacacaagggactggcacactgtccagggatgcctctcgagaggaagagacacgaggtcactctgaaggcttgttctcctctatggagtctgcagccacttcgacaacagatacttccggtaaaaataaggccccagttccttctacctggccctgctcccagaaggagcctgggccaccaggggtcctggggtgtttccgaggcccctggaggccaggtcacggaggtgacactctggatgcagagcccatgctggcaggctgtgtggcccgtgtggcagccctgaagatcagctcaaacgaacagcccccggccgcatggcctccaaggcaagacatgggcagtgggctctttgggcagcgctgggccaggggccctgacatgctggagcagaaacagtccagcagctcccccagcatgaccaccatccatggcctaccctactcagccagcacacaggaccagaggtgtcgagatcgtgtccaggacctgagctggctcagggtggagcccaccgggctaggtgtccaggcctgggcctctgtggaggaccagcccttgcagctcagcacagaggctgtggagcaggtggcacacggcagccagctggactctgagccccgctcagcccctgctgcccggtggagttcccagggccaccatccagaaagcctgggcctcactttgaacagccagcaggaagggggggtctctgcaagtgccccagaatgccgctgcagcctcctggcccgtgagggcctcctctgtggccagccagaagtgggggcctctgggccagccatggctgagccccatctgtaggacaggctcacatgcaccaggaactgcatgtgtcttcatgaccactttcaggagagcctaggactcaaatctctatcttttgtccctgatgtggggactgtgttgggggtggggggtggcaggactcaggcatgcagagggtagcatgttcatgtggaggcatccttgcctgaacccaccagctcaggcagcccaccgccaaagacagcgcgaagctgcaaccacctagctgctcctcatgcaggggctggagagaggggctagggcttgaaactgagggggagaaagagctgcacattgtaaatgggaagcagagagccaatgagtctgcctgggatgtgtgtgaatcccaaaagacgcaatcccaaatgccatagtcccaagtgttgagaatccaaaatattaaaattactatactctaaaatccg

SEQ ID NO: 41399 - DNA, 6172 bp, Artificial Sequence
  derived and/or modified sequence
gagctgaccgtggtgctgagcgcggctcgcgctccgacgcggtgcccgagcctgtcgcggccgcgccctgctgcactgcgggcccccagcgcagctggggcactggcagcatggagctgaagagaggaaagaccttcatcaagtccagcctgcaggtttcccacgagaaacccccagacccagcagccgtggctgcagccagggaggggacaggcccctggtcagtccttccaggagggcaacagaggccccacagtgagaagggcccccaagccagccccagtgcccaagaatacgacagatgccccaacaaaggggcgcagctggaccccaaagggggacccgcagccctctgtggagccaccttcaaaccggtgcgaaagtgcaagactcacgacagcatgtctggggcaggcagggccacggctgccacagggcagctggtgggcagtgcaagcttcccgggctccccgggcagccggcgcatgatcgactaccgccactttgtgccccagatgccctttgtgccagctgtggccaagagcatcccgaggaagaggatttccctgaagaggcccaagaagtgctttcggaacctattccacattcggagaaacaagactgaggacttggcctcgctggcggccgaggggaaaagcctgccctccccaggggacccgtcagaccctggggggcggcgaagcaaagccttcctccccccgggtgaggggccggggctggacggcctgtgccaggacctgttggacagcgagctcctggccgatgcatcctttggtctctgcagggccctgtgtgaggacgtggcctcactccagagcttcgactcgctcacgggttgtggggaggtgttcgcagatgagagctcggtgccatctctggagctgaacgagggcccggagagcccaacccaggctgctcagggcctggagagcaaggttcccaggggccctctccagggcagtgtggagcagctggcctcgcccgcccagaatgaagcctctgacttcaccaggttctgggacagtgtgaatcgctcagtgcgtcagcagcagcgtgccctcctaggcccgtggctttcaggcccccaggggacagacagggaccaatcccggctggacacagctgggctcgctgagctgcccctctgcccctgcagggaccctcgcagcggctccaaagccagctccatcgacacaggcacccccaagagcgagcagcccgaatccgtgtccacaagtgacgagggctactatgattccttctcgccaggacttgaggaggacaagaaggaagctgagagcccaggcactcctgccgccaccttcccacgggacagctacagtggggacgccctctacgagctcttccacgaccccagcgagggtcctcttggccccagcccagatgatgacctgtgcgtgtctgagagtctgtcagggccggccctggggacgccactgtccatatgcagcttccgagtgggggccgaggagaacttggccccagcaccaggccctgacctgctcagccagggcttcctacagagctcctggaagggcaaggagtgcctgctgaagctgtgtgacactgagctcgccatcaccatgggcatcgtcagctggctgcgccgaggccccacgccccgtgccccacccacccctgggcagcctgcagctccacctggttcccagggagcccctagggcacccacagagaagctggggggcagggagggcctggcctcagatgcagggggggcgacagtttgctcagcacccagcaggcaggagctgtgggcacacccgggcaccacaggcctgctcgccggagagagcaaggccctcggaggggccacacaagggactggcacactgtccagggatgcctctcgagaggaagagacacgaggtcactctgaaggcttgttctcctctatggagtctgcagccacttcgacaacagatacttccggtaaaaataaggccccagttccttctacctggccctgctcccagaaggagcctgggccaccaggggtcctggggtgtttccgaggcccctggaggccaggtcacggaggtgacactctggatgcagagcccatgctggcaggctgtgtggcccgtgtggcagccctgaagatcagctcaaacgaacagcccccggccgcatggcctccaaggcaagacatgggcagtgggctctttgggcagcgctgggccaggggccctgacatgctggagcagaaacagtccagcagctcccccagcatgaccaccatccatggcctaccctactcagccagcacacaggaccagaggtgtcgagatcgtgtccaggacctgagctggctcagggtggagcccaccgggctaggtgtccaggcctgggcctctgtggaggaccagcccttgcagctcagcacagaggctgtggagcaggtggcacacggcagccagctggactctgagccccgctcagcccctgctgcccggtggagttcccagggccaccatccagaaagcctgggcctcactttgaacagccagcaggaagggggggtctctgcaagtgccccagaatgccgctgcagcctcctggcccgtgagggcctcctctgtggccagccagaagtgggggcctctgggccagccatggctgagccccatctgtaggacaggctcacatgcaccaggaactgcatgtgtcttcatgaccactttcaggagagcctaggactcaaatctctatcttttgtccctgatgtggggactgtgttgggggtggggggtggcaggactcaggcatgcagagggtagcatgttcatgtggaggcatccttgcctgaacccaccagctcaggcagcccaccgccaaagacagcgcgaagctgcaaccacctagctgctcctcatgcaggggctggagagaggggctagggcttgaaactgagggggagaaagagctgcacattgtaaatgggaagcagagagccaatgagtctgcctgggatgtgtgtgaatcccaaaagacgcaatcccaaatgccatagtcccaagtgttgagaatccaaaatattaaaattactatactctaaaatccgaaaatcacaatcccaaaagatctaaatcctggaaatataattctgggaaaatttttttttaattttttaaaagatacttacattttaaaaggatttatttgagaaacataaaaacacaacagaacacatcagccacttcacacaataaaataggcaataatacatatttttggaagcataaacaggtatacagacagttacaccggtgtgagttattagcagacaaactatattcatgaagaaataggtcaaaatgggaaatgtatacatgcatgtcactatgcttggtaattgtgtgcacctcgctttatacttgcagtcatatcatgaccaacaacctaagtcttttgacgaagtcaatctatgatgcgtcaccaccacacacacagttgcccaaagagcggagatggcaagaactttcatctctcacaattgcagatgtacaaaaattacatctcttcatttattgaggaagttttgacgtttttatacacacgcacaatgcttacacacacagtcaacctgggatgccggcagggtggctcaggacgaaagcctcaggacccaggagggccatgggtgtaagttccagagtccaaaggccagcgagcctgaagctctgatgtcaaggcagtggaagaaaagcctgtcccagctctgagagagagaccagtttgccttctttatttgttctccctgggcctcagcagattgaatgctgcccaccaacattgagggtggatcttccacacctaggcccctcagattcacacactaatctctggaaacacctcacagacatgcccagaataatgatctcccaggtctctaggtatcccttaacccagtcgagttcacacccaaaatgaagtccacaggtccaccccttgtcaacttggcatccatccgcatccccttaaaccattttcagtctccaaataaagccccaagcaaggcagtagctccacctaacatgatgcaactatcccgggattgtgatttttaagactttagatgttagggatttgaaactttagagatttgcgtctttcagtatttcaatgttggggaccagtgtttgggattatgtcttttagaataatgatccaaacttgtgtgaggactgtgaggctcagggtgggagacgggtgggggagccgaccttaggagggcccactgaaccggcctcaatctggccccagtctggcctactcgctgccccaggacaggtggctacaacatgctgagggcctgaagggcgtcccctcaggaacattgtattactgttttgtgttgctataaaggataactgtgaccagatcatttataaagtaaagaagtttatttggcttgtaattctgcaggtgtagaggcatggcaccagcatctgctgctgctttttttttttttttttttttttttgagacagggtctcactttgttgcccaggtgggaatgggagtgcagtggcacagtcttggctcactgcagcctctacctcctgggctcaagcagtcctcccacctcagcctcccaagtagctgggactacaggcgtgcgccaccttgcctggctaatttttctatttttttgtagagacgggttttcgccatgttgcctcagctaaaatgtctcaaaatctcctcaactaaaatgtctcaaaatctcagcctcccacagtgctggatgacaggagtgagccagccagcatcatgcatccctgtgcgccctgccagggctggcgggaccctcccacccttgttgatgggcagtgctagattatttgtcacgaatcatcccctacaaacaatgatttccctccgcttgcactctctaactagagccatggatggccaaatgctttttgggaagaagccaatggattctcctcggctctgcctgcaagtaacaaaggcttttgactccactccctccacgctgtcagatcgccattccccttcaggaaaacttcgaatggggctgtggacctcactccccaaaatgtcacaacacatgtgcagcaccccgacattcagaaccatgaagggagaaggtggctggtgtctgtaggagggacaggtgtccgtcctgggccagtgtcaggccagcaggtgcagggacagatgggccatccacattctccaagattagcttctacctcaaccagcacacctcagcaagatgccaggattgggctccacaggcagccatgaaatgggtttctggaggaaagatcagcacaggaaaaggggtcagtcaggtcgcaggcaaagtgctagggaaatcccatctcatgcagagctcccaccaagaggagcgtgagttgtgctgtcctggctcgagaagaaggcagcacaggatctgtagctgagggtggccctcccaccaggggacgctggtcagtgcctctcctgactgcctgacgcttggtctccggtggccctctctcaccagggctccctgaggcctgctgcaagcaggacacaggctgcacatcacaggttccaaagtgtgcagcaaggcttctgaccaggcccgtccagatctggagcccctgtggagccacatctgagccctcctcccaagactcacacacaggaccacagcagcatcactgagccgagctgggggcaagtttcaccagattcgcttacctgatccttgcatcaacctcaatgcagttgtcagccccatttttcagacctggacacggaggcacagggtgctggtgtgacttgcccacagttattagtgtgtgaggtgatgggttttgtcccgtcccagctccaaaggccctgctcttcctcaagctccagaacctctcactgagctcctgcagtgaagtcccccctcagagccctcagcccttcctgctttcaggctccagatgtcagagcacccttgggtgccagccacaagtggccctccagcaggctgagcacccagggggaggctgccctgactcaaccccagcctggggctttgtgctgcacctgagggagtagccgctctgtaaatccttgttgaaagaatgaagtgtcaaaaggt

SEQ ID NO: 41400 - DNA, 599 bp, Artificial Sequence
  derived and/or modified sequence
cacagcaccagtagaccccacacagtgagtacctgtagggcaagtgcctctttcgttctcttaataatagagtcaggtcccttctccaagggaagaccctgccttgcagccccagcctggcctgccccttcttgcaggcccgctccgaaccctggcagctggggcactggcagcatggagctgaagagaggaaagaccttcatcaagtccagcctgcaggtttcccacgagaaacccccagacccagcagccgtggctgcagccagggaggggacaggcccctggtcagtccttccaggagggcaacagaggccccacagtgagaagggcccccaagccagccccagtgcccaagaatacgacagatgccccaacaaaggggcgcagctggaccccaaagggggacccgcagccctctgtggagccaccttcaaaccggtgcgaaagtgcaagactcacgacagcatgtctggggcaggcagggccacggctgccacagggcagctggtgggcagtgcaagcttcccgggctccccgggcagccggcgcatgatcgactaccgccactttgtgccccagatgccctttgtgccagctgt

SEQ ID NO: 41401 - DNA, 651 bp, Artificial Sequence
  derived and/or modified sequence
gagctgaccgtggtgctgagcgcggctcgcgctccgacgcggtgcccgagcctgtcgcggccgcgccctgctgcactgcgggcccccagcgcagctggggcactggcagcatggagctgaagagaggaaagaccttcatcaagtccagcctgcaggtttcccacgagaaacccccagacccagcagccgtggctgcagccagggaggggacaggcccctggtcagtccttccaggagggcaacagaggccccacagtgagaagggcccccaagccagccccagtgcccaagaatacgacagatgccccaacaaaggggcgcagctggaccccaaagggggacccgcagccctctgtggagccaccttcaaaccggtgcgaaagtgcaagactcacgacagcatgtctggggcaggcagggccacggctgccacagggcagctggtgggcagtgcaagcttcccgggctccccgggcagccggcgcatgatcgactaccgccactttgtgccccagatgccctttgtgccagctgtggccaagagcatcccgaggaagaggatttccctgaagaggcccaagaagtgctttcggaacctattccacattcggagaaacaagactgaggacttggcctcgctggcggccgagg

SEQ ID NO: 41402 - DNA, 2586 bp, Artificial Sequence
  derived and/or modified sequence
atggagctgaagaggggcaagaccttcatcaagagcagcctgcaggtgtcccatgagaagcccccagaccctgctgctgtggccgccgcccgggagggcaccggcccctggagcgtgctgcccggcggccagcagaggccccacagcgagaagggcccccaggccagccccagcgcccaggagtatgaccgctgccccaacaagggggcccagctggaccccaagggcggccctgctgccctgtgtggggccaccttcaagcctgtgaggaagtgcaagacccatgacagcatgtctggagctggccgggccacagctgccaccggccagctggtgggcagcgccagcttccctggcagccctggcagcaggaggatgattgactaccgccactttgtgccccagatgccctttgtgcctgctgtggccaagagcatccccaggaagaggatcagcctgaagaggcccaagaagtgcttcaggaacctcttccacatcagaagaaacaagacagaggacctggccagcctggccgctgagggcaagagcctgcccagccctggggaccccagcgaccccggcggccgccgcagcaaggccttcctgcccccaggagagggccctggcctggatggcctgtgccaggacctgctggacagcgagctgctggctgatgccagctttggcctgtgccgggccctgtgtgaagatgtggccagcctgcagagctttgacagcctgaccggctgtggggaggtgtttgctgatgagagctctgtgcccagcctggagctgaatgaaggacctgagagccccacccaggccgcccagggcctggagagcaaggtgccccggggccccctgcagggctctgtggagcagctggccagccctgcccagaatgaggccagtgacttcacccgcttctgggacagcgtgaacagatctgtgcggcagcagcagagggccctgctgggcccctggctgagcggcccccagggcacagaccgggaccagagccggctggacacagctggcctggccgagctgcccctgtgcccctgccgggaccccaggagcggcagcaaggccagcagcattgacaccggcacccccaagtctgagcagcctgagagcgtgtccaccagtgatgagggctactatgacagcttcagccctggcctggaggaggacaagaaggaggccgagagccctggcaccccagctgccaccttcccccgggacagctacagcggagatgccctgtatgagctgttccatgaccccagcgagggccccctgggccccagcccagatgatgacctgtgtgtgtctgagagcctgagcggccctgccctgggcacccccctgagcatctgcagcttccgggtgggcgctgaggagaacctggccccagcccctggccctgacctgctgagccagggcttcctgcagagctcctggaagggcaaggagtgcctgctgaagctgtgtgacacagagctggccatcaccatgggcatcgtgtcctggctgcggcggggccccaccccccgggccccacccaccccaggccagcctgctgcccctcctggcagccagggcgccccccgggcccccacagagaagctgggcggccgggagggcctggccagtgatgctgggggcgccaccgtgtgcagcgcccccagccggcaggagctgtgggcccaccctggcaccaccggcctgctggccggggagagcaaggccctgggcggggccacccagggcaccggcaccctgagcagagatgccagccgggaggaggagacccggggccacagcgagggcctcttcagctccatggagagcgctgccaccagcaccacagacaccagcggcaagaacaaggcccctgtgcccagcacctggccctgcagccagaaggagcccggccccccaggagtgctgggctgcttccggggcccctggaggcctggccacggcggggacaccctggatgctgagcccatgctggccggctgtgtggcccgggtggccgccctgaagatcagcagcaatgagcagcccccagctgcctggccaccccggcaggacatgggcagcggcctgtttggccagcgctgggcccggggccctgacatgctggagcagaagcagagcagcagcagccccagcatgaccaccatccacggcctgccctacagcgccagcacccaggaccagcgctgccgggacagagtgcaggacctgtcctggctgcgggtggagcccaccggcctgggcgtgcaggcctgggcctctgtggaggaccagcccctgcagctgagcacagaagctgtggagcaggtggcccacggcagccagctggacagcgagcccaggtctgccccagctgcccgctggagcagccagggccaccaccctgagagcctgggcctgaccctgaacagccagcaggagggcggcgtgtctgccagcgccccagaatgtcgctgcagcctgctggcccgggagggcctgctgtgtggccagcctgaggtgggcgccagcggccctgccatggccgagccccacctgtag

SEQ ID NO: 41403 - DNA, 429 bp, Artificial Sequence
  derived and/or modified sequence
atggagctgaagaggggcaagaccttcatcaagagcagcctgcaggtgtcccatgagaagcccccagaccctgctgctgtggccgccgcccgggagggcaccggcccctggagcgtgctgcccggcggccagcagaggccccacagcgagaagggcccccaggccagccccagcgcccaggagtatgaccgctgccccaacaagggggcccagctggaccccaagggcggccctgctgccctgtgtggggccaccttcaagcctgtgaggaagtgcaagacccatgacagcatgtctggagctggccgggccacagctgccaccggccagctggtgggcagcgccagcttccctggcagccctggcagcaggaggatgattgactaccgccactttgtgccccagatgccctttgtgcctgctgtgtag

SEQ ID NO: 41404 - DNA, 543 bp, Artificial Sequence
  derived and/or modified sequence
atggagctgaagaggggcaagaccttcatcaagagcagcctgcaggtgtcccatgagaagcccccagaccctgctgctgtggccgccgcccgggagggcaccggcccctggagcgtgctgcccggcggccagcagaggccccacagcgagaagggcccccaggccagccccagcgcccaggagtatgaccgctgccccaacaagggggcccagctggaccccaagggcggccctgctgccctgtgtggggccaccttcaagcctgtgaggaagtgcaagacccatgacagcatgtctggagctggccgggccacagctgccaccggccagctggtgggcagcgccagcttccctggcagccctggcagcaggaggatgattgactaccgccactttgtgccccagatgccctttgtgcctgctgtggccaagagcatccccaggaagaggatcagcctgaagaggcccaagaagtgcttcaggaacctcttccacatcagaagaaacaagacagaggacctggccagcctggccgctgagtag

SEQ ID NO: 41405 - DNA, 2586 bp, Artificial Sequence
  derived and/or modified sequence
atggagctgaagcggggcaagaccttcatcaagagcagcctgcaggtaagtcacgagaaacctcccgaccctgcagcggtggctgcagctcgagagggcaccgggccctggagtgtgctgccaggggggcagcaacgtccccacagcgaaaaggggccccaagcctcaccctctgcccaagaatatgatagatgtcccaataaaggggcacagctggacccaaagggaggaccagctgcattatgtggcgccacgttcaaacccgtgaggaaatgcaaaacccacgacagtatgtctggcgctgggcgcgccactgcagccaccgggcagctggtcgggtctgcatcttttcctggaagccctggttctaggcggatgatagactaccgacacttcgtgccccaaatgccctttgtcccggccgtggcgaagtccatccctcgaaaaagaatatccctgaagagacccaaaaaatgctttagaaatctctttcacattcgccggaataaaaccgaagatttggcatcgctggctgccgagggaaaaagcctcccctctccaggggacccatccgacccaggtggccggcggagcaaggctttcctgccaccaggtgaggggccaggcctggacggactgtgtcaggatctgcttgactccgagctcttggctgatgctagcttcggtttgtgtagggccctgtgtgaggatgtggcttcccttcagagcttcgattctctgaccggctgcggtgaagtcttcgccgacgagagttcagttccaagcttagagctgaatgaggggcctgagagtcctacccaagctgcccaggggttagagtccaaggtaccaaggggcccactgcaaggttcggtagagcagctagcaagcccagcccagaatgaggcttccgattttactcggttttgggactcagtcaatcggtcagttagacagcaacagcgggcgttgctgggaccttggttaagcgggcctcagggcactgatagagaccagagtcggcttgataccgccggcctggccgagctccccctgtgcccatgtcgcgatccgcggagcggatccaaggcttcatcgattgacacagggacgcctaaaagtgaacagccagagagtgtgtccacgtccgatgagggttactatgactccttctctcccggcctggaagaggacaaaaaagaggccgagagcccagggacgcccgccgcaacatttccccgggactcgtacagtggagatgctttgtacgaactgttccacgatcctagcgaaggcccgttaggccctagccccgacgatgacctgtgcgtaagcgaaagtctcagcggccctgccttaggaactccattgagcatatgctcctttcgggtgggagcagaagagaacttagctcccgctccggggcctgacctgttatcacagggtttcttgcagtcttcttggaaggggaaggagtgtctgctgaaactgtgcgacaccgagctggccataactatgggcattgttagctggttacgccggggacctactccccgcgcgccaccaactcccggccagcctgccgctccccccggttctcagggggctcccagggcccccaccgaaaagcttggcggtagagagggattggcctctgacgccggtggggctactgtgtgctcagccccctcgaggcaggaactgtgggcccatcctggtacaacagggctgctcgccggagaatccaaagctttaggcggcgcaacgcagggcactggtaccctgagcagagatgcaagccgggaagaggaaacacggggacactccgaagggctgtttagcagtatggaatcggctgcaacttctactacggacacatccgggaaaaacaaggccccagtcccatccacctggccttgctcacagaaagagcctggaccccctggggtgctggggtgttttagaggaccatggaggcctggacatggaggcgacaccctggacgctgagcctatgctggcaggatgcgtagcgcgcgtggccgcattaaagatctcttctaacgaacagcctcccgcggcttggcctccacgccaggatatggggtctggcctgttcgggcaacgctgggctcgggggcccgacatgctcgagcagaagcagagcagctccagcccctccatgacaaccattcatggtcttccctatagcgccagtacgcaggatcagagatgtcgggacagggttcaagacttgtcttggcttcgagtggagcccacaggtctcggcgttcaggcctgggcctcagtggaagaccagcccctacagctcagtaccgaggcagtggagcaggtggcccatgggagccaactcgattcagagccccgaagtgcccccgccgcaaggtggagttcccagggtcatcaccccgaaagccttggccttaccctcaactctcagcaagaggggggcgtctccgcctctgctccggagtgcaggtgtagcttgctggcaagagaggggctgctatgcggccagcccgaggtgggggcctctggtccagctatggccgaaccccacttatag

SEQ ID NO: 41406 - DNA, 2586 bp, Artificial Sequence
  derived and/or modified sequence
atggagctgaagcggggcaagaccttcatcaagagcagcctgcaggtcagtcacgaaaaaccccccgaccctgccgctgtagcagccgccagggaaggaacaggtccatggtctgttctgcccggtggccagcagcggccgcactcagagaaaggccctcaggcaagtcccagtgctcaggaatacgatcggtgtccaaataagggcgcacaactggacccaaagggcggcccggccgccttatgtggagctacgttcaagcccgtgcggaagtgcaaaacacatgacagtatgagcggggccggcagggcaactgcagcaacgggacagcttgtgggaagcgcctctttcccgggctcacccggctcccggaggatgattgactaccgccatttcgtcccacagatgcctttcgtgcccgccgtcgctaaatccatacctcgcaaaagaatttctttgaaaaggcctaaaaagtgttttagaaacctgttccatattcgacgcaataagaccgaagacctcgcctccctggccgcggagggaaagagtctcccttctcccggagatcccagcgatccagggggcagacgtagcaaggcctttcttcccccaggagagggaccaggcctggacgggctctgtcaggaccttcttgacagtgaactgctggctgacgctagcttcggattgtgtcgtgccctgtgcgaagatgtggcctctttgcagagttttgactcccttacaggctgtggcgaggtcttcgctgatgagtccagtgtgccatctttagaactgaatgaaggtccagagagtccaacccaggccgcccagggactggagtccaaagtgccccggggcccactgcaaggaagcgtggagcagttggcaagtcccgcccagaacgaggccagcgatttcacgcggttctgggactcagtcaaccgtagcgtgcgccagcagcagcgcgctcttctcggtccttggcttagtgggcctcaaggaacagacagggaccagagtcgtctcgacactgctgggctggctgaactgcctttgtgtccttgccgcgaccctcggtcaggatctaaggcgagttcaattgatacagggacgcccaagtctgaacagcctgaatcggtgtcaaccagcgacgaagggtattacgactccttctctccaggtttggaggaggacaagaaggaggctgagagtccggggacaccagccgctacatttcctcgtgactcctacagtggtgacgccctgtacgaactctttcatgacccttcggagggccctttgggcccaagtccagacgacgatctttgtgtgtccgagtcactgtccggtccagctctcggcacacccctgtccatctgctcttttcgggtaggggccgaagaaaaccttgccccagctcccgggcccgatctcttgagtcaaggcttcttacagtctagttggaaaggaaaggagtgtcttctaaaactgtgcgacaccgagctagcaatcactatgggcattgtgagctggctgcgacgcgggccaacaccgcgcgcacctcctactcccggccagcccgctgcacctcctggttcccagggcgctcctagagcacccactgagaagctgggcgggagagagggccttgcttccgacgcaggcggagctaccgtttgttctgcgcctagtaggcaggaattgtgggcccacccaggtacaactggactgttggccggagaaagtaaggccttaggaggagctacacaagggaccggcacactgagtcgggacgcctcccgcgaggaagagacacggggccatagtgagggcctgttctcaagcatggaatctgcagctacatcaaccaccgacactagtggaaaaaacaaagcacctgtcccctctacttggccttgttctcagaaagagcctggcccacctggagttctcggatgctttcgcgggccgtggcgtccaggacatggcggcgataccctagacgcggaaccaatgctggccggatgtgttgctagagtcgccgctctgaaaatatcaagcaatgaacaaccccctgctgcctggccaccgcggcaggatatggggtccggtctttttggacagcgctgggcccggggacctgatatgctcgagcaaaaacaatctagcagttccccgtctatgactactatccacgggttgccatactcagcaagcacacaggatcagcgctgtcgcgatcgcgtgcaggatttgtcgtggctgagagtggagcctactggcctcggcgtgcaggcttgggcgtctgttgaagatcaacctctccagctgagcacagaggcagtggagcaggttgcacacggatcccagctggattctgaacctcgttccgctcctgctgccagatggtctagtcagggtcaccaccctgaaagtctgggactgacactgaacagtcaacaagaaggtggcgtaagcgcttccgctcccgagtgtcgatgcagtctgcttgccagggaaggactgctgtgcggccagccggaagtgggggccagcggccctgcaatggcggagccgcatctgtag

SEQ ID NO: 41407 - DNA, 429 bp, Artificial Sequence
  derived and/or modified sequence
atggagctgaagcggggcaagaccttcatcaagagcagcctgcaggtgtctcatgagaaacctcctgatccagctgccgtggcggcagcacgagagggtacggggccttggagcgtcctgcctggaggccagcaacgcccccactcggagaagggcccccaggcaagtcctagtgcacaagaatacgatcggtgccccaataagggggcccagttggacccgaaaggaggacctgcggcactgtgcggagctacatttaaacccgtccgcaagtgtaagacccatgattcaatgtcgggcgctgggagagccaccgcagcgaccggacagctggtcggatctgccagctttcccgggtcgccgggatctaggaggatgatcgattataggcatttcgtacctcagatgccatttgtccccgccgtctag

SEQ ID NO: 41408 - DNA, 543 bp, Artificial Sequence
  derived and/or modified sequence
atggagctgaagcggggcaagaccttcatcaagagcagcctgcaggtctcccacgagaaaccacctgaccctgctgccgtggcagccgctagggagggtacgggaccatggtcggtgttgcccggaggacagcagcggccccatagtgaaaaagggccacaggctagcccatcagcccaagaatacgataggtgcccaaataagggagcacagctagaccccaagggcggtcctgcagccctttgcggagctacattcaagccagtacgcaaatgcaagacacacgactcaatgtccggcgctggccgggccacagctgccacaggacagctggtgggatcggcctcttttcccggttcacccggatcccgacgtatgattgattatcgacacttcgtgcctcagatgcctttcgtgccagcagttgcgaaatcaataccccgcaaacgcattagtttaaaacgacccaagaagtgttttcggaatctgttccacattcggcgcaataaaacagaggacctggcttctctggctgccgagtag

SEQ ID NO: 41409 - DNA, 2586 bp, Artificial Sequence
  derived and/or modified sequence
atggaactcaaaagagggaagactttcataaagtcttctctccaggtgtctcacgaaaagccccctgaccctgcagccgtggctgcagccagagaaggaactggtccgtggtccgtcctccccggaggacaacagcggcctcactccgaaaagggccctcaggcctccccaagtgcacaagagtacgatcgctgcccaaacaagggggctcaactggaccctaagggcggaccagccgctttatgtggagccactttcaagccagtgcgcaaatgcaagacacacgacagcatgagcggcgctggacgtgccacggccgctacaggccaactggtcggtagtgcatcctttccagggtcaccagggagcagacggatgatcgactaccggcacttcgttcctcagatgcccttcgtgcctgctgtcgcaaagtctatacccagaaagagaattagcctgaaacgacccaagaaatgcttccgcaacctcttccatattaggcgcaataagaccgaggatctggcttccttagcagctgagggaaagtccctgccttccccaggcgatccctctgatcccggtggcagacggtccaaggcctttctcccgcctggagaaggtccaggcttagacggactttgccaagatcttctggactcggaattactggctgacgctagcttcgggctgtgtcgagctctctgcgaagatgtcgcaagtcttcagagttttgatagtttaacagggtgtggggaagtctttgccgacgagagcagcgtgccatctttggaacttaatgaggggccagagtctccaacgcaggccgcacaaggcctggagtctaaggtgccaagagggcctctgcagggatcagtggaacagctagccagcccagctcaaaatgaggcctcagacttcactaggttctgggactccgttaatagaagcgtcagacagcaacagagagccctcctgggcccttggctgtccggaccccagggtaccgaccgggatcagtcccgactcgacactgctggtcttgccgaattgccgctgtgcccttgtcgcgaccctcgcagtgggagcaaagctagctccatcgatactgggacacctaaatcagagcagcccgagagcgtcagcacaagcgacgagggttactatgacagtttctctcctggcctagaagaggataaaaaggaggccgagagtcctggaactccagccgctactttcccacgcgactcctacagtggagacgccctttatgagctctttcatgacccatctgagggcccattaggaccatctccagacgatgacctgtgtgtgtctgagtcactcagcgggccagccctgggcacacccctttcaatctgtagctttagggtcggtgccgaggaaaacctcgcgcctgcacccggtcccgatcttctgagtcagggattcctccaatcgtcatggaaaggtaaggaatgtctcctaaagttgtgtgacaccgaactcgcgataactatgggtatcgtgtcttggcttaggcgcggaccaaccccacgtgcgccacccacccctggccaacctgcggcaccccctggtagccagggagccccacgagcgcctaccgaaaagctggggggaagggaggggctagcaagcgacgcagggggtgcaacagtatgttccgcgccttccagacaagagctatgggcccatcctgggactaccggcctgctcgctggcgagtccaaggctctggggggagccacgcagggaaccggcaccctgtctcgcgacgcttctcgggaggaagaaactcgaggtcattctgagggattgttctcatcaatggaatccgccgctactagcaccactgacacctcaggaaaaaacaaggctcctgtccccagtacctggccttgtagtcaaaaggaacccggtccaccaggggtgctgggatgttttcgaggcccatggcggccaggccacggaggcgacacactggacgccgagcctatgctggccggttgtgtggccagagtggcggctttgaagataagttccaacgaacagcctccagcagcttggcccccaaggcaagatatggggagtggccttttcgggcagcgatgggcacggggaccagatatgttggagcaaaagcagtccagctcatccccaagcatgaccaccatccacggcctgccctactctgcgtcaactcaggaccaaaggtgcagagaccgagttcaagacctgtcttggctgcgcgtggaaccaacggggctgggggtgcaggcttgggcaagtgtggaggaccagcctctgcaactgtctacagaggctgtggaacaggtggcccacggttcacagcttgatagtgaacctcgatcggcaccagccgctcgctggtcatcccagggacatcaccctgagtccctagggcttacactgaacagccagcaagaagggggagtaagtgcctcggcacctgaatgccgttgctctttgcttgcacgcgagggtcttctgtgtgggcaacctgaagtgggcgcttccgggcctgctatggcagagccacacctgtag

SEQ ID NO: 41410 - DNA, 2586 bp, Artificial Sequence
  derived and/or modified sequence
atggagctgaaacggggaaagaccttcattaaatcatctctacaggtgagccacgaaaagccacctgatcccgctgccgttgctgcagccagagaagggacggggccttggagcgtcctccctgggggacagcaaaggccccattccgaaaaagggcctcaggcatctccgtctgcccaggaatatgacaggtgcccaaacaaaggcgctcaacttgacccaaagggaggacccgctgctctgtgtggtgcaacttttaagccagttaggaagtgtaagacacatgacagtatgtctggggctggacgcgcaaccgctgccactggccagcttgtaggctctgcttcatttcccggttcgccaggcagtcggagaatgatcgactatcgtcacttcgtccctcagatgcctttcgttccagctgtcgccaaaagcattccacgtaagaggatctctctgaaaaggccaaagaagtgtttcagaaatttgtttcatattcgcagaaacaagacggaagacttggcaagtctggcggctgaagggaagtccctccctagcccaggcgacccgtctgatcctggtggcaggagaagcaaggcttttctacctccaggggaaggaccaggactggacgggctgtgccaggacctgctcgactctgaactcctggccgatgcaagctttggactttgccgagccctctgtgaggacgtagcatccctgcagtcctttgattctctgacaggctgcggcgaggtgttcgccgatgaatcatctgtgcctagtttagagctcaacgaaggccctgagagccctacccaggccgctcaaggacttgagagtaaagtacctcggggaccactgcaggggtccgtggagcaactggccagcccagcccagaacgaagctagtgacttcactcgcttttgggactctgtcaaccgcagcgtgcggcagcagcagcgagcgctcctgggcccatggcttagtggccctcaggggaccgatcgggaccagagtcggcttgatactgctgggctagcagagttacctctctgtccatgtagagatccgcgttcagggagcaaggctagtagcattgataccggaacgcccaagtccgagcagcccgagtctgtatcaacatctgacgaaggctactacgactccttctcaccaggcctcgaggaggataagaaggaagctgagagtcctggaacacccgctgccactttcccacgtgattcgtactctggggacgccctttacgagctgtttcacgatcccagtgaaggacctctggggcctagcccggacgatgatttgtgcgttagcgagtctctgagcggcccagccctggggacccccctgtccatctgcagcttcagagtgggagctgaagaaaatttggcgcctgcaccaggaccagacctgctcagccagggcttcttacagtcttcctggaagggaaaggagtgcttgttaaagctttgcgacacagaactcgccatcaccatggggattgtgtcctggttgcggagaggtcccacacctagggctccaccaacaccgggacagccagctgccccaccagggtcccagggcgcaccgcgagccccaaccgaaaagctcgggggtcgcgagggcctagcctcagatgccggaggggcaaccgtgtgctcagcaccctcccgccaggaactatgggcacatccaggaaccactggattactggcaggggagagtaaggcccttgggggagccacccagggtacaggcacactgagccgtgacgcctcccgagaagaggagacacgcggacacagtgaggggctgttcagtagtatggaatccgcagcaacttccactacagatacctctggaaagaataaagccccagtacccagtacatggccctgtagccagaaagagcctggtccaccaggcgttttggggtgctttagaggcccatggagacctggccacggcggtgatacattggacgccgagcccatgctggctggatgcgttgctcgggtggccgctctcaagatttcatcgaatgagcagccccctgcagcgtggccaccgaggcaggacatggggagtggtctgttcgggcagcgctgggcccgaggacctgatatgctggagcagaagcaaagctccagctccccatcaatgacgacgatccacggccttccatactccgctagtactcaggaccagcgctgtagggaccgggtacaggacctgagctggctaagagttgagcccaccggcttgggcgtgcaggcatgggcctccgtcgaggatcagcccctgcagttgagtaccgaagcggtggaacaggtcgcacacgggtcacagctggattcagagccacgcagtgcaccagccgctagatggagctcgcaagggcatcatcctgagtccctgggtctgaccctgaatagccagcaggaagggggagtctcagcctcagcaccagagtgccgctgttcattgcttgcaagagaagggttgttgtgtggacagccagaagtgggggcttccggacccgctatggcagaaccccacctctag

SEQ ID NO: 41411 - DNA, 429 bp, Artificial Sequence
  derived and/or modified sequence
atggagttgaaacgcggaaagacattcataaaatcttccctccaggtatcacacgaaaaaccgcctgatcctgccgctgtcgcagccgcaagggagggtactggtccctggtctgtcctgccaggtgggcaacagagacctcatagcgagaagggtccacaggccagtcccagtgcgcaggagtacgacagatgccccaataagggtgctcagttggatcctaagggcggacctgcggcattatgtggagcaacattcaagccagtgcgcaagtgcaaaactcatgattccatgtcgggcgcagggagggcgaccgccgcaacaggacagctcgttggaagcgcttcttttccgggatccccaggaagtcggagaatgattgactaccggcacttcgttccacaaatgccctttgtccccgcagtatag

SEQ ID NO: 41412 - DNA, 543 bp, Artificial Sequence
  derived and/or modified sequence
atggagttaaaacgaggcaagacattcatcaaaagcagtctgcaggtcagccacgagaaaccacccgaccccgctgccgtggcagccgcaagggagggcactgggccatggagtgtgcttccaggaggccaacagcggcctcactctgagaaagggccacaggctagcccgagtgctcaggagtacgataggtgccctaacaagggagctcagctggatccgaaaggcggtcccgcagccctatgtggagccacttttaagcccgtgcgcaagtgtaaaacgcatgattctatgagcggagcaggccgtgcgactgcagctactggacaactggtcggttcggcttcttttccaggctccccagggagcagaagaatgatcgactaccgccacttcgtgccgcagatgccgttcgtccccgctgttgctaagtccataccaaggaaaagaattagtctgaaaagaccaaaaaaatgctttcgcaatttgttccatattagaaggaataagactgaagatctggcatcccttgctgccgagtag

SEQ ID NO: 41413 - protein, 1823 aa, Artificial Sequence
  derived and/or modified sequence
MALSSAWRSVLPLWLLWSAACSRAASGDDNAFPFDIEGSSAVGRQDPPETSEPRVALGRLPPAAEKCNAGFFHTLSGECVPCDCNGNSNECLDGSGYCVHCQRNTTGEHCEKCLDGYIGDSIRGAPQFCQPCPCPLPHLANFAESCYRKNGAVRCICNENYAGPNCERCAPGYYGNPLLIGSTCKKCDCSGNSDPNLIFEDCDEVTGQCRNCLRNTTGFKCERCAPGYYGDARIAKNCAVCNCGGGPCDSVTGECLEEGFEPPTGMDCPTISCDKCVWDLTDDLRLAALSIEEGKSGVLSVSSGAAAHRHVNEINATIYLLKTKLSERENQYALRKIQINNAENTMKSLLSDVEELVEKENQASRKGQLVQKESMDTINHASQLVEQAHDMRDKIQEINNKMLYYGEEHELSPKEISEKLVLAQKMLEEIRSRQPFFTQRELVDEEADEAYELLSQAESWQRLHNETRTLFPVVLEQLDDYNAKLSDLQEALDQALNYVRDAEDMNRATAARQRDHEKQQERVREQMEVVNMSLSTSADSLTTPRLTLSELDDIIKNASGIYAEIDGAKSELQVKLSNLSNLSHDLVQEAIDHAQDLQQEANELSRKLHSSDMNGLVQKALDASNVYENIVNYVSEANETAEFALNTTDRIYDAVSGIDTQIIYHKDESENLLNQARELQAKAESSSDEAVADTSRRVGGALARKSALKTRLSDAVKQLQAAERGDAQQRLGQSRLITEEANRTTMEVQQATAPMANNLTNWSQNLQHFDSSAYNTAVNSARDAVRNLTEVVPQLLDQLRTVEQKRPASNVSASIQRIRELIAQTRSVASKIQVSMMFDGQSAVEVHSRTSMDDLKAFTSLSLYMKPPVKRPELTETADQFILYLGSKNAKKEYMGLAIKNDNLVYVYNLGTKDVEIPLDSKPVSSWPAYFSIVKIERVGKHGKVFLTVPSLSSTAEEKFIKKGEFSGDDSLLDLDPEDTVFYVGGVPSNFKLPTSLNLPGFVGCLELATLNNDVISLYNFKHIYNMDPSTSVPCARDKLAFTQSRAASYFFDGSGYAVVRDITRRGKFGQVTRFDIEVRTPADNGLILLMVNGSMFFRLEMRNGYLHVFYDFGFSGGPVHLEDTLKKAQINDAKYHEISIIYHNDKKMILVVDRRHVKSMDNEKMKIPFTDIYIGGAPPEILQSRALRAHLPLDINFRGCMKGFQFQKKDFNLLEQTETLGVGYGCPEDSLISRRAYFNGQSFIASIQKISFFDGFEGGFNFRTLQPNGLLFYYASGSDVFSISLDNGTVIMDVKGIKVQSVDKQYNDGLSHFVISSVSPTRYELIVDKSRVGSKNPTKGKIEQTQASEKKFYFGGSPISAQYANFTGCISNAYFTRVDRDVEVEDFQRYTEKVHTSLYECPIESSPLFLLHKKGKNLSKPKASQNKKGGKSKDAPSWDPVALKLPERNTPRNSHCHLSNSPRAIEHAYQYGGTANSRQEFEHLKGDFGAKSQFSIRLRTRSSHGMIFYVSDQEENDFMTLFLAHGRLVYMFNVGHKKLKIRSQEKYNDGLWHDVIFIRERSSGRLVIDGLRVLEESLPPTEATWKIKGPIYLGGVAPGKAVKNVQINSIYSFSGCLSNLQLNGASITSASQTFSVTPCFEGPMETGTYFSTEGGYVVLDESFNIGLKFEIAFEVRPRSSSGTLVHGHSVNGEYLNVHMKNGQVIVKVNNGIRDFSTSVTPKQSLCDGRWHRITVIRDSNVVQLDVDSEVNHVVGPLNPKPIDHREPVFVGGVPESLLTPRLAPSKPFTGCIRHFVIDGHPVSFSKAALVSGAVSINSCPAA

SEQ ID NO: 41414 - protein, 1823 aa, Artificial Sequence
  derived and/or modified sequence
MALSSAWRSVLPLWLLWSAACSRAASGDDNAFPFDIEGSSAVGRQDPPETSEPRVALGRLPPAAEKCNAGFFHTLSGECVPCDCNGNSNECLDGSGYCVHCQRNTTGEHCEKCLDGYIGDSIRGAPQFCQPCPCPLPHLANFAESCYRKNGAVRCICNENYAGPNCERCAPGYYGNPLLIGSTCKKCDCSGNSDPNLIFEDCDEVTGQCRNCLRNTTGFKCERCAPGYYGDARIAKNCAVCNCGGGPCDSVTGECLEEGFEPPTGMDCPTISCDKCVWDLTDALRLAALSIEEGKSGVLSVSSGAAAHRHVNEINATIYLLKTKLSERENQYALRKIQINNAENTMKSLLSDVEELVEKENQASRKGQLVQKESMDTINHASQLVEQAHDMRDKIQEINNKMLYYGEEHELSPKEISEKLVLAQKMLEEIRSRQPFFTQRELVDEEADEAYELLSQAESWQRLHNETRTLFPVVLEQLDDYNAKLSDLQEALDQALNYVRDAEDMNRATAARQRDHEKQQERVREQMEVVNMSLSTSADSLTTPRLTLSELDDIIKNASGIYAEIDGAKSELQVKLSNLSNLSHDLVQEAIDHAQDLQQEANELSRKLHSSDMNGLVQKALDASNVYENIVNYVSEANETAEFALNTTDRIYDAVSGIDTQIIYHKDESENLLNQARELQAKAESSSDEAVADTSRRVGGALARKSALKTRLSDAVKQLQAAERGDAQQRLGQSRLITEEANRTTMEVQQATAPMANNLTNWSQNLQHFDSSAYNTAVNSARDAVRNLTEVVPQLLDQLRTVEQKRPASNVSASIQRIRELIAQTRSVASKIQVSMMFDGQSAVEVHSRTSMDDLKAFTSLSLYMKPPVKRPELTETADQFILYLGSKNAKKEYMGLAIKNDNLVYVYNLGTKDVEIPLDSKPVSSWPAYFSIVKIERVGKHGKVFLTVPSLSSTAEEKFIKKGEFSGDDSLLDLDPEDTVFYVGGVPSNFKLPTSLNLPGFVGCLELATLNNDVISLYNFKHIYNMDPSTSVPCARDKLAFTQSRAASYFFDGSGYAVVRDITRRGKFGQVTRFDIEVRTPADNGLILLMVNGSMFFRLEMRNGYLHVFYDFGFSGGPVHLEDTLKKAQINDAKYHEISIIYHNDKKMILVVDRRHVKSMDNEKMKIPFTDIYIGGAPPEILQSRALRAHLPLDINFRGCMKGFQFQKKDFNLLEQTETLGVGYGCPEDSLISRRAYFNGQSFIASIQKISFFDGFEGGFNFRTLQPNGLLFYYASGSDVFSISLDNGTVIMDVKGIKVQSVDKQYNDGLSHFVISSVSPTRYELIVDKSRVGSKNPTKGKIEQTQASEKKFYFGGSPISAQYANFTGCISNAYFTRVDRDVEVEDFQRYTEKVHTSLYECPIESSPLFLLHKKGKNLSKPKASQNKKGGKSKDAPSWDPVALKLPERNTPRNSHCHLSNSPRAIEHAYQYGGTANSRQEFEHLKGDFGAKSQFSIRLRTRSSHGMIFYVSDQEENDFMTLFLAHGRLVYMFNVGHKKLKIRSQEKYNDGLWHDVIFIRERSSGRLVIDGLRVLEESLPPTEATWKIKGPIYLGGVAPGKAVKNVQINSIYSFSGCLSNLQLNGASITSASQTFSVTPCFEGPMETGTYFSTEGGYVVLDESFNIGLKFEIAFEVRPRSSSGTLVHGHSVNGEYLNVHMKNGQVIVKVNNGIRDFSTSVTPKQSLCDGRWHRITVIRDSNVVQLDVDSEVNHVVGPLNPKPIDHREPVFVGGVPESLLTPRLAPSKPFTGCIRHFVIDGHPVSFSKAALVSGAVSINSCPAA

SEQ ID NO: 41415 - protein, 178 aa, Artificial Sequence
  derived and/or modified sequence
  misc_feature (1)..(1): Xaa can be any naturally occurring amino acid
XIFEDCDEVTGQCRNCLRNTTGFKCERCAPGYYGDARIAKNCAVCNCGGGPCDSVTGECLEEGFEPPTGMDCPTISCDKCVWDLTDALRLAALSIEEGKSGVLSVSSGAAAHRHVNEINATIYLLKTKLSERENQYALRKIQINNAENTMKSLLSDVEELVEKHWNKPRRRLELQEGV

SEQ ID NO: 41416 - DNA, 5472 bp, Artificial Sequence
  derived and/or modified sequence
atggccttatccagtgcatggaggtccgttctgcctctgtggttgctctggtccgctgcttgctctcgggctgcatctggcgacgataatgcatttccttttgacatagaggggagcagtgcagtcggtcgacaggatccaccggaaacgagcgaacccagagtggctctaggaagactccctcccgcagctgagaaatgtaacgctggcttctttcatacactctcaggcgaatgcgtcccctgcgattgtaacggaaattccaacgaatgtctggatgggagtggatactgcgtgcattgtcagaggaataccaccggcgagcactgcgagaagtgtctggacggatacatcggtgatagcatccggggtgccccacagttctgtcagccctgtccctgcccactgccgcacttggcaaacttcgccgaatcctgttacagaaaaaatggagccgtccggtgtatctgcaacgagaattacgccggaccaaattgcgagcggtgtgctcctggttactacgggaacccattactgataggatctacttgcaaaaagtgcgactgctccggaaactcagatcccaacctgatcttcgaggactgtgacgaagtgaccggccagtgtaggaattgcctccgcaacacaacgggttttaaatgcgaacgctgcgccccaggatactacggcgatgccagaatcgcaaagaattgcgccgtgtgtaactgcggagggggaccctgcgactccgtgacgggggagtgccttgaggaaggctttgagcctcctaccgggatggactgccccactatcagctgtgataagtgcgtctgggacttaactgatgccctgcggctagccgctttaagcatagaagaggggaagagtggagttctgtccgtttcatccggagcagcagctcatcgccacgttaatgagataaatgccacaatttaccttctgaaaaccaagctgtctgaacgcgaaaaccagtacgccttacgaaagatccagatcaataatgctgaaaacactatgaagtcgcttttatccgacgtggaggagctggtagaaaaagagaaccaggcgtctagaaagggtcagttggtgcagaaagagagcatggacacgatcaaccacgccagtcaacttgtggaacaggcacacgacatgagggacaagatacaggagattaacaataagatgttatactatggagaagaacatgagctttctccaaaagaaatatcagagaagctggtgcttgcccagaaaatgctggaagaaatccggtcacgccagcctttttttacgcagagagaacttgtggacgaggaggcggacgaggcttacgaactcctctcccaggcagagtcttggcagcgcctgcacaacgagacacggaccctcttccctgtagttctagaacagctggacgactacaacgccaagcttagcgatctacaggaggcgttggaccaggcactgaactacgtaagggacgctgaagacatgaatagagcaacagccgctcgtcagcgcgatcatgaaaaacagcaggaacgcgtgcgggaacagatggaagtagttaacatgtcactcagcacttcagctgattctttgacaacacccaggttgacactgtccgaattggatgacataataaagaacgcaagtggcatatatgccgaaattgacggcgctaagtctgagctgcaggtaaaactcagcaacctgagcaacctgtctcacgaccttgtccaggaggcaattgaccacgcccaagacctgcagcaagaagccaacgagttgagccgcaaactgcacagctcagacatgaacggccttgtccagaaagccctggacgcaagcaatgtttatgagaatatcgtgaattacgtgtctgaggccaacgagaccgctgaatttgccttgaacaccacagacaggatatatgatgccgtttctgggattgatactcagatcatctatcataaggacgaatcagagaatctcctgaaccaggccagagaactgcaagccaaggcagagtcgtcgtctgatgaggctgttgccgatacctcacggagagtggggggtgcattagcaaggaagtccgccctaaagacgagactttctgacgccgtgaaacaactgcaggccgctgaaagaggagacgcacagcagaggcttggtcagagtcgcctcataacagaagaggcaaatcgaaccacaatggaagtacagcaggctactgctcccatggctaataacctgacaaattggagtcaaaatctacagcatttcgactcatccgcctataatacggccgtgaattccgcgagagacgctgttagaaatttaacagaggtggtccctcagctgctcgatcagctgagaaccgtggagcagaaacgccctgctagcaatgtgtccgcctcgatacagagaatccgcgagctgatcgcacagacccggagcgtcgcatccaagatccaggtctccatgatgtttgacggtcaaagcgccgtcgaggttcactctcggacctcgatggacgaccttaaagctttcacctctctgtctctgtacatgaagcctccggtaaaacggcctgagctgacagaaacagcggaccaattcatcctgtacctgggtagcaaaaacgcaaagaaagagtacatgggcctcgcgattaaaaacgacaatctggtgtacgtctataacctaggaacgaaagatgtagagatcccgctggatagcaaacccgtctcctcatggcctgcctatttctccattgtgaaaatcgagagggtgggcaagcacggcaaagtatttcttaccgtgccctctctctcttccaccgccgaagagaaattcatcaagaagggagagttttcgggcgatgactccctcctagacctggatcccgaagatactgtcttttacgtcgggggtgttccctcaaatttcaaattacctacgtcgttaaacttacctggcttcgtgggctgcctggaactagcaacactgaataacgatgtgatcagcctgtacaactttaagcatatatataatatggaccccagtactagcgtgccttgtgcgcgagataagctggctttcacccagagtagggccgcaagttactttttcgacggcagcggctacgccgtggtgcgcgacataacgaggagaggcaagttcggacaggtgactcgctttgatattgaagtgagaactcctgcagacaacggcctcatactactgatggttaacgggtctatgtttttccgccttgagatgagaaacggatatttgcatgtgttctacgacttcggatttagtgggggtcccgtccacctggaagatactctgaagaaagctcaaattaacgatgcgaagtatcacgagatcagcattatctaccacaatgacaaaaagatgattctggtggtcgaccgaagacatgtcaaaagcatggataatgaaaagatgaaaattccatttacagatatctatattggtggtgcccctcccgaaatcttgcagtcccgggctttacgggcacacttaccgctcgacattaattttcgaggttgtatgaagggtttccagttccagaaaaaagatttcaacctgctggaacagaccgagactctaggagttggatacggttgccccgaagactctctcatttcccggcgagcctatttcaacggccaatccttcattgctagcatacagaagataagcttcttcgacggctttgagggaggcttcaattttcggacactgcagccgaatggtttgctcttttactatgcttcagggtctgacgttttcagtatctccttagacaacggaacggtgattatggatgtcaagggcattaaggtgcagagtgtcgacaaacagtacaacgacggtctgtctcacttcgtgatcagcagcgttagtccaacgaggtacgagctaatcgtggataagtcccgagtcggatccaaaaacccaacaaagggcaaaatcgaacagacccaggcttcagagaagaaattttactttgggggatctcctatctccgcacagtacgcaaatttcacaggttgcatctcgaatgcttactttaccagagtagatcgtgacgtggaggtggaggacttccagagatatacggagaaagtccataccagtctgtacgaatgtccaattgagtcttctcccctttttttgctgcacaaaaaggggaagaacctcagtaaacctaaggcttcccagaacaagaagggcggaaagagcaaggacgccccatcttgggaccccgtcgccttgaagctgcctgaaaggaacacgccgcgaaattctcattgtcacctgagtaattctcctagagcgatagagcacgcttaccagtacggaggcacagctaactcccgacaggaatttgaacacctgaagggcgactttggggctaaatcccaattttccataagattgcggaccaggagctcacacgggatgatcttctacgtctccgaccaggaggagaatgattttatgaccttgtttttagcacatgggcgactcgtgtatatgttcaacgtaggtcacaaaaagctgaaaatcaggagtcaggaaaaatataacgatggcctttggcatgacgtaatttttataagggaaaggagcagcggaaggctcgtgatcgacggcctgcgggtgcttgaggaatccctgcctccaacagaagcaacatggaagataaaggggcctatatatcttgggggtgtggccccaggtaaggccgtgaagaatgtacagatcaattccatctacagttttagcggctgtctgtctaatcttcagctcaacggggcatctataacatccgcttcacagactttcagcgtgaccccatgttttgagggcccaatggagacaggtacgtatttttccaccgagggcggttacgttgtgttggacgagtcctttaatataggactaaaattcgagattgcttttgaagtccggcctagaagcagcagtggaacccttgtccacggccactccgtgaacggcgagtacctgaatgttcatatgaaaaatggccaagtcatagttaaagtcaacaatggaatccgggacttctctacttcagttactccaaaacaatcactgtgcgacggaaggtggcacaggattaccgtgattagggattcaaacgtagtgcaactggatgtggattcagaggtcaaccatgtggtcgggccacttaatcccaagccaattgaccatagagagcccgtgttcgtaggtggcgtgcccgaatccctcctgactccgagactggcaccatcaaagcctttcacgggatgtattcgacactttgtcatagatgggcaccctgtgtctttctccaaagcagccttggtctcaggagctgtgtctattaatagttgccccgcagcctac

SEQ ID NO: 41417 - DNA, 5472 bp, Artificial Sequence
  derived and/or modified sequence
atggctctctcctctgcatggagatccgtccttcccctttggttgttgtggtctgcagcttgtagccgggcagctagcggagatgataatgcttttccttttgatatcgaaggctcctccgccgttgggcggcaagacccgccagaaacgagtgagcctagggtagccttgggccggttgccacccgctgccgagaaatgtaatgccggcttctttcataccttatctggagaatgtgtgccatgcgattgcaacgggaattccaatgaatgccttgatggcagcgggtactgtgtccattgtcagagaaacaccaccggggagcactgcgagaaatgcctggatgggtacattggagatagcattcgaggggctcctcaattttgccagccgtgcccttgcccactgccccacttagcaaactttgccgaatcctgctaccggaaaaacggagccgtacgctgcatttgcaatgaaaattacgctggcccaaactgtgagcggtgcgctcctgggtactacgggaaccctttactaataggctccacttgtaaaaaatgcgattgttcaggcaactctgatccgaatcttattttcgaggactgcgatgaagtgactggtcagtgtaggaactgtcttaggaataccaccggctttaagtgcgaacggtgcgcccctgggtactacggcgatgctcgcattgccaaaaattgtgctgtttgtaactgcgggggcggaccctgcgacagcgttaccggcgaatgtctggaggagggtttcgagccacctaccggaatggactgtccaacgatttcttgtgataaatgcgtctgggacttaacagatgcactccgactggcagccctcagtatcgaggaaggcaagtccggagtgctgagtgtctcctctggagctgccgctcaccgtcacgtgaatgagattaatgcgaccatttatctgctgaagaccaaactttctgagcgtgagaaccagtacgcactgcgcaagatccagatcaacaacgccgagaacacaatgaagtccttgctctcagatgtggaggagctggtggaaaaggagaatcaggcctcaagaaaagggcaactcgtccagaaggaatcgatggatactatcaatcacgcatcgcagcttgttgaacaggcccatgacatgagggacaagattcaggagattaataacaagatgttgtactacggcgaagagcatgagctgagccctaaagaaatcagcgaaaaacttgtgctggcccagaagatgttagaggaaattagaagtagacagcccttcttcactcaaagggaactggtggacgaggaggccgacgaggcttacgagctgctgtcacaagccgagtcctggcaaaggttgcataacgagacccgaacgttattcccggtagtgctggaacaacttgacgactataatgccaaactgtctgatctgcaagaggctctggaccaagccctaaactatgtgcgcgatgccgaggatatgaatcgcgccactgccgcaaggcagcgcgaccatgaaaaacagcaagagcgtgtgagagagcaaatggaagtcgtgaatatgtcgctgtcaactagtgccgacagtcttactaccccccgacttacgctgtcagaactcgatgacatcattaaaaatgcctcagggatctacgccgagattgacggagctaagagcgagctccaggtcaaactgtccaatctgtctaacctctctcacgatcttgtgcaggaggccattgatcatgcccaggatctccagcaggaggcgaacgagctgagcaggaagctccattcgtccgatatgaacggactggttcaaaaggctttggacgcatcaaacgtgtatgaaaatattgtgaactatgtcagcgaggccaatgaaaccgccgaatttgccctcaatactactgataggatttatgacgcagtgtcagggatcgatacccagataatatatcacaaagatgaatctgagaatttgctgaatcaagcccgagagttacaagcaaaagccgagagcagtagcgatgaggcagttgccgacacgagtcggcgagtgggtggcgctctcgcgcgcaaatccgccctgaaaactagactctctgatgctgtgaagcagctccaggctgcagagcgcggtgatgcccaacagagactggggcagtcccgcctaataaccgaagaagcaaacaggaccacgatggaagtgcaacaggccactgccccgatggctaataacctgaccaactggagccaaaacttgcagcattttgattcttctgcatacaatactgccgtgaattccgctagagacgccgttcgaaatctgaccgaggtggtgcctcagttgctggatcagctccggacagttgagcagaagcgcccagcaagcaacgtcagcgcctccatccaacgaatccgggagctaatcgctcagacgcgctcagtagcaagcaagattcaggtatctatgatgttcgatggccagagcgcagtcgaagtgcactccagaacatctatggacgacttgaaggccttcactagcctgtcactttacatgaagcctcccgtcaaaaggcccgaattaacagagaccgccgatcaatttatcctgtacctagggagtaagaacgctaaaaaggagtatatgggactggcgataaagaacgataacctagtgtacgtttataacctgggcacgaaagacgtggagattcccctcgactccaagcctgtgtctagttggcctgcttactttagcatcgtgaaaatcgagagagtcgggaaacatggcaaagtctttttaacagtccctagcttaagctctaccgccgaagaaaagtttatcaaaaagggcgaattctctggcgatgattcattacttgaccttgaccccgaagacacagtcttttacgtgggcggagtgccttctaactttaagttacccacgtcactgaatctgcctggatttgtgggttgtctagaactcgccactctaaacaatgatgtaattagtctgtataatttcaagcacatttacaatatggatccatccacctcggttccatgcgccagagataaacttgcatttacgcaatccagagctgcttcatacttcttcgacgggagtggatatgcagtcgtccgcgatatcacgcgtaggggcaaatttggtcaagtaaccaggtttgacatagaagtcaggactccagcagataatgggctgattctcctcatggtcaatggctccatgttttttcgcctagaaatgcgaaatggttacttacatgttttctacgacttcggcttctcagggggtcctgtgcatctggaggacacactgaagaaagcccagatcaacgacgcaaaatatcacgagatttctattatataccataacgataaaaagatgatcctcgtggttgaccggcgccacgttaaatcgatggacaacgagaagatgaaaatacccttcacagacatttacataggcggtgccccaccggagattctgcaatcccgtgccctcagagctcatctgcctctcgatatcaatttccggggatgtatgaaggggttccagttccagaagaaggatttcaatcttctcgagcagaccgagaccctgggcgtgggttacggctgccccgaggatagtttgatctccagaagagcctatttcaatggccagagcttcatagcctctattcagaagataagtttttttgacggcttcgagggggggttcaacttccggactctccagcccaatggcctgttattctactacgcctcaggctctgacgtcttctcaattagcctagataatggaacagtgataatggatgtgaaggggatcaaggtgcagagcgtggacaaacagtacaacgatggactgtcacatttcgttatctcctcggtgagccccacgcgatacgagctcattgtggacaaatctcgtgtgggctccaaaaaccctaccaaaggcaaaatcgagcagacacaggcctctgaaaaaaagttctattttggcgggtctcctatatccgcgcagtacgccaacttcactggatgcatttctaatgcttactttacaagagtcgaccgcgatgtggaagtggaggattttcagcggtacaccgaaaaggtgcacacgagcctgtatgaatgtcctatagagtcttctcctctgtttctgttgcacaagaaaggaaagaatctgtctaagccaaaagcgtcacagaacaagaagggcggcaagagcaaggacgcgccctcttgggaccctgtcgccttaaagctgcccgagcgaaatacccccaggaatagtcactgccatcttagcaattccccccgcgccattgagcatgcataccagtatggcggaacagcaaactccagacaggaatttgagcatttgaagggagatttcggtgcaaagagccagttttctatcagactcaggactcgaagtagccacggcatgatcttctatgtctcggatcaggaagaaaatgatttcatgaccttattccttgcccatgggagactcgtgtacatgttcaacgtgggtcataagaaattgaaaatccgttctcaagagaagtataatgacgggctgtggcatgacgtcatttttattagggagagaagcagcggacgcctagtcatagatggactgagagtgctggaagagtcgttgccacctactgaggccacttggaaaattaaaggaccaatctatctcggaggggtcgcacccggaaaagctgttaagaatgtacagatcaactccatctattccttcagcggctgcctatctaacctccagctgaacggggcctctatcacctccgcctcacagacattcagtgttaccccttgcttcgaaggaccgatggaaactggtacgtacttttctacagaaggcggatacgtggtacttgacgagagcttcaacatcggtctgaaattcgagattgccttcgaagtacgtccaaggtctagctcgggaacactcgtgcacggccatagcgtgaacggggaatacctcaacgtgcatatgaagaatggtcaggtcatcgtgaaagtgaacaatgggatcagggatttctctacttctgtgacacccaagcagtccctctgtgatggaagatggcatcgaattactgtgattagagactctaacgtcgtgcagttagatgttgattccgaagtgaatcacgtggtcggacctctcaacccaaaacccattgatcaccgggagccagttttcgttggaggcgtacctgagtccctgctcactccaagattggcccctagcaagccattcacgggttgtattagacattttgtgatcgatggccaccccgtgagcttttctaaagccgcccttgtaagtggagcagtctccatcaacagctgcccggccgcttag

SEQ ID NO: 41418 - DNA, 5472 bp, Artificial Sequence
  derived and/or modified sequence
atggccctaagcagcgcctggcgcagcgtgctgccactctggctcctgtggtccgccgcctgctctagggcagcctccggggatgacaacgccttcccatttgacattgagggctcaagcgctgtggggcgtcaagacccccctgaaactagtgaacctcgcgtggcattaggtcgcctgccccctgctgccgaaaagtgtaatgctggtttttttcatactctgagtggagagtgtgtcccttgtgattgtaatggcaactcaaacgaatgccttgacggatccggatactgcgtgcactgccaacgaaacaccacaggtgagcattgcgagaagtgtctggacggttatattggagactctatccgcggagcacctcaattctgtcaaccctgtccctgccctttaccacacttggctaactttgctgaaagttgctatagaaaaaacggcgctgtgaggtgcatttgtaacgagaattacgccggccccaactgtgagcgctgcgccccgggatattacggcaacccccttctgatcggcagcacttgcaagaaatgcgattgttccgggaatagtgatccaaatctgatttttgaggactgcgacgaggtgaccggccagtgccgaaattgcttaaggaataccaccggattcaagtgtgaaaggtgcgctcccggatattacggggatgccaggatagccaagaattgtgccgtttgcaattgtggaggaggtccgtgcgactccgttacaggcgaatgcctagaggaaggcttcgaaccacctacaggaatggactgtcccaccattagctgtgacaaatgcgtctgggatctaactgatgctttgagattggctgcgctgtccatcgaagaagggaagagcggtgtactcagcgtgtcaagcggcgctgctgcccatcgacacgtgaatgaaattaacgccacgatctacctgctgaaaaccaaactgagcgagagggagaatcaatacgctctcagaaaaatccaaatcaataatgcggagaacaccatgaaatccctgctttccgacgtggaggaactagtggaaaaagaaaatcaagctagtcgcaaaggtcaattagtccagaaggagagcatggacacaataaaccatgccagccagctagtggaacaagcccacgacatgcgcgataaaatccaagaaattaataacaagatgctctactatggagaagaacacgaattgtctcccaaggaaatcagcgagaaactagtgctggcccaaaaaatgctggaggagatacgtagtagacaaccctttttcactcagagagagctcgttgacgaagaagcagacgaagcatatgagctgctcagtcaggcggagagttggcagcgcctacataacgagacccgtacgttatttcccgtggtactagaacagttagatgactacaacgcaaaacttagcgaccttcaggaagccctcgaccaggcactcaactacgtccgagacgccgaggacatgaaccgtgcaactgccgctcgccaacgcgatcacgagaaacagcaagagagggtacgggagcagatggaggttgtgaatatgtcccttagtacctcggcagactctctaactacaccacggcttaccttatctgagctcgatgatataattaagaatgcttctggaatttatgctgaaatcgacggggcaaaatcagaactgcaggtgaaattatcaaaccttagcaacctttcccacgacttggtgcaggaggccatcgaccacgctcaggacttgcaacaggaggcaaacgagcttagcaggaagcttcacagtagtgacatgaacgggctggtgcaaaaagccctcgatgcctcaaacgtgtacgagaacatagtgaattatgtgagcgaagccaacgaaactgcggaatttgccctcaataccactgacagaatctatgacgccgtatcaggaatcgatacacagataatctatcacaaagacgagagtgaaaatctgctgaaccaggcaagagaactccaggcaaaggctgaatcctcaagcgacgaggcggtagcagacacgtcccgaagagtcggaggcgcactcgccaggaaatccgctctgaaaacccgactatccgatgcggtcaaacagctacaggcggccgaacgtggagacgcacagcagagacttggacagagtcgactcattacagaggaagctaacaggacaacgatggaagttcaacaggccactgctcctatggcaaataatctaaccaactggtctcagaatctacagcactttgatagcagcgcctacaacaccgccgtgaattcagcccgggacgccgtgcgaaatttaacagaagtcgtcccacagctccttgaccagctgaggaccgtggagcagaagaggccagcatctaacgtctctgccagtatccaacgaatacgggaactgatcgctcaaaccagaagcgtcgcatccaaaattcaggtgtctatgatgtttgacggtcaaagcgctgtcgaggtacattcaagaacttctatggacgatctgaaggcgtttacttccctgtctctgtacatgaaacccccagtcaaaaggccagagctgaccgagactgcagaccagtttatcctttacctgggctcaaaaaacgcaaagaaagagtatatgggccttgccatcaagaacgataacctagtgtacgtttataacctgggcacgaaagacgtggagattcccctcgactccaagcctgtgtctagttggcctgcttactttagcatcgtgaaaatcgagagagtcgggaaacatggcaaagtctttttaacagtccctagcttaagctctaccgccgaagaaaagtttatcaaaaagggcgaattctctggcgatgattcattacttgaccttgaccccgaagacacagtcttttacgtgggcggagtgccttctaactttaagttacccacgtcactgaatctgcctggatttgtgggttgtctagaactcgccactctaaacaatgatgtaattagtctgtataatttcaagcacatttacaatatggatccatccacctcggttccatgcgccagagataaacttgcatttacgcaatccagagctgcttcatacttcttcgacgggagtggatatgcagtcgtccgcgatatcacgcgtaggggcaaatttggtcaagtaaccaggtttgacatagaagtcaggactccagcagataatgggctgattctcctcatggtcaatggctccatgttttttcgcctagaaatgagaaatggatacctgcacgtgttttatgactttggatttagcggcggaccagtacacctcgaagacacactgaagaaggctcagataaatgacgcgaaataccatgaaatttcgattatatatcacaatgacaagaaaatgatactggtggtggatcggaggcacgtaaaatctatggacaacgaaaaaatgaaaattccatttacagatatatatatcggaggcgctccaccagaaatcctgcagagtcgtgccctgcgggctcacttgccattggacataaactttagaggttgcatgaaaggcttccaatttcagaaaaaggactttaacctgctcgagcaaacggagacccttggggttggctacggatgtcccgaggattccttgatttcccggcgagcttatttcaatggccagagctttatagccagtattcaaaagatcagcttcttcgatggattcgaaggtgggttcaattttaggacgctccaaccaaacggcctgctattctattacgcatcagggagcgatgtgttctcaatctccctggacaacggaaccgtcattatggatgtgaaaggaattaaagtgcaaagcgtcgacaaacaatataatgatggcctctcccattttgtcatcagttccgtctcacctactagatatgaattgatcgtggataaatctcgggtcgggtccaagaacccaacgaaaggcaaaatagaacaaacacaggctagcgaaaagaagttttattttggtgggagcccaatttctgctcagtatgctaacttcacaggttgcatttcgaacgcttacttcacacgggtcgatcgcgacgtcgaggttgaagacttccagcgctacaccgaaaaagtccatacatccttgtatgaatgccctatagaatctagtcctctgttcctcctccacaaaaaaggtaaaaatttgtctaagcccaaagccagtcagaataaaaaggggggcaagtcgaaggatgccccctcctgggatcccgtagccctcaagctccccgaaagaaatacgccccgtaactctcattgtcacctgtctaattctccacgcgccatcgaacacgcatatcagtatggaggcactgctaactcgcgccaagagtttgaacatctgaaaggagattttggcgctaagtctcaattttccataagacttcggacgcggtcttcacatggcatgatattttacgtgtccgatcaggaggaaaacgattttatgacactgttcttggcacacgggaggctcgtgtatatgtttaacgtcgggcataaaaagttaaagataaggtctcaggaaaagtacaacgacggtctttggcatgacgttatctttattagggaacggtcaagcggcagactggtaattgacgggctgcgcgttctagaggaaagtctgccacccactgaagcaacatggaaaataaaaggtccaatatatttgggaggagtggccccaggaaaggcagtcaagaacgtgcagatcaattccatctactccttctccggttgtctaagtaacttgcaactaaatggggcttcgatcacctcagctagccagacatttagcgtgaccccctgtttcgaaggaccaatggagaccggcacatatttctctacagaaggcggctatgtcgtgttggatgaatccttcaatatcggcctgaaatttgagatcgcctttgaagtccgtcctcgctcttcatccggtacactcgtccacggccactcagtcaatggagagtacctcaatgtgcatatgaaaaacggacaggttatagtgaaagttaataacggaatccgcgacttttctacgagtgtgacacctaagcagtctctgtgtgacggtcggtggcataggatcacagttattcgggattccaatgtggtgcaactagatgtggattccgaagttaatcacgtcgtcgggccgctgaaccccaaacctatcgaccatagagagcccgtttttgtcggaggagtgcccgagagcctgctgacacctcgccttgccccctcaaagccattcacgggctgcatacgccacttcgttatcgacggccatcccgtctcgttcagtaaggctgcactcgtgtctggagcagtatccataaattcttgccccgccgcctag

SEQ ID NO: 41419 - DNA, 5472 bp, Artificial Sequence
  derived and/or modified sequence
atggccctgagcagcgcctggagaagcgtgctgcccctgtggctgctgtggagcgccgcctgcagcagagccgccagcggcgacgacaacgccttccccttcgacatcgagggcagcagcgccgtgggcagacaggacccccccgagaccagcgagcccagagtggccctgggcagactgccccccgccgccgagaagtgcaacgccggcttcttccacaccctgagcggcgagtgcgtgccctgcgactgcaacggcaacagcaacgagtgcctggacggcagcggctactgcgtgcactgccagagaaacaccaccggcgagcactgcgagaagtgcctggacggctacatcggcgacagcatcagaggcgccccccagttctgccagccctgcccctgccccctgccccacctggccaacttcgccgagagctgctacagaaagaacggcgccgtgagatgcatctgcaacgagaactacgccggccccaactgcgagagatgcgcccccggctactacggcaaccccctgctgatcggcagcacctgcaagaagtgcgactgcagcggcaacagcgaccccaacctgatcttcgaggactgcgacgaggtgaccggccagtgcagaaactgcctgagaaacaccaccggcttcaagtgcgagagatgcgcccccggctactacggcgacgccagaatcgccaagaactgcgccgtgtgcaactgcggcggcggcccctgcgacagcgtgaccggcgagtgcctggaggagggcttcgagccccccaccggcatggactgccccaccatcagctgcgacaagtgcgtgtgggacctgaccgacgccctgagactggccgccctgagcatcgaggagggcaagagcggcgtgctgagcgtgagcagcggcgccgccgcccacagacacgtgaacgagatcaacgccaccatctacctgctgaagaccaagctgagcgagagagagaaccagtacgccctgagaaagatccagatcaacaacgccgagaacaccatgaagagcctgctgagcgacgtggaggagctggtggagaaggagaaccaggccagcagaaagggccagctggtgcagaaggagagcatggacaccatcaaccacgccagccagctggtggagcaggcccacgacatgagagacaagatccaggagatcaacaacaagatgctgtactacggcgaggagcacgagctgagccccaaggagatcagcgagaagctggtgctggcccagaagatgctggaggagatcagaagcagacagcccttcttcacccagagagagctggtggacgaggaggccgacgaggcctacgagctgctgagccaggccgagagctggcagagactgcacaacgagaccagaaccctgttccccgtggtgctggagcagctggacgactacaacgccaagctgagcgacctgcaggaggccctggaccaggccctgaactacgtgagagacgccgaggacatgaacagagccaccgccgccagacagagagaccacgagaagcagcaggagagagtgagagagcagatggaggtggtgaacatgagcctgagcaccagcgccgacagcctgaccacccccagactgaccctgagcgagctggacgacatcatcaagaacgccagcggcatctacgccgagatcgacggcgccaagagcgagctgcaggtgaagctgagcaacctgagcaacctgagccacgacctggtgcaggaggccatcgaccacgcccaggacctgcagcaggaggccaacgagctgagcagaaagctgcacagcagcgacatgaacggcctggtgcagaaggccctggacgccagcaacgtgtacgagaacatcgtgaactacgtgagcgaggccaacgagaccgccgagttcgccctgaacaccaccgacagaatctacgacgccgtgagcggcatcgacacccagatcatctaccacaaggacgagagcgagaacctgctgaaccaggccagagagctgcaggccaaggccgagagcagcagcgacgaggccgtggccgacaccagcagaagagtgggcggcgccctggccagaaagagcgccctgaagaccagactgagcgacgccgtgaagcagctgcaggccgccgagagaggcgacgcccagcagagactgggccagagcagactgatcaccgaggaggccaacagaaccaccatggaggtgcagcaggccaccgcccccatggccaacaacctgaccaactggagccagaacctgcagcacttcgacagcagcgcctacaacaccgccgtgaacagcgccagagacgccgtgagaaacctgaccgaggtggtgccccagctgctggaccagctgagaaccgtggagcagaagagacccgccagcaacgtgagcgccagcatccagagaatcagagagctgatcgcccagaccagaagcgtggccagcaagatccaggtgagcatgatgttcgacggccagagcgccgtggaggtgcacagcagaaccagcatggacgacctgaaggccttcaccagcctgagcctgtacatgaagccccccgtgaagagacccgagctgaccgagaccgccgaccagttcatcctgtacctgggcagcaagaacgccaagaaggagtacatgggcctggccatcaagaacgacaacctggtgtacgtgtacaacctgggcaccaaggacgtggagatccccctggacagcaagcccgtgagcagctggcccgcctacttcagcatcgtgaagatcgagagagtgggcaagcacggcaaggtgttcctgaccgtgcccagcctgagcagcaccgccgaggagaagttcatcaagaagggcgagttcagcggcgacgacagcctgctggacctggaccccgaggacaccgtgttctacgtgggcggcgtgcccagcaacttcaagctgcccaccagcctgaacctgcccggcttcgtgggctgcctggagctggccaccctgaacaacgacgtgatcagcctgtacaacttcaagcacatctacaacatggaccccagcaccagcgtgccctgcgccagagacaagctggccttcacccagagcagagccgccagctacttcttcgacggcagcggctacgccgtggtgagagacatcaccagaagaggcaagttcggccaggtgaccagattcgacatcgaggtgagaacccccgccgacaacggcctgatcctgctgatggtgaacggcagcatgttcttcagactggagatgagaaacggctacctgcacgtgttctacgacttcggcttcagcggcggccccgtgcacctggaggacaccctgaagaaggcccagatcaacgacgccaagtaccacgagatcagcatcatctaccacaacgacaagaagatgatcctggtggtggacagaagacacgtgaagagcatggacaacgagaagatgaagatccccttcaccgacatctacatcggcggcgccccccccgagatcctgcagagcagagccctgagagcccacctgcccctggacatcaacttcagaggctgcatgaagggcttccagttccagaagaaggacttcaacctgctggagcagaccgagaccctgggcgtgggctacggctgccccgaggacagcctgatcagcagaagagcctacttcaacggccagagcttcatcgccagcatccagaagatcagcttcttcgacggcttcgagggcggcttcaacttcagaaccctgcagcccaacggcctgctgttctactacgccagcggcagcgacgtgttcagcatcagcctggacaacggcaccgtgatcatggacgtgaagggcatcaaggtgcagagcgtggacaagcagtacaacgacggcctgagccacttcgtgatcagcagcgtgagccccaccagatacgagctgatcgtggacaagagcagagtgggcagcaagaaccccaccaagggcaagatcgagcagacccaggccagcgagaagaagttctacttcggcggcagccccatcagcgcccagtacgccaacttcaccggctgcatcagcaacgcctacttcaccagagtggacagagacgtggaggtggaggacttccagagatacaccgagaaggtgcacaccagcctgtacgagtgccccatcgagagcagccccctgttcctgctgcacaagaagggcaagaacctgagcaagcccaaggccagccagaacaagaagggcggcaagagcaaggacgcccccagctgggaccccgtggccctgaagctgcccgagagaaacacccccagaaacagccactgccacctgagcaacagccccagagccatcgagcacgcctaccagtacggcggcaccgccaacagcagacaggagttcgagcacctgaagggcgacttcggcgccaagagccagttcagcatcagactgagaaccagaagcagccacggcatgatcttctacgtgagcgaccaggaggagaacgacttcatgaccctgttcctggcccacggcagactggtgtacatgttcaacgtgggccacaagaagctgaagatcagaagccaggagaagtacaacgacggcctgtggcacgacgtgatcttcatcagagagagaagcagcggcagactggtgatcgacggcctgagagtgctggaggagagcctgccccccaccgaggccacctggaagatcaagggccccatctacctgggcggcgtggcccccggcaaggccgtgaagaacgtgcagatcaacagcatctacagcttcagcggctgcctgagcaacctgcagctgaacggcgccagcatcaccagcgccagccagaccttcagcgtgaccccctgcttcgagggccccatggagaccggcacctacttcagcaccgagggcggctacgtggtgctggacgagagcttcaacatcggcctgaagttcgagatcgccttcgaggtgagacccagaagcagcagcggcaccctggtgcacggccacagcgtgaacggcgagtacctgaacgtgcacatgaagaacggccaggtgatcgtgaaggtgaacaacggcatcagagacttcagcaccagcgtgacccccaagcagagcctgtgcgacggcagatggcacagaatcaccgtgatcagagacagcaacgtggtgcagctggacgtggacagcgaggtgaaccacgtggtgggccccctgaaccccaagcccatcgaccacagagagcccgtgttcgtgggcggcgtgcccgagagcctgctgacccccagactggcccccagcaagcccttcaccggctgcatcagacacttcgtgatcgacggccaccccgtgagcttcagcaaggccgccctggtgagcggcgccgtgagcatcaacagctgccccgccgcctag

SEQ ID NO: 41420 - DNA, 5472 bp, Artificial Sequence
  derived and/or modified sequence
atggccctatcttctgcatggagatctgtcctgcccctctggctgctctggtccgcggcctgctctcgcgccgcctcgggcgacgataacgcattcccctttgatattgaggggtccagcgctgtggggcgacaggatccacccgaaacgtctgagccaagagtagcccttgggcggctgccccccgcagcagagaaatgcaacgccggtttttttcataccctgtccggtgaatgcgtgccttgcgactgcaacggtaactccaatgagtgtcttgacgggagtggttactgcgtgcattgtcaaaggaataccacaggagagcactgcgagaaatgtctggacggctatatcggggatagcattcggggagctccacagttttgtcagccatgcccttgtcccctaccccacctcgccaattttgcggaaagctgttatagaaaaaacggcgctgtacgatgcatctgtaatgaaaattatgccggtcctaactgcgagagatgcgctcccggatactatggaaatcccctcctgattggtagtacttgtaaaaagtgtgactgtagcgggaactcagatccgaacctgatttttgaggactgcgacgaggtaaccggccagtgccgcaactgcttacggaataccaccgggttcaaatgcgagcgttgtgccccaggctattatggcgatgcaaggatcgccaagaattgcgcagtttgtaactgcggtggggggccctgtgacagtgtaactggggagtgcctagaagaaggcttcgagccccctactggcatggactgccccacaatttcatgtgataaatgtgtctgggacctgactgacgctttgcgcctcgccgccctgtcaatcgaagagggaaagtccggggtgctgagtgtaagttccggcgccgctgcccaccggcacgtgaatgaaatcaatgctaccatatatcttcttaagacaaaactctctgaacgcgaaaaccagtatgccctgcggaaaattcagatcaataacgccgagaatacaatgaaatccctgctttcagacgtcgaagaacttgtagagaaggaaaatcaggctagtcgtaagggacaactagtgcagaaagaaagcatggacactattaatcacgcctcccagcttgtagagcaagctcacgatatgcgcgataaaatacaagaaattaacaacaaaatgctgtactacggcgaggagcatgagctctcccccaaagagatctctgaaaagctcgtactggcccaaaagatgctggaagagatacggagtcggcaaccattttttactcagcgtgagctggttgacgaggaggctgatgaggcttacgaactgctgagccaggctgaatcttggcagcggctccataatgaaactcggaccctttttcctgtggtcctggagcaactggatgattacaacgccaagctgtccgaccttcaggaagctctggaccaggcgctcaactacgtcagagacgccgaggatatgaatagggctaccgctgcccggcagagagaccacgaaaagcaacaggagagagtgcgagaacaaatggaggtcgtgaacatgagcctctcaacaagcgctgacagcctgacaactcctcggctgaccctgtctgaactcgacgacatcatcaaaaacgcgagcggcatctacgctgagattgatggggcaaagtctgaactacaggtgaaactgtccaacttaagcaacctgtcccatgacttggtgcaggaggcgatcgaccatgcccaggacctgcagcaggaggccaacgaactaagcagaaagctccactcatctgatatgaacgggctagtgcagaaagccctggacgcttcgaatgtgtacgaaaacatcgtcaactacgtcagcgaggctaatgaaaccgctgagttcgctctgaacacaacagataggatttacgacgccgtgtccggcattgacacacagatcatttaccacaaggatgaatctgaaaatctactgaatcaagcaagagagctacaggcaaaagccgaatccagctcagatgaagcagtcgctgataccagtagaagagtgggcggtgctctggcccggaagtccgctcttaagactagactgagcgacgccgtgaaacagctgcaagcagcggaacgcggtgatgcccagcaaagactaggtcagagcagactgatcaccgaagaggccaatcgaaccaccatggaagtccaacaggccacagccccgatggccaacaatctgaccaattggtcacagaatcttcagcacttcgacagctctgcctacaatactgcagtcaacagtgccagagatgccgttcgcaatttgaccgaggtggtcccccagttattggatcagttgagaacagtggagcaaaagagaccggcctcaaacgtatccgcaagcattcagaggatcagggagctgatcgctcaaacccgctccgttgcctccaaaatccaagtttctatgatgtttgatggacagtctgcagtcgaagtgcattcacggacctctatggacgaccttaaggcttttacctcacttagcctgtacatgaagccgcctgttaagaggcccgagctcactgagacagcagatcaattcatcctataccttgggagtaagaatgctaagaaagaatacatggggctcgctatcaaaaacgacaatcttgtgtacgtctataatctgggaaccaaggacgtggaaataccgctggatagcaagccagtgagctcgtggcctgcctatttcagtatcgtaaagatcgagcgggtgggcaagcacggcaaggtattcctcaccgtgccttccctctcaagcaccgccgaggaaaagttcattaagaaaggcgagttctccggcgacgactctctcctggatttagacccagaagataccgtgttttatgtgggcggggtgccttctaattttaaactgcctacgagtctgaaccttcccggcttcgtaggatgcctagagctggcgaccctgaataatgatgtgatcagcctctataatttcaagcacatctacaatatggacccatctactagtgtgccatgtgcgagagataaactggccttcacccaaagtcgtgcggccagttatttcttcgacggctctggttacgcagtggtcagagatatcacccgccggggtaaatttggtcaggtgacccgctttgatattgaagtgcgtacgcccgcagacaacggcctcatcctgctaatggtcaatggctcaatgttttttcgccttgagatgcggaatgggtatttgcacgtgttttatgattttggatttagcggaggtcctgtacatctggaagacacactgaagaaggcccaaatcaacgacgctaaatatcatgaaatctctatcatatatcacaacgataaaaaaatgattctggtggtagacaggcggcatgtgaagtccatggacaacgaaaagatgaaaatcccttttacggatatctacatcggaggcgccccccctgaaatactccaaagtagagccctccgggcgcacctaccactcgatattaatttccggggctgtatgaagggcttccagttccagaaaaaggatttcaatcttttagaacaaactgagaccctcggcgtcgggtatggctgcccagaggactccctgatctcacgccgcgcttactttaacggacagagttttatcgccagcattcaaaagatcagcttttttgacggttttgagggcgggtttaatttcagaactcttcaacctaacggcctcctgttttactatgcatctggctctgatgtctttagcattagtttggataatggaaccgtgatcatggatgtcaaaggcatcaaagtccagtccgtagacaaacagtacaacgacggtctctcccactttgtgatttcctctgtgagtcctaccaggtacgagctcattgtggacaagagtcgagtgggcagtaaaaacccaaccaaggggaagatcgagcagacgcaagcttcagagaaaaagttctatttcggcggttccccaatctcagcccagtatgccaacttcacgggttgtatctcgaatgcctatttcacaagagtagatcgcgacgtcgaggtggaggactttcagcggtatactgagaaggtacacacatcactgtatgagtgccctatcgagtccagtcctttgtttctgcttcacaaaaaaggtaagaacttatcgaagccaaaggccagtcagaataaaaagggaggcaaatccaaggacgccccatcttgggatccagtggctctcaaactcccggagcgcaacacaccacgaaattcacactgccacctatcgaactccccacgtgctatcgaacatgcctaccaatacgggggcacagcaaactcacggcaggagtttgaacacctgaagggggactttggcgcgaaaagccagttctccatccggttgagaactaggagcagtcacggcatgatcttctacgtttctgatcaggaagagaatgatttcatgacacttttcctagctcacggccggctagtgtacatgtttaatgtcggccacaagaagctgaagattcgctcgcaggagaagtataatgatggcctgtggcatgacgtcatctttatccgggagcgctcaagcggaagacttgtgatcgacggcctgagagttctggaggaatctctgccacctaccgaggccacatggaagataaaggggcccatttatctcgggggcgttgccccaggcaaggcagtcaagaatgtccagatcaactccatatatagcttctctggctgcctgagtaacctccagctgaatggcgcctcaatcacatctgcaagccagaccttctcagtaactccttgcttcgagggcccaatggagacaggcacgtatttttccaccgagggagggtatgtggttctagatgagtccttcaatattggactgaagtttgaaattgcctttgaggtcagaccccggtcttcaagcggaacccttgtgcatggccatagcgttaacggggaatacctcaatgtgcatatgaagaatggtcaagttatcgtgaaagtgaacaatgggattagggactttagtacctcagtgactcccaagcagtccttatgtgacgggcgctggcatcgaattacggttataagggactcaaatgtggttcaactggatgtggactccgaagtgaatcacgtggtggggccacttaatcctaaaccaatcgaccaccgggagcctgttttcgtcgggggcgtccccgaaagtctcctaacccctaggctggcaccatccaaaccttttactggctgtattcggcacttcgtgatagatggtcatcctgtttccttttctaaggctgcactggtgtcgggtgctgtctctatcaatagttgccctgccgcgtag

SEQ ID NO: 41421 - DNA, 5472 bp, Artificial Sequence
  derived and/or modified sequence
atggccctgagcagcgcctggaggtctgtgctgcccctgtggctgctgtggagcgctgcctgcagccgggccgccagcggagatgacaatgccttcccctttgacatcgagggcagcagcgctgtgggccggcaggaccccccagagaccagcgagccccgggtggccctgggccgcctgcccccagctgctgagaagtgcaatgccggcttcttccacaccctgagcggggagtgtgtgccctgtgactgcaatggaaacagcaatgaatgtctggatggcagcggctactgtgtgcactgccagaggaacaccaccggggagcactgtgagaagtgcctggatggctacatcggggacagcatccggggggccccccagttctgccagccctgcccctgccccctgccccacctggccaactttgctgagagctgctacaggaagaatggagctgtgcgctgcatctgcaatgaaaattatgccggccccaactgtgagcgctgtgcccctggctactacggcaaccccctgctgattggcagcacctgcaagaagtgtgactgcagcggcaacagcgaccccaacctgatctttgaggactgtgatgaggtgacaggccagtgcaggaactgcctgaggaacaccaccggcttcaagtgtgagcgctgtgcccctggctactatggagatgcccgcatcgccaagaactgtgctgtgtgcaactgtggcggcggcccctgtgacagcgtgactggagagtgcctggaggagggctttgagccccccaccggcatggactgccccaccatcagctgtgacaagtgtgtgtgggacctgacagatgccctgcggctggccgccctgagcattgaggagggcaagagcggcgtgctgtctgtgtcctctggagctgctgcccaccgccacgtgaatgagatcaatgccaccatctacctgctgaagaccaagctgtctgaaagagagaaccagtatgccctgaggaagatccagatcaacaatgctgagaacaccatgaagagcctgctgagtgatgtggaggagctggtggagaaggagaaccaggccagcaggaagggccagctggtgcagaaggagagcatggacaccatcaaccacgccagccagctggtggagcaggcccatgacatgagggacaagatccaggagatcaacaacaagatgctgtactatggagaggagcacgagctgagccccaaggagatcagcgagaagctggtgctggcccagaagatgctggaggagatccgcagccggcagcccttcttcacccagcgggagctggtggatgaggaggctgatgaggcctatgagctgctgagccaggccgagagctggcagaggctgcacaatgagaccaggaccctcttccctgtggtgctggagcagctggatgactacaatgccaagctgagtgacctgcaggaggccctggaccaggccctgaactacgtgagagatgctgaggacatgaacagagccacagctgcccggcagagggaccacgagaagcagcaggagcgggtgcgggagcagatggaggtggtgaacatgagcctgagcaccagcgctgacagcctgaccaccccccggctgaccctgtctgagctggatgacatcatcaagaatgccagcggcatctatgcagaaattgatggagccaagtctgagctgcaggtgaagctgagcaacctgagcaacctgagccatgacctggtgcaggaggccatcgaccacgcccaggacctgcagcaggaggccaatgagctgagcaggaagctgcacagcagtgacatgaatggcctggtgcagaaggccctggatgccagcaatgtgtatgagaacatcgtgaactacgtgtctgaggccaatgaaacagctgagtttgccctgaacaccacagaccgcatctatgatgctgtgtctggcatcgacacccagatcatctaccacaaggatgaaagtgagaacctgctgaaccaggcccgggagctgcaggccaaggccgagagcagcagtgatgaggccgtggccgacaccagccggcgggtgggcggggccctggccaggaagagcgccctgaagacccggctgagtgatgctgtgaagcagctgcaggccgctgagagaggagatgcccagcagaggctgggccagagccgcctcatcacagaggaggccaacagaaccaccatggaggtgcagcaggccacagcccccatggccaacaacctgaccaactggagccagaacctgcagcactttgacagcagcgcctacaacacagctgtgaacagcgccagagatgctgtgaggaacctgacagaggtggtgccccagctgctggaccagctgaggacagtggagcagaagaggcctgccagcaatgtgtctgccagcatccagaggatccgggagctgattgcccagaccaggtctgtggccagcaagatccaggtgtccatgatgtttgatggccagagcgctgtggaggtgcacagcaggacctccatggatgacctgaaggccttcaccagcctgagcctgtacatgaagccccctgtgaagaggcctgagctgacagaaacagctgaccagttcatcctgtacctgggcagcaagaatgccaagaaggagtacatgggcctggccatcaagaatgacaacctggtgtatgtgtacaacctgggcaccaaggatgtggagatccccctggacagcaagcctgtgtcctcctggccagcctacttcagcatcgtgaagattgaaagagtgggcaagcacggcaaggtgttcctgactgtgcccagcctgagcagcacagctgaggagaagttcatcaagaagggggagttctctggagatgacagcctgctggacctggaccctgaggacaccgtcttctacgtgggcggcgtgcccagcaacttcaagctgcccaccagcctgaacctgcccggctttgtgggctgcctggagctggccaccctgaacaatgatgtgatcagcctgtacaacttcaagcacatctacaacatggaccccagcacctctgtgccctgtgcccgggacaagctggccttcacccagagcagagctgccagctacttctttgatggcagcggctatgctgtggtgcgggacatcacccggcggggcaagtttggccaggtgaccaggtttgatattgaggtgaggaccccagctgacaatggcctcatcctgctgatggtgaatggctccatgttcttccggctggagatgagaaatggctacctgcacgtgttctatgactttggcttcagcggcggccctgtgcacctggaggacaccctgaagaaggcccagatcaatgatgccaagtaccacgagatcagcatcatctaccacaatgacaagaagatgatcctggtggtggacagaagacatgtgaagtccatggacaatgagaagatgaagatccccttcacagacatctacatcggcggggcccctcctgagatcctgcagagccgggccctgcgggcccacctgcccctggacatcaacttccggggctgcatgaagggcttccagttccagaagaaggacttcaacctgctggagcagacagagaccctgggcgtgggctacggctgcccagaggacagcctcatcagcagaagagcctacttcaacggccagagcttcatcgccagcatccagaagatctccttctttgatggctttgaaggaggcttcaacttccgcaccctgcagcccaacggcctgctcttctactatgccagcggcagtgatgtgttcagcatcagcctggacaatggcaccgtcatcatggatgtgaagggcatcaaggtgcagagcgtggacaagcagtacaatgatggcctgagccacttcgtcatcagctctgtgagccccaccaggtatgagctgattgtggacaagagccgggtgggcagcaagaaccccaccaagggcaagattgagcagacccaggccagcgagaagaagttctactttggaggcagccccatcagcgcccagtatgccaacttcaccggctgcatcagcaatgcctacttcaccagggtggacagagatgtggaggtggaggacttccagcgctacacagagaaggtgcacaccagcctgtatgaatgtcccatcgagagcagccccctcttcctgctgcacaagaagggcaagaacctgagcaagcccaaggccagccagaacaagaagggcggcaagagcaaggatgcccccagctgggaccctgtggccctgaagctgcctgagaggaacaccccaagaaacagccactgccacctgagcaacagcccccgggccatcgagcacgcctaccagtatggaggaacagccaacagccggcaggagtttgagcacctgaagggggactttggagccaagagccagttcagcatccggctgcggaccaggagcagccacggcatgatcttctacgtgtctgaccaggaggagaatgacttcatgaccctcttcctggcccacggccgcctggtgtacatgttcaacgtgggccacaagaagctgaagatccgcagccaggagaagtacaatgatggcctgtggcatgatgtgatcttcatccgggagaggagcagcggccgcctggtgattgatggcctgcgggtgctggaggagagcctgcccccaacagaggccacctggaagatcaagggccccatctacctgggcggcgtggcccctgggaaggctgtgaagaatgtgcagatcaacagcatctacagcttcagcggctgcctgagcaacctgcagctgaatggagccagcatcaccagcgccagccagaccttctctgtgaccccctgctttgagggccccatggagaccggcacctacttcagcacagaaggaggctacgtggtgctggatgagagcttcaacatcggcctgaagtttgagatcgcctttgaggtgcggcccaggagcagcagcggcaccctggtgcacggccacagcgtgaatggagagtacctgaatgtgcacatgaagaatggccaggtgattgtgaaggtgaacaacggcatccgggacttcagcacctctgtgacccccaagcagagcctgtgtgatggccgctggcaccgcatcaccgtcatccgggacagcaatgtggtgcagctggatgtggacagcgaggtgaaccacgtggtgggccccctgaaccccaagcccatcgaccaccgggagcctgtgtttgtgggcggcgtgcctgagagcctgctgaccccccggctggcccccagcaagcccttcaccggctgcatccgccactttgtgattgatggccaccctgtgtccttcagcaaggccgccctggtgtctggagctgtgtccatcaacagctgcccagctgcctag

SEQ ID NO: 41422 - DNA, 5472 bp, Artificial Sequence
  derived and/or modified sequence
atggccctgagcagcgcctggcggagcgtgctgcccctgtggctgctttggtcggccgcgtgcagcagggccgcctccggggacgacaacgcattcccatttgacatagaaggcagcagcgccgtcggtcgacaggatccccccgagacaagtgaacctcgagtggccctcgggagactcccacctgcagccgagaagtgtaatgcaggattctttcatactctgtctggggaatgtgttccttgcgactgcaacggcaatagcaacgaatgtctggacggaagcggctactgcgtgcattgccagcggaataccacaggtgaacattgtgaaaaatgtctcgacggatatatcggagatagcattagaggtgcccctcagttttgccagccatgcccatgtcctttaccacacttggcgaattttgcagagtcgtgctatagaaaaaatggcgcggttaggtgtatctgcaatgagaattacgcgggccctaactgtgagcggtgcgcgcctggatattacgggaaccccctcctgatcggaagtacatgtaagaagtgtgactgcagcggcaactctgaccctaacctaatctttgaagattgtgacgaagtgactggccagtgcagaaactgtctgagaaacacaaccggctttaaatgtgaacggtgcgcccctggctactatggagatgctaggatcgccaaaaattgtgctgtctgcaactgtggtgggggaccctgcgattctgtgacaggggagtgcttagaagaggggttcgagccacctaccggaatggactgcccaaccatctcatgcgataagtgtgtgtgggatctgactgatgctctgaggcttgctgcactcagtattgaggaggggaagagcggggtcctctccgttagctccggggctgcagcgcaccggcatgtgaatgagatcaatgcaactatatatttgttgaagactaagttatccgagcgggaaaatcagtacgccctgcggaaaatacagattaataatgcagagaataccatgaagtccttgttgtccgatgtcgaagagttggtggaaaaggaaaaccaagcgagcaggaagggccagctcgtacagaaagaaagcatggacactattaatcacgcttcgcagctggtagagcaggcccacgatatgcgcgataagatccaggaaattaacaacaagatgctgtactatggagaggaacatgaactgtcacctaaggagatatccgaaaaactggtgttagctcagaagatgctggaagagatacgcagccggcagcctttcttcactcaaagggagctggtggacgaagaagctgacgaggcctacgagctcctctctcaagccgagagttggcagcgtttgcataatgagacccgcactctgtttccagtagtgctggagcagctggacgattataatgccaagctgtccgacctgcaggaggctctggatcaggctctcaactacgtgcgcgacgcagaagatatgaatagagctaccgccgccaggcaacgcgaccacgaaaagcagcaagaacgcgtccgggaacagatggaggtggtcaacatgagtctctctaccagcgccgattctttgaccactccacggcttaccctcagcgaactagatgatatcatcaaaaatgcatcaggaatctacgcagagatcgatggggccaagtcagagctgcaggttaagctgagcaacctatccaatttgtctcatgacttagtgcaggaagccatcgaccatgcacaggacctccagcaggaggccaatgaactctctagaaagttgcattcttctgacatgaatggtctggtgcagaaagcactcgacgcctccaacgtttatgaaaatatcgtcaactatgttagcgaagcaaatgaaaccgcggagttcgccctgaatactactgataggatatacgatgccgtctcaggaatcgacacccaaattatctatcacaaggatgagagtgagaacctgctcaaccaggcacgagagctgcaggcaaaagcagaatccagttccgatgaagcagtggcggacaccagtcgccgagtgggcggagccctggcacgaaagtccgccttaaagacaaggctgtccgacgcagtaaaacagttgcaggcagccgaacgtggagacgcacagcagcggctcgggcaaagccgccttatcaccgaagaagccaatcggaccacaatggaagtgcaacaggctacagctccaatggccaacaacctgaccaactggagccagaacctgcagcactttgactcttccgcctacaatacagctgtgaattctgccagggacgcagtgagaaatctgaccgaggtcgtgccccagctcttagatcagctacggacagtagaacagaaaaggcctgcctcaaacgtgagtgcgagcattcagaggattagagaactgatagcccagaccaggagtgtagcaagcaaaattcaagtatctatgatgtttgacgggcagtcggccgtggaggtgcactctagaacaagcatggacgatctcaaggctttcacttccctcagcttgtacatgaagcctcctgtgaagcgcccggaactgactgagacggctgatcagttcatactgtatcttggaagcaaaaacgcgaagaaggaatatatggggctcgccattaaaaatgacaatctcgtatatgtttacaatctcggcaccaaagacgtagagatacccttagactctaagccagtatcatcttggccagcatactttagcatcgttaaaatcgagcgggtaggcaagcacggcaaagtgttcctgaccgtacccagcctctcctcaacggctgaggagaagtttattaaaaagggggagttcagcggagacgattctctgcttgacctcgaccccgaggatacagtattctatgtcggcggggtgccctccaatttcaagcttccaacatcgctgaatctgcctgggtttgttggctgcctggagctggcaaccctaaacaacgacgttatctcgctatacaatttcaaacatatctataacatggacccgtcgacatcagtcccgtgcgccagggacaaactcgcatttactcagtccagggccgcatcttacttcttcgacggctctgggtatgcggtagtgcgggatatcacacgtagggggaagtttggacaggtaacgagattcgacattgaagtgaggactcccgccgacaatggccttatcttgctgatggtgaacgggagcatgttctttcgcttagagatgagaaacggttacctccacgtcttttacgactttggttttagcggcggacccgtgcatttggaggataccctgaagaaagcccaaattaacgatgctaaatatcatgaaatcagcatcatttaccacaatgataaaaagatgatcttggtggttgataggcgccacgtaaaaagcatggataacgaaaaaatgaaaatccctttcaccgatatctacatcggtggtgctccgcctgagatcctacagtcccgcgcactgagagctcacctgccgctcgacatcaatttccgtggctgtatgaaggggttccagtttcaaaaaaaggatttcaatcttcttgaacagacagagacccttggtgtgggatacgggtgccccgaggactccctgatcagccggagagcctactttaacggtcagtccttcatcgcatctattcagaagatttcatttttcgacggctttgagggcggcttcaacttccgtaccctgcaacccaacggcctcttgttctattacgccagcggctctgacgtgttttccatcagcctcgataacggaacagtcataatggatgttaaagggattaaagtgcagagcgtggacaaacagtataacgacggcctgtcccacttcgtgatttctagtgtgagcccaaccaggtacgagctgattgttgacaaatctagagttggttccaaaaaccctactaagggcaaaattgagcaaacacaggcaagcgagaaaaagttctacttcggcggctcacctatctctgctcagtacgcaaacttcacagggtgtatctcaaacgcgtacttcactcgggtggaccgcgatgtcgaggttgaggatttccagagatatactgaaaaagtgcacactagtctgtacgaatgtccaattgaatcttctcctttatttttactacataagaaagggaagaacctgtccaaacccaaagcttcacagaataagaaaggcgggaagtccaaggacgcgcctagttgggaccctgtggctctcaaattgcctgaacgcaatacccctcgaaatagtcattgccatctctctaattctcctagggctattgagcatgcatatcaatatggcggtactgctaactcaagacaggagttcgaacacctaaagggagatttcggcgctaaatcccagttcagcatcaggctgcgaaccaggtcatcacatggtatgatcttttatgttagtgatcaagaagagaacgattttatgaccctgtttcttgcacacggcagactcgtgtatatgtttaacgtgggccacaagaagttaaaaatcagaagccaggagaagtataacgatggactgtggcacgatgtaatcttcattcgagaaagatcctctggacgccttgtgatagacggcctccgggtcttagaggagtccctcccgcctactgaggccacctggaaaattaaggggcctatttacttgggaggggttgcccctggaaaggctgtgaagaatgttcagatcaactcaatttacagtttctccgggtgcctctccaatcttcaactcaatggggcctccatcacttcagctagccagactttctcagtgacaccctgcttcgaagggcctatggaaaccggcacctacttttccacagagggagggtacgtggttctggatgaaagtttcaacatcggacttaagttcgaaatagcgtttgaggtacgcccgaggtcctcaagcggcaccctggtgcacggccactcggtcaacggcgagtacttgaatgtgcacatgaagaatggtcaggtgattgtgaaggtcaataacgggatcagggactttagtaccagtgttacacctaaacagtctctttgtgacggcagatggcaccgtatcacggtgattcgtgactctaatgtcgtccagttggatgtcgactccgaagtcaaccatgtagtgggcccattgaatccaaaaccaatcgaccacagagagcctgtgttcgttggcggcgtgccagagagtctgcttacacccagactggcgcccagtaaacctttcacaggttgtatcaggcattttgtgatcgacggacaccctgtctcgttctctaaggccgcgctggtgagcggagcggtgtcaatcaactcttgccccgccgcctag

SEQ ID NO: 41423 - DNA, 5472 bp, Artificial Sequence
  derived and/or modified sequence
atggccctgagcagcgcctggagaagcgtgctgcccctgtggctgctgtggagcgccgcctgcagcagagccgccagcggcgacgacaacgccttccccttcgacatcgagggcagcagcgccgtgggcagacaggacccccccgagaccagcgagcccagagtggccctgggcagactgccccccgccgccgagaagtgcaacgccggcttcttccacaccctgagcggcgagtgcgtgccctgcgactgcaacggcaacagcaacgagtgcctggacggcagcggctactgcgtgcactgccagagaaacaccaccggcgagcactgcgagaagtgcctggacggctacatcggcgacagcatcagaggcgccccccagttctgccagccctgcccctgccccctgccccacctggccaacttcgccgagagctgctacagaaagaacggcgccgtgagatgcatctgcaacgagaactacgccggccccaactgcgagagatgcgcccccggctactacggcaaccccctgctgatcggcagcacctgcaagaagtgcgactgcagcggcaacagcgaccccaacctgatcttcgaggactgcgacgaggtgaccggccagtgcagaaactgcctgagaaacaccaccggcttcaagtgcgagagatgcgcccccggctactacggcgacgccagaatcgccaagaactgcgccgtgtgcaactgcggcggcggcccctgcgacagcgtgaccggcgagtgcctggaggagggcttcgagccccccaccggcatggactgccccaccatcagctgcgacaagtgcgtgtgggacctgaccgacgacctgagactggccgccctgagcatcgaggagggcaagagcggcgtgctgagcgtgagcagcggcgccgccgcccacagacacgtgaacgagatcaacgccaccatctacctgctgaagaccaagctgagcgagagagagaaccagtacgccctgagaaagatccagatcaacaacgccgagaacaccatgaagagcctgctgagcgacgtggaggagctggtggagaaggagaaccaggccagcagaaagggccagctggtgcagaaggagagcatggacaccatcaaccacgccagccagctggtggagcaggcccacgacatgagagacaagatccaggagatcaacaacaagatgctgtactacggcgaggagcacgagctgagccccaaggagatcagcgagaagctggtgctggcccagaagatgctggaggagatcagaagcagacagcccttcttcacccagagagagctggtggacgaggaggccgacgaggcctacgagctgctgagccaggccgagagctggcagagactgcacaacgagaccagaaccctgttccccgtggtgctggagcagctggacgactacaacgccaagctgagcgacctgcaggaggccctggaccaggccctgaactacgtgagagacgccgaggacatgaacagagccaccgccgccagacagagagaccacgagaagcagcaggagagagtgagagagcagatggaggtggtgaacatgagcctgagcaccagcgccgacagcctgaccacccccagactgaccctgagcgagctggacgacatcatcaagaacgccagcggcatctacgccgagatcgacggcgccaagagcgagctgcaggtgaagctgagcaacctgagcaacctgagccacgacctggtgcaggaggccatcgaccacgcccaggacctgcagcaggaggccaacgagctgagcagaaagctgcacagcagcgacatgaacggcctggtgcagaaggccctggacgccagcaacgtgtacgagaacatcgtgaactacgtgagcgaggccaacgagaccgccgagttcgccctgaacaccaccgacagaatctacgacgccgtgagcggcatcgacacccagatcatctaccacaaggacgagagcgagaacctgctgaaccaggccagagagctgcaggccaaggccgagagcagcagcgacgaggccgtggccgacaccagcagaagagtgggcggcgccctggccagaaagagcgccctgaagaccagactgagcgacgccgtgaagcagctgcaggccgccgagagaggcgacgcccagcagagactgggccagagcagactgatcaccgaggaggccaacagaaccaccatggaggtgcagcaggccaccgcccccatggccaacaacctgaccaactggagccagaacctgcagcacttcgacagcagcgcctacaacaccgccgtgaacagcgccagagacgccgtgagaaacctgaccgaggtggtgccccagctgctggaccagctgagaaccgtggagcagaagagacccgccagcaacgtgagcgccagcatccagagaatcagagagctgatcgcccagaccagaagcgtggccagcaagatccaggtgagcatgatgttcgacggccagagcgccgtggaggtgcacagcagaaccagcatggacgacctgaaggccttcaccagcctgagcctgtacatgaagccccccgtgaagagacccgagctgaccgagaccgccgaccagttcatcctgtacctgggcagcaagaacgccaagaaggagtacatgggcctggccatcaagaacgacaacctggtgtacgtgtacaacctgggcaccaaggacgtggagatccccctggacagcaagcccgtgagcagctggcccgcctacttcagcatcgtgaagatcgagagagtgggcaagcacggcaaggtgttcctgaccgtgcccagcctgagcagcaccgccgaggagaagttcatcaagaagggcgagttcagcggcgacgacagcctgctggacctggaccccgaggacaccgtgttctacgtgggcggcgtgcccagcaacttcaagctgcccaccagcctgaacctgcccggcttcgtgggctgcctggagctggccaccctgaacaacgacgtgatcagcctgtacaacttcaagcacatctacaacatggaccccagcaccagcgtgccctgcgccagagacaagctggccttcacccagagcagagccgccagctacttcttcgacggcagcggctacgccgtggtgagagacatcaccagaagaggcaagttcggccaggtgaccagattcgacatcgaggtgagaacccccgccgacaacggcctgatcctgctgatggtgaacggcagcatgttcttcagactggagatgagaaacggctacctgcacgtgttctacgacttcggcttcagcggcggccccgtgcacctggaggacaccctgaagaaggcccagatcaacgacgccaagtaccacgagatcagcatcatctaccacaacgacaagaagatgatcctggtggtggacagaagacacgtgaagagcatggacaacgagaagatgaagatccccttcaccgacatctacatcggcggcgccccccccgagatcctgcagagcagagccctgagagcccacctgcccctggacatcaacttcagaggctgcatgaagggcttccagttccagaagaaggacttcaacctgctggagcagaccgagaccctgggcgtgggctacggctgccccgaggacagcctgatcagcagaagagcctacttcaacggccagagcttcatcgccagcatccagaagatcagcttcttcgacggcttcgagggcggcttcaacttcagaaccctgcagcccaacggcctgctgttctactacgccagcggcagcgacgtgttcagcatcagcctggacaacggcaccgtgatcatggacgtgaagggcatcaaggtgcagagcgtggacaagcagtacaacgacggcctgagccacttcgtgatcagcagcgtgagccccaccagatacgagctgatcgtggacaagagcagagtgggcagcaagaaccccaccaagggcaagatcgagcagacccaggccagcgagaagaagttctacttcggcggcagccccatcagcgcccagtacgccaacttcaccggctgcatcagcaacgcctacttcaccagagtggacagagacgtggaggtggaggacttccagagatacaccgagaaggtgcacaccagcctgtacgagtgccccatcgagagcagccccctgttcctgctgcacaagaagggcaagaacctgagcaagcccaaggccagccagaacaagaagggcggcaagagcaaggacgcccccagctgggaccccgtggccctgaagctgcccgagagaaacacccccagaaacagccactgccacctgagcaacagccccagagccatcgagcacgcctaccagtacggcggcaccgccaacagcagacaggagttcgagcacctgaagggcgacttcggcgccaagagccagttcagcatcagactgagaaccagaagcagccacggcatgatcttctacgtgagcgaccaggaggagaacgacttcatgaccctgttcctggcccacggcagactggtgtacatgttcaacgtgggccacaagaagctgaagatcagaagccaggagaagtacaacgacggcctgtggcacgacgtgatcttcatcagagagagaagcagcggcagactggtgatcgacggcctgagagtgctggaggagagcctgccccccaccgaggccacctggaagatcaagggccccatctacctgggcggcgtggcccccggcaaggccgtgaagaacgtgcagatcaacagcatctacagcttcagcggctgcctgagcaacctgcagctgaacggcgccagcatcaccagcgccagccagaccttcagcgtgaccccctgcttcgagggccccatggagaccggcacctacttcagcaccgagggcggctacgtggtgctggacgagagcttcaacatcggcctgaagttcgagatcgccttcgaggtgagacccagaagcagcagcggcaccctggtgcacggccacagcgtgaacggcgagtacctgaacgtgcacatgaagaacggccaggtgatcgtgaaggtgaacaacggcatcagagacttcagcaccagcgtgacccccaagcagagcctgtgcgacggcagatggcacagaatcaccgtgatcagagacagcaacgtggtgcagctggacgtggacagcgaggtgaaccacgtggtgggccccctgaaccccaagcccatcgaccacagagagcccgtgttcgtgggcggcgtgcccgagagcctgctgacccccagactggcccccagcaagcccttcaccggctgcatcagacacttcgtgatcgacggccaccccgtgagcttcagcaaggccgccctggtgagcggcgccgtgagcatcaacagctgccccgccgcctag

SEQ ID NO: 41424 - DNA, 5472 bp, Artificial Sequence
  derived and/or modified sequence
atggccctatcttccgcctggcggtctgtgctacccctgtggctactctggtccgccgcatgtagcagagccgctagcggtgacgacaacgcttttccgtttgatattgagggcagttccgcagtggggcgccaagaccctccggagaccagcgagcctagggtcgccctagggcgccttcctcctgctgcagaaaaatgtaacgcaggtttttttcacacattgtccggtgagtgtgtgccttgtgattgcaacggtaactccaacgagtgcctcgatgggtctggctactgtgtgcattgtcaaaggaacaccaccggtgaacactgcgaaaaatgcttggacggctacatcggggactctattcggggggccccacagttttgtcagccctgcccctgtcctctccctcacctcgcgaattttgccgagagctgctaccgaaagaacggggcagtccgttgcatctgtaatgaaaactatgcaggtccaaactgcgaacgctgtgccccaggatactatggcaaccccctattaatcggatcaacttgcaaaaagtgcgactgttccggcaacagcgatcctaaccttatttttgaggactgtgacgaggtgaccggccagtgcaggaattgcctgcgcaacactactggtttcaagtgtgaacggtgtgcccctggctattatggcgacgcacggattgctaagaattgcgcagtgtgtaattgtggaggaggtccttgcgactctgtaaccggagaatgcctagaagagggctttgagccaccgaccgggatggactgtccaacaatatcttgcgacaaatgcgtctgggacttaactgatgatctccggttagctgccctgagcatagaggaagggaaaagtggagtcctgagtgttagctccggcgcggctgcgcacaggcatgtcaacgagattaatgccacaatttatctcctgaagactaagctgtcggaacgcgagaatcagtatgcgctgcgaaaaattcagatcaataatgctgagaatacgatgaagagcttgctgtccgacgtggaagaactggtcgagaaagaaaaccaggcctctcgcaagggtcagctcgtgcagaaggaatctatggatacaattaaccacgcctctcagctggtggaacaggcccacgacatgagagacaagattcaggagattaataataagatgctgtactatggggaggagcatgagctctccccaaaggagatctctgagaaactggtgcttgcccaaaaaatgctggaggagattcggtcacggcaaccatttttcacccagagagaactggttgacgaagaagccgatgaggcttacgagctcttgagccaggccgaatcatggcaacgtctgcataatgagacaagaactttgttcccagtggtgcttgaacagctggacgattataatgcaaagcttagcgacctgcaagaggcattggatcaggccttaaactacgttcgggacgcggaagacatgaaccgggcaaccgccgctaggcagcgcgaccatgaaaaacaacaggaacgtgtacgagaacagatggaggttgtaaacatgagcctctcgacatccgcggatagcctgactacccctaggttaacgctgagtgagctcgatgatataatcaagaatgcatcaggcatctatgcagaaatcgatggagccaagtctgaactgcaggtaaaattgagtaatctctccaatctcagccacgatctcgtgcaggaggcgatcgatcatgcccaggacttgcagcaagaggccaacgaattgtctcgcaaacttcactcgtcagatatgaacggtctggtccaaaaagcactggacgcctccaatgtttatgagaatattgtcaactatgttagcgaggccaatgagaccgccgaattcgccctgaatacaacggatcgcatttacgacgccgtcagcggtattgatactcagattatttaccataaggacgagagtgaaaaccttctcaatcaagcccgtgagctccaggccaaagccgagagcagcagcgacgaagctgttgctgatacttcaagacgcgtcgggggagccctagccagaaaatccgctcttaagactcgcctgagtgacgccgttaaacagctccaagcagccgagaggggcgacgctcaacaacgcctgggccaatcacgattgataacggaggaagccaacaggactacaatggaagtccagcaggctaccgcccccatggccaataatctgacaaattggtcccagaatctgcagcacttcgattcaagcgcgtacaatacagctgtcaatagtgccagagatgccgtccgcaatctgaccgaggtggtccctcaactcttagatcagctgaggacagtggagcaaaagaggcccgccagcaatgtttctgcctcaatccagagaataagggaactgatcgctcagacccgatcggtggcttccaagatacaggtatctatgatgttcgatggccaatctgccgttgaagtgcacagccggacgtctatggacgatctcaaggcatttaccagcctgtcactgtacatgaagccccccgtaaagaggccagagctcacagagactgcggatcagtttatcctgtatctcggttctaaaaacgctaagaaggagtatatgggtctcgctattaaaaacgataatcttgtgtacgtatacaacttaggcactaaggatgtggagattccgttggactctaagccggtgtccagctggcccgcatatttcagcatcgtgaagattgaacgggtaggtaagcacgggaaggtattcctgactgtgccttctctgagttccaccgcagaggagaaattcatcaaaaagggggagtttagtggcgacgattcactgctcgacctggaccctgaggatacagtgttctatgtcgggggggtgcctagcaattttaagcttcccaccagcctgaacttgcccggatttgtgggatgcctggaattggccactctgaataatgacgtgatcagcctctacaacttcaaacacatttacaatatggatccttccactagtgtcccctgtgcaagggataagctcgcttttacccagagccgggcggcatcttatttcttcgacggaagcggctacgctgtggtccgcgatataacacggcgcggcaaattcgggcaagtgacccgattcgacattgaggtccgcacacctgcagataatggtttaattctcttgatggtgaacggatctatgttctttcgcctcgaaatgagaaatggataccttcacgtattttacgacttcggattctccggtggacctgtccacttggaggacacactcaaaaaagcacaaattaatgatgcaaagtaccacgagatatcaataatctaccacaacgataagaagatgattcttgtggtcgataggcgtcacgtcaaaagtatggacaatgagaaaatgaaaattccgttcacggacatttacatcggtggcgcacccccggaaatcttacagtcacgcgccctgcgcgcccacctcccacttgatatcaatttccgtggatgtatgaaaggcttccaattccaaaagaaagatttcaacctgctggagcagacagagaccctgggcgtggggtatgggtgccctgaagattcgctgataagcagacgcgcatacttcaacggccagagctttattgcaagcatccagaagatctccttcttcgatggtttcgaggggggtttcaattttcgcactctccagccaaacggcttgctgttttactacgcgtccggtagcgatgtattttctattagtttggataacggcaccgtgatcatggatgtgaaggggatcaaggtgcagagcgtggacaagcaatacaacgacggattatcacactttgttatatcttcagtgtccccaactcgatatgaactcattgttgacaaatctagagttgggagcaaaaacccaacaaagggaaagatcgaacagacacaagctagcgaaaagaagttctatttcggcggaagccccattagcgctcaatatgcaaacttcacaggctgtattagtaacgcttacttcacaagggtcgatagagacgtggaagtggaggattttcagcggtatacagaaaaagtgcacacctcattatatgaatgcccaattgaaagttccccactcttccttctgcacaagaagggcaagaatctttcgaaacccaaggcctcccagaacaagaaaggtgggaagtcaaaggacgcaccttcctgggatcctgttgctcttaaacttccggaaaggaacactccgcgaaatagtcattgtcatctgtcgaatagccctagagccattgagcatgcatatcaatatgggggcaccgccaattcccggcaggaatttgagcacctgaagggtgattttggggccaagtctcaattctccattcgcctccgaacacgcagcagtcacggcatgattttttacgtatcggaccaggaggaaaatgacttcatgacactctttctcgcccatggaagactagtttacatgttcaatgtcggacacaagaagctgaagattcggtcccaggagaaatataacgacggcctgtggcacgacgtaatattcattcgggagagaagttctggtcgcctcgtgatcgacgggcttagggtcctggaagagagtctgccgccaactgaagccacttggaagattaaaggccctatctatctgggaggagtggcgcctggaaaggctgttaaaaacgtccagatcaactctatttattcgttttccggatgcttaagtaacttgcagctgaatggagcgagcatcaccagcgccagtcagaccttctccgttacaccatgtttcgagggtccaatggaaactggcacatacttttccaccgagggcggttacgtcgtgctggacgagagcttcaacattgggctgaagtttgagattgcctttgaggtgaggccacgaagcagcagcggtacgctggtgcatggacactcggtcaatggtgagtaccttaacgtccacatgaagaacgggcaggtcatcgttaaggtcaacaacgggattagggacttttccacgtccgtgacaccaaaacagtcgctgtgcgatggacggtggcacagaattaccgtgattcgggattcaaacgtcgtgcagctggacgtcgactcggaggtgaaccatgtagtagggccattgaatccgaagcctatagaccacagagaacctgttttcgtggggggagtgcccgaaagcctcctcacaccgcgcttagcacctagtaaacctttcactggatgcatcagacatttcgtgatcgatggacacccggtgtccttttcgaaagccgcgctagtttctggcgcggtgtcaattaactcgtgcccagcagcctag

SEQ ID NO: 41425 - DNA, 5472 bp, Artificial Sequence
  derived and/or modified sequence
atggccctgagcagcgcctggaggtctgtgctgcccctgtggctgctgtggagcgctgcctgcagccgggccgccagcggagatgacaatgccttcccctttgacatcgagggcagcagcgctgtgggccggcaggaccccccagagaccagcgagccccgggtggccctgggccgcctgcccccagctgctgagaagtgcaatgccggcttcttccacaccctgagcggggagtgtgtgccctgtgactgcaatggaaacagcaatgaatgtctggatggcagcggctactgtgtgcactgccagaggaacaccaccggggagcactgtgagaagtgcctggatggctacatcggggacagcatccggggggccccccagttctgccagccctgcccctgccccctgccccacctggccaactttgctgagagctgctacaggaagaatggagctgtgcgctgcatctgcaatgaaaattatgccggccccaactgtgagcgctgtgcccctggctactacggcaaccccctgctgattggcagcacctgcaagaagtgtgactgcagcggcaacagcgaccccaacctgatctttgaggactgtgatgaggtgacaggccagtgcaggaactgcctgaggaacaccaccggcttcaagtgtgagcgctgtgcccctggctactatggagatgcccgcatcgccaagaactgtgctgtgtgcaactgtggcggcggcccctgtgacagcgtgactggagagtgcctggaggagggctttgagccccccaccggcatggactgccccaccatcagctgtgacaagtgtgtgtgggacctgacagatgacctgcggctggccgccctgagcattgaggagggcaagagcggcgtgctgtctgtgtcctctggagctgctgcccaccgccacgtgaatgagatcaatgccaccatctacctgctgaagaccaagctgtctgaaagagagaaccagtatgccctgaggaagatccagatcaacaatgctgagaacaccatgaagagcctgctgagtgatgtggaggagctggtggagaaggagaaccaggccagcaggaagggccagctggtgcagaaggagagcatggacaccatcaaccacgccagccagctggtggagcaggcccatgacatgagggacaagatccaggagatcaacaacaagatgctgtactatggagaggagcacgagctgagccccaaggagatcagcgagaagctggtgctggcccagaagatgctggaggagatccgcagccggcagcccttcttcacccagcgggagctggtggatgaggaggctgatgaggcctatgagctgctgagccaggccgagagctggcagaggctgcacaatgagaccaggaccctcttccctgtggtgctggagcagctggatgactacaatgccaagctgagtgacctgcaggaggccctggaccaggccctgaactacgtgagagatgctgaggacatgaacagagccacagctgcccggcagagggaccacgagaagcagcaggagcgggtgcgggagcagatggaggtggtgaacatgagcctgagcaccagcgctgacagcctgaccaccccccggctgaccctgtctgagctggatgacatcatcaagaatgccagcggcatctatgcagaaattgatggagccaagtctgagctgcaggtgaagctgagcaacctgagcaacctgagccatgacctggtgcaggaggccatcgaccacgcccaggacctgcagcaggaggccaatgagctgagcaggaagctgcacagcagtgacatgaatggcctggtgcagaaggccctggatgccagcaatgtgtatgagaacatcgtgaactacgtgtctgaggccaatgaaacagctgagtttgccctgaacaccacagaccgcatctatgatgctgtgtctggcatcgacacccagatcatctaccacaaggatgaaagtgagaacctgctgaaccaggcccgggagctgcaggccaaggccgagagcagcagtgatgaggccgtggccgacaccagccggcgggtgggcggggccctggccaggaagagcgccctgaagacccggctgagtgatgctgtgaagcagctgcaggccgctgagagaggagatgcccagcagaggctgggccagagccgcctcatcacagaggaggccaacagaaccaccatggaggtgcagcaggccacagcccccatggccaacaacctgaccaactggagccagaacctgcagcactttgacagcagcgcctacaacacagctgtgaacagcgccagagatgctgtgaggaacctgacagaggtggtgccccagctgctggaccagctgaggacagtggagcagaagaggcctgccagcaatgtgtctgccagcatccagaggatccgggagctgattgcccagaccaggtctgtggccagcaagatccaggtgtccatgatgtttgatggccagagcgctgtggaggtgcacagcaggacctccatggatgacctgaaggccttcaccagcctgagcctgtacatgaagccccctgtgaagaggcctgagctgacagaaacagctgaccagttcatcctgtacctgggcagcaagaatgccaagaaggagtacatgggcctggccatcaagaatgacaacctggtgtatgtgtacaacctgggcaccaaggatgtggagatccccctggacagcaagcctgtgtcctcctggccagcctacttcagcatcgtgaagattgaaagagtgggcaagcacggcaaggtgttcctgactgtgcccagcctgagcagcacagctgaggagaagttcatcaagaagggggagttctctggagatgacagcctgctggacctggaccctgaggacaccgtcttctacgtgggcggcgtgcccagcaacttcaagctgcccaccagcctgaacctgcccggctttgtgggctgcctggagctggccaccctgaacaatgatgtgatcagcctgtacaacttcaagcacatctacaacatggaccccagcacctctgtgccctgtgcccgggacaagctggccttcacccagagcagagctgccagctacttctttgatggcagcggctatgctgtggtgcgggacatcacccggcggggcaagtttggccaggtgaccaggtttgatattgaggtgaggaccccagctgacaatggcctcatcctgctgatggtgaatggctccatgttcttccggctggagatgagaaatggctacctgcacgtgttctatgactttggcttcagcggcggccctgtgcacctggaggacaccctgaagaaggcccagatcaatgatgccaagtaccacgagatcagcatcatctaccacaatgacaagaagatgatcctggtggtggacagaagacatgtgaagtccatggacaatgagaagatgaagatccccttcacagacatctacatcggcggggcccctcctgagatcctgcagagccgggccctgcgggcccacctgcccctggacatcaacttccggggctgcatgaagggcttccagttccagaagaaggacttcaacctgctggagcagacagagaccctgggcgtgggctacggctgcccagaggacagcctcatcagcagaagagcctacttcaacggccagagcttcatcgccagcatccagaagatctccttctttgatggctttgaaggaggcttcaacttccgcaccctgcagcccaacggcctgctcttctactatgccagcggcagtgatgtgttcagcatcagcctggacaatggcaccgtcatcatggatgtgaagggcatcaaggtgcagagcgtggacaagcagtacaatgatggcctgagccacttcgtcatcagctctgtgagccccaccaggtatgagctgattgtggacaagagccgggtgggcagcaagaaccccaccaagggcaagattgagcagacccaggccagcgagaagaagttctactttggaggcagccccatcagcgcccagtatgccaacttcaccggctgcatcagcaatgcctacttcaccagggtggacagagatgtggaggtggaggacttccagcgctacacagagaaggtgcacaccagcctgtatgaatgtcccatcgagagcagccccctcttcctgctgcacaagaagggcaagaacctgagcaagcccaaggccagccagaacaagaagggcggcaagagcaaggatgcccccagctgggaccctgtggccctgaagctgcctgagaggaacaccccaagaaacagccactgccacctgagcaacagcccccgggccatcgagcacgcctaccagtatggaggaacagccaacagccggcaggagtttgagcacctgaagggggactttggagccaagagccagttcagcatccggctgcggaccaggagcagccacggcatgatcttctacgtgtctgaccaggaggagaatgacttcatgaccctcttcctggcccacggccgcctggtgtacatgttcaacgtgggccacaagaagctgaagatccgcagccaggagaagtacaatgatggcctgtggcatgatgtgatcttcatccgggagaggagcagcggccgcctggtgattgatggcctgcgggtgctggaggagagcctgcccccaacagaggccacctggaagatcaagggccccatctacctgggcggcgtggcccctgggaaggctgtgaagaatgtgcagatcaacagcatctacagcttcagcggctgcctgagcaacctgcagctgaatggagccagcatcaccagcgccagccagaccttctctgtgaccccctgctttgagggccccatggagaccggcacctacttcagcacagaaggaggctacgtggtgctggatgagagcttcaacatcggcctgaagtttgagatcgcctttgaggtgcggcccaggagcagcagcggcaccctggtgcacggccacagcgtgaatggagagtacctgaatgtgcacatgaagaatggccaggtgattgtgaaggtgaacaacggcatccgggacttcagcacctctgtgacccccaagcagagcctgtgtgatggccgctggcaccgcatcaccgtcatccgggacagcaatgtggtgcagctggatgtggacagcgaggtgaaccacgtggtgggccccctgaaccccaagcccatcgaccaccgggagcctgtgtttgtgggcggcgtgcctgagagcctgctgaccccccggctggcccccagcaagcccttcaccggctgcatccgccactttgtgattgatggccaccctgtgtccttcagcaaggccgccctggtgtctggagctgtgtccatcaacagctgcccagctgcctag

SEQ ID NO: 41426 - DNA, 6547 bp, Artificial Sequence
  derived and/or modified sequence
gaatattcttctggagcccttggaggggctccaaactgagaggggagggaagaccgcagggaaaggcggacctcagtgtctgaaaagccagcttagagtgggagggcctgggagtagaaggtaaaaagggagtggtgagaatgaatgtgagaaggaagccaggacagcgcagtccccagtcccgaacggccagggagaggaggtggcctagcgctggcggggctcaccccaatccgtctgccttttgatgccgtactctgctggttgcgcagccacctcgggatactgcacacggagaggagggaaaataagcgaggcaccgccgcaccacgcgggagacctacggagacccacagcgcccgagccctggaagagcactactggatgtcagcggagaaatggctttgagctcagcctggcgctcggttctgcctctgtggctcctctggagcgctgcctgctcccgcgccgcgtccggggacgacaacgcttttccttttgacattgaagggagctcagcggttggcaggcaagacccgcctgagacgagcgaaccccgcgtggctctgggacgcctgccgcctgcggccgagaaatgcaatgctggattctttcacaccctgtcgggagaatgtgtgccctgcgactgtaatggcaattccaacgagtgtttggacggctcaggatactgtgtgcactgccagcggaacacaacaggagagcactgtgaaaagtgtctggatggttatatcggagattccatcaggggagcaccccaattctgccagccgtgcccctgtcccctgccccacttggccaattttgcagaatcctgctataggaaaaatggagctgttcggtgcatttgtaacgaaaattatgctggacctaactgtgaaagatgtgctcccggttactatggaaaccccttactcattggaagcacctgtaagaaatgtgactgcagtggaaattcagatcccaacctgatctttgaagattgtgatgaagtcactggccagtgtaggaattgcttacgcaacaccaccggattcaagtgtgaacgttgcgctcctggctactatggggacgccaggatagccaagaactgtgcagtgtgcaactgcgggggaggcccatgtgacagtgtaaccggagaatgcttggaagaaggttttgaaccccctacaggcatggactgcccaaccataagctgtgataagtgcgtctgggacctgactgatgacctgcggttagcagcgctctccatcgaggaaggcaaatccggggtgctgagcgtatcctctggggccgccgctcataggcacgtgaatgaaatcaacgccaccatctacctcctcaaaacaaaattgtcagaaagagaaaaccaatacgccctaagaaagatacaaatcaacaatgctgagaacacgatgaaaagccttctgtctgacgtagaggaattagttgaaaaggaaaatcaagcctccagaaaaggacaacttgttcagaaggaaagcatggacaccattaaccacgcaagtcagctggtagagcaagcccatgatatgagggataaaatccaagagatcaacaacaagatgctctattatggggaagagcatgaacttagccccaaggaaatctctgagaagctggtgttggcccagaagatgcttgaagagattagaagccgtcaaccatttttcacccaacgggagctcgtggatgaggaggcagatgaggcttacgaactactgagccaggctgagagctggcagcggctgcacaatgagacccgcactctgtttcctgtcgtcctggagcagctggatgactacaatgctaagttgtcagatctccaggaagcacttgaccaggcccttaactatgtcagggatgccgaagacatgaacagggccacagcagccaggcagcgggaccatgagaaacaacaggaaagagtgagggaacaaatggaagtggtgaacatgtctctgagcacatctgcggactctctgacaacacctcgtctaactctttcagaacttgatgatataataaagaatgcgtcagggatttatgcagaaatagatggagccaaaagtgaactacaagtaaaactatctaacctaagtaacctcagccatgatttagtccaagaagctattgaccatgcacaggaccttcaacaagaagctaatgaattgagcaggaagttgcacagttcagatatgaacgggctggtacagaaggctttggatgcatcaaatgtctatgaaaatattgttaattatgttagtgaagccaatgaaacagcagaatttgctttgaacaccactgaccgaatttatgatgcggtgagtgggattgatactcaaatcatttaccataaagatgaaagtgagaacctcctcaatcaagccagagaactgcaagcaaaggcagagtctagcagtgatgaagcagtggctgacactagcaggcgtgtgggtggagccctagcaaggaaaagtgcccttaaaaccagactcagtgatgccgttaagcaactacaagcagcagagagaggggatgcccagcagcgcctggggcagtctagactgatcaccgaggaagccaacaggacgacgatggaggtgcagcaggccactgcccccatggccaacaatctaaccaactggtcacagaatcttcaacattttgactcttctgcttacaacactgcagtgaactctgctagggatgcagtaagaaatctgaccgaggttgtccctcagctcctggatcagcttcgtacggttgagcagaagcgacctgcaagcaacgtttctgccagcatccagaggatccgagagctcattgctcagaccagaagtgttgccagcaagatccaagtctccatgatgtttgatggccagtcagctgtggaagtgcactcgagaaccagtatggatgacttaaaggccttcacgtctctgagcctgtacatgaaaccccctgtgaagcggccggaactgaccgagactgcagatcagtttatcctgtacctcggaagcaaaaacgccaaaaaagagtatatgggtcttgcaatcaaaaatgataatctggtatacgtctataatttgggaactaaagatgtggagattcccctggactccaagcccgtcagttcctggcctgcttacttcagcattgtcaagattgaaagggtgggaaaacatggaaaggtgtttttaacagtcccgagtctaagtagcacagcagaggaaaagttcattaaaaagggggaattttcgggagatgactctctgctggacctggaccctgaggacacagtgttttatgttggtggagtgccttccaacttcaagctccctaccagcttaaacctgcctggctttgttggctgcctggaactggccactttgaataatgatgtgatcagcttgtacaactttaagcacatctataatatggacccctccacatcagtgccatgtgcccgagataagctggccttcactcagagtcgggctgccagttacttcttcgatggctccggttatgccgtggtgagagacatcacaaggagagggaaatttggtcaggtgactcgctttgacatagaagttcgaacaccagctgacaacggccttattctcctgatggtcaatggaagtatgtttttcagactggaaatgcgcaatggttacctacatgtgttctatgattttggattcagcggtggccctgtgcatcttgaagatacgttaaagaaagctcaaattaatgatgcaaaataccatgagatctcaatcatttaccacaatgataagaaaatgatcttggtagttgacagaaggcatgtcaagagcatggataatgaaaagatgaaaataccttttacagatatatacattggaggagctcctccagaaatcttacaatccagggccctcagagcacaccttcccctagatatcaacttcagaggatgcatgaagggcttccagttccaaaagaaggacttcaatttactggagcagacagaaaccctgggagttggttatggatgcccagaagactcacttatatctcgcagagcatatttcaatggacagagcttcattgcttcaattcagaaaatatctttctttgatggctttgaaggaggttttaatttccgaacattacaaccaaatgggttactattctattatgcttcagggtcagacgtgttctccatctcactggataatggtactgtcatcatggatgtaaagggaatcaaagttcagtcagtagataagcagtacaatgatgggctgtcccacttcgtcattagctctgtctcacccacaagatatgaactgatagtagataaaagcagagttgggagtaagaatcctaccaaagggaaaatagaacagacacaagcaagtgaaaagaagttttacttcggtggctcaccaatcagtgctcagtatgctaatttcactggctgcataagtaatgcctactttaccagggtggatagagatgtggaggttgaagatttccaacggtatactgaaaaggtccacacttctctttatgagtgtcccattgagtcttcaccattgtttctcctccataaaaaaggaaaaaatttatccaagcctaaagcaagtcagaataaaaagggagggaaaagtaaagatgcaccttcatgggatcctgttgctctgaaactcccagagcggaatactccaagaaactctcattgccacctttccaacagccctagagcaatagagcacgcctatcaatatggaggaacagccaacagccgccaagagtttgaacacttaaaaggagattttggtgccaaatctcagttttccattcgtctgagaactcgttcctcccatggcatgatcttctatgtctcagatcaagaagagaatgacttcatgactctatttttggcccatggccgcttggtttacatgtttaatgttggtcacaaaaaactgaagattagaagccaggagaaatacaatgatggcctgtggcatgatgtgatatttattcgagaaaggagcagtggccgactggtaattgatggtctccgagtcctagaagaaagtcttcctcctactgaagctacctggaaaatcaagggtcccatttatttgggaggtgtggctcctggaaaggctgtgaaaaatgttcagattaactccatctacagttttagtggctgtctcagcaatctccagctcaatggggcctccatcacctctgcttctcagacattcagtgtgaccccttgctttgaaggccccatggaaacaggaacttacttttcaacagaaggaggatacgtggttctagatgaatctttcaatattggattgaagtttgaaattgcatttgaagtccgtcccagaagcagttccggaaccctggtccacggccacagtgtcaatggggagtacctaaatgttcacatgaaaaatggacaggtcatagtgaaagtcaataatggcatcagagatttttccacctcagttacacccaagcagagtctctgtgatggcagatggcacagaattacagttattagagattctaatgtggttcagttggatgtggactctgaagtgaaccatgtggttggacccctgaatccaaaaccaattgatcacagggagcctgtgtttgttggaggtgttccagaatctctactgacaccacgcttggcccccagcaaacccttcacaggctgcatacgccactttgtgattgatggacacccagtgagcttcagtaaagcagccctggtcagcggcgccgtaagcatcaactcctgtccagcagcctgacatgacagagcacagctgcccaaatacaaagttctttagagcactgaaagaaacacaaagccagccaggaggaacagtaactcttccttcgggtggaagctttcatcgagttgaacaggacttaaacgaatcatcagggaccggatatttcttatttctcatttggattcttaaccttgaatccaaagtgtctgcaatggacaacaattgaaggagtggcaaacttacttgtattgagagcacacgcaattcctactggtgaaattactgtttctgtttctaataaaatagaagggattccaaataaacacttgcacacatttttgaagtgcggctagattctcagattcacctttcttccagggaagataactttcaatctatataaaaatctctgtcctaaaactacctttctttattttgaagagacttactaacttacatataatctaaattagatgatagatttgtttttagcccttttgtttggtctatcagtataagaagaatattttaggtttatagctgaagttatcaaggtttaataaagtaaatttctaacagaatactagaaaaatgcagtataatttaattttttctaaataagaaacacaggaaatcaactactttttccccttccttatctccttaaaagaaaaataaaattgtacatgaga

SEQ ID NO: 41427 - DNA, 5472 bp, Artificial Sequence
  derived and/or modified sequence
atggccctgagcagcgcctggcggagcgtgctgcccctgtggctgctctggagcgccgcctgttcgagggccgcctccggggatgataacgcctttccctttgacattgagggatcctcagctgtaggccgccaggacccacctgaaacgagcgagcctagagtagcactgggcaggttacctccagcggcagaaaaatgcaacgcgggattcttccacaccttaagtggcgagtgtgtgccctgtgattgtaacggcaacagtaatgagtgtctcgacggcagcggctactgcgtccactgtcagcggaatactacaggggaacattgcgagaaatgccttgatggctacataggcgactctatcaggggagccccgcagttctgccagccctgcccctgccccttgccacatctggccaacttcgccgagtcttgttatcgcaaaaacggtgccgtccgctgcatttgtaatgaaaactatgcaggaccaaattgcgaacggtgtgcccccggttactacggtaatcccctgctgatcggaagcacctgcaagaagtgtgactgttccgggaacagtgaccccaatctgatatttgaagattgcgacgaagttacgggccagtgtagaaactgcctgcgcaatactactggctttaaatgtgagcgatgcgctccagggtactacggtgatgcccgcattgcaaaaaattgcgcagtgtgcaattgtggaggtgggccttgcgacagcgttactggagagtgtctggaggaaggtttcgagccacccaccggaatggattgcccaactatctcctgcgacaagtgtgtgtgggacttgaccgacgacctccggctggccgcgttgagcatcgaagaaggtaaatctggagtgctctctgtctcatctggagcagctgcacaccgacacgtaaatgagattaatgcaaccatttacctgttaaaaaccaaactgtccgagcgggagaatcaatacgctcttcgaaagattcagatcaacaacgctgaaaacaccatgaagagcctgctgtccgacgtcgaggagctcgtggagaaagagaaccaggcctcccgtaaagggcagttagtgcagaaggaatccatggacaccatcaaccacgcaagccagctcgttgagcaggcccatgacatgcgggataaaatccaagaaattaataacaagatgctatactatggcgaggaacacgagcttagtccaaaagagatttccgaaaagctggtgctcgcccagaaaatgctcgaagaaatccgcagtcgtcagccgttttttacccagcgagaactcgtggatgaggaggctgatgaagcttacgagctgctgtcccaggcagagagctggcagcggctacataacgaaacacggacgctctttcctgtggtactggaacaactggacgattacaacgctaagctgtcagatctgcaggaagccctagatcaagcgctaaactatgtaagagatgctgaagacatgaaccgggctacagccgccagacagcgcgaccacgagaaacagcaggaaagggtgcgggagcagatggaggtcgttaatatgtctctgtccacttctgcagactcactgactacacccaggcttacactatccgagttggacgatattattaaaaacgcctccggaatctacgccgaaatcgacggagcaaaatccgagctgcaggtgaaacttagtaacctcagcaaccttagccacgacctcgtgcaagaagccattgatcacgcacaggatttgcagcaagaagccaatgagctttcaaggaaactccacagtagcgatatgaacggactagtgcagaaagccctggacgccagcaatgtctacgagaatatcgttaactacgtgtcagaagctaatgagaccgccgagtttgcactgaatactaccgatcgcatctatgacgctgtctctggtattgacacccaaattatatatcataaagacgagtcggaaaaccttctcaatcaagccagggaattacaggcgaaggctgaaagctcttccgacgaggccgtggcagacacctcccggcgcgtgggaggagccctcgcacgcaagtcagcattgaagacccgcctgtccgatgcagtcaaacaactgcaagcggccgaacggggtgacgcccagcagaggctcggacaatcacgactgatcacggaagaagcaaataggactacaatggaggtgcagcaggctacagcaccaatggcgaacaacctcacaaactggagccagaaccttcaacacttcgactccagcgcctacaatactgcagtgaatagtgcccgggacgcagtgcgcaatctcacagaagttgttccccaactgttagaccagctgcgtactgtggaacagaaaaggcctgcctcaaatgtgtccgcatccatacagaggatccgagagctcatcgcccagacccggtcagtcgccagcaaaattcaagtgtcgatgatgtttgacgggcagtccgcagtcgaggtccatagccgtacttcaatggatgatttgaaggcttttacatctctgagcttatacatgaagcctccggtcaaacgacccgaactgacagagacagcagatcaatttatactttacctgggaagtaaaaatgccaagaaagagtatatgggcttggcaataaagaatgacaacctggtgtacgtatataacctggggaccaaagatgtggagataccccttgacagcaaacctgtctcttcatggcctgcctatttcagcatagttaagatcgaacgtgtgggcaagcatggcaaggtattcctaaccgtaccaagcctaagctctacggcagaggaaaagtttataaagaaaggcgagttttccggggatgacagcctcttagacctagatcctgaagatacagttttctacgtcggaggggtgccatcgaatttcaagctcccaacctctctcaacctgcccggattcgttgggtgtctggaacttgcaactctgaacaatgatgttatctcactatataacttcaaacatatctataacatggatccatctacctcggtgccatgcgccagagacaaactggccttcacccagtctagggctgcctcctacttttttgacggttccggctacgccgtggtgcgggacataacgcggcgtggaaaattcggccaggttaccagatttgacattgaggtgaggacccctgccgacaatggacttatcctccttatggtcaatggctctatgttcttcaggctggaaatgaggaacggctatctgcatgtcttctatgacttcggtttttctggtggtccagtacacttggaagataccctgaagaaggcccagatcaatgatgctaagtaccacgaaatctccatcatttatcacaatgataaaaaaatgattctggtggtggaccgacgtcatgttaagtcgatggacaacgaaaagatgaagattccgttcaccgacatttacattggcggagcaccaccagagattctgcaatctcgagccctgcgggcgcacctccccttagatatcaattttcgaggatgcatgaaaggcttccagttccagaaaaaagatttcaatttgttagagcagacggagacactcggggttggctatgggtgtcctgaggattctcttatctctcgacgcgcttacttcaacgggcaatcattcatcgcctcgatccagaagattagcttttttgacggattcgaaggggggtttaatttccggacgttgcagccaaacggcctcctgttttactacgcctccgggtctgatgtattttccatttctctggacaatggcacagtgattatggatgttaaggggattaaggtccagtccgttgataagcaatacaatgacggtctctcacactttgtaatcagctcagtgtccccaactaggtatgaactcattgtggacaaatcccgagtaggctccaaaaacccgaccaagggcaagattgagcagacacaagcctcagagaaaaagttttacttcggaggaagccctattagcgctcagtacgcaaactttactggctgcatctctaacgcttactttacacgagtggatcgggatgtggaagtggaagatttccaaagatataccgaaaaggtccacacctccctttatgagtgcccaatcgagtcctcccctctatttctgctgcacaagaagggaaaaaatctgtctaaacccaaggccagtcagaacaaaaaaggaggtaaaagcaaagatgctcccagttgggatcccgtggcgctgaagctacccgagaggaatacgcctcggaattcccactgccacctatcaaacagccccagggccattgagcacgcctaccagtacggaggtaccgctaactcaaggcaggagtttgaacatcttaagggagattttggtgccaagtcgcagttctccatccgcctgagaacacgctcgtcacacggcatgattttttacgtgtccgaccaagaggagaacgattttatgacacttttcctggcccacggacggctagtatatatgttcaatgtgggccacaaaaaattgaaaatcaggagccaggagaagtacaacgatgggctctggcacgatgtgatttttatccgggagcggtcaagcggccgcttagttatagatggcctgcgcgtactggaggaatcattgccccccaccgaagcgacatggaaaatcaagggccccatctacctgggcggggtcgcacccggcaaagctgttaagaacgtgcaaatcaactccatttactcatttagcggttgcttatctaatttacagctgaatggggcttctattaccagtgcatcccaaaccttcagcgtgacaccgtgttttgagggacccatggagaccgggacctacttctccactgaaggcggctatgtcgtcttagacgagtccttcaatattggtttaaaatttgagatcgcatttgaagtgcgaccgaggtctagctcaggcaccctggtgcacggtcactcggtgaacggggagtatctcaatgtgcatatgaagaatggacaggttattgtgaaagtcaataacggcatccgggacttctctacctccgtgactccaaagcaatccttgtgcgatggtaggtggcaccgaataacagtgattcgcgatagtaacgtggtgcaattggacgtcgacagtgaggttaatcacgtggtgggcccattaaacccaaagcccatcgaccatcgggagccggtgtttgtcggcggggtaccagaaagcctcctaaccccgagattggccccctcaaaacctttcacaggatgtataagacattttgtaatcgatggccatccggtgtcctttagcaaagctgcattggtttcaggcgcagtgtcaattaactcttgtcctgctgcctag

SEQ ID NO: 41428 - DNA, 5471 bp, Artificial Sequence
  derived and/or modified sequence
atggcgctgtcatctgcttggaggtctgtgctgccactttggctgctctggtccgctgcttgttcccgcgctgcaagcggagatgataatgccttccccttcgacattgaggggagcagtgccgtggggcgacaagaccctcccgagacatcagagcccagagttgccctgggtagattgccccctgctgccgaaaagtgcaacgctggattttttcatactctcagcggagaatgcgtgccatgtgactgcaacgggaattccaatgaatgtttggacggcagcggatattgtgttcactgtcagaggaacacaactggtgagcattgtgaaaagtgcttggacggttacatcggcgattccatccggggagcccctcagttttgccaaccctgtccttgccctcttcctcatctggcgaactttgctgagtcctgctacagaaaaaatggcgctgtgaggtgcatctgcaatgagaactacgccggaccgaactgcgagcgatgcgcccctggctactatggcaatcccctgctgataggaagcacctgcaagaaatgtgattgctcgggaaacagtgaccccaatctgatcttcgaagactgtgatgaggttacagggcaatgccgaaactgcctgcgtaacaccactggcttcaagtgcgaaagatgcgctccaggctactacggcgatgcacgcatcgccaaaaactgcgctgtatgcaactgcggaggcggtccttgcgatagcgtaacaggagagtgcttggaagaagggtttgaacccccaactggtatggactgtccgacaatcagctgtgacaaatgcgtgtgggacctgactgacgatctgcgcctggccgcattgagtatagaagaagggaaaagcggagtactgtcagttagctcaggcgcagctgcccacaggcatgtgaacgagattaacgcaacaatatatctgcttaaaactaagctgagtgagcgggagaaccagtatgcactgaggaagatacaaataaataatgcggaaaataccatgaaaagtctcctttctgatgtcgaggaattagtggaaaaggaaaatcaggcgtcacggaaagggcagctggtgcagaaggagagcatggacacaatcaatcatgcttctcagctagtcgaacaggcgcatgacatgcgagataagatccaagaaattaacaacaaaatgctgtactacggggaggaacatgagctctctccaaaggagatttccgagaagctggtcttggcgcaaaagatgctcgaggagattaggtctcggcagccattctttacccagcgtgagctcgtggatgaagaggctgatgaagcctacgaactcttatcacaggcagaatcgtggcaaaggctgcacaacgaaacccgcacattattccctgtggtgctggagcagctggacgactataacgctaagctgagtgacttgcaggaagccctggaccaggctctcaattacgtccgtgacgctgaggatatgaatagggctactgccgcacgccagcgcgatcatgagaaacagcaagaaagagtgcgcgaacagatggaggtagtcaacatgtctctctccacctccgcagattccctgacgactccacggctcactttaagtgagctggacgatattataaaaaacgcctccgggatctacgccgaaatcgacggcgcaaagtccgaactgcaggtcaagctgagcaatctgtctaacctcagccacgacctcgtgcaggaggctattgatcacgcccaagacctgcaacaagaggcgaacgaacttagcagaaaactgcattcatcggacatgaacggcttagtacagaaggctctagatgcatccaatgtctacgaaaacatcgtgaattacgtatccgaagcgaatgaaaccgctgagttcgcgctgaataccacggatcgcatatatgatgctgtttcgggaattgatacacaaattatataccacaaggatgagagtgaaaacctgctgaatcaggcccgagagctgcaagctaaggcagaatcctccagcgacgaagccgttgccgacacttcccgacgcgtggggggagctttagcgagaaagagcgccttgaaaacaagactcagcgacgcagtgaaacaactgcaggcggctgaacgcggtgatgcccaacagagactcggccagtctagactgattactgaagaggccaatagaacaacaatggaggtccagcaggccacagcgcctatggctaataacttgactaactggtcacagaatctccagcacttcgattcgtccgcctataacaccgccgtaaattccgctagagacgccgttcgaaacctaactgaagttgtgccccagctcctcgatcagctgagaacagtcgaacagaaacgcccagcttccaatgtgtccgccagcattcagcgtatccgtgagctgatagcacaaacaagaagcgtggcttcaaagattcaagtgtcaatgatgttcgatggacaatcagccgtggaggtgcactctaggacctctatggatgaccttaaggccttcacttcactgtccctctatatgaaaccaccagtcaagaggcctgaactaaccgaaacagccgaccagttcattttgtacctgggcagtaagaacgccaaaaaggagtatatgggacttgccatcaaaaacgacaacctcgtttacgtctataacttggggaccaaggacgtggaaattcctcttgactccaaacctgtatcttcctggcccgcttacttttccatcgtaaagatcgagcgagtaggtaagcacggcaaagtctttctgactgtgccatctctgtcaagcaccgctgaggaaaagtttatcaagaagggtgagttttctggtgacgactcccttctcgacctggatcctgaagacactgtgttctatgtcggaggggtgccttcaaactttaaattgcccacatccttgaatctgccgggatttgtgggatgcttggagctggccacacttaacaatgatgtaatcagcttatacaatttcaagcacatctacaacatggacccgagcacatcagtgccctgtgccagagacaagctggcgtttacacaatctcgagccgcaagttactttttcgacggctctggatatgccgtggtgagggacatcacccgcaggggtaagttcggtcaggtcacacggttcgacatcgaggtcagaactccagccgacaacgggttaatcctgctcatggtcaacggctccatgttcttccggctcgaaatgcggaatgggtatttgcacgtcttttatgattttggcttcagtggcggacctgttcacctcgaagacacactgaaaaaagctcaaattaacgacgccaaataccatgaaatttccataatctatcataatgataaaaagatgattttggtggtggacagacggcatgtaaagagcatggacaacgaaaagatgaagattccatttacagatatctacataggtggcgcacccccagaaatcctgcagtctcgagccctgagggctcacctgcctctggacatcaacttccgtggctgtatgaaaggattccagtttcaaaaaaaggacttcaacttactggaacagacagagacactgggagtgggctatgggtgtcccgaggacagtctgatcagcaggcgcgcttacttcaacggccaaagctttatagcatctatccaaaaaatatcttttttcgacgggttcgaaggaggtttcaactttagaactctgcaacctaacgggttactgttctattatgctagcgggagcgatgtgttctcaattagtcttgacaacggaactgtcataatggacgttaaaggcattaaggttcagagcgtagacaaacaatataatgacgggctgtctcactttgtgattagctccgtctctccaactcgttatgaactgatcgttgacaagtcgcgggtgggatcaaagaatccaactaagggtaagattgaacagactcaagcctctgagaagaaattctactttgggggaagtccgatctccgctcagtatgcaaatttcactggctgcatctctaatgcctactttacgcgcgtggatcgagacgtggaagtagaggacttccagcggtacaccgaaaaagtccacacttccctgtacgagtgccccatcgaaagtagtcctctttttctgctccataaaaagggcaagaatctgtccaaaccgaaagcgagccaaaacaaaaaagggggaaaaagtaaggatgcaccatcttgggatccagtggccttgaagttaccagagaggaacaccccacgtaatagccattgccacttgtccaattcacctagagccatcgagcatgcctatcaatatgggggaactgctaatagccggcaggagttcgaacatctgaagggagacttcggggctaagtcgcaatttagtatccgcttaaggacacgctcttcacacggaatgattttctacgtttcggaccaggaagagaatgatttcatgactctcttcctggctcatggcaggttagtttacatgttcaacgtgggccacaagaaactgaaaatccgcagtcaagagaagtataacgacgggctctggcatgatgtgattttcatcagagaaaggagtagtggccgattggtgatcgacggtctccgcgttctggaggaaagtctaccccctactgaggccacatggaaaattaagggaccgatctaccttggaggcgttgctcctggcaaggctgtgaaaaatgtgcagatcaacagtatctactccttctctggttgcctcagcaatctgcagctgaatggagcctctataacctccgcctcacagacttttagcgtcaccccgtgtttcgaaggccctatggaaaccggtacctacttctctaccgaaggcggttacgtcgtgctggatgaaagttttaatattggactgaagtttgagattgcgtttgaagtgcgcccaagatctagcagcgggacacttgtgcatgggcactcagttaacggcgaatacctgaacgtccatatgaagaatggacaggtgatcgtcaaagtgaataatggtattagagacttctcgacaagtgtcactcctaaacaatccttatgtgacggtcggtggcatcgcattactgtgattcgagattcgaacgtggtacagctggacgtggattccgaagttaaccacgtggtgggcccactgaacccaaagcccatcgaccacagggaacccgtctttgttgggggagtgcccgagagcctgctgaccccacgattggctccctctaagccatttacgggatgcatccgacatttcgtgatcgatggacatcccgtgtcgttctccaaggccgctctggtgagtggggctgtgagcattaattcctgtcctgctgccta

SEQ ID NO: 41429 - DNA, 267 bp, Artificial Sequence
  derived and/or modified sequence
atggctctctcctctgcttggcgcagcgtcctccctctctggttactttggagtgccgcctgcagtcgggccgctagtggggacgataacgccttccctttcgatatcgaggggagcagcgctgtgggtaggcaggatccgccagagaccagcgaacctcgggtagccttaggacggcttcctccagccgcagaaaaatgcaatgccggctttttccataccctgtcaggagagtgcgtgccatgcgactgcaacggcaactcatag

SEQ ID NO: 41430 - DNA, 390 bp, Artificial Sequence
  derived and/or modified sequence
atggcgttgtcctcagcatggcgcagcgtgctgccactttggctgttgtggagcgccgcctgttcccgggccgcatctggcgatgataatgcctttccatttgatattgagggctcaagtgccgtgggtaggcaggaccccccagagacatccgagcccagggtggcccttgggaggctaccacccgctgctgaaaaatgcaacgcaggcttttttcacacactcagtggcgaatgcgtgccctgcgattgcaatggaaatagcaacgagtgtctggacggctcaggttattgcgtgaccacagacggcgaagaccccgggttcagcgcctccgcactgagttttatactgagctcacagggggcgcgcgaggcaagggccccaacatag

SEQ ID NO: 41431 - DNA, 324 bp, Artificial Sequence
  derived and/or modified sequence
atggccctttcctcggcgtggcgttctgttttaccactttggttgctatggtccgctgcgtgttcccgggccgcctctggcgacgacaatgcgttcccttttgacatagagggtagctctgcagtcgggcgccaggaccctcccgagaccagtgaacctcgggtggccctcggcaggctaccccccgcagccgaaaagtgcaatgcaggctttttccataccctgagcggggagtgtgtgccctgcgactgtaacggaaattccaatgaatgcctggacggtagcggctactgcgttcattgccagcgcaacaccacaggatag

SEQ ID NO: 41432 - DNA, 246 bp, Artificial Sequence
  derived and/or modified sequence
atggccctttcatcagcttggcgaagtgttctcccactgtggctgctttggtccgcagcctgcagcagagccgcctccggagacgataatgccttcccatttgacattgagggctctagtgctgtaggaagacaagatccccccgaaacttccgagcccagggtcgccctcggcaggctgcccccagccgcggaaaaatgcaacgctggcttctttcacaccttgtctggtgagtgcgtaccctag

SEQ ID NO: 41433 - DNA, 6547 bp, Artificial Sequence
  derived and/or modified sequence
gaatattcttctggagcccttggaggggctccaaactgagaggggagggaagaccgcagggaaaggcggacctcagtgtctgaaaagccagcttagagtgggagggcctgggagtagaaggtaaaaagggagtggtgagaatgaatgtgagaaggaagccaggacagcgcagtccccagtcccgaacggccagggagaggaggtggcctagcgctggcggggctcaccccaatccgtctgccttttgatgccgtactctgctggttgcgcagccacctcgggatactgcacacggagaggagggaaaataagcgaggcaccgccgcaccacgcgggagacctacggagacccacagcgcccgagccctggaagagcactactggatgtcagcggagaaatggctttgagctcagcctggcgctcggttctgcctctgtggctcctctggagcgctgcctgctcccgcgccgcgtccggggacgacaacgcttttccttttgacattgaagggagctcagcggttggcaggcaagacccgcctgagacgagcgaaccccgcgtggctctgggacgcctgccgcctgcggccgagaaatgcaatgctggattctttcacaccctgtcgggagaatgtgtgccctgcgactgtaatggcaattccaacgagtgtttggacggctcaggatactgtgtgcactgccagcggaacacaacaggagagcactgtgaaaagtgtctggatggttatatcggagattccatcaggggagcaccccaattctgccagccgtgcccctgtcccctgccccacttggccaattttgcagaatcctgctataggaaaaatggagctgttcggtgcatttgtaacgaaaattatgctggacctaactgtgaaagatgtgctcccggttactatggaaaccccttactcattggaagcacctgtaagaaatgtgactgcagtggaaattcagatcccaacctgatctttgaagattgtgatgaagtcactggccagtgtaggaattgcttacgcaacaccaccggattcaagtgtgaacgttgcgctcctggctactatggggacgccaggatagccaagaactgtgcagtgtgcaactgcgggggaggcccatgtgacagtgtaaccggagaatgcttggaagaaggttttgaaccccctacaggcatggactgcccaaccataagctgtgataagtgcgtctgggacctgactgatgcactgcggttagcagcgctctccatcgaggaaggcaaatccggggtgctgagcgtatcctctggggccgccgctcataggcacgtgaatgaaatcaacgccaccatctacctcctcaaaacaaaattgtcagaaagagaaaaccaatacgccctaagaaagatacaaatcaacaatgctgagaacacgatgaaaagccttctgtctgacgtagaggaattagttgaaaaggaaaatcaagcctccagaaaaggacaacttgttcagaaggaaagcatggacaccattaaccacgcaagtcagctggtagagcaagcccatgatatgagggataaaatccaagagatcaacaacaagatgctctattatggggaagagcatgaacttagccccaaggaaatctctgagaagctggtgttggcccagaagatgcttgaagagattagaagccgtcaaccatttttcacccaacgggagctcgtggatgaggaggcagatgaggcttacgaactactgagccaggctgagagctggcagcggctgcacaatgagacccgcactctgtttcctgtcgtcctggagcagctggatgactacaatgctaagttgtcagatctccaggaagcacttgaccaggcccttaactatgtcagggatgccgaagacatgaacagggccacagcagccaggcagcgggaccatgagaaacaacaggaaagagtgagggaacaaatggaagtggtgaacatgtctctgagcacatctgcggactctctgacaacacctcgtctaactctttcagaacttgatgatataataaagaatgcgtcagggatttatgcagaaatagatggagccaaaagtgaactacaagtaaaactatctaacctaagtaacctcagccatgatttagtccaagaagctattgaccatgcacaggaccttcaacaagaagctaatgaattgagcaggaagttgcacagttcagatatgaacgggctggtacagaaggctttggatgcatcaaatgtctatgaaaatattgttaattatgttagtgaagccaatgaaacagcagaatttgctttgaacaccactgaccgaatttatgatgcggtgagtgggattgatactcaaatcatttaccataaagatgaaagtgagaacctcctcaatcaagccagagaactgcaagcaaaggcagagtctagcagtgatgaagcagtggctgacactagcaggcgtgtgggtggagccctagcaaggaaaagtgcccttaaaaccagactcagtgatgccgttaagcaactacaagcagcagagagaggggatgcccagcagcgcctggggcagtctagactgatcaccgaggaagccaacaggacgacgatggaggtgcagcaggccactgcccccatggccaacaatctaaccaactggtcacagaatcttcaacattttgactcttctgcttacaacactgcagtgaactctgctagggatgcagtaagaaatctgaccgaggttgtccctcagctcctggatcagcttcgtacggttgagcagaagcgacctgcaagcaacgtttctgccagcatccagaggatccgagagctcattgctcagaccagaagtgttgccagcaagatccaagtctccatgatgtttgatggccagtcagctgtggaagtgcactcgagaaccagtatggatgacttaaaggccttcacgtctctgagcctgtacatgaaaccccctgtgaagcggccggaactgaccgagactgcagatcagtttatcctgtacctcggaagcaaaaacgccaaaaaagagtatatgggtcttgcaatcaaaaatgataatctggtatacgtctataatttgggaactaaagatgtggagattcccctggactccaagcccgtcagttcctggcctgcttacttcagcattgtcaagattgaaagggtgggaaaacatggaaaggtgtttttaacagtcccgagtctaagtagcacagcagaggaaaagttcattaaaaagggggaattttcgggagatgactctctgctggacctggaccctgaggacacagtgttttatgttggtggagtgccttccaacttcaagctccctaccagcttaaacctgcctggctttgttggctgcctggaactggccactttgaataatgatgtgatcagcttgtacaactttaagcacatctataatatggacccctccacatcagtgccatgtgcccgagataagctggccttcactcagagtcgggctgccagttacttcttcgatggctccggttatgccgtggtgagagacatcacaaggagagggaaatttggtcaggtgactcgctttgacatagaagttcgaacaccagctgacaacggccttattctcctgatggtcaatggaagtatgtttttcagactggaaatgcgcaatggttacctacatgtgttctatgattttggattcagcggtggccctgtgcatcttgaagatacgttaaagaaagctcaaattaatgatgcaaaataccatgagatctcaatcatttaccacaatgataagaaaatgatcttggtagttgacagaaggcatgtcaagagcatggataatgaaaagatgaaaataccttttacagatatatacattggaggagctcctccagaaatcttacaatccagggccctcagagcacaccttcccctagatatcaacttcagaggatgcatgaagggcttccagttccaaaagaaggacttcaatttactggagcagacagaaaccctgggagttggttatggatgcccagaagactcacttatatctcgcagagcatatttcaatggacagagcttcattgcttcaattcagaaaatatctttctttgatggctttgaaggaggttttaatttccgaacattacaaccaaatgggttactattctattatgcttcagggtcagacgtgttctccatctcactggataatggtactgtcatcatggatgtaaagggaatcaaagttcagtcagtagataagcagtacaatgatgggctgtcccacttcgtcattagctctgtctcacccacaagatatgaactgatagtagataaaagcagagttgggagtaagaatcctaccaaagggaaaatagaacagacacaagcaagtgaaaagaagttttacttcggtggctcaccaatcagtgctcagtatgctaatttcactggctgcataagtaatgcctactttaccagggtggatagagatgtggaggttgaagatttccaacggtatactgaaaaggtccacacttctctttatgagtgtcccattgagtcttcaccattgtttctcctccataaaaaaggaaaaaatttatccaagcctaaagcaagtcagaataaaaagggagggaaaagtaaagatgcaccttcatgggatcctgttgctctgaaactcccagagcggaatactccaagaaactctcattgccacctttccaacagccctagagcaatagagcacgcctatcaatatggaggaacagccaacagccgccaagagtttgaacacttaaaaggagattttggtgccaaatctcagttttccattcgtctgagaactcgttcctcccatggcatgatcttctatgtctcagatcaagaagagaatgacttcatgactctatttttggcccatggccgcttggtttacatgtttaatgttggtcacaaaaaactgaagattagaagccaggagaaatacaatgatggcctgtggcatgatgtgatatttattcgagaaaggagcagtggccgactggtaattgatggtctccgagtcctagaagaaagtcttcctcctactgaagctacctggaaaatcaagggtcccatttatttgggaggtgtggctcctggaaaggctgtgaaaaatgttcagattaactccatctacagttttagtggctgtctcagcaatctccagctcaatggggcctccatcacctctgcttctcagacattcagtgtgaccccttgctttgaaggccccatggaaacaggaacttacttttcaacagaaggaggatacgtggttctagatgaatctttcaatattggattgaagtttgaaattgcatttgaagtccgtcccagaagcagttccggaaccctggtccacggccacagtgtcaatggggagtacctaaatgttcacatgaaaaatggacaggtcatagtgaaagtcaataatggcatcagagatttttccacctcagttacacccaagcagagtctctgtgatggcagatggcacagaattacagttattagagattctaatgtggttcagttggatgtggactctgaagtgaaccatgtggttggacccctgaatccaaaaccaattgatcacagggagcctgtgtttgttggaggtgttccagaatctctactgacaccacgcttggcccccagcaaacccttcacaggctgcatacgccactttgtgattgatggacacccagtgagcttcagtaaagcagccctggtcagcggcgccgtaagcatcaactcctgtccagcagcctgacatgacagagcacagctgcccaaatacaaagttctttagagcactgaaagaaacacaaagccagccaggaggaacagtaactcttccttcgggtggaagctttcatcgagttgaacaggacttaaacgaatcatcagggaccggatatttcttatttctcatttggattcttaaccttgaatccaaagtgtctgcaatggacaacaattgaaggagtggcaaacttacttgtattgagagcacacgcaattcctactggtgaaattactgtttctgtttctaataaaatagaagggattccaaataaacacttgcacacatttttgaagtgcggctagattctcagattcacctttcttccagggaagataactttcaatctatataaaaatctctgtcctaaaactacctttctttattttgaagagacttactaacttacatataatctaaattagatgatagatttgtttttagcccttttgtttggtctatcagtataagaagaatattttaggtttatagctgaagttatcaaggtttaataaagtaaatttctaacagaatactagaaaaatgcagtataatttaattttttctaaataagaaacacaggaaatcaactactttttccccttccttatctccttaaaagaaaaataaaattgtacatgaga

SEQ ID NO: 41434 - DNA, 588 bp, Artificial Sequence
  derived and/or modified sequence
aaaagctgaatattcttctggagcccttggaggggctccaaactgagaggggagggaagaccgcagggaaaggcggacctcagtgtctgaaaagccagcttagagtgggagggcctgggagtagaagctgctggttgcgcagccacctcgggatactgcacacggagaggagggaaaataagcgaggcaccgccgcaccacgcgggagacctacggagacccacagcgcccgagccctggaagagcactactggatgtcagcggagaaatggctttgagctcagcctggcgctcggttctgcctctgtggctcctctggagcgctgcctgctcccgcgccgcgtccggggacgacaacgcttttccttttgacattgaagggagctcagcggttggcaggcaagacccgcctgagacgagcgaaccccgcgtggctctgggacgcctgccgcctgcggccgagaaatgcaatgctggattctttcacaccctgtcgggagaatgtgtgccctgcgactgtaatggcaattccaacgagtgtttggacggctcaggatactgtgtgcactgccagcggaacacaacagg

SEQ ID NO: 41435 - DNA, 267 bp, Artificial Sequence
  derived and/or modified sequence
atggccctgagcagcgcctggaggtctgtgctgcccctgtggctgctgtggagcgctgcctgcagccgggccgccagcggagatgacaatgccttcccctttgacatcgagggcagcagcgctgtgggccggcaggaccccccagagaccagcgagccccgggtggccctgggccgcctgcccccagctgctgagaagtgcaatgccggcttcttccacaccctgagcggggagtgtgtgccctgtgactgcaatggaaacagctag

SEQ ID NO: 41436 - DNA, 390 bp, Artificial Sequence
  derived and/or modified sequence
atggccctgagcagcgcctggaggtctgtgctgcccctgtggctgctgtggagcgctgcctgcagccgggccgccagcggagatgacaatgccttcccctttgacatcgagggcagcagcgctgtgggccggcaggaccccccagagaccagcgagccccgggtggccctgggccgcctgcccccagctgctgagaagtgcaatgccggcttcttccacaccctgagcggggagtgtgtgccctgtgactgcaatggaaacagcaatgaatgtctggatggcagcggctactgtgtgaccacagatggagaggaccccggcttcagcgccagcgccctgtccttcatcctgagcagccagggcgcccgggaggcccgggcccccacctag

SEQ ID NO: 41437 - DNA, 324 bp, Artificial Sequence
  derived and/or modified sequence
atggccctgagcagcgcctggaggtctgtgctgcccctgtggctgctgtggagcgctgcctgcagccgggccgccagcggagatgacaatgccttcccctttgacatcgagggcagcagcgctgtgggccggcaggaccccccagagaccagcgagccccgggtggccctgggccgcctgcccccagctgctgagaagtgcaatgccggcttcttccacaccctgagcggggagtgtgtgccctgtgactgcaatggaaacagcaatgaatgtctggatggcagcggctactgtgtgcactgccagaggaacaccaccggctag

SEQ ID NO: 41438 - DNA, 246 bp, Artificial Sequence
  derived and/or modified sequence
atggccctgagcagcgcctggaggtctgtgctgcccctgtggctgctgtggagcgctgcctgcagccgggccgccagcggagatgacaatgccttcccctttgacatcgagggcagcagcgctgtgggccggcaggaccccccagagaccagcgagccccgggtggccctgggccgcctgcccccagctgctgagaagtgcaatgccggcttcttccacaccctgagcggggagtgtgtgccctag

SEQ ID NO: 41439 - DNA, 267 bp, Artificial Sequence
  derived and/or modified sequence
atggccctgagcagcgcctggcggagcgtgctgcccctgtggctgctgtggtccgccgcctgctctcgcgccgcttccggcgacgacaacgcctttccattcgacatcgaaggatcctcagccgttggtagacaggacccaccggagacctcagagccgagagtcgccctgggcaggctgccgcctgcagcagagaagtgcaatgctggattttttcataccttgagtggcgagtgtgttccatgcgactgtaacggtaatagctag

SEQ ID NO: 41440 - DNA, 390 bp, Artificial Sequence
  derived and/or modified sequence
atggccctgagcagcgcctggcggagcgtgctgcccctgtggctgctatggagcgccgcttgcagtagggccgctagtggcgatgataatgctttcccctttgatatagagggatccagcgccgtgggtaggcaggaccctcctgaaacaagtgaaccacgggtggcactgggacgcctgcctccagctgcagagaagtgtaatgctgggttcttccacaccctgtcaggcgaatgtgtcccttgcgattgtaatggtaactctaatgaatgtttggacggcagcgggtactgtgtcacaaccgatggcgaggaccctggattttctgcaagtgcgttaagttttatcctgtcctcacaaggcgcacgggaagcccgcgctccgacctag

SEQ ID NO: 41441 - DNA, 324 bp, Artificial Sequence
  derived and/or modified sequence
atggccctgagcagcgcctggcggagcgtgctgcccctgtggctgctatggagcgctgcctgcagtcgtgctgcgagcggagatgacaatgcttttccatttgatatcgagggcagctccgcagttggcagacaggatccccccgagacatcggagcctagggtggcactggggcgactgcctccagccgcagagaagtgtaatgccggttttttccacacactgagtggcgagtgtgtcccatgcgattgtaacgggaactcaaacgagtgtttagatggttccgggtattgtgtgcattgccagaggaataccacagggtag

SEQ ID NO: 41442 - DNA, 246 bp, Artificial Sequence
  derived and/or modified sequence
atggccctgagcagcgcctggcggagcgtgctgcccctgtggctgctgtggtccgctgcttgcagtcgtgctgcttctggtgacgataatgcctttcccttcgacatcgagggctcgtccgccgtggggcgacaggatccccctgaaaccagtgagccgcgcgtggccctagggcgcctgcccccagccgccgagaaatgcaatgctggcttcttccacacgttgtctggagagtgcgtcccgtag

SEQ ID NO: 41443 - DNA, 267 bp, Artificial Sequence
  derived and/or modified sequence
atggcactatcttcagcctggaggagtgtgctaccattgtggctcttatggtccgcagcttgtagcagagccgcaagtggcgacgacaacgcttttccttttgacattgagggatctagcgcggtgggtaggcaagacccccctgagactagcgagccacgcgtcgcactcgggaggctgccgccagctgctgaaaagtgcaatgccggtttcttccatactctgtctggagaatgcgtgccctgcgattgtaatgggaactcctag

SEQ ID NO: 41444 - DNA, 390 bp, Artificial Sequence
  derived and/or modified sequence
atggctttaagcagcgcatggcgtagcgtgcttcccttgtggctgctgtggagtgcggcatgctctcgtgccgcatcaggggacgacaacgcctttcctttcgacattgaggggtccagcgcagtgggacggcaggaccccccagaaacatcagagccccgtgtagctcttgggagactcccacccgctgccgaaaagtgtaacgctggattctttcacaccctgagtggagaatgcgtgccttgcgattgcaatgggaactcaaacgaatgtctggatggctctggctactgtgtgactacagacggggaggaccctggtttttcagcttctgcactgagcttcattttatcttcacaaggcgcaagagaagcccgagcgccaacatag

SEQ ID NO: 41445 - DNA, 324 bp, Artificial Sequence
  derived and/or modified sequence
atggcccttagtagcgcctggagaagtgtgctgcctctctggctcctgtggagcgccgcatgtagtcgcgctgcatcaggagatgacaacgcttttccgtttgatatcgagggctccagtgctgtggggagacaagaccctccagaaacctcagagcctcgtgtggctttgggtcggctaccacccgctgcagagaagtgcaatgcagggttcttccacaccctcagcggggagtgcgtcccgtgtgactgcaatgggaacagtaacgagtgtctcgatggctctgggtactgcgtccactgtcagcgcaacacaaccggctag

SEQ ID NO: 41446 - DNA, 246 bp, Artificial Sequence
  derived and/or modified sequence
atggccctatcctctgcgtggcggtctgtgctgccactttggctgctgtggagtgcagcatgctcaagggctgcgtcaggggatgataatgccttcccctttgacatcgaaggctcttccgccgtggggcgtcaagacccacctgaaactagtgagccacgcgtcgccctgggtcgcttgccccctgccgcagagaagtgcaatgctgggttctttcatacactcagcggtgagtgcgtcccatag

SEQ ID NO: 41447 - DNA, 267 bp, Artificial Sequence
  derived and/or modified sequence
atggcgctcagttctgcttggcgcagtgtattacccctgtggcttttgtggagcgcagcatgtagtagagcggcgagtggtgacgacaatgcatttcccttcgatatagaggggtcttccgcagtcggccggcaggatccacccgaaacatcagagccgagggtcgcgttgggccggctacccccggcagcagagaaatgtaatgctggcttctttcacactctatccggcgagtgcgtgccttgtgactgtaacggaaactcctag

SEQ ID NO: 41448 - DNA, 390 bp, Artificial Sequence
  derived and/or modified sequence
atggccttaagtagtgcctggcggtcggtcttaccactctggcttttgtggagtgctgcgtgttcacgggctgcctccggcgacgataacgcttttccctttgatatcgaaggctcatctgcagtcgggcgacaggatcccccagaaacaagtgaacctagagtggccttggggcggctaccccccgcagcagaaaaatgtaacgccggattcttccatacactctcaggggaatgcgtcccgtgtgactgcaatggcaatagtaatgaatgccttgacggtagtggctattgtgtaactaccgacggcgaggaccctgggtttagcgccagtgcactctcatttatcctctcttcacaaggcgcacgggaagctcgcgctccaacatag

SEQ ID NO: 41449 - DNA, 324 bp, Artificial Sequence
  derived and/or modified sequence
atggctttgtcttccgcatggagaagtgtgttgcctctgtggttactgtggagtgctgcctgttcccgcgccgcatccggagacgataacgccttcccatttgatatcgaagggtcctctgctgtaggccgacaggatccacctgaaacaagcgagccacgagttgctctgggccgcctgcctccagccgccgagaagtgcaatgcaggtttcttccatactctgtcgggcgagtgtgttccctgcgattgcaatggcaatagcaacgagtgtcttgacggttcgggatactgcgtccactgccagagaaacactactgggtag

SEQ ID NO: 41450 - DNA, 246 bp, Artificial Sequence
  derived and/or modified sequence
atggctctttcctccgcttggcgttctgttctgcccctctggttgctgtggtcagcagcatgctcaagggctgcgtcgggagatgacaacgcttttccgttcgatattgaagggtcttcagcagtaggacggcaggatcctccagaaacctcagagccccgcgtagcattaggacgcttaccccctgcagcggaaaaatgcaacgccgggttcttccacacattgtccggtgagtgcgtaccctag

SEQ ID NO: 41451 - DNA, 390 bp, Artificial Sequence
  derived and/or modified sequence
atggccttaagtagtgcctggcggtcggtcttaccactctggcttttgtggagtgctgcgtgttcacgggctgcctccggcgacgataacgcttttccctttgatatcgaaggctcatctgcagtcgggcgacaggatcccccagaaacaagtgaacctagagtggccttggggcggctaccccccgcagcagaaaaatgtaacgccggattcttccatacactctcaggggaatgcgtcccgtgtgactgcaatggcaatagtaatgaatgccttgacggtagtggctattgtgtaactaccgatggcgaagaccccgggttctcagcctcagcgttgtcattcattctttcctctcaaggcgctcgcgaagccagggctccaacctag

SEQ ID NO: 41452 - DNA, 324 bp, Artificial Sequence
  derived and/or modified sequence
atggccctgtccagcgcatggcggtctgtgttgccgctctggcttctctggagcgccgcgtgttctcgcgccgctagcggtgatgacaatgcctttcccttcgatatcgagggaagctcagcagtggggcgccaagacccccccgagacttcagaaccccgtgtcgccctcggacgattgcctccagcagctgagaagtgcaatgccggctttttccataccctgtccggtgagtgtgttccttgtgattgtaacggaaacagcaatgaatgcctcgacggctctggctactgtgtgcactgtcagcgaaatacaaccggatag

SEQ ID NO: 41453 - DNA, 267 bp, Artificial Sequence
  derived and/or modified sequence
atggccctgagcagcgcctggagaagcgtgctgcccctgtggctgctgtggagcgccgcctgcagcagagccgccagcggcgacgacaacgccttccccttcgacatcgagggcagcagcgccgtgggcagacaggacccccccgagaccagcgagcccagagtggccctgggcagactgccccccgccgccgagaagtgcaacgccggcttcttccacaccctgagcggcgagtgcgtgccctgcgactgcaacggcaacagctag

SEQ ID NO: 41454 - DNA, 390 bp, Artificial Sequence
  derived and/or modified sequence
atggccctgagcagcgcctggagaagcgtgctgcccctgtggctgctgtggagcgccgcctgcagcagagccgccagcggcgacgacaacgccttccccttcgacatcgagggcagcagcgccgtgggcagacaggacccccccgagaccagcgagcccagagtggccctgggcagactgccccccgccgccgagaagtgcaacgccggcttcttccacaccctgagcggcgagtgcgtgccctgcgactgcaacggcaacagcaacgagtgcctggacggcagcggctactgcgtgaccaccgacggcgaggaccccggcttcagcgccagcgccctgagcttcatcctgagcagccagggcgccagagaggccagagcccccacctag

SEQ ID NO: 41455 - DNA, 324 bp, Artificial Sequence
  derived and/or modified sequence
atggccctgagcagcgcctggagaagcgtgctgcccctgtggctgctgtggagcgccgcctgcagcagagccgccagcggcgacgacaacgccttccccttcgacatcgagggcagcagcgccgtgggcagacaggacccccccgagaccagcgagcccagagtggccctgggcagactgccccccgccgccgagaagtgcaacgccggcttcttccacaccctgagcggcgagtgcgtgccctgcgactgcaacggcaacagcaacgagtgcctggacggcagcggctactgcgtgcactgccagagaaacaccaccggctag
